United States Patent Application Publication US 2021/0199660 A1 - sequence listing, part 38

SEQ ID NO: 539669 - DNA, 120 bp, Artificial Sequence
  ENSG00000167117_23 (sequence is synthesized)
catctgctttccatttggacttttagttcatactgtatcttctcaggacagttaagttggaatacaatgccactgtcctgaaagatggtagaattatcctatttctggaggagtgggggt

SEQ ID NO: 539670 - DNA, 120 bp, Artificial Sequence
  ENSG00000167117_24 (sequence is synthesized)
ggtgggtaggaatctcaagagcgatttgctcctctgcacaatagcttctttaaggacaccagggcccccagggctatacatttccctgaagctttccagataagcaacaaggtatgagca

SEQ ID NO: 539671 - DNA, 120 bp, Artificial Sequence
  ENSG00000167117_25 (sequence is synthesized)
cctgctatgtattgcccaagggtgatgtgtttaaatatccattgcatattttaaatccttggctggcttaaagctgcaagctttctgtcttcagtggatataatgggggcatacatccca

SEQ ID NO: 539672 - DNA, 120 bp, Artificial Sequence
  ENSG00000167117_26 (sequence is synthesized)
gagcttgcccaacactccaagaaaagaaccctcagctaatgcaaagtgtgtatgtgcccatgaaagctccatgtctacttaacattcagtttttaggattatttatgctgtaataataga

SEQ ID NO: 539673 - DNA, 120 bp, Artificial Sequence
  ENSG00000167117_27 (sequence is synthesized)
tatgaaaatctctgacaggtattttgtttcctttacaaactgtatttgaatttatgggtgatttagagcttgtgtttaaagtcagaattcagaaccccaaagaaaatgacttcattgaaa

SEQ ID NO: 539674 - DNA, 77 bp, Artificial Sequence
  ENSG00000167117_28 (sequence is synthesized)
aacatatagtgaaacccagcacacctgtagtagtcccagctacatgggaagctgaggcaggagaatcacctgaaccc

SEQ ID NO: 539675 - DNA, 120 bp, Artificial Sequence
  ENSG00000167118_0 (sequence is synthesized)
ccggaaatttgcgggcgcgccggaagttgaggggagtttcctgcgagctcggcttcctcaacatggctgcgcccttgtcagtggaggtggagttcggaggtggtgcggagctcctgtttg

SEQ ID NO: 539676 - DNA, 120 bp, Artificial Sequence
  ENSG00000167118_1 (sequence is synthesized)
acggtattaagaaacatcgagtcactttgcctggacaggaggaaccctgggacatccggaacctgctcatctggatcaagaagaatttgctaaaagagcggccagagttgttcatccagg

SEQ ID NO: 539677 - DNA, 120 bp, Artificial Sequence
  ENSG00000167118_2 (sequence is synthesized)
gagacagcgtgcggccaggaattctggtgctgattaacgatgccgactgggagctactgggtgagctggactaccagcttcaggaccaggacagcgtcctcttcatctccactctgcacg

SEQ ID NO: 539678 - DNA, 120 bp, Artificial Sequence
  ENSG00000167118_3 (sequence is synthesized)
gcggctgagggcccttctctgggcctgggcacccttagaggggagaacgaagcaatcagacatccccttgggccctgcttccaggtctccctgtcccccttgcctgccttcttccctgct

SEQ ID NO: 539679 - DNA, 120 bp, Artificial Sequence
  ENSG00000167118_4 (sequence is synthesized)
ctgtcccctaagctccctccaggcagggaaaagaggccaggtgctaaaaatgagcctttctcaagcacgtgagcagcggaaggcagacaggcgccagagcccagcactcccttttccagc

SEQ ID NO: 539680 - DNA, 120 bp, Artificial Sequence
  ENSG00000167118_5 (sequence is synthesized)
agctgtggtgggggagggttcccctccagtttgtcaagagttgaaggaggctctgtggccaggtgacctggctgccttccactccttgtacctcagtctaaacatggagtggccgctgac

SEQ ID NO: 539681 - DNA, 120 bp, Artificial Sequence
  ENSG00000167118_6 (sequence is synthesized)
aaggcgctccagccccagagccagcgtcttcatggggaagatgaatggacctgagtagctgaaggaaggcccctccctacccaaagactggaggcttctcagcctcaatttccctgtctg

SEQ ID NO: 539682 - DNA, 120 bp, Artificial Sequence
  ENSG00000167118_7 (sequence is synthesized)
tacagctgagggctctgcctgtcccccactgctatcagtatggaaccccagctggggtcccctattgagtgccgactccccccaccgccagcagctgctcctccagccacacccctcctg

SEQ ID NO: 539683 - DNA, 120 bp, Artificial Sequence
  ENSG00000167118_8 (sequence is synthesized)
ctccccccacccctagcccttgaccctggctggcctgccccgctccacaggccaccagatgggctcctgagaccctccccaggctgcttacagctcattctgctgggggtagagatgagg

SEQ ID NO: 539684 - DNA, 120 bp, Artificial Sequence
  ENSG00000167118_9 (sequence is synthesized)
ggagggagtaagttaaaccttggactagcaagtagaagcctggggggatgcgtgtgcctcagtttcctcctccacaactgaatatagtggctgaaaactggggagatacttgatggcgcg

SEQ ID NO: 539685 - DNA, 120 bp, Artificial Sequence
  ENSG00000167118_10 (sequence is synthesized)
aatgtccgttttctctcccttcccacctcctgcaggaagcaggacggggcaggcagcacctggtaggcacagtgctttgcccctcctccccttcccttctggaagtcttggggcctcagt

SEQ ID NO: 539686 - DNA, 120 bp, Artificial Sequence
  ENSG00000167118_11 (sequence is synthesized)
gccggccttgggcaaataaaagactaggttgtttactagccttgcttggagcttcatccttggaaacgggtggcacctcatatccccccagccgtggtctgtgatacaacctctccatcc

SEQ ID NO: 539687 - DNA, 120 bp, Artificial Sequence
  ENSG00000167118_12 (sequence is synthesized)
tcagcctagggcctcagagctacccttcacccaaaagaggggtgggggtgaacactcagacaatctgagagggggtagtctaatagagccatctggagaagggagtggcagagccagtct

SEQ ID NO: 539688 - DNA, 120 bp, Artificial Sequence
  ENSG00000167118_13 (sequence is synthesized)
gtgctgaccagtctgtgtcccgggacgcatccccacccgtctgtccaaggctttgtcccaccagctgcagccagcagcctcagaacccaaaatgagggtagcatagataagactgctgag

SEQ ID NO: 539689 - DNA, 120 bp, Artificial Sequence
  ENSG00000167118_14 (sequence is synthesized)
ccccctttctgtggtctttcctttccatgacctagagaaaagagctttgctggagggagacccccaaaaagaattagggtgctaacatcccaccaaaagcatcatcccacccaaaatgtt

SEQ ID NO: 539690 - DNA, 120 bp, Artificial Sequence
  ENSG00000167118_15 (sequence is synthesized)
gcttttcattctatgtcaataatttaaggtggaatttctctcaccctgtggagatgaaagtggcaaaaggttgtcccagcagtgttgggggatggggtgtgcacatcattcttttggggg

SEQ ID NO: 539691 - DNA, 120 bp, Artificial Sequence
  ENSG00000167118_16 (sequence is synthesized)
tagatgacctgctggctggtgggcttttctccaggactactgcaggtagagaccctctgggcttgtgtggagtgggagcagccgtgttgggactatggggaggagctggtctgggtgcaa

SEQ ID NO: 539692 - DNA, 120 bp, Artificial Sequence
  ENSG00000167118_17 (sequence is synthesized)
attaaggccagtgttggggtctgagtgctgtccagaaaggctgtgtgaccaaccctcactagttcctgaggtcagggtctccatgttagggaacagagcaagagacttggaacagctccc

SEQ ID NO: 539693 - DNA, 120 bp, Artificial Sequence
  ENSG00000167118_18 (sequence is synthesized)
tacagctgcacttctagaaggtcagcctgtccgattcttgtaacctggaggtccctccccatctgcagccccctgagctgcaggagcggccccatcagtgcacctgattggaacacacta

SEQ ID NO: 539694 - DNA, 120 bp, Artificial Sequence
  ENSG00000167118_19 (sequence is synthesized)
gatttcaggtcctggaaactgggcgctaggatccgtttccctggctgcagagagtgggaggtgtgatgtggaatatcccttctcccagcacaccccaattaatactgaagagtagggcag

SEQ ID NO: 539695 - DNA, 120 bp, Artificial Sequence
  ENSG00000167118_20 (sequence is synthesized)
gaggaggtgctgggaaaaccgggtttcttggcacatgggggtgcaagcactgtggttgaaattggccatgtccaaggcacaccagacgatttcaggtcatttttagccctagactggaaa

SEQ ID NO: 539696 - DNA, 120 bp, Artificial Sequence
  ENSG00000167118_21 (sequence is synthesized)
ggggtcaggggacaggtgacctgggctcagcccccagcagctcccaactgcccctctcccaagcaactcctgatccctgcttttgaggaaataaacaaataaaaccccgctatctccgaa

SEQ ID NO: 539697 - DNA, 120 bp, Artificial Sequence
  ENSG00000167118_22 (sequence is synthesized)
tgagtcccactcctcccttccctgaagcaggtggagggagggacggatatttgagcccccaccctcgggttcagtcctggccttctctgaatccggttctccccttcctcctccctaact

SEQ ID NO: 539698 - DNA, 120 bp, Artificial Sequence
  ENSG00000167118_23 (sequence is synthesized)
gttactaaaccgaactcttgaggattttttaaatcccagatgaaaggagcctggtgaatttctcagaaaacttggattctgccctctggttgccacagacttgctgtgggaccttaggcg

SEQ ID NO: 539699 - DNA, 120 bp, Artificial Sequence
  ENSG00000167118_24 (sequence is synthesized)
acttacttcgcttctctgggcctcagttactctctacacagaaagtgctgaggaaaaaacgtagctagtacaactgaagagctaaatattctgttttatttcattgtaatttaaatagcc

SEQ ID NO: 539700 - DNA, 120 bp, Artificial Sequence
  ENSG00000167118_25 (sequence is synthesized)
acatgcagctagtagattaccatacagtgcagcacgggtctagaattccaaggagtcattgactctgtgcgtgcacacacccatgcacatgcacacacactcactggggacaccccatag

SEQ ID NO: 539701 - DNA, 120 bp, Artificial Sequence
  ENSG00000167118_26 (sequence is synthesized)
gtgcggccaggaattctggtgctgattaacgatgccgactgggagctactggtcagtaccttgggggacatccctcccccagcccctgcccttgctgcttcagtgggaaagcgttgggcc

SEQ ID NO: 539702 - DNA, 120 bp, Artificial Sequence
  ENSG00000167118_27 (sequence is synthesized)
tctcctcaggcacatatagagtggctgggtaatcctccgccccactccagccccacactgaggctgctggagtctcccactccaggtgaggaagggatgggtagctggggacatgggagt

SEQ ID NO: 539703 - DNA, 120 bp, Artificial Sequence
  ENSG00000167118_28 (sequence is synthesized)
ctgaagatttgcaggttgaggtataggatacccatttttctggtagagtctgtctcttccagagcagccagtcctcagcccctgttctcccaactcctggggtggacctgggaaggtggc

SEQ ID NO: 539704 - DNA, 120 bp, Artificial Sequence
  ENSG00000167118_29 (sequence is synthesized)
gcctcgaagcataggtcactgtcaggtcctaagggatcaggcctaggggatcagccctccttcaggtcatggtccagtggtcctggaggccacctctaaggccagcagtgctccttgggc

SEQ ID NO: 539705 - DNA, 120 bp, Artificial Sequence
  ENSG00000167118_30 (sequence is synthesized)
cattaccagtgggagccaggctaagctgcctgaccaaatgttgacctaccctgccttatgccaggcaggactgcacgtgagcattgccatgtggcatggcaactgattcggaagaggcaa

SEQ ID NO: 539706 - DNA, 120 bp, Artificial Sequence
  ENSG00000167118_31 (sequence is synthesized)
aacagccttctctccaggatgggcatgcagaggcctaaaaaaaagccgaagttcttttccagggctaacgagaataagattagacccctggaaaagtcctactaatggttaccatgacag

SEQ ID NO: 539707 - DNA, 120 bp, Artificial Sequence
  ENSG00000167118_32 (sequence is synthesized)
tgtggcaagcactccacacatatcagctcatttcgttttcgtataggccttgtgggttagacagtatcacttatcccattttcagatgaggaacctgatactcagaaacaaaatgacctg

SEQ ID NO: 539708 - DNA, 120 bp, Artificial Sequence
  ENSG00000167118_33 (sequence is synthesized)
cccatggtctgggtggtggtgctggctggcatttgcacccattttccatctggctacaaagaccatgcatgactgacctggtttccttcacactcagaccagcctccccttcctgggata

SEQ ID NO: 539709 - DNA, 120 bp, Artificial Sequence
  ENSG00000167123_0 (sequence is synthesized)
ctgcccgcgccgcgccgctgctccagctgctgctcctgctggggccgtggctggaggctgcgggcgttgcggagtcgccgctgcccgccgtggtccttgccatcctggcccgcaatgccg

SEQ ID NO: 539710 - DNA, 120 bp, Artificial Sequence
  ENSG00000167123_1 (sequence is synthesized)
gtccttgccatcctggcccgcaatgccgaacactcgctgccccactacctgggcgctctggagcggctggactacccccgggccaggatggccctctggtgtgccacggaccacaatgtg

SEQ ID NO: 539711 - DNA, 120 bp, Artificial Sequence
  ENSG00000167123_2 (sequence is synthesized)
gacaacaccacagagatgctgcaggagtggctggcggctgtgggcgatgactatgctgctgtggtctggaggcctgagggcgagcccaggttctacccagatgaagagggtcccaagcac

SEQ ID NO: 539712 - DNA, 120 bp, Artificial Sequence
  ENSG00000167123_3 (sequence is synthesized)
tggaccaaagaaaggcaccagtttctgatggagctgaagcaggaagccctcacctttgccaggaactggggggccgactatatcctgtttgcagacacagacaacattctgaccaacaat

SEQ ID NO: 539713 - DNA, 120 bp, Artificial Sequence
  ENSG00000167123_4 (sequence is synthesized)
cagactctgcggcttctcatggggcaggggcttccagtggtggccccaatgctggactcccagacctactactccaacttctggtgtgggatcaccccccagggctactaccgccgcaca

SEQ ID NO: 539714 - DNA, 120 bp, Artificial Sequence
  ENSG00000167123_5 (sequence is synthesized)
gccgagtacttccccaccaagaaccgccagcgccggggctgcttccgtgtccccatggtccactccaccttccttgcatccctgcgggctgaaggggcagaccagcttgctttctacccg

SEQ ID NO: 539715 - DNA, 120 bp, Artificial Sequence
  ENSG00000167123_6 (sequence is synthesized)
ccacatcccaactacacttggcctttcgacgacatcatcgtcttcgcctatgcctgccaggctgctggggtctccgtccacgtgtgcaatgagcaccgttatgggtacatgaatgtgccg

SEQ ID NO: 539716 - DNA, 120 bp, Artificial Sequence
  ENSG00000167123_7 (sequence is synthesized)
gtgaaatcccaccaggggctggaagacgagagggtcaacttcatccacctgatcttagaagcactagtggacggcccccgcatgcaggcctcagctcatgtgactcggccctctaagagg

SEQ ID NO: 539717 - DNA, 120 bp, Artificial Sequence
  ENSG00000167123_8 (sequence is synthesized)
cccagcaagatagggtttgacgaggtctttgtcatcagcctggctcgcaggcctgaccgtcgggaacgcatgctcgcctcgctctgggagatggagatctctgggagggtggtggacgct

SEQ ID NO: 539718 - DNA, 120 bp, Artificial Sequence
  ENSG00000167123_9 (sequence is synthesized)
ccatcaggaacctcggcgtagacctgctcccgggctaccaggacccttactcgggccgcactctgaccaagggcgaggtgggctgcttcctcagccattactccatctgggaagaggtgg

SEQ ID NO: 539719 - DNA, 120 bp, Artificial Sequence
  ENSG00000167123_10 (sequence is synthesized)
ttgccaggggcctggcccgggtcctggtgtttgaggatgacgtgcgctttgagagcaacttcagggggcggctggagcggctgatggaggatgtggaggcagagaaactgtcttgggacc

SEQ ID NO: 539720 - DNA, 120 bp, Artificial Sequence
  ENSG00000167123_11 (sequence is synthesized)
tgatctacctcggacggaagcaggtgaaccctgagaaggagacggccgtggaggggctgccgggcctggtggtggctgggtactcctactggacgctggcctatgccctgcgtctggcgg

SEQ ID NO: 539721 - DNA, 120 bp, Artificial Sequence
  ENSG00000167123_12 (sequence is synthesized)
gtgcccgcaagctgctggcctcacagcctctgcgccgcatgctgcccgtggacgagttcctgcccatcatgttcgaccagcaccccaacgagcagtacaaggcacacttctggccacggg

SEQ ID NO: 539722 - DNA, 120 bp, Artificial Sequence
  ENSG00000167123_13 (sequence is synthesized)
acctggtggccttctccgcccagcccctgctcgctgcccctacccactatgccggggacgccgagtggctcagtgacacggagacatcctctccatgggatgatgacagcggccgcctca

SEQ ID NO: 539723 - DNA, 120 bp, Artificial Sequence
  ENSG00000167123_14 (sequence is synthesized)
tcagctggagcggctcccaaaagaccctgcgcagcccccgcctggacctgactggcagcagcgggcacagcctccaaccccagccccgagatgagctctaggtccaggtgatgactgcaa

SEQ ID NO: 539724 - DNA, 120 bp, Artificial Sequence
  ENSG00000167123_15 (sequence is synthesized)
agcagtgtccaggagcaggccactactgcccagagagcagaggaggaggttgttggcagggactgcagatcctgtcagacctggccaccaccttgggcatggccactctgccctctggac

SEQ ID NO: 539725 - DNA, 120 bp, Artificial Sequence
  ENSG00000167123_16 (sequence is synthesized)
ctgtctttcatcgggagaaaccactcagagatggatcccattccctaaaggtctcacagcaaaggagcaggactcccaggcccctgtaccctgcctggcctgattcagggccttgtggcc

SEQ ID NO: 539726 - DNA, 120 bp, Artificial Sequence
  ENSG00000167123_17 (sequence is synthesized)
cccagcttctgtttcaagctgggcagaccccaggatcccttccctccctaaggactcagctgaggggcccctctgcccccttctacctccacctcagcaccctcccccagcttgatgttt

SEQ ID NO: 539727 - DNA, 120 bp, Artificial Sequence
  ENSG00000167123_18 (sequence is synthesized)
gggtctccccagcaccctcctccctggccggtgcaaagtacagggaggtaaagcaggacccttgcagacatgttgcccagcacacagtaggccctcaataaaagccatttgcactttaaa

SEQ ID NO: 539728 - DNA, 120 bp, Artificial Sequence
  ENSG00000167123_19 (sequence is synthesized)
gggcagagatgcctccagctgggctttgagggtgtcagtcttccctcaaataggaaagatgaggggcaggggaggatattggggacaagcctctgctcagccctgggtcctcttggaacc

SEQ ID NO: 539729 - DNA, 120 bp, Artificial Sequence
  ENSG00000167123_20 (sequence is synthesized)
gggcttggagccggaggtggggagggtgtccaagctgagctcctggattcccatctgccgaactgcacccagaaccaggagtggggtgcgggcccatcctctggccaggatcctgggctc

SEQ ID NO: 539730 - DNA, 120 bp, Artificial Sequence
  ENSG00000167123_21 (sequence is synthesized)
ccttggccacaaagcaggacaggggaccagagatcccccaactcaggagacgtgaagctggcagctgggccgctggcctagaaatggcctcaaatggaagctgccacccgatcctggtgg

SEQ ID NO: 539731 - DNA, 120 bp, Artificial Sequence
  ENSG00000167123_22 (sequence is synthesized)
aggctttgagctaggctagagatcaggactccagggttcagtgcgcacgtgctgcccctgcactagggccgaagcaatgcgggtgctggcgaccgacgcaaggaggtgacgcacagggga

SEQ ID NO: 539732 - DNA, 120 bp, Artificial Sequence
  ENSG00000167123_23 (sequence is synthesized)
cttaaggagcggaccgccgcgggaggacgcgcccagctcagggggactccctctgcgccccccacgctgggtctccggcccacgcgtggcccggctggtctgcggagctagcgccagggc

SEQ ID NO: 539733 - DNA, 120 bp, Artificial Sequence
  ENSG00000167123_24 (sequence is synthesized)
tagcgccagggccgccagagggcgcccggggcggaggatggggcgggagccggggaagcccgggaggtggtggccgagtgggcgccgcccctctgggtctgcggctcaggtcgaagagtc

SEQ ID NO: 539734 - DNA, 120 bp, Artificial Sequence
  ENSG00000167123_25 (sequence is synthesized)
cggggaatccggattccgggggttcaacgcccaggggttccatgagcccctactgttctcggacgcccggccggccccgacgcactcgtcctagcacccctcccctgtccggtcctccgg

SEQ ID NO: 539735 - DNA, 120 bp, Artificial Sequence
  ENSG00000167123_26 (sequence is synthesized)
ccgtcgcccctccggggtccagccgggcggggctgctccagggtcgcggctggcgcgggtccccgggccctggccctccggtgccccgggccaaggagagaaaacttgagcatccacgca

SEQ ID NO: 539736 - DNA, 120 bp, Artificial Sequence
  ENSG00000167123_27 (sequence is synthesized)
cttgagcatccacgcacaggggtggggagcaggatcccactctgagggtgcactgccccgccctctccgggtctgcctcggccccgcccgggccccaggccccgccccctcccctcggcc

SEQ ID NO: 539737 - DNA, 120 bp, Artificial Sequence
  ENSG00000167123_28 (sequence is synthesized)
gacccgggcattggcaccgagtgggcacctaacccccagcttcgcagatggcccccgcccccggcggccctgtctgctcgctccctgcccagacaccacctagacaggcccctcccctca

SEQ ID NO: 539738 - DNA, 120 bp, Artificial Sequence
  ENSG00000167123_29 (sequence is synthesized)
cagacggccctgccagcccgagccgccagagaggaccccgagccccctgctgggagacgacagacctctgaggccacaggccgacgcgggacacccacccctccttctggtcccctactc

SEQ ID NO: 539739 - DNA, 120 bp, Artificial Sequence
  ENSG00000167123_30 (sequence is synthesized)
cttcctcttggggccttccctgggtgtaggttgggcccagccagcccttttcaccccagccttcagggcccagctcaaccccagtgggacctgtggttggctggatttgaagaggagcag

SEQ ID NO: 539740 - DNA, 120 bp, Artificial Sequence
  ENSG00000167123_31 (sequence is synthesized)
acaggaacctctgaagtccactggggcccaacgtggcagggatcgaccacgctggaggcttccgggcacaggttgggggtgccatcagcactgggctccgggctgtgcaggggagtcaga

SEQ ID NO: 539741 - DNA, 120 bp, Artificial Sequence
  ENSG00000167123_32 (sequence is synthesized)
ccggcccccccaccgcccccgtgctggggccagctctcttggtagatcttggtagaggggcgggatcctgtcagccaagggcagtcccccttcctggagcctctcccctctggcatctct

SEQ ID NO: 539742 - DNA, 120 bp, Artificial Sequence
  ENSG00000167123_33 (sequence is synthesized)
gtacccccagggcactgggatcgaaggccacaacccctggtctgtagacaccagaacagggaggagtccctggctgaggttgggggtaaactgagaaaaatgacaagccaccctcttcaa

SEQ ID NO: 539743 - DNA, 120 bp, Artificial Sequence
  ENSG00000167123_34 (sequence is synthesized)
cacaccacagttgggctgggggggtggagccctggcctggggaggccgcccacaattaccacagtttgggagtttgttagttcccacccctgtaagacttgacacgtagtcttcatttct

SEQ ID NO: 539744 - DNA, 120 bp, Artificial Sequence
  ENSG00000167123_35 (sequence is synthesized)
ggggaattggcttaaaggggcagcatcacccaaaacctgggcacttggctaaacccccacctctgttatgggggccccttccccaggagaggggaggctgtgccccatgacagcagagct

SEQ ID NO: 539745 - DNA, 120 bp, Artificial Sequence
  ENSG00000167123_36 (sequence is synthesized)
tggacccatctgcattcttagggacgcttagagcatggtttggtccttattacaacctgggggtggaggaaagcagcagctcttctgtctagtccccattcagagagggacaggggctgg

SEQ ID NO: 539746 - DNA, 120 bp, Artificial Sequence
  ENSG00000167123_37 (sequence is synthesized)
cctgtggtcacacagccacaggtcacataggtaggtatctgcccacctaacgaaggtaaccagggaatgcaccaggtgtgatccttaaagtcgaggtacttttcatctttcaaaatgcat

SEQ ID NO: 539747 - DNA, 120 bp, Artificial Sequence
  ENSG00000167123_38 (sequence is synthesized)
catctcaaaaaaaatgcattattcttctcttatctttgtccatgacataagcaggacagcttaagttatagagggaggacgtgaagcccagagaaagatgggacttgcctgaggtcacac

SEQ ID NO: 539748 - DNA, 120 bp, Artificial Sequence
  ENSG00000167123_39 (sequence is synthesized)
agcaggtcacagaactgtggtggggacctggctgtgctgcctccagcctctctgctgtagcacacctacccttcactgttccaaggagagctcgacctcaaaggtgttagtgctttgggg

SEQ ID NO: 539749 - DNA, 120 bp, Artificial Sequence
  ENSG00000167123_40 (sequence is synthesized)
ggaaagggacctgtctgaggttggtgacagacacccagttcgatcccatctgtggtgccgccaggccgctcccttttctgctcctctcccgagaggctgcagagttctttccctcccagc

SEQ ID NO: 539750 - DNA, 120 bp, Artificial Sequence
  ENSG00000167123_41 (sequence is synthesized)
atcctaggagccacgctgggtctctggcaggaccactcagtgaactccttggggggctgcagcccaggcagggctggagcctgtgacgtcccctcctcaaagtttgcagacacagacaac

SEQ ID NO: 539751 - DNA, 120 bp, Artificial Sequence
  ENSG00000167123_42 (sequence is synthesized)
agtggctggcggctgtgggcgatgactatgctgctgtggtctggaggcctgagggcgagcccaggtggtgatctgaggggaagggtgctggggaagatggagaacagctgcagcccagag

SEQ ID NO: 539752 - DNA, 120 bp, Artificial Sequence
  ENSG00000167123_43 (sequence is synthesized)
aggaaaagggacagcccagagccacagcctccaagccagggctctgtccactgccctgcagagagggaggggcatgtaccccatgggaacatctcacctctatcccctcaggttctaccc

SEQ ID NO: 539753 - DNA, 120 bp, Artificial Sequence
  ENSG00000167130_0 (sequence is synthesized)
gaagcccggtctccgggtaagatggcagcggacggacagtgctcgctccccgcttcatggcggccggtgaccctcacccacgtcgaatatcctgcaggtgatctctctggccacctcctt

SEQ ID NO: 539754 - DNA, 120 bp, Artificial Sequence
  ENSG00000167130_1 (sequence is synthesized)
gcctacctgagcctcagccctgtatttgtcatcgtcggtttcgtgaccctcatcatatttaagcgggagctgcacacgatctccttccttgggggcctggcactgaacgagggggtcaac

SEQ ID NO: 539755 - DNA, 120 bp, Artificial Sequence
  ENSG00000167130_2 (sequence is synthesized)
tggctgatcaaaaacgtcatccaggagccacggccctgtggaggcccccacacagcagtgggcaccaagtacgggatgccctccagccattcccagtttatgtggttcttctccgtctat

SEQ ID NO: 539756 - DNA, 120 bp, Artificial Sequence
  ENSG00000167130_3 (sequence is synthesized)
tccttccttttcctgtatttaagaatgcaccaaacaaacaacgccaggttcctggacttgctgtggaggcacgtgctctccctgggactcctcgctgtggccttcctagtctcctacagc

SEQ ID NO: 539757 - DNA, 120 bp, Artificial Sequence
  ENSG00000167130_4 (sequence is synthesized)
agggtctacctgctgtaccacacctggagccaggtgctctatggaggcatcgctggaggcctcatggccatcgcctggttcatcttcacccaggaggtcctcaccccgctgttccccagg

SEQ ID NO: 539758 - DNA, 120 bp, Artificial Sequence
  ENSG00000167130_5 (sequence is synthesized)
atagcagcctggcctgtctccgagttcttcctaatccgagacacaagcctcattcccaacgtactctggtttgagtacacggtaacccgggcagaagccaggaacagacaacgcaagctg

SEQ ID NO: 539759 - DNA, 120 bp, Artificial Sequence
  ENSG00000167130_6 (sequence is synthesized)
gggacgaaactgcagtgaccagtgggtgtggctgggtccagcctccagatctggcccgcacgatgccttgcaggatggacaggatgacagacagggacgaagcagagacctctacagacc

SEQ ID NO: 539760 - DNA, 120 bp, Artificial Sequence
  ENSG00000167130_7 (sequence is synthesized)
caagtcaccaagtggagcctttttttttcttattttaattttaatgaacaaggtggaccaaagggctgaaccagcccctcaaccaggaccctggggggcctgctgcctgggggccgtggc

SEQ ID NO: 539761 - DNA, 120 bp, Artificial Sequence
  ENSG00000167130_8 (sequence is synthesized)
cagagaccctcgctgtgctgctgccagcccctggctgggcagaaagtgccctcggcatgggcacctgggtgtggggtggaggaggagggctcgcgcctctggtctcggggccaggaattc

SEQ ID NO: 539762 - DNA, 120 bp, Artificial Sequence
  ENSG00000167130_9 (sequence is synthesized)
tgagaagtacacactatttattttttggttttgtcagaggcaggcaggattttggagctggaagaatctgctctccggtggctgccctgtgaacagagggctcccggtcagcttcccagg

SEQ ID NO: 539763 - DNA, 120 bp, Artificial Sequence
  ENSG00000167130_10 (sequence is synthesized)
cccttcgccctatgcccagagggcagactgcctctccctgggccggggtggcctgggtgccaggaggaggggagcataccccacaccctccctgccaccgttgccgttccagaacctcgg

SEQ ID NO: 539764 - DNA, 120 bp, Artificial Sequence
  ENSG00000167130_11 (sequence is synthesized)
tcagtgtttccctgtctgggggcagggcccagagcgagcacgcgtctggcggctgctgtcgttgtgttctaccccgtactgacccaacaccacaagggctttctctggtcccctgtccct

SEQ ID NO: 539765 - DNA, 120 bp, Artificial Sequence
  ENSG00000167130_12 (sequence is synthesized)
aagacaataatcgctttctgacaaaggagcctgcacatttgggtgagcagacccaagctgtttacagctctttcttgtcctgccatccagtagcagttagtcttcatccccacgtgaaca

SEQ ID NO: 539766 - DNA, 120 bp, Artificial Sequence
  ENSG00000167130_13 (sequence is synthesized)
aaatgggaaggagccgtgaggagaggagtgaggcaacaggcacccgaagtccctcgtccttccctctgtgtgctctgaatatgtccttgtccttcctgacccatctctgaccagctggga

SEQ ID NO: 539767 - DNA, 120 bp, Artificial Sequence
  ENSG00000167130_14 (sequence is synthesized)
acctgcttggggtccccctcaaacctgtgtctggggtgtgggctcacagatccctatcagcctggttcgtgggagggctcttcctaaagggacccccatctctaagtcactctgaaaggg

SEQ ID NO: 539768 - DNA, 120 bp, Artificial Sequence
  ENSG00000167130_15 (sequence is synthesized)
agttgtggagaggagacgcctccagactctcagaagttttgaggactgaactgggtcactcgggatctgtgttcgaatcctccccacccctttctttgtggagtttcctaacctgctgct

SEQ ID NO: 539769 - DNA, 120 bp, Artificial Sequence
  ENSG00000167130_16 (sequence is synthesized)
gaagcacaatgttttggtgctttcttttctcatttgttaaaggcagtgtccaaaagccattccagatgccaagaccaggggcttatttctagggaaggtaggtcggtttccatgtttccc

SEQ ID NO: 539770 - DNA, 120 bp, Artificial Sequence
  ENSG00000167130_17 (sequence is synthesized)
tcccgttatttttattttttactttttgcctgagacaagccgagtatgaggtggtttgatttaagaaaaatcaatgaaattgtttactactgttttaaaataaaaccgtaaactctggca

SEQ ID NO: 539771 - DNA, 120 bp, Artificial Sequence
  ENSG00000167131_0 (sequence is synthesized)
agttgctaggcaaccacagctgcgggcgtggtctgcgcggggttgccctcctgttctggtttatcaggggatccccaaagaaagcaaggggaccaaggccgggactgctggggtgaaggc

SEQ ID NO: 539772 - DNA, 120 bp, Artificial Sequence
  ENSG00000167131_1 (sequence is synthesized)
acaggccatggaaaggaatgacatcatcaacttcaaggctttggagaaagagctgcaggctgcactcactgctgatgagaagtacaaacgggagaatgctgccaagttacgggcagtgga

SEQ ID NO: 539773 - DNA, 120 bp, Artificial Sequence
  ENSG00000167131_2 (sequence is synthesized)
acagagggtggcttcctatgaggagttcaggggtattgtccttgcatcacatctgaagccactggagcggaaggataagatgggaggaaagagaactgtgccctggaactgtcacactat

SEQ ID NO: 539774 - DNA, 120 bp, Artificial Sequence
  ENSG00000167131_3 (sequence is synthesized)
ctatcgtgattggcgacgacacttgccaagtgggccagagcgctaccaggctctactgcagcttgggggtccaaggctcggctgcctcttccagacagatgtgggatttggacttcttgg

SEQ ID NO: 539775 - DNA, 120 bp, Artificial Sequence
  ENSG00000167131_4 (sequence is synthesized)
ggagctgctggtggcactggctgatcacgtggggccggctgaccgggcagcggtgctggggatcctatgcagcctggcgagcactgggcgcttcaccctgaacctaagcctgctgagccg

SEQ ID NO: 539776 - DNA, 120 bp, Artificial Sequence
  ENSG00000167131_5 (sequence is synthesized)
ggcagagagagagagctgcaagggcttgtttcagaagctgcaagccatgggcaaccccagatccgtgaaggaggggctcagctgggaggagcagggtctggaggagcagtctggtgggct

SEQ ID NO: 539777 - DNA, 120 bp, Artificial Sequence
  ENSG00000167131_6 (sequence is synthesized)
ccaggaggaggagaggctcctgcaggagctgctggagctgtaccaggttgactgatgcggcaagctaccctcagaggtcccagtggtcactggaggcagttttttggttgttgtcttggg

SEQ ID NO: 539778 - DNA, 120 bp, Artificial Sequence
  ENSG00000167131_7 (sequence is synthesized)
agctgcgggcgtggtctgcgcggggttgccctcctgttctggtttatcaggggatccccaaagaaagcaaggggaccaaggccgggactgctggggtgaaggtccgggaggctgagtaag

SEQ ID NO: 539779 - DNA, 120 bp, Artificial Sequence
  ENSG00000167131_8 (sequence is synthesized)
ccacacctggttcccttctcaacttggaattttcagagcaaaaacaggaatcaagtcttccccacttctccagtccctcagtgtctcgctgttttgaactgtgtgtatccatggacagtc

SEQ ID NO: 539780 - DNA, 120 bp, Artificial Sequence
  ENSG00000167131_9 (sequence is synthesized)
aagagctcaggaagttgagagcggttttgtttcccacccttagagtctgccaagcctctagcccactggccttgagagatgagtgtgtgcccaaccaaatgctggctataccagttacag

SEQ ID NO: 539781 - DNA, 120 bp, Artificial Sequence
  ENSG00000167131_10 (sequence is synthesized)
cctccactcataaaagggaaaaagcaaaatctttatggtaaacaaacactgatctccacagctcttaacaagaatgtttatagccccaaaccaatgaatggacatgtaatcaacaaatga

SEQ ID NO: 539782 - DNA, 120 bp, Artificial Sequence
  ENSG00000167131_11 (sequence is synthesized)
tcaaatactacatcatttgaggtgttgaattttcccctagagactcagttcttgtgcaggttgggcctgggaaagtcccaagccatcagctcaggtccagccagcctcccggatggccag

SEQ ID NO: 539783 - DNA, 120 bp, Artificial Sequence
  ENSG00000167131_12 (sequence is synthesized)
atatgcaggagggtgggtttccttcatcccccaggttgatgaaagacttttccaccaggctggcagggcagggcctggagcactgaggcagagatctccctgcccgagcacctcggcccg

SEQ ID NO: 539784 - DNA, 120 bp, Artificial Sequence
  ENSG00000167131_13 (sequence is synthesized)
cccttctcattccggtttcctttgacccattcttgggtgagcgccagtgttctagaaaggggagtaaaggccaggttctagaatggctttccccccccaccctgagatcaggtctggaat

SEQ ID NO: 539785 - DNA, 120 bp, Artificial Sequence
  ENSG00000167131_14 (sequence is synthesized)
ctggctgcataatcctttcctcatctagaggcttccgcttagcagagctttctaggagccctatgagcctttaatgccctggttttgccctgcccctctgacccctgcctccttcaggta

SEQ ID NO: 539786 - DNA, 120 bp, Artificial Sequence
  ENSG00000167131_15 (sequence is synthesized)
tgcacctggccctcaccactgtgctcctgtgggcatgggggctccaggcctttgaaattgtggagaaggaaaacatttttcagaggaccccctgccctgctttcctgatgtttgaaaatg

SEQ ID NO: 539787 - DNA, 120 bp, Artificial Sequence
  ENSG00000167131_16 (sequence is synthesized)
cagcctacctggccgacatgagctttgagcttccctgtcactgcaaacccgaagaggtgccagctgtagtctggttctaccaaaagcacctaggtagcagccacaccaaagtgctgacgg

SEQ ID NO: 539788 - DNA, 120 bp, Artificial Sequence
  ENSG00000167131_17 (sequence is synthesized)
actttgatgggcgggtgctgacggaggcagcccaggtacgtgtgggcagcgacatgctgacccgcttcagcatccgcatgttcagcttgttggttttcagggctcagtctgaggactcag

SEQ ID NO: 539789 - DNA, 120 bp, Artificial Sequence
  ENSG00000167131_18 (sequence is synthesized)
gcctgtacttctgcggcacccgcaagggggactacttttacgcctacgatgtggacatccagaacagtgagggaatggtggccactttccaggacaagggccaggagccctttgcagatg

SEQ ID NO: 539790 - DNA, 120 bp, Artificial Sequence
  ENSG00000167131_19 (sequence is synthesized)
aatactatgggcacctccatgtcttcaccaccttctgggaatggaccccctgtgaccgctgcggagtgcgtggggagcagtggcgcatcggcctctgctacctgcagagcccagacctct

SEQ ID NO: 539791 - DNA, 120 bp, Artificial Sequence
  ENSG00000167131_20 (sequence is synthesized)
ccccacgctacctcaaggccgtgcccgatgtggtgtcttgtggctcaagggctgtgccaaggaagctgcggaccaaggccagggaccacacgcctgaggtgctggttcggagctgcttag

SEQ ID NO: 539792 - DNA, 120 bp, Artificial Sequence
  ENSG00000167131_21 (sequence is synthesized)
taccctgtgagaagacaaagaccatccgggagggcgtgctggccatcattaactatgtgtccaaagtgggcagccggccctgggtgccccaggtgcccattcagttccaccagcagagac

SEQ ID NO: 539793 - DNA, 120 bp, Artificial Sequence
  ENSG00000167131_22 (sequence is synthesized)
tgggccatggactcatcatctcctgtcctggggcccggccagagcatgcagtggcctgggacaaagaccgccagcacctctaccgcacacagtacctgaagggtgtcaacaggtccatga

SEQ ID NO: 539794 - DNA, 120 bp, Artificial Sequence
  ENSG00000167131_23 (sequence is synthesized)
gggtgttcattgaccacggcaaccagctccacatccgcttcacccagctggatgaccggggcatctactattgctggaggcagggtgtgctagttgctggcttccggctgggtgtgacat

SEQ ID NO: 539795 - DNA, 120 bp, Artificial Sequence
  ENSG00000167131_24 (sequence is synthesized)
ctcatgggcactacccagcctcgttctcagatcctgagactcgctcggctgtggagctcaccctgataggctacctgctcatcacagcagtctttgtcaccattcacttctgtcgttgct

SEQ ID NO: 539796 - DNA, 120 bp, Artificial Sequence
  ENSG00000167131_25 (sequence is synthesized)
gctgctacttatttcactgttgtcccagcttctccccctaggagctctcttcagctctgaagaccagttgtccttcaatgtgtttgttaaatgataccagatgtctctgggtgggtaccc

SEQ ID NO: 539797 - DNA, 120 bp, Artificial Sequence
  ENSG00000167131_26 (sequence is synthesized)
tgggttgggacaggtggtaggaacatgtggacaaatctgttacagcctgctccccattttcatgggcaggtctgggacctgatctgagaagtggaggggcctgaggctggtgggagattg

SEQ ID NO: 539798 - DNA, 120 bp, Artificial Sequence
  ENSG00000167131_27 (sequence is synthesized)
gggactgagctcaggatggaagtagggcacatgtgtttcctgacttcacatttaggtcagagaaggaaagtgtgaactcagatttatccagtggtaaacactgatcagtgttgaatcatg

SEQ ID NO: 539799 - DNA, 120 bp, Artificial Sequence
  ENSG00000167131_28 (sequence is synthesized)
ggcagccccgaaatcgaggtgtgtgcgtgtgtgcgcgcttcggaagccttgggaaggcacgaggacgacagggtcttccattctttttcccgctccaggcctcaatttaccgatccgtaa

SEQ ID NO: 539800 - DNA, 120 bp, Artificial Sequence
  ENSG00000167131_29 (sequence is synthesized)
agcgaaaggggccaatagcatataaggccccttccagatctgacgctttttaatttcctatcccacctggagcaacccttccgtgccgctgacccgcttcaacttacctctcgcctgctc

SEQ ID NO: 539801 - DNA, 120 bp, Artificial Sequence
  ENSG00000167131_30 (sequence is synthesized)
gctaggcaaccacagctgcgggcgtggtctgcgcggggttgccctcctgttctggtttatcaggggatccccaaagaaagcaaggggaccaaggccgggactgctggggtgaaggtccgg

SEQ ID NO: 539802 - DNA, 120 bp, Artificial Sequence
  ENSG00000167131_31 (sequence is synthesized)
aggagaaagcccccctccagcccgagacgtctgctgacttctatcgtgattggcgacgacacttgccaagtgggccagagcgctaccaggctctactgcagcttgggggtccaaggctcg

SEQ ID NO: 539803 - DNA, 120 bp, Artificial Sequence
  ENSG00000167136_0 (sequence is synthesized)
acacccggttgggctctgctgctcccttctgggttccgaggcccaagcccttggcagtgtttgtgagtggaagggaggtcacgctatcgtccgcggccccagcagccctgtgccctcgtt

SEQ ID NO: 539804 - DNA, 120 bp, Artificial Sequence
  ENSG00000167136_1 (sequence is synthesized)
cgttggatcccgcgacgcggctcctttaagagcctcgcgggtcgcccgccgctaggtcgctccccggccatgcgggcgctgcgggccggcctgaccctggcgtcgggcgcggggctgggt

SEQ ID NO: 539805 - DNA, 80 bp, Artificial Sequence
  ENSG00000167136_2 (sequence is synthesized)
gtgctgcccgtggcggcggcagccgagttgccccctgtgcccgggggaccccgcggcccgggcgagctggccaagtacgg

SEQ ID NO: 539806 - DNA, 120 bp, Artificial Sequence
  ENSG00000167136_3 (sequence is synthesized)
gcggcccgggcgagctggccaagtacgggctgccggggctggcgcagctcaagagccgcgagtcgtacgtgctgtgctacgacccgcgcacccgcggcgcgctctgggtggtggagcagc

SEQ ID NO: 539807 - DNA, 120 bp, Artificial Sequence
  ENSG00000167136_4 (sequence is synthesized)
gtgcacgcgtaccaccgtgccaccaacgccgactaccgcggcagtggcttcgaccgcggtcacctggccgccgccgccaaccaccgctggagccagaaggccatggacgacacgttctac

SEQ ID NO: 539808 - DNA, 120 bp, Artificial Sequence
  ENSG00000167136_5 (sequence is synthesized)
ctgagcaacgtcgcgccccaggtgccccacctcaaccagaatgcctggaacaacctggagaaatatagccgcagcttgacccgcagctaccaaaacgtctatgtctgcacagggccactc

SEQ ID NO: 539809 - DNA, 120 bp, Artificial Sequence
  ENSG00000167136_6 (sequence is synthesized)
ttcctgcccaggacagaggctgatgggaaatcctacgtaaagtaccaggtcatcggcaagaaccacgtggcagtgcccacacacttcttcaaggtgctgatcctggaggcagcaggtggg

SEQ ID NO: 539810 - DNA, 120 bp, Artificial Sequence
  ENSG00000167136_7 (sequence is synthesized)
caaattgagctccgcacctacgtgatgcccaacgcacctgtggatgaggccatcccactggagcgcttcctggtgcccatcgagagcattgagcgggcttcggggctgctctttgtgcca

SEQ ID NO: 539811 - DNA, 120 bp, Artificial Sequence
  ENSG00000167136_8 (sequence is synthesized)
aacatcctggcgcgggcaggcagcctcaaggccatcacggcgggcagtaagtgagggtggagcccagtgagactgtgggtgtgtgcaggccggggagtattaaaggtggtgatttttgga

SEQ ID NO: 539812 - DNA, 120 bp, Artificial Sequence
  ENSG00000167139_0 (sequence is synthesized)
acactgctggccggctctgttcaagtgtgggaggtcaggagcagccagttcctcctgggaatgcaacccatctccgaaaaggattaagcatcactagggctccaagtgagttctgatcag

SEQ ID NO: 539813 - DNA, 120 bp, Artificial Sequence
  ENSG00000167139_1 (sequence is synthesized)
aggctgttcggaagacagcaggggccatgaccaccctctctcctgaaaacagcctctctgccagacagtcagcctccttcatcctggtgaagagaaaaccacccattgacaagacagaat

SEQ ID NO: 539814 - DNA, 120 bp, Artificial Sequence
  ENSG00000167139_2 (sequence is synthesized)
gggacagcttctttgatgagagtggccacttggccaaatcacgggacttcatttgtgttaacatcctggaaaggggtctgcaccccttcgtgaggactgaagcctggaaattcctcacgg

SEQ ID NO: 539815 - DNA, 120 bp, Artificial Sequence
  ENSG00000167139_3 (sequence is synthesized)
gctacttctcatggcagagttcccaggatgagcggctcacggtggacagcatgaggaggaagaactacaaggccttatgccaaatgtatgagaagattcagccccttctggaaaacctgc

SEQ ID NO: 539816 - DNA, 120 bp, Artificial Sequence
  ENSG00000167139_4 (sequence is synthesized)
accggaacttcacagagactcgcaataacattgcacgtgacattcagaaaatctatgacaaagatcccctgggcaacgtcctcatcgacaagaagaggctagagaagatcctgctcctga

SEQ ID NO: 539817 - DNA, 120 bp, Artificial Sequence
  ENSG00000167139_5 (sequence is synthesized)
ggtggagcacgaccacgagaccttctggcttttccagttcttcctgcagaaaacggaacacagctgtgtcatcaacattggcgtggccaagaacctagacatgctcagcaccctgatcac

SEQ ID NO: 539818 - DNA, 120 bp, Artificial Sequence
  ENSG00000167139_6 (sequence is synthesized)
cttcctggaccccgtgtttgctgagcacctaaaagggaagggtgcaggggctgtgcagtccctcttcccctggttctgcttctgcttccagcgtgccttcaagtccttcgatgatgtctg

SEQ ID NO: 539819 - DNA, 120 bp, Artificial Sequence
  ENSG00000167139_7 (sequence is synthesized)
gaggctctgggaggttctgctgacggggaagccctgcaggaacttccaggtgctggtggcctacagcatgctgcagatggtgcgggagcaggtgctgcaggaaagcatgggcggggatga

SEQ ID NO: 539820 - DNA, 120 bp, Artificial Sequence
  ENSG00000167139_8 (sequence is synthesized)
catcctcctggcctgcaacaacctcatcgaccttgatgctgatgagctgatctctgccgcctgcgtggtttatgctgagctcatccagaaggatgttcctcagacattaaaggatttctt

SEQ ID NO: 539821 - DNA, 120 bp, Artificial Sequence
  ENSG00000167139_9 (sequence is synthesized)
cctctgaggacaccaaagcccgcagtggactgatgccttcgatgggcaggatgaaggccaggggcactggagtgagggagtagataaaacagctgcaatataaacagtcctctggaataa

SEQ ID NO: 539822 - DNA, 120 bp, Artificial Sequence
  ENSG00000167157_0 (sequence is synthesized)
gcgtgcaccagcggctccggagcgagcggccgtggctgagaaggggagggcggaaagtttgtttccccgacgtcagcgccgggcgggccgcgaggctaggaggcggcgggagctgggcag

SEQ ID NO: 539823 - DNA, 80 bp, Artificial Sequence
  ENSG00000167157_1 (sequence is synthesized)
gcagagcgcggggcggccggggctctcgctccgacccgcgcccgcgacccttcctgggacccgagcccgagacccccgcc

SEQ ID NO: 539824 - DNA, 120 bp, Artificial Sequence
  ENSG00000167157_2 (sequence is synthesized)
ccttcgccctggacaagccggcgctgggcccggggccgccgccgcctccacccgcgctggggcccggcgactgcgcccaggcgcgcaagaacttctcggtgagccacctcctggacctgg

SEQ ID NO: 539825 - DNA, 80 bp, Artificial Sequence
  ENSG00000167157_3 (sequence is synthesized)
ccgaggcgcgggagggcgcagcacgggagccgtccgggggcagcagcggcagcgaggcggcgccgcaggatggtgagtgt

SEQ ID NO: 539826 - DNA, 120 bp, Artificial Sequence
  ENSG00000167157_4 (sequence is synthesized)
gtgagtgtcccagcccggggcgcggtagcgccgccaagcggaagaagaagcagcggcggaaccgcaccacgttcaacagcagccaactgcaggcgctggagcgcgtgttcgagcgcacgc

SEQ ID NO: 539827 - DNA, 120 bp, Artificial Sequence
  ENSG00000167157_5 (sequence is synthesized)
atgaaagggccatgctggccagccgctctgcctcgctgctcaagtcctacagccaggaggccgccatcgagcagcccgtggctccccggcccaccgccctgagtccagattatctctcct

SEQ ID NO: 539828 - DNA, 120 bp, Artificial Sequence
  ENSG00000167157_6 (sequence is synthesized)
ggacagcctcgtccccctacagcacagtgccaccctacagccctgggagctcaggccccgcaaccccaggggtcaacatggccaacagcatcgccagcctccgtctcaaggccaaggagt

SEQ ID NO: 539829 - DNA, 120 bp, Artificial Sequence
  ENSG00000167157_7 (sequence is synthesized)
tcagcctgcaccacagccaggtgcctacggtgaactgaagtccagtcccaccaggacccagacgcctccctgggtggacagcaatagaaaagggggcagacgcccaggaagtgaccttct

SEQ ID NO: 539830 - DNA, 120 bp, Artificial Sequence
  ENSG00000167157_8 (sequence is synthesized)
cctggatgagctctcctggcccgtctgtccagcctggactcccgagcccacgaggctgttgaggcccctgcagccgggcccagctcttctgtccttggccaccagagactgcagcccaca

SEQ ID NO: 539831 - DNA, 120 bp, Artificial Sequence
  ENSG00000167157_9 (sequence is synthesized)
acccttggaggggttgggccggaaggtggaagagcctgccaaggacctcatttagtttgtgtattaaaaccaaaaagcttttgtctttaagaaataaaaccatttttttaagccccaaaa

SEQ ID NO: 539832 - DNA, 120 bp, Artificial Sequence
  ENSG00000167165_0 (sequence is synthesized)
agaggtagacaggacctgtgaaaagcagtggttagtttagggaaaatacctaggagccctgtgatttggagagtgaaaactctttattaccgttgttactttaactctttccaggatggc

SEQ ID NO: 539833 - DNA, 120 bp, Artificial Sequence
  ENSG00000167165_1 (sequence is synthesized)
ctgcctccttcgctcatttcagagaatttctgcaggggttttcttcttagcactttggggcatggttgtaggtgacaagctgctggtggtccctcaggacggaagccactggcttagtat

SEQ ID NO: 539834 - DNA, 120 bp, Artificial Sequence
  ENSG00000167165_2 (sequence is synthesized)
gaaggatatagttgaggttctcagtgaccggggtcatgagattgtagtggtggtgcctgaagttaatttgcttttgaaagaatccaaatactacacaagaaaaatctatccagtgccgta

SEQ ID NO: 539835 - DNA, 120 bp, Artificial Sequence
  ENSG00000167165_3 (sequence is synthesized)
tgaccaagaagagctgaagaaccgttaccaatcatttggaaacaatcactttgctgagcgatcattcctaactgctcctcagacagagtacaggaataacatgattgttattggcctgta

SEQ ID NO: 539836 - DNA, 120 bp, Artificial Sequence
  ENSG00000167165_4 (sequence is synthesized)
cttcatcaactgccagagcctcctgcaggacagggacaccctgaacttctttaaggagagcaagtttgatgctcttttcacagacccagccttaccctgtggggtgatcctggctgagta

SEQ ID NO: 539837 - DNA, 120 bp, Artificial Sequence
  ENSG00000167165_5 (sequence is synthesized)
tttgggcctaccatctgtgtacctcttcaggggttttccgtgttccctggagcatacattcagcagaagcccagaccctgtgtcctacattcccaggtgctacacaaagttttcagacca

SEQ ID NO: 539838 - DNA, 120 bp, Artificial Sequence
  ENSG00000167165_6 (sequence is synthesized)
catgactttttcccaacgagtggccaacttccttgttaatttgttggagccctatctattttattgtctgttttcaaagtatgaagaactcgcatcagctgtcctcaagagagatgtgga

SEQ ID NO: 539839 - DNA, 120 bp, Artificial Sequence
  ENSG00000167165_7 (sequence is synthesized)
tataatcaccttatatcagaaggtctctgtttggctgttaagatatgactttgtgcttgaatatcctaggccggtcatgcccaacatggtcttcattggaggtatcaactgtaagaagag

SEQ ID NO: 539840 - DNA, 120 bp, Artificial Sequence
  ENSG00000167165_8 (sequence is synthesized)
gaaagacttgtctcaggaatttgaagcctacattaatgcttctggagaacatggaattgtggttttctctttgggatcaatggtctcagaaattccagagaagaaagctatggcaattgc

SEQ ID NO: 539841 - DNA, 120 bp, Artificial Sequence
  ENSG00000167165_9 (sequence is synthesized)
tgatgctttgggcaaaatccctcagacagtcctgtggcggtacactggaacccgaccatcgaatcttgcgaacaacacgatacttgttaagtggctaccccaaaacgatctgcttggtca

SEQ ID NO: 539842 - DNA, 120 bp, Artificial Sequence
  ENSG00000167165_10 (sequence is synthesized)
atatgcaatggcgttcccatggtgatgatgcccttgtttggtgatcagatggacaatgcaaagcgcatggagactaagggagctggagtgaccctgaatgttctggaaatgacttctgaa

SEQ ID NO: 539843 - DNA, 120 bp, Artificial Sequence
  ENSG00000167165_11 (sequence is synthesized)
gatttagaaaatgctctaaaagcagtcatcaatgacaaaagttacaaggagaacatcatgcgcctctccagccttcacaaggaccgcccggtggagccgctggacctggccgtgttctgg

SEQ ID NO: 539844 - DNA, 120 bp, Artificial Sequence
  ENSG00000167165_12 (sequence is synthesized)
gtggagtttgtgatgaggcacaagggcgcgccacacctgcgccccgcagcccacgacctcacctggtaccagtaccattccttggacgtgattggtttcctcttggccgtcgtgctgaca

SEQ ID NO: 539845 - DNA, 120 bp, Artificial Sequence
  ENSG00000167165_13 (sequence is synthesized)
gtggccttcatcacctttaaatgttgtgcttatggctaccggaaatgcttggggaaaaaagggcgagttaagaaagcccacaaatccaagacccattgagaagtgggtgggaaataaggt

SEQ ID NO: 539846 - DNA, 120 bp, Artificial Sequence
  ENSG00000167165_14 (sequence is synthesized)
aaaattttgaaccattccctagtcatttccaaacttgaaaacagaatcagtgttaaattcattttattcttattaaggaaatactttgcataaattaatcagccccagagtgctttaaaa

SEQ ID NO: 539847 - DNA, 120 bp, Artificial Sequence
  ENSG00000167165_15 (sequence is synthesized)
aattctcttaaataaaaataatagactcgctagtcagtaaagatatttgaatatgtatcgtgccccctctggtgtctttgatcaggatgacatgtgccatttttcagaggacgtgcagac

SEQ ID NO: 539848 - DNA, 120 bp, Artificial Sequence
  ENSG00000167165_16 (sequence is synthesized)
aggctggcattctagattacttttcttactctgaaacatggcctgtttgggagtgcgggattcaaaggtggtcccacggctgcccctactgcaaatggcagttttaatcttatcttttgg

SEQ ID NO: 539849 - DNA, 120 bp, Artificial Sequence
  ENSG00000167165_17 (sequence is synthesized)
cttctgcagatggttgcaattgatccttaaccaataatggtcagtcctcatctctgtcgtgcttcataggtgccaccttgtgtgtttaaagaagggaagctttgtacctttagagtgtag

SEQ ID NO: 539850 - DNA, 120 bp, Artificial Sequence
  ENSG00000167165_18 (sequence is synthesized)
gtgaaatgaatgaatggcttggagtgcactgagaacagcatatgatttcttgctttggggaaaaagaatgatgctatgaaattggtgggtggtgtatttgagaagataatcattgcttat

SEQ ID NO: 539851 - DNA, 120 bp, Artificial Sequence
  ENSG00000167165_19 (sequence is synthesized)
gtcaaatggagctgaatttgataaaaacccaaaatacagctatgaagtgctgggcaagtttactttttttctgatgtttcctacaactaaaaataaattaataaatttatataaattcta

SEQ ID NO: 539852 - DNA, 120 bp, Artificial Sequence
  ENSG00000167165_20 (sequence is synthesized)
gggaccgccctcagcagtgtggttagcaggcagggccagtgtgaccctccctttctgggcctcagttgagaaacctgaagctcaggagaggagtcactcccctggcagatgggtggctgg

SEQ ID NO: 539853 - DNA, 120 bp, Artificial Sequence
  ENSG00000167165_21 (sequence is synthesized)
gccagaagcagataccaggctttctgactcctgctctaggattctcaccacgtactggctagacttatacttctcaaatcttaatttcctaaaggccggtcatgcccaacatggtcttca

SEQ ID NO: 539854 - DNA, 120 bp, Artificial Sequence
  ENSG00000167165_22 (sequence is synthesized)
atggatacttcagtctctatgcagacttgcagaagactggagcctttggcattcagaagaggaattcagactgtgcaagatctgaggccaggctccagctccccaggtcctttggaattt

SEQ ID NO: 539855 - DNA, 120 bp, Artificial Sequence
  ENSG00000167165_23 (sequence is synthesized)
ctaaaagcagtcatcaatgacaaaagaaagaagcagcagtcaggaagacagatgtgaagagctggagcatgttcagatgagaggagacggaacacggggacacaccagcttgagcaaggg

SEQ ID NO: 539856 - DNA, 120 bp, Artificial Sequence
  ENSG00000167165_24 (sequence is synthesized)
acaacaggggaggactgatgactgacttcccacctttgagttacaaggagaacatcatgcgcctctccagccttcacaaggaccgcccggtggagccgctggacctggccgtgttctggg

SEQ ID NO: 539857 - DNA, 120 bp, Artificial Sequence
  ENSG00000167165_25 (sequence is synthesized)
agaaggaagaaaggcccccacttcccagggagccaaaggaacgaaatcctgtatcaaaagaagaaaaaccaccctcaaaagctggaaattcactgaaggcagagaaaaggggtgcagacc

SEQ ID NO: 539858 - DNA, 120 bp, Artificial Sequence
  ENSG00000167165_26 (sequence is synthesized)
ctctgcttctgcttcccagggagttcctctgaccccccaaaatattctccagcgggtttcccaagaggtcaaaggagaatgggtcccggccgccaaagaactccctgaagacctcggcgg

SEQ ID NO: 539859 - DNA, 120 bp, Artificial Sequence
  ENSG00000167165_27 (sequence is synthesized)
ggtcacggaagctgaagacctactcgaaggggtccttgaagggcctgccgcctgcgcagccgccctccgccctcgcctcgccatagcggtcatagatatcgcgtttctacgcgtccgaca

SEQ ID NO: 539860 - DNA, 120 bp, Artificial Sequence
  ENSG00000167165_28 (sequence is synthesized)
acacctcgtaggcctcagccacctgcttgaatcttctcaccgcttcctccctgtcctcggggtttttgtcggggtgccacttgagcgccagcttgcggtacgccttcttgataccctcgg

SEQ ID NO: 539861 - DNA, 120 bp, Artificial Sequence
  ENSG00000167165_29 (sequence is synthesized)
acgaggcctaccggggtactcccagcacctcgtagtagtccactatgctggactgccaaagagcctgcggggcactggcacagcgagcggcaaggctgccagcacccgcgcacaggtcag

SEQ ID NO: 539862 - DNA, 120 bp, Artificial Sequence
  ENSG00000167165_30 (sequence is synthesized)
cacatctcattggccgaggcctgtgagcgcctcgcatcccaagatgcagtgctcctgggactggccctgctctctgtgaggctctgtgaggccctgtgatgctccaagaccaggccccgc

SEQ ID NO: 539863 - DNA, 120 bp, Artificial Sequence
  ENSG00000167165_31 (sequence is synthesized)
ccactccggcctccaaccagccatggtctccaaaaaggatgggaaaaagaggttggggaaaagagagggccttgactttggctgcctgaagaactgtttttcttaaagtaggctttatat

SEQ ID NO: 539864 - DNA, 120 bp, Artificial Sequence
  ENSG00000167165_32 (sequence is synthesized)
cagtctttttcctcggccacaggagggaagagggtggtgggagtgagtttagtctgaccggggctgaagacatcctgttgtttaggactgcggttctccaacgttccagccccggtgccc

SEQ ID NO: 539865 - DNA, 120 bp, Artificial Sequence
  ENSG00000167165_33 (sequence is synthesized)
atttgcttttgttcatctggattatgcctatcatatgtactgcattagagattaaaacagaattaaaaagacatattcattgggcaatttaagaagaataaacccatgacacactaacaa

SEQ ID NO: 539866 - DNA, 120 bp, Artificial Sequence
  ENSG00000167165_34 (sequence is synthesized)
acctttttatgtaactttttttgagacaaaatgtagtgagaagagtggcatcgttttacagtttttgcatctctctctttagtacttggctctatagagaggtggattctcatgtcagct

SEQ ID NO: 539867 - DNA, 120 bp, Artificial Sequence
  ENSG00000167165_35 (sequence is synthesized)
tctgcattctatctattgtgatattacacatcccccatgtagcttctggaaaactccactgtacacttgtgggagaatgacaatgagaaaatcaagtaacattattacggaaatagtttt

SEQ ID NO: 539868 - DNA, 120 bp, Artificial Sequence
  ENSG00000167165_36 (sequence is synthesized)
gactttgtaaaattctcctgaaaaattactggggatccctaggatttcctggctcatactttgagaatcgctagtctagcagagtagtccctggtattctgaagggattagtttaggaca

SEQ ID NO: 539869 - DNA, 120 bp, Artificial Sequence
  ENSG00000167165_37 (sequence is synthesized)
accctccttccccataccaaaatctagatgctcaagctccttttataaaatgacacagtatttgtatataacctacccatatcctcctttaaacctctagtcatctcttgattactttta

SEQ ID NO: 539870 - DNA, 120 bp, Artificial Sequence
  ENSG00000167165_38 (sequence is synthesized)
cacacagtgtccaaacccttcctcctatattcctagattactaacaaccaattcagaccacatgacattcatgcaaagggtcaagaacatgctctaccctctggccctgtcctacatttg

SEQ ID NO: 539871 - DNA, 120 bp, Artificial Sequence
  ENSG00000167165_39 (sequence is synthesized)
ccatgctttttctgctccttatgcaagccttgcctctgagctttttcagagagaggtgtcagtggtggatattctcagtcatgcatctgtgtggctgttccgaggggactttgtgatgga

SEQ ID NO: 539872 - DNA, 120 bp, Artificial Sequence
  ENSG00000167173_0 (sequence is synthesized)
actcagcaactgccatacagcaaaaggagggattgcaactaccatgcagcaactgccaccttgaaagagaaggggttgaagagtagtctctaatatccagcaccagttggccttaggttc

SEQ ID NO: 539873 - DNA, 120 bp, Artificial Sequence
  ENSG00000167173_1 (sequence is synthesized)
cctgcctccagaccttattctcctgcaacatcaccactggttgaaaccttactacaaatcaagctgtgaagtcactggagccctgtagcaagtcatgtccctgtaacgatgagtgagctg

SEQ ID NO: 539874 - DNA, 120 bp, Artificial Sequence
  ENSG00000167173_2 (sequence is synthesized)
acagctaaggggcttgcctaaaccacacaggtcagaagttgagtagcaggggcctaggagggctcgaagccttcacagcgatggcagagaagcgacccctgagaaccctggggcctgtga

SEQ ID NO: 539875 - DNA, 120 bp, Artificial Sequence
  ENSG00000167173_3 (sequence is synthesized)
tgtatggcaagctgccccgcttagagacagactccgggctcgagcacagcctgccccactctgttggtaaccaggatccctgcacctacaaggggtcctacttctcctgccccatggcag

SEQ ID NO: 539876 - DNA, 120 bp, Artificial Sequence
  ENSG00000167173_4 (sequence is synthesized)
gtactcctaaggccgagtctgagcagttggcgtcctggaccccatacccacccttgtactctaccggtatggcaggacccccacttcaggcagacaacctgctgaccaactgcctgttct

SEQ ID NO: 539877 - DNA, 120 bp, Artificial Sequence
  ENSG00000167173_5 (sequence is synthesized)
accgctcgccagcagaaggccctgagaagatgcaggactccagccctgttgagctcctgcccttcagtccccaggctcactcctacccaggcccaccactggcagcacccaaacctgtct

SEQ ID NO: 539878 - DNA, 120 bp, Artificial Sequence
  ENSG00000167173_6 (sequence is synthesized)
accgcaaccctctgtgctatgggctctcaacttgtctgggggaaggagcagtgaagaggccactggatgttgactggactctggcgactgggcccctgttgccctcagctgacccaccct

SEQ ID NO: 539879 - DNA, 120 bp, Artificial Sequence
  ENSG00000167173_7 (sequence is synthesized)
gctctctggccccagctcctagcaagggccagactctggatggcaccttcttgcggggggtgccagctgaggggtccagtaaagactcctcagggagcttctccccatgccagcccttcc

SEQ ID NO: 539880 - DNA, 120 bp, Artificial Sequence
  ENSG00000167173_8 (sequence is synthesized)
tggagaaatatcagaccatccacagcacgggcttcctggcctccaggtacacaggtccttaccctaggaactccaagcaagcaatgtctgaggggccctcaagtccttggacccagctgg

SEQ ID NO: 539881 - DNA, 120 bp, Artificial Sequence
  ENSG00000167173_9 (sequence is synthesized)
cccagcccctggggccaccctgtcaggacaccgggcccacccactacccaccaccccaccacccaccaccccaccctccacaggccctgccttgccctccagcctgtcgccacccagaga

SEQ ID NO: 539882 - DNA, 120 bp, Artificial Sequence
  ENSG00000167173_10 (sequence is synthesized)
agcagggcagctacagcccagcactcccactgcagcctctggggggccacaaggggaccgggtaccaggctggtgggctgggcagcccctacctgaggcagcaggcagcccaggcacctt

SEQ ID NO: 539883 - DNA, 120 bp, Artificial Sequence
  ENSG00000167173_11 (sequence is synthesized)
acattcccccactggggctggacgcttacccctacccctctgcccctctcccagcaccctctccaggcctcaagctggagccgcctctcactccacggtgcccattggactttgcccccc

SEQ ID NO: 539884 - DNA, 120 bp, Artificial Sequence
  ENSG00000167173_12 (sequence is synthesized)
agacactgagttttccttatgcccgggatgacctctctctctatggagcatcccctgggcttggagggacaccaccttcccagaacaatgtgcgggctgtgccacagcctggtgccttcc

SEQ ID NO: 539885 - DNA, 120 bp, Artificial Sequence
  ENSG00000167173_13 (sequence is synthesized)
agagggcatgccagcctttgccagcgagccagccctgctcagagcctgtgaggcctgcacaggaagccgaagagaagacctggctgcccagctgcaggaaagagaagctccagccccggc

SEQ ID NO: 539886 - DNA, 120 bp, Artificial Sequence
  ENSG00000167173_14 (sequence is synthesized)
tcagtgagcactctgggccgcccatcgtcatccgagacagtccagttccctgtacccccccagcactgcccccctgtgcccgggagtgccagtctcttccacagaaggagggcgcaaggc

SEQ ID NO: 539887 - DNA, 120 bp, Artificial Sequence
  ENSG00000167173_15 (sequence is synthesized)
cacccagctctccaccaatgcctgtcattgacaatgtcttcagcctggccccctaccgtgactatctggatgtgccggcacccgaggccacaactgagcctgactctgccacagctgagc

SEQ ID NO: 539888 - DNA, 120 bp, Artificial Sequence
  ENSG00000167173_16 (sequence is synthesized)
ctgactcagccccagccaccagtgaaggtcaggacaaaggctgcagggggaccctgcctgcccaggagggcccctcagggagtaaacccctaaggggctcacttaaggaggaggtagccc

SEQ ID NO: 539889 - DNA, 120 bp, Artificial Sequence
  ENSG00000167173_17 (sequence is synthesized)
tggatttgagtgtgaggaagcccacagcagaggcctcccctgtcaaggcttcccgttctgtggagcatgccaagcctactgcagccatggatgtgccagatgtgggcaacatggtgtcag

SEQ ID NO: 539890 - DNA, 120 bp, Artificial Sequence
  ENSG00000167173_18 (sequence is synthesized)
aggaccaacttccacagctctgtggccttcatgttccgaaagttcaagatcctccgtccggcacctttgcctgcagccgtggtcccgtccacgcccacctcagctcctgctcccacacag

SEQ ID NO: 539891 - DNA, 120 bp, Artificial Sequence
  ENSG00000167173_19 (sequence is synthesized)
cctgcacccacccccacatctgggcccattggactgcggattctcgctcaacagcccttgtctgtgacctgcttcagcctggcactgcccagccctccagccgtagctgtggcctcccct

SEQ ID NO: 539892 - DNA, 120 bp, Artificial Sequence
  ENSG00000167173_20 (sequence is synthesized)
gcccctgctccagctccatcccctgctccggctcgagctcaggctccagcttcagcccgggatccagctccagctccagctccagttgcaggccctgctccagcatctacttcagcccca

SEQ ID NO: 539893 - DNA, 120 bp, Artificial Sequence
  ENSG00000167173_21 (sequence is synthesized)
ggggactccctggagcagcattttacaggactacatgcgtccctgtgtgatgctatttctggctccgtcgcccactctcctccagagaagcttcgcgagtggctagagacggctgggccc

SEQ ID NO: 539894 - DNA, 120 bp, Artificial Sequence
  ENSG00000167173_22 (sequence is synthesized)
tggggccaggctgcgtggcaggactgccagggtgtgcaggggctgctggccaagctgctgtctcagctgcagcgcttcgatcgcacccaccggtgccccttcccccatgtggtgcgagct

SEQ ID NO: 539895 - DNA, 120 bp, Artificial Sequence
  ENSG00000167173_23 (sequence is synthesized)
ggcgccatcttcgtgcccattcacctggtgaaggagcggctcttccctcggctgccacccgcttctgtggaccatgtgctgcaggagcatcgtgtggagctgcggcccaccacgctgtcg

SEQ ID NO: 539896 - DNA, 120 bp, Artificial Sequence
  ENSG00000167173_24 (sequence is synthesized)
gaggagcgggcactgcgggagctcgccctgccaggctgcacctcacgcatgctgaagttactggcgctgcgccagctgccggacatttaccccgaccttctcggcctgcagtggcgcgac

SEQ ID NO: 539897 - DNA, 120 bp, Artificial Sequence
  ENSG00000167173_25 (sequence is synthesized)
tgtgtacgccgccagctgggtgactttgacactgaggctggagctgtgtcctcctcagagcccactgtggccagaggtgagccagagagcctagccctggctcagaagtcaccggccccc

SEQ ID NO: 539898 - DNA, 120 bp, Artificial Sequence
  ENSG00000167173_26 (sequence is synthesized)
aaggtcaggaagccaggcaggaagccaccaacccctggcccggagaaagcagaggcagctgctggggaagagtcctgtggtgcctcccctacccctgctaccagtgccagcccacctggc

SEQ ID NO: 539899 - DNA, 120 bp, Artificial Sequence
  ENSG00000167173_27 (sequence is synthesized)
cccacactgaaggcccgcttccgcagtctgctggagaccgcctggctcaatggcctggctctgcccacctggggccacaagtcctcaagaccagaccagccctcaccctgcccacagctg

SEQ ID NO: 539900 - DNA, 120 bp, Artificial Sequence
  ENSG00000167173_28 (sequence is synthesized)
ctggacagccagagccatcacctgtagcactggttgccagtgctgtgtgtatagcagtcactctccacccttcccttctgcctgcccagctgccccggggccacgagtggatgctggggc

SEQ ID NO: 539901 - DNA, 120 bp, Artificial Sequence
  ENSG00000167173_29 (sequence is synthesized)
tgtggctgctcccctggaggggttccatctctgaccctgtggcccattcagggtgggctgaagagcccctgagcttttaacgtgagggtctttattggataggactactccctatttctt

SEQ ID NO: 539902 - DNA, 120 bp, Artificial Sequence
  ENSG00000167173_30 (sequence is synthesized)
gcctagagaacacacatgggctttggagcccgacagacctgggcttgaatcccggctcgtgttcttgctgcaggacctgggcaagaaacttcacctctgctgagccctcattccccatgt

SEQ ID NO: 539903 - DNA, 120 bp, Artificial Sequence
  ENSG00000167173_31 (sequence is synthesized)
gtaaaatgggacaacgcaacctacctcacagggttgttgtggggatgctgcctgatacataccctgtcaccatttggtctctgcttcctctctgggacagggcctagaattggaggcaga

SEQ ID NO: 539904 - DNA, 120 bp, Artificial Sequence
  ENSG00000167173_32 (sequence is synthesized)
gaaccttcctatagaaagtcttcgtgtgtcctaggacttggctatcgtagagtggtaccttaggcagtggatgtgactcacactttcaggagtcaccccccagcatttggggttgggttg

SEQ ID NO: 539905 - DNA, 120 bp, Artificial Sequence
  ENSG00000167173_33 (sequence is synthesized)
gccctactccagcctggagctccctgagggagcctgcactccctgctcccaatccccgctactggtgcagggatgcagcctggagctggcgtccttgttctgggcctgctgctgccgcca

SEQ ID NO: 539906 - DNA, 120 bp, Artificial Sequence
  ENSG00000167173_34 (sequence is synthesized)
ccccaggaggccccaggcctgtcctgaattgacatcagtgcttccctgaactgcctcccccacccctggcattatcccaggaaacttatgttttctagaagctaagcagctgctgggact

SEQ ID NO: 539907 - DNA, 120 bp, Artificial Sequence
  ENSG00000167173_35 (sequence is synthesized)
cagggactggtgcaggtaggctgagtggcagctcagtcctagaaggtctctgaagatctggactgaggaccctgctgctccccaagccagagcccatcagccaggcctgctgtgagccac

SEQ ID NO: 539908 - DNA, 120 bp, Artificial Sequence
  ENSG00000167173_36 (sequence is synthesized)
ctgcctgtggagtgctgagctcaaccaaaggctggcaagctctgggcctcatttaagggattctgatgagccgatgggccctggaggcagcccattaaagcatctggctcgtttttggaa

SEQ ID NO: 539909 - DNA, 120 bp, Artificial Sequence
  ENSG00000167173_37 (sequence is synthesized)
agacggcgcccagcggcggcgcgaacggcagctaggagggttgctccgggcttggtgctcactgcgacttcccgcgcagggcccggtcggactaggacccgcggcctgagagacgctgga

SEQ ID NO: 539910 - DNA, 120 bp, Artificial Sequence
  ENSG00000167173_38 (sequence is synthesized)
ggcttctggctgccgccggccccccgcgaacgggctgcggggcaggggtggcgctgctgctccgactttccccggacttcgaggctcccgggacctggtagcgctctgggtctccggcgg

SEQ ID NO: 539911 - DNA, 120 bp, Artificial Sequence
  ENSG00000167173_39 (sequence is synthesized)
ggtgtgtgtgctgtgtgagtgcgtcacagctggggctgagtgattccaaggactcctgcccgggtagggggctttaggatgagctctaggtacccccaccccttgaccctccagacaatc

SEQ ID NO: 539912 - DNA, 120 bp, Artificial Sequence
  ENSG00000167173_40 (sequence is synthesized)
agtgagcaccttcatagcctcttttgtaggcttctgaacatgccagctgctctgtccccatggaaactcctcggcctcccctggtgctgcaccttcttggattccctcctcctctgcctg

SEQ ID NO: 539913 - DNA, 120 bp, Artificial Sequence
  ENSG00000167173_41 (sequence is synthesized)
tgccttctccatctttggtgcagtgtttccggcactctggttaggccctgttttctagctgagataatttccctgatctccagcctagcatcccctttgtgagctctagccctaaataac

SEQ ID NO: 539914 - DNA, 120 bp, Artificial Sequence
  ENSG00000167173_42 (sequence is synthesized)
ccactgcatgctgggcctcagcccctgggtctctctcccacactgaactcatcccaaatcacactcccgagccttcccctcagctcacttcccacaaccagttcttttccatgtcagtga

SEQ ID NO: 539915 - DNA, 120 bp, Artificial Sequence
  ENSG00000167173_43 (sequence is synthesized)
agggcaccccctttcacaaagctcctcatgctctagacctggtgagggccacagctgcctttttgaacgtgtagttttgcagtcctccccggcccttacatacacagaagtgtgcgcata

SEQ ID NO: 539916 - DNA, 120 bp, Artificial Sequence
  ENSG00000167173_44 (sequence is synthesized)
agtcgcattgttttgtggtttgcttttcctctactaaatgatgtgcctgctgttctccagcttgttttcttttaatgtcctggaggaccacacaactgccgaagtgttgtgtggcgtgta

SEQ ID NO: 539917 - DNA, 120 bp, Artificial Sequence
  ENSG00000167178_0 (sequence is synthesized)
ctcaaatcggggtattgatctccacggaagccccaaaccctcgccatcgagagacccccatggcccggggtgatggctgtggggcttggtgctcccagagagctcagtggctacagaatg

SEQ ID NO: 539918 - DNA, 120 bp, Artificial Sequence
  ENSG00000167178_1 (sequence is synthesized)
ggtggggattctgcgtgtctcccggagcctgaacccctttcctggttatggccggtagctgtctccagggctaacgtgggcagcgcaggggggcggaaaccgggttttagccaaatgcct

SEQ ID NO: 539919 - DNA, 120 bp, Artificial Sequence
  ENSG00000167178_2 (sequence is synthesized)
cgacatcgccgcgcctccgcctcctcgtcgctgaaagaaatgtcggggtttcatcagagctagggagcgacagtcgggaacagcgagtctgccgaagccggctgttgtgtgagggtgtga

SEQ ID NO: 539920 - DNA, 120 bp, Artificial Sequence
  ENSG00000167178_3 (sequence is synthesized)
gacggcggggcggtgaggggccaccgcggcttgggggatagtgcgtgtggggttgaccgtgtgtctgcttgagaggctgtgaagatatggggggcagatatgggagaaatgctcgggcct

SEQ ID NO: 539921 - DNA, 120 bp, Artificial Sequence
  ENSG00000167178_4 (sequence is synthesized)
gaagtccccagcccaccgtgctcaagagtagcggacgttttgccaccatccttgtctgtgctactgtctgctgcagcttccgtgccccgttctcctggagcagggcgtaaaagcggcttg

SEQ ID NO: 539922 - DNA, 120 bp, Artificial Sequence
  ENSG00000167178_5 (sequence is synthesized)
cattcaattagcagcgaagctcgcgggcgctggcgggacaggcgcgtgaggccacaacacatgcgtgtatcttgcttgggctatcttccctgctctgccacgccgggtctggagaagggg

SEQ ID NO: 539923 - DNA, 120 bp, Artificial Sequence
  ENSG00000167178_6 (sequence is synthesized)
tttcagccccaggacatttactgagagtcggcgaatattgggagccgcgatgttcccccttcgggccctgtggttggtctgggcgcttctaggagtggccggatcatgcccggagccgtg

SEQ ID NO: 539924 - DNA, 120 bp, Artificial Sequence
  ENSG00000167178_7 (sequence is synthesized)
cgcctgcgtggacaagtacgctcaccagttcgcggactgcgcttacaaagagttgcgtgaggtgccggaaggactgcctgccaacgtgacgacgcttagtctgtccgcgaacaagatcac

SEQ ID NO: 539925 - DNA, 120 bp, Artificial Sequence
  ENSG00000167178_8 (sequence is synthesized)
tgtgctgcggcgcggggccttcgccgacgtcacacaggtcacgtcgctgtggctggcgcacaatgaggtgcgcaccgtggagccaggcgcactggccgtgctgagtcagctcaagaacct

SEQ ID NO: 539926 - DNA, 120 bp, Artificial Sequence
  ENSG00000167178_9 (sequence is synthesized)
cgatctgagccacaacttcatatccagctttccgtggagcgacctgcgcaacctgagcgcgctgcagctgctcaaaatgaaccacaaccgcctgggctctctgccccgggacgcactcgg

SEQ ID NO: 539927 - DNA, 120 bp, Artificial Sequence
  ENSG00000167178_10 (sequence is synthesized)
tgcgctacccgacctgcgttccctgcgcatcaacaacaaccggctgcgtacgctggcgcctggcaccttcgacgcgcttagcgcgctgtcacacttgcaactctatcacaatcccttcca

SEQ ID NO: 539928 - DNA, 120 bp, Artificial Sequence
  ENSG00000167178_11 (sequence is synthesized)
ctgcggctgcggccttgtgtggctgcaggcctgggccgcgagcacccgggtgtccttacccgagcccgactccattgcttgtgcctcgcctcccgcgctgcagggggtgccggtgtaccg

SEQ ID NO: 539929 - DNA, 120 bp, Artificial Sequence
  ENSG00000167178_12 (sequence is synthesized)
cctgcccgccctgccctgtgcaccgcccagcgtgcatctgagtgccgagccaccgcttgaagcacccggcaccccactgcgcgcaggactggcgttcgtgttacactgcatcgccgacgg

SEQ ID NO: 539930 - DNA, 120 bp, Artificial Sequence
  ENSG00000167178_13 (sequence is synthesized)
ccaccctacgcctcgcctgcaatggcaacttcagatccccggtggcaccgtagtcttagagccaccggttctgagcggggaggacgacggggttggggcggaggaaggagagggagaagg

SEQ ID NO: 539931 - DNA, 120 bp, Artificial Sequence
  ENSG00000167178_14 (sequence is synthesized)
agatggggatttgctgacgcagacccaagcccaaacgccgactccagcacccgcttggccggcgcccccagccacaccgcgcttcctggccctcgcaaatggctccctgttggtgcccct

SEQ ID NO: 539932 - DNA, 120 bp, Artificial Sequence
  ENSG00000167178_15 (sequence is synthesized)
cctgagtgccaaggaggcgggcgtctacacttgccgtgcacacaatgagctgggcgccaactctacgtcaatacgcgtggcggtggcagcaaccgggcccccaaaacacgcgcctggcgc

SEQ ID NO: 539933 - DNA, 120 bp, Artificial Sequence
  ENSG00000167178_16 (sequence is synthesized)
cgggggagaacccgacggacaggccccgacctctgagcgcaagtccacagccaagggccggggcaacagcgtcctgccttccaaacccgagggcaaaatcaaaggccaaggcctggccaa

SEQ ID NO: 539934 - DNA, 120 bp, Artificial Sequence
  ENSG00000167178_17 (sequence is synthesized)
ggtcagcattctcggggagaccgagacggagccggaggaggacacaagtgagggagaggaggccgaagaccagatcctcgcggacccggcggaggagcagcgctgtggcaacggggaccc

SEQ ID NO: 539935 - DNA, 120 bp, Artificial Sequence
  ENSG00000167178_18 (sequence is synthesized)
ctctcggtacgtttctaaccacgcgttcaaccagagcgcagagctcaagccgcacgtcttcgagctgggcgtcatcgcgctggatgtggcggagcgcgaggcgcgggtgcagctgactcc

SEQ ID NO: 539936 - DNA, 120 bp, Artificial Sequence
  ENSG00000167178_19 (sequence is synthesized)
ctgggcccggcggggctggcggagccccgcgacccgggcggcgacccctgcgcctactctatctgtgtccagcggggggcggcgcggcagtgcagtggtcccgcgtagaggaaggcgtca

SEQ ID NO: 539937 - DNA, 120 bp, Artificial Sequence
  ENSG00000167178_20 (sequence is synthesized)
tcaacgcctactggttccgcggcctgcggccgggtaccaactactccgtgtgcctggcgctggcgggcgaagcctgccacgtgcaagtggtgttttccaccaagaaggagctcccatcgc

SEQ ID NO: 539938 - DNA, 120 bp, Artificial Sequence
  ENSG00000167178_21 (sequence is synthesized)
tgctggtcatagtggcagtgagcgtattcctcctggtgctggccacagtgccccttctgggcgccgcctgctgccatctgctggctaaacacccgggcaagccctaccgtctgatcctgc

SEQ ID NO: 539939 - DNA, 120 bp, Artificial Sequence
  ENSG00000167178_22 (sequence is synthesized)
ggcctcaggcccctgaccctatggagaagcgcatcgccgcagacttcgacccgcgtgcttcgtacctcgagtccgagaaaagctacccggcaggcggcgaggcgggcggcgaggagccag

SEQ ID NO: 539940 - DNA, 120 bp, Artificial Sequence
  ENSG00000167178_23 (sequence is synthesized)
aggacgtgcagggggagggccttgatgaagacgcggagcagggagacccaagtggggacctgcagagagaggagagcctggcggcctgctcactggtggagtcccagtccaaggccaacc

SEQ ID NO: 539941 - DNA, 120 bp, Artificial Sequence
  ENSG00000167178_24 (sequence is synthesized)
aagaggagttcgaggcgggctctgagtacagcgatcggctgcccctgggcgccgaggcggtcaacatcgcccaggagattaatggcaactacaggcagacggcaggctgaacctccgccc

SEQ ID NO: 539942 - DNA, 120 bp, Artificial Sequence
  ENSG00000167178_25 (sequence is synthesized)
gtccggcccgcccattcccgacctccacctagggtgcctgggagcagcagtctagggctggcaggacttatgtcccccgtccccaaccttcacctactcctcccccttactactccccaa

SEQ ID NO: 539943 - DNA, 120 bp, Artificial Sequence
  ENSG00000167178_26 (sequence is synthesized)
ccttgactaccagggacttctattagggagtgggccgatttcaccagtccctgctacccacggctgccattctccctgcgggctgaatccccttccccgccaagcacagtgtttatctta

SEQ ID NO: 539944 - DNA, 120 bp, Artificial Sequence
  ENSG00000167178_27 (sequence is synthesized)
ccccatgcaagactccacccgcagacggtgggcgatatctatgtccctccattcccgtcgcgattatctgcgaaatccaccccgcagcccgccccaccgtgggctctggagccagaggaa

SEQ ID NO: 539945 - DNA, 120 bp, Artificial Sequence
  ENSG00000167178_28 (sequence is synthesized)
acgagcgaagactttggaaacctcgcggtaacgcggtggtttcgggggccagccaaggccagtggagtgctgtggggtcccacctcgacccctcctcctccctttctttctttccttttt

SEQ ID NO: 539946 - DNA, 73 bp, Artificial Sequence
  ENSG00000167178_29 (sequence is synthesized)
cacctcgacccctcctcctccctttctttctttcccggagtcttggtctgtcgccaggctggagtgcagtggc

SEQ ID NO: 539947 - DNA, 79 bp, Artificial Sequence
  ENSG00000167178_30 (sequence is synthesized)
ctcctccctttcaatccctactcccagaagccgggattcgtggcaacccctagtttttagttccaaagcctcctgccgg

SEQ ID NO: 539948 - DNA, 120 bp, Artificial Sequence
  ENSG00000167178_31 (sequence is synthesized)
gtggcaacccctagtttttagttccaaagcctcctgccggcagggaaccaaatccttctgtcctcccacccccaccccacttctggccagttggagtccagcccggtgcctggggcgcct

SEQ ID NO: 539949 - DNA, 120 bp, Artificial Sequence
  ENSG00000167178_32 (sequence is synthesized)
ttcagctccgcgctcagattttcctgttttcgttgttttcaaagacagcgacatttcgggtctggtgctaacacccccttcccagcctctgggaaaatcgagtgtgtgtgtcggggggta

SEQ ID NO: 539950 - DNA, 120 bp, Artificial Sequence
  ENSG00000167178_33 (sequence is synthesized)
gggagggaatgcgttttctgtcgtctctctcctaacttaaagcgccgcaggaccgcgcgccccttggcggctgagcctgtggacttggtcgcgggccaatttcgttgtccgtgtgttggg

SEQ ID NO: 539951 - DNA, 120 bp, Artificial Sequence
  ENSG00000167178_34 (sequence is synthesized)
ctttccggaggtctgtgcgcccaacagcgccgctcccgcggctccacccgacccagaccctagctggaaagcgccggaggcggaggaagctgactgtggcctcccgggccgcggctctct

SEQ ID NO: 539952 - DNA, 120 bp, Artificial Sequence
  ENSG00000167178_35 (sequence is synthesized)
ggagggctcgcgccctagttcgcacaaagcctgctcgtgactgtgcgactgtgcgacgggatccggatggagccgagcccctccgtcctcgcgtctcggtcctcgcgtcgccccgcccca

SEQ ID NO: 539953 - DNA, 120 bp, Artificial Sequence
  ENSG00000167178_36 (sequence is synthesized)
cccgcccctgcttcggcgggaatcgtgtttgcccggcgtgtagtccctgacaagcgtgccctgtaggagaaaagtctgtgtcctgtgaagtgtgaccgtgtagtgtaggggggcgggcgg

SEQ ID NO: 539954 - DNA, 120 bp, Artificial Sequence
  ENSG00000167178_37 (sequence is synthesized)
gggggcggatgggcggggagggagggaaggggaggggcgcggcgcggcgactcggggcggggttcttttttccattttgaaagaaagcgtcggggttggggtggggggagtttcagtcct

SEQ ID NO: 539955 - DNA, 120 bp, Artificial Sequence
  ENSG00000167178_38 (sequence is synthesized)
cgggatcagccctctccgcgaagcgcagcacaagcgcgggcctgggacggagtagccccccggagcccgtgcccttttctaaacgcgtctgtatgcagtcaataaaacaatcgatttgaa

SEQ ID NO: 539956 - DNA, 120 bp, Artificial Sequence
  ENSG00000167178_39 (sequence is synthesized)
agatcccacatctcaagtcgtgcagtgcaggtcctcctattgcttctctgctgggtttcggtcacagtggagggctgtatgcacacacaggcacatgcctgtgttcttgagccgcgatgt

SEQ ID NO: 539957 - DNA, 120 bp, Artificial Sequence
  ENSG00000167178_40 (sequence is synthesized)
aacctgcagccagagaggtgggggaaacggacgcaaaaggaaaaattgaagtggtactttggggccaccaagtccccaaacttacctgtccctttctttgccccccgccccccgttttcc

SEQ ID NO: 539958 - DNA, 120 bp, Artificial Sequence
  ENSG00000167178_41 (sequence is synthesized)
attagacccgcttctgcgcgccggacggcgccggacgaggtgcgcgcagtcttctagctgagctcggaggcagatccagaagtcgcggctcccaccccaggcctcggcggactctgcctg

SEQ ID NO: 539959 - DNA, 120 bp, Artificial Sequence
  ENSG00000167178_42 (sequence is synthesized)
acctgctcgagtgaggccgggagcggaccgcagcccgctggaggtgccgggggcgaaatgctggcgtctgctcctccgtctcccagaatcctgccctggaaaaaaccagcgccaaccgcc

SEQ ID NO: 539960 - DNA, 120 bp, Artificial Sequence
  ENSG00000167178_43 (sequence is synthesized)
ggtttaactgaggacggatttaaggcattacgaaagacagctttcccctttgctcggctctccttctctctcctgctgccctgtgaagaggtgtcttctgccataattccacaacacatg

SEQ ID NO: 539961 - DNA, 120 bp, Artificial Sequence
  ENSG00000167178_44 (sequence is synthesized)
gtcggcgaatattgggcattactagggatgtgaatgggagactggtatagaaagtggtgaggagccgaagccaagaaattgctttaaacacaagatgaaaacgctctgttctgtacacaa

SEQ ID NO: 539962 - DNA, 120 bp, Artificial Sequence
  ENSG00000167178_45 (sequence is synthesized)
agaatcacctaatactggtgtgaggcatctcacttagctgtggagaagtccttggaattagatctcagaaagacagttccagctttaagacagtaaaacctttaggcaatgggctaattg

SEQ ID NO: 539963 - DNA, 120 bp, Artificial Sequence
  ENSG00000167178_46 (sequence is synthesized)
gaagccggctgttgtgtgaggcttccgtgccccgttctcctggagcaggcaagacctggagtgaggtgcttgggtgcgctcgagagagcttccccctgctccacctgtcccgcggtgcgc

SEQ ID NO: 539964 - DNA, 120 bp, Artificial Sequence
  ENSG00000167182_0 (sequence is synthesized)
aggctctcggtggcggcggaggcggcggaggccagggaggaagatgtcgtaatgagcgatccacagaccagcatggctgccactgctgctgtgagtcccagtgactacctgcagcctgcc

SEQ ID NO: 539965 - DNA, 120 bp, Artificial Sequence
  ENSG00000167182_1 (sequence is synthesized)
gcctccaccacccaggactcccagccatctcccttagccctgcttgctgcaacatgtagcaaaattggccctccagcagttgaagctgctgtgacacctcctgctcccccacagcccaca

SEQ ID NO: 539966 - DNA, 120 bp, Artificial Sequence
  ENSG00000167182_2 (sequence is synthesized)
ccgcggaaacttgtccctatcaaacctgcccctctccctctcagccccggcaagaatagctttggaatcttgtcctccaaaggaaatatacttcagattcaggggtcacaactgagcgcc

SEQ ID NO: 539967 - DNA, 120 bp, Artificial Sequence
  ENSG00000167182_3 (sequence is synthesized)
tcctatcctggagggcagctggtgttcgctatccagaatcccaccatgatcaacaaagggacccgatcaaatgccaatatccagtaccaggcggtccctcagattcaggcaagcaattcc

SEQ ID NO: 539968 - DNA, 120 bp, Artificial Sequence
  ENSG00000167182_4 (sequence is synthesized)
caaaccatccaagtacagcccaatctcaccaaccagatccagatcatccctggcaccaaccaagccatcatcaccccctcaccgtccagtcacaagcctgtccccatcaagccagccccc

SEQ ID NO: 539969 - DNA, 120 bp, Artificial Sequence
  ENSG00000167182_5 (sequence is synthesized)
atccagaagtcgagtacgaccaccacccccgtgcagagcggggccaatgtggtgaagctgacaggtgggggcggcaatgtgacgctcactctgcccgtcaacaaccttgtgaacgccagt

SEQ ID NO: 539970 - DNA, 120 bp, Artificial Sequence
  ENSG00000167182_6 (sequence is synthesized)
gacaccggggcccctactcagctcctcactgaaagccccccaaccccgctgtctaagactaacaagaaagcaaggaagaagagccttcctgcctcccagccccctgtggctgtggctgag

SEQ ID NO: 539971 - DNA, 120 bp, Artificial Sequence
  ENSG00000167182_7 (sequence is synthesized)
caggtggagacggtgctgatcgagaccaccgcggacaacatcatccaggcaggaaataacctgctcattgttcagagccctggtgggggccagccagctgtggtccagcaggtccaggtg

SEQ ID NO: 539972 - DNA, 120 bp, Artificial Sequence
  ENSG00000167182_8 (sequence is synthesized)
gtgccccccaaggccgagcagcagcaggtggtacagatcccccagcaggctctgcgggtggtgcaggcggcatctgccaccctccccactgtaccccagaagccctcccagaactttcag

SEQ ID NO: 539973 - DNA, 120 bp, Artificial Sequence
  ENSG00000167182_9 (sequence is synthesized)
atccaggcagctgagccgacacctactcaggtctacatccgcacgccttccggtgaggtgcagacagtccttgtccaggacagccccccagcaacagctgcagccacctctaacaccacc

SEQ ID NO: 539974 - DNA, 120 bp, Artificial Sequence
  ENSG00000167182_10 (sequence is synthesized)
tgtagcagccctgcatcccgtgctccccatctgagtgggaccagcaaaaagcactcagctgcaattctccgaaaagagcgtcccctgccaaagattgccccagccgggagcatcatcagc

SEQ ID NO: 539975 - DNA, 120 bp, Artificial Sequence
  ENSG00000167182_11 (sequence is synthesized)
ctgaatgcagcccagttggcggcagctgcccaggcaatgcagaccatcaacatcaatggtgtccaggtccagggcgtgcctgtcaccatcaccaacacaggcgggcagcagcagctgaca

SEQ ID NO: 539976 - DNA, 120 bp, Artificial Sequence
  ENSG00000167182_12 (sequence is synthesized)
gaccatcagtgggctgagccccacccagatccagctgcaaatggaacaagccctggccggagagacccagcccggggagaagcggcgccgcatggcctgcacgtgtcccaactgcaagga

SEQ ID NO: 539977 - DNA, 120 bp, Artificial Sequence
  ENSG00000167182_13 (sequence is synthesized)
tggggagaagaggtctggagagcagggcaagaagaagcacgtgtgccacatccccgactgtggcaagacgttccgtaagacgtccttgctgcgtgcccatgtgcgcctgcacactggcga

SEQ ID NO: 539978 - DNA, 120 bp, Artificial Sequence
  ENSG00000167182_14 (sequence is synthesized)
gcggccctttgtctgcaactggttcttctgtgggaagaggttcacacggagtgacgagctccaacggcatgctcgcacccacacaggggacaaacgcttcgagtgcgcccagtgtcagaa

SEQ ID NO: 539979 - DNA, 120 bp, Artificial Sequence
  ENSG00000167182_15 (sequence is synthesized)
gcgcttcatgaggagtgaccacctcaccaagcattacaagacccacctggtcacgaagaacttgtaaggccaactgcggcgggaggccctgaagatgcagtcccccacctgtgtcctccc

SEQ ID NO: 539980 - DNA, 120 bp, Artificial Sequence
  ENSG00000167182_16 (sequence is synthesized)
tgggcccctggtggaaaggagccctgtggctgccttgggcctgccctcagccccactcctgttctgcaactgtccccacaggaaggggctctgttccctgtattgtcctccttctgaagc

SEQ ID NO: 539981 - DNA, 120 bp, Artificial Sequence
  ENSG00000167182_17 (sequence is synthesized)
cccttggctctgccttggcccttcccctcaccacgagctcccggcctgcccagactgtggacactggccgtgcccaatgagacgttctaaaccaggacgcgtgggaacccttatttccaa

SEQ ID NO: 539982 - DNA, 120 bp, Artificial Sequence
  ENSG00000167182_18 (sequence is synthesized)
aggaaaaacatgcatttcactccgtcgaggagcaaagtgagcccctaccccccaccccgatccccgctcccaacactgccggagtcgcgtcatgccatgccccctctcctgcacctccct

SEQ ID NO: 539983 - DNA, 120 bp, Artificial Sequence
  ENSG00000167182_19 (sequence is synthesized)
ggccctgccggccactgtggacgccctggggcttggcacccacctctggagaaactcggggccacctccactccatgtgcccagccccgccacaacctctcctccagcacattccagctc

SEQ ID NO: 539984 - DNA, 120 bp, Artificial Sequence
  ENSG00000167182_20 (sequence is synthesized)
tatttaaaaagtaaagacacccaccgactcctgatccccctctttttctatggagaacgttgccttatactctacttcagatgatgaacactgtgtactgtgtgtgctttaaagaagttt

SEQ ID NO: 539985 - DNA, 120 bp, Artificial Sequence
  ENSG00000167182_21 (sequence is synthesized)
tatttaattgctcccttcttcctttccttgttattcacctccctgatgcctgctttcagttgagggttgggggcaatgatgagcatatgaattttttctcactctagcaattcccttttc

SEQ ID NO: 539986 - DNA, 120 bp, Artificial Sequence
  ENSG00000167182_22 (sequence is synthesized)
taaatgacacagcatttaaactcaaatctggattcagataacagcacctgcacatcctgcacctcctccctctcccttcacctcacccctgcccggcccaagctctacttgtgtacagtg

SEQ ID NO: 539987 - DNA, 120 bp, Artificial Sequence
  ENSG00000167182_23 (sequence is synthesized)
tatattgtataatagacaattgtgtctactacatgtttaaaaacacattgcttgttatttttgaggcttttaaattaaacaaaaatccaactttatttttagttgtaactgcttgaggta

SEQ ID NO: 539988 - DNA, 120 bp, Artificial Sequence
  ENSG00000167182_24 (sequence is synthesized)
tgttttatgaattaagtgacagatttgttatcctttattaacgtactttgttggtcagcactgggctgacaaaaattttttcttgctaataaatttagttgcctgaggcaaaatcttcaa

SEQ ID NO: 539989 - DNA, 120 bp, Artificial Sequence
  ENSG00000167182_25 (sequence is synthesized)
gtcgctcgggcggtggcgggctccgggattggcggttgcttggcgggcggtgtcaggctctcggtggcggcggaggcggcggaggccagggaggaagatgtcgtaatgagcgggggcgaa

SEQ ID NO: 539990 - DNA, 120 bp, Artificial Sequence
  ENSG00000167182_26 (sequence is synthesized)
tctatcagacaacctatcaattgggctgatgatgtcagtgttccagtggcttctaacaggcgttaatacctgttggaaatggattatcattggctgggacgattgatccacagaccagca

SEQ ID NO: 539991 - DNA, 120 bp, Artificial Sequence
  ENSG00000167182_27 (sequence is synthesized)
agtctgaggagaggagaggagaaagtaatctactgaaatagatgtaaggctatcaacccagggtggatccacagaccagcatggctgccactgctgctgtgagtcccagtgactacctgc

SEQ ID NO: 539992 - DNA, 120 bp, Artificial Sequence
  ENSG00000167182_28 (sequence is synthesized)
tgggtcccggccgctgccggcggggtcttcccggcccccaaggatccacagaccagcatggctgccactgctgctgtgagtcccagtgactacctgcagcctgccgcctccaccacccag

SEQ ID NO: 539993 - DNA, 120 bp, Artificial Sequence
  ENSG00000167183_0 (sequence is synthesized)
accttgactccaggagctgcagcagagcaggtaacagctcttgcacctgtttctcttgcacctgacgtgcagctgctcctacccacctctcctggctgagccttgcctgatacagcagcc

SEQ ID NO: 539994 - DNA, 120 bp, Artificial Sequence
  ENSG00000167183_1 (sequence is synthesized)
cggaggcaccacttgcttcccgagtctcaccctcccaggcagctcctacactcaactgcttctctaggaaaggtctcacctccagcctggagcagtcgggattacagaaagccccatcct

SEQ ID NO: 539995 - DNA, 120 bp, Artificial Sequence
  ENSG00000167183_2 (sequence is synthesized)
tggcttagggagcgccatgacgactgaaattggttggtggaagctgactttcctccggaaaaagaaatccactcccaaagtgctgtatgagatccctgacacctatgcccaaacagaggg

SEQ ID NO: 539996 - DNA, 120 bp, Artificial Sequence
  ENSG00000167183_3 (sequence is synthesized)
agatgcagaacccccgaggcctgacgctggaggccccaacagcgactttaacacccgcctggagaagattgtggacaagagcacaaagggcaagcacgtcaaggtctccaactcaggacg

SEQ ID NO: 539997 - DNA, 120 bp, Artificial Sequence
  ENSG00000167183_4 (sequence is synthesized)
cttcaaggagaagaagaaagtgagagccacgctggcagagaaccctaacctctttgatgatcacgaggaaggacggtcatcaaagtgaagggctgaggagggtgctagcacctcttggct

SEQ ID NO: 539998 - DNA, 120 bp, Artificial Sequence
  ENSG00000167183_5 (sequence is synthesized)
ccctgccatcagccagatctgagacaggaccttgccacgctggcctctttggccatagctgaagctgtggggccagttgatacctgctggcaggaaatggctgttttttaggtttgtatt

SEQ ID NO: 539999 - DNA, 120 bp, Artificial Sequence
  ENSG00000167183_6 (sequence is synthesized)
agagtgaaaagtctcacccaggaggaacagccctccttgaagcaatggcagggccagcagggaggtgggcatggcagggaatggagagagtgagccagacagacttcacctccttactgg

SEQ ID NO: 540000 - DNA, 120 bp, Artificial Sequence
  ENSG00000167183_7 (sequence is synthesized)
acacagggtcaagggcgagtttcaattgctgctccctttactttctctacctgtgactactccctggaccaatcctgaggagggcacattttccagaagccacgtgataggggctggttt

SEQ ID NO: 540001 - DNA, 120 bp, Artificial Sequence
  ENSG00000167183_8 (sequence is synthesized)
ctgtggagccagaggcagagacactgaacttgagctcacctcctaacaccggcagtaaacttcctggaactttgccctcaggtgcggaggggacagaggaccctggcactctgttagggt

SEQ ID NO: 540002 - DNA, 120 bp, Artificial Sequence
  ENSG00000167183_9 (sequence is synthesized)
gctgtagaagactagattgatggtagtttggcctgttagttcctgttttggccatgacttttgcagatggcaagtcacacaccctcaaagggaagctacacgggccaaatcgggggagtg

SEQ ID NO: 540003 - DNA, 120 bp, Artificial Sequence
  ENSG00000167183_10 (sequence is synthesized)
ggtggggaattttctcctctccctttcctactataatagtatttaagacatatcagctccagagatgagtcctggagccttgaattttgtttaacaaaataattgtaggtttctctctgt

SEQ ID NO: 540004 - DNA, 120 bp, Artificial Sequence
  ENSG00000167183_11 (sequence is synthesized)
aataacaacgctggaaaggcagagaacctcttttatgctcatgtcttgcatttattgagatgactgtttctcatgcctttatgttccttcatgtaagtaaagtggacctttgtgctcaaa

SEQ ID NO: 540005 - DNA, 120 bp, Artificial Sequence
  ENSG00000167186_0 (sequence is synthesized)
actattggccagttccgttcaacgaagtggttgctttttttagttccggcaatgagttgcgccggggcggcggcggctccccgcctttggcggctgcgcccgggggcccggcggtccctc

SEQ ID NO: 540006 - DNA, 120 bp, Artificial Sequence
  ENSG00000167186_1 (sequence is synthesized)
tcagcttatggaagaagaaccagtgtcagatttcgcagttcaggaatgactttagacaatatcagtcgggcagctgtggatcgaataatccgggtggatcatgcaggcgaatatggagca

SEQ ID NO: 540007 - DNA, 120 bp, Artificial Sequence
  ENSG00000167186_2 (sequence is synthesized)
aaccgcatctatgccgggcagatggctgtcctgggtcggaccagcgtcgggccagtcattcagaaaatgtgggatcaagaaaaggaccatttgaaaaagttcaatgagttgatggttacg

SEQ ID NO: 540008 - DNA, 120 bp, Artificial Sequence
  ENSG00000167186_3 (sequence is synthesized)
ttcagggtccggccaacagttctgatgcccttgtggaacgtgctggggtttgcactgggggcggggaccgccttgctcgggaaggaaggtgccatggcctgcaccgtggcggtggaagag

SEQ ID NO: 540009 - DNA, 120 bp, Artificial Sequence
  ENSG00000167186_4 (sequence is synthesized)
agcatagcacatcactacaacaaccagatcaggacgctgatggaggaggaccctgaaaaatacgaggaacttcttcagctgataaagaaatttcgggatgaagagcttgagcaccatgac

SEQ ID NO: 540010 - DNA, 120 bp, Artificial Sequence
  ENSG00000167186_5 (sequence is synthesized)
ataggcctcgaccatgatgcagaattggctccagcctatgccgtcctgaagagcattatccaggccggatgcagagtggcgatatatttatcagaaagattataaagtgtgtccagtttt

SEQ ID NO: 540011 - DNA, 120 bp, Artificial Sequence
  ENSG00000167186_6 (sequence is synthesized)
gcctgtctataaaagatgatagtaatttaccaagtgacatttgcagagaaacaggtgtacagttatcgttgtacttttgtacaatgtgaattttgttaataaattataaggtttgttttt

SEQ ID NO: 540012 - DNA, 120 bp, Artificial Sequence
  ENSG00000167186_7 (sequence is synthesized)
ttttttttaaactctgcagtgttgatttttctctgggttgttttttctgccatgagaccaacaggtcaccagccttgttcaagttacagcaaacgaagctgggccttgtttggtctcata

SEQ ID NO: 540013 - DNA, 120 bp, Artificial Sequence
  ENSG00000167186_8 (sequence is synthesized)
cttaattttcttttatatacatgtttttcttttacatgcatatatatatattttattttattttatgttttttggagacagggcctcgctcttttgtccaggccgggtcacaactcactg

SEQ ID NO: 540014 - DNA, 80 bp, Artificial Sequence
  ENSG00000167186_9 (sequence is synthesized)
gctggctaattctatttttttatagaggcgaagtctcactatgtcgccaggctggtctctaactcctgggctcagtgatc

SEQ ID NO: 540015 - DNA, 87 bp, Artificial Sequence
  ENSG00000167186_10 (sequence is synthesized)
gctggctaattctatttttttatagaggcgaagtctcactatgtcgccaggctggtctctaactcctgggctcagtgatcctcccgt

SEQ ID NO: 540016 - DNA, 120 bp, Artificial Sequence
  ENSG00000167186_11 (sequence is synthesized)
caaatcattaataatgtaacaggaatctttaggagaaaaaacaatttggtttactgataacaaaagataattggaaacatgagagtatttgagattggccaagcagaactatgaagtcca

SEQ ID NO: 540017 - DNA, 120 bp, Artificial Sequence
  ENSG00000167186_12 (sequence is synthesized)
tcaagtaagtcaaagatcatcgtttctgttttgaattgtgggtgataatgggtgggagagtgctacagtctgtatgtctgtgtctccctagaattcatacgatgaaatcttcactctcaa

SEQ ID NO: 540018 - DNA, 120 bp, Artificial Sequence
  ENSG00000167186_13 (sequence is synthesized)
gttgatagaaggtggggcccttgggaagtgtgaggtcatgagagtggagccctcatgaatgggatcagtgccttatgaaaggccctagagagatacctcatcctctccacagtgtgagac

SEQ ID NO: 540019 - DNA, 120 bp, Artificial Sequence
  ENSG00000167186_14 (sequence is synthesized)
ttcaaggggaagtatgagacttctctgaggaagcagacccttcacaagcaaaatcagccagcactttgatcacggacttcccagcctctaggactgtgagcaataaatgtttgatgttta

SEQ ID NO: 540020 - DNA, 120 bp, Artificial Sequence
  ENSG00000167186_15 (sequence is synthesized)
taagccacccagactgtggtattttgttatagcagcctgaacagactaagacgggggtgttgcttccatcaaaggatgtactaagttgtggattatttgtgaaattgaattacaaccttt

SEQ ID NO: 540021 - DNA, 120 bp, Artificial Sequence
  ENSG00000167186_16 (sequence is synthesized)
tccttaaggtcttttaccacctcccccccaaaaaaatcccccaaaactgattcagattttcatactttaatgaaatattttataatttgcaaatttttaagtaatttatgaaaaacctag

SEQ ID NO: 540022 - DNA, 120 bp, Artificial Sequence
  ENSG00000167186_17 (sequence is synthesized)
atcagtggatctcctctctggctgcccattagaatgtcctgtggagattaaacttttttttttcagtttatggaccaagagttttgatttatttagggtggagttcaggatcagaatggt

SEQ ID NO: 540023 - DNA, 120 bp, Artificial Sequence
  ENSG00000167186_18 (sequence is synthesized)
ttcagaagctcccaggtgattccggagtgagttggagctgcaagcccctgagctagattataagatgcttctgggaaagaaccacattttaggaatttgcttcccacccagtgccctgca

SEQ ID NO: 540024 - DNA, 120 bp, Artificial Sequence
  ENSG00000167186_19 (sequence is synthesized)
tttaatcagcacctgatgacttggcaggacttgccccaccagggtctggctttgaagggtagtggacaccaggatcctttggattaatcctctgccacctctctcttttcctcaaccgag

SEQ ID NO: 540025 - DNA, 120 bp, Artificial Sequence
  ENSG00000167186_20 (sequence is synthesized)
agtgaatttatgtaattgagtgaaagtctacgaatcataattgtaataaattaaggctgggcatttgtttgaaattagataggataaagccaaaggtttgaacaagttgtggatggtttg

SEQ ID NO: 540026 - DNA, 120 bp, Artificial Sequence
  ENSG00000167186_21 (sequence is synthesized)
taaaaattaatcttacaaaataaatgctgtgtgtgaacacgttgattaaattcaaaagggtattatttggtttttctgtaaattgaaccttgaaataaaagcacaacaaggttttcttaa

SEQ ID NO: 540027 - DNA, 120 bp, Artificial Sequence
  ENSG00000167186_22 (sequence is synthesized)
gtttgcactgggtacgtgtctctctagaagagcttatgcaagcttggggatctaggatgattaaatccttcaggggcggggaccgccttgctcgggaaggaaggtgccatggcctgcacc

SEQ ID NO: 540028 - DNA, 120 bp, Artificial Sequence
  ENSG00000167186_23 (sequence is synthesized)
gtgcagtgatgtcacggcaggtgcggccagcgttccgagtcgaggacagttggcgacactgaaaattcagcgtctccgggagtctctctctttgtagtctttgcccagggccttgccagg

SEQ ID NO: 540029 - DNA, 120 bp, Artificial Sequence
  ENSG00000167186_24 (sequence is synthesized)
caaagggtagcccgacgaccagcagcctccgctacttctgggcgctcgctagaaatacagattctcgggccccaccccgacctacttggtcggtatctgtgatctgtgaacaggaccttt

SEQ ID NO: 540030 - DNA, 120 bp, Artificial Sequence
  ENSG00000167186_25 (sequence is synthesized)
aggtgatttgcatgcactgtaaactgtgaaagccatcagtgtagtggaaggagcatcgaatttagagtagagagacatggttttggaccctggttcctgctttccttgtttcatctgtgc

SEQ ID NO: 540031 - DNA, 87 bp, Artificial Sequence
  ENSG00000167186_26 (sequence is synthesized)
ttttggaccctggttcctgctttccttgtttcatctgtgctgccttagaaaattgtcatgagcccgggcgcggtggctccgtggagg

SEQ ID NO: 540032 - DNA, 120 bp, Artificial Sequence
  ENSG00000167186_27 (sequence is synthesized)
ttgctttgaggcgagattgcaccactgcactgcaacctgggcgtcagagcgagactttgtctcccccgcgcaaaaaaaaaaaaaaaaaagaaatttcatgaagtcgttttctcaacgtta

SEQ ID NO: 540033 - DNA, 120 bp, Artificial Sequence
  ENSG00000167186_28 (sequence is synthesized)
aattaccgtgtaccactttcgggatttttgcctaatggcagtactgcttgaacttttgattactagatgtgtttttttgtatagctatgtcccatttaaaaattaaattaatttccttga

SEQ ID NO: 540034 - DNA, 120 bp, Artificial Sequence
  ENSG00000167186_29 (sequence is synthesized)
gttgctttttttagttccggcaatgagttgcgccggggcggcggcggctccccgcctttggcggctgcgcccgggggcccggcggtccctctcaggttaaacagagtccgtttatgggca

SEQ ID NO: 540035 - DNA, 120 bp, Artificial Sequence
  ENSG00000167186_30 (sequence is synthesized)
acttcaagtaatgaatcatgggaggtcaagcgttccctagggagatgccattgtctccaggagagcgaaggttggttcttggtggagatggggagcaaaaagcatattgttctttttatg

SEQ ID NO: 540036 - DNA, 120 bp, Artificial Sequence
  ENSG00000167186_31 (sequence is synthesized)
gataaagcacagagagacatctagtacatagacaggtatgcggtatatctttggtatcagtactccatggcgggggcaggcagtaatgaaaaaaggttaagaatcgctcagcacagcagt

SEQ ID NO: 540037 - DNA, 120 bp, Artificial Sequence
  ENSG00000167191_0 (sequence is synthesized)
cagtgaagctggacccgcaggcgggcgtgcgtggagcgggggccgcggccgcgccgcagagatgtgactcgggccgaaggccagctggagcgtcggcgctgcggggccgcgggggtcgaa

SEQ ID NO: 540038 - DNA, 120 bp, Artificial Sequence
  ENSG00000167191_1 (sequence is synthesized)
cgaatgttcgtggcatcagagagaaagatgagagctcaccaggtgctcaccttcctcctgctcttcgtgatcacctcggtggcctctgaaaacgccagcacatcccgaggctgtgggctg

SEQ ID NO: 540039 - DNA, 120 bp, Artificial Sequence
  ENSG00000167191_2 (sequence is synthesized)
gacctcctccctcagtacgtgtccctgtgcgacctggacgccatctggggcattgtggtggaggcggtggccggggcgggcgccctgatcacactgctcctgatgctcatcctcctggtg

SEQ ID NO: 540040 - DNA, 120 bp, Artificial Sequence
  ENSG00000167191_3 (sequence is synthesized)
cggctgcccttcatcaaggagaaggagaagaagagccctgtgggcctccactttctgttcctcctggggaccctgggcctctttgggctgacgtttgccttcatcatccaggaggacgag

SEQ ID NO: 540041 - DNA, 120 bp, Artificial Sequence
  ENSG00000167191_4 (sequence is synthesized)
accatctgctctgtccgccgcttcctctggggcgtcctctttgcgctctgcttctcctgcctgctgagccaggcatggcgcgtgcggaggctggtgcggcatggcacgggccccgcgggc

SEQ ID NO: 540042 - DNA, 120 bp, Artificial Sequence
  ENSG00000167191_5 (sequence is synthesized)
tggcagctggtgggcctggcgctgtgcctgatgctggtgcaagtcatcatcgctgtggagtggctggtgctcaccgtgctgcgtgacacaaggccagcctgcgcctacgagcccatggac

SEQ ID NO: 540043 - DNA, 120 bp, Artificial Sequence
  ENSG00000167191_6 (sequence is synthesized)
tttgtgatggccctcatctacgacatggtactgcttgtggtcaccctggggctggccctcttcactctgtgcggcaagttcaagaggtggaagctgaacggggccttcctcctcatcaca

SEQ ID NO: 540044 - DNA, 120 bp, Artificial Sequence
  ENSG00000167191_7 (sequence is synthesized)
gccttcctctctgtgctcatctgggtggcctggatgaccatgtacctcttcggcaatgtcaagctgcagcagggggatgcctggaacgaccccaccttggccatcacgctggcggccagc

SEQ ID NO: 540045 - DNA, 120 bp, Artificial Sequence
  ENSG00000167191_8 (sequence is synthesized)
ggctgggtcttcgtcatcttccacgccatccctgagatccactgcacccttctgccagccctgcaggagaacacgcccaactacttcgacacgtcgcagcccaggatgcgggagacggcc

SEQ ID NO: 540046 - DNA, 120 bp, Artificial Sequence
  ENSG00000167191_9 (sequence is synthesized)
ttcgaggaggacgtgcagctgccgcgggcctatatggagaacaaggccttctccatggatgaacacaatgcagctctccgaacagcaggatttcccaacggcagcttgggaaaaagaccc

SEQ ID NO: 540047 - DNA, 120 bp, Artificial Sequence
  ENSG00000167191_10 (sequence is synthesized)
agtggcagcttggggaaaagacccagcgctccgtttagaagcaacgtgtatcagccaactgagatggccgtcgtgctcaacggtgggaccatcccaactgctccgccaagtcacacagga

SEQ ID NO: 540048 - DNA, 120 bp, Artificial Sequence
  ENSG00000167191_11 (sequence is synthesized)
agacacctttggtgaaagactttaagttccagagaatcagaatttctcttaccgatttgcctccctggctgtgtctttcttgagggagaaatcggtaacagttgccgaaccaggccgcct

SEQ ID NO: 540049 - DNA, 120 bp, Artificial Sequence
  ENSG00000167191_12 (sequence is synthesized)
cacagccaggaaatttggaaatcctagccaaggggatttcgtgtaaatgtgaacactgacgaactgaaaagctaacaccgactgcccgcccctcccctgccacacacacagacacgtaat

SEQ ID NO: 540050 - DNA, 120 bp, Artificial Sequence
  ENSG00000167191_13 (sequence is synthesized)
accagaccaacctcaatccccgcaaactaaagcaaagctaattgcaaatagtattaggctcactggaaaatgtggctgggaagactgtttcatcctctgggggtagaacagaaccaaatt

SEQ ID NO: 540051 - DNA, 120 bp, Artificial Sequence
  ENSG00000167191_14 (sequence is synthesized)
cacagctggtgggccagactggtgttggttggaggtggggggctcccactcttatcacctctccccagcaagtgctggaccccaggtagcctcttggagatgaccgttgcgttgaggaca

SEQ ID NO: 540052 - DNA, 120 bp, Artificial Sequence
  ENSG00000167191_15 (sequence is synthesized)
aatggggactttgccaccggcttgcctggtggtttgcacatttcaggggggtcaggagagttaaggaggttgtgggtgggattccaaggtgaggcccaactgaatcgtggggtgagcttt

SEQ ID NO: 540053 - DNA, 120 bp, Artificial Sequence
  ENSG00000167191_16 (sequence is synthesized)
atagccagtagaggtggagggaccctggcatgtgccaaagaagaggccctctgggtgatgaagtgaccatcacatttggaaagtgatcaaccactgttccttctatggggctcttgctct

SEQ ID NO: 540054 - DNA, 120 bp, Artificial Sequence
  ENSG00000167191_17 (sequence is synthesized)
agtgtctatggtgagaacacaggccccgccccttcccttgtagagccatagaaatattctggcttggggcagcagtcccttcttcccttgatcatctcgccctgttcctacacttacggg

SEQ ID NO: 540055 - DNA, 120 bp, Artificial Sequence
  ENSG00000167191_18 (sequence is synthesized)
tgtatctccaaatcctctcccaattttattcccttattcatttcaagagctccaatggggtctccagctgaaagcccctccgggaggcaggttggaaggcaggcaccacggcaggttttc

SEQ ID NO: 540056 - DNA, 120 bp, Artificial Sequence
  ENSG00000167191_19 (sequence is synthesized)
cgcgatgatgtcacctagcagggcttcaggggttcccactaggatgcagagatgacctctcgctgcctcacaagcagtgacacctcgggtcctttccgttgctatggtgaaaattcctgg

SEQ ID NO: 540057 - DNA, 120 bp, Artificial Sequence
  ENSG00000167191_20 (sequence is synthesized)
atggaatggatcacatgagggtttcttgttgcttttggagggtgtgggggatattttgttttggtttttctgcaggttccatgaaaacagcccttttccaagcccattgtttctgtcatg

SEQ ID NO: 540058 - DNA, 120 bp, Artificial Sequence
  ENSG00000167191_21 (sequence is synthesized)
tctagcatcgattcaaagcagagttttaacctgacggcatggaatgtataaatgagggtgggtccttctgcagatactctaatcactacattgctttttctataaaactacccataagcc

SEQ ID NO: 540059 - DNA, 120 bp, Artificial Sequence
  ENSG00000167191_22 (sequence is synthesized)
tttaacctttaaagaaaaatgaaaaaggttagtgtttgggggccgggggaggactgaccgcttcataagccagtacgtctgagctgagtatgtttcaataaaccttttgatatttctcaa

SEQ ID NO: 540060 - DNA, 120 bp, Artificial Sequence
  ENSG00000167191_23 (sequence is synthesized)
ggccctagtctctgctgtctcccctccccaccccatccttgcaaagcactggggaaagtaaggccaatctggccctccctgtgtgacccgccttcgagttttccttaacagttagtacat

SEQ ID NO: 540061 - DNA, 120 bp, Artificial Sequence
  ENSG00000167191_24 (sequence is synthesized)
ttccttgtgttaccacgcatggggaagaaaacgcatggccccagaatgccacccccacctgacctccccggaagcaccccgcctctgcccagagcatgtgcttgcttctagagaatcccg

SEQ ID NO: 540062 - DNA, 120 bp, Artificial Sequence
  ENSG00000167191_25 (sequence is synthesized)
ttccagtcattgcgtggacagaaaacgtaagagtcctggggaggggtgggagggaatgaagctaggacctggggtgggggtgggggcggttgcatgcggacccggtattctgaaaagaaa

SEQ ID NO: 540063 - DNA, 120 bp, Artificial Sequence
  ENSG00000167191_26 (sequence is synthesized)
gaaatcttcaaacacctcggtcctgtccggtgaaaaaacgacagcattacacattctcgtgccaggaaatggttactcacccccgctctctggagtcctttggagctttctgataccatt

SEQ ID NO: 540064 - DNA, 120 bp, Artificial Sequence
  ENSG00000167191_27 (sequence is synthesized)
cacacgatggagcaattcacacgttcgttttctaagttctttattgtccaagcatataaggtgagcacagcacaaatggctgccatggaaagtcgtgcttccccagcataagaacagagc

SEQ ID NO: 540065 - DNA, 120 bp, Artificial Sequence
  ENSG00000167191_28 (sequence is synthesized)
catctttgagccatgggaagcctcatttaatgagacctttttccccccttttaaatctgatatgttatcgcacttagggttttgttttattttggcttttaaggttgagagtgggctgaa

SEQ ID NO: 540066 - DNA, 120 bp, Artificial Sequence
  ENSG00000167191_29 (sequence is synthesized)
cgccttcataatgggggcggaggcgggagtgagaggagaagggagagagctgttctttttctaatgactacacctgaaaagtatcaagagacatctttgccaagagactgtagcagccag

SEQ ID NO: 540067 - DNA, 120 bp, Artificial Sequence
  ENSG00000167191_30 (sequence is synthesized)
ctgccccccgtggagcaaggtttaaagacaaaattaaatggcacctctgtttaagatctgcgtgtgtaaacaagactcgtttggggaaaacgacccgggaggagagcatctgtgatcaaa

SEQ ID NO: 540068 - DNA, 120 bp, Artificial Sequence
  ENSG00000167191_31 (sequence is synthesized)
atctctcattgtaagcacaaattgttccgtgtctggttattaaaatcgctttgggtctataacagccactcttgtccccccttttaatagaaaattgtcattctagcctggatttctccc

SEQ ID NO: 540069 - DNA, 120 bp, Artificial Sequence
  ENSG00000167191_32 (sequence is synthesized)
cactggaggtggagggtgggaagagaagggagtcagctctgacagcttacaaactgggaagttctgtgcatctccagggattccagagttgaagatctggttgttggaagctgggcgccc

SEQ ID NO: 540070 - DNA, 120 bp, Artificial Sequence
  ENSG00000167191_33 (sequence is synthesized)
agtgcttttttttttttttttttttagcccagatgccgtcaggacccactgaacaagggtgaactcgggtggtggtctcggttggccaaggctgagttgaacgcctcaggccaaacccca

SEQ ID NO: 540071 - DNA, 120 bp, Artificial Sequence
  ENSG00000167191_34 (sequence is synthesized)
agttgaaagggagcattgtggcttttataatccaatgatgcaatgatgataccagcttacaggagttctcagcaggtgctttttattaactgatgaagagctaaggctcacttttgatag

SEQ ID NO: 540072 - DNA, 120 bp, Artificial Sequence
  ENSG00000167191_35 (sequence is synthesized)
ataatatatatttattaaatgcattaatgtgtgttttataatgtacctttatcttcccccggctgactgttgcatacttataaaaaagaagttaaagaaatttcaagacaatcaatatgt

SEQ ID NO: 540073 - DNA, 120 bp, Artificial Sequence
  ENSG00000167191_36 (sequence is synthesized)
accataaacgactatataaatattacaaatttaaaaggctgtaaaccatgggcagataggttttattttcaaaatgctgttcttaacacaaaaataaaggctttactatttacttaagac

SEQ ID NO: 540074 - DNA, 120 bp, Artificial Sequence
  ENSG00000167191_37 (sequence is synthesized)
gtgtggtagcttgtcaaaacaacccagtgcaactaactactaggctttcggatctgccttgagggtcggtctgtggcattttaaatgggagaatcttggttaacagcaaaccacagaaca

SEQ ID NO: 540075 - DNA, 120 bp, Artificial Sequence
  ENSG00000167191_38 (sequence is synthesized)
tattaaggtaataagtttacccataaaagcaggaactttctatataatactttgggacttagacaacaaaaatcctttgttacatctgtctgggtttaagtgtctcatcttgttgggttt

SEQ ID NO: 540076 - DNA, 120 bp, Artificial Sequence
  ENSG00000167191_39 (sequence is synthesized)
gcagtaaaagttaaggagtggtctcctttggaaatgatcattaagtataaggtcttttttataaagagagtagtcagtcactaggtaaacttaaaaccaaattcagaggttggggactta

SEQ ID NO: 540077 - DNA, 120 bp, Artificial Sequence
  ENSG00000167191_40 (sequence is synthesized)
aattagaatatggatctttgcaaaggcggccacaagtgggaaaactggtaataagagcacttctgtattccttgggactagagttcattgtacattttaacagcagctggtgtagaagaa

SEQ ID NO: 540078 - DNA, 120 bp, Artificial Sequence
  ENSG00000167191_41 (sequence is synthesized)
tactcctgaggcactgaagaagtaatctggatgaatgaataaaatgtggggataatgcagaaagtgaagactggtcctttcttttctaaactatttgcattaaagcttgtttgcaatgaa

SEQ ID NO: 540079 - DNA, 120 bp, Artificial Sequence
  ENSG00000167191_42 (sequence is synthesized)
atctggaagggccacggtccccaaagatcaggggctgccactattcccagaaggaggtgttctgcatctccccttcctgcagcccccgggagaggggagcaggggtccgtcctatccctt

SEQ ID NO: 540080 - DNA, 120 bp, Artificial Sequence
  ENSG00000167191_43 (sequence is synthesized)
ttggtcttatgtggctgggatggttgcggcgacgggggtagagattggggggcgcaccgcggagggagaaaggaaatctcaccctgagaatctggagtgcagggaagggatgctgctcaa

SEQ ID NO: 540081 - DNA, 120 bp, Artificial Sequence
  ENSG00000167191_44 (sequence is synthesized)
aagcaggtcccacggccgcccagcggacacgcgtccgggctgtgccctgaccgtctgcggagcgcacggccagtggcccgggccgctgagtgtgtgagccctgaagggcagtggacatgt

SEQ ID NO: 540082 - DNA, 120 bp, Artificial Sequence
  ENSG00000167191_45 (sequence is synthesized)
gcgtacgtgggtgatgtgtgcggtaggggtggtggcgatcctgcgtagggacccacgtgaggggtgcaccgactggacgtgtgtgtttcgaggggccaaggaagcgggtgttggtcccag

SEQ ID NO: 540083 - DNA, 120 bp, Artificial Sequence
  ENSG00000167191_46 (sequence is synthesized)
tgtgcgtaaacggacaacgacatctgggagttgggcagtgaggagagagaagagtgtgtccaggaggaacctgcctggaggaggcctagcggtgtgtgtgcgcctaggtgtataccgggg

SEQ ID NO: 540084 - DNA, 120 bp, Artificial Sequence
  ENSG00000167191_47 (sequence is synthesized)
cgttggtgacttcgagaggcaccgggcgggatcgatcctctctgcgtcctggacctggtgctggtgtgtttcggggaagttactgcttatgaaccccccttggagcgtggcctgggggca

SEQ ID NO: 540085 - DNA, 120 bp, Artificial Sequence
  ENSG00000167191_48 (sequence is synthesized)
actgtggatcgggcagccaaggatgcaatttgcatttcaatgattgcttttatttacaggactggagctgctttgcatattcatggatcacagagcttgtgttcttgcaaccctgtttac

SEQ ID NO: 540086 - DNA, 120 bp, Artificial Sequence
  ENSG00000167191_49 (sequence is synthesized)
agcagttttgagtagtgtgatgctgaactttacatgaatggctttctgtagtgagaaggcgcctgtcacccgcggcctgcagaggctgcgtggcttggagggggaaccagaggcccaacc

SEQ ID NO: 540087 - DNA, 120 bp, Artificial Sequence
  ENSG00000167191_50 (sequence is synthesized)
atgggcctccttcccctggtctctacagcagcttttcccaaacccactgagatgggtcaggctcctagagagcctgagaacaaagcccctttgtgacttttgttttgaatcaggcttgtg

SEQ ID NO: 540088 - DNA, 120 bp, Artificial Sequence
  ENSG00000167191_51 (sequence is synthesized)
acaaaggggaggagccactgggttgggtggatgggggtgcccggagcgcgctgttgttgcaggggaagaaaacaaaattgtgtcttttttttggcaatgttgtcttgccaatccctccct

SEQ ID NO: 540089 - DNA, 120 bp, Artificial Sequence
  ENSG00000167191_52 (sequence is synthesized)
aacctatgaggattttttaatttgagagccctcaaatgggccagtggtctagtcagcattgggaaatgaagatgatgagatcctgtaactcggaaaagatatcagaggtgcctaccgcca

SEQ ID NO: 540090 - DNA, 120 bp, Artificial Sequence
  ENSG00000167193_0 (sequence is synthesized)
gtccgctgggcggcgggcgccgggggccggaggggcgcgcgcggcggcggcaccccagcgtttaggcgcggaggcagccatggcgggcaacttcgactcggaggagcggagtagctggta

SEQ ID NO: 540091 - DNA, 120 bp, Artificial Sequence
  ENSG00000167193_1 (sequence is synthesized)
gggcaacttcgactcggaggagcggagtagctggtactgggggaggttgagtcggcaggaggcggtggcgctgctgcagggccagcggcacggggtgttcctggtgcgggactcgagcac

SEQ ID NO: 540092 - DNA, 120 bp, Artificial Sequence
  ENSG00000167193_2 (sequence is synthesized)
cagccccggggactatgtgctcagcgtctcagagaactcgcgcgtctcccactacatcatcaacagcagcggcccgcgcccgccggtgccaccgtcgcccgcccagcctccgcccggggt

SEQ ID NO: 540093 - DNA, 120 bp, Artificial Sequence
  ENSG00000167193_3 (sequence is synthesized)
gagcccctccagactccgaataggagatcaagagtttgattcattgcctgctttactggaattctacaaaatacactatttggacactacaacgttgatagaaccagtttccagatccag

SEQ ID NO: 540094 - DNA, 120 bp, Artificial Sequence
  ENSG00000167193_4 (sequence is synthesized)
gcagggtagtggagtgattctcaggcaggaggaggcggagtatgtgcgagccctctttgactttaatgggaatgatgaggaagatcttccctttaagaaaggagacatcttgagaatccg

SEQ ID NO: 540095 - DNA, 120 bp, Artificial Sequence
  ENSG00000167193_5 (sequence is synthesized)
ggacaagcctgaagagcagtggtggaatgcggaggacagcgaaggcaagagagggatgattccagtcccttacgtcgagaagtatagacctgcctccgcctcagtatcggctctgattgg

SEQ ID NO: 540096 - DNA, 120 bp, Artificial Sequence
  ENSG00000167193_6 (sequence is synthesized)
aggtaaccaggagggttcccacccacagccactgggtgggccggagcctgggccctatgcccaacccagcgtcaacactccgctccctaacctccagaatgggcccatatatgccagggt

SEQ ID NO: 540097 - DNA, 120 bp, Artificial Sequence
  ENSG00000167193_7 (sequence is synthesized)
tatccagaagcgagtccccaatgcctacgacaagacagccttggctttggaggtcggtgagctggtaaaggttacgaagattaatgtgagtggtcagtgggaaggggagtgtaatggcaa

SEQ ID NO: 540098 - DNA, 120 bp, Artificial Sequence
  ENSG00000167193_8 (sequence is synthesized)
acgaggtcacttcccattcacacatgtccgtctgctggatcaacagaatcccgatgaggacttcagctgagtatagttcaacagttttgctgacagatgggaacaatctttttttttttt

SEQ ID NO: 540099 - DNA, 120 bp, Artificial Sequence
  ENSG00000167193_9 (sequence is synthesized)
ttccaactgccatctatacaattttcttacagatgtcaaaagcagtctagtttatataagcattctgttacctgtgatattttttagactgaactgctccattcctagtcttaattacca

SEQ ID NO: 540100 - DNA, 120 bp, Artificial Sequence
  ENSG00000167193_10 (sequence is synthesized)
tattcagggtacgaactggagggcttgtgtgttagcttctgaattggcaattggaggcggtagtggtcgtgcctgtgtgtatcagaagggataggtatcttgcctcctttctctcaggca

SEQ ID NO: 540101 - DNA, 120 bp, Artificial Sequence
  ENSG00000167193_11 (sequence is synthesized)
gtgcaaatcaccctgtggaaaaccgatggacaggaaggagtgttacacactgcttaccctgatttattcagtggttttgttttcattctggaaccatactatcaaatggcgacagactgt

SEQ ID NO: 540102 - DNA, 120 bp, Artificial Sequence
  ENSG00000167193_12 (sequence is synthesized)
tccgttccacccccgtgaagtaatcatgcaccgtgtgaatagtatcaagcaggattgctttcattgtatggagcatgaccagcgtgtgactcattctgacatttcagatcctaagaattc

SEQ ID NO: 540103 - DNA, 120 bp, Artificial Sequence
  ENSG00000167193_13 (sequence is synthesized)
taagaacactactagaagcatttgttccctcctagtcaatgcttcatactttttcttgggattcttttagcccttgacattcttgtcccccaaacctgtaagtaggtgaattcctaagat

SEQ ID NO: 540104 - DNA, 120 bp, Artificial Sequence
  ENSG00000167193_14 (sequence is synthesized)
aagtgtgtattttcattccaggtgaaaagcaggatgtaccgagcactttattcagtgcatagctttaagccagtgttggattcactaagtggacagccagtctcccagctctctgccttc

SEQ ID NO: 540105 - DNA, 120 bp, Artificial Sequence
  ENSG00000167193_15 (sequence is synthesized)
cccaaaagggtcgtagtaggtcacccttctacagcagctaactagagtcctaactaatgggatccagcagggccatttctccagagggccagtatcctattaggagactcttggaattct

SEQ ID NO: 540106 - DNA, 120 bp, Artificial Sequence
  ENSG00000167193_16 (sequence is synthesized)
tcaagagtggaaggaccaatcacctctgatattctgtggaaggttttggggtcaaattctgccctctgcattctgtgcaacttgtataaaagtcaagttagtattacatgaatttggggt

SEQ ID NO: 540107 - DNA, 69 bp, Artificial Sequence
  ENSG00000167193_17 (sequence is synthesized)
cttgtataaaagtcaagttagtattacatgaatttggggtagggttagtgctttgaaaaaatgttgaac

SEQ ID NO: 540108 - DNA, 67 bp, Artificial Sequence
  ENSG00000167193_18 (sequence is synthesized)
cagcctgagcgacaggttgaaccaattgtgaattacttatgtattattcatttctcatggggagagt

SEQ ID NO: 540109 - DNA, 120 bp, Artificial Sequence
  ENSG00000167193_19 (sequence is synthesized)
gtgaattacttatgtattattcatttctcatggggagagtaatgctgttgaagaacattacattgtaaactgccttcatttttggctctttgtttatgttcaggtttagtttacaaaccc

SEQ ID NO: 540110 - DNA, 120 bp, Artificial Sequence
  ENSG00000167193_20 (sequence is synthesized)
atttaagtatggaatgatttatatggggtcaggtgctccacaaaatagacctatgagaccaaaaatgacctaggctatttagacgacagcatgaaacttccacgttagttctcagtctat

SEQ ID NO: 540111 - DNA, 120 bp, Artificial Sequence
  ENSG00000167193_21 (sequence is synthesized)
aaaggcacttaccggtctctggtgtggtatgaccaatagaaacaccttatagtttgctttggacctcattttggaaaaataatctgcctttctaattgttctgcataggttaaaatgata

SEQ ID NO: 540112 - DNA, 120 bp, Artificial Sequence
  ENSG00000167193_22 (sequence is synthesized)
aatttacattctttgaacctataccagattgtggtgtccgagtgaccggcacactgtctgacacacagtcagtgtgcacgtatttgtctgagtgaatgaggagacctgagaaaccggtga

SEQ ID NO: 540113 - DNA, 120 bp, Artificial Sequence
  ENSG00000167193_23 (sequence is synthesized)
cgtggcacagggaagccagctggcccaggattccgtacatggccgcaagcagactaacgcgttgacgctaatttaatgtattttacctcacactaaggtcatgcttgataaagacgttaa

SEQ ID NO: 540114 - DNA, 120 bp, Artificial Sequence
  ENSG00000167193_24 (sequence is synthesized)
actcaacttgtaaaatggtagcccagtgctatgcacagagtgggtgctcattagtgttgaatgaacacatttgtaatactacatgtaattccatctgactgctttgttaaattttcagtt

SEQ ID NO: 540115 - DNA, 120 bp, Artificial Sequence
  ENSG00000167193_25 (sequence is synthesized)
agaacgtagatactgtaaagtccacacacacattaaatcttgttttcctgaaagtatggcatcaaaaatacttgtagaaaaaccttgtcacaactgatttgaatgttcctattttctttt

SEQ ID NO: 540116 - DNA, 120 bp, Artificial Sequence
  ENSG00000167193_26 (sequence is synthesized)
cctttgactttgatattggcttgtaatgtctcttttcatcatatgtaatatcagtggaacaggcagcgctactcaagtcctaaggattcctcagtgatcagtgatccagggccgttcatg

SEQ ID NO: 540117 - DNA, 120 bp, Artificial Sequence
  ENSG00000167193_27 (sequence is synthesized)
aaccactgggctggatttgactgttgagtgtggcagttaatgcccctcaagaaatcaaaggatgtcttataagtgtcttccaaaaaaaagcaaatgctgaaatcctattggcaaagtaaa

SEQ ID NO: 540118 - DNA, 120 bp, Artificial Sequence
  ENSG00000167193_28 (sequence is synthesized)
ctgaaattggctgctatattttatataatcatttctgcaaatcccattttttgaatactaatatttgacatggttaattcttattaatttgttggaattgtttattgttaataatgcaaa

SEQ ID NO: 540119 - DNA, 120 bp, Artificial Sequence
  ENSG00000167193_29 (sequence is synthesized)
tagataatttttaattatccacaagtaacatttcactgttaatggtttgaaataggtgataagcaaaccaatttgaaataaaatataaacatgtgccattgtattataacactatacact

SEQ ID NO: 540120 - DNA, 120 bp, Artificial Sequence
  ENSG00000167193_30 (sequence is synthesized)
ttcttgacagttaaatttaaaaaaaaattttttttggtagcatgtattgtatatgtttatagtatatgtagtaaataaaaatatggccaaatgtttggcttggtgatcttttgcaaaaaa

SEQ ID NO: 540121 - DNA, 61 bp, Artificial Sequence
  ENSG00000167193_31 (sequence is synthesized)
ccggaggcgaaggttacagtgagccgagattatgccactgccctccagcctgggcgacaga

SEQ ID NO: 540122 - DNA, 120 bp, Artificial Sequence
  ENSG00000167194_0 (sequence is synthesized)
aggagtcatgaggctgtggccatgggtgctggtgtgggtgtggctggctgcactaggggccatagaaactgggtcccaagtcagcttccgcctcgagagataaaggcaggggtcagcttg

SEQ ID NO: 540123 - DNA, 120 bp, Artificial Sequence
  ENSG00000167194_1 (sequence is synthesized)
gctgttgtcacagagtttgcttgggtcctagcacccagacccaagcgtgccacggcgtcagccctggggacagagtctccgcgcttcttagacagacctgacttcttcgattatccggac

SEQ ID NO: 540124 - DNA, 120 bp, Artificial Sequence
  ENSG00000167194_2 (sequence is synthesized)
tcagaccaagccaggctgctggctgtggcccagtttattggagagaaacccatcgtgttcattaactcaggttccagccccgggctcttccatcacatcctggtgggcttgctggtggtg

SEQ ID NO: 540125 - DNA, 120 bp, Artificial Sequence
  ENSG00000167194_3 (sequence is synthesized)
cctaaagagccggacaagggctctggactcaacctgagcacccacacccacctcctctcctgttgatgagcaaaagttccctgctttcctcctccctgactgcccagcgagcagctgggg

SEQ ID NO: 540126 - DNA, 120 bp, Artificial Sequence
  ENSG00000167194_4 (sequence is synthesized)
atcctgtcccctctgtttcccatggcccaagccccccacctcctcccttcccagccccaaagaacttggtggcaagggccttggtggcgttcacgcagatcgtcttttattagcggtctg

SEQ ID NO: 540127 - DNA, 120 bp, Artificial Sequence
  ENSG00000167194_5 (sequence is synthesized)
taaagcacctcccagggtcccccgaccccagattggaggaagccttgagaggtcagtagcaccagggacatggcagggcccgagggcgcgatgtgcagccgatggtgagggactgggcgc

SEQ ID NO: 540128 - DNA, 120 bp, Artificial Sequence
  ENSG00000167194_6 (sequence is synthesized)
cctcgcctgcccccggggttgtcagcactgggaaggcttgggggtagcagccacctccttcccccaacccaacagactagttcaaatttgggtaaataaataaaataaataagattcctc

SEQ ID NO: 540129 - DNA, 120 bp, Artificial Sequence
  ENSG00000167194_7 (sequence is synthesized)
catcgtgttcattaactcagggacagccaagcgttaaggggaaaatgcagagcaaaaggagccaaggacaaagaaagttccatgtacttggagagtaaacaaaaacgagaaatggatgaa

SEQ ID NO: 540130 - DNA, 120 bp, Artificial Sequence
  ENSG00000167194_8 (sequence is synthesized)
ctccttttccagttctgcacccacattatagtcgggggaaaagaaaagaccagaagatgcccacagaccaaaaggcacagatacagtgccaaaataagcccaggacaggcagccaagcgt

SEQ ID NO: 540131 - DNA, 120 bp, Artificial Sequence
  ENSG00000167194_9 (sequence is synthesized)
taaggggaaaatgcagagcaaaaggagccaaggacaaagaaagttccatgtacttggagagtaaacaaaaacgagaaatggatgaatagacaagacagcatttttcttctggagtcagca

SEQ ID NO: 540132 - DNA, 120 bp, Artificial Sequence
  ENSG00000167195_0 (sequence is synthesized)
atgtggccccaaccctacctccctccccaccccatgatgttagaagaatctcgacagaataaattggcagcagccaagaaaaagctaaaagaatatcagcaaaggaagagccctggtatt

SEQ ID NO: 540133 - DNA, 120 bp, Artificial Sequence
  ENSG00000167195_1 (sequence is synthesized)
ccagcaggagcaaagacaaaaaagaaaaaaactgacagtagccctgagacaaccacttccggtggtggccactcacctggggatagccagtaccaagaactagcagtagccctggagtca

SEQ ID NO: 540134 - DNA, 120 bp, Artificial Sequence
  ENSG00000167195_2 (sequence is synthesized)
ggatagccagtaccaagaactagcagtagccctggagtcaagctcagtgacaatcaatcagctcaatgaaaacatagaatcattgaaacagcagaagaaacaagtggaacatcagctgga

SEQ ID NO: 540135 - DNA, 120 bp, Artificial Sequence
  ENSG00000167195_3 (sequence is synthesized)
atggagcagttagagacaatcaacatcctcacattggaaaaggcagacttgaagaccaccctttaccatactaaacgtgctgcccgacacttcgaagaagagtccaaggatctggctggc

SEQ ID NO: 540136 - DNA, 120 bp, Artificial Sequence
  ENSG00000167195_4 (sequence is synthesized)
cgcctgcaatactccttacagcgtattcaagaattggagcgggctctctctgctgtgtctacacagcagcaggaagaggacaggtcctcgagctgcagagaagcggtcctccagcggcgg

SEQ ID NO: 540137 - DNA, 120 bp, Artificial Sequence
  ENSG00000167195_5 (sequence is synthesized)
ttacagcagaccataaaggagcgggcgctgctgaacgcacacgtgacacaggtgacagagtcactaaaacaagtccagctagagcgggacgaatatgctaaacacataaaaggagagagg

SEQ ID NO: 540138 - DNA, 120 bp, Artificial Sequence
  ENSG00000167195_6 (sequence is synthesized)
gcccggtggcaggagaggatgtggaaaatgtcggtggaggctcgaacattgaaggaagagaagaagcgtgacatacatcggatacaggagctggagaggagcttgtccgaactcaaaaac

SEQ ID NO: 540139 - DNA, 120 bp, Artificial Sequence
  ENSG00000167195_7 (sequence is synthesized)
cagatggctgagcccccatccctggcacccccagcagtgacctctgtggtggaacagctacaagatgaggccaaacacctgaggcaggaggtggaaggtctggagggaaagctccagtcc

SEQ ID NO: 540140 - DNA, 120 bp, Artificial Sequence; identical to SEQ ID NO: 360572
  ENSG00000167195_8 (sequence is synthesized)

SEQ ID NO: 540141 - DNA, 120 bp, Artificial Sequence; identical to SEQ ID NO: 360573
  ENSG00000167195_9 (sequence is synthesized)

SEQ ID NO: 540142 - DNA, 120 bp, Artificial Sequence; identical to SEQ ID NO: 360574
  ENSG00000167195_10 (sequence is synthesized)

SEQ ID NO: 540143 - DNA, 120 bp, Artificial Sequence; identical to SEQ ID NO: 360575
  ENSG00000167195_11 (sequence is synthesized)

SEQ ID NO: 540144 - DNA, 120 bp, Artificial Sequence; identical to SEQ ID NO: 360576
  ENSG00000167195_12 (sequence is synthesized)

SEQ ID NO: 540145 - DNA, 120 bp, Artificial Sequence; identical to SEQ ID NO: 360577
  ENSG00000167195_13 (sequence is synthesized)

SEQ ID NO: 540146 - DNA, 120 bp, Artificial Sequence; identical to SEQ ID NO: 360578
  ENSG00000167195_14 (sequence is synthesized)

SEQ ID NO: 540147 - DNA, 120 bp, Artificial Sequence
  ENSG00000167195_15 (sequence is synthesized)
ggcaaccatgaggggcatggcaaattcctcatcgctgcccagaaccctgctgatgagcccactccaggggccccagccccccaggaacttggggctgccggtgagcaggatgatttttat

SEQ ID NO: 540148 - DNA, 120 bp, Artificial Sequence
  ENSG00000167195_16 (sequence is synthesized)
gaagtgagcctggacaacaacgtggagcctgcaccaggagcggccagggagggttctccccatgacaaccccccggtacagcagatcgtgcagctgtctcctgtcatgcaggacacctag

SEQ ID NO: 540149 - DNA, 120 bp, Artificial Sequence
  ENSG00000167196_0 (sequence is synthesized)
agtgcgcgccggccgggcaaccctatgctggcgtaatcgggttcctccgagccgccgtaggactggttccggcgggctggtgaggaatggagccggtaggctgctgcggcgagtgccgcg

SEQ ID NO: 540150 - DNA, 120 bp, Artificial Sequence
  ENSG00000167196_1 (sequence is synthesized)
gctcctccgtagacccgcggagcaccttcgtgttgagtaacctggcggaggtggtggagcgtgtgctcaccttcctgcccgccaaggcgttgctgcgggtggcctgcgtgtgccgcttat

SEQ ID NO: 540151 - DNA, 120 bp, Artificial Sequence
  ENSG00000167196_2 (sequence is synthesized)
ggagggagtgtgtgcgcagagtattgcggacccatcggagcgtaacctggatctccgcaggcctggcggaggccggccacctggaggggcattgcttggttcgcgtggtagcagaggagc

SEQ ID NO: 540152 - DNA, 120 bp, Artificial Sequence
  ENSG00000167196_3 (sequence is synthesized)
ttgagaatgttcgcatcttaccacatacagttctttacatggctgattcagaaactttcattagtctggaagagtgtcgtggccataagagagcaaggaaaagaactagtatggaaacag

SEQ ID NO: 540153 - DNA, 120 bp, Artificial Sequence
  ENSG00000167196_4 (sequence is synthesized)
cacttgcccttgagaagctattccccaaacaatgccaagtccttgggattgtgaccccaggaattgtagtgactccaatgggatcaggtagcaatcgacctcaggaaatagaaattggag

SEQ ID NO: 540154 - DNA, 120 bp, Artificial Sequence
  ENSG00000167196_5 (sequence is synthesized)
aatctggttttgctttattattccctcaaattgaaggaataaaaatacaaccctttcattttattaaggatccaaagaatttaacattagaaagacatcaactcactgaagtaggtcttt

SEQ ID NO: 540155 - DNA, 120 bp, Artificial Sequence
  ENSG00000167196_6 (sequence is synthesized)
tagataaccctgaacttcgtgtggtccttgtctttggttataattgctgtaaggtgggagccagtaattatctgcagcaagtagtcagcactttcagtgatatgaatatcatcttggctg

SEQ ID NO: 540156 - DNA, 120 bp, Artificial Sequence
  ENSG00000167196_7 (sequence is synthesized)
gaggccaggtggacaacctgtcatcactgacttctgaaaagaaccctctggatattgatgcctcgggtgtggttggactgtcatttagtggacaccgaatccagagtgccactgtgctcc

SEQ ID NO: 540157 - DNA, 120 bp, Artificial Sequence
  ENSG00000167196_8 (sequence is synthesized)
tcaacgaggacgtcagtgatgagaagactgctgaggctgcgatgcagcgcctcaaagcggccaacattccagagcataacaccattggcttcatgtttgcatgcgttggcaggggctttc

SEQ ID NO: 540158 - DNA, 120 bp, Artificial Sequence
  ENSG00000167196_9 (sequence is synthesized)
agtattacagagccaaggggaatgttgaggctgatgcatttagaaagttttttcctagtgttcccttattcggcttctttggaaatggagaaattggatgtgatcggatagtcactggga

SEQ ID NO: 540159 - DNA, 120 bp, Artificial Sequence
  ENSG00000167196_10 (sequence is synthesized)
actttatattgaggaaatgtaatgaggtaaaagatgatgatctgtttcatagctatacaacaataatggcactcatacatctggggtcatctaaataataattaaagtggctttcataat

SEQ ID NO: 540160 - DNA, 120 bp, Artificial Sequence
  ENSG00000167196_11 (sequence is synthesized)
atgtaacttttgggttctgcctttttcagaaaatggaaacttgggccatgtgtatttcaaacaaaaataactttagatatatcttttttgtagctttgattgatgctctaagatcacatg

SEQ ID NO: 540161 - DNA, 120 bp, Artificial Sequence
  ENSG00000167196_12 (sequence is synthesized)
agggtagtatttaatatattagatgaaggacaactttggacataacactgactaggagttgagagcttttgcatcaggcagaagcaaactgattatagttgtgttgcaccagatcatgta

SEQ ID NO: 540162 - DNA, 120 bp, Artificial Sequence
  ENSG00000167196_13 (sequence is synthesized)
gctgctgtgtaacatgaccttaaatagtcttcctgcataggaagagcaaaagggtattcatcaataggatatagatttaagacattccctgactaccccttgcgttgttaggtgatgtct

SEQ ID NO: 540163 - DNA, 120 bp, Artificial Sequence
  ENSG00000167196_14 (sequence is synthesized)
tttagcagaatcatgaagaccttttttctcccttaataaaggagaaaaatatactgatggctggagaaatttttctctgcctttcagttttatgaattttttcagaagtaacaatattat

SEQ ID NO: 540164 - DNA, 120 bp, Artificial Sequence
  ENSG00000167196_15 (sequence is synthesized)
aaaattaaagaactatttttgttttggtcagataaattgacaagactaatcagtattttattataagtaaaagatttttcttctttccttaaaaatatttttttttcacctaggtctaaa

SEQ ID NO: 540165 - DNA, 120 bp, Artificial Sequence
  ENSG00000167196_16 (sequence is synthesized)
atttttttttcacctaggtctaaatagctaactaactggtagaccagagtattacatcatcttattttggttttataccaataaaacatagcgtggaactcattcaggtaatgttttgca

SEQ ID NO: 540166 - DNA, 120 bp, Artificial Sequence
  ENSG00000167196_17 (sequence is synthesized)
tttcattgcttttggatgaacaaaggaagtaaactaatcctttataaatgaaaacccagaatagttggtatgtcagctagtcattcctgtcatattcccagtagaatgattttcaagttt

SEQ ID NO: 540167 - DNA, 120 bp, Artificial Sequence
  ENSG00000167196_18 (sequence is synthesized)
gaatttctgtacaaatatctaaataagagatgtgcagagagcaccaattttccttcaatatccattctttacttttcacataatgatagaacctttgatttttcaagtgggtatgcctcc

SEQ ID NO: 540168 - DNA, 120 bp, Artificial Sequence
  ENSG00000167196_19 (sequence is synthesized)
tagaataaagactacatttcccagtctcctgtgcaggtatgactgtgttctggacaatggaatgtgaggggaaacgattttttgtgtccttaaaatggcatgaccatttatttgcccctt

SEQ ID NO: 540169 - DNA, 120 bp, Artificial Sequence
  ENSG00000167196_20 (sequence is synthesized)
tctccatcctgttgcttggaatgtggatctggtagtgagccatcttggaccctgaagaggaggcaacacaccattgtagaagaaaaacaacagaaggatcctggtccctgtacgacctca

SEQ ID NO: 540170 - DNA, 120 bp, Artificial Sequence
  ENSG00000167196_21 (sequence is synthesized)
ttgaagaaacaccataagtggcgtggactatctacctccagactgttttacaagagagaaattagcatattccatctaatacagtatgatgtaactaatgttacttttgtaacagtcagt

SEQ ID NO: 540171 - DNA, 120 bp, Artificial Sequence
  ENSG00000167196_22 (sequence is synthesized)
ggtttgttctaacaggacagtagaacacttgcaaggtaagtaaaaccaaatgtattagcattattcctgcttttccttttttgtcacttttatcctttttttaaaactgaaaatattttt

SEQ ID NO: 540172 - DNA, 120 bp, Artificial Sequence
  ENSG00000167196_23 (sequence is synthesized)
ctcttgctatttatatatatatgataaaaatgcttggaagagtcctttaatttatggttattctaaatcctagttcctgaggcaagtccaaagaaaaatttgtcaaaacttttcatctat

SEQ ID NO: 540173 - DNA, 120 bp, Artificial Sequence
  ENSG00000167196_24 (sequence is synthesized)
gaatatttatatttagctcttgctatttagctattatcaaaatacctcaaaattttagtccttgaatgtgctcatatagcccataaggcaaatattttttaaactttattgtccctgata

SEQ ID NO: 540174 - DNA, 120 bp, Artificial Sequence
  ENSG00000167196_25 (sequence is synthesized)
ttaaccagaattggttgaatagtagaggaaaagggatttttaaaactgaaaatatgaacaaaatgagccttagaattgaatggattattttaaacaaattaatactcatataaaatgttt

SEQ ID NO: 540175 - DNA, 120 bp, Artificial Sequence
  ENSG00000167196_26 (sequence is synthesized)
tgctgcttctcaaagagtctgatacagggtaatttcatacaatatttgatgttgttaaagcattcctttttatagctgagcctttggagcttgttatgaacagtaaaatcatttagtcac

SEQ ID NO: 540176 - DNA, 120 bp, Artificial Sequence
  ENSG00000167196_27 (sequence is synthesized)
atggttgtaaccttagtgcaaagtaaaaagggaaaagttgacctaatagaaacaatagtagtattgataagaacaaaagtcatcctccctgcctctcagaggccctgaagtcctgtgagg

SEQ ID NO: 540177 - DNA, 120 bp, Artificial Sequence
  ENSG00000167196_28 (sequence is synthesized)
aagggaaatagtaatttaaccaaagttaaatctgtgtaactcatttattacaattttgaaaggcttgtcttagaagcattaaaggagtattagctaaaaacaaactaaattcctagagat

SEQ ID NO: 540178 - DNA, 120 bp, Artificial Sequence
  ENSG00000167196_29 (sequence is synthesized)
gacaatcattgtagtcctctgtgaaactgaaaatgatcacatgaaaaaaatgtgagcataaaaaagagaagtaaaggtgtaccattagcctacatactgagctgacgatcagatcataga

SEQ ID NO: 540179 - DNA, 120 bp, Artificial Sequence
  ENSG00000167196_30 (sequence is synthesized)
atactttatttaatcaagacatttaaaaatacttatttcatctacatactttcaaagcaaaataatttctggggctagtttcctttgtataaggcttaagcaaggaatatatttccatgc

SEQ ID NO: 540180 - DNA, 120 bp, Artificial Sequence
  ENSG00000167196_31 (sequence is synthesized)
cctttgatccaagtaaaatctaaggaagagggaaagtaaaccttgaaattaagacctagaaatagatccacccttgcagactgataaaagtgggcaatctagtaggccagttcacattac

SEQ ID NO: 540181 - DNA, 120 bp, Artificial Sequence
  ENSG00000167196_32 (sequence is synthesized)
agttatctcagttttgcttaaagcaaaccctaaccctcaacctacgaggccagatagcaaaagacgtgcaactggtttatattgcaaatttaacaaagtgaacatgcaaagaattacaat

SEQ ID NO: 540182 - DNA, 72 bp, Artificial Sequence
  ENSG00000167196_33 (sequence is synthesized)
caaatttaacaaagtgaacatgcaaagaattacaatagaaataaacttttacaaatctgagaactttatggc

SEQ ID NO: 540183 - DNA, 74 bp, Artificial Sequence
  ENSG00000167196_34 (sequence is synthesized)
atctgagaactttctatgcaatctgcagaaatttttaagaatataaatatgcttttgtcattttatacccagtc

SEQ ID NO: 540184 - DNA, 120 bp, Artificial Sequence
  ENSG00000167196_35 (sequence is synthesized)
ttaagaatataaatatgcttttgtcattttatacccagtctggcccaggtttgcactgccataaattcagttttaatgggaacagaagactccagatcctcttgatgggaagaaatcatg

SEQ ID NO: 540185 - DNA, 120 bp, Artificial Sequence
  ENSG00000167196_36 (sequence is synthesized)
aaattttagatgattgacttggttttcatttgtagaaactgggtatgagttggcttaatgaaaatcctaaaataataaaataagcattagtaataatatccttgttaaatgaacaaagtg

SEQ ID NO: 540186 - DNA, 120 bp, Artificial Sequence
  ENSG00000167196_37 (sequence is synthesized)
aatacgatataaagaatgtgataccagaaagttactttaatattgaccctatatagggaagaataatcaaatatttgcaaaatatgttatttttgttttatatatttaacttctacccta

SEQ ID NO: 540187 - DNA, 120 bp, Artificial Sequence
  ENSG00000167196_38 (sequence is synthesized)
tgccacaactgaagacaggttacaagaacatgtgctactacaaagtaggaaactggcagaagccaataagtatcacttaatattttggtatggaaacttttttttttttgagagagtttt

SEQ ID NO: 540188 - DNA, 120 bp, Artificial Sequence
  ENSG00000167196_39 (sequence is synthesized)
aggcgtgagccaccgtgcccagctggaaactttcatttcttaaaacagatttataaaagtttttgctatatagtgactgttagccagtaaaaacagggaagattgattaatttagaagaa

SEQ ID NO: 540189 - DNA, 120 bp, Artificial Sequence
  ENSG00000167196_40 (sequence is synthesized)
agaaattgaaagaaaatatatttattaatgttgcttttaaatgcaaattatcagattgaggagaattttgagaccattgacatttttctaattatgactaaaatttaatcactatactta

SEQ ID NO: 540190 - DNA, 120 bp, Artificial Sequence
  ENSG00000167196_41 (sequence is synthesized)
aataaaattatagggaggaataaaacataattgaccccagcgacatcagcaaaaatgggtggactaggaagctgcaagcttttgtttgcctatcaaaacattaaaaaaaaaaaagaggcc

SEQ ID NO: 540191 - DNA, 120 bp, Artificial Sequence
  ENSG00000167196_42 (sequence is synthesized)
aaaaaaaaaaaaaaaaaaaaagcaactgtctgaacgaaccttgttagagctttggaaaacagtcaaaggtttacagcaaccaaaagaatgcccaatcatctgcagaatggtaggaaaata

SEQ ID NO: 540192 - DNA, 120 bp, Artificial Sequence
  ENSG00000167196_43 (sequence is synthesized)
caaaagaatgcccaatcatctgcagaatggtaggaaaatattgtgactttttagtggctcttgcccgagcctctccctacattgtggcagtcttaaagcagcagaagcccagtcccctcc

SEQ ID NO: 540193 - DNA, 120 bp, Artificial Sequence
  ENSG00000167196_44 (sequence is synthesized)
cttgaactggagaaaacatgctagaccttttttgcaaattactgtgtacatttttttctaacctgtctgcggatacttgaaggactgacacaaggtcacatgtttgttttgcctaactgg

SEQ ID NO: 540194 - DNA, 120 bp, Artificial Sequence
  ENSG00000167196_45 (sequence is synthesized)
tagggtgggcactgcttacaaaagctgcaaagaaccacaggtgcatggggcaagaggttatgggtgtaaacataaaatagaacaactaaggcccagaggagaatctggggtaagactttg

SEQ ID NO: 540195 - DNA, 120 bp, Artificial Sequence
  ENSG00000167196_46 (sequence is synthesized)
ggaaattaagaacagttacatatacaggggggatttaaaatgcgacatgcatgcccagggaaaacacttgcccggaaagttctaagacccaagctttcaccttggtctggtccctaagcc

SEQ ID NO: 540196 - DNA, 120 bp, Artificial Sequence
  ENSG00000167196_47 (sequence is synthesized)
caaaagcaggccaaagtaagtattgaaggattacctgggacaaagctgatttgtaaaatctaggattgctcctagcattcaagggaatttatgtcaaaatagctgaacgtgacataaaag

SEQ ID NO: 540197 - DNA, 120 bp, Artificial Sequence
  ENSG00000167196_48 (sequence is synthesized)
gaagagagacttcagtgatcacacacagaaggaatagtcttttataaaaataatttggaaaactctcaaaacaaatggatgacagcttttaaaaataaaaaaacaatgaaccagaaaacc

SEQ ID NO: 540198 - DNA, 120 bp, Artificial Sequence
  ENSG00000167196_49 (sequence is synthesized)
gtggggaaaggaaagaatctcatacctagagttaccatattataatagtgaatatccaactctcaaggaaaaaaatcacaaaccatacaaaggaacaggaaaataatgcgcattcaaaag

SEQ ID NO: 540199 - DNA, 120 bp, Artificial Sequence
  ENSG00000167196_50 (sequence is synthesized)
atcaaaattaattgaccttgtcctaatgaaggacattaaactagacatatactttaactcaaatatgcccaaagaactaaaggaaaacatgaacaaagaattaaagaaatcaggaaaatg

SEQ ID NO: 540200 - DNA, 120 bp, Artificial Sequence
  ENSG00000167196_51 (sequence is synthesized)
ataaatgaacaaaatcagaatatcaacagataggcattataaaaaaattctggcagagaaaagtataataaatgaaattttcactacaggggttcagcagcagatataagcaggtagaag

SEQ ID NO: 540201 - DNA, 120 bp, Artificial Sequence
  ENSG00000167196_52 (sequence is synthesized)
aaagaatcagcaaacttgagatgggatcactgaaagcagaaacaacaaatcaagcctacatagttttaaaagatacatatcacacacaaagaagtgaagaagatatggtgcatttttgaa

SEQ ID NO: 540202 - DNA, 120 bp, Artificial Sequence
  ENSG00000167196_53 (sequence is synthesized)
ccacaacaggatgtagttagaaatcagtaacaaaaggaaaattggaaaattcacaaacttgtggaaattaaacaaaacactcaaccaatgggtcaaagaagaaatcacaagggaaattaa

SEQ ID NO: 540203 - DNA, 120 bp, Artificial Sequence
  ENSG00000167196_54 (sequence is synthesized)
aaagagaaaaatgcaacataccaaaatttataggatgcagtgaaagcactgctaaaagggaaatttgtagacataaatgcttacattaaaaaacaaaaaagacctcatgtcaacaacctg

SEQ ID NO: 540204 - DNA, 120 bp, Artificial Sequence
  ENSG00000167196_55 (sequence is synthesized)
actttgcagcttgagggggaaaaacatactaaatccaaagctagcagatggaaggaaataataaagattagaacagatataataaattgaataaagattagaaacactagagaaaaatca

SEQ ID NO: 540205 - DNA, 120 bp, Artificial Sequence
  ENSG00000167196_56 (sequence is synthesized)
gtgaaactacaagttctttaaaagaccataaagttggaaagcctatgcgtagatagactaagaaaaaaaggaagactcaattgctaaaataaatgaaaatgggaacagcactctagattc

SEQ ID NO: 540206 - DNA, 120 bp, Artificial Sequence
  ENSG00000167196_57 (sequence is synthesized)
tagaaaaatgaaaagggttatagaagaataccttcgacaatctagatgaaatgctcaaagtcctagaaatgcaaaacgtactactgctgaactatgaaaaaaatttaaaaatctcaatag

SEQ ID NO: 540207 - DNA, 120 bp, Artificial Sequence
  ENSG00000167196_58 (sequence is synthesized)
aactataaccagtaaggtaattgaattagtaatcaaaattctcctggaaaaaaagcactggacctgatggttttcatttgtgaattctaccaaataagaagaaataaccccaatcccttc

SEQ ID NO: 540208 - DNA, 120 bp, Artificial Sequence
  ENSG00000167196_59 (sequence is synthesized)
taacttttcccaaaaattgaagaggaaggacgctgcctaattcattctgatgctgaagccagacaaagatactacaagaaaagattacagaccagttattccttatgatcgctgattcaa

SEQ ID NO: 540209 - DNA, 120 bp, Artificial Sequence
  ENSG00000167196_60 (sequence is synthesized)
caattgtcaatactaggaaactgaatttagcagcatattaaaaggattgtacaccacgaccaaatggaatgaattcctggaatgcaaggattgttcaacatacaaaaatcaatataatat

SEQ ID NO: 540210 - DNA, 120 bp, Artificial Sequence
  ENSG00000167196_61 (sequence is synthesized)
actacattaacagaacgaagcgagaaccagatgatcatctcaattgatgcagacaaagcatttgacaaaatccagcagcctcttgtgattaaaaacactcaacaaatgagggataagagg

SEQ ID NO: 540211 - DNA, 120 bp, Artificial Sequence
  ENSG00000167196_62 (sequence is synthesized)
aaactacctgaacataataaaagccagacatgaaaagcccacggtagacaccatacttagtggtgaaagcttttcctctaagatcaagacaatgctcatttcaccattcctattcaacac

SEQ ID NO: 540212 - DNA, 120 bp, Artificial Sequence
  ENSG00000167196_63 (sequence is synthesized)
agtactaggagttctagcctgagctagaaaaagaaaagacatctaagttggaaagtaagaagtaaaatcctatatgttcacaaatgatatgatctttagacaacccgaaagattccacac

SEQ ID NO: 540213 - DNA, 120 bp, Artificial Sequence
  ENSG00000167196_64 (sequence is synthesized)
caaaaaaaaaaaataactgttaattcagtaaggtagcaggatacaaagtcaacccacaaaagtcagttgcattcctatacactaacaatgaacaacctgagaaggaaattacaagaacag

SEQ ID NO: 540214 - DNA, 120 bp, Artificial Sequence
  ENSG00000167196_65 (sequence is synthesized)
tcccatttaccatagcgtcaaaaagaataaaatgcacagaaattagcttacccaaggtggtaaatggcttgtacaatgaaaactacaaaacattgcttcaataaagataaaaataaacgg

SEQ ID NO: 540215 - DNA, 120 bp, Artificial Sequence
  ENSG00000167196_66 (sequence is synthesized)
aaatacatctcatgttcatggattggaaaatctaatgttaatatgtcagtactactcaaagtgatgtgcagattcactacagtctctatcagaatcctaggatttttttttttttttttg

SEQ ID NO: 540216 - DNA, 120 bp, Artificial Sequence
  ENSG00000167196_67 (sequence is synthesized)
cagaaatagaaaaacccatcctgaatttcatgtggaatctgaagggatcccaaatagccaagtcagtcttgagaaagaagaacaaattggaggacttaaacctgcagagtttaaaactta

SEQ ID NO: 540217 - DNA, 120 bp, Artificial Sequence
  ENSG00000167196_68 (sequence is synthesized)
ctataatgctacagtaatcaaaacaatgtgattctggcataaaggcagacggatagaccaatgggatagactggagaacctagaaataaaccctctcatatgtaggtaaatgatttttga

SEQ ID NO: 540218 - DNA, 120 bp, Artificial Sequence
  ENSG00000167196_69 (sequence is synthesized)
caagggtgccaaggctattccaaggatagttttttcaacaaataatgatgggaaagctggataaccacatggctaactaacaaagttgcaacctcactcatttgcaaaaattaactcaaa

SEQ ID NO: 540219 - DNA, 120 bp, Artificial Sequence
  ENSG00000167196_70 (sequence is synthesized)
atggaccaaagacctaaatgtgagagctaaaaccataaaactcttaggatgtggcagtggtttcttggatatgacaccaaattcacagacaacgaaagaaaaaataggcaaattatactt

SEQ ID NO: 540220 - DNA, 120 bp, Artificial Sequence
  ENSG00000167196_71 (sequence is synthesized)
cattaaaattttgtgcatcaaagaacactatcaacagagtaaaaagattacctatggagtgggaggaaataatatgcagttcacgtacctaataaggattaaacatccagaatacataca

SEQ ID NO: 540221 - DNA, 120 bp, Artificial Sequence
  ENSG00000167196_72 (sequence is synthesized)
aaactcccaaaatgcaacaacagtgtaaaaacctgatttaaaaaatggcaaaggatttggatagatctccagagaggacatgcagatagccagtgagcacaggaaaaaatgcttagcatc

SEQ ID NO: 540222 - DNA, 120 bp, Artificial Sequence
  ENSG00000167196_73 (sequence is synthesized)
actaaacagtaaggaaatgcaaatcaaaaccacattgagataccacttcatacccactgggatagctcttattaaaattaaaaaaacacacaagtgttggcaaggatgtggagaaattgg

SEQ ID NO: 540223 - DNA, 120 bp, Artificial Sequence
  ENSG00000167196_74 (sequence is synthesized)
aactcttattactgatggaaatatagtggtatgcagctgctgtagaaaacagtatggtgattttccaattaaatatagaattgtcatttgattcagcaattgcatttctgggtatataca

SEQ ID NO: 540224 - DNA, 120 bp, Artificial Sequence
  ENSG00000167196_75 (sequence is synthesized)
caaaataattgaaagcggaggcttgagggtatatttgtataccagtgttcactgcagcattattcaccgtagtcaaaaggtagaaacaacccaaatacccaacagatgaatggatagaca

SEQ ID NO: 540225 - DNA, 120 bp, Artificial Sequence
  ENSG00000167196_76 (sequence is synthesized)
aaatgtgttatatccatacaatggaatattattcagccataaaaaggaaatccttctacatactacatcatggatgaacctttcagacattaagtaaatcacaaaaggacaatactatat

SEQ ID NO: 540226 - DNA, 120 bp, Artificial Sequence
  ENSG00000167196_77 (sequence is synthesized)
gaatccactgatgtgaggtacctagactagtgagattcatagagacaaagtagaacaaagattacgttttgtcacagggagcaggagggaatgggaatttattgtttaaggggcacagag

SEQ ID NO: 540227 - DNA, 120 bp, Artificial Sequence
  ENSG00000167196_78 (sequence is synthesized)
attagtgtgggatcatgaaaaagttccggaggtgcatagtggtgactggtacatacaacgaatgtatttaatgcctttaaactgtaacttcaaaatggttaaaatttaaatcttacgtac

SEQ ID NO: 540228 - DNA, 120 bp, Artificial Sequence
  ENSG00000167196_79 (sequence is synthesized)
ccaccaaaaaaaaaaaaaaaaaaaaatatggcctagcttttttttttttttttaaaaagggcagggggtggggtatttagtcacaagacatagaggaactttaagtgtatattgctaagt

SEQ ID NO: 540229 - DNA, 120 bp, Artificial Sequence
  ENSG00000167196_80 (sequence is synthesized)
aactttaagtgtatattgctaagtgaaagaagttagtctgaaaggctacatactacatgatttcaaatatatgacattctggagaaagcaaagttagtaaagactggttgccagaggttc

SEQ ID NO: 540230 - DNA, 120 bp, Artificial Sequence
  ENSG00000167196_81 (sequence is synthesized)
agtgggagagagggaggggtaaatacatggagtagagatttttagggtggtgaaactactgtatacaatactataatagtggatacatgacattatatattggtcaaaatccataaagac

SEQ ID NO: 540231 - DNA, 120 bp, Artificial Sequence
  ENSG00000167196_82 (sequence is synthesized)
atacaacaaaaagaggacccttcatgtaaattacaggcttcagctagcctggatgacagagtgagactttgtctcaaaaagtaaagtaaaaatgtgtcaatattggttaaacaaatatac

SEQ ID NO: 540232 - DNA, 120 bp, Artificial Sequence
  ENSG00000167196_83 (sequence is synthesized)
cacactagtgcaagatgttaataataaaggcctggggtggggggaagcataggggaactctatactatctgctcagtttttctgaaaatctaaaacttctaataaagtctattaaaatta

SEQ ID NO: 540233 - DNA, 120 bp, Artificial Sequence
  ENSG00000167196_84 (sequence is synthesized)
cttgtgtgcttctgatttcgtctgtgaatgaagggaaatggtctcaggttttgtcactttggggttaacaatttaaaaaacgtgtttaaagaattattaagataatagttcattccattt

SEQ ID NO: 540234 - DNA, 120 bp, Artificial Sequence
  ENSG00000167196_85 (sequence is synthesized)
tgtagtagacattggctaaggggcttactgaacataattctgcttacggttgaataattacatttttatatatattgtccttcaagaacttccttgagtcacattctccttaaaatttga

SEQ ID NO: 540235 - DNA, 120 bp, Artificial Sequence
  ENSG00000167196_86 (sequence is synthesized)
cattgcctgttgatctttcctttgacagatgtggtactctgtgtgacctcaatgtgtcacctcctttctagtttcctcctttaaaggaaacacatggttagagtgtatctttatggcaaa

SEQ ID NO: 540236 - DNA, 120 bp, Artificial Sequence
  ENSG00000167196_87 (sequence is synthesized)
acttctcagagcttctaatatgcccagtgctgtggaaatctggaaggagaatagcattacctgtgacagttcccaaatgtgtttggtcacaaaacttttttccacagaatgtcttgcaag

SEQ ID NO: 540237 - DNA, 120 bp, Artificial Sequence
  ENSG00000167196_88 (sequence is synthesized)
tcgtactggtttttggaaattctgtattagatcttttgaaaggctttttcaagcttaaaaattgtggatcttttttgttactaaggcttttgctttcaaagataaaaatatttgctcttc

SEQ ID NO: 540238 - DNA, 120 bp, Artificial Sequence
  ENSG00000167196_89 (sequence is synthesized)
gggaagcttgcctggggacacgccgtgggcatgtcccaggctggcggggtggggggagagacccttgggacccaccagggccgtccccggctcgctcgccctacctgaggtgacccccta

SEQ ID NO: 540239 - DNA, 63 bp, Artificial Sequence
  ENSG00000167196_90 (sequence is synthesized)
ccagtaaggttcttcatggcaaaaagatctgttcccaattgcaatttgctcttacaaacagtg

SEQ ID NO: 540240 - DNA, 120 bp, Artificial Sequence
  ENSG00000167196_91 (sequence is synthesized)
tggacataaatatcatttgtttccagcaggaaaatcagaccctaccccaccctcaatgcttgtaaacactactatttgtttcccactctgtttaatatttgcatcctagagtggtgacat

SEQ ID NO: 540241 - DNA, 120 bp, Artificial Sequence
  ENSG00000167202_0 (sequence is synthesized)
gcagggggcggccgcggagcccggggcgggtccggcgcgggagccagcgcggctgtgtggctatctgcagaagctgtcgggcaagggccccctgcgtggctaccgcagccgctggttcgt

SEQ ID NO: 540242 - DNA, 120 bp, Artificial Sequence
  ENSG00000167202_1 (sequence is synthesized)
tggttcgtgttcgacgcgcgccgctgctacctttactatttcaagagtccgcaggacgcgctgcccctcggccacttggacatcgcggacgcctgcttcagctaccagggccccgacgag

SEQ ID NO: 540243 - DNA, 120 bp, Artificial Sequence
  ENSG00000167202_2 (sequence is synthesized)
gcggcggagccgggcacggagccgcccgcgcacttccaggtgcacagcgcgggagccgtcacggtgctcaaggctcccaatcgtcaactcatgacttactggttacaggagcttcagcag

SEQ ID NO: 540244 - DNA, 120 bp, Artificial Sequence
  ENSG00000167202_3 (sequence is synthesized)
aagagatgggaatattgtaacagtcttgacatggtcaagtgggacagcaggacctctccaactcccggggattttcctaagggtcttgtagccagagataacactgatttaatttaccca

SEQ ID NO: 540245 - DNA, 120 bp, Artificial Sequence
  ENSG00000167202_4 (sequence is synthesized)
cacccaaatgcttctgcagaaaaagccagaaatgtcctagctgtggagactgtgcctggagagctggtgggagaacaagctgcaaatcagcccgccccagggcatccaaattccattaat

SEQ ID NO: 540246 - DNA, 120 bp, Artificial Sequence
  ENSG00000167202_5 (sequence is synthesized)
ttttactctttgaaacagtggggcaatgagctcaagaattcgatgtcttctttccgtcctgggagaggacataatgatagtcggaggactgtgttttataccaatgaagagtgggaactt

SEQ ID NO: 540247 - DNA, 120 bp, Artificial Sequence
  ENSG00000167202_6 (sequence is synthesized)
ttagacccaacccctaaggacctagaggagtccatagtacaggaagaaaagaagaagctgacccctgaaggaaacaaaggagtaactggctcaggattcccctttgattttggacgtaac

SEQ ID NO: 540248 - DNA, 120 bp, Artificial Sequence
  ENSG00000167202_7 (sequence is synthesized)
ccctacaaaggaaagcgccctttgaaagacataattgggtcgtacaaaaatcgtcacagcagtggtgacccttcaagtgaaggcacatcaggcagtggcagcgtcagcatcaggaagccg

SEQ ID NO: 540249 - DNA, 120 bp, Artificial Sequence
  ENSG00000167202_8 (sequence is synthesized)
gcctccgaaatgcaactgcaggtccagagccagcaggaagagctggaacagttaaagaaagacctgtccagtcagaaggagcttgttcgactgctccagcagacagtccggtcatcccag

SEQ ID NO: 540250 - DNA, 120 bp, Artificial Sequence
  ENSG00000167202_9 (sequence is synthesized)
tatgacaagtatttcacaagcagccggctctgtgagggggtcccaaaggacacgctcgagcttctgcaccaaaaggatgatcagattctgggccttaccagccagctggagaggttcagc

SEQ ID NO: 540251 - DNA, 120 bp, Artificial Sequence
  ENSG00000167202_10 (sequence is synthesized)
ttggagaaggagagtcttcagcaggaagtaaggacgctgaagagcaaagtgggcgagctcaacgagcagctgggaatgctcatggagaccatccaagccaaggacgaggtcatcatcaag

SEQ ID NO: 540252 - DNA, 120 bp, Artificial Sequence
  ENSG00000167202_11 (sequence is synthesized)
ctcagcgagggcgagggcaacgggcctcctcccaccgtggcgcccagctccccttcggttgtgcctgttgccagggaccagctggaactggacaggctgaaagataatctacaggggtac

SEQ ID NO: 540253 - DNA, 120 bp, Artificial Sequence
  ENSG00000167202_12 (sequence is synthesized)
aaaacccaaaacaaatttctaaataaggagattttggaactctcagctctacgaagaaatgcagaaaggagagagagggatctgatggcaaagtattctagcctggaagccaagctctgc

SEQ ID NO: 540254 - DNA, 120 bp, Artificial Sequence
  ENSG00000167202_13 (sequence is synthesized)
cagatagaaagtaaatacctgatattgctccaagaaatgaagacaccagtgtgctcagaagaccaggggcccacccgggaggtcatagcccagttgctggaggatgctctgcaggttgag

SEQ ID NO: 540255 - DNA, 120 bp, Artificial Sequence
  ENSG00000167202_14 (sequence is synthesized)
agccaagagcagccggagcaagcatttgttaaacctcatcttgtcagtgaatatgatatttatgggttcaggactgtacctgaggatgatgaggaagagaaattggttgccaaggtccgc

SEQ ID NO: 540256 - DNA, 120 bp, Artificial Sequence
  ENSG00000167202_15 (sequence is synthesized)
gcgttggatctgaagactctctacctcacagaaaaccaggaagtctccactggggtcaagtgggaaaactattttgcaagtacagtgaacagggagatgatgtgctctccagagttaaaa

SEQ ID NO: 540257 - DNA, 120 bp, Artificial Sequence
  ENSG00000167202_16 (sequence is synthesized)
aacctcatccgtgcgggcattccccacgagcaccgttccaaggtgtggaagtggtgtgtggaccgtcacaccaggaagttcaaggacaacactgagcctggccacttccagaccttgctg

SEQ ID NO: 540258 - DNA, 120 bp, Artificial Sequence
  ENSG00000167202_17 (sequence is synthesized)
cagaaggcgctggagaaacagaacccagcctccaagcagattgagctggacttgctgcgaactctgcccaacaacaaacattactcctgccccacctcagaaggcatacagaagttacgc

SEQ ID NO: 540259 - DNA, 120 bp, Artificial Sequence
  ENSG00000167202_18 (sequence is synthesized)
aatgtcctcctcgccttctcctggcggaatccagatatcggctactgtcaaggcctaaacaggttggtggcagtggccctcctgtacctggaacaagaagatgctttctggtgtctcgtt

SEQ ID NO: 540260 - DNA, 120 bp, Artificial Sequence
  ENSG00000167202_19 (sequence is synthesized)
accatagtggaagttttcatgcctcgagactattatacaaagactcttttaggatcccaggtggaccagcgggtgttcagagaccttatgagtgagaagctgcctcggttgcatggccac

SEQ ID NO: 540261 - DNA, 120 bp, Artificial Sequence
  ENSG00000167202_20 (sequence is synthesized)
tttgaacagtacaaagtcgactacactctcatcactttcaactggtttctggtggtatttgtggatagtgtcgttagtgacatcctctttaaaatatgggactctttcctttatgaagga

SEQ ID NO: 540262 - DNA, 120 bp, Artificial Sequence
  ENSG00000167202_21 (sequence is synthesized)
ccaaaggttattttccgttttgctctggcactttttaagtacaaggaagaggagattttgaaattgcaagattcgatgtctatatttaagtatctccgctacttcactcgcactatcctt

SEQ ID NO: 540263 - DNA, 120 bp, Artificial Sequence
  ENSG00000167202_22 (sequence is synthesized)
gatgctagatccggaaccgacgcgcctaccacttggagaaagtccggctggagctgaccgagctggaggccatccgtgaggacttcctgcgtgagcgggacaccagccctgacaagggtg

SEQ ID NO: 540264 - DNA, 120 bp, Artificial Sequence
  ENSG00000167202_23 (sequence is synthesized)
agctggtcagtgacgaggaggaggatacctgagtgggctcgggatgctgctcttccttccttcacaaccaaagtgtgcccaaagggtgaaagtgcacttaaaagccagaatgtaacgtgt

SEQ ID NO: 540265 - DNA, 120 bp, Artificial Sequence
  ENSG00000167202_24 (sequence is synthesized)
tctaatctgtttacaaccatttccgtgccatgcttttggttacacgtatctcagtcacgctttctgcctggttggtggatcctcaggcttaccagtggctatttgcaagagcctgtttcc

SEQ ID NO: 540266 - DNA, 120 bp, Artificial Sequence
  ENSG00000167202_25 (sequence is synthesized)
agcctccgtcagcctgtcggtgctctgaccctctgaaaccttgctttgctgggcatctccccatattctctctcctgtacatagtgggcagtggtgtgtggttttgaatggcagtgctat

SEQ ID NO: 540267 - DNA, 120 bp, Artificial Sequence
  ENSG00000167202_26 (sequence is synthesized)
aaaggatgccagctgtgctttaggcacctgtaggccagagggttgctgcctcaggcataaggttggtatgaaaaggggctgccttagaaaagcaggcacatcccttgttcagaaatggcc

SEQ ID NO: 540268 - DNA, 120 bp, Artificial Sequence
  ENSG00000167202_27 (sequence is synthesized)
actgtaggaaagcctgtgaacctcccaccagtggctttaagctgccagccatgccccatttctagaatagcctttgctcttccacacgcaacccttccatcagtgtcttccagcctgcat

SEQ ID NO: 540269 - DNA, 120 bp, Artificial Sequence
  ENSG00000167202_28 (sequence is synthesized)
ggggagggcctggctgcccagacacccaccctcacttctcatggccagcctgtgtttgcagatcactgggctgctctgtccccagcttgccccgtgccaggcatggctctgtgagattct

SEQ ID NO: 540270 - DNA, 120 bp, Artificial Sequence
  ENSG00000167202_29 (sequence is synthesized)
gtggaatgcccttcttgacttgtggaaatcattcaccaagtacgatgggatgggattccaagtaaacagtggaccgtcatattgcaaagcaggcccacgcctgggctggccttggttgag

SEQ ID NO: 540271 - DNA, 120 bp, Artificial Sequence
  ENSG00000167202_30 (sequence is synthesized)
gggatggaggaatgttttcgggggtgctttgcagggcagtggtgcagccgcagcgtgaacgctcttggacagctgaaaaccatggcctccttggggatggccagtgctcctggtgtctcc

SEQ ID NO: 540272 - DNA, 120 bp, Artificial Sequence
  ENSG00000167202_31 (sequence is synthesized)
acctgcctgggttgtgcaggaggccggctgccagtgcctggggctgggaaacttttttgcttggggcaggcttgggtgagctctcccagatgtgtgcccaccccaccactgcctggaaca

SEQ ID NO: 540273 - DNA, 120 bp, Artificial Sequence
  ENSG00000167202_32 (sequence is synthesized)
tccttgttctctgccaggatgcaggggcactgttgcctctgacacagcagtttctgggaactcagaggactgcctttctgaaggctggggagaggctttgagcaaggagcttgtttttgc

SEQ ID NO: 540274 - DNA, 120 bp, Artificial Sequence
  ENSG00000167202_33 (sequence is synthesized)
ttaatcgctctagaccatccctgatgcgtagatgtgagaggatgttttctggcacagtgttatgaaaatacaagataaatgatctcagtggaatgtttcatattacccgaaaaaaactgg

SEQ ID NO: 540275 - DNA, 120 bp, Artificial Sequence
  ENSG00000167202_34 (sequence is synthesized)
aaatcatcctttgttgtgaacacactgagactaagaattgaagcaatgcagttttaagaagtatttttcctattttttgctgtcaactttttggcaatgccacggcaaagttggtgtttc

SEQ ID NO: 540276 - DNA, 120 bp, Artificial Sequence
  ENSG00000167202_35 (sequence is synthesized)
agcacatgctagagtgagctccggcttcgtgtctttaaccaactccactaatgtttcactgggtagacggagctggcctctatatttagccagaagcctttgcctcttttcaggcatcaa

SEQ ID NO: 540277 - DNA, 120 bp, Artificial Sequence
  ENSG00000167202_36 (sequence is synthesized)
aaatgggttttgtcattgtctttgtctttgagagcagcagtttgaggtctgactccttcagttgtcctgtgagctgggcgttgcagtctgctcgaatcaagtgttggaaccccccccacc

SEQ ID NO: 540278 - DNA, 120 bp, Artificial Sequence
  ENSG00000167202_37 (sequence is synthesized)
cctcagcccatcgtgaaacgacagctgtcagcctggggggcggctgctgaggaggtgcagcaggaatggggctgggccctgaggttttactttccgagccaatggcccctggaacatgcc

SEQ ID NO: 540279 - DNA, 120 bp, Artificial Sequence
  ENSG00000167202_38 (sequence is synthesized)
agcacacactgccatgtcctggggctaagagctgcctttagggacaggctcgtgttgtccagtttgccctgagagatgcacctgaccaggggcccgtcgtggctgcaacccacggtggta

SEQ ID NO: 540280 - DNA, 120 bp, Artificial Sequence
  ENSG00000167202_39 (sequence is synthesized)
tgttagtgtttccaggcagttgtcagcagctgccgggcagtgtgtgtgtgcgacagcaggagagttcctggaggaaagggactggggacactttctcagaggttctcctgcctggaatca

SEQ ID NO: 540281 - DNA, 120 bp, Artificial Sequence
  ENSG00000167202_40 (sequence is synthesized)
agtgatgcgtgtccagaaggcaagagagggcggctccgcctggttaaagtttgggaacgggacggagccaactcctccttccaggactgtgggccccactcttttgcgctaacacttccc

SEQ ID NO: 540282 - DNA, 120 bp, Artificial Sequence
  ENSG00000167202_41 (sequence is synthesized)
ctccctcgggtcactgaggaaagagctgctctgtcccctccagtgccctgaaggtccctggcctccactggctgccatggcagggggcccttctgacaggggctgccccaagctgctgtt

SEQ ID NO: 540283 - DNA, 120 bp, Artificial Sequence
  ENSG00000167202_42 (sequence is synthesized)
cctcctctgaaccttcaccccaacacccagcccgtggcccctgcaagggggaccctgccagctgggaaacccaaaggcctgtccaaacgtgcgcaccaggaccgaggggagctccctccc

SEQ ID NO: 540284 - DNA, 120 bp, Artificial Sequence
  ENSG00000167202_43 (sequence is synthesized)
aacacctgctaggaattgccaacttttaaatggatggggttttttatgggttgaacctctgttaatacttttgtacactctcactacagtttatatttttataggctattttctcaaggt

SEQ ID NO: 540285 - DNA, 120 bp, Artificial Sequence
  ENSG00000167202_44 (sequence is synthesized)
gtttctagattccacatatctattttatataacaagttattatgttatgtgtgtgactcccttgtgtgtatctgtgccagcctcagcctccgagttgcttttccctctggccctgactct

SEQ ID NO: 540286 - DNA, 120 bp, Artificial Sequence
  ENSG00000167202_45 (sequence is synthesized)
cactgactcaccgatgtgatgtgcaggcccacttcttaccccagatagcctcgggcgctgcctgtagtcatgctgacagctgtacagtagccgccaagactgctgacagctggagacggt

SEQ ID NO: 540287 - DNA, 120 bp, Artificial Sequence
  ENSG00000167202_46 (sequence is synthesized)
tctggtttcaactacggtatattgatatcggaagtattctagacagatcctcggttgggttttctagctacatgtttgtattgcacagatccccacctgccatcctatagtgttgtcttc

SEQ ID NO: 540288 - DNA, 120 bp, Artificial Sequence
  ENSG00000167202_47 (sequence is synthesized)
ctgtgtgttccggggcttctgggcagctgggcctgcccggggaagtccttgcaggtgggaggccatacagagacccactgtgtgccactgaacgtcccactgctgctgggcaactggagg

SEQ ID NO: 540289 - DNA, 120 bp, Artificial Sequence
  ENSG00000167202_48 (sequence is synthesized)
actgcagggggcgccaggtgactctctccttttatatcacagcagctcctgtgctgaccttcaagttacgttttggaactgtaatactaaaggaagaaataaactactaatttgtataat

SEQ ID NO: 540290 - DNA, 120 bp, Artificial Sequence
  ENSG00000167202_49 (sequence is synthesized)
atttaagtatctccgctacttcactcgcactatccttgatgctagccactgaccagtggttaggagcaagtggatcataaccttaacatttttattgaaaattggagccttgacctgggg

SEQ ID NO: 540291 - DNA, 120 bp, Artificial Sequence
  ENSG00000167202_50 (sequence is synthesized)
atgtgaaacccacaagctgcacatttctctgtagactgcatctggacacttgtcacattgccaactgggtctgacagtcatcgccaggactgcctgggcctgtgttcattcccagtcaat

SEQ ID NO: 540292 - DNA, 120 bp, Artificial Sequence
  ENSG00000167202_51 (sequence is synthesized)
ccaaggatgaagacatacctgccatcaccatgcaagtgccgggagctcttctcagggcttatgtgtgggaacacgagtaatcccacaccctaggaggtggcactactcttaccccagtgt

SEQ ID NO: 540293 - DNA, 120 bp, Artificial Sequence
  ENSG00000167202_52 (sequence is synthesized)
gcagatgaagatcagaggccagaaaaggggggtgacttcagtcacacagcaagcatgtggcagagctggagtccaggtcgtcattctgagcctgcccctggctgggccattgtgctttgt

SEQ ID NO: 540294 - DNA, 120 bp, Artificial Sequence
  ENSG00000167202_53 (sequence is synthesized)
ccccaggctctcaggttgcgcgtctgctcgtctgcttacccggtgacctggcaggcctgatacacttctcccctttgttccctctccaggtggaccagcgggtgttcagagaccttatga

SEQ ID NO: 540295 - DNA, 120 bp, Artificial Sequence
  ENSG00000167202_54 (sequence is synthesized)
tacagaaggaagctgatcagtatctcctttggggacctgaaccctttccccctacgccagatccggaaccgacgcgcctaccacttggagaaagtccggctggagctgaccgagctggag

SEQ ID NO: 540296 - DNA, 120 bp, Artificial Sequence
  ENSG00000167202_55 (sequence is synthesized)
tctttgtgtaagccattcgataccacatatgaacttagcagtgaatgaaaatgaatttagaaagaaaataataatgatgctaccttatgagtggacagcattccacagttacccagcgcc

SEQ ID NO: 540297 - DNA, 120 bp, Artificial Sequence
  ENSG00000167202_56 (sequence is synthesized)
caaggccagtgccaagcatatggaagatacgactaaggtcagcatgtgatttaatttacccacacccaaatgcttctgcagaaaaagccagaaatgtcctagctgtggagactgtgcctg

SEQ ID NO: 540298 - DNA, 120 bp, Artificial Sequence
  ENSG00000167202_57 (sequence is synthesized)
caaatgagctgtaatcaaatgatacttgtcaacagctgttatatacctgatatacttttttgaacagaacttgaagcatcttcccagaccttattcctgcatgttttctagggtatattt

SEQ ID NO: 540299 - DNA, 120 bp, Artificial Sequence
  ENSG00000167202_58 (sequence is synthesized)
gatttgtctgataaggtggcagatgggagctagtcctggaccacagtgtcctaagaaagaatgggtatagcatggagtggccactcatgggccatgtgccagatggcaccgagctggacc

SEQ ID NO: 540300 - DNA, 120 bp, Artificial Sequence
  ENSG00000167202_59 (sequence is synthesized)
tcagtaattggcatgtagcctggttcctgctgctctctccacctctgtccagaggtgatgcatttgttggcatccagaggtctgattatcagcactccttctataaggaagagaggaacc

SEQ ID NO: 540301 - DNA, 120 bp, Artificial Sequence
  ENSG00000167202_60 (sequence is synthesized)
cactgcaggccattttaaacatgaaaggtggtctgtggcataaattaatttcttgtctttgctacagtctgtctctggctcacttcctaatagttttgggtttgttgttcactggtcatt

SEQ ID NO: 540302 - DNA, 120 bp, Artificial Sequence
  ENSG00000167202_61 (sequence is synthesized)
accatggtgcccaagggatctcagcacggcctgcactagatctgggtccagggtatcaggaaaccacagtcatttgttcatgtatcagaaacattcaacccacatcaagccctgtgatag

SEQ ID NO: 540303 - DNA, 120 bp, Artificial Sequence
  ENSG00000167202_62 (sequence is synthesized)
gcgctgggagctatggcttacagtttgagcctgagcctcaccatctgtcaaatggctggtggtgttaccccatcatatggaggaggagatggaggcccagagatctaataagcaggggat

SEQ ID NO: 540304 - DNA, 120 bp, Artificial Sequence
  ENSG00000167202_63 (sequence is synthesized)
taggggggctaatgagggggactaacttgggggagccaacttcagagccttactgcccatgagcctcccacccgctctgttgtatgttttttaaaaatcagtttttgaataaggaatata

SEQ ID NO: 540305 - DNA, 120 bp, Artificial Sequence
  ENSG00000167202_64 (sequence is synthesized)
tttacatattaaaccctaattgtataaacaggtgtttgtaatggagtggaggcccctccctagtcttctagttactcttctcaatttattctttaccttagccgggcacagtggcatgtg

SEQ ID NO: 540306 - DNA, 120 bp, Artificial Sequence
  ENSG00000167202_65 (sequence is synthesized)
ggaggctgaggtaggaggatcatttgagctgaggagttaaaatatagcctgggcaacacagcaagacccagaaaacaaactaaattagagaaagtacaggcccttagatatggggaaagc

SEQ ID NO: 540307 - DNA, 120 bp, Artificial Sequence
  ENSG00000167202_66 (sequence is synthesized)
cccttagatatggggaaagcagtttgttccaaagctgcttgaacttgcaagactaccaggagtccattccctctaacctctaatgtaccccaaacacaaattaaaaaaaaaaaaaagaaa

SEQ ID NO: 540308 - DNA, 120 bp, Artificial Sequence
  ENSG00000167202_67 (sequence is synthesized)
ggtgttttgaaacataaaaggttgcaccctcgtgtgtgccttgtgttaaaaggagcccacgcagccgacggcagcaggagcaaatggcctgctctgatggggacaggcaggaagtccttc

SEQ ID NO: 540309 - DNA, 120 bp, Artificial Sequence
  ENSG00000167202_68 (sequence is synthesized)
ggggcatttctgtttcatcacagcttttcctggggctggtgagtctgttgggcctttggttgacagggaagcgcatgagcccatgttggtggatacaaagcatttggggcctggcagaat

SEQ ID NO: 540310 - DNA, 120 bp, Artificial Sequence
  ENSG00000167202_69 (sequence is synthesized)
ccagagaggggaagaaggtggccctaggaactggcctattttgtgatccccagagaccagtgtggctgacccattagtgctacaaatccatagccaggcctcaggacagcttttggtctt

SEQ ID NO: 540311 - DNA, 120 bp, Artificial Sequence
  ENSG00000167202_70 (sequence is synthesized)
agggctgtgtgtgagcactctctggagcgccgctgattctcttgtctctcccctgcgtcctgccaggaagctgatcagtatctcctttggggacctgaaccctttccccctacgccagat

SEQ ID NO: 540312 - DNA, 120 bp, Artificial Sequence
  ENSG00000167202_71 (sequence is synthesized)
attgcaagattcgatgtctatatttaagtatctccgctacttcactcgcactatccttgatgctaggtcctgcctgccgctctgagcagtacacactctgcctctgcacacctaggggcc

SEQ ID NO: 540313 - DNA, 120 bp, Artificial Sequence
  ENSG00000167202_72 (sequence is synthesized)
atggggctcagcctgggactggcacccaggtgcccaccgcccaagacccaaagacactctctctgccagaacagcaccttactgcctgtgtcaggatgaaggcagacctccaccgtcacc

SEQ ID NO: 540314 - DNA, 120 bp, Artificial Sequence
  ENSG00000167202_73 (sequence is synthesized)
tggaggggtggcagagtgtggagttttagtgggttgggtgcccagaccctctgcttcctagctgaaaccatgggcagctcatttggcctctctgaacctcagtgtcctcctctgtgaagt

SEQ ID NO: 540315 - DNA, 120 bp, Artificial Sequence
  ENSG00000167202_74 (sequence is synthesized)
gggagcaacaatcctgcctcctccaagccctggagggaggactgcatgtgttcttgcatgtgtaggctcggcccttgcccggcacatcctaagagctcgatccatgccagctgctgctag

SEQ ID NO: 540316 - DNA, 120 bp, Artificial Sequence
  ENSG00000167202_75 (sequence is synthesized)
tgttgaaaaccagcagggtttattttcctgtaataaaggagtcttggcctagccagtgaaaattgcccctcaggtcaatagtctttccccagggcggggaccgtgcaagccatgtccccc

SEQ ID NO: 540317 - DNA, 120 bp, Artificial Sequence
  ENSG00000167202_76 (sequence is synthesized)
cattcagagggaggctccaggagggaacagtgttcacttggcatctttcggtatttctgggagggtgaattgcaatgatcaccaccaccaaagagctggctcccaatcgtcaactcatga

SEQ ID NO: 540318 - DNA, 120 bp, Artificial Sequence
  ENSG00000167207_0 (sequence is synthesized)
gtagacagatccaggctcaccagtcctgtgccactgggcttttggcgttctgcacaaggcctacccgcagatgccatgcctgctcccccagcctaatgggctttgatgggggaagagggt

SEQ ID NO: 540319 - DNA, 120 bp, Artificial Sequence
  ENSG00000167207_1 (sequence is synthesized)
ggttcagcctctcacgatgaggaggaaagagcaagtgtcctcctcggacattctccgggttgtgaaatgtgctcgcaggaggcttttcaggcacagaggagccagctggtcgagctgctg

SEQ ID NO: 540320 - DNA, 120 bp, Artificial Sequence
  ENSG00000167207_2 (sequence is synthesized)
gtctcagggtccctggaaggcttcgagagtgtcctggactggctgctgtcctgggaggtcctctcctgggaggactacgagggcttccacctcctgggccagcctctctcccacttggcc

SEQ ID NO: 540321 - DNA, 120 bp, Artificial Sequence
  ENSG00000167207_3 (sequence is synthesized)
aggcgccttctggacaccgtctggaataagggtacttgggcctgtcagaagctcatcgcggctgcccaagaagcccaggccgacagccagtcccccaagctgcatggctgctgggacccc

SEQ ID NO: 540322 - DNA, 120 bp, Artificial Sequence
  ENSG00000167207_4 (sequence is synthesized)
cactcgctccacccagcccgagacctgcagagtcaccggccagccattgtcaggaggctccacagccatgtggagaacatgctggacctggcatgggagcggggtttcgtcagccagtat

SEQ ID NO: 540323 - DNA, 120 bp, Artificial Sequence
  ENSG00000167207_5 (sequence is synthesized)
gaatgtgatgaaatcaggttgccgatcttcacaccgtcccagagggcaagaaggctgcttgatcttgccacggtgaaagcgaatggattggctgccttccttctacaacatgttcaggaa

SEQ ID NO: 540324 - DNA, 120 bp, Artificial Sequence
  ENSG00000167207_6 (sequence is synthesized)
ttaccagtcccattggccctgcctttggaagctgccacatgcaagaagtatatggccaagctgaggaccacggtgtctgctcagtctcgcttcctcagtacctatgatggagcagagacg

SEQ ID NO: 540325 - DNA, 120 bp, Artificial Sequence
  ENSG00000167207_7 (sequence is synthesized)
ctctgcctggaggacatatacacagagaatgtcctggaggtctgggcagatgtgggcatggctggacccccgcagaagagcccagccaccctgggcctggaggagctcttcagcacccct

SEQ ID NO: 540326 - DNA, 120 bp, Artificial Sequence
  ENSG00000167207_8 (sequence is synthesized)
ggccacctcaatgacgatgcggacactgtgctggtggtgggtgaggcgggcagtggcaagagcacgctcctgcagcggctgcacttgctgtgggctgcagggcaagacttccaggaattt

SEQ ID NO: 540327 - DNA, 120 bp, Artificial Sequence
  ENSG00000167207_9 (sequence is synthesized)
ctctttgtcttcccattcagctgccggcagctgcagtgcatggccaaaccactctctgtgcggactctactctttgagcactgctgttggcctgatgttggtcaagaagacatcttccag

SEQ ID NO: 540328 - DNA, 120 bp, Artificial Sequence
  ENSG00000167207_10 (sequence is synthesized)
ttactccttgaccaccctgaccgtgtcctgttaacctttgatggctttgacgagttcaagttcaggttcacggatcgtgaacgccactgctccccgaccgaccccacctctgtccagacc

SEQ ID NO: 540329 - DNA, 120 bp, Artificial Sequence
  ENSG00000167207_11 (sequence is synthesized)
ctgctcttcaaccttctgcagggcaacctgctgaagaatgcccgcaaggtggtgaccagccgtccggccgctgtgtcggcgttcctcaggaagtacatccgcaccgagttcaacctcaag

SEQ ID NO: 540330 - DNA, 120 bp, Artificial Sequence
  ENSG00000167207_12 (sequence is synthesized)
ggcttctctgaacagggcatcgagctgtacctgaggaagcgccatcatgagcccggggtggcggaccgcctcatccgcctgctccaagagacctcagccctgcacggtttgtgccacctg

SEQ ID NO: 540331 - DNA, 120 bp, Artificial Sequence
  ENSG00000167207_13 (sequence is synthesized)
cctgtcttctcatggatggtgtccaaatgccaccaggaactgttgctgcaggagggggggtccccaaagaccactacagatatgtacctgctgattctgcagcattttctgctgcatgcc

SEQ ID NO: 540332 - DNA, 120 bp, Artificial Sequence
  ENSG00000167207_14 (sequence is synthesized)
acccccccagactcagcttcccaaggtctgggacccagtcttcttcggggccgcctccccaccctcctgcacctgggcagactggctctgtggggcctgggcatgtgctgctacgtgttc

SEQ ID NO: 540333 - DNA, 120 bp, Artificial Sequence
  ENSG00000167207_15 (sequence is synthesized)
tcagcccagcagctccaggcagcacaggtcagccctgatgacatttctcttggcttcctggtgcgtgccaaaggtgtcgtgccagggagtacggcgcccctggaattccttcacatcact

SEQ ID NO: 540334 - DNA, 120 bp, Artificial Sequence
  ENSG00000167207_16 (sequence is synthesized)
ttccagtgcttctttgccgcgttctacctggcactcagtgctgatgtgccaccagctttgctcagacacctcttcaattgtggcaggccaggcaactcaccaatggccaggctcctgccc

SEQ ID NO: 540335 - DNA, 120 bp, Artificial Sequence
  ENSG00000167207_17 (sequence is synthesized)
acgatgtgcatccaggcctcggagggaaaggacagcagcgtggcagctttgctgcagaaggccgagccgcacaaccttcagatcacagcagccttcctggcagggctgttgtcccgggag

SEQ ID NO: 540336 - DNA, 120 bp, Artificial Sequence
  ENSG00000167207_18 (sequence is synthesized)
tccggcgccaggcctgtgcccgctggtgtctggcccgcagcctccgcaagcacttccactccatcccgccagctgcaccgggtgaggccaagagcgtgcatgccatgcccgggttcatct

SEQ ID NO: 540337 - DNA, 120 bp, Artificial Sequence
  ENSG00000167207_19 (sequence is synthesized)
ggctcatccggagcctgtacgagatgcaggaggagcggctggctcggaaggctgcacgtggcctgaatgttgggcacctcaagttgacattttgcagtgtgggccccactgagtgtgctg

SEQ ID NO: 540338 - DNA, 120 bp, Artificial Sequence
  ENSG00000167207_20 (sequence is synthesized)
ccctggcctttgtgctgcagcacctccggcggcccgtggccctgcagctggactacaactctgtgggtgacattggcgtggagcagctgctgccttgccttggtgtctgcaaggctctgt

SEQ ID NO: 540339 - DNA, 120 bp, Artificial Sequence
  ENSG00000167207_21 (sequence is synthesized)
atttgcgcgataacaatatctcagaccgaggcatctgcaagctcattgaatgtgctcttcactgcgagcaattgcagaagttagctctattcaacaacaaattgactgacggctgtgcac

SEQ ID NO: 540340 - DNA, 120 bp, Artificial Sequence
  ENSG00000167207_22 (sequence is synthesized)
actccatggctaagctccttgcatgcaggcagaacttcttggcattgaggctggggaataactacatcactgccgcgggagcccaagtgctggccgaggggctccgaggcaacacctcct

SEQ ID NO: 540341 - DNA, 120 bp, Artificial Sequence
  ENSG00000167207_23 (sequence is synthesized)
tgcagttcctgggattctggggcaacagagtgggtgacgagggggcccaggccctggctgaagccttgggtgatcaccagagcttgaggtggctcagcctggtggggaacaacattggca

SEQ ID NO: 540342 - DNA, 120 bp, Artificial Sequence
  ENSG00000167207_24 (sequence is synthesized)
gtgtgggtgcccaagccttggcactgatgctggcaaagaacgtcatgctagaagaactctgcctggaggagaaccatctccaggatgaaggtgtatgttctctcgcagaaggactgaaga

SEQ ID NO: 540343 - DNA, 120 bp, Artificial Sequence
  ENSG00000167207_25 (sequence is synthesized)
aaaattcaagtttgaaaatcctgaagttgtccaataactgcatcacctacctaggggcagaagccctcctgcaggcccttgaaaggaatgacaccatcctggaagtctggctccgaggga

SEQ ID NO: 540344 - DNA, 120 bp, Artificial Sequence
  ENSG00000167207_26 (sequence is synthesized)
acactttctctctagaggaggttgacaagctcggctgcagggacaccagactcttgctttgaagtctccgggaggatgttcgtctcagtttgtttgtgagcaggctgtgagtttgggccc

SEQ ID NO: 540345 - DNA, 120 bp, Artificial Sequence
  ENSG00000167207_27 (sequence is synthesized)
cagaggctgggtgacatgtgttggcagcctcttcaaaatgagccctgtcctgcctaaggctgaacttgttttctgggaacaccataggtcacctttattctggcagaggagggagcatca

SEQ ID NO: 540346 - DNA, 120 bp, Artificial Sequence
  ENSG00000167207_28 (sequence is synthesized)
gtgccctccaggatagacttttcccaagcctacttttgccattgacttcttcccaagattcaatcccaggatgtacaaggacagcccctcctccatagtatgggactggcctctgctgat

SEQ ID NO: 540347 - DNA, 120 bp, Artificial Sequence
  ENSG00000167207_29 (sequence is synthesized)
cctcccaggcttccgtgtgggtcagtggggcccatggatgtgcttgttaactgagtgccttttggtggagaggcccggcctctcacaaaagaccccttaccactgctctgatgaagagga

SEQ ID NO: 540348 - DNA, 120 bp, Artificial Sequence
  ENSG00000167207_30 (sequence is synthesized)
gtacacagaacacataattcaggaagcagctttccccatgtctcgactcatccatccaggccattccccgtctctggttcctcccctcctcctggactcctgcacacgctccttcctctg

SEQ ID NO: 540349 - DNA, 120 bp, Artificial Sequence
  ENSG00000167207_31 (sequence is synthesized)
aggctgaaattcagaatattagtgacctcagctttgatatttcacttacagcacccccaaccctggcacccagggtgggaagggctacaccttagcctgccctcctttccggtgtttaag

SEQ ID NO: 540350 - DNA, 120 bp, Artificial Sequence
  ENSG00000167207_32 (sequence is synthesized)
acatttttggaaggggacacgtgacagccgtttgttccccaagacattctaggtttgcaagaaaaatatgaccacactccagctgggatcacatgtggacttttatttccagtgaaatca

SEQ ID NO: 540351 - DNA, 120 bp, Artificial Sequence
  ENSG00000167207_33 (sequence is synthesized)
gttactcttcagttaagcctttggaaacagctcgactttaaaaagctccaaatgcagctttaaaaaattaatctgggccagaatttcaaacggcctcactaggcttctggttgatgcctg

SEQ ID NO: 540352 - DNA, 120 bp, Artificial Sequence
  ENSG00000167207_34 (sequence is synthesized)
tgaactgaactctgacaacagacttctgaaatagacccacaagaggcagttccatttcatttgtgccagaatgctttaggatgtacagttatggattgaaagtttacaggaaaaaaaatt

SEQ ID NO: 540353 - DNA, 120 bp, Artificial Sequence
  ENSG00000167207_35 (sequence is synthesized)
aggccgttccttcaaagcaaatgtcttcctggattattcaaaatgatgtatgttgaagcctttgtaaattgtcagatgctgtgcaaatgttattattttaaacattatgatgtgtgaaaa

SEQ ID NO: 540354 - DNA, 120 bp, Artificial Sequence
  ENSG00000167207_36 (sequence is synthesized)
ctggttaatatttataggtcactttgttttactgtcttaagtttatactcttatagacaacatggccgtgaactttatgctgtaaataatcagaggggaataaactgttgagtcaaaaca

SEQ ID NO: 540355 - DNA, 120 bp, Artificial Sequence
  ENSG00000167207_37 (sequence is synthesized)
gcagcccgagccggagccggagccgggagtcgtggcccggagtgggccttggagtcggcgcgcaggcggctcgcggttgtgaaatgtgctcgcaggaggcttttcaggcacagaggagcc

SEQ ID NO: 540356 - DNA, 120 bp, Artificial Sequence
  ENSG00000167207_38 (sequence is synthesized)
ggagtgggccttggagtcggcgcgcaggcggctcgcgcaaggaagtgatcctttctctacatgggcctcaccttggggaggacaatggtgtctttgaagttgtagtaactgaagtagaga

SEQ ID NO: 540357 - DNA, 120 bp, Artificial Sequence
  ENSG00000167207_39 (sequence is synthesized)
gttcagcctctcacgatgaggaggaaagagcaagtgtcctcctcggacattctccgggtaagaggagcaggcattgtcccgtcccagcttgatcctcagccttctttcatccttggccgc

SEQ ID NO: 540358 - DNA, 120 bp, Artificial Sequence
  ENSG00000167207_40 (sequence is synthesized)
gacatgctcccaggcctggggtcagatggggagtgctgactctgtttctgggctgttttctggggagaatgggtcggcgggtttttttccccaggacctgggcagggtcaatggtggggg

SEQ ID NO: 540359 - DNA, 120 bp, Artificial Sequence
  ENSG00000167207_41 (sequence is synthesized)
ccgctgtcgcatccttggctggtgtttccacagctgagaaccactccagggccaagcccagagcttattctacccttttttgtcctctcttcccctgtcctcggccaccccaccctcttg

SEQ ID NO: 540360 - DNA, 120 bp, Artificial Sequence
  ENSG00000167207_42 (sequence is synthesized)
gctcctctgcttagatgtgggcacaaggaggagaactccttggcctgagagaactaccttagatcctggcttccagtggcctctgcaggggggtacaccctctctcccaagcagccagac

SEQ ID NO: 540361 - DNA, 120 bp, Artificial Sequence
  ENSG00000167207_43 (sequence is synthesized)
acacaagtaacctcattgcctcagtttccccatctgaccagcacagggccccctgtgccccagcagcgttctgagagattggagctttctccttttgcttaccttggctaccgtatgagg

SEQ ID NO: 540362 - DNA, 120 bp, Artificial Sequence
  ENSG00000167207_44 (sequence is synthesized)
acggatacagagtgttccccccacccccagcccaggggatatttgattcatgaacattccctcagtgtctttgtgggggacaatgctgtgccaggctcagggatgccaggacgagtaaga

SEQ ID NO: 540363 - DNA, 68 bp, Artificial Sequence
  ENSG00000167207_45 (sequence is synthesized)
aataatcagaggggaataaactgttgagtcaaaacagccatcttccttgtgaccaaacatttaaaaat

SEQ ID NO: 540364 - DNA, 90 bp, Artificial Sequence
  ENSG00000167207_46 (sequence is synthesized)
gttgtcctccagcctgggcaacaagagtggaactccatctcaaataaataaagaaaataaaaaataaaaatattactaaaacttgtcaaa

SEQ ID NO: 540365 - DNA, 120 bp, Artificial Sequence
  ENSG00000167207_47 (sequence is synthesized)
aagaaaataaaaaataaaaatattactaaaacttgtcaaattttaaagcacaattttctacttgaagcggaggaaaatgatgttttcaacccgataatgtatagcttaaggcaaaagcaa

SEQ ID NO: 540366 - DNA, 120 bp, Artificial Sequence
  ENSG00000167207_48 (sequence is synthesized)
ttcttagaaaatagccaggcaatcaaaacacttttggcttcagtttagaaaagtttaaccccgtgaagttttcagctgtgcaggagcctccccgtacccagcctaaaaggctgcaacaca

SEQ ID NO: 540367 - DNA, 120 bp, Artificial Sequence
  ENSG00000167207_49 (sequence is synthesized)
tgtgaaaaggccccttggcccccctcgattccctcaaagtggctccaggagtctttaacagaaggatggagaaggtttacttatggctggctctccacagcgagcagcctctcatgcagg

SEQ ID NO: 540368 - DNA, 120 bp, Artificial Sequence
  ENSG00000167207_50 (sequence is synthesized)
ccttgtgttaaaatagtgcttagctgcgtttaataagcaagggatcaggtggtcacccagcaaggtaaaatcctacttccttgaaaggttttgcgtctggctgactcggtggtgtggcat

SEQ ID NO: 540369 - DNA, 120 bp, Artificial Sequence
  ENSG00000167207_51 (sequence is synthesized)
ctccctggaccctgcatgggagtgtgtctatgggttttctttgtgattggtgccctgttctgcccagaccattgtttctgatacagcagatcaggaggaaggtggtgttgagtctccttt

SEQ ID NO: 540370 - DNA, 120 bp, Artificial Sequence
  ENSG00000167207_52 (sequence is synthesized)
tgagtctcctttcgctgaggagtacacacagcagcccatttgcatagcactgtattgggttgtcagtttgtcatctttaaattcattcagcaatgaggccaggcatggtggctcatgcct

SEQ ID NO: 540371 - DNA, 120 bp, Artificial Sequence
  ENSG00000167207_53 (sequence is synthesized)
gcaccgagctgggctctagaagtctgggcccagcttcgcctctgccaccctgctttgcaacactgcccagatcccttcccttctgggccttaatttcaatatgtgatgatgacagccaca

SEQ ID NO: 540372 - DNA, 120 bp, Artificial Sequence
  ENSG00000167208_0 (sequence is synthesized)
aaacggggaacttagaaagtggcagcccctcggcttgtcgccggagctgagaaccaagagctcgaaggggccatatgacactcctcccggacccctggacacacacagccctggagactg

SEQ ID NO: 540373 - DNA, 120 bp, Artificial Sequence
  ENSG00000167208_1 (sequence is synthesized)
gagccttggagcatggcaagtccagagcaccctgggagccctggctgcatgggacccataacccagtgcacggcaaggacccagcaggaagcaccagccactggccccgacctcccgcac

SEQ ID NO: 540374 - DNA, 120 bp, Artificial Sequence
  ENSG00000167208_2 (sequence is synthesized)
ccaggacctgacgggcacttagacacacacagtggcctgagctccaactccagcatgaccacgcgggagcttcagcagtactggcagaaccagaaatgccgctggaagcacgtcaaactg

SEQ ID NO: 540375 - DNA, 120 bp, Artificial Sequence
  ENSG00000167208_3 (sequence is synthesized)
ctctttgagatcgcttcagctcgcatcgaggagagaaaagtctctaagtttgtggtgtaccaaatcatcgtcatccagactgggagctttgacaacaacaaggccgtcctggaacggcgc

SEQ ID NO: 540376 - DNA, 120 bp, Artificial Sequence
  ENSG00000167208_4 (sequence is synthesized)
tattccgacttcgcgaagctccagaaagcgctgctgaagacgttcagggaggagatcgaagacgtggagtttcccaggaagcacctgactgggaacttcgctgaggagatgatctgtgag

SEQ ID NO: 540377 - DNA, 120 bp, Artificial Sequence
  ENSG00000167208_5 (sequence is synthesized)
cgtcggcgcgccctgcaggagtacctgggcctgctctacgccatccgctgcgtgcgccgctcccgggagttcctggacttcctcacgcggccggagctgcgcgaggctttcggctgcctg

SEQ ID NO: 540378 - DNA, 120 bp, Artificial Sequence
  ENSG00000167208_6 (sequence is synthesized)
cgggccggccagtacccgcgcgccctggagctgctgctgcgcgtgctgccgctgcaggagaagctcaccgcccactgccctgcggccgccgtcccggccctgtgcgccgtgctgctgtgc

SEQ ID NO: 540379 - DNA, 120 bp, Artificial Sequence
  ENSG00000167208_7 (sequence is synthesized)
caccgcgacctcgaccgccccgccgaggccttcgcggccggagagagggccctgcagcgcctgcaggcccgggagggccatcgctactatgcgcctctgctggacgccatggtccgcctg

SEQ ID NO: 540380 - DNA, 120 bp, Artificial Sequence
  ENSG00000167208_8 (sequence is synthesized)
gcctacgcgctgggcaaggacttcgtgactctgcaggagaggctggaggagagccagctccggaggcccacgccccgaggcatcaccctgaaggagctcactgtgcgagaatacctgcac

SEQ ID NO: 540381 - DNA, 120 bp, Artificial Sequence
  ENSG00000167208_9 (sequence is synthesized)
ctgtgcgagaatacctgcactgagccggcctgggaccccgcagggacgctggagatttggggtcaccatggctcacagtgggctgtttggggttctttttttttatttttccttttcttt

SEQ ID NO: 540382 - DNA, 120 bp, Artificial Sequence
  ENSG00000167208_10 (sequence is synthesized)
cttttttgttatttgagacagtcttgctctgtcacccagactgaagtgcagtggctcaattatgtctcactgcagcctcaaactcctgggcacaagcaatcctcccacctcagcctccca

SEQ ID NO: 540383 - DNA, 120 bp, Artificial Sequence
  ENSG00000167208_11 (sequence is synthesized)
agcttcccaaaacactggggttacaagtgtgagccaccacccctggcctggggttcatttttaatgggaaaagccactgggggctctaactcgctgggtgactttggacaagcccctcct

SEQ ID NO: 540384 - DNA, 120 bp, Artificial Sequence
  ENSG00000167208_12 (sequence is synthesized)
ctggtcctcaatttctccatctgtattggacagaggtgctcctgggaccccttggaagcctctgcttgtgtcccacgtcctcttgatgccagggccacttcatctccaaaacacaaaacc

SEQ ID NO: 540385 - DNA, 120 bp, Artificial Sequence
  ENSG00000167208_13 (sequence is synthesized)
aactgccaaaaccgtccagagcagtgtccaccccaccagtgtctttgtgggaagctggagaagaagtttacctcacacattctagacaaaacttagtccatttccttgaagacagttctc

SEQ ID NO: 540386 - DNA, 120 bp, Artificial Sequence
  ENSG00000167208_14 (sequence is synthesized)
tccagctgctccaaggcttttctctctgttccttccaccttggaattgctttaaaatatttccatccattatcctaatactatcttagtattctagcccttcccccttaccatgtagacc

SEQ ID NO: 540387 - DNA, 82 bp, Artificial Sequence
  ENSG00000167208_15 (sequence is synthesized)
tatcttagtattctagcccttcccccttaccatgtagacctgacaaagcaaaacaaaagctcacctattgccctcaagaaca

SEQ ID NO: 540388 - DNA, 120 bp, Artificial Sequence
  ENSG00000167208_16 (sequence is synthesized)
gggtgggaggaccctggaccagaaagcaataatggcataagattctgtgataccaggcatttttggcaagggaagttgccaacaatttttctggctgggatggcatagcacattgtctag

SEQ ID NO: 540389 - DNA, 120 bp, Artificial Sequence
  ENSG00000167208_17 (sequence is synthesized)
gggtggattttcattcataaggcagctgttccctgaatggcttccctgggttatgtagaaacagcctggggaggaggtgatacaacatacttaatggggcctctgggcagaaaacagact

SEQ ID NO: 540390 - DNA, 120 bp, Artificial Sequence
  ENSG00000167208_18 (sequence is synthesized)
gaatcctcaacactgccccttttgagggtctgtgatcctggaacttctctgatggactgggatgcccttaactgaggtctgctgtctggaaaggacaccacaggcccagaatgaaggggc

SEQ ID NO: 540391 - DNA, 120 bp, Artificial Sequence
  ENSG00000167208_19 (sequence is synthesized)
atctggaccaatgacctagattcaacacagggcttggagctggtggtacaggctggttttggcccaatgtgtgttggaggctggaagcccctgaagacctaaactgcctggatgagctta

SEQ ID NO: 540392 - DNA, 120 bp, Artificial Sequence
  ENSG00000167208_20 (sequence is synthesized)
ttagggtgaattaatgagtctgtaatttgggaaccttaatgtgagacaccacttaaggagaggaacttggcccagcaagtgatcactctagaagtggacagctatgcactagactgcacc

SEQ ID NO: 540393 - DNA, 120 bp, Artificial Sequence
  ENSG00000167208_21 (sequence is synthesized)
agaatctgttcaacagcgacaccttgtggtaaaaactgtagacgccccatcaggctggatgggaaactagaaacagactgtctcatctttggacagatatccctcaaatctcccaatcta

SEQ ID NO: 540394 - DNA, 120 bp, Artificial Sequence
  ENSG00000167208_22 (sequence is synthesized)
ctccagggaaaagacacttcaagtgagagatattggacttcttgaaaatctaggcctatggaaaattaaagtgttaaatggaaaaattaaagagctatgagtctatttgtaatgatgaaa

SEQ ID NO: 540395 - DNA, 120 bp, Artificial Sequence
  ENSG00000167208_23 (sequence is synthesized)
tgacttatccagggtcacgtggcgagacagggacagcaccagaaccagacccgagatgtccacgtcaaagtgacatgctctgagaggcagcacacacagaataaccctgcatccaaattc

SEQ ID NO: 540396 - DNA, 120 bp, Artificial Sequence
  ENSG00000167208_24 (sequence is synthesized)
caggaagctcttaggggtcatccagctgggcctaggggtgcagggtcagtgctgaggcctgggcagggccgctagcctccctgagctttctggcttcaggctgggaggcacagttcaggg

SEQ ID NO: 540397 - DNA, 120 bp, Artificial Sequence
  ENSG00000167208_25 (sequence is synthesized)
tggactgtgaccccttggcctagaatgcccttagctctgctctctagtggctgtccccatagctggaactctgttttggagtggcaaaaccagttccacctgctggtaggggtaggttgg

SEQ ID NO: 540398 - DNA, 120 bp, Artificial Sequence
  ENSG00000167208_26 (sequence is synthesized)
ctcccaacacatccccagcaggcctctcttgggctcaaaagccaagctgtgcccagccacgtctccaaatgcttcctggcccccatgcagcaactgcatttagctgccttcccagaattt

SEQ ID NO: 540399 - DNA, 120 bp, Artificial Sequence
  ENSG00000167208_27 (sequence is synthesized)
cctgcatgctcacacagcccttccctctggggcccaacaatgccacagcctgttctatcaatcaccagctgttttcctttgagcagtctccttttacttatgcacatttacttgaaaaag

SEQ ID NO: 540400 - DNA, 120 bp, Artificial Sequence
  ENSG00000167208_28 (sequence is synthesized)
aaacttcctattactatcctaaatggaaactcagaatcacttgctataattagaaagtagctacaaaaataaacacaatgaaaccgatcactgttattacaccctaacccgcttttacct

SEQ ID NO: 540401 - DNA, 120 bp, Artificial Sequence
  ENSG00000167208_29 (sequence is synthesized)
gagacaggccctgagcctgaggccgctggtagacttttgttaaaagagagagagacagagacagagaaataagcattagagacctgcaatcaccaagctgagacttctctttgatttact

SEQ ID NO: 540402 - DNA, 120 bp, Artificial Sequence
  ENSG00000167208_30 (sequence is synthesized)
cagaaggactggaaaatgttgtcctgcaaaaggaggtaagtttctcaccacgtagcgctgatcatcccgtgttgcccgtgcgttgctgcagaccatctggggtcttgcccaagcaccctg

SEQ ID NO: 540403 - DNA, 120 bp, Artificial Sequence
  ENSG00000167208_31 (sequence is synthesized)
gagactttgctccctggtttcctggtcaccaactcgagtgttcagccctgtgtgctctccagctcctaagtcgtgggcctggtttcagctttgattgcccactcttggctttcaacccgt

SEQ ID NO: 540404 - DNA, 120 bp, Artificial Sequence
  ENSG00000167208_32 (sequence is synthesized)
tggtcgaagcctgaagccgcagtatgtccttgagtgggtccccccctacccatctagctgttgcccccatggtaagatcaagaaaatgccctcccctccaaaagtccccacgccgagccc

SEQ ID NO: 540405 - DNA, 120 bp, Artificial Sequence
  ENSG00000167208_33 (sequence is synthesized)
tcatctgtcagctcccaggctcggccccctcactagctccaggctgggaggcacagttcagggcagactgtggcccctcagcatagcatggacttagctctgctctctagtggctgtccc

SEQ ID NO: 540406 - DNA, 120 bp, Artificial Sequence
  ENSG00000167208_34 (sequence is synthesized)
catagctagaactctgttttggagcagcaaaactagttccacctgctggtagggctaagttgactcccaacatgtccccagcgtgttggtgttgggaaccttgatctagctgctcgtttt

SEQ ID NO: 540407 - DNA, 120 bp, Artificial Sequence
  ENSG00000167208_35 (sequence is synthesized)
ctcagtaaccaaagatccctggcactcctacgatgtctcaggccttatctagagctggggatacagcagtgaccaggacagaactggtccctgcctcacggaagtgaagtgtcaggaggc

SEQ ID NO: 540408 - DNA, 120 bp, Artificial Sequence
  ENSG00000167208_36 (sequence is synthesized)
cactcccaaagcaaatggaagctgggacagaatgatgtcctcagccaggtggtcagggaaggcttctcagagggggcgctgttcaaagaatcacagagcatacaaaggagctggccctgg

SEQ ID NO: 540409 - DNA, 120 bp, Artificial Sequence
  ENSG00000167208_37 (sequence is synthesized)
gagcacagagaggggagaattttaggcaaagaggtagcaggagcacagccctgaggcaggaaactacccccccaccaccctcggcatcctcagttctggtttgcacccagaaagggggta

SEQ ID NO: 540410 - DNA, 120 bp, Artificial Sequence
  ENSG00000167208_38 (sequence is synthesized)
ggtccaggacacacccggactgatgtgtcacactggctgtgccagctgagagagtgggctccaggcaccactaacagagaagccttgcaaggcaggtccatgcaccgcccgcctccagtt

SEQ ID NO: 540411 - DNA, 120 bp, Artificial Sequence
  ENSG00000167208_39 (sequence is synthesized)
accactcattgcaaaggaaatgagctgggagcctgtgtgtgggccgtgcagacccttttggttacaagccacaaaaacccaggttaatctgatgaggaaggaatttattatctgtaaagt

SEQ ID NO: 540412 - DNA, 120 bp, Artificial Sequence
  ENSG00000167208_40 (sequence is synthesized)
ccaggagcaggctagctttacaccaagcaggatccaaggacccacacttgtcacctcatatctctctctctctcccactttcgctttctctgtctcttcttagttctgctttcctccact

SEQ ID NO: 540413 - DNA, 120 bp, Artificial Sequence
  ENSG00000167208_41 (sequence is synthesized)
gtgccttcgctctcagagagagctctcccctggcagtgacaagatggctgcagcagctccagcaacctcagaggactcccccatccagggtccttgtgagctcctcatctgtaggatgtg

SEQ ID NO: 540414 - DNA, 120 bp, Artificial Sequence
  ENSG00000167208_42 (sequence is synthesized)
cagtaaacactcacgtgtcctttcctgaggagcccagtggctggggtgggggctgaggggcagcccctatgccctcacagtgcagcaaccttggttagctcacccatcagggcagacttg

SEQ ID NO: 540415 - DNA, 120 bp, Artificial Sequence
  ENSG00000167208_43 (sequence is synthesized)
ggcagaaatcatgtcttggcatattgttttgtaatctgctttttaaattgtcactatatattatgagcatttccctataatatacaatattcttccacattatgtttaatggtttcattg

SEQ ID NO: 540416 - DNA, 120 bp, Artificial Sequence
  ENSG00000167208_44 (sequence is synthesized)
tattctaatgcatattctatagttattttaaccaccccacaatgttgcaaaatgtccttatttgggacaacactgctgcaaacactttgacccatatgtcctttttgtgtgcactcttat

SEQ ID NO: 540417 - DNA, 120 bp, Artificial Sequence
  ENSG00000167208_45 (sequence is synthesized)
ggcaacttctaacggtggcatttctgaatcatagacacttttttgacttctacatattttatttttttagttgacaaaaactgtatttatgaatcataaacacttaatgattttgctatt

SEQ ID NO: 540418 - DNA, 120 bp, Artificial Sequence
  ENSG00000167210_0 (sequence is synthesized)
atgatgccccagaagaaaaggcggaggaagaaggacatcgacttcctggccctgtacgaagcggagctgctgaactacgcctcggaggacgacgagggggagctggaacacgagtactac

SEQ ID NO: 540419 - DNA, 120 bp, Artificial Sequence
  ENSG00000167210_1 (sequence is synthesized)
aaggccagagtgtatgaagtggtcacagccacgggggatgttcgcggtgcagggacggatgccaatgtcttcatcacgctttttggagagaatgggctctctcccaagctccagctcacc

SEQ ID NO: 540420 - DNA, 120 bp, Artificial Sequence
  ENSG00000167210_2 (sequence is synthesized)
agcaagagcaagtctgcctttgagaagggcaacgtcgatgtgttccgggtgagaaccaacaatgtgggcctcatctataaagtcaggattgagcatgacaacacgggcttgaatgccagc

SEQ ID NO: 540421 - DNA, 120 bp, Artificial Sequence
  ENSG00000167210_3 (sequence is synthesized)
tggtacctggaccatgtgattgtgaccgacatgaagaggcctcatctccgttactacttcaactgcaacaactggctgagcaaggtggaaggtgaccgccagtggtgccgtgacctgctg

SEQ ID NO: 540422 - DNA, 120 bp, Artificial Sequence
  ENSG00000167210_4 (sequence is synthesized)
gccagcttcaaccccatggacatgcccagaggtaataagtatgaagtcaaggtatacactggtgatgtaattggtgcagggacagatgctgatgtcttcatcaatatttttggagagtat

SEQ ID NO: 540423 - DNA, 120 bp, Artificial Sequence
  ENSG00000167210_5 (sequence is synthesized)
ggagacacaggggagcgtaggctagaaaatgaaaaggacaactttgaaaagggagctgaagacaggttcatcctggatgccccggatttggggcagctgatgaagatcaatgttggccac

SEQ ID NO: 540424 - DNA, 120 bp, Artificial Sequence
  ENSG00000167210_6 (sequence is synthesized)
aacaataaggggggctctgcaggttggttcctgtcccagatagtcattgaagatattgggaacaaaagaaaatatgacttcccccttaaccgctggctggccttggacgaagacgatggc

SEQ ID NO: 540425 - DNA, 120 bp, Artificial Sequence
  ENSG00000167210_7 (sequence is synthesized)
aaaatccaaagggatatcttagtgggcggagctgagaccacagctattacgtatattgtcaccgtcttcactggggatgtccggggggctggtaccaaatccaaaatctacttggtcatg

SEQ ID NO: 540426 - DNA, 120 bp, Artificial Sequence
  ENSG00000167210_8 (sequence is synthesized)
tatggggccagagggaataagaacagtgggaaaatcttcctggagggcggcgtgtttgaccgaggccgcacggacatcttccacatcgagctggctgtcctccttagccccctgagtcgg

SEQ ID NO: 540427 - DNA, 120 bp, Artificial Sequence
  ENSG00000167210_9 (sequence is synthesized)
gtctccgtcgggcatggcaatgtgggtgtcaacagaggctggttctgtgagaaggtggtgattctgtgccccttcactggtatccagcagaccttcccttgtagcaactggctggatgag

SEQ ID NO: 540428 - DNA, 120 bp, Artificial Sequence
  ENSG00000167210_10 (sequence is synthesized)
aagaaagcggatgggttgattgagaggcagctctatgagatggtgtctctcaggaagaagcggctgaaaaaattcccttggtccctgtgggtctggacaaccgacctaaagaaagctggt

SEQ ID NO: 540429 - DNA, 120 bp, Artificial Sequence
  ENSG00000167210_11 (sequence is synthesized)
accaactctcccatcttcatccagatttatgggcagaaggggcggacagatgagattctcctgaatcccaacaacaagtggttcaaacccggcataatcgagaagtttaggattgagctc

SEQ ID NO: 540430 - DNA, 120 bp, Artificial Sequence
  ENSG00000167210_12 (sequence is synthesized)
ccggatcttggcaggttttataagattcgagtatggcatgataaaaggagttctggttctggatggcatttagaaaggatgaccctgatgaacactctgaacaaagacaagtacaacttc

SEQ ID NO: 540431 - DNA, 120 bp, Artificial Sequence
  ENSG00000167210_13 (sequence is synthesized)
aattgcaaccgctggctggatgccaatgaggatgacaatgagatagtgagggaaatgactgcagaaggcccaacagtgcgcaggatcatgggcatggcccggtaccatgtgactgtgtgc

SEQ ID NO: 540432 - DNA, 120 bp, Artificial Sequence
  ENSG00000167210_14 (sequence is synthesized)
acaggtgaacttgaaggtgctgggaccgatgccaacgtctatctctgcctttttggtgatgtgggggacacgggggaacggctgctctacaactgcaggaataacacagacctgtttgaa

SEQ ID NO: 540433 - DNA, 120 bp, Artificial Sequence
  ENSG00000167210_15 (sequence is synthesized)
aagggcaatgctgacgagttcactatcgagtctgtcaccatgcggaatgtgaggcgggtgaggatcagacacgatggcaaaggctccggcagcggctggtacctggacagagtgctggtg

SEQ ID NO: 540434 - DNA, 120 bp, Artificial Sequence
  ENSG00000167210_16 (sequence is synthesized)
agagaggaggggcagcctgagagcgacaacgtggagttcccatgtctcaggtggttggacaaggataaggatgatgggcagctggtccgagagttgctacccagtgacagcagcgcgaca

SEQ ID NO: 540435 - DNA, 120 bp, Artificial Sequence
  ENSG00000167210_17 (sequence is synthesized)
ctgaagaactttcgctatcacatcagcttgaagactggggatgtctctggggccagcacggattctagagtctacatcaagctctatggggataaatctgacaccatcaagcaagttctt

SEQ ID NO: 540436 - DNA, 120 bp, Artificial Sequence
  ENSG00000167210_18 (sequence is synthesized)
cttgtctctgacaacaacctcaaagactactttgaacgtggccgggtggatgagttcaccctcgagaccctgaacattggaaatatcaaccggctggtgattgggcatgacagcactggc

SEQ ID NO: 540437 - DNA, 120 bp, Artificial Sequence
  ENSG00000167210_19 (sequence is synthesized)
atgcatgccagctggttcctgggcagcgttcagatccgtgtgccccgtcaaggcaagcagtacacctttcccgccaaccgctggctggacaagaaccaggctgacgggcgcctggaggtg

SEQ ID NO: 540438 - DNA, 120 bp, Artificial Sequence
  ENSG00000167210_20 (sequence is synthesized)
gagctgtatcccagcgaggtggtggagatccagaaattggtccactatgaggttgagatttggacaggagatgtgggtggcgcaggcaccagtgcccgagtctacatgcagatctatgga

SEQ ID NO: 540439 - DNA, 120 bp, Artificial Sequence
  ENSG00000167210_21 (sequence is synthesized)
gagaaaggcaagacagaagtgctcttcctctccagccgctcaaaagtttttgaacgggcgtccaaggacacattccagcttgaggcggccgacgtgggcgaggtctataagctccggctc

SEQ ID NO: 540440 - DNA, 120 bp, Artificial Sequence
  ENSG00000167210_22 (sequence is synthesized)
gggcacacgggcgagggctttgggcccagctggttcgtggacaccgtgtggctgcggcacctggtggtgcgggaggtggacctcacgccggaggaggaggcccggaagaagaaggagaag

SEQ ID NO: 540441 - DNA, 120 bp, Artificial Sequence
  ENSG00000167210_23 (sequence is synthesized)
gacaagctgcggcagctgctcaagaaggagcggctgaaggccaagctgcagaggaagaagaagaagaggaagggcagcgacgaagaggacgagggggaggaagaggagtcgtcctcatca

SEQ ID NO: 540442 - DNA, 120 bp, Artificial Sequence
  ENSG00000167210_24 (sequence is synthesized)
gaggagtcctcgtcagaggaggaggagatggaagaagaggaggaagaggaggagtttgggccggggatgcaggaggtgattgagcagcacaagttcgaagcccaccgctggctggcccgg

SEQ ID NO: 540443 - DNA, 120 bp, Artificial Sequence
  ENSG00000167210_25 (sequence is synthesized)
ggcaaggaggacaacgaacttgtcgtggagttggtgccagctggcaagccgggtcctgagcgaaacacctatgaggttcaggtggtcacggggaatgtgcccaaggccggcactgatgct

SEQ ID NO: 540444 - DNA, 120 bp, Artificial Sequence
  ENSG00000167210_26 (sequence is synthesized)
aacgtctacctaaccatctacggcgaggagtatggagacacgggcgaacgacccctgaagaagtcagacaagtccaacaaatttgagcaggggcagacagacaccttcaccatctatgcc

SEQ ID NO: 540445 - DNA, 120 bp, Artificial Sequence
  ENSG00000167210_27 (sequence is synthesized)
attgacctgggggccctgaccaagattcggattcgccacgacaacacaggcaacagagcaggctggttcctggacagaatagacattactgacatgaacaacgagatcacgtactacttt

SEQ ID NO: 540446 - DNA, 120 bp, Artificial Sequence
  ENSG00000167210_28 (sequence is synthesized)
acgttggctggcagtggaggaagatgatggccagctgtccagggagctgttgccagtggatgagtcctatgtgctgccacagagcgaggagggtaggggaggcggtgacaacaaccccct

SEQ ID NO: 540447 - DNA, 120 bp, Artificial Sequence
  ENSG00000167210_29 (sequence is synthesized)
cgacaacctggccctggagcagaaagataaatctaccacattctcagtgaccataaagactggggttaagaagaatgcgggcacagatgctaatgtcttcatcacactctttggcacaca

SEQ ID NO: 540448 - DNA, 120 bp, Artificial Sequence
  ENSG00000167210_30 (sequence is synthesized)
ggatgacactggaatgaccctcctgaagtcctccaagacaaacagcgataagtttgagagggacagcattgaaatcttcacggtggagacgctggatctgggagacctgtggaaagtccg

SEQ ID NO: 540449 - DNA, 120 bp, Artificial Sequence
  ENSG00000167210_31 (sequence is synthesized)
gcttggccatgacaacacaggcaaggccccaggctggtttgtagactgggtagaggtggatgccccatctcttgggaagtgcatgacgtttccctgtggccgctggctggccaaaaacga

SEQ ID NO: 540450 - DNA, 120 bp, Artificial Sequence
  ENSG00000167210_32 (sequence is synthesized)
agacgacgggtccatcatcagagacctcttccatgcagagcttcagacgaggctgtacacaccatttgttccttacgagatcaccctctacaccagtgatgtctttgctgctgggacaga

SEQ ID NO: 540451 - DNA, 120 bp, Artificial Sequence
  ENSG00000167210_33 (sequence is synthesized)
tgccaacatcttcatcatcatctatggctgcgatgccgtgtgcacccagcagaagtatctgtgtaccaacaagagggaacagaagcagttctttgagaggaagtctgcctcccgcttcat

SEQ ID NO: 540452 - DNA, 120 bp, Artificial Sequence
  ENSG00000167210_34 (sequence is synthesized)
cgtagagttagaagatgtgggagaaatcattgaaaaaattcggattggccataataacacgggcatgaatcctgggtggcactgctctcacgtggacatccgcaggctcctcccggataa

SEQ ID NO: 540453 - DNA, 120 bp, Artificial Sequence
  ENSG00000167210_35 (sequence is synthesized)
agacggtgcagagaccttgactttcccatgcgatcggtggcttgccacctctgaggatgacaaaaagaccattcgagaactggttccatatgacatcttcactgagaaatacatgaaaga

SEQ ID NO: 540454 - DNA, 120 bp, Artificial Sequence
  ENSG00000167210_36 (sequence is synthesized)
tgggtccttacggcaagtctacaaggaagtagaagagcctctggacattgtgctgtactcggtgcagatcttcacagggaacattcctggggcagggacggatgccaaggtgtacatcac

SEQ ID NO: 540455 - DNA, 120 bp, Artificial Sequence
  ENSG00000167210_37 (sequence is synthesized)
catctatggagacctcggggacactggggagcgataccttggcaagtcagagaaccggaccaacaagttcgagagaggaacggctgacaccttcatcatcgaggccgctgacctaggcgt

SEQ ID NO: 540456 - DNA, 120 bp, Artificial Sequence
  ENSG00000167210_38 (sequence is synthesized)
catctacaagatcaagctccgccatgacaactccaagtggtgcgcagactggtacgtggagaaggtggagatctggaatgacaccaacgaggacgagttcctgttcctatgcgggcgctg

SEQ ID NO: 540457 - DNA, 120 bp, Artificial Sequence
  ENSG00000167210_39 (sequence is synthesized)
gctctccctgaagaaggaggatgggcgactcgagaggctcttttacgagaaggagtacactggggaccgcagcagcaactgcagcagccctgctgacttctgggagatcgccctgagctc

SEQ ID NO: 540458 - DNA, 120 bp, Artificial Sequence
  ENSG00000167210_40 (sequence is synthesized)
caagatggccgatgtcgacatcagcacagtgaccgggcccatggctgactacgttcaagagggcccaattattccctactatgtgtcagtcaccactgggaagcacaaggacgcggccac

SEQ ID NO: 540459 - DNA, 120 bp, Artificial Sequence
  ENSG00000167210_41 (sequence is synthesized)
tgacagccgagccttcatctttctcatcggggaggatgatgaacgtagtaagcgcatctggttggactacccccgagggaagaggggcttcagccgtggctctgtggaggagttctacgt

SEQ ID NO: 540460 - DNA, 120 bp, Artificial Sequence
  ENSG00000167210_42 (sequence is synthesized)
cgcaggcttggatgtgggcatcatcaagaaaatagaggttctctatgaaatgacggtgtggacaggggatgtggttggcgggggcactgactccaacatcttcatgaccctctacggcat

SEQ ID NO: 540461 - DNA, 120 bp, Artificial Sequence
  ENSG00000167210_43 (sequence is synthesized)
caacgggagcacagaggagatgcagctggacaaaaagaaagccaggtttgagcgggagcagaacgacaccttcatcatggagatcctagacattgctccattcaccaagatgcggatccg

SEQ ID NO: 540462 - DNA, 120 bp, Artificial Sequence
  ENSG00000167210_44 (sequence is synthesized)
gattgatggcctgggcagtcggccggagtggttcctggagaggatcctactgaagaacatgaacactggagacctgaccatgttctactatggagactggctgtcccagcggaagggcaa

SEQ ID NO: 540463 - DNA, 120 bp, Artificial Sequence
  ENSG00000167210_45 (sequence is synthesized)
gaagaccctggtgtgtgaaatgtgtgccgttatcgatgaggaagaaatgatggagtggacctcctacaccgtcgcagttaagaccagcgacatcctgggagcaggcactgatgccaacgt

SEQ ID NO: 540464 - DNA, 120 bp, Artificial Sequence
  ENSG00000167210_46 (sequence is synthesized)
gttcatcatcatcttcggggagaacggggatagtgggacactggccctgaagcagtcggcaaactggaacaagtttgagcggaacaacacggacacattcaacttccctgacatgctgag

SEQ ID NO: 540465 - DNA, 120 bp, Artificial Sequence
  ENSG00000167210_47 (sequence is synthesized)
cttgggccacctctgcaagctgagggtctggcacgacaacaaagggatatttcctggctggcatctgagctatgtcgatgtgaaggacaactcccgcgacgagaccttccacttccagtg

SEQ ID NO: 540466 - DNA, 120 bp, Artificial Sequence
  ENSG00000167210_48 (sequence is synthesized)
tgactgctggctctccaagagtgagggtgacgggcagacggtccgcgactttgcctgtgccaacaacaagatctgtgatgagctggaagagaccacctacgagatcgtcatagaaacggg

SEQ ID NO: 540467 - DNA, 120 bp, Artificial Sequence
  ENSG00000167210_49 (sequence is synthesized)
caacggaggcgaaaccagggagaacgtctggctcatcctggagggcaggaagaaccgatccaaagagtttctcatggaaaattcttctaggcagcgggcctttaggaaggggaccacaga

SEQ ID NO: 540468 - DNA, 120 bp, Artificial Sequence
  ENSG00000167210_50 (sequence is synthesized)
cacgtttgagtttgacagcatctacttgggggacattgcctccctctgtgtgggccaccttgccagggaagaccggtttatccccaagagagaacttgcctggcatgtcaagaccatcac

SEQ ID NO: 540469 - DNA, 120 bp, Artificial Sequence
  ENSG00000167210_51 (sequence is synthesized)
catcaccgagatggagtacggcaatgtgtacttctttaactgtgactgcctcatccccctcaagaggaagaggaagtacttcaaggtattcgaggttaccaagacgacagagagctttgc

SEQ ID NO: 540470 - DNA, 120 bp, Artificial Sequence
  ENSG00000167210_52 (sequence is synthesized)
cagcaaggtccagagcctggtgcccgtcaagtacgaagtcatcgtgacaacaggctatgagccaggggcaggcactgatgccaacgtcttcgtgaccatctttggggccaacggagacac

SEQ ID NO: 540471 - DNA, 120 bp, Artificial Sequence
  ENSG00000167210_53 (sequence is synthesized)
aggcaagcgggagctgaagcagaaaatgcgcaacctcttcgagcggggcagcacagaccgcttcttcctggagacgctggagctgggtgagctgcgcaaggtgcgcctggagcacgacag

SEQ ID NO: 540472 - DNA, 120 bp, Artificial Sequence
  ENSG00000167210_54 (sequence is synthesized)
cagtggctactgctcaggctggctggtggagaaggtggaggtcaccaacaccagcaccggcgtggccaccatcttcaactgtggcaggtggctggacaagaagcggggggatggactcac

SEQ ID NO: 540473 - DNA, 120 bp, Artificial Sequence
  ENSG00000167210_55 (sequence is synthesized)
ctggagagacctcttcccttctgtctgaggggctagggcccccaccctctcactgagatgccccaatctcacatttctgccctccaccttggcggtcagcagcccttcaaagcctctagc

SEQ ID NO: 540474 - DNA, 120 bp, Artificial Sequence
  ENSG00000167210_56 (sequence is synthesized)
attggcactgggggctagcagtccactgagaacttcatggggtcctgctccccaccctacccccagtttattgaacctacagtgataataattagcatgtgtcataatctgtggctgccc

SEQ ID NO: 540475 - DNA, 120 bp, Artificial Sequence
  ENSG00000167210_57 (sequence is synthesized)
agtacatgttgaactgtaactgctggctggccaaggacagaggcgacggcatcacctcccgtgtcttcgacctcttggatgccatggtggtgaacattggggtgaaggttctctatgaaa

SEQ ID NO: 540476 - DNA, 120 bp, Artificial Sequence
  ENSG00000167210_58 (sequence is synthesized)
agagaaggcagagggaacagcaccttgggcacggggaagccaagaaaacggggcactctggcccacccaggcctgagctataggagggccgtgggcgccagagctcagggaggaggtctc

SEQ ID NO: 540477 - DNA, 120 bp, Artificial Sequence
  ENSG00000167210_59 (sequence is synthesized)
acacaaactctggaaaagatgaaatgaggtcgagagggacattaggtggcatctggaggagtaggacatgatggggaaagaggatgtgtggaggaggagggctttgggggtgttgtaacc

SEQ ID NO: 540478 - DNA, 120 bp, Artificial Sequence
  ENSG00000167210_60 (sequence is synthesized)
agaccctcactcttccttccagccaccacccaccccttcccctggttcctctggcttgtcaatggaccttgttaaagcacaaatgtcactgtagaggatcattacatgaacccagcccat

SEQ ID NO: 540479 - DNA, 120 bp, Artificial Sequence
  ENSG00000167210_61 (sequence is synthesized)
gatactttgtggaggggttatgagagaattgcaggcagggccccagcacctagagcccatgggccagctgacccacaggaacaaacagagaatggcgttgagtggcagatgctgaggcac

SEQ ID NO: 540480 - DNA, 120 bp, Artificial Sequence
  ENSG00000167210_62 (sequence is synthesized)
gtagggatgcgggggttcaagaggaagtcctcgccgcaagatggtgtcttgggggaaaactagggggagggagcaacttaaactgggccttggcaggttcctggtgtggtctgcttcctc

SEQ ID NO: 540481 - DNA, 120 bp, Artificial Sequence
  ENSG00000167210_63 (sequence is synthesized)
cagcagtagagtggtgataggaaagatggcatctgggatactgtgaatctctgagtctcacggtgcagccaatggtgtccacacaataccctccttaactgaaaaagcctggagggcaag

SEQ ID NO: 540482 - DNA, 120 bp, Artificial Sequence
  ENSG00000167210_64 (sequence is synthesized)
caggctgggacttgctgcagagtgtggatgagaaattgagtcttcacccaggggatagaagtggagaagcagaggccatcaagatggtgtattttaagcaaaaactaattaacacttttc

SEQ ID NO: 540483 - DNA, 120 bp, Artificial Sequence
  ENSG00000167210_65 (sequence is synthesized)
cccaaaaaagctaggctaattaaattattaccaaccatatcctataaagaactcatcttagcatctgcttgctaagaagtgtatacttttccccagtttcaataaacccagtggcaagtg

SEQ ID NO: 540484 - DNA, 120 bp, Artificial Sequence
  ENSG00000167210_66 (sequence is synthesized)
agaggaagaaccgaggtgggggcttggtgaaggcacaccaggaagagcaggctgcgcctcaccctccagtggagacagagggcagacattctctttggagcacacctcaggctaaatggc

SEQ ID NO: 540485 - DNA, 120 bp, Artificial Sequence
  ENSG00000167210_67 (sequence is synthesized)
gaaccagggtcctgacctggagtctgacctctgccagaaactcatcaggtcaccctggacaagtcatgccatctttatgggcttttgtttcctcttctgataaatgggcttaatgttgcc

SEQ ID NO: 540486 - DNA, 120 bp, Artificial Sequence
  ENSG00000167210_68 (sequence is synthesized)
agcctaacttcttaagatgttctgaaaatccaaggcatttaagcttggaaaggaaaaagtgccacagaaccatgaggctggggacaaactgtgaacatccccagcttccccttgcagctc

SEQ ID NO: 540487 - DNA, 120 bp, Artificial Sequence
  ENSG00000167210_69 (sequence is synthesized)
ctttttggctcatggctatggggtcaacagaaggccccagcccttatctctggtactgaatcaaaaccaatgggcttcttggaccaggtcagaagctgtcccacaaaggttctctatgaa

SEQ ID NO: 540488 - DNA, 120 bp, Artificial Sequence
  ENSG00000167216_0 (sequence is synthesized)
acttttctcccttctctagggtcctagcacagtgtctgatggagctttcctaccagaccctgaaattcacgcatcaggcgcgggaagcgtgcgagatgaggacagaagcacgacgaaaaa

SEQ ID NO: 540489 - DNA, 120 bp, Artificial Sequence
  ENSG00000167216_1 (sequence is synthesized)
atcttctcattttgatttcgcattatttaacacaagaagggtatatcgatacagcaaatgctttggagcaagaaactaaactggggttacgacggtttgaagtttgtgacaacattgatc

SEQ ID NO: 540490 - DNA, 120 bp, Artificial Sequence
  ENSG00000167216_2 (sequence is synthesized)
ttgaaactattttgatggaatatgagagttattattttgtaaaatttcagaaataccccaaaattgtcaaaaagtcatcagacacagcagaaaataatttaccgcaaagaagtagaggga

SEQ ID NO: 540491 - DNA, 120 bp, Artificial Sequence
  ENSG00000167216_3 (sequence is synthesized)
agaccagaaggatgatgaacgacagttgtcaaaatcttcccaagatcaatcagcagaggccccggtccaaaaccacagcggggaagacaggggacaccaaatcgctcaataaggagcatc

SEQ ID NO: 540492 - DNA, 120 bp, Artificial Sequence
  ENSG00000167216_4 (sequence is synthesized)
ctaatcaggaggtagttgataacactcgcctggaaagtgccaacttcggcctacatatatcaagaatccgtaaagacagtggagaggaaaatgcccacccacgaagaggccaaatcattg

SEQ ID NO: 540493 - DNA, 120 bp, Artificial Sequence
  ENSG00000167216_5 (sequence is synthesized)
acttccaagggctgctcacagatgccatcaagggagcaaccagtgaacttgccttgaacaccttcgaccataatccagacccctcagaacgactgctgaaacctctgagtgcatttattg

SEQ ID NO: 540494 - DNA, 120 bp, Artificial Sequence
  ENSG00000167216_6 (sequence is synthesized)
gcatgaacagtgagatgcgagaattggcagccgtggtgagccgggacatttatctccataatccaaacataaagtggaatgacattattggacttgatgcagccaagcagttagtcaaag

SEQ ID NO: 540495 - DNA, 120 bp, Artificial Sequence
  ENSG00000167216_7 (sequence is synthesized)
aagctgttgtgtatcctataaggtatccacagctatttacaggaattctttctccctggaaaggactactgctgtacggccctccaggtacaggaaagactttactggccaaagctgtgg

SEQ ID NO: 540496 - DNA, 120 bp, Artificial Sequence
  ENSG00000167216_8 (sequence is synthesized)
ccactgaatgtaaaacaaccttctttaacatttctgcatccaccattgtcagcaaatggagaggggattcagaaaaactcgttcgggtgttatttgagcttgcccgctaccacgccccat

SEQ ID NO: 540497 - DNA, 120 bp, Artificial Sequence
  ENSG00000167216_9 (sequence is synthesized)
ccacgatcttcctggacgagctggagtcggtgatgagtcagagaggcacagcttctgggggagaacatgaaggaagcctgcggatgaagacagagttactggtgcagatggatgggctgg

SEQ ID NO: 540498 - DNA, 120 bp, Artificial Sequence
  ENSG00000167216_10 (sequence is synthesized)
cacgctcagaagatctcgtatttgtcttagcagcttctaacctgccgtgggagctggactgtgccatgttacgccgcctggagaagaggattctggtcgatctccccagccgggaggcca

SEQ ID NO: 540499 - DNA, 120 bp, Artificial Sequence
  ENSG00000167216_11 (sequence is synthesized)
ggcaggccatgatctaccactggctgcctcctgtgagcaagagcagggccttggagctgcacacagagctggagtacagtgtgctgagccaggagactgagggctactcaggctcagata

SEQ ID NO: 540500 - DNA, 120 bp, Artificial Sequence
  ENSG00000167216_12 (sequence is synthesized)
cagggaagcagccatgcggcccgtgaggaagatctttgatgcacttgaaaatcaccagtcagaaagcagcgacttacccaggatccagttggatatagtaaccactgccgactttctgga

SEQ ID NO: 540501 - DNA, 120 bp, Artificial Sequence
  ENSG00000167216_13 (sequence is synthesized)
tgtgctaactcacaccaagccctccgcaaagaatctggctcagagatactcagactggcaaagagagttcgagtctgtctgaaaccacatttaccctgacctggccacaaaggcaaccac

SEQ ID NO: 540502 - DNA, 120 bp, Artificial Sequence
  ENSG00000167216_14 (sequence is synthesized)
aaagacctcctagtttattaatgtccgtgggagaacaaaatgattggaatggaaaagagaaaattatttttgaagactggattaacttgagccactgtattgttttggatagctgagata

SEQ ID NO: 540503 - DNA, 120 bp, Artificial Sequence
  ENSG00000167216_15 (sequence is synthesized)
tatttattaacttaccattatcgatgtcagcaaaatattgagagtttcagttacatacatatatgtgctattgggtcatacaatggagatttttctgacaattagactccataaaatttt

SEQ ID NO: 540504 - DNA, 120 bp, Artificial Sequence
  ENSG00000167216_16 (sequence is synthesized)
aatgaacaattttctgtaatgttactcatttgtaaactttttaagaaaaagatgtacttagaaaagttgtgttggccacacacaggatgaccctgagttggggcagccaagtagaagcta

SEQ ID NO: 540505 - DNA, 120 bp, Artificial Sequence
  ENSG00000167216_17 (sequence is synthesized)
agcttgacaggcactgcccagctgacagtcccagggtgaaggaggacggaagcagggaaggcaatgcagtctgtttctcattccggacaatattctgaatctcatcagctccccctaatt

SEQ ID NO: 540506 - DNA, 120 bp, Artificial Sequence
  ENSG00000167216_18 (sequence is synthesized)
ctgactccatccagctttgtcagcagcaaacccctcccaaactaagccccactcagaaatgtcactgagcattctgatgctagagctaatagccagggtgactagcacaccatcaccatc

SEQ ID NO: 540507 - DNA, 120 bp, Artificial Sequence
  ENSG00000167216_19 (sequence is synthesized)
agctgccagtctgattgttttgggttctggcccccaataacatcttttcactcttcacacctcacatccggtgtgctctgcccttctctttccattgccgcagcttctcatcagatccaa

SEQ ID NO: 540508 - DNA, 120 bp, Artificial Sequence
  ENSG00000167216_20 (sequence is synthesized)
agcttaggatggggcacctaagcttcgagaacattcatcccaagtcttccctgctcttaggctcttccccctctccttaaggggttataaacaactagacgcatctctctcagaaaccca

SEQ ID NO: 540509 - DNA, 120 bp, Artificial Sequence
  ENSG00000167216_21 (sequence is synthesized)
caatccgaggcatctactttcaacccttgataaattttgaaggcttctactaagtaatgccacttcttttcccccactagaacttacctatgggaaatcaccttcttttctcttccttgc

SEQ ID NO: 540510 - DNA, 120 bp, Artificial Sequence
  ENSG00000167216_22 (sequence is synthesized)
cttgtcttcatcatccctgcagacagactcttcaagaggaaaaacctccagaaagagacactttggatagctaagtatcccaaaggattttacccttttaaacaaaaccaaagcattttt

SEQ ID NO: 540511 - DNA, 120 bp, Artificial Sequence
  ENSG00000167216_23 (sequence is synthesized)
ttcggtatcgattattttgagattattctcaaatgcctctttaaacatcatttcatggaaaatgtcaaattgaaaatataccttatttaacaaattgaaaataaaaaagatttcatctca

SEQ ID NO: 540512 - DNA, 120 bp, Artificial Sequence
  ENSG00000167216_24 (sequence is synthesized)
gactccgtctcaaaaaaaaaaaaagtgtactagtccattttcatgctgctggtgaagacatatccaagactgggaagaaaaaaaaattaactggacttacagtttcacatggatggggag

SEQ ID NO: 540513 - DNA, 120 bp, Artificial Sequence
  ENSG00000167216_25 (sequence is synthesized)
tcacatggatggggagcctcagaatcatggcggggggcaaaagacacttcttatatggtggcagcaagagaaaatgaggaagacgcaagaagcggaaacccctgataaaaccatcagacc

SEQ ID NO: 540514 - DNA, 87 bp, Artificial Sequence
  ENSG00000167216_26 (sequence is synthesized)
gtgagacttattcactaccatgagaacagcatgcgtggtggaaactgctcacgattcaaattatctcctcgattacaattcaagatg

SEQ ID NO: 540515 - DNA, 120 bp, Artificial Sequence
  ENSG00000167216_27 (sequence is synthesized)
tcaagaagtttaaggaaatggcctatggatgcaaaatcacataaacttggcctgacagttttgggaggagtaaaagtgagtgtctgaaagggcggttatttgcactgggcacccaggaag

SEQ ID NO: 540516 - DNA, 120 bp, Artificial Sequence
  ENSG00000167216_28 (sequence is synthesized)
ggccactggtgctaagttcaccaatgtaatgaagtgaggggtcattcactccagaaggactgagaattttggaagaattaatgtacttagagtgcccaacttattgtcagcaataattta

SEQ ID NO: 540517 - DNA, 120 bp, Artificial Sequence
  ENSG00000167216_29 (sequence is synthesized)
ctcactggcaagatcggactgaataattcatgttacaactgcaatcagaatactcatgattgctggttgttagttggtttttgtaccccaaattaagtcgcataaaattacttccttttc

SEQ ID NO: 540518 - DNA, 120 bp, Artificial Sequence
  ENSG00000167216_30 (sequence is synthesized)
agtaactgactacttttctcccttctctagggtcctagcacagtgtctgatggagctttcctaccagaccctgaaattcacgcatcaggcgcgggaagcggtatatcgatacagcaaatg

SEQ ID NO: 540519 - DNA, 120 bp, Artificial Sequence
  ENSG00000167216_31 (sequence is synthesized)
agatctcgtatttgtcttagcagcttctaacctgccgtggtaagagaccaagagagtaaattttgaatacattttcaggagtcactaagtgcaaataaaaattttatattgaccacttca

SEQ ID NO: 540520 - DNA, 120 bp, Artificial Sequence
  ENSG00000167216_32 (sequence is synthesized)
aggttccttggatcgaccggtcagcccagtaactgactacttttctcccttctctagggtcctagcacagtgtctgatggagctttcctaccagaccctgaaattcacgcatcaggcgcg

SEQ ID NO: 540521 - DNA, 80 bp, Artificial Sequence
  ENSG00000167216_33 (sequence is synthesized)
gccgggcccgtcacgtgaacggcgcgggagctccgcctccgacgcgccgaagccccgcccctagcggtgccccctgccca

SEQ ID NO: 540522 - DNA, 120 bp, Artificial Sequence
  ENSG00000167216_34 (sequence is synthesized)
gcgcctgccccggcgtgctgccccgcggcttggccccgctcggccccaggtcgtgccttccctccccggcggaggcccctgcggactgcctagagctgggtcgcaactgaggcgttatcc

SEQ ID NO: 540523 - DNA, 120 bp, Artificial Sequence
  ENSG00000167216_35 (sequence is synthesized)
aactgaggcgttatccgcgggcctggcctcgggaagtggcggggaggaagaagaggcggccgggacgcgtgacaggagcattcgggaagattcttacggtgcccttcacgcggtgcctat

SEQ ID NO: 540524 - DNA, 120 bp, Artificial Sequence
  ENSG00000167216_36 (sequence is synthesized)
ggacggagaaagccgccgcaaataaaaccatcccccagagtagttgtggcggaataatctaaatatgggtgttggattgaggaaacttgaatatttttgtatcctgaagggagaaatgga

SEQ ID NO: 540525 - DNA, 120 bp, Artificial Sequence
  ENSG00000167216_37 (sequence is synthesized)
tgaagaagaaatggatgaagaagaccgaagataatgatgaagggataatttggaataggattcacagcaagagagacagaagggaaagacattgaagaaacagactagttaacacatgaa

SEQ ID NO: 540526 - DNA, 120 bp, Artificial Sequence
  ENSG00000167216_38 (sequence is synthesized)
tgtttttccacgtctaatgagaacagggtcctagcacagtgtctgatggagctttcctaccagaccctgaaattcacgcatcaggcgcgggaagcggtgttatttgagcttgcccgctac

SEQ ID NO: 540527 - DNA, 120 bp, Artificial Sequence
  ENSG00000167216_39 (sequence is synthesized)
gcttgtggaatccctttccagaagctttaccatcacagctctgtgactgtctcccagcaatactgactgcagtcatgtgacctggcccagcccaggacttctctcattacagctgcccca

SEQ ID NO: 540528 - DNA, 120 bp, Artificial Sequence
  ENSG00000167220_0 (sequence is synthesized)
aacttccggcgtccgtcgggcagcagcggggctgtctatcccggctgaggacccgcggccagtgcgggtggctggctttgccattagcgggggcctttcctgaggacggcgtacggagtg

SEQ ID NO: 540529 - DNA, 120 bp, Artificial Sequence
  ENSG00000167220_1 (sequence is synthesized)
tggggaatgaaggatggcagcatgccgtgcattaaaagctgttttggtagatctcagtggcacacttcacattgaagatgcagctgtgccaggcgcacaggaagctcttaaaaggttacg

SEQ ID NO: 540530 - DNA, 120 bp, Artificial Sequence
  ENSG00000167220_2 (sequence is synthesized)
tggtgcttctgtaatcattaggtttgtgaccaatacaaccaaagagagcaagcaagacctgttagaaaggttgagaaaattggaatttgatatctctgaagatgaaatattcacatctct

SEQ ID NO: 540531 - DNA, 120 bp, Artificial Sequence
  ENSG00000167220_3 (sequence is synthesized)
gactgcagccagaagtttactagagcggaaacaagtcagacccatgctgctagttgatgatcgggcactacctgatttcaaaggaatacaaacaagtgatcctaatgctgtggtcatggg

SEQ ID NO: 540532 - DNA, 120 bp, Artificial Sequence
  ENSG00000167220_4 (sequence is synthesized)
attggcaccagaacattttcattatcaaattctgaatcaagcattccggttactcctggatggagcacctctgatagcaatccacaaagccaggtattacaagaggaaagatggcttagc

SEQ ID NO: 540533 - DNA, 120 bp, Artificial Sequence
  ENSG00000167220_5 (sequence is synthesized)
cctggggcctggaccatttgtgactgctttagagtatgccacagataccaaagccacagtcgtggggaaaccagagaagacgttctttttggaagcattgcggggcactggctgtgaacc

SEQ ID NO: 540534 - DNA, 120 bp, Artificial Sequence
  ENSG00000167220_6 (sequence is synthesized)
tgaggaggctgtcatgataggagatgattgcagggatgatgttggtggggctcaagatgtcggcatgctgggcatcttagtaaagactgggaaatatcgagcatcagatgaagaaaaaat

SEQ ID NO: 540535 - DNA, 120 bp, Artificial Sequence
  ENSG00000167220_7 (sequence is synthesized)
taatccacctccttacttaacttgtgagagtttccctcatgctgtggaccacattctgcagcacctattgtgaagcagtgtgtgcatctgaagcaacttgaaatgcagcttcttattgtc

SEQ ID NO: 540536 - DNA, 120 bp, Artificial Sequence
  ENSG00000167220_8 (sequence is synthesized)
tggaatgaatcccttaccaactcagtgccagcatcggtagacaccagtcagtgctgatcgctttttaaccctcttttgttgtgcattaattagaaagaaaggtattgaattgcggctagc

SEQ ID NO: 540537 - DNA, 120 bp, Artificial Sequence
  ENSG00000167220_9 (sequence is synthesized)
ttttgtaactgaagatgagacccaaagaaagggaaagctgagattttgtgccattccttttaaaatattcatcaggttaggtggggctgtgggggaaaagctactacagggaagagtgtt

SEQ ID NO: 540538 - DNA, 120 bp, Artificial Sequence
  ENSG00000167220_10 (sequence is synthesized)
ctctgctgtctcttcactggaaaacagggaggggggatttcagactgtgaagaaagttgaatggtggtttttaaattataaagtaatgtattaaaaggtgcattaggctgtagttctaat

SEQ ID NO: 540539 - DNA, 120 bp, Artificial Sequence
  ENSG00000167220_11 (sequence is synthesized)
attgagttcaactgtgaaatccatcagatgtgccaaatggagaagacagaaagcaacaaagtgaattgttctttagcccaagtggtacagtgaatttgctttaacagatgttgaaaacta

SEQ ID NO: 540540 - DNA, 120 bp, Artificial Sequence
  ENSG00000167220_12 (sequence is synthesized)
aattttctactgtattcccagcacgggtgacttctttttctcttcattagccagagatgactaatttaaatttagaaccagattttaatttaaattaatatttccattaataacctattc

SEQ ID NO: 540541 - DNA, 120 bp, Artificial Sequence
  ENSG00000167220_13 (sequence is synthesized)
attgcagatacctattatactgtgtaacagttgttttggaaattttatgtaaaattaaaactatcagtattttacagatgttttaattagacattgttattaacaggaacagtgcagaaa

SEQ ID NO: 540542 - DNA, 120 bp, Artificial Sequence
  ENSG00000167220_14 (sequence is synthesized)
ctagaatcaagccttataatatcttatagaccatgcatttttgaagttagtgtccactagggtcctattaactgtacatttgcaagatttcattatttttgcctctgacactatgggaaa

SEQ ID NO: 540543 - DNA, 120 bp, Artificial Sequence
  ENSG00000167220_15 (sequence is synthesized)
aattttttagaagctattgggacagattcaagcttttatgcacttggttactacagctgtaaaatgaaatctcgtcttgtagcatggattattcttctcatgttaaacccaccaaaataa

SEQ ID NO: 540544 - DNA, 120 bp, Artificial Sequence
  ENSG00000167220_16 (sequence is synthesized)
aggggactaaataggtaatgattttcctagtgcatttgcatactgtgataatcctgggccttgcaatagttctacagggctcttgggcattgaattattaggatgtaattgtacatcatt

SEQ ID NO: 540545 - DNA, 120 bp, Artificial Sequence
  ENSG00000167220_17 (sequence is synthesized)
gtagtgttcaccttattgaagctcactctgatgttaatgagcttcgggttttgatgcttgtttagagatcagcagtcttggatgggagggaacaaagctaaataaatgttagtttggtga

SEQ ID NO: 540546 - DNA, 120 bp, Artificial Sequence
  ENSG00000167220_18 (sequence is synthesized)
agcggggctgtctatcccggctgaggacccgcggccagtgcgggtggctggctttgccattagcgggggcctttcctgaggacggcgtacggagtgtgggttactcctggatggagcacc

SEQ ID NO: 540547 - DNA, 120 bp, Artificial Sequence
  ENSG00000167220_19 (sequence is synthesized)
gtcctaaccagaatttgtttagcatgtgaaacagtcatctagaaaaaaaataggatctttctttgccttcatatatcatcaacatagcatcctgttttctccctccattcatcatttatc

SEQ ID NO: 540548 - DNA, 120 bp, Artificial Sequence
  ENSG00000167220_20 (sequence is synthesized)
catccatgaaagcacaggctgctgcagtgagtgaatcagccatgagcaatgcaggcagctccattcactcaacgaacgttattgagcccctgctgtgtgctaggtgctagaactaaaaca

SEQ ID NO: 540549 - DNA, 120 bp, Artificial Sequence
  ENSG00000167220_21 (sequence is synthesized)
tatacctaagccacttttgtcaatttctattttgtagaaaccccacttgcagagccagactaagcaaaagcctttaactccatggctaggaagcttatttatttgtctcttagaccactg

SEQ ID NO: 540550 - DNA, 120 bp, Artificial Sequence
  ENSG00000167220_22 (sequence is synthesized)
gatccagaaagtaggtcatatagtaatatttagtcattaacttacctgtaagatcaaatagaaaccttgtgaaggagtttatactaacgatatttaagcttgggaagaaaactggcagta

SEQ ID NO: 540551 - DNA, 120 bp, Artificial Sequence
  ENSG00000167220_23 (sequence is synthesized)
gagcttgctgcggggaccatgctatggacaggtgccttcagggtgctaacgagagtgaggtatatattaattacctttgtacatttgatgctggctcccttcctgtaagaagttataatc

SEQ ID NO: 540552 - DNA, 120 bp, Artificial Sequence
  ENSG00000167220_24 (sequence is synthesized)
agtaagataagacaggaagcgtcttctccaccatgatgcaaagatgtggaaaagagggtttttcaggctttgtgtttgtctggcaaagcctcttaaagtagttgtagaaaacagtaggtc

SEQ ID NO: 540553 - DNA, 120 bp, Artificial Sequence
  ENSG00000167220_25 (sequence is synthesized)
tcttgttgaaagagctgagtttaggcagagaaaactgggaaaagcagaagaatcaacaatagagaccacaaagggatgagagagcaaggagaaaggtgaagggcagaggcagccctggtg

SEQ ID NO: 540554 - DNA, 120 bp, Artificial Sequence
  ENSG00000167220_26 (sequence is synthesized)
gctacagggcaggagctgcgttctgcatttcctccctcccctctcttcttccctccattcattctttaaaaagatatttataggatagttactatgtgctagtcactatgttaggtactt

SEQ ID NO: 540555 - DNA, 120 bp, Artificial Sequence
  ENSG00000167220_27 (sequence is synthesized)
ggaatacattgggacatgtaacagatatagcccctgtctcaaataacttagtcttcttaaatgtgagacagatgttaaacaaataaatgcataattacaaattgttgtaaatgttgtgga

SEQ ID NO: 540556 - DNA, 120 bp, Artificial Sequence
  ENSG00000167220_28 (sequence is synthesized)
ggcaaagaacaaggtgaataacagggagggggtttaatttggatgggaaggtggggtctgacctgaagcatgaaggaggtagtcaggtgagaataatggaatgacaagggaatggcacgt

SEQ ID NO: 540557 - DNA, 120 bp, Artificial Sequence
  ENSG00000167220_29 (sequence is synthesized)
gtgtaggccctcagaaaagcaggtccagtctgggactgcagcctggtgagccagtagcacatgcttaggtgagagggtcactggggctgcatgacaaagggcttggtaagcagcagtaga

SEQ ID NO: 540558 - DNA, 120 bp, Artificial Sequence
  ENSG00000167220_30 (sequence is synthesized)
gattttggattctttctgaagggcactgggacccattaaagggtctttaaatagggactgtgcaccttctgacttgtaaaagctctttgtgaccactgtggaatggttcctctgctgtgt

SEQ ID NO: 540559 - DNA, 120 bp, Artificial Sequence
  ENSG00000167220_31 (sequence is synthesized)
tgaggtgttaaattgtgtgccaggtgctagaacagcaggccatcttgaattccacggttgggagagtcaggcagtgagcctgctgcttgatgccaagtggcctgtcctgcctggcccctg

SEQ ID NO: 540560 - DNA, 120 bp, Artificial Sequence
  ENSG00000167220_32 (sequence is synthesized)
tgcctttgggagcggatgagtcctctgccctctggggtctgggcttccattttaaagcattaatttaatcaccaatctatctttagagctgagggtaggggaaagaaaatgatttcatca

SEQ ID NO: 540561 - DNA, 120 bp, Artificial Sequence
  ENSG00000167220_33 (sequence is synthesized)
gctgtgaacatgtgaagggaatcttagctgtcagacgatccagtacctgtggctgtccattgtgaatgaccagagggcctggggaaaggctgaatgtgacatttctttgaattgcctcat

SEQ ID NO: 540562 - DNA, 120 bp, Artificial Sequence
  ENSG00000167220_34 (sequence is synthesized)
ttacatcctgaagcctcaataaaaggtgatttgggagatgtgcagcccctgattctgtcttaactgtaagggtggtgctgtgatgacccaggtgctcatggggtatgattaatttagcat

SEQ ID NO: 540563 - DNA, 120 bp, Artificial Sequence
  ENSG00000167220_35 (sequence is synthesized)
agcagcggggctgtctatcccggctgaggacccgcggccagtgcgggtggctggctttgccattagcgggggcctttcctgaggacggcgtacggagtgtggccctccacatacataacc

SEQ ID NO: 540564 - DNA, 120 bp, Artificial Sequence
  ENSG00000167220_36 (sequence is synthesized)
agtggccccgcgcgtgcgcatagctgggcgcgaggcgcgctgtgggtctctgcggggcggatcgtgaagctagtgtgtcagtcattcctcgaagcgtgctcttgggctgtattttggagc

SEQ ID NO: 540565 - DNA, 120 bp, Artificial Sequence
  ENSG00000167220_37 (sequence is synthesized)
cggctgaggacccgcggccagtgcgggtggctggctttgccattagcgggggcctttcctgaggacggcgtacggagtgtggaacagaattctggagtaaagaagcaggttcccttttcg

SEQ ID NO: 540566 - DNA, 120 bp, Artificial Sequence
  ENSG00000167232_0 (sequence is synthesized)
gtctctcgctgccgccggagtttccaggtctcgacttcactgctctgtgtcctctgctccaggaggcccagcctgtgtggccctgtgacctgcaggtattggagagccacagctaagatg

SEQ ID NO: 540567 - DNA, 120 bp, Artificial Sequence
  ENSG00000167232_1 (sequence is synthesized)
ttagggatgtggccatagaattctctccggaggagtggcaatgtctggacactgcacagcagaatttatataggaatgtgatgttagagaactacagaaacctggccttcctgggtattg

SEQ ID NO: 540568 - DNA, 120 bp, Artificial Sequence
  ENSG00000167232_2 (sequence is synthesized)
atgttagagaactacagaaacctggccttcctgggtattgctctctctaagccagacctgattacttatctggagcaaggaaaagagccctggaatatgaagcaacatgagatggtggat

SEQ ID NO: 540569 - DNA, 120 bp, Artificial Sequence
  ENSG00000167232_3 (sequence is synthesized)
gaacccacaggtatatgtcctcattttcctcaagacttttggccagagcagagcatggaagattcttttcaaaaagtattactgagaaaatatgaaaaatgtggacatgagaatttacag

SEQ ID NO: 540570 - DNA, 120 bp, Artificial Sequence
  ENSG00000167232_4 (sequence is synthesized)
ttaagaaaaggttgtaaaagtgtggatgagtgtaaggtgcacaaagaaggttataataaacttaaccagtgtctcacaactgcccagagcaaagtatttcaatgtgggaaatatttgaaa

SEQ ID NO: 540571 - DNA, 120 bp, Artificial Sequence
  ENSG00000167232_5 (sequence is synthesized)
gtcttctataaatttttaaattcaaacagacatacgataagacatactggaaagaaatgcttcaaatgtaaaaaatgtgtcaagtcattttgcatccgtttacacaaaacccaacataaa

SEQ ID NO: 540572 - DNA, 120 bp, Artificial Sequence
  ENSG00000167232_6 (sequence is synthesized)
tgcgtttatattacagagaagtcctgtaaatgtaaagaatgtgaaaaaacctttcattggtcctcaacccttactaatcataaggaaattcatactgaagataaaccctacaaatgtgaa

SEQ ID NO: 540573 - DNA, 120 bp, Artificial Sequence
  ENSG00000167232_7 (sequence is synthesized)
gaatgtggcaaagcttttaagcagctctcaacccttactacacataaaataatctgtgctaaagagaaaatctacaagtgtgaagaatgtggcaaagcatttctatggtcctcaacccta

SEQ ID NO: 540574 - DNA, 66 bp, Artificial Sequence
  ENSG00000167232_8 (sequence is synthesized)
tgaagaatgtggcaaagcatttctatggtcctcaaccctaactagacataagaggatttcttcaac

SEQ ID NO: 540575 - DNA, 90 bp, Artificial Sequence
  ENSG00000167232_9 (sequence is synthesized)
ataactcatactgacaaagcttttaagcgactctcaacccttactaaacataaaataatacatgctggagagaaactctacaaatgtgaa

SEQ ID NO: 540576 - DNA, 80 bp, Artificial Sequence
  ENSG00000167232_10 (sequence is synthesized)
aatgtgaagaatgtggcaaagcttttaatcgatcttcaaatcttactatacataagtttgcaaagcatttaactggtcct

SEQ ID NO: 540577 - DNA, 120 bp, Artificial Sequence
  ENSG00000167232_11 (sequence is synthesized)
gcatttaactggtcctcaagccttactaaacataaaagatttcatactagagagaaacccttcaaatgtaaagaatgtggcaaagcatttatatggtcttcaaccctaactagacataag

SEQ ID NO: 540578 - DNA, 73 bp, Artificial Sequence
  ENSG00000167232_12 (sequence is synthesized)
caaagcatttatatggtcttcaaccctaactagacataagaggatacacgcaatcctcaacccttactaaaca

SEQ ID NO: 540579 - DNA, 120 bp, Artificial Sequence
  ENSG00000167232_13 (sequence is synthesized)
ttcatactggagagaaaccctacaaatttgaagaatgtggcaaagcttttagacaatccttaacccttaataaacataagataattcatagtagagagaaaccctacaaatgtaaagaat

SEQ ID NO: 540580 - DNA, 79 bp, Artificial Sequence
  ENSG00000167232_14 (sequence is synthesized)
taaagaatgtggcaaagcttttaagcaattctcaacccttactacacataaaataattcatgctggaacattcctcaag

SEQ ID NO: 540581 - DNA, 120 bp, Artificial Sequence
  ENSG00000167232_15 (sequence is synthesized)
taagataattcatactggagagaagtcttacaagtgtgaagaatgtggcaaagcatttctatggtcctcaaccctaagaagacataagaggatacacactggagagaaaccctacaaatg

SEQ ID NO: 540582 - DNA, 68 bp, Artificial Sequence
  ENSG00000167232_16 (sequence is synthesized)
caattcctcaacccttgctaatcataagataactcatactgaagagaaaccctacaaatgtaaagaat

SEQ ID NO: 540583 - DNA, 90 bp, Artificial Sequence
  ENSG00000167232_17 (sequence is synthesized)
ataactcatactgacaaaacttttaagcgactctcaacccttactaaacataaaataatacatgctggagagaaactctacaaatgtgaa

SEQ ID NO: 540584 - DNA, 81 bp, Artificial Sequence
  ENSG00000167232_18 (sequence is synthesized)
gcaaagcatttaactggtcctcaagccttactaaacataaaagaattcatactagagagaaacccttcaaatgtaaagaat

SEQ ID NO: 540585 - DNA, 120 bp, Artificial Sequence
  ENSG00000167232_19 (sequence is synthesized)
agaattcatactagagagaaacccttcaaatgtaaagaatgtggcaaagcatttatatggtcttcaaccctaactagacataagaggatacacactggagagaagccctacaaatgtgaa

SEQ ID NO: 540586 - DNA, 65 bp, Artificial Sequence
  ENSG00000167232_20 (sequence is synthesized)
agcataagagcactcctcagcccttgctaaacataaaataatacatgctggagagaaactctaca

SEQ ID NO: 540587 - DNA, 120 bp, Artificial Sequence
  ENSG00000167232_21 (sequence is synthesized)
gctaaacataaaataatacatgctggagagaaactctacaaatgtgaggaatgtggcaaagcttttaatcaatcttcaaatcttacgacacataagataattcatactaaagagaaacct

SEQ ID NO: 540588 - DNA, 120 bp, Artificial Sequence
  ENSG00000167232_22 (sequence is synthesized)
tccaagagtgaagaatgtgacaaagcatttatctggtcctcaacccttactgaacataagagaattcataccagagagaaaacctacaaatgtgaagaatgtggcaaagcatttagccag

SEQ ID NO: 540589 - DNA, 69 bp, Artificial Sequence
  ENSG00000167232_23 (sequence is synthesized)
aacctacaaatgtgaagaatgtggcaaagcatttagccagccttcacaccttactacacataagaggat

SEQ ID NO: 540590 - DNA, 60 bp, Artificial Sequence
  ENSG00000167232_24 (sequence is synthesized)
aatgtgaagaatgtggcaaagcttttaggaaatcttcaactcttacttttagccaatcct

SEQ ID NO: 540591 - DNA, 87 bp, Artificial Sequence
  ENSG00000167232_25 (sequence is synthesized)
tacaaatgtgaagaatgtggcaaagcatttagccaatcctcaaccctaactagacatacgaggatgcacactggagagaaaccacga

SEQ ID NO: 540592 - DNA, 81 bp, Artificial Sequence
  ENSG00000167232_26 (sequence is synthesized)
gcaaagcatttatatcatcctcaaccctaaatggacataagagaattcatactagagagaaaccctacaaatgtgaagaat

SEQ ID NO: 540593 - DNA, 120 bp, Artificial Sequence
  ENSG00000167232_27 (sequence is synthesized)
gaatgtggcaaagcatttagccaatcttcaaccctaactagacataagaggttgcacaccggagagaaaccctacaaatgtggagaatgtggcaaagcctttaaagagtcctcagctctt

SEQ ID NO: 540594 - DNA, 120 bp, Artificial Sequence
  ENSG00000167232_28 (sequence is synthesized)
agaaaccctacaaatgtgaaaaatgtggcaaagcctttaaccagtcttcaatccttactaaccataagaaaattcatactatcacacctgtaatcccactactttgggaggccgaggcgg

SEQ ID NO: 540595 - DNA, 120 bp, Artificial Sequence
  ENSG00000167232_29 (sequence is synthesized)
ccgtctcaaaaaaaaaaaaaagaaaattcatactagagagaaaccctacaaatataaagaatgtggcaaatcttttaaccggtcttcaacctttactaaacataaggtaattcatactgg

SEQ ID NO: 540596 - DNA, 120 bp, Artificial Sequence
  ENSG00000167232_30 (sequence is synthesized)
tctacaaatgtgaagaatgtggcaaatcctttttctggtcctcagccctaaccagacataagaaaattcatactggacagcaaccctacaaacaggaaaaatttggcaaagcctttaacc

SEQ ID NO: 540597 - DNA, 120 bp, Artificial Sequence
  ENSG00000167232_31 (sequence is synthesized)
ggcaaagcctttaaccagttttcacaccttactacagataagataactcatattggagagaaatcttacaagtgtgaataatgtggtaaagtctataaaaagtcctgaattcttaacaga

SEQ ID NO: 540598 - DNA, 120 bp, Artificial Sequence
  ENSG00000167232_32 (sequence is synthesized)
cataatattattcatactggagagaaactctacaaacctgaaagatgtgccaacgcttttgacaagtcaaacttttctaaacatcaagaaaatcatgctgctgagaaatcctagaaatgt

SEQ ID NO: 540599 - DNA, 120 bp, Artificial Sequence
  ENSG00000167232_33 (sequence is synthesized)
gaagaatgtgacaaagcctctaaatgattgtcacacttgatcgtaggtaagataattcatactggagaaaactaccagtgtgaacaatgtggccaagctttgaactaatgctcacacctt

SEQ ID NO: 540600 - DNA, 120 bp, Artificial Sequence
  ENSG00000167232_34 (sequence is synthesized)
aatgcataggaaagcatttatgcttgagaaaaagtgaacaaatatagacaaaaagccattaatacctgctcacatcgtactcaaattcagagcgttcatactaaataagaagtgtaatta

SEQ ID NO: 540601 - DNA, 120 bp, Artificial Sequence
  ENSG00000167232_35 (sequence is synthesized)
ctgtcaaacgactgatcagaaaatatgtctttaaagtacagaagagtattttgaaaaagcattacaaatatgaagaggcattatttatgaccttttctatggaaaggtaaggacattaaa

SEQ ID NO: 540602 - DNA, 120 bp, Artificial Sequence
  ENSG00000167232_36 (sequence is synthesized)
aatgtaagatgcatgatgaaaatttaagtagagaggatctttatggttaacttataatatcgagtgatgcatgaggtagatgttcagattaatattctgcattattatgaaagaaaaaca

SEQ ID NO: 540603 - DNA, 120 bp, Artificial Sequence
  ENSG00000167232_37 (sequence is synthesized)
tatgatttattgtatttttatgaaatatatgtagcatatttttaaattataaattgcatgtgaacttttcaaccaaacagttttaacatgttaaatactatcatgaattcaatgaagtgt

SEQ ID NO: 540604 - DNA, 120 bp, Artificial Sequence
  ENSG00000167232_38 (sequence is synthesized)
actatcatgaattcaatgaagtgttattatgccagtaactttaacctattccaccttactcaagggtgtaggtaaaagatggtaaaaatacactatttggtaagataatggactgacatc

SEQ ID NO: 540605 - DNA, 120 bp, Artificial Sequence
  ENSG00000167232_39 (sequence is synthesized)
tctagtgattttttttgccagtgagttttaattgccattaagttaaagaatattgttcccataggctaaatttttatttttattttctcatttaaatgtatttgacttaatttttgtgga

SEQ ID NO: 540606 - DNA, 120 bp, Artificial Sequence
  ENSG00000167232_40 (sequence is synthesized)
tacctaatatgtgtacatattatgccatatgtggcatattttgatacggacacacaatatataacaatcgcattagactaaatgcggtctccattacctctagcatttattctttgtatt

SEQ ID NO: 540607 - DNA, 120 bp, Artificial Sequence
  ENSG00000167232_41 (sequence is synthesized)
ctccattacctctagcatttattctttgtattacaaataattcaattctacagttttagttatttttaaatgtacaattaaattgttgttgactacaggattatttttatggtcataata

SEQ ID NO: 540608 - DNA, 120 bp, Artificial Sequence
  ENSG00000167232_42 (sequence is synthesized)
aagagccctggaatgtgaagagacatgagacagtagtcagcttctcagctttttaatttaaagtctgttttatttgatacggagtcttgctccatcgccaggctggagtgcagtggcgcg

SEQ ID NO: 540609 - DNA, 120 bp, Artificial Sequence
  ENSG00000167232_43 (sequence is synthesized)
ctagttctttgaaatgtgatgtcaggtccttaatatgtaagctttctatttttttgatgcaggcctttaggctattaacttcccttttagtactacatttgatgtatctcacaggtttta

SEQ ID NO: 540610 - DNA, 90 bp, Artificial Sequence
  ENSG00000167232_44 (sequence is synthesized)
tcccttttagtactacatttgatgtatctcacaggttttattatattgtgtttctatttccatcttttttcccacaaatttttaagagat

SEQ ID NO: 540611 - DNA, 120 bp, Artificial Sequence
  ENSG00000167232_45 (sequence is synthesized)
gtgttggctcactgcaacttctgccttccaggctcaaacgatcgttttatattagcctcccgagtagctaggaccataggtgcacaccaccacacctagctattttttcatatttttttt

SEQ ID NO: 540612 - DNA, 89 bp, Artificial Sequence
  ENSG00000167232_46 (sequence is synthesized)
accacacctagctattttttcatatttttttttgtagggttaaacttcttacctcaggtggtccacctgtctcagcctcccaaagtgct

SEQ ID NO: 540613 - DNA, 120 bp, Artificial Sequence
  ENSG00000167232_47 (sequence is synthesized)
aaccatcataattacttcatttacatagtcactgttgaggagtatgttatttaaattctttgtaaatttatagtttctgaaatttctcttgatactgatttgtagttttattctactgtg

SEQ ID NO: 540614 - DNA, 120 bp, Artificial Sequence
  ENSG00000167232_48 (sequence is synthesized)
gtctaagtaggtagttcgtataattttgatttggggggatactttgttgatttgccagatttcctatctcaatggtctctctaatgctgtgagtagaatgttgaatttctccactattat

SEQ ID NO: 540615 - DNA, 120 bp, Artificial Sequence
  ENSG00000167232_49 (sequence is synthesized)
tgtattactgtctatctcgttctatagatttaataatatttctttgtaaatcagggtgctgtgatgttgggttcatatatatttagaattgttatatcttttggctgaaatgatttcttt

SEQ ID NO: 540616 - DNA, 120 bp, Artificial Sequence
  ENSG00000167232_50 (sequence is synthesized)
attattggatgatgatctttatccttttttgttacagctttttaatttaaagtctgttttatttgatgtaagtatagatactcctatttacttttggtttctgtttgtgttaatatattc

SEQ ID NO: 540617 - DNA, 120 bp, Artificial Sequence
  ENSG00000167232_51 (sequence is synthesized)
ccccccatttgcctttaatctatatgtgtcttacaagtaaggtgagatttttgtaggcaacatagatttgcgttattttttctcattcatttcataaatctatacttttttttttttttt

SEQ ID NO: 540618 - DNA, 88 bp, Artificial Sequence
  ENSG00000167232_52 (sequence is synthesized)
caccacgctcagctaatttttgtattttcagaagagacggggtttcatcatattcaaccctcacctcaccctcccaaagtgctgggac

SEQ ID NO: 540619 - DNA, 120 bp, Artificial Sequence
  ENSG00000167232_53 (sequence is synthesized)
tgagccaccgcacccaaccaaatctatacatttcaatgaaggatttaatttatttatattcaaggtaaatattaatatgtaaggttttgttactatcataatgttaattattttcttgtc

SEQ ID NO: 540620 - DNA, 120 bp, Artificial Sequence
  ENSG00000167232_54 (sequence is synthesized)
tgtcttatttttttatctgtctttgtagtttaataaaattctgtcatgttgtgatttgatttatttcactttgttttgttttgtaagacctgttagttttatacttttatatattttaat

SEQ ID NO: 540621 - DNA, 120 bp, Artificial Sequence
  ENSG00000167232_55 (sequence is synthesized)
gtgaatatcaatctcttgtttttatattagaattttttttaacatctttcataggcccagtctagtggtaattagtttccccagcatttatttgtcagggtaagactttatattcttcat

SEQ ID NO: 540622 - DNA, 120 bp, Artificial Sequence
  ENSG00000167232_56 (sequence is synthesized)
ttgtgaaggttattctagcttgatataaaatttttggctggcagttttcttttttttcaacactctaaaagtgccatcccattctcttctggtcagtaaagtttctgctgagaagtctgc

SEQ ID NO: 540623 - DNA, 120 bp, Artificial Sequence
  ENSG00000167232_57 (sequence is synthesized)
ttttaatctaatgtggttttctttataaattactagatgcttttcttttgcttattttagaattacttccttcactttgactttagatattctgattatcatgtgccattatgatgtctg

SEQ ID NO: 540624 - DNA, 120 bp, Artificial Sequence
  ENSG00000167232_58 (sequence is synthesized)
ttttgcaatatattttgtttatattttgttgtattttgtttgctgagcttcctgtgtatgtatgtctaattctattgctagagttggaaagttttcatcaattgttttcttaaataggtt

SEQ ID NO: 540625 - DNA, 120 bp, Artificial Sequence
  ENSG00000167232_59 (sequence is synthesized)
ttctaaactttttgatgttttttcttcctcagaaacactgataattttaaagtttagttacttcatgtagttggaaacaaagtcttcattcttttttattcttttctccttatttttgtc

SEQ ID NO: 540626 - DNA, 120 bp, Artificial Sequence
  ENSG00000167232_60 (sequence is synthesized)
tgagtgtattattttaaaagacctgtttaaaggtttgaaaattatttttatgtttcttccagtctattattgaatctttgaatgtattttcttttgcctgcaataaatcttcagttccat

SEQ ID NO: 540627 - DNA, 120 bp, Artificial Sequence
  ENSG00000167232_61 (sequence is synthesized)
tgcttctgcagaaaagttgcaccttctaggtgttggactcagcaatatatcacaatgtctgcagtattttggaaggagaggagagtcaccattacttaggtgctaggcccagcaatacat

SEQ ID NO: 540628 - DNA, 120 bp, Artificial Sequence
  ENSG00000167232_62 (sequence is synthesized)
caacgcttttgacaagtcaaacttttctaaacatcaagaaaatcatgctgctgagaaatcctagaaatgtgaagaatgtgacaaagcctctaaatgattgtcacacttgatcgtagggcc

SEQ ID NO: 540629 - DNA, 120 bp, Artificial Sequence
  ENSG00000167232_63 (sequence is synthesized)
cctaggttctgggtatagcaatatgtcacaaatgcccctaagaagagggcccaggaaaagagagtcaccttggtgagaatgtcagagatattccatttttgggtattcacaaaaaagaat

SEQ ID NO: 540630 - DNA, 120 bp, Artificial Sequence
  ENSG00000167232_64 (sequence is synthesized)
aaagtcccataacctagaaggtgggctctgctccatgacacaaatcaccctagtgggcaggtccattaaagagaaggctgtcaaagcacatagatgctgggcaaagtgatatgtcataat

SEQ ID NO: 540631 - DNA, 120 bp, Artificial Sequence
  ENSG00000167232_65 (sequence is synthesized)
ccccatgatgataggcccagagacatgtcacaatgacctctttaggcagagaccaggcagaagaatcacatcacttgtgtgctggccctagtgataagtcactctcatttctgtggacat

SEQ ID NO: 540632 - DNA, 120 bp, Artificial Sequence
  ENSG00000167232_66 (sequence is synthesized)
ggcccaggcagaagagcagagtcacattacctaagcgctgggtcaagagatatgtcacaatcttttacatgggcaaaacccaggtaaaaaagaggagtaatatcagatagtaggtgttgc

SEQ ID NO: 540633 - DNA, 120 bp, Artificial Sequence
  ENSG00000167232_67 (sequence is synthesized)
cagagatatgtcaaaatgccccctgtatgaaagactcaggcagtcaaaacacattagttggtttcttaacctagtgatatgttataatctttcctgtgggtatgatgcaggcagaagacg

SEQ ID NO: 540634 - DNA, 120 bp, Artificial Sequence
  ENSG00000167232_68 (sequence is synthesized)
agagtcatgtgatggatgcagagacatgtcacaaggtcttctgtgggcagggtccagactgaagccttccacctgctaggggttgagcccaatgatatgtcacaatacccaaattatgca

SEQ ID NO: 540635 - DNA, 120 bp, Artificial Sequence
  ENSG00000167232_69 (sequence is synthesized)
gggcccaggcaaaaaaaacgagaggcacatcacctgggttctggatccaatgatatatcacaattttctattttggcaagacccaggcagaaagaaaagttacatcacctaggtgatgaa

SEQ ID NO: 540636 - DNA, 120 bp, Artificial Sequence
  ENSG00000167232_70 (sequence is synthesized)
atacatattataatagttttgtgggcaggacccatgcgggagagtcacatcacctaggtgttggacccagaaatatgtcacaatatacagtgtatacagagctgaggcatgagacaatag

SEQ ID NO: 540637 - DNA, 120 bp, Artificial Sequence
  ENSG00000167232_71 (sequence is synthesized)
taacttcactcatttgttgagcccagctatacaatccttttttgggcacagccgaagtagtagaggagagttacatcaccttggtgctgggtccagcaatgtgtcaccatacctgctgag

SEQ ID NO: 540638 - DNA, 120 bp, Artificial Sequence
  ENSG00000167232_72 (sequence is synthesized)
gggagggtacaggcaagagagccacatcacttaggtgaggggcccagagatatctcacagtaccccctgtgggtagaactcaggaaaaaggagagagtcacataatctagaagctgagct

SEQ ID NO: 540639 - DNA, 120 bp, Artificial Sequence
  ENSG00000167232_73 (sequence is synthesized)
cagctgtatgttacaatcacccagtggacaggtcccaggcatgagagtagagtcacatcacataggtgctggaccaagcaatttgtcacaaccttcactgtggacaggtccccagaaaaa

SEQ ID NO: 540640 - DNA, 120 bp, Artificial Sequence
  ENSG00000167232_74 (sequence is synthesized)
gagaatcacatcatttaggtaacaaaacctgagttagtcactgttacttgtttgggcagaggtcaggaagaagtgtcacacaacatgtatgctggactaagcaatacgtcactctctctg

SEQ ID NO: 540641 - DNA, 120 bp, Artificial Sequence
  ENSG00000167232_75 (sequence is synthesized)
ttttaggtatggcccaggcaggagagaagggtcatatcacctaagctctggattcgcagataggccccaatctcttttttgggcaatgctcgggtaagagagcagagtcacatcaagtgg

SEQ ID NO: 540642 - DNA, 120 bp, Artificial Sequence
  ENSG00000167232_76 (sequence is synthesized)
ttgatgggcccagagatatatcacattgccccttgtggacagggaccaggcaggggactcacatcacaatagaggtaggacaaggaatacatcacaatacgttttgagagcagaaccaaa

SEQ ID NO: 540643 - DNA, 120 bp, Artificial Sequence
  ENSG00000167232_77 (sequence is synthesized)
aaagagtaacataatctttgtgttgagtgcagcaatatgttacacttttctttgtgggcagaacgtgtaaagaaggaaaaagttggccggacacggtggcctgtaatcccaacactttgg

SEQ ID NO: 540644 - DNA, 83 bp, Artificial Sequence
  ENSG00000167232_78 (sequence is synthesized)
ctgaacctttgaggcagaggctgcagtaagcaaagatcacgccactgcactccagtgtgggtgacacagcaagactccatctc

SEQ ID NO: 540645 - DNA, 120 bp, Artificial Sequence
  ENSG00000167232_79 (sequence is synthesized)
gggaagaggcacatgtcacacgtgcaagaaggtccaaggatgagattaaaaattccacaaaggtccaaattctagggcccagacagaagagaagagtcacatcatctagatgatgaatga

SEQ ID NO: 540646 - DNA, 120 bp, Artificial Sequence
  ENSG00000167232_80 (sequence is synthesized)
tacagaccttggcttttctaccccaattcaagaagtcacttcttcagtcaaccaaaccaattacaaaattgtgttccaatgtcacatgttcaaaaataaacagttcctgaaaagatgtaa

SEQ ID NO: 540647 - DNA, 120 bp, Artificial Sequence
  ENSG00000167244_0 (sequence is synthesized)
tccccgggtcttccaacggactgggcgttgctcccggacactgaggactggccccggggtctcgctcaccttcagcagcgtccaccgcctgccacagagcgttcgatcgctcgctgcctg

SEQ ID NO: 540648 - DNA, 120 bp, Artificial Sequence
  ENSG00000167244_1 (sequence is synthesized)
agctcctggtgcgcccgcggacgcagcctccagcttcgcgacaccaatgggaatcccaatggggaagtcgatgctggtgcttctcaccttcttggccttcgcctcgtgctgcattgctgc

SEQ ID NO: 540649 - DNA, 120 bp, Artificial Sequence
  ENSG00000167244_2 (sequence is synthesized)
ttaccgccccagtgagaccctgtgcggcggggagctggtggacaccctccagttcgtctgtggggaccgcggcttctacttcagcaggcccgcaagccgtgtgagccgtcgcagccgtgg

SEQ ID NO: 540650 - DNA, 120 bp, Artificial Sequence
  ENSG00000167244_3 (sequence is synthesized)
catcgttgaggagtgctgtttccgcagctgtgacctggccctcctggagacgtactgtgctacccccgccaagtccgagagggacgtgtcgacccctccgaccgtgcttccggacaactt

SEQ ID NO: 540651 - DNA, 120 bp, Artificial Sequence
  ENSG00000167244_4 (sequence is synthesized)
gcgcaggggcctgcctgccctcctgcgtgcccgccggggtcacgtgctcgccaaggagctcgaggcgttcagggaggccaaacgtcaccgtcccctgattgctctacccacccaagaccc

SEQ ID NO: 540652 - DNA, 120 bp, Artificial Sequence
  ENSG00000167244_5 (sequence is synthesized)
cgcccacgggggcgcccccccagagatggccagcaatcggaagtgagcaaaactgccgcaagtctgcagcccggcgccaccatcctgcagcctcctcctgaccacggacgtttccatcag

SEQ ID NO: 540653 - DNA, 120 bp, Artificial Sequence
  ENSG00000167244_6 (sequence is synthesized)
gttccatcccgaaaatctctcggttccacgtccccctggggcttctcctgacccagtccccgtgccccgcctccccgaaacaggctactctcctcggccccctccatcgggctgaggaag

SEQ ID NO: 540654 - DNA, 120 bp, Artificial Sequence
  ENSG00000167244_7 (sequence is synthesized)
cacagcagcatcttcaaacatgtacaaaatcgattggctttaaacacccttcacataccctccccccaaattatccccaattatccccacacataaaaaatcaaaacattaaactaaccc

SEQ ID NO: 540655 - DNA, 87 bp, Artificial Sequence
  ENSG00000167244_8 (sequence is synthesized)
ggccccagcgagccttctgctgagctgtagacaccaatgggaatcccaatggggaagtcgatgctggtgcttctcaccttcttggcc

SEQ ID NO: 540656 - DNA, 120 bp, Artificial Sequence
  ENSG00000167244_9 (sequence is synthesized)
taaaaaaaaaaagtattaaaaacgaattggctgagaaacaattggcaaaataaaggaatttggcactccccacccccctctttctcttctcccttggactttgagtcaaattggcctgga

SEQ ID NO: 540657 - DNA, 120 bp, Artificial Sequence
  ENSG00000167244_10 (sequence is synthesized)
cttgagtccctgaaccagcaaagagaaaagaaggaccccagaaatcacaggtgggcacgtcgctgctaccgccatctcccttctcacgggaattttcagggtaaactggccatccgaaaa

SEQ ID NO: 540658 - DNA, 120 bp, Artificial Sequence
  ENSG00000167244_11 (sequence is synthesized)
tagcaacaacccagactggctcctcactcccttttccatcactaaaaatcacagagcagtcagagggacccagtaagaccaaaggaggggaggacagagcatgaaaaccaaaatccatgc

SEQ ID NO: 540659 - DNA, 120 bp, Artificial Sequence
  ENSG00000167244_12 (sequence is synthesized)
aaatgaaatgtaattggcacgaccctcacccccaaatcttacatctcaattcccatcctaaaaagcactcatactttatgcatccccgcagctacacacacacaacacacagcacacgca

SEQ ID NO: 540660 - DNA, 120 bp, Artificial Sequence
  ENSG00000167244_13 (sequence is synthesized)
tgaacacagcacacacacgagcacagcacacacacaaacgcacagcacacacagcacacagatgagcacacagcacacacacaaacgcacagcacacacacgcacacacatgcacacaca

SEQ ID NO: 540661 - DNA, 120 bp, Artificial Sequence
  ENSG00000167244_14 (sequence is synthesized)
gcacacaaacgcacggcacacacacgcacacacatgcacacacagcacacacacaaacgcacagcacacacaaacgcacagcacacacgcacacacagcacacacacgagcacacagcac

SEQ ID NO: 540662 - DNA, 120 bp, Artificial Sequence
  ENSG00000167244_15 (sequence is synthesized)
acaaacgcacagcacacgcacacacatgcacacacagcacacacactagcacacagcacacacacaaagacacagcacacacatgcacacacagcacacacacgcgaacacagcacacac

SEQ ID NO: 540663 - DNA, 120 bp, Artificial Sequence
  ENSG00000167244_16 (sequence is synthesized)
gaacacagcacacacagcacacacacaaacacagcacacacatgcacacagcacacgcacacacagcacacacatgaacacagcacacagcacacacatgcacacacagcacacacgcat

SEQ ID NO: 540664 - DNA, 120 bp, Artificial Sequence
  ENSG00000167244_17 (sequence is synthesized)
gcacagcacacatgaacacagcacacacacaaacacacagcacacacatgcacacacagcacacacactcatgcgcagcacatacatgaacacagctcacagcacacaaacacgcagcac

SEQ ID NO: 540665 - DNA, 120 bp, Artificial Sequence
  ENSG00000167244_18 (sequence is synthesized)
tatctaagcaactacgatatctgtatggatcaggccaaagtcccgctaagattctccaatgttttcatggtctgagccccgctcctgttcccatctccactgcccctcggccctgtctgt

SEQ ID NO: 540666 - DNA, 120 bp, Artificial Sequence
  ENSG00000167244_19 (sequence is synthesized)
gccctgcctctcagaggagggggctcagatggtgcggcctgagtgtgcggccggcggcatttgggatacacccgtagggtgggcggggtgtgtcccaggcctaattccatctttccacca

SEQ ID NO: 540667 - DNA, 120 bp, Artificial Sequence
  ENSG00000167244_20 (sequence is synthesized)
tgacagagatgcccttgtgaggctggcctccttggcgcctgtccccacggcccccgcagcgtgagccacgatgctccccataccccacccattcccgatacaccttacttactgtgtgtt

SEQ ID NO: 540668 - DNA, 120 bp, Artificial Sequence
  ENSG00000167244_21 (sequence is synthesized)
ggcccagccagagtgaggaaggagtttggccacattggagatggcggtagctgagcagacatgcccccacgagtagcctgactccctggtgtgctcctggaaggaagatcttggggaccc

SEQ ID NO: 540669 - DNA, 120 bp, Artificial Sequence
  ENSG00000167244_22 (sequence is synthesized)
ccccaccggagcacacctagggatcatctttgcccgtctcctggggaccccccaagaaatgtggagtcctcgggggccgtgcactgatgcggggagtgtgggaagtctggcggttggagg

SEQ ID NO: 540670 - DNA, 120 bp, Artificial Sequence
  ENSG00000167244_23 (sequence is synthesized)
ggtgggtggggggcagtgggggctgggcggggggagttctggggtaggaagtggtcccgggagattttggatggaaaagtcaggaggattgacagcagacttgcagaattacatagagaa

SEQ ID NO: 540671 - DNA, 120 bp, Artificial Sequence
  ENSG00000167244_24 (sequence is synthesized)
aggattgacagcagacttgcagaattacatagagaaattaggaacccccaaatttcatgtcaattgatctattccccctctttgtttcttggggcatttttccttttttttttttttttg

SEQ ID NO: 540672 - DNA, 120 bp, Artificial Sequence
  ENSG00000167244_25 (sequence is synthesized)
aaaccaaattaaaccccccccccatgtaacaggggggcagtgacaaaagcaagaacgcacgaagccagcctggagaccaccacgtcctgccccccgccatttatcgccctgattggattt

SEQ ID NO: 540673 - DNA, 120 bp, Artificial Sequence
  ENSG00000167244_26 (sequence is synthesized)
tgtttttcatctgtccctgttgcttgggttgagttgagggtggagcctcctggggggcactggccactgagcccccttggagaagtcagaggggagtggagaaggccactgtccggcctg

SEQ ID NO: 540674 - DNA, 120 bp, Artificial Sequence
  ENSG00000167244_27 (sequence is synthesized)
gcttctggggacagtggctggtccccagaagtcctgagggcggaggggggggttgggcagggtctcctcaggtgtcaggagggtgctcggaggccacaggagggggctcctggctggcct

SEQ ID NO: 540675 - DNA, 120 bp, Artificial Sequence
  ENSG00000167244_28 (sequence is synthesized)
gaggctggccggaggggaaggggctagcaggtgtgtaaacagagggttccatcaggctggggcagggtggccgccttccgcacacttgaggaaccctcccctctccctcggtgacatctt

SEQ ID NO: 540676 - DNA, 120 bp, Artificial Sequence
  ENSG00000167244_29 (sequence is synthesized)
gcccgcccctcagcaccctgccttgtctccaggaggtccgaagctctgtgggacctcttgggggcaaggtggggtgaggccggggagtagggaggtcaggcgggtctgagcccacagagc

SEQ ID NO: 540677 - DNA, 120 bp, Artificial Sequence
  ENSG00000167244_30 (sequence is synthesized)
aggagagctgccaggtctgcccatcgaccaggttgcttgggccccggagcccacgggtctggtgatgccatagcagccaccaccgcggcgcctagggctgcggcagggactcggcctctg

SEQ ID NO: 540678 - DNA, 120 bp, Artificial Sequence
  ENSG00000167244_31 (sequence is synthesized)
ggaggtttacctcgcccccacttgtgcccccagctcagcccccctgcacgcagcccgactagcagtctagaggcctgaggcttctgggtcctggtgacggggctggcatgaccccggggg

SEQ ID NO: 540679 - DNA, 120 bp, Artificial Sequence
  ENSG00000167244_32 (sequence is synthesized)
tcgtccatgccagtccgcctcagtcgcagagggtccctcggcaagcgccctgtgagtgggccattcggaacattggacagaagcccaaagagccaaattgtcacaattgtggaacccaca

SEQ ID NO: 540680 - DNA, 120 bp, Artificial Sequence
  ENSG00000167244_33 (sequence is synthesized)
ttggcctgagatccaaaacgcttcgaggcaccccaaattacctgcccattcgtcaggacacccacccacccagtgttatattctgcctcgccggagtgggtgttcccgggggcacttgcc

SEQ ID NO: 540681 - DNA, 120 bp, Artificial Sequence
  ENSG00000167244_34 (sequence is synthesized)
gaccagccccttgcgtccccaggtttgcagctctcccctgggccactaaccatcctggcccgggctgcctgtctgacctccgtgcctagtcgtggctctccatcttgtctcctccccgtg

SEQ ID NO: 540682 - DNA, 120 bp, Artificial Sequence
  ENSG00000167244_35 (sequence is synthesized)
tccccaatgtcttcagtggggggccccctcttgggtcccctcctctgccatcacctgaagacccccacgccaaacactgaatgtcacctgtgcctgccgcctcggtccaccttgcggccc

SEQ ID NO: 540683 - DNA, 120 bp, Artificial Sequence
  ENSG00000167244_36 (sequence is synthesized)
gtgtttgactcaactcaactcctttaacgctaatatttccggcaaaatcccatgcttgggttttgtctttaaccttgtaacgcttgcaatcccaataaagcattaaaagtcatgatcttc

SEQ ID NO: 540684 - DNA, 80 bp, Artificial Sequence
  ENSG00000167244_37 (sequence is synthesized)
gccgcccccgcctcctggcccacgcctgcccgcgctctgcccaccagcgcctccatcgggcaaggcggccccgcgtcgac

SEQ ID NO: 540685 - DNA, 120 bp, Artificial Sequence
  ENSG00000167244_38 (sequence is synthesized)
gcggccccgcgtcgacgccgcccgctgcctcgctgctgactcccgtcccgggcgccgtccgcggggtcgcgctccgccgggcctgcggattccccgccgcctcctcttcatctacctcaa

SEQ ID NO: 540686 - DNA, 120 bp, Artificial Sequence
  ENSG00000167244_39 (sequence is synthesized)
catctacctcaactccccccatccccgcttcgcccgaggaggcggttccccccgcaggcagtccggctcgcaggccgccggcgttgtcacccccccccgcgctccccctccagccctccc

SEQ ID NO: 540687 - DNA, 80 bp, Artificial Sequence
  ENSG00000167244_40 (sequence is synthesized)
ccccggtgccgccaccgcctgtccccctcccgaggcccgggctcgcgacggcagagggctccgtcggcccaaaccgagct

SEQ ID NO: 540688 - DNA, 120 bp, Artificial Sequence
  ENSG00000167244_41 (sequence is synthesized)
gggcgcccgcggtccgggtgcagcctccactccgccccccagtcaccgcctcccccggcccctcgacgtggcgcccttccctccgcttctctgtgctccccgcgcccctcttggcgtctg

SEQ ID NO: 540689 - DNA, 120 bp, Artificial Sequence
  ENSG00000167244_42 (sequence is synthesized)
gccccggcccccgctctttctcccgcaaccttcccttcgctccctcccgtcccccccagctcctagcctccgactccctccccccctcacgcccgccctctcgccttcgccgaaccaaag

SEQ ID NO: 540690 - DNA, 120 bp, Artificial Sequence
  ENSG00000167244_43 (sequence is synthesized)
tggattaattacacgctttctgtttctctccgtgctgttctctcccgctgtgcgcctgcccgcctctcgctgtcctctctccccctcgccctctcttcggcccccccctttcacgttcac

SEQ ID NO: 540691 - DNA, 120 bp, Artificial Sequence
  ENSG00000167244_44 (sequence is synthesized)
tctgtctctcccactatctctgcccccctctatccttgatacaacagctgacctcatttcccgataccttttcccccccgaaaagtacaacatctggcccgccccagcccgaagacagcc

SEQ ID NO: 540692 - DNA, 120 bp, Artificial Sequence
  ENSG00000167244_45 (sequence is synthesized)
cgtcctccctggacaatcagacgaattctccccccccccccaaaaaaaagccatccccccgctctgccccgtcgcacattcggcccccgcgactcggccagagcggcgctggcagaggag

SEQ ID NO: 540693 - DNA, 87 bp, Artificial Sequence
  ENSG00000167244_46 (sequence is synthesized)
tgaaagagacttccaggccccagcgagccttctgctgagctacaccaatgggaatcccaatggggaagtcgatgctggtgcttctca

SEQ ID NO: 540694 - DNA, 120 bp, Artificial Sequence
  ENSG00000167244_47 (sequence is synthesized)
cactgcagcttccccaaccccgcgcacagcgggcactggtttcgggcctctctgtctcctacgaagtccccagagcaactcggatttgggaaatttctctctagcgttgcccaaacacac

SEQ ID NO: 540695 - DNA, 120 bp, Artificial Sequence
  ENSG00000167244_48 (sequence is synthesized)
ggacgcagcctccagcttcgcggagatggtttccccagacccccaaattatcgtggtggcccccgagaccgaactcgcgtctatgcaagtccaacgcactgaggacggggtaaccattat

SEQ ID NO: 540696 - DNA, 120 bp, Artificial Sequence
  ENSG00000167257_0 (sequence is synthesized)
gctcgacccctccccccgtggctcggccgccccctccccccgctccgcccgctcagagcataatggcagcgtctgaggttgctggtgttgtggccaatgcccccagtcctccggaatctt

SEQ ID NO: 540697 - DNA, 120 bp, Artificial Sequence
  ENSG00000167257_1 (sequence is synthesized)
ctagtttatgtgcttccaaatcagacgaaggtctcccagatggtctaagcaccaaagactctgcacagaagcagaagaactcgcctctgttgagtgtaagtagccaaacaataaccaagg

SEQ ID NO: 540698 - DNA, 120 bp, Artificial Sequence
  ENSG00000167257_2 (sequence is synthesized)
agaataacagaaatgtccatttggagcactcagagcagaatcctggttcatcagcaggtgacacctcagcagcgcaccaggtggttttaggagaaaacttgatagccacagccctttgtc

SEQ ID NO: 540699 - DNA, 120 bp, Artificial Sequence
  ENSG00000167257_3 (sequence is synthesized)
tttctggcagtgggtctcagtctgatttgaaggatgtggccagcacagcaggagaggagggggacacaagccttcgggagagcctccatccagtcactcggtctcttaaggcagggtgcc

SEQ ID NO: 540700 - DNA, 120 bp, Artificial Sequence
  ENSG00000167257_4 (sequence is synthesized)
atactaagcagcttgcctccaggaattgctctgaagagaaatccccacaaacctccatcctaaaggaaggtaacagggacacaagcttggatttccgacctgtagtgtctccagcaaatg

SEQ ID NO: 540701 - DNA, 120 bp, Artificial Sequence
  ENSG00000167257_5 (sequence is synthesized)
gggttgaaggagtccgagtggatcaggatgatgatcaagatagctcttccctgaagctttctcagaacattgctgtacagactgactttaagacagctgattcagaggtaaacacagatc

SEQ ID NO: 540702 - DNA, 120 bp, Artificial Sequence
  ENSG00000167257_6 (sequence is synthesized)
aagatattgaaaagaatttggataaaatgatgacagagagaaccctgttgaaagagcgttaccaggaggtcctggacaaacagaggcaagtggagaatcagctccaagtgcaattaaagc

SEQ ID NO: 540703 - DNA, 120 bp, Artificial Sequence
  ENSG00000167257_7 (sequence is synthesized)
agcttcagcaaaggagagaagaggaaatgaagaatcaccaggagatattaaaggctattcaggatgtgacaataaagcgggaagaaacaaagaagaagatagagaaagagaagaaggagt

SEQ ID NO: 540704 - DNA, 120 bp, Artificial Sequence
  ENSG00000167257_8 (sequence is synthesized)
ttttgcagaaggagcaggatctgaaagctgaaattgagaagctttgtgagaagggcagaagagaggtgtgggaaatggaactggatagactcaagaatcaggatggcgaaataaatagga

SEQ ID NO: 540705 - DNA, 120 bp, Artificial Sequence
  ENSG00000167257_9 (sequence is synthesized)
acattatggaagagactgaacgggcctggaaggcagagatcttatcactagagagccggaaagagttactggtactgaaactagaagaagcagaaaaagaggcagaattgcaccttactt

SEQ ID NO: 540706 - DNA, 120 bp, Artificial Sequence
  ENSG00000167257_10 (sequence is synthesized)
acctcaagtcaactcccccaacactggagacagttcgttccaaacaggagtgggagacgagactgaatggagttcggataatgaaaaagaatgttcgtgaccaatttaatagtcatatcc

SEQ ID NO: 540707 - DNA, 120 bp, Artificial Sequence
  ENSG00000167257_11 (sequence is synthesized)
agttagtgaggaacggagccaagctgagcagccttcctcaaatccctactcccactttacctccacccccatcagagacagacttcatgcttcaggtgtttcaacccagtccctctctgg

SEQ ID NO: 540708 - DNA, 120 bp, Artificial Sequence
  ENSG00000167257_12 (sequence is synthesized)
ctcctcggatgcccttctccattgggcaggtcacaatgcccatggttatgcccagtgcagatccccgctccttgtctttcccaatcctgaaccctgccctttcccagcccagccagcctt

SEQ ID NO: 540709 - DNA, 120 bp, Artificial Sequence
  ENSG00000167257_13 (sequence is synthesized)
cctcaccccttcctggctcccatggcagaaatagccctggcttgggttcccttgtcagcccccacggtccacacatgccccctgccgcctccatcccacctcccccaggcttgggcggtg

SEQ ID NO: 540710 - DNA, 120 bp, Artificial Sequence
  ENSG00000167257_14 (sequence is synthesized)
agcagatcaagacagcacgtaccaccatggcaggcctgaccatggaggaacttatccagttggttgctgcacgactggcagaacatgagcgggtggcagcaagtactcagccacttggtc

SEQ ID NO: 540711 - DNA, 120 bp, Artificial Sequence
  ENSG00000167257_15 (sequence is synthesized)
gcatccgggccttgttccctgctccactggcccaaatcagtaccccaatgttcttgccttctgcccaagtttcatatcctggaaggtcttcacatgctccagccacctgtaagctatgtc

SEQ ID NO: 540712 - DNA, 120 bp, Artificial Sequence
  ENSG00000167257_16 (sequence is synthesized)
taatgtgccagaaactcgtccagcccagtgagctgcatccaatggcgtgtacccatgtattgcacaaggagtgtatcaaattctgggcccagaccaacacaaatgacacttgtccctttt

SEQ ID NO: 540713 - DNA, 120 bp, Artificial Sequence
  ENSG00000167257_17 (sequence is synthesized)
gtccaactcttaaatgacggacctgactggggaggaagaagaagagaaactgatgtgaacaggaagcgcgggttcaagatttctaaaactctatatttatacagtgacatatactcatgc

SEQ ID NO: 540714 - DNA, 120 bp, Artificial Sequence
  ENSG00000167257_18 (sequence is synthesized)
catgtacatttttattatataggtaatgtgtgtatagaaagtctgtattccaatgttcgtaaatgaaactatgtatattatgcagaaacagtctgttccccctcatcttgcaattccttt

SEQ ID NO: 540715 - DNA, 120 bp, Artificial Sequence
  ENSG00000167257_19 (sequence is synthesized)
gggggatgcagattgtagggaagatgatgtttagtttggccttgaaattatgatatccctgcccagggctgttttcaaatacaatataaaaaccacctaggaacctgctgttgctctaag

SEQ ID NO: 540716 - DNA, 120 bp, Artificial Sequence
  ENSG00000167257_20 (sequence is synthesized)
gccattctgctttggtttggctcagcctctagtccatttccttaaggctcatgtatgcagatttaaagcctggtgctcacccactgtccaaccagatgccttgcttaccgaaagcctcca

SEQ ID NO: 540717 - DNA, 120 bp, Artificial Sequence
  ENSG00000167257_21 (sequence is synthesized)
gaagcctcagtattgttttagccactctactccaaatggataaaatgagactctgattgaggaaaaaaaagtaaccctagtagtttgacttcttattgaatattttactgtgttaacgct

SEQ ID NO: 540718 - DNA, 120 bp, Artificial Sequence
  ENSG00000167257_22 (sequence is synthesized)
cattatttatacagacattaggtttacagaatattctgttttacatcaccaaaattcacagtccgagaataacaacataaccaggtcccaattcctccatgtaccccacaagcttctgtc

SEQ ID NO: 540719 - DNA, 120 bp, Artificial Sequence
  ENSG00000167257_23 (sequence is synthesized)
caccctattttctggacagaaattagcacaacccacaggtttttcctgggccaagtcttcctttgctgccactgtcttggcttctaatcaagctctgacaggccaacattgtgaagtcct

SEQ ID NO: 540720 - DNA, 120 bp, Artificial Sequence
  ENSG00000167257_24 (sequence is synthesized)
caccctttcccattcacttctggtctcctagtctagctaatccccctcccccagaaggttaaggcagttggttcacaaccaagttgtttggtgaccttgggtgagctccagacaggcact

SEQ ID NO: 540721 - DNA, 120 bp, Artificial Sequence
  ENSG00000167257_25 (sequence is synthesized)
ggggtgaggagatgtctgtgcaaaattacttgtagaatgatcttgggatgctggattttaatttttgaagcaagaaagttagggggggacatatttcctgtcctgggaaaaatggagacc

SEQ ID NO: 540722 - DNA, 120 bp, Artificial Sequence
  ENSG00000167257_26 (sequence is synthesized)
aaagtgatattaagaaagtagtttggatttcaaatttataaatcacttgctctgtgggtagctatcaggaactagatcattttccacctctgcttattgtacttcttaattttaggtttt

SEQ ID NO: 540723 - DNA, 120 bp, Artificial Sequence
  ENSG00000167257_27 (sequence is synthesized)
atacctgggaaagctgtgactctattagagctttgaatcttttcctatccttttatctttactcctacagggaatggcctcagctcccttctcttttagaattaaacaagtaaaaactaa

SEQ ID NO: 540724 - DNA, 120 bp, Artificial Sequence
  ENSG00000167257_28 (sequence is synthesized)
ttcagtcagtgttagtctgtgcttaacacttccagcaattgggaggaccaatttaatagtcatatccagttagtgaggaacggagccaagctgagcagccttcctcaaatccctactccc

SEQ ID NO: 540725 - DNA, 120 bp, Artificial Sequence
  ENSG00000167257_29 (sequence is synthesized)
actttacctccacccccatcagagacagacttcatgcttcagacaaactggagaagatcctggagaagctgctgacccggttcccacagtgcaataaggcccagatgaccaacattcttc

SEQ ID NO: 540726 - DNA, 120 bp, Artificial Sequence
  ENSG00000167257_30 (sequence is synthesized)
gaccatccctattcagtgcaagagttgttcattgatgtcttctccagtttcctaaactttctttttcttcctttctctctcgtcctctacctcttctcctctgcagacagacttcatgct

SEQ ID NO: 540727 - DNA, 120 bp, Artificial Sequence
  ENSG00000167257_31 (sequence is synthesized)
gagaacttgctggcttgttttgttttttgttttttttgctagcaaccatcatactactctcatacagtgccatacaatgacttcattctgatgttcagtaaataagaaagccagtagcca

SEQ ID NO: 540728 - DNA, 120 bp, Artificial Sequence
  ENSG00000167257_32 (sequence is synthesized)
ttgtctaatcttatggcaagtaggaactttatgacctacgtgtagtctctttcactgagtaactgatgagtgcaggacattagcattcatatttatcatctttgaccttgcaggaagaat

SEQ ID NO: 540729 - DNA, 120 bp, Artificial Sequence
  ENSG00000167257_33 (sequence is synthesized)
ccttgttaattctctgagtcacatcttaagaagtacagtgtatcctgccttctagtgacgggtgtgctttgttgtaggagaaagtatgggcacaacagactgtagagggcagacgtctca

SEQ ID NO: 540730 - DNA, 120 bp, Artificial Sequence
  ENSG00000167257_34 (sequence is synthesized)
tctcagacttgaggctttctctcagtcagtcattgggtcttgtttgggttattttgtgggaccgatgattaatgcagcgtggatgttggtgtccgtttgccagaactacattgcttagct

SEQ ID NO: 540731 - DNA, 120 bp, Artificial Sequence
  ENSG00000167257_35 (sequence is synthesized)
tgcttggaagctggtaaggggaaagagtaaaaagttagttacctgtggcggaattctaggtgttagtgattctgcctcttttaaagtgtctctgaacgattctaaatataacttttttcc

SEQ ID NO: 540732 - DNA, 120 bp, Artificial Sequence
  ENSG00000167258_0 (sequence is synthesized)
aagtgccgtttcggtttaatctagtgtgtgactgggtctgtgtgagggagagagtgtgtgtggtgtggaggtgaaacggaggcaagaaagggggctacctcaggagcgagggacaaaggg

SEQ ID NO: 540733 - DNA, 120 bp, Artificial Sequence
  ENSG00000167258_1 (sequence is synthesized)
ggcgtgaggcacctaggccgcggcaccccggcgacaggaagccgtcctgaaccgggctaccgggtaggggaagggcccgcgtagtcctcgcagggccccagagctggagtcggctccaca

SEQ ID NO: 540734 - DNA, 120 bp, Artificial Sequence
  ENSG00000167258_2 (sequence is synthesized)
gccccgggccgtcggcttctcacttcctggacctccccggcgcccgggcctgaggactggctcggcggagggagaagaggaaacagacttgagcagctccccgttgtctcgcaactccac

SEQ ID NO: 540735 - DNA, 120 bp, Artificial Sequence
  ENSG00000167258_3 (sequence is synthesized)
tgccgaggaactctcatttcttccctcgctccttcaccccccacctcatgtagaagggtgctgaggcgtcgggagggaggaggagcctgggctaccgtccctgccctccccacccccttc

SEQ ID NO: 540736 - DNA, 120 bp, Artificial Sequence
  ENSG00000167258_4 (sequence is synthesized)
ccggggcgctttggtgggcgtggagttggggttgggggggtgggtgggggttgctttttggagtgctggggaacttttttcccttcttcaggtcaggggaaagggaatgcccaattcaga

SEQ ID NO: 540737 - DNA, 120 bp, Artificial Sequence
  ENSG00000167258_5 (sequence is synthesized)
gagacatgggggcaagaaggacgggagtggaggagcttctggaactttgcagccgtcatcgggaggcggcagctctaacagcagagagcgtcaccgcttggtatcgaagcacaagcggca

SEQ ID NO: 540738 - DNA, 120 bp, Artificial Sequence
  ENSG00000167258_6 (sequence is synthesized)
taagtccaaacactccaaagacatggggttggtgacccccgaagcagcatccctgggcacagttatcaaacctttggtggagtatgatgatatcagctctgattccgacaccttctccga

SEQ ID NO: 540739 - DNA, 120 bp, Artificial Sequence
  ENSG00000167258_7 (sequence is synthesized)
tgacatggccttcaaactagaccgaagggagaacgacgaacgtcgtggatcagatcggagcgaccgcctgcacaaacatcgtcaccaccagcacaggcgttcccgggacttactaaaagc

SEQ ID NO: 540740 - DNA, 120 bp, Artificial Sequence
  ENSG00000167258_8 (sequence is synthesized)
taaacagaccgaaaaagaaaaaagccaagaagtctccagcaagtcgggatcgatgaaggaccggatatcgggaagttcaaagcgttcgaatgaggagactgatgactatgggaaggcgca

SEQ ID NO: 540741 - DNA, 120 bp, Artificial Sequence
  ENSG00000167258_9 (sequence is synthesized)
ggtagccaaaagcagcagcaaggaatccaggtcatccaagctccacaaggagaagaccaggaaagaacgggagctgaagtctgggcacaaagaccggagtaaaagtcatcgaaaaaggga

SEQ ID NO: 540742 - DNA, 120 bp, Artificial Sequence
  ENSG00000167258_10 (sequence is synthesized)
aacacccaaaagttacaaaacagtggacagcccaaaacggagatccaggagcccccacaggaagtggtctgacagctccaaacaagatgatagcccctcgggagcttcttatggccaaga

SEQ ID NO: 540743 - DNA, 120 bp, Artificial Sequence
  ENSG00000167258_11 (sequence is synthesized)
ttatgaccttagtccctcacgatctcatacctcgagcaattatgactcctacaagaaaagtcctggaagtacctcgagaaggcagtcggtcagtcccccttacaaggagccttcggccta

SEQ ID NO: 540744 - DNA, 120 bp, Artificial Sequence
  ENSG00000167258_12 (sequence is synthesized)
ccagtccagcacccggtcaccgagcccctacagtaggcgacagagatctgtcagtccctatagcaggagacggtcgtccagctacgaaagaagtggctcttacagcgggcgatcgcccag

SEQ ID NO: 540745 - DNA, 120 bp, Artificial Sequence
  ENSG00000167258_13 (sequence is synthesized)
tccctatggtcgaaggcggtccagcagccctttcctgagcaagcggtctctgagtcggagtccactccccagtaggaaatccatgaagtccagaagtagaagtcctgcatattcaagaca

SEQ ID NO: 540746 - DNA, 120 bp, Artificial Sequence
  ENSG00000167258_14 (sequence is synthesized)
ttcatcttctcatagtaaaaagaagagatccagttcacgcagtcgtcattccagtatctcacctgtcaggcttccacttaattccagtctgggagctgaactcagtaggaaaaagaagga

SEQ ID NO: 540747 - DNA, 120 bp, Artificial Sequence
  ENSG00000167258_15 (sequence is synthesized)
aagagcagctgctgctgctgcagcaaagatggatggaaaggagtccaagggttcacctgtatttttgcctagaaaagagaacagttcagtagaggctaaggattcaggtttggagtctaa

SEQ ID NO: 540748 - DNA, 120 bp, Artificial Sequence
  ENSG00000167258_16 (sequence is synthesized)
aaagttacccagaagtgtaaaattggaaaaatctgccccagatactgaactggtgaatgtaacacatctaaacacagaggtaaaaaattcttcagatacagggaaagtaaagttggatga

SEQ ID NO: 540749 - DNA, 120 bp, Artificial Sequence
  ENSG00000167258_17 (sequence is synthesized)
gaactccgagaagcatcttgttaaagatttgaaagcacagggaacaagagactctaaacccatagcactgaaagaggagattgttactccaaaggagacagaaacatcagaaaaggagac

SEQ ID NO: 540750 - DNA, 120 bp, Artificial Sequence
  ENSG00000167258_18 (sequence is synthesized)
ccctccacctcttcccacaattgcttctcccccaccccctctaccaactactacccctccacctcagacaccccctttgccacctttgcctccaataccagctcttccacagcaaccacc

SEQ ID NO: 540751 - DNA, 120 bp, Artificial Sequence
  ENSG00000167258_19 (sequence is synthesized)
tctgcctccttctcagccagcatttagtcaggttcctgcttccagtacttcaactttgcccccttctactcactcaaagacatctgctgtgtcctctcaggcaaattctcagccccctgt

SEQ ID NO: 540752 - DNA, 120 bp, Artificial Sequence
  ENSG00000167258_20 (sequence is synthesized)
acaggtttctgtgaagactcaagtatctgtaacagctgctattccacacctgaaaacttcaacgttgcctcctttgcccctcccacccttattacctggagatgatgacatggatagtcc

SEQ ID NO: 540753 - DNA, 120 bp, Artificial Sequence
  ENSG00000167258_21 (sequence is synthesized)
aaaagaaactcttccttcaaaacctgtgaagaaagagaaggaacagaggacacgtcacttactcacagaccttcctctccctccagagctccctggtggagatctgtctcccccagactc

SEQ ID NO: 540754 - DNA, 120 bp, Artificial Sequence
  ENSG00000167258_22 (sequence is synthesized)
tccagaaccaaaggcaatcacaccacctcagcaaccatataaaaagagaccaaaaatttgttgtcctcgttatggagaaagaagacaaacagaaagcgactgggggaaacgctgtgtgga

SEQ ID NO: 540755 - DNA, 120 bp, Artificial Sequence
  ENSG00000167258_23 (sequence is synthesized)
caagtttgacattattgggattattggagaaggaacctatggccaagtatataaagccaaggacaaagacacaggagaactagtggctctgaagaaggtgagactagacaatgagaaaga

SEQ ID NO: 540756 - DNA, 120 bp, Artificial Sequence
  ENSG00000167258_24 (sequence is synthesized)
gggcttcccaatcacagccattcgtgaaatcaaaatccttcgtcagttaatccaccgaagtgttgttaacatgaaggaaattgtcacagataaacaagatgcactggatttcaagaagga

SEQ ID NO: 540757 - DNA, 120 bp, Artificial Sequence
  ENSG00000167258_25 (sequence is synthesized)
caaaggtgccttttaccttgtatttgagtatatggaccatgacttaatgggactgctagaatctggtttggtgcacttttctgaggaccatatcaagtcgttcatgaaacagctaatgga

SEQ ID NO: 540758 - DNA, 120 bp, Artificial Sequence
  ENSG00000167258_26 (sequence is synthesized)
aggattggaatactgtcacaaaaagaatttcctgcatcgggatattaagtgttctaacattttgctgaataacagtgggcaaatcaaactagcagattttggacttgctcggctctataa

SEQ ID NO: 540759 - DNA, 120 bp, Artificial Sequence
  ENSG00000167258_27 (sequence is synthesized)
ctctgaagagagtcgcccttacacaaacaaagtcattactttgtggtaccgacctccagaactactgctaggagaggaacgttacacaccagccatagatgtttggagctgtggatgtat

SEQ ID NO: 540760 - DNA, 120 bp, Artificial Sequence
  ENSG00000167258_28 (sequence is synthesized)
tcttggggaactattcacaaagaagcctatttttcaagccaatctggaactggctcagctagaactgatcagccgactttgtggtagcccttgtccagctgtgtggcctgatgttatcaa

SEQ ID NO: 540761 - DNA, 120 bp, Artificial Sequence
  ENSG00000167258_29 (sequence is synthesized)
actgccctacttcaacaccatgaaaccgaagaagcaatatcgaaggcgtctacgagaagaattctctttcattccttctgcagcacttgatttattggaccacatgctgacactagatcc

SEQ ID NO: 540762 - DNA, 120 bp, Artificial Sequence
  ENSG00000167258_30 (sequence is synthesized)
tagtaagcggtgcacagctgaacagaccctacagagcgacttccttaaagatgtcgaactcagcaaaatggctcctccagacctcccccactggcaggattgccatgagttgtggagtaa

SEQ ID NO: 540763 - DNA, 120 bp, Artificial Sequence
  ENSG00000167258_31 (sequence is synthesized)
gaaacggcgacgtcagcgacaaagtggtgttgtagtcgaagagccacctccatccaaaacttctcgaaaagaaactacctcagggacaagtactgagcctgtgaagaacagcagcccagc

SEQ ID NO: 540764 - DNA, 120 bp, Artificial Sequence
  ENSG00000167258_32 (sequence is synthesized)
accacctcagcctgctcctggcaaggtggagtctggggctggggatgcaataggccttgctgacatcacacaacagctgaatcaaagtgaattggcagtgttattaaacctgctgcagag

SEQ ID NO: 540765 - DNA, 120 bp, Artificial Sequence
  ENSG00000167258_33 (sequence is synthesized)
ccaaaccgacctgagcatccctcaaatggcacagctgcttaacatccactccaacccagagatgcagcagcagctggaagccctgaaccaatccatcagtgccctgacggaagctacttc

SEQ ID NO: 540766 - DNA, 120 bp, Artificial Sequence
  ENSG00000167258_34 (sequence is synthesized)
caggactcagagaccatggccccagaggagtctttgaaggaagcaccctctgccccagtgatcctgccttcagcagaacagacgacccttgaagcttcaagcacaccagctgacatgcag

SEQ ID NO: 540767 - DNA, 120 bp, Artificial Sequence
  ENSG00000167258_35 (sequence is synthesized)
aatatattggcagttctcttgagtcagctgatgaaaacccaagagccagcaggcagtctggaggaaaacaacagtgacaagaacagtgggccacaggggccccgaagaactcccacaatg

SEQ ID NO: 540768 - DNA, 120 bp, Artificial Sequence
  ENSG00000167258_36 (sequence is synthesized)
ccacaggaggaggcagcagcatgtcctcctcacattcttccaccagagaagaggccccctgagccccccggacctccaccgccgccacctccaccccctctggttgaaggcgatctttcc

SEQ ID NO: 540769 - DNA, 120 bp, Artificial Sequence
  ENSG00000167258_37 (sequence is synthesized)
agcgccccccaggagttgaacccagccgtgacagccgccttgctgcaacttttatcccagcctgaagcagagcctcctggccacctgccacatgagcaccaggccttgagaccaatggag

SEQ ID NO: 540770 - DNA, 120 bp, Artificial Sequence
  ENSG00000167258_38 (sequence is synthesized)
tactccacccgaccccgtccaaacaggacttatggaaacactgatgggcctgaaacagggttcagtgccattgacactgatgaacgaaactctggtccagccttgacagaatccttggtc

SEQ ID NO: 540771 - DNA, 120 bp, Artificial Sequence
  ENSG00000167258_39 (sequence is synthesized)
cagaccctggtgaagaacaggaccttctcaggctctctgagccaccttggggagtccagcagttaccagggcacagggtcagtgcagtttccaggggaccaggacctccgttttgccagg

SEQ ID NO: 540772 - DNA, 120 bp, Artificial Sequence
  ENSG00000167258_40 (sequence is synthesized)
gtccccttagcgttacacccggtggtcgggcaaccattcctgaaggctgagggaagcagcaattctgtggtacatgcagagaccaaattgcaaaactatggggagctggggccaggaacc

SEQ ID NO: 540773 - DNA, 120 bp, Artificial Sequence
  ENSG00000167258_41 (sequence is synthesized)
actggggccagcagctcaggagcaggccttcactgggggggcccaactcagtcttctgcttatggaaaactctatcgggggcctacaagagtcccaccaagagggggaagagggagagga

SEQ ID NO: 540774 - DNA, 120 bp, Artificial Sequence
  ENSG00000167258_42 (sequence is synthesized)
gttccttactaacccagagacttcagtgtcctgaaagattcctttcctatccatccttccatccagttctctgaatctttaatgaaatcatttgccagagcgaggtaatcatctgcattt

SEQ ID NO: 540775 - DNA, 120 bp, Artificial Sequence
  ENSG00000167258_43 (sequence is synthesized)
ggctactgcaaagctgtccgttgtattccttgctcacttgctactagcaggcgacttacgaaataatgatgttggcaccagttccccctggatgggctatagccagaacatttacttcaa

SEQ ID NO: 540776 - DNA, 120 bp, Artificial Sequence
  ENSG00000167258_44 (sequence is synthesized)
ctctaccttagtagatacaagtagagaatatggagaggatcattacattgaaaagtaaatgttttattagttcattgcctgcacttactgatcggaagagagaaagaacagtttcagtat

SEQ ID NO: 540777 - DNA, 120 bp, Artificial Sequence
  ENSG00000167258_45 (sequence is synthesized)
tgagatggctcaggagaggctctttgatttttaaagttttggggtgggggattgtgtgtggtttctttcttttgaattttaatttaggtgttttgggtttttttcctttaaagagaatag

SEQ ID NO: 540778 - DNA, 120 bp, Artificial Sequence
  ENSG00000167258_46 (sequence is synthesized)
tgttcacaaaatttgagctgctctttggcttttgctataagggaaacagagtggcctggctgatttgaataaatgtttctttcctctccaccatctcacattttgcttttaagtgaacac

SEQ ID NO: 540779 - DNA, 120 bp, Artificial Sequence
  ENSG00000167258_47 (sequence is synthesized)
tttttccccattgagcatcttgaacatactttttttccaaataaattactcatccttaaagtttactccactttgacaaaagatacgcccttctccctgcacataaagcaggttgtagaa

SEQ ID NO: 540780 - DNA, 120 bp, Artificial Sequence
  ENSG00000167258_48 (sequence is synthesized)
ccttctccctgcacataaagcaggttgtagaacgtggcattcttgggcaagtaggtagactttacccagtctctttccttttttgctgatgtgtgctctctctctctctttctctctctc

SEQ ID NO: 540781 - DNA, 120 bp, Artificial Sequence
  ENSG00000167258_49 (sequence is synthesized)
tctcgcttgctcgctctcgctgtttctctctctttgaggcatttgtttggaaaaaatcgttgagatgcccaagaacctgggataattctttactttttttgaaataaaggaaaggaaatt

SEQ ID NO: 540782 - DNA, 120 bp, Artificial Sequence
  ENSG00000167258_50 (sequence is synthesized)
cagactcttacattgttctctgtaactcttcaattctaaaatgttttgttttttaaaccatgttctgatggggaagttgatttgtaagtgtggacagcttggacattgctgctgagctgt

SEQ ID NO: 540783 - DNA, 120 bp, Artificial Sequence
  ENSG00000167258_51 (sequence is synthesized)
ggttagagatgatgcctccattcctagagggctaataacagcatttagcatattgtttacacatatatttttatgtcaaaaaaaaaacaaaaacctttcaaacagagcattgtgatattg

SEQ ID NO: 540784 - DNA, 120 bp, Artificial Sequence
  ENSG00000167258_52 (sequence is synthesized)
tcaaagagaaaaacaaatcctgaagatacatggaaatgtaacctagtttagggtgggtatttttctgaagatacatcaatacctgaccttttttaaaaaaataattttaaaacagcatac

SEQ ID NO: 540785 - DNA, 120 bp, Artificial Sequence
  ENSG00000167258_53 (sequence is synthesized)
tgtgaggaagaacagtattgacatacccacatcccagcatgtgtaccctgccagttcttttagggatttttcctccaaagagatttggatttggttttggtaaaaggggttaaattgtgc

SEQ ID NO: 540786 - DNA, 120 bp, Artificial Sequence
  ENSG00000167258_54 (sequence is synthesized)
ttccaggcaagaactttgccttatcataaacaggaaatgaaaaagggaagggctgtcaggatgggataatttgggaggcttctcattctggcttctatttctatgtgagtaccagcatat

SEQ ID NO: 540787 - DNA, 120 bp, Artificial Sequence
  ENSG00000167258_55 (sequence is synthesized)
agagtgttttaaaaacagatacatgtcatataatttatctgcacagacttagaccttcaggaaacataggttaagcccccttttacaaagaaaaagtaaacatacttcagcatcttggag

SEQ ID NO: 540788 - DNA, 120 bp, Artificial Sequence
  ENSG00000167258_56 (sequence is synthesized)
ggtagttttcaaaactcaagtttcatgtttcaatgccaagttcttattttaaaaaataaaatctacttataagagaaaggtgcattacttaaaaaaaaaaaactttaaagaaatgaaaga

SEQ ID NO: 540789 - DNA, 120 bp, Artificial Sequence
  ENSG00000167258_57 (sequence is synthesized)
agaaccctcttcagatacttacttgaagactgttttcccctgttaatgagatatagctagatatcggtgtgtgtatttctttattattctctggtttttgatctggccttgcctccaggg

SEQ ID NO: 540790 - DNA, 120 bp, Artificial Sequence
  ENSG00000167258_58 (sequence is synthesized)
ccaaacactgatttagaaagagagccttctagctattttggcattgatggctttttataccagtgtgtccagttagatttactaggcttactgacatgctattggtaaatcgcattaaag

SEQ ID NO: 540791 - DNA, 120 bp, Artificial Sequence
  ENSG00000167258_59 (sequence is synthesized)
ttcatctgaaccttctgtctgttgacttcttagtcctcagacatgggcctttgtgttttagaatatttgaatttgagttattgggccccactccctgttttttattaaagaacgtgagcc

SEQ ID NO: 540792 - DNA, 120 bp, Artificial Sequence
  ENSG00000167258_60 (sequence is synthesized)
tgggatactttcagaagtatctgttcaatgaaaaaaagttggtttcccatcaaatatgaataaaattctctatatatttcattgtattttggttatcagcagtcatcaataatgtttttc

SEQ ID NO: 540793 - DNA, 120 bp, Artificial Sequence
  ENSG00000167258_61 (sequence is synthesized)
cctcccctctcccacctcttatttttaattatgccaaatatcctaaataatatacttaagcctccattccctcatccctactagggaagggggtgagtgtatgtgtgagtgtatgtgtat

SEQ ID NO: 540794 - DNA, 120 bp, Artificial Sequence
  ENSG00000167258_62 (sequence is synthesized)
gtatgatcccatctcacccccacccccattttgggagtcttttaaaatgaaaacaaagtttggtagttttgactatttctaaaagcagaggagaaaaaaaaacttatttaaatatcctgg

SEQ ID NO: 540795 - DNA, 120 bp, Artificial Sequence
  ENSG00000167258_63 (sequence is synthesized)
aatctgtatggaggaagaaaaggtatttgttaatttttcagttacgttatctataaacatgatggaagtaaaggtttggcagaatttcaccttgactatttgaaaattacagacccaatt

SEQ ID NO: 540796 - DNA, 120 bp, Artificial Sequence
  ENSG00000167258_64 (sequence is synthesized)
aattccattcaaaagtggttttcgttttgttttaattattgtacaatgagagatattgtctattaaatacattattttgaacagatgagaaatctgattctgttcatgagtgggaggcaa

SEQ ID NO: 540797 - DNA, 120 bp, Artificial Sequence
  ENSG00000167258_65 (sequence is synthesized)
aactggtttgaccgtgatcatttttgtggttttgaaaacaaatatacttgacccagtttccttagttttttcttcaactgtccataggaacgataagtatttgaaagcaacatcaaatct

SEQ ID NO: 540798 - DNA, 120 bp, Artificial Sequence
  ENSG00000167258_66 (sequence is synthesized)
atacgtttaaagcagggcagttagcacaaatttgcaagtagaacttctattagcttatgccatagacatcacccaaccacttgtatgtgtgtgtgtatatataatatgcatatatagtta

SEQ ID NO: 540799 - DNA, 120 bp, Artificial Sequence
  ENSG00000167258_67 (sequence is synthesized)
ccgtgctaaaatggttaccagcaggttttgagagagaatgctgcatcagaaaagtgtcagttgccacctcattctccctgatttaggttcctgacactgattcctttctctctcgttttt

SEQ ID NO: 540800 - DNA, 120 bp, Artificial Sequence
  ENSG00000167258_68 (sequence is synthesized)
gacccccattgggtgtatcttgtctatgtacagatattttgtaatatattaaatttttttctttcagtttataaaaatggaaagtggagattggaaaattaaatatttcctgttactata

SEQ ID NO: 540801 - DNA, 120 bp, Artificial Sequence
  ENSG00000167258_69 (sequence is synthesized)
catgtttttgcttttatcagcctgggagctaggtccctggagacaagaattttagaacagttatgactctctctgggagtgtactaaggttagtctgaatccttctggggaattcaggtt

SEQ ID NO: 540802 - DNA, 120 bp, Artificial Sequence
  ENSG00000167258_70 (sequence is synthesized)
atgttctttggtgtctagtcccttgtctcatgtctaatgtaacctgccattttcctttacaggtaggagcaacggtgggaatgccctctgaggaatgcagtgatgtccatcagtcacctc

SEQ ID NO: 540803 - DNA, 120 bp, Artificial Sequence
  ENSG00000167258_71 (sequence is synthesized)
tcacccagagcctggcaaattcagtctctttcacagaacctaaagccaagccaggttcagtgggaaatcccacctgtccaaacactgtgtgagacaccagaattagaggcctgcaagcct

SEQ ID NO: 540804 - DNA, 120 bp, Artificial Sequence
  ENSG00000167258_72 (sequence is synthesized)
aaaaaaatgcagtagttaggaaaacaaaatagaaaattatgatagaaattagtctttaaaattactgtaacataggaagctgaatgataatatggtagttacaatcctttcagactatga

SEQ ID NO: 540805 - DNA, 120 bp, Artificial Sequence
  ENSG00000167258_73 (sequence is synthesized)
ttttggggagacgtgactaaagtttggagaagcaagtgtatttttatacatgacagtaatgaaaactttttactttattttatctctcctatatattctttaagttttatttcaggttaa

SEQ ID NO: 540806 - DNA, 120 bp, Artificial Sequence
  ENSG00000167258_74 (sequence is synthesized)
cctatgtcatcaaacattctgtaaaatgtgttagccaagtccatgcaaggtctctgttgtagagcaagattatgtcctagaaatgtgaccacagcatgtatattgttccctctcatcttc

SEQ ID NO: 540807 - DNA, 120 bp, Artificial Sequence
  ENSG00000167258_75 (sequence is synthesized)
cttccttctgctttgttttaatgtttccatctaacagcaaaaaggggcagggagtctgccaacagcctgcatgttagaacagttctttaaaggaaggaaatggaggaaatcttagaccaa

SEQ ID NO: 540808 - DNA, 120 bp, Artificial Sequence
  ENSG00000167258_76 (sequence is synthesized)
aatcaggataatcatttgaaacatatgatatttttacactagctgttagatccaggatgcaactgttttacttttaatcacttgatttatttataattgcaattttctgatcccaagatt

SEQ ID NO: 540809 - DNA, 120 bp, Artificial Sequence
  ENSG00000167258_77 (sequence is synthesized)
ttattctttatatatctggttacttatattgatatttgtttatgttgcacagtgtgtgtgtttgtgtttataatcacatgtgctttttaagatggtgtttaaaagaagtaacccttccac

SEQ ID NO: 540810 - DNA, 120 bp, Artificial Sequence
  ENSG00000167258_78 (sequence is synthesized)
agcagctcaaatgtgaaaaacaagacccagagaggggaaatcatttgaatcctgtcctggtattgctttgtgttcctggatttggagaatttctgggaacacaggaaaaggaaagtgaat

SEQ ID NO: 540811 - DNA, 120 bp, Artificial Sequence
  ENSG00000167258_79 (sequence is synthesized)
gccaccaggatctgaacccaagattccagcctcggtcaccaccctgaccctgagaatgccactgggatggggagaacttgtcagtcttcatccttccccacaagtatactgaagccagga

SEQ ID NO: 540812 - DNA, 120 bp, Artificial Sequence
  ENSG00000167258_80 (sequence is synthesized)
gggatcctagcatctcctcacaaaattatgatcttccctgggcatctctaagccaccaattgggttgcctgcacctgagcaaatacagcaagcacctgccttagagagctcttagaggga

SEQ ID NO: 540813 - DNA, 120 bp, Artificial Sequence
  ENSG00000167258_81 (sequence is synthesized)
ttatccgcagcctgaagaaagaaggttacaactgaggaagaacttctgaacagggaagagtggaagaaaagactgcagtacgtagagcatcaagggaagctgtggaaatatattttctta

SEQ ID NO: 540814 - DNA, 120 bp, Artificial Sequence
  ENSG00000167258_82 (sequence is synthesized)
tccttcatccccaatgcccagatgggacaggtcaccagcctcctgtgtctacccccacctttcttgcttgctggcctcctctctctgcagtgcctctctcatccctgcaatccagacagc

SEQ ID NO: 540815 - DNA, 120 bp, Artificial Sequence
  ENSG00000167258_83 (sequence is synthesized)
acatgcagcagctcaaatgtgaaaaacaagacccagagaggggaaatcatttgaatcctgtcctggtattgctttgtgttcctggatttggagaatttctgggaacacaggaaaaggaaa

SEQ ID NO: 540816 - DNA, 120 bp, Artificial Sequence
  ENSG00000167258_84 (sequence is synthesized)
agtcggtgctgctggaattactgcacagctggcgctccccccagcaccccgagcagagcagcagtgcagattaaaatctccaattagcgttaaagtgaagtgaggaggtgctgaggctgc

SEQ ID NO: 540817 - DNA, 120 bp, Artificial Sequence
  ENSG00000167258_85 (sequence is synthesized)
caaggaggccagacgggggccctgggttggcaaaacccccactcttgcctggattctgagtgtcacccttagtcacccctactttcccagctcctctcccaacagctttcagtgcccatt

SEQ ID NO: 540818 - DNA, 120 bp, Artificial Sequence
  ENSG00000167258_86 (sequence is synthesized)
agttttgtatcgcttggggccagagggctttgcagaggggtggaagggggcaaatgccttacctaaaatgctagggacaccgtaagtatggaggaggagagcggtcagtgctcatcaagg

SEQ ID NO: 540819 - DNA, 120 bp, Artificial Sequence
  ENSG00000167258_87 (sequence is synthesized)
gagataccctattcactgcctgccaggcagccaggccaaggtgacttcacgctacagctctgcttcttctttttgcttgaagaaaagataaacaggacgggtcctttcaggtcctttacc

SEQ ID NO: 540820 - DNA, 120 bp, Artificial Sequence
  ENSG00000167258_88 (sequence is synthesized)
tatgaagtgctaggggacatggtgcccacatgaacatctctctctgcatattttatcctatctgacccatctgctcccaccgaagttatggctccttcctccctctctccattcttctct

SEQ ID NO: 540821 - DNA, 120 bp, Artificial Sequence
  ENSG00000167258_89 (sequence is synthesized)
cagctttcctgtgggcaggggtaggcacagccaggcttgggagcatcgccatgccctgccacctgggtcccagcctgctcctcgttatagtcttcccagtttggggaagagcagtgatat

SEQ ID NO: 540822 - DNA, 120 bp, Artificial Sequence
  ENSG00000167258_90 (sequence is synthesized)
gccaagaatggaggcctcagactctcccaatccctgatttttacatgtccccctataaggcccctctgccatctacacttttgcccttcatccacaaagcccaaaaggaaggcattatag

SEQ ID NO: 540823 - DNA, 120 bp, Artificial Sequence
  ENSG00000167258_91 (sequence is synthesized)
ctagccatgccctctgactgccctctgcccctttaagggaaatggaaatgggtacccagctgactgaacctactcaacacctccagaaattagacactagggcatggtgccaccctccca

SEQ ID NO: 540824 - DNA, 120 bp, Artificial Sequence
  ENSG00000167258_92 (sequence is synthesized)
tctctctctctctctcagctcaaagcacagctgagccttaaaaggggggttgagggggtggagagaccaagctggggcaggggggtatagagctccaatagcacgttttcacctgccatt

SEQ ID NO: 540825 - DNA, 120 bp, Artificial Sequence
  ENSG00000167258_93 (sequence is synthesized)
taattggatgtatttttaattaatgggacctcagggaccaacatgagacaatctgatatctgaatagggacaggggagggattgggtaagggaggaggattgggccactgggtgcggtta

SEQ ID NO: 540826 - DNA, 120 bp, Artificial Sequence
  ENSG00000167258_94 (sequence is synthesized)
ccgggaacccaggcccatcaatcactggccactttgcgttctggcatggagaatagcgaggtggaggaagggaggcactggggagaggtgccaggatttccccccaactgccaggacctc

SEQ ID NO: 540827 - DNA, 120 bp, Artificial Sequence
  ENSG00000167258_95 (sequence is synthesized)
caaacggattggaactatactggttgactcaggtctggagcccaaaatcacagccagaatataaggtgaggctgttttcttgctcctggggttttgtctggttgggcttgtcccagggag

SEQ ID NO: 540828 - DNA, 120 bp, Artificial Sequence
  ENSG00000167258_96 (sequence is synthesized)
tgctgtaaaattgtgaaaggaaggtggggacagagctttgaggtccttgtagagagaagacaagagctatggaccatagaaccagagactatggagagacggaggagaagggcagggttc

SEQ ID NO: 540829 - DNA, 120 bp, Artificial Sequence
  ENSG00000167258_97 (sequence is synthesized)
agaggtatttctgtatgttttgacataaaataagtgccatggagattacatgcaaaatggcatgcaaatgaggcctggtgccttttggggtatgaatcgtagaaccttgcttttgcaaga

SEQ ID NO: 540830 - DNA, 88 bp, Artificial Sequence
  ENSG00000167258_98 (sequence is synthesized)
tggccaacatggtgaaacgccatctctaccaaaaaatacaaaaaaattatctgggcatggtgataaggtaggagaattagcctgggca

SEQ ID NO: 540831 - DNA, 88 bp, Artificial Sequence
  ENSG00000167261_0 (sequence is synthesized)
tgggttcttggtctcactgagttctagaatgaagctgcactctctgactgccacccctgcctgcctgcccggccctgcacaacatgca

SEQ ID NO: 540832 - DNA, 120 bp, Artificial Sequence
  ENSG00000167261_1 (sequence is synthesized)
tgccacccctgcctgcctgcccggccctgcacaacatgcagccctccggcctcgagggtcccggcacgtttggtcggtggcctctgctgagtctgctgctcctgctgctgctgctccagc

SEQ ID NO: 540833 - DNA, 120 bp, Artificial Sequence
  ENSG00000167261_2 (sequence is synthesized)
ctgtaacctgtgcctacaccacgccaggcccccccagagccctcaccacgctgggcgcccccagagcccacaccatgccgggcacctacgctccctcgaccacactcagtagtcccagca

SEQ ID NO: 540834 - DNA, 120 bp, Artificial Sequence
  ENSG00000167261_3 (sequence is synthesized)
cccagggcctgcaagagcaggcacgggccctgatgcgggacttcccgctcgtggacggccacaacgacctgcccctggtcctaaggcaggtttaccagaaagggctacaggatgttaacc

SEQ ID NO: 540835 - DNA, 120 bp, Artificial Sequence
  ENSG00000167261_4 (sequence is synthesized)
tgcgcaatttcagctacggccagaccagcctggacaggcttagagatggcctcgtgggcgcccagttctggtcagcctatgtgccatgccagacccaggaccgggatgccctgcgcctca

SEQ ID NO: 540836 - DNA, 120 bp, Artificial Sequence
  ENSG00000167261_5 (sequence is synthesized)
ccctggagcagattgacctcatacgccgcatgtgtgcctcctattctgagctggagcttgtgacctcggctaaagctctgaacgacactcagaaattggcctgcctcatcggtgtagagg

SEQ ID NO: 540837 - DNA, 120 bp, Artificial Sequence
  ENSG00000167261_6 (sequence is synthesized)
gtggccactcgctggacaatagcctctccatcttacgtaccttctacatgctgggagtgcgctacctgacgctcacccacacctgcaacacaccctgggcagagagctccgctaagggcg

SEQ ID NO: 540838 - DNA, 120 bp, Artificial Sequence
  ENSG00000167261_7 (sequence is synthesized)
aggtggtggcagaaatgaaccgcctgggcatgatggtagacttatcccatgtctcagatgctgtggcacggcgggccctggaagtgtcacaggcacctgtgatcttctcccactcggctg

SEQ ID NO: 540839 - DNA, 120 bp, Artificial Sequence
  ENSG00000167261_8 (sequence is synthesized)
cccggggtgtgtgcaacagtgctcggaatgttcctgatgacatcctgcagcttctgaagaagaacggtggcgtcgtgatggtgtctttgtccatgggagtaatacagtgcaacccatcag

SEQ ID NO: 540840 - DNA, 120 bp, Artificial Sequence
  ENSG00000167261_9 (sequence is synthesized)
ccaatgtgtccactgtggcagatcacttcgaccacatcaaggctgtcattggatccaagttcatcgggattggtggagattatgatggggccggcaaattccctcaggggctggaagacg

SEQ ID NO: 540841 - DNA, 120 bp, Artificial Sequence
  ENSG00000167261_10 (sequence is synthesized)
tgtccacatacccggtcctgatagaggagttgctgagtcgtggctggagtgaggaagagcttcagggtgtccttcgtggaaacctgctgcgggtcttcagacaagtggaaaaggtacagg

SEQ ID NO: 540842 - DNA, 120 bp, Artificial Sequence
  ENSG00000167261_11 (sequence is synthesized)
aagaaaacaaatggcaaagccccttggaggacaagttcccggatgagcagctgagcagttcctgccactccgacctctcacgtctgcgtcagagacagagtctgacttcaggccaggaac

SEQ ID NO: 540843 - DNA, 120 bp, Artificial Sequence
  ENSG00000167261_12 (sequence is synthesized)
tcactgagattcccatacactggacagccaagttaccagccaagtggtcagtctcagagtcctccccccacatggccccagtccttgcagttgtggccaccttcccagtccttattctgt

SEQ ID NO: 540844 - DNA, 120 bp, Artificial Sequence
  ENSG00000167261_13 (sequence is synthesized)
ggctctgatgacccagttagtcctgccagatgtcactgtagcaagccacagacaccccacaaagttcccctgttgtgcaggcacaaatatttcctgaaataaatgttttggacatagaaa

SEQ ID NO: 540845 - DNA, 120 bp, Artificial Sequence
  ENSG00000167261_14 (sequence is synthesized)
gagagagaaggtcagggccagggggccccttcctgaatccagtccacagggttaacccctcatttccagagcctatcttctcccccacacccacccacacaacccagcaccaggaaatcc

SEQ ID NO: 540846 - DNA, 120 bp, Artificial Sequence
  ENSG00000167261_15 (sequence is synthesized)
agagcccagagcactgtggtcacagggacacatgtggccctgggtgtggccgggacacgttgcaggcggttggggacatgacgtggtctgcagatctcccagggcagggcagagggccac

SEQ ID NO: 540847 - DNA, 120 bp, Artificial Sequence
  ENSG00000167261_16 (sequence is synthesized)
tgtttgggggaagcaccccaggccctctctcttagagagagagcctaggggcagcagaggagccacctgggtcggccccctggggacagtgggaggagtaaaagggagggtggagggccc

SEQ ID NO: 540848 - DNA, 120 bp, Artificial Sequence
  ENSG00000167261_17 (sequence is synthesized)
gccctaagacaggccgcgagtgggcgcccaggacagggatccgcccagccggcgggagcgcccttggggatgacggcgggagggctgggcgccccctggtggccgtactgggcggtgccg

SEQ ID NO: 540849 - DNA, 120 bp, Artificial Sequence
  ENSG00000167261_18 (sequence is synthesized)
tctccgcacatccttcgcggggccctgtgacttcgttaccctcctcttgaggccacgccgccaggtggcctgaatcgagggtcgggactccatcgtcgcgctctgcccctcgcccgcccc

SEQ ID NO: 540850 - DNA, 82 bp, Artificial Sequence
  ENSG00000167261_19 (sequence is synthesized)
tagtgaaatcttgtctgttctagaatgaagctgcagaccctcgcagctctctgactgccacccctgcctgcctgcccggccc

SEQ ID NO: 540851 - DNA, 120 bp, Artificial Sequence
  ENSG00000167261_20 (sequence is synthesized)
gtctgtatcagacatcatgggagcagatccagggcgacatcaaagggaagcatgagtctccaggaccagaggggcttggatgcagatgatcatcatctgggcactgctggatactgaggc

SEQ ID NO: 540852 - DNA, 120 bp, Artificial Sequence
  ENSG00000167261_21 (sequence is synthesized)
agactattgtttcttgggaattgtctgtatcagacatcatgggagcagatccagggcgacatcaaagggaagcatgagtctccaggaccagaggggcttggatgcagatgatcatcatct

SEQ ID NO: 540853 - DNA, 120 bp, Artificial Sequence
  ENSG00000167261_22 (sequence is synthesized)
gggcactgctggatactgaagttctcattatgttgcctagactggtctcaaacctccggcttcaagagatcctctcacctcgaccttcaaattactgggattacaggcatgagccaccat

SEQ ID NO: 540854 - DNA, 120 bp, Artificial Sequence
  ENSG00000167261_23 (sequence is synthesized)
gtcctaccagactttgttaaaagaggaacaggccaggcatcgtgggctcacatgaacactcatgccccagaagtaaacaagtgttagccaaccaggaggcctatcctccccctaacctca

SEQ ID NO: 540855 - DNA, 120 bp, Artificial Sequence
  ENSG00000167261_24 (sequence is synthesized)
gcccagaacaagctttacccatgggatgtggcactgactctggagtggggaggggagctgggattctggttttcagaatacgacttgacccctggccagacgcggtggctcatgcctgta

SEQ ID NO: 540856 - DNA, 120 bp, Artificial Sequence
  ENSG00000167261_25 (sequence is synthesized)
gcaagggggcgatgggagctgagcacactcctgggcaagggagggtcccagagtatgcagggctgtggaggaggctccctcacaccacccctggatgccctctctcccgtcatgcatggg

SEQ ID NO: 540857 - DNA, 120 bp, Artificial Sequence
  ENSG00000167261_26 (sequence is synthesized)
ctgtgagagctcaagccacaggagccacaagataagaggagtgtggctgcagaacccaggtggcagggctttcctcaggccccttactcctgacctggacgaggccggggcttcctcaag

SEQ ID NO: 540858 - DNA, 120 bp, Artificial Sequence
  ENSG00000167264_0 (sequence is synthesized)
gcgacctcgcgtacggtggctggcgaggctcagtacggtgtgtggagctggagcaccgtgaggaagaagcgaggttctttttaagagttcagctgcgaggctgtaacagaggaggaaatg

SEQ ID NO: 540859 - DNA, 120 bp, Artificial Sequence
  ENSG00000167264_1 (sequence is synthesized)
attttgaatagcctctctctgtgttaccataataagctaatcctggccccaatggttcgggtagggactcttccaatgaggctgctggccctggattatggagcggacattgtttactgt

SEQ ID NO: 540860 - DNA, 120 bp, Artificial Sequence
  ENSG00000167264_2 (sequence is synthesized)
gaggagctgatcgacctcaagatgattcagtgcaagagagttgttaatgaggtgctcagcacagtggactttgtcgcccctgatgatcgagttgtcttccgcacctgtgaaagagagcag

SEQ ID NO: 540861 - DNA, 120 bp, Artificial Sequence
  ENSG00000167264_3 (sequence is synthesized)
aacagggtggtcttccagatggggacttcagacgcagagcgagcccttgctgtggccaggcttgtagaaaatgatgtggctggtattgatgtcaacatgggctgtccaaaacaatattcc

SEQ ID NO: 540862 - DNA, 120 bp, Artificial Sequence
  ENSG00000167264_4 (sequence is synthesized)
accaagggaggaatgggagctgccctgctgtcagaccctgacaagattgagaagatcctcagcactcttgttaaagggacacgcagacctgtgacctgcaagattcgcatcctgccatcg

SEQ ID NO: 540863 - DNA, 120 bp, Artificial Sequence
  ENSG00000167264_5 (sequence is synthesized)
ctagaagataccctgagccttgtgaagcggatagagaggactggcattgctgccatcgcagttcatgggaggaagcgggaggagcgacctcagcatcctgtcagctgtgaagtcatcaaa

SEQ ID NO: 540864 - DNA, 120 bp, Artificial Sequence
  ENSG00000167264_6 (sequence is synthesized)
gccattgctgataccctctccattcctgtcatagccaacggaggatctcatgaccacatccaacagtattcggacatagaggactttcgacaagccacggcagcctcttccgtgatggtg

SEQ ID NO: 540865 - DNA, 120 bp, Artificial Sequence
  ENSG00000167264_7 (sequence is synthesized)
gcccgagcagccatgtggaacccatctatcttcctcaaggagggtctgcggcccctggaggaggtcatgcagaaatacatcagatacgcggtgcagtatgacaaccactacaccaacacc

SEQ ID NO: 540866 - DNA, 120 bp, Artificial Sequence
  ENSG00000167264_8 (sequence is synthesized)
gccagatgctacgagaacagctggagtcgccccagggaaggttgctccatgctgcccagtcttcccgggaaatttgtgaggcctttggccttggtgccttctatgaggagaccacacagg

SEQ ID NO: 540867 - DNA, 120 bp, Artificial Sequence
  ENSG00000167264_9 (sequence is synthesized)
agctggatgcccagcaggccaggctctcagccaagacttcagagcagacaggggagccagctgaagatacctctggtgtcattaagatggctgtcaagtttgaccggagagcatacccag

SEQ ID NO: 540868 - DNA, 120 bp, Artificial Sequence
  ENSG00000167264_10 (sequence is synthesized)
cccagatcacccctaagatgtgcctactagagtggtgccggagggagaagttggcacagcctgtgtatgaaacggttcaacgccctctagatcgcctgttctcctctattgtcaccgttg

SEQ ID NO: 540869 - DNA, 120 bp, Artificial Sequence
  ENSG00000167264_11 (sequence is synthesized)
ctgaacaaaagtatcagtctaccttgtgggacaagtccaagaaactggcggagcaggctgcagccatcgtctgtctgcggagccagggcctccctgagggtcggctgggtgaggagagcc

SEQ ID NO: 540870 - DNA, 120 bp, Artificial Sequence
  ENSG00000167264_12 (sequence is synthesized)
cttccttgcacaagcgaaagagggaggctcctgaccaagaccctgggggccccagagctcaggagctagcacaacctggggatctgtgcaagaagccctttgtggccttgggaagtggtg

SEQ ID NO: 540871 - DNA, 120 bp, Artificial Sequence
  ENSG00000167264_13 (sequence is synthesized)
aagaaagccccctggaaggctggtgactactcttcctgccttagtcacccctccatgggcctggtgctaaggtggctgtggatgccacagcatgaaccagatgccgttgaacagtttgct

SEQ ID NO: 540872 - DNA, 120 bp, Artificial Sequence
  ENSG00000167264_14 (sequence is synthesized)
ggtcttgcctggcagaagttagatgtcctggcaggggccatcagcctagagcatggaccaggggccgcccaggggtggatcctggcccctttggtggatctgagtgacagggtcaagttc

SEQ ID NO: 540873 - DNA, 120 bp, Artificial Sequence
  ENSG00000167264_15 (sequence is synthesized)
tctttgaaaacaggagcttttcaggtggtaactccccaacctgacattggtactgtgcaataaagacaccccctaccctcacccacggctggctgcttcagccttgggcatcttcataaa

SEQ ID NO: 540874 - DNA, 120 bp, Artificial Sequence
  ENSG00000167264_16 (sequence is synthesized)
agtacggtgtgtggagctggagcaccgtgaggaagaagcgaggttctttttaagagttcagctgcgagatatcaaacaaagaattactctgtacaaagccagaacacatatatcaaagta

SEQ ID NO: 540875 - DNA, 120 bp, Artificial Sequence
  ENSG00000167264_17 (sequence is synthesized)
agccacgcactggtgctaagcaatcaacagcaggagaggcagagattgggatggacaaagggatcatggaaggctccttcgagctggacttgaaggactgatatcaaacaaagaattact

SEQ ID NO: 540876 - DNA, 120 bp, Artificial Sequence
  ENSG00000167264_18 (sequence is synthesized)
atgccctcctgaggctcaccatcccctgggatttcccaactcatgccctgtgccaggccagtgttgaatacctggggtacattgtacaacgatggcttcctgaagattctgctttaatgt

SEQ ID NO: 540877 - DNA, 120 bp, Artificial Sequence
  ENSG00000167264_19 (sequence is synthesized)
tttccaaagagccagtcatgagtaattatactattggagacagtttatggaaatcaagctatcacagtcttatatgtctctagtctcaaatttaatttacttacttgtaggaattgtctg

SEQ ID NO: 540878 - DNA, 120 bp, Artificial Sequence
  ENSG00000167264_20 (sequence is synthesized)
tttggcatgatttctctatttttttatccctagcattgattactcagatcatagtctttgtttttatgtagtgtgtatatatttctcatagaaaaatattaggatttttcaagagtagtt

SEQ ID NO: 540879 - DNA, 120 bp, Artificial Sequence
  ENSG00000167264_21 (sequence is synthesized)
gttttcttcctgtacctagaggtggcagtcggtgctcagcttccacagctctccttgatacacttgctcagacccctcggctactctcttgcccagcccagagtaccttttccacttgtc

SEQ ID NO: 540880 - DNA, 120 bp, Artificial Sequence
  ENSG00000167264_22 (sequence is synthesized)
tgaagacccgcagcaggtttccacgaaggacaccctgaagctcttcctcactccagccacgactcagcaactcctctatcaggaccggatatcaaacaaagaattactctgtacaaagcc

SEQ ID NO: 540881 - DNA, 120 bp, Artificial Sequence
  ENSG00000167264_23 (sequence is synthesized)
ctttttaagagttcagctgcgaggtctgtagctccgaataggggatggcgacatccagacccggccagccttggggaagggcgcgtcgtggaggcaggactggaggctggcgatacgagg

SEQ ID NO: 540882 - DNA, 120 bp, Artificial Sequence
  ENSG00000167264_24 (sequence is synthesized)
cggcagtggggccttgacccaatggaccatgagggcggagggcttctggcgattggttacctggttcctgggattctctttagttgttcctcattgccctgagatagcttgtcccgtgct

SEQ ID NO: 540883 - DNA, 120 bp, Artificial Sequence
  ENSG00000167264_25 (sequence is synthesized)
acggtggctggcgaggctcagtacggtgtgtggagctggagcaccgtgaggaagaagcgaggttctttttaagagttcagctgcgaggtttcatccatttccatgtgccactgtttttca

SEQ ID NO: 540884 - DNA, 120 bp, Artificial Sequence
  ENSG00000167264_26 (sequence is synthesized)
gaggttctttttaagagttcagctgcgagatatcaaacaaagaattactctgtacaaagccagaacacatatatcaaagtaatcctgaagtatcagaacaaaataatagattatttccta

SEQ ID NO: 540885 - DNA, 120 bp, Artificial Sequence
  ENSG00000167264_27 (sequence is synthesized)
attgggctcaacctcttctgttgctttcttatgtgaatcttgttcactcaagtgatggctccatgcaagttggccaaagggcttgtagtcctttactgggctgtaacagaggaggaaatg

SEQ ID NO: 540886 - DNA, 120 bp, Artificial Sequence
  ENSG00000167264_28 (sequence is synthesized)
caagtcagcagctccccagtatctgaaggatcaagccagcacctcagcatagagcctgagacccttccatgtgcctcgctccttccagtttcatccctgcagccctttgctccagccaag

SEQ ID NO: 540887 - DNA, 120 bp, Artificial Sequence
  ENSG00000167264_29 (sequence is synthesized)
tcacctggtccctctgccacgtgtgccttctctgctcctagcttgtcccttctcacccttttggcatctggtgactcctcattttggggacctggcctatccagatgtcagcaggaggct

SEQ ID NO: 540888 - DNA, 120 bp, Artificial Sequence
  ENSG00000167264_30 (sequence is synthesized)
gcctttctccactgggcacttttgcttgggaggagcatgtgatacaggcagccttcatttgacttaggttggaaacacttccttttatctgcctttgatttgaccccagcagtttggcct

SEQ ID NO: 540889 - DNA, 120 bp, Artificial Sequence
  ENSG00000167264_31 (sequence is synthesized)
agtacggtgtgtggagctggagcaccgtgaggaagaagcgaggttctttttaagagttcagctgcgagccaaggttcactctctactccctcgtcacgcgtcccaacttctcatccagaa

SEQ ID NO: 540890 - DNA, 120 bp, Artificial Sequence
  ENSG00000167264_32 (sequence is synthesized)
cccacccctcttgcagcccgctcagctccactggcttccccgtcagaaacctgaattacctaaaatagtagtaagaagggtgctgcgaccctacaaagtgatcaaatatcaaacaaagaa

SEQ ID NO: 540891 - DNA, 120 bp, Artificial Sequence
  ENSG00000167264_33 (sequence is synthesized)
gacttaaggggcaggcttcaggccttcagggttttgtggaggagagcagggcagagatagagaggaatcctgcctgggccctcccatccagccctccctacaaatgcctagtagccactc

SEQ ID NO: 540892 - DNA, 120 bp, Artificial Sequence
  ENSG00000167264_34 (sequence is synthesized)
tgtggggcacatctgtcggctggtacaagccccagtgaccacaggagggcaagagaaacctaaattctgatatgagctggagaggcaagattaatctaagagatagataggtagccacgc

SEQ ID NO: 540893 - DNA, 120 bp, Artificial Sequence
  ENSG00000167272_0 (sequence is synthesized)
atccggtttgcacgccggaccggagagcgcggaggcagccatggtgcggttcaagcacaggtacctgctctgcgaactggtgtctgacgacccccgctgccgcctaagcctcgatgaccg

SEQ ID NO: 540894 - DNA, 120 bp, Artificial Sequence
  ENSG00000167272_1 (sequence is synthesized)
agttctgagcagcctcgtacgggacacgatcgccagggtgcacggaactttcggcgcagccgcctgctccatcggcttcgcggttcgatatctcaatgcctatactggaatagtgctact

SEQ ID NO: 540895 - DNA, 120 bp, Artificial Sequence
  ENSG00000167272_2 (sequence is synthesized)
tcgatgcagaaaagaattctatcagcttgtgtggtcagctcttcccttcatcacatacttggagaacaaaggacaccgttacccatgctttttcaacacattacatgtgggaggtacaat

SEQ ID NO: 540896 - DNA, 120 bp, Artificial Sequence
  ENSG00000167272_3 (sequence is synthesized)
aagaacatgtcagaagttcctaattcagtacaacaggagacagctgttgatcttgttgcagaactgcactgatgaaggagagcgggaagctatccagaagtctgtgacaagaagctgctt

SEQ ID NO: 540897 - DNA, 120 bp, Artificial Sequence
  ENSG00000167272_4 (sequence is synthesized)
ggaggaggaggagtcaggtgaggaggctgcagaagcaatggagtgaacctctgctccccacacagctggctacactgctcaggcttcaggcccacttgttgaacagaacaatctgggtag

SEQ ID NO: 540898 - DNA, 120 bp, Artificial Sequence
  ENSG00000167272_5 (sequence is synthesized)
caacagcatcttccacagttttccaaactggatagctgccaaccagcagacattacccacttgaaatggagtactcagttaaactgaagttgcctttacctagcattccctggtgaagtg

SEQ ID NO: 540899 - DNA, 120 bp, Artificial Sequence
  ENSG00000167272_6 (sequence is synthesized)
ttgcaggttgtgaactctgtagacatctttattgcttggctaagagtagatttaataaatgtatctggtttccgtggcatttagcatacttatattacagaaagggcttatggagtccat

SEQ ID NO: 540900 - DNA, 120 bp, Artificial Sequence
  ENSG00000167272_7 (sequence is synthesized)
gcttggccaagtctctgttctctctctatccctagccttggtgggaagactgactccctatgtggtactagttaaacttttttttttgagacagtctcagtctatcacccaggctggagt

SEQ ID NO: 540901 - DNA, 63 bp, Artificial Sequence
  ENSG00000167272_8 (sequence is synthesized)
tttttttgagacagtctcagtctatcacccaggctggagtgtagtggcccagtccaagtaact

SEQ ID NO: 540902 - DNA, 120 bp, Artificial Sequence
  ENSG00000167272_9 (sequence is synthesized)
ctgttgaccacagtaactcatatgccaggtacaataagaacatgtcagaagttcctaattcagtacaacaggagacagctgttgatcttgttgcagaactgcactgatgaaggtaagcaa

SEQ ID NO: 540903 - DNA, 120 bp, Artificial Sequence
  ENSG00000167272_10 (sequence is synthesized)
cactagcccagtgcccactgagcagtgactgaccttaagctgaagaaatcactcccaaagatatctttcatccctgttatctgccttctccaggagagcgggaagctatccagaagtctg

SEQ ID NO: 540904 - DNA, 120 bp, Artificial Sequence
  ENSG00000167272_11 (sequence is synthesized)
aattagcagagcgctaaaaggaggggcccgaaggcagtggggctttgagctagaagcctctttttacctgcttgacaggtaatttctgtaattggttgtgattgaatttgatagggtaga

SEQ ID NO: 540905 - DNA, 120 bp, Artificial Sequence
  ENSG00000167272_12 (sequence is synthesized)
gaattaaatgagggaagctgtgtatacttcctagtaagagctattatatgaccgattacattaacatcatatggaaaaaaattgtcaaaagtactccgggaaagcccttaaatagttggt

SEQ ID NO: 540906 - DNA, 120 bp, Artificial Sequence
  ENSG00000167272_13 (sequence is synthesized)
aaagtacagaacacatgattgtcaatatatgtaaatacaggatgagctaggacagaggggcccttctttcacaccacttaaattagttcccactttaaccttgtttgagattgacttctg

SEQ ID NO: 540907 - DNA, 120 bp, Artificial Sequence
  ENSG00000167272_14 (sequence is synthesized)
attcccttccagaccctcccagtgccttgctgggtcctcgcggccccgctagtgtccaccttcctctcgcctgccgcaggtacctgctctgcgaactggtgtctgacgacccccgctgcc

SEQ ID NO: 540908 - DNA, 120 bp, Artificial Sequence
  ENSG00000167272_15 (sequence is synthesized)
gggattacaggcgtgagccaccacacagagcaaaagttttccaaaatgatttttctttcctgttgtagttcgatatctcaatgcctatactggaatagtgctacttcgatgcagaaaaga

SEQ ID NO: 540909 - DNA, 120 bp, Artificial Sequence
  ENSG00000167280_0 (sequence is synthesized)
ggcggcggcggcggcagctgcaggggctggcggccccggaggcggggacgcaggaggagcaggaggatcaggagccgcggccgcggcggcggcggccgggaaggagcatcaaagatgaag

SEQ ID NO: 540910 - DNA, 120 bp, Artificial Sequence
  ENSG00000167280_1 (sequence is synthesized)
ccgcggcggcggcggccgggaaggagcatcaaagatgaagaagaagagacagtctttcgagaggtggtcagtttttccccggaccccctgccagttagatattatgacaaggacaccacc

SEQ ID NO: 540911 - DNA, 120 bp, Artificial Sequence
  ENSG00000167280_2 (sequence is synthesized)
aaaccaatcagcttttacttgtcttcgctggaggagctcttggcgtggaagccccgcttggaggatggctttaatgtggccctggagcccctggcgtgtcgccagccccctctgagcagc

SEQ ID NO: 540912 - DNA, 120 bp, Artificial Sequence
  ENSG00000167280_3 (sequence is synthesized)
cagaggccccggactttgttgtgtcatgacatgatgggcgggtacctggatgacaggttcattcagggctcggtggtgcagactccctatgctttctaccactggcagtgcatcgacgtc

SEQ ID NO: 540913 - DNA, 120 bp, Artificial Sequence
  ENSG00000167280_4 (sequence is synthesized)
tttgtgtacttcagccaccacaccgtcaccattcccccagtgggctggaccaacactgcccacaggcatggggtctgcgtgctggggactttcatcacggagtggaatgaagggggaagg

SEQ ID NO: 540914 - DNA, 120 bp, Artificial Sequence
  ENSG00000167280_5 (sequence is synthesized)
ctctgtgaagccttcctggccggggatgagcgctcgtaccaggcagtggctgaccggctggtccagatcactcagttttttcgttttgatggctggctgatcaacatcgagaactcgctg

SEQ ID NO: 540915 - DNA, 120 bp, Artificial Sequence
  ENSG00000167280_6 (sequence is synthesized)
agtctggccgctgtggggaacatgcctcctttcctgcggtacctcaccacacagctgcaccggcaggtcccagggggcctggtgctctggtatgacagcgtggtgcaaagtgggcagctc

SEQ ID NO: 540916 - DNA, 120 bp, Artificial Sequence
  ENSG00000167280_7 (sequence is synthesized)
aaatggcaagacgaactcaaccagcacaacagggtcttctttgattcctgcgacggcttcttcactaactataactggcgggaggagcacttggagcggatgctggggcaggctggggag

SEQ ID NO: 540917 - DNA, 120 bp, Artificial Sequence
  ENSG00000167280_8 (sequence is synthesized)
cgccgggctgatgtgtacgtgggcgtggatgtgtttgctcgagggaacgtggtcggaggccgattcgacacagacaagtcgttggagctgatccgaaagcatggcttctccgtggctttg

SEQ ID NO: 540918 - DNA, 120 bp, Artificial Sequence
  ENSG00000167280_9 (sequence is synthesized)
tttgcccccggctgggtgtatgagtgtctggagaagaaggatttcttccagaaccaggacaagttctggggccgactggagcgttatctgcccacacatagcatctgctccttgcctttc

SEQ ID NO: 540919 - DNA, 120 bp, Artificial Sequence
  ENSG00000167280_10 (sequence is synthesized)
ggtagggccctggtaccacctgagcgcccaggagatccagcccttgtttggagaacacaggctgggaggggatggccggggctgggtgaggacgcactgctgcctggaggatgcctggca

SEQ ID NO: 540920 - DNA, 120 bp, Artificial Sequence
  ENSG00000167280_11 (sequence is synthesized)
cggaggcagctccctgctcgtccggggtgtgatcccaccggaggttggaaatgtggctgtgaggttattttccctgcaggccccagtgccacccaagatttacctgtccatggtgtataa

SEQ ID NO: 540921 - DNA, 120 bp, Artificial Sequence
  ENSG00000167280_12 (sequence is synthesized)
gcttgaggggcccacggacgtcacagttgctttggagctgaccacaggggatgccggcagctgccacatcggtggcatctcagtgttgaacgcagaaacaagctcaagacacagcctccg

SEQ ID NO: 540922 - DNA, 120 bp, Artificial Sequence
  ENSG00000167280_13 (sequence is synthesized)
acccctccgggtgccccccaccaagctggccagatgggtgggccgctgcggccggcagctgagtgggggctgggtccagcactgctacgaggtgagcctgcgtgggtgcctgctgctaga

SEQ ID NO: 540923 - DNA, 120 bp, Artificial Sequence
  ENSG00000167280_14 (sequence is synthesized)
cctcctcgtttgcttctcacggccgccgggtagtcgggaggaggagagcttcacctgtcggcttggagagatccaggtggtggacgctgccagcctgctggcccctctgccccaggtgca

SEQ ID NO: 540924 - DNA, 120 bp, Artificial Sequence
  ENSG00000167280_15 (sequence is synthesized)
ggccgtcaccatctctcacatccgctggcagccatccgcctctgagcgggaggggccccctgctctgctccagctcagctgcaccctgcactggtccttcctcctctcacaagtccgttg

SEQ ID NO: 540925 - DNA, 120 bp, Artificial Sequence
  ENSG00000167280_16 (sequence is synthesized)
cttccgaatccactgctggggagggatgagtgatgactctccgggcagggagctgccgaggccagagatgcccatgttcctggggttggcttttgccacccagtaccggatagtggacct

SEQ ID NO: 540926 - DNA, 120 bp, Artificial Sequence
  ENSG00000167280_17 (sequence is synthesized)
gctggtggaagccgccgggcccggccaggatcgtcgcatggaatttctggtggagcctgtccccaaggaagggttccgggtacctcaggccgagtggggcagggcagttctgctttattc

SEQ ID NO: 540927 - DNA, 120 bp, Artificial Sequence
  ENSG00000167280_18 (sequence is synthesized)
agcccctgcatgagcggatgctaaggccgggtggtctcctggcctcgggctgaggcctcttcccggctgtctgcccctggcctgcgctggacctgctaagtgcccacagtggcagcgagg

SEQ ID NO: 540928 - DNA, 120 bp, Artificial Sequence
  ENSG00000167280_19 (sequence is synthesized)
tcccggtcccggggctggggtgggagaccccgggctgagtgctgtggctttctggtggggggcgatggaaacaggaaaccaagcagtgggatcgcagcgttggtcactgcgaggcgagtg

SEQ ID NO: 540929 - DNA, 120 bp, Artificial Sequence
  ENSG00000167280_20 (sequence is synthesized)
gcgggctttctgtttctgccttgtccctccccacggtacctggttcccaggtgaaaatgaaaggaggggagaagttgagaacagaacattccataaaggatatttcctaataggctgcaa

SEQ ID NO: 540930 - DNA, 120 bp, Artificial Sequence
  ENSG00000167280_21 (sequence is synthesized)
ccaggtgatgcttcccagaggggctcgggctgggctggctgtttgtccagctggagtgggggtggaggccgccccaggccgcccccttcttgggttcagcggggaactggggtggaggag

SEQ ID NO: 540931 - DNA, 120 bp, Artificial Sequence
  ENSG00000167280_22 (sequence is synthesized)
cgacacagacaaggtgggtggtggctttcgtccaagggccagcggcccagtgcctcccctgggacctcatttcctcatggaccttccattcccgtctgcacctcaaaggaatgacagcag

SEQ ID NO: 540932 - DNA, 120 bp, Artificial Sequence
  ENSG00000167280_23 (sequence is synthesized)
ctgttcttcccagagtggggatcccgtggcactgagaaacaggtgtcctgccccggccaagctatgtccccactgaaacccctttcccggctatttctacaatcagataatgtatttttg

SEQ ID NO: 540933 - DNA, 120 bp, Artificial Sequence
  ENSG00000167280_24 (sequence is synthesized)
tgtgggtgttaccagacagaggcgcgtcgttcccccgctgtccggtcctcggcgggcctgggcctcctgtcccagctgcgttccttgatcttccccgtgagggaagcctgcggggacgca

SEQ ID NO: 540934 - DNA, 120 bp, Artificial Sequence
  ENSG00000167280_25 (sequence is synthesized)
caggggcctgcagcgcctctcactgcggctcaggggcgaggacgggggaggtgcccagggtttggggatcggtaggtgtcatgacgagggagcattttctggcaaggcaggtcacaccag

SEQ ID NO: 540935 - DNA, 120 bp, Artificial Sequence
  ENSG00000167280_26 (sequence is synthesized)
ccagccccccaaagccacccctttactctgcatctgtgagtttggatactttagatgccccatatgagggaatcccatacggtatttcagaactgagatgtttcagcccacaaaagaatc

SEQ ID NO: 540936 - DNA, 120 bp, Artificial Sequence
  ENSG00000167280_27 (sequence is synthesized)
tggccttgggggaggacttgtcccctggctacggacaggaccacgatgtgggagcatttggcacccaggccccctgttcctggagggaggggctggtggacgcgatttggagctggcttc

SEQ ID NO: 540937 - DNA, 120 bp, Artificial Sequence
  ENSG00000167280_28 (sequence is synthesized)
tcacacgtggtggccatggaactggacagatggggcagtggaggccagaacaaggacagaggacagacccagatgggttttttaaaattgtgatcaaaaatgcattaacgtgaaattcac

SEQ ID NO: 540938 - DNA, 120 bp, Artificial Sequence
  ENSG00000167280_29 (sequence is synthesized)
catcttgaccctgttgaagtgaacggtacaggagtgttaactctgcgtacgttgctacgtgacagatccctagaactgtgtcatcttgtaggactggactctccccattgcacattagcc

SEQ ID NO: 540939 - DNA, 120 bp, Artificial Sequence
  ENSG00000167280_30 (sequence is synthesized)
aggaaggagcggggccaggccggtgcccctggcgtgggatgcgcagggctctgcctgcctctggtctatcagtcctgcccgttcccagagccccagggatgttctcagcccttaatttag

SEQ ID NO: 540940 - DNA, 120 bp, Artificial Sequence
  ENSG00000167280_31 (sequence is synthesized)
ctttaaatgagtaaattaatccaataactaaagagcctctttactgcccgtgattctgataatcgaatgagaggtgtgccagaggacaatgggaccgcgcagccacagccagttggggcc

SEQ ID NO: 540941 - DNA, 120 bp, Artificial Sequence
  ENSG00000167280_32 (sequence is synthesized)
cagcccctgcccccctgcccttgcagcagcgctgaccgcctctcccgcgccctcttctggcgggcttgtggaacgacgggggtgatgcccagcagcctccagtcgttggagctgatccga

SEQ ID NO: 540942 - DNA, 120 bp, Artificial Sequence
  ENSG00000167280_33 (sequence is synthesized)
ctgagcatgaggacgagctacagcagctcctggggtggggctgcctgcgggatggcgggagaggatgccctggagaaccgtcctcccagtgtggaaggcccttttccctgaggagtgggc

SEQ ID NO: 540943 - DNA, 120 bp, Artificial Sequence
  ENSG00000167280_34 (sequence is synthesized)
attctgggccagccggcgctggcttcgtgcctccacgtgggccagccccagctgctccgtgtttcctggcgttggcaatttactgtgctgctgagtgtgaggtcatctccggagcgtttt

SEQ ID NO: 540944 - DNA, 120 bp, Artificial Sequence
  ENSG00000167280_35 (sequence is synthesized)
cagcagcccctggctctgcggcgtctcttccgggctgtgggcatgcagggaagtggctctgaggcagtctgcgctgtggccctgcctctgcccagcgagaggccgtgggctctggacaag

SEQ ID NO: 540945 - DNA, 120 bp, Artificial Sequence
  ENSG00000167280_36 (sequence is synthesized)
ccgcccttcaggctggggtagcaggtcagtccaggcaggaagcagcacctgccccccgcgccagcccagccccagcctgagtgcaggagctgcaggacccgcgggggcttttccagctac

SEQ ID NO: 540946 - DNA, 120 bp, Artificial Sequence
  ENSG00000167280_37 (sequence is synthesized)
tctgttccttcacgtcctcccttctcagcctcgtccaagcaccgggaagacctccaggctgaccccttgagcagcagtcagcacaggtgcgtgggggcgtgagggaggcagggtcttcac

SEQ ID NO: 540947 - DNA, 120 bp, Artificial Sequence
  ENSG00000167280_38 (sequence is synthesized)
cacaggcgccttcctctgtccttcctgctctttcttctctgcccaggccgctgcagctgcacagcctctgctacacctgggctgcctgggaggcttcctggtgtggtgtctggaccccac

SEQ ID NO: 540948 - DNA, 120 bp, Artificial Sequence
  ENSG00000167280_39 (sequence is synthesized)
ggccttgggtcatcctgtggctggtctggggtggggtctgttgtggtccttccacggtgtcagtggcctgaagtccctcgcttttggggggggggtctctcacccccaggccacataggg

SEQ ID NO: 540949 - DNA, 120 bp, Artificial Sequence
  ENSG00000167280_40 (sequence is synthesized)
ccagtggtaggggttccctctatgtcgggcagtgctgagggctgggatgctctgtgaccccagctggagcccacacctaagggctggcatccacatcatttcaccctgcagtgagggaag

SEQ ID NO: 540950 - DNA, 120 bp, Artificial Sequence
  ENSG00000167280_41 (sequence is synthesized)
aggccaccaggtggcagcacagccacacccgttcccacgtcagaggagggcaaggctgggtactcagcagccactctgagccggggctccttccaggagctgaaatccacctgtctccat

SEQ ID NO: 540951 - DNA, 120 bp, Artificial Sequence
  ENSG00000167280_42 (sequence is synthesized)
cttccttgcctgcctgggtactcatgccaagcagagactgggattaggggttctgtgctcttgcctaattaggaacattctcccatgtctcttgtgtggtcccagaaggagaagtgagtt

SEQ ID NO: 540952 - DNA, 120 bp, Artificial Sequence
  ENSG00000167280_43 (sequence is synthesized)
tgccaaggatatggggcaggaggctccctctgctgaccccctgcagcctggagccagcccggggactgtcctgggtggagggcaggtgaacacaagctgctgccggggactgtcctgggt

SEQ ID NO: 540953 - DNA, 120 bp, Artificial Sequence
  ENSG00000167280_44 (sequence is synthesized)
ggacggcaggtgaacacaagcggctgccgcatgtagccactcactcgactttttttcagctgtgaccattcccgggagctctttgagcctttctgtctcatttggaaccagggggaacca

SEQ ID NO: 540954 - DNA, 120 bp, Artificial Sequence
  ENSG00000167280_45 (sequence is synthesized)
ggaaggggctcctggcctctctgtgtcctctgcagtgggggttgtggggggcgcagcatccacgccttgctgcccttctttcatgaagtctgttttttaagtgctggttcccccgaatat

SEQ ID NO: 540955 - DNA, 120 bp, Artificial Sequence
  ENSG00000167280_46 (sequence is synthesized)
tttatgcagaggagggaaaatttatagtggcaattattttctcacagtctggtgagcaggcaattaattaggagtaagggggcctagtagagcgtggcgtgtggcagaatcgcaccgccc

SEQ ID NO: 540956 - DNA, 120 bp, Artificial Sequence
  ENSG00000167280_47 (sequence is synthesized)
cggctccccagcccaccgccatgcagggctcgcgtgcgggaaaactaatatgccggcgtttaagcctgtgcccctctgctgggtgtaactgcgctgaaataaatgatctgacaatgtgaa

SEQ ID NO: 540957 - DNA, 120 bp, Artificial Sequence
  ENSG00000167280_48 (sequence is synthesized)
cggccgcttcctgcagactcgtgtttgcagcgtatctgtagacggggaggctgcagtcctcctggaagtcctgtcttggagggtgcaggagagcctcgagtttccaccagcaagtttgag

SEQ ID NO: 540958 - DNA, 120 bp, Artificial Sequence
  ENSG00000167280_49 (sequence is synthesized)
ggacactgagaggctccctcccttcctccggaccgagctgttgcccccatgtctctggcaggttctggggccgactggagcgttatctgcccacacatagcatctgctccttgcctttcg

SEQ ID NO: 540959 - DNA, 120 bp, Artificial Sequence
  ENSG00000167281_0 (sequence is synthesized)
gatacagcagcagctggtgctcctggccaggctgtgcgtgctctctctgcctctctctctcggactctctgctctctctctctgactctctcctctctctctgttggcctggtgaaatgt

SEQ ID NO: 540960 - DNA, 120 bp, Artificial Sequence
  ENSG00000167281_1 (sequence is synthesized)
tcttggctgtaggcacacagagccttggactcaaggctgttggagtcgaggacaccttgacttcggtcctggaggttgaaattctgcctctgagaagctaacagtcttcctgtggtcgcc

SEQ ID NO: 540961 - DNA, 120 bp, Artificial Sequence
  ENSG00000167281_2 (sequence is synthesized)
actcctccccagcagccccctccttgccaaggacggtccagaaggagccccactggggcctccccgctcagcaaagcagacctcacctcccactaccagcttgaagtcacagcagccaga

SEQ ID NO: 540962 - DNA, 120 bp, Artificial Sequence
  ENSG00000167281_3 (sequence is synthesized)
ggaaattctgccaccattttcccaggtctgcagcccctccagctgggaacctgctcctggagccatccctctgcaaacagagagcccagagtgcctcggggaaaattggctgaataaaag

SEQ ID NO: 540963 - DNA, 120 bp, Artificial Sequence
  ENSG00000167281_4 (sequence is synthesized)
agcgatcaggacgccacggctccgcctgaagcgatggcccagccctacccccccgcccagtacccccctccgccacagaacggcatccctgccgagtacgccccgcccccaccgcacccc

SEQ ID NO: 540964 - DNA, 120 bp, Artificial Sequence
  ENSG00000167281_5 (sequence is synthesized)
acgcaggactactccggccagaccccggtccccacagagcatggcatgaccctgtacacaccagcacagacccaccccgagcagccaggctccgaggccagcacacagcccatcgccggg

SEQ ID NO: 540965 - DNA, 120 bp, Artificial Sequence
  ENSG00000167281_6 (sequence is synthesized)
agcagcccaagcggctacacgtctccaacatccccttccggttcagggaccccgacttgcggcaaatgttcgggcaattcggaaaaattttagacgtggagatcatttttaacgagcggg

SEQ ID NO: 540966 - DNA, 120 bp, Artificial Sequence
  ENSG00000167281_7 (sequence is synthesized)
gctccaagggttttgggtttgtaacttttgaaactagctcagatgctgaccgagcccgggagaagctgaatgggacgatcgtagagggacggaaaattgaggtcaataatgccacggccc

SEQ ID NO: 540967 - DNA, 120 bp, Artificial Sequence
  ENSG00000167281_8 (sequence is synthesized)
gagtgatgaccaacaagaagacggggaacccctacaccaacggctggaagctaaatccagtggtcggcgcagtctacgggcctgaattctatgcagtgacggggttcccctaccccacca

SEQ ID NO: 540968 - DNA, 120 bp, Artificial Sequence
  ENSG00000167281_9 (sequence is synthesized)
ccggcacagccgttgcctaccggggcgcacatcttcggggccggggccgggccgtgtataatacatttcgggctgcgccacccccaccccccatcccgacttacggagcggtcgtgtatc

SEQ ID NO: 540969 - DNA, 120 bp, Artificial Sequence
  ENSG00000167281_10 (sequence is synthesized)
aggatggattttatggtgctgagatttatggaggctacgcagcctacagatacgctcagcccgctgcagcggcggcagcctacagcgacagttacggcagagtctacgcagctgccgacc

SEQ ID NO: 540970 - DNA, 120 bp, Artificial Sequence
  ENSG00000167281_11 (sequence is synthesized)
gacccgtaccatcacaccatcgggcccgcggcgacctacagcattggaaccatgtgaaaccttccaccgtttccttctcggaccatgaagggcaaaaacaaaaaaacaaaaaaaatcaca

SEQ ID NO: 540971 - DNA, 120 bp, Artificial Sequence
  ENSG00000167281_12 (sequence is synthesized)
gcaaacgcttgttaaaatgccagtcccatgggcggggctggcaccgtgccccctccctcctcagcagacaccggagccggcctaccccacctctccagcgttcccaccactttcttgtcc

SEQ ID NO: 540972 - DNA, 120 bp, Artificial Sequence
  ENSG00000167281_13 (sequence is synthesized)
gcaacaaaaaaaaaaccaaccaaaccaagaggcatccaaccaagtccaagtcccgcgtcctggccacacgcccgcaccgagggagcacgccggcaggggcgccgaggagcggccccagga

SEQ ID NO: 540973 - DNA, 120 bp, Artificial Sequence
  ENSG00000167281_14 (sequence is synthesized)
caggacggccccaccgcgtcctggctggcagcacagtgggaacacgcccctccgtctcaggcagtgggggagttggaggggaaggggcctcccttgtgggacccgtggggggctctgttt

SEQ ID NO: 540974 - DNA, 120 bp, Artificial Sequence
  ENSG00000167281_15 (sequence is synthesized)
tccatccagtcttcctttcccagcccccaactcccaagacagacagtgtggagcccagcggcggcggagcaggcccgggcctgagcaggcaggcgctgctagcaagacttgatctttgtg

SEQ ID NO: 540975 - DNA, 120 bp, Artificial Sequence
  ENSG00000167281_16 (sequence is synthesized)
gccagctgtgccagggggccggcggggctgaggggtgcgggcagctttcatcccaggggctccactgggccccgtcaccctcctgtcgcgtcccctgcgtcccacctccctcctgcccgg

SEQ ID NO: 540976 - DNA, 120 bp, Artificial Sequence
  ENSG00000167281_17 (sequence is synthesized)
cagtcccgcccgtgcccccagcctggcgaggaagccgtccaacagtagccccggggccagctcccaacagaaagggctgacgtggctccaggactcaggggcgctccatgggaggacgaa

SEQ ID NO: 540977 - DNA, 120 bp, Artificial Sequence
  ENSG00000167281_18 (sequence is synthesized)
ggaagcccagccagccaggagccactcctcacacctccaagtgtggccaagtgggccctgaggccaaggacttacttgctcttcctggccatctctccctttctggaggaggcccggggc

SEQ ID NO: 540978 - DNA, 120 bp, Artificial Sequence
  ENSG00000167281_19 (sequence is synthesized)
ctgtgtacaccaaggctgacctcgtgctgcctgctgggacccagccctccctgccgctcccctgtgagcccagtccaccgtgggcgcccagggccagggacgggccagcgcccggctgca

SEQ ID NO: 540979 - DNA, 120 bp, Artificial Sequence
  ENSG00000167281_20 (sequence is synthesized)
tcgcgaggttgggagtcacagtggctgtgggcctggacgggcacagccagagcaggggcccatgggaagggcaagggatggggaagcctgggccggccccttccctgctcccaaggcagg

SEQ ID NO: 540980 - DNA, 120 bp, Artificial Sequence
  ENSG00000167281_21 (sequence is synthesized)
tgtccaggtggcgggagcagcaccaaggacagccaggcttacccggtgggaggagcaggagcagagcaggtggcagggaggaacccctggcgaggcagggagcactgaagtagggaagca

SEQ ID NO: 540981 - DNA, 120 bp, Artificial Sequence
  ENSG00000167281_22 (sequence is synthesized)
gcaaaaaatacaggctcccaacgtggctccactgtctcatgaagtgtcaaaaatttaaaaatacacctcactttctattcagcatcagctattgaaatggaattctccttttctattccc

SEQ ID NO: 540982 - DNA, 120 bp, Artificial Sequence
  ENSG00000167281_23 (sequence is synthesized)
gttgtacatagccccacgccctgcctccggctttgtcctctgtacagagccccctgtcccctctgctgttccggacccttttcttgcagcagctcaaccccccgactcactcagatcccc

SEQ ID NO: 540983 - DNA, 120 bp, Artificial Sequence
  ENSG00000167281_24 (sequence is synthesized)
aggactgcagccgagccccgggcttcctttcttaccattctgtatgcttccaaggtgtgaccattcaaactaacagtattattaagattattaataaagatttctttcttcaaaccagga

SEQ ID NO: 540984 - DNA, 120 bp, Artificial Sequence
  ENSG00000167281_25 (sequence is synthesized)
agaagccgagggatgcagccaggggcacctcgcatggacgcctgccgcccgcctcagccctctgccctggggacacatggctgtgctggcagcagcaggttgaaattctgcctctgagaa

SEQ ID NO: 540985 - DNA, 120 bp, Artificial Sequence
  ENSG00000167281_26 (sequence is synthesized)
ccatcacaccatcgggcccgcggcgacctacagcattggaaccatggtaaggagcccaggcccgcccagccctgggtgccagtcctaacagctgggcatgggtggtgaggcccttggggg

SEQ ID NO: 540986 - DNA, 120 bp, Artificial Sequence
  ENSG00000167281_27 (sequence is synthesized)
agaggccgagccctctgaccaatgccttggtcccggagactttggaaggaccacggcctggatgtgagttagggtgaggggagggctggcccctcacgccctctcagttgcggggaagca

SEQ ID NO: 540987 - DNA, 120 bp, Artificial Sequence
  ENSG00000167281_28 (sequence is synthesized)
acagccgcttcaccccctactagcaagagacccagcccctaacagcattcacactgactgcctattacacaccaaacccaacagcccaaaaccaggcacagccaccagaagacagtgcac

SEQ ID NO: 540988 - DNA, 120 bp, Artificial Sequence
  ENSG00000167281_29 (sequence is synthesized)
ccctcccggtcagcgacacgcacggctggccccctgcaactctaaaatctatagattatttctctccagccagttggtctccccaccccacctgtgctggtgtgtgtgtctttgaccctg

SEQ ID NO: 540989 - DNA, 120 bp, Artificial Sequence
  ENSG00000167281_30 (sequence is synthesized)
cctggggaaacagccagaagctggaagtcatcccaagagagaagtcagccaggggttggagaccccagcagaagagcgatcaggacgccacggctccgcctgaagcgatggcccagccct

SEQ ID NO: 540990 - DNA, 120 bp, Artificial Sequence
  ENSG00000167281_31 (sequence is synthesized)
ggaggaggagagagaccgggagggcgcccgggaggcagggcgcgcgcacactccgagggacgcagcgagcgcagagccgccgccgggcgcccccctgccgccccatgctgtgctccatgg

SEQ ID NO: 540991 - DNA, 120 bp, Artificial Sequence
  ENSG00000167281_32 (sequence is synthesized)
ctgtccaactccggcagcatgctcccgcactccgtgccctgcccgcccgccttcctctacctccaacagagcgatcaggacgccacggctccgcctgaagcgatggcccagccctacccc

SEQ ID NO: 540992 - DNA, 120 bp, Artificial Sequence
  ENSG00000167281_33 (sequence is synthesized)
cagcttgaagtcacagcagccagaggaaattctgccaccattttcccaggtctgcagcccctccagctgggaacctgctcctggagccatccctctgcaaacaggtgtcctctcccggag

SEQ ID NO: 540993 - DNA, 120 bp, Artificial Sequence
  ENSG00000167281_34 (sequence is synthesized)
ttctctaccaggagggagcagctaaaagctgagatttgttgcaatttacttttgtcccccacccatgccttcacagtgcccggcacttatttggtgtttaataaactgcccattaaatgc

SEQ ID NO: 540994 - DNA, 120 bp, Artificial Sequence
  ENSG00000167281_35 (sequence is synthesized)
gtgagcaggagacagggagggctgaaggctgtgcagcaccctggtatggggtgagtgagggtgcctagagggcgcccacagaaggggctcctgactcggactgaggggcagggaggtctc

SEQ ID NO: 540995 - DNA, 120 bp, Artificial Sequence
  ENSG00000167281_36 (sequence is synthesized)
cttggatgaaggggtgcctgggctagggctgcaggctggctggcccttgccaagagaggacaagagggagccattccgtgtagagggcatagtggctgcaaaggcctcagggagctgagg

SEQ ID NO: 540996 - DNA, 120 bp, Artificial Sequence
  ENSG00000167281_37 (sequence is synthesized)
gcatgtggcgtgctctgggtagcacatgactgagtgtgcgcctggactgggcatccgggatggggtcaccaagagcctcgtggacgatggagaagttgcaaggggatttgctgatgggca

SEQ ID NO: 540997 - DNA, 120 bp, Artificial Sequence
  ENSG00000167281_38 (sequence is synthesized)
tgagcatgttgaacatcttgggagctgctgataatgaaagccaggagtttctggggtttcccagccactggagggaggaagagtttgggggctgtggagggaaggcttggcgccgtttag

SEQ ID NO: 540998 - DNA, 120 bp, Artificial Sequence
  ENSG00000167281_39 (sequence is synthesized)
cacctctgtgtcgtgttctctcttgtcccccatggatgagcccaaaatgtgctgggaaaggcaggactgggagccggaggggctgaaagggaaatggataaatggggtaaggatggagga

SEQ ID NO: 540999 - DNA, 120 bp, Artificial Sequence
  ENSG00000167281_40 (sequence is synthesized)
cgattgtttttaggcaattctggctggcctgagaagcaatgtcactgccttcctgatcctttccctcccccaaccccaaggtcccccaccccaggtgctccgcgcatggccacccattcc

SEQ ID NO: 541000 - DNA, 120 bp, Artificial Sequence
  ENSG00000167281_41 (sequence is synthesized)
tcaggcagccccagcttgctggtccagggtggtccaactcatctccatggcctggtctcctcggggaaggggcttcggataccagctcagttcccagtgttgaccctcgctgggggactg

SEQ ID NO: 541001 - DNA, 120 bp, Artificial Sequence
  ENSG00000167281_42 (sequence is synthesized)
gctactactgcctgagcccattggtccattgctctgtacctccaacccccattacccacctgtggctgaccccctccacagattcacttgcagagtttactttggggagattattataca

SEQ ID NO: 541002 - DNA, 120 bp, Artificial Sequence
  ENSG00000167281_43 (sequence is synthesized)
agtatgatgcttctggaccttcaatggggttgtgtcctgataaacccatcataaggtgaaaatattgtaagtcaaaaataaatttaatggaccgggcttggtggctcatgcttgtaatct

SEQ ID NO: 541003 - DNA, 120 bp, Artificial Sequence
  ENSG00000167281_44 (sequence is synthesized)
aataaacccaacaaacataaagttgaaaaattcaaagtcaatcgtaagtcaaaccttcgtaagttggagatcatctgtaatgtatatttagtgtgaacaaaattagaaaatgcagccatc

SEQ ID NO: 541004 - DNA, 120 bp, Artificial Sequence
  ENSG00000167281_45 (sequence is synthesized)
ggccctcaggtggcctctcttcgctaggtcctgggttttgggtggtgtgtgcacaaggccagcgctgcgtttttcaaaaatcaggaccggaaactagatccgtcagcgtatgaagtcttc

SEQ ID NO: 541005 - DNA, 120 bp, Artificial Sequence
  ENSG00000167281_46 (sequence is synthesized)
ttcagccaaaactagaaaagttgggcactcttttttgtaccgcgtttgccctaagcccgcccttggctcagaagtgggcactgaccagatggcctggagctagacctgacattagaacta

SEQ ID NO: 541006 - DNA, 120 bp, Artificial Sequence
  ENSG00000167281_47 (sequence is synthesized)
gacctgggctagacctgagccgggtgcttccgtcctagaagcaggtcacctcggagccactcagggctgcgggcagaggcagctcgggctctgctgccggctctccggctttctagcagg

SEQ ID NO: 541007 - DNA, 120 bp, Artificial Sequence
  ENSG00000167281_48 (sequence is synthesized)
aagaggacaaagagacagagcccagggggtccccttcacatggcctcaggcttcccacagtgggccgtgtgtaacagggtcccccgtaccgagtggctgcctgtgtgtgtcagggttaga

SEQ ID NO: 541008 - DNA, 120 bp, Artificial Sequence
  ENSG00000167281_49 (sequence is synthesized)
tgcagttttccgtgggagtagacaggaaggccgccgggtgttggcctcacaggcgcccgcaagtgttcaccacgaggagggcagcagccgtcacagccgcctcctgagatgccaccgctg

SEQ ID NO: 541009 - DNA, 120 bp, Artificial Sequence
  ENSG00000167281_50 (sequence is synthesized)
tgagatgccaccgctgtaaactgaatctattttacagggaagcatcggaaggagcccccaggtgagtcacttgtagaataaagaattcatttgccgggccgggcgcggtggctcacgcct

SEQ ID NO: 541010 - DNA, 120 bp, Artificial Sequence
  ENSG00000167281_51 (sequence is synthesized)
ctgtgcctctccagggctgtttcttcatctgcaaaatggggagggtgtggtggctcactgggcagggaggaccccgtgagtttcgaacagtctgtgtggctcacacacagtgttgaggaa

SEQ ID NO: 541011 - DNA, 120 bp, Artificial Sequence
  ENSG00000167281_52 (sequence is synthesized)
aaccagcccatccttattatcattcccagtccaaatgccctttcctcctcgacctgctcccaggccaccctcccggacagccgctctgggggaagatgaggacgggaggaaagtgagagc

SEQ ID NO: 541012 - DNA, 120 bp, Artificial Sequence
  ENSG00000167281_53 (sequence is synthesized)
aggactcagcacggggaagagggagcaggacggggactttggcaggcagtggggagagcttatgggcagagtccaagcgcctttcctgcagcctctggccacctggagctcggatggtgg

SEQ ID NO: 541013 - DNA, 120 bp, Artificial Sequence
  ENSG00000167281_54 (sequence is synthesized)
ggctgtgctgagtctgactccagaaaccctcatcccagctgtgctcaggggggtagataacaagttccactttccctctccagttctcttctgggaggtgggtaccccaggcttcggggg

SEQ ID NO: 541014 - DNA, 120 bp, Artificial Sequence
  ENSG00000167281_55 (sequence is synthesized)
atgacgcccaggggtgagggttgctcaggggcaggctgaggaggatcacaattgggaaagaatcctagcagacccccaggcagaagagtcaggaaggagtagaccctggtgttttgaact

SEQ ID NO: 541015 - DNA, 120 bp, Artificial Sequence
  ENSG00000167281_56 (sequence is synthesized)
agcacttgtccgggcagtgtgggaaaggggggcccggcgcggggaggcgccctgggaatgttcccaagggctccaccggtgtcgctggggttcccaggcatacgttttggtgggaaaagg

SEQ ID NO: 541016 - DNA, 120 bp, Artificial Sequence
  ENSG00000167281_57 (sequence is synthesized)
ggtacggtgtgcacaccgtggggtccaggctgggccaggagaccaggcagcccccaacctgggagtagcggtagcgccctatgagggcaagagccacatttcctggcctcccaggctgca

SEQ ID NO: 541017 - DNA, 120 bp, Artificial Sequence
  ENSG00000167281_58 (sequence is synthesized)
cagaacaacagaaacgcctggcagggcctcccccaaagccacccgaccagccccgtgccatggccctagtgtccagcaccctgacgcagggagggaggggctccaggcacccagtgtggg

SEQ ID NO: 541018 - DNA, 120 bp, Artificial Sequence
  ENSG00000167281_59 (sequence is synthesized)
tctccccggcctgagggtgctcccgcaggccttcacccagccaaccacaggagtagccactgcccctcctcgccccattcagctgaaactaatatttttcattaaattttattgacgata

SEQ ID NO: 541019 - DNA, 120 bp, Artificial Sequence
  ENSG00000167281_60 (sequence is synthesized)
cttacacatctcaaattctttttaaaaatttgggagtgttcccactttgcaagcatcccgagtgcgtcctgggtgtgactcttctgtgatctggcacttggcacaggaagtaaaagcggt

SEQ ID NO: 541020 - DNA, 120 bp, Artificial Sequence
  ENSG00000167281_61 (sequence is synthesized)
agacatttttatagggtacaggtgatcaaccagcggggctgcaaaatctctggaaccagctgcccactctgcacccaagggccacacccaccgctgtctgggcagaagtgagaattcagg

SEQ ID NO: 541021 - DNA, 120 bp, Artificial Sequence
  ENSG00000167281_62 (sequence is synthesized)
ggagcatggaaatcagaacagacccatctctgaatggcctcgggctatgcggctcatgaggggcacggaacctacaccagtgaaacatcagggaatggagggaggtgggaacctttgccc

SEQ ID NO: 541022 - DNA, 120 bp, Artificial Sequence
  ENSG00000167281_63 (sequence is synthesized)
acctttgcagcaagagccgtttcatctcaatctcttcatcagcctgggcacagagggctgcagtgggacggccctgggttctctgcaggttggcaccgaagccaacccatgggctctggt

SEQ ID NO: 541023 - DNA, 120 bp, Artificial Sequence
  ENSG00000167281_64 (sequence is synthesized)
ggcgagtgctgcgtgacttggcttcaacactacccaacactctggaattcatcagttgggggtggaggtttccattgtagaaaacaaacccaccaggtttgcccaggtgttaactattta

SEQ ID NO: 541024 - DNA, 120 bp, Artificial Sequence
  ENSG00000167281_65 (sequence is synthesized)
cggtagaaacaggccagccaggcagtctcaggctgtctctgccatctggggttccagacagtgaaatggaggcagcagagacaggtggaggctcccagagaggcagaattgacaggggag

SEQ ID NO: 541025 - DNA, 120 bp, Artificial Sequence
  ENSG00000167281_66 (sequence is synthesized)
ggcacccaggaagccagaatcaccggtggaggcatccaggaagccagaattgacaggtgaaggtgcccagggccatctgaagcacacatgcagcctccaagtctcactcgcccagagtgg

SEQ ID NO: 541026 - DNA, 120 bp, Artificial Sequence
  ENSG00000167281_67 (sequence is synthesized)
acccagaagagtcactggatggagccccggggagtctgggcttggggtcagggtctccaggactctgctccatcatgggccttctagtaagaagagtcagttcttcggactggaggtctt

SEQ ID NO: 541027 - DNA, 81 bp, Artificial Sequence
  ENSG00000167281_68 (sequence is synthesized)
caggatcccttgagcccaggacttcaagaccagcctgagcaacacagggagaccctgtctctacagatagtttttaaaatt

SEQ ID NO: 541028 - DNA, 120 bp, Artificial Sequence
  ENSG00000167281_69 (sequence is synthesized)
acacagggagaccctgtctctacagatagtttttaaaattagctgtgggtgtagtggcaggcacctgtggcccaagctactcgggaggctgaagtaggaggatcgcttgagcccaggagg

SEQ ID NO: 541029 - DNA, 120 bp, Artificial Sequence
  ENSG00000167281_70 (sequence is synthesized)
cactccagcctgggcaacagagcaagaaactgtgcccccctacccccaaaaaaagtttcttccttcctaacctgggatttatctttttggaagattccaaagtcccagcaatggcgtcca

SEQ ID NO: 541030 - DNA, 120 bp, Artificial Sequence
  ENSG00000167281_71 (sequence is synthesized)
ggaagattccaaagtcccagcaatggcgtccagacacaaggttgtgtgatggtgggccggggatgcggggtggggtgaagacttggccagagggaggaacataccccgaccctccgtcct

SEQ ID NO: 541031 - DNA, 120 bp, Artificial Sequence
  ENSG00000167281_72 (sequence is synthesized)
cccactgccaccctctccagatgtatctccccagctggccagtgggctctcgtccctgctgttcctccccacccagtgcaaagggacaaggagccgggcccacggggcatgctgtagaga

SEQ ID NO: 541032 - DNA, 120 bp, Artificial Sequence
  ENSG00000167281_73 (sequence is synthesized)
taagacctgggtacactgaggaggggtaaggggctgggcctcgtcaagaagccctcctgcccaacctgtcggaatgcctggagccggagcccactgcaaggcagctggtgtcccccgcag

SEQ ID NO: 541033 - DNA, 120 bp, Artificial Sequence
  ENSG00000167281_74 (sequence is synthesized)
aggcctccaggtggagcaggtctttgctctgctcctgggttcccccggggagaggaagactggcccacctgcaggaagggagaggctgggatgccgattacaggctgggatccctggctc

SEQ ID NO: 541034 - DNA, 120 bp, Artificial Sequence
  ENSG00000167283_0 (sequence is synthesized)
ccttccggcgggtgacattcagccggcggttcggggcgacggactctccattccagaaccatggcccaatttgtccgtaaccttgtggagaagaccccggcgctggtgaacgctgctgtg

SEQ ID NO: 541035 - DNA, 120 bp, Artificial Sequence
  ENSG00000167283_1 (sequence is synthesized)
acttactcgaagcctcgattggccacattttggtactacgccaaggttgagctggttcctcccacccctgctgagatccctagagctattcagagcctgaaaaaaatagtcaatagtgct

SEQ ID NO: 541036 - DNA, 120 bp, Artificial Sequence
  ENSG00000167283_2 (sequence is synthesized)
cagactggtagcttcaaacagctcacagttaaggaagctgtgctgaatggtttggtggccactgaggtgttgatgtggttttatgtcggagagattataggcaagcggggcatcattggc

SEQ ID NO: 541037 - DNA, 120 bp, Artificial Sequence
  ENSG00000167283_3 (sequence is synthesized)
tatgatgtttgaagaccaatctttaacatctgattatatttgatttattatttgagtgttgttggaccatgtgtgatcagactgctatctgaataaaataagatttgtcaaaactcagtg

SEQ ID NO: 541038 - DNA, 120 bp, Artificial Sequence
  ENSG00000167283_4 (sequence is synthesized)
tgatattaagctgggttgtctttaaacaaccctaaatacacgtctgtttagcccgcaattggaaaggatatatgtggcaatattaacctggtacatgaatatatggggataacattttaa

SEQ ID NO: 541039 - DNA, 120 bp, Artificial Sequence
  ENSG00000167283_5 (sequence is synthesized)
tttgaaggtttggaatatatatatttaagctttatttccagaacagtgagggttaggtcttgggaaaactataacttgccaaagtagaagaaatagtagtaccatatgccaaagtgatag

SEQ ID NO: 541040 - DNA, 120 bp, Artificial Sequence
  ENSG00000167283_6 (sequence is synthesized)
agatgaatcatgtcagtagttagaataacatttcaactgttttctttgctaaaatcacagaaagaccctattgacaacatctatgtctgtaaaaatgttagagtacttgtcatcttgaat

SEQ ID NO: 541041 - DNA, 120 bp, Artificial Sequence
  ENSG00000167283_7 (sequence is synthesized)
atagcctccccaagagagaacagggtggtattctaagtatgtttctttgtaacatctttagcagtaggacagagccatacatgtgaaatctgatttttatgtgtgttattcgtttgtctg

SEQ ID NO: 541042 - DNA, 120 bp, Artificial Sequence
  ENSG00000167283_8 (sequence is synthesized)
gttttactacctttgcaaaaacaaaataccccaaagatatttaaacaaggttataatttagcatcttccctggatctaaatagtatattatatcctgaaataaatgaaatgattgctata

SEQ ID NO: 541043 - DNA, 120 bp, Artificial Sequence
  ENSG00000167283_9 (sequence is synthesized)
agttaagaaaaaaagcagcacctgaggattctgaacagttctctgctcagtgatgatcaagccttcctttggacaagcttaaataactcagccactgttctttgttggaggactttggga

SEQ ID NO: 541044 - DNA, 120 bp, Artificial Sequence
  ENSG00000167283_10 (sequence is synthesized)
ctactgatgcaatgtgtccacttgggggccctttggagaaaaaattgctaatttcagaggggcagccgcaccagtggttaaggaaatccctggggagaaaatgtttctgtctggattaga

SEQ ID NO: 541045 - DNA, 120 bp, Artificial Sequence
  ENSG00000167283_11 (sequence is synthesized)
gagaagacatcttatttactcattcaatcttcatgataatcttgtgaagctataattaatatccttatttttgcagattaggaaactaagacgtactgaggctgggtgcctggttcaaga

SEQ ID NO: 541046 - DNA, 120 bp, Artificial Sequence
  ENSG00000167283_12 (sequence is synthesized)
tcatatagctaacattattggacatgcaaatcaagcccagatttgtgactctgagctgatgttaattctgtcacaatattggttctcaagataaatctttccaggtgagggggaaaggga

SEQ ID NO: 541047 - DNA, 120 bp, Artificial Sequence
  ENSG00000167283_13 (sequence is synthesized)
tgctgggtttacaggcatgaccactgcacttagcctctcttataattttttaaataaaaaatgtcttcctctttctgaaatcactactgcagtctcacaactaccctggttgttaatgat

SEQ ID NO: 541048 - DNA, 120 bp, Artificial Sequence
  ENSG00000167283_14 (sequence is synthesized)
ctcttctcttgaaatagtaaataccttgaggaattccagcttggtaatagattctagttttggctcttcttaactatacatgtagattttacttttattatttgtggtgcctttaaaaga

SEQ ID NO: 541049 - DNA, 120 bp, Artificial Sequence
  ENSG00000167283_15 (sequence is synthesized)
ggagcagctgtgcttttgtcagagaaacatttaatccagcacatattgatgaggataccaaaatgggtaccagttgttttaattccatctggatttgtggataatattatgataactttt

SEQ ID NO: 541050 - DNA, 120 bp, Artificial Sequence
  ENSG00000167283_16 (sequence is synthesized)
catcttgttcttaagagtgccattctaaatccttcatccctttcttcacctctttcttcaaatttgctggtctctctccaagaaaatatgaataaattgactgttctcttgtttttaaat

SEQ ID NO: 541051 - DNA, 120 bp, Artificial Sequence
  ENSG00000167283_17 (sequence is synthesized)
ccaattcctagcatctttacagttagctagatttgccattcataaatgaagtacagtactagctggccactagtgaagtactggcataattgaatgtgcttatagcatcctgcctgattg

SEQ ID NO: 541052 - DNA, 120 bp, Artificial Sequence
  ENSG00000167283_18 (sequence is synthesized)
aacatccctgtggcacaggtgttctgcatctttaaaagcctcttgttaccagggagcagctttgacttttcacaccgggtgcacatttggtacaagcagtgaatgaaggtgatgcatgaa

SEQ ID NO: 541053 - DNA, 120 bp, Artificial Sequence
  ENSG00000167283_19 (sequence is synthesized)
agaaaatgtcttcccttgggatttttctgattgttttgattaatatatatgtttccaatgaggctgaatccagcataatgaggaaaaaaattttgactgctgaggaagatacttactttt

SEQ ID NO: 541054 - DNA, 120 bp, Artificial Sequence
  ENSG00000167283_20 (sequence is synthesized)
ctaattttgtcacctgggtagaaataattagcccattttatgtcttagtttcctaagagtcttaaacctagcaaaaaagtgaccatttttattgggaaattttttttcctttcctatatt

SEQ ID NO: 541055 - DNA, 120 bp, Artificial Sequence
  ENSG00000167283_21 (sequence is synthesized)
agatagtatactaaaatatgatggcttgctttgctgagtctgtacttttttcatctggagtcctgagattgtccccaattcagccaaaacatctcttgaactatgtcacagtcaggaagc

SEQ ID NO: 541056 - DNA, 120 bp, Artificial Sequence
  ENSG00000167283_22 (sequence is synthesized)
ccggcgggtgacattcagccggcggttcggggcgacggactctccattccagaaccatggcccaatttgtccgtaaccttgtggagaagaccccggcgctggtgaacggcattggcagtt

SEQ ID NO: 541057 - DNA, 120 bp, Artificial Sequence
  ENSG00000167283_23 (sequence is synthesized)
gacattcagccggcggttcggggcgacggactctccattccagaaccatggcccaatttgtccgtaaccttgtggagaagaccccggcgctggtgaacggtggcgcatattaaggaattg

SEQ ID NO: 541058 - DNA, 120 bp, Artificial Sequence
  ENSG00000167286_0 (sequence is synthesized)
agagaagcagacatcttctagttcctcccccactctcctctttccggtacctgtgagtcagctaggggagggcagctctcacccaggctgatagttcggtgacctggctttatctactgg

SEQ ID NO: 541059 - DNA, 120 bp, Artificial Sequence
  ENSG00000167286_1 (sequence is synthesized)
atgagttccgctgggagatggaacatagcacgtttctctctggcctggtactggctacccttctctcgcaagtgagccccttcaagatacctatagaggaacttgaggacagagtgtttg

SEQ ID NO: 541060 - DNA, 120 bp, Artificial Sequence
  ENSG00000167286_2 (sequence is synthesized)
tgaattgcaataccagcatcacatgggtagagggaacggtgggaacactgctctcagacattacaagactggacctgggaaaacgcatcctggacccacgaggaatatataggtgtaatg

SEQ ID NO: 541061 - DNA, 120 bp, Artificial Sequence
  ENSG00000167286_3 (sequence is synthesized)
aagaatctaccgtgcaagttcattatcgaatgtgccagagctgtgtggagctggatccagccaccgtggctggcatcattgtcactgatgtcattgccactctgctccttgctttgggag

SEQ ID NO: 541062 - DNA, 120 bp, Artificial Sequence
  ENSG00000167286_4 (sequence is synthesized)
tcttctgctttgctggacatgagactggaaggctgtctggggctgccgacacacaagctctgttgaggaatgaccaggtctatcagcccctccgagatcgagatgatgctcagtacagcc

SEQ ID NO: 541063 - DNA, 120 bp, Artificial Sequence
  ENSG00000167286_5 (sequence is synthesized)
accttggaggaaactgggctcggaacaagtgaacctgagactggtggcttctagaagcagccattaccaactgtaccttcccttcttgctcagccaataaatatatcctctttcactcag

SEQ ID NO: 541064 - DNA, 120 bp, Artificial Sequence
  ENSG00000167286_6 (sequence is synthesized)
caggtgcctgggcttcttaaggctcctgggcaaggcgtgggagttgtcctgacttgcttgggatctcgccctcctacctacctgtttcttccttcatctccttccttcctctgcctcaca

SEQ ID NO: 541065 - DNA, 120 bp, Artificial Sequence
  ENSG00000167286_7 (sequence is synthesized)
ggtgacctggctttatctactggatgagttccgctgggagatggaacatagcacgtttctctctggcctggtactggctacccttctctcgcaagtgtgccagagctgtgtggagctgga

SEQ ID NO: 541066 - DNA, 120 bp, Artificial Sequence
  ENSG00000167291_0 (sequence is synthesized)
cggcagcggcggaggcgacggtggcggctctcggagccggcgcgaatccggcccccgcagcgggacccgggcaggtcttgacgagccctgcccgggccgacgcatgcggaggatggaaac

SEQ ID NO: 541067 - DNA, 120 bp, Artificial Sequence
  ENSG00000167291_1 (sequence is synthesized)
atggaaacacttgcccggcaatgtctctgggccgcctccttcgcagggcctcctccaaagcctcggacctcctgaccctcacccccggtggcagcggcagcgggtccccctctgtcctgg

SEQ ID NO: 541068 - DNA, 120 bp, Artificial Sequence
  ENSG00000167291_2 (sequence is synthesized)
atggagagatcatctactccaagaacaatgtctgcgtgcacccgccggaggggctgcaggggctgggggagcaccacccaggttacctgtgcttgtacatggagaaggatgagatgctgg

SEQ ID NO: 541069 - DNA, 120 bp, Artificial Sequence
  ENSG00000167291_3 (sequence is synthesized)
gagccaccctcatcctggcatgggtccccaactctcgcatccagaggcaggacgaggaggccctgcgctacatcacacccgagagctcccccgttcgcaaggcaccccgccctcggggcc

SEQ ID NO: 541070 - DNA, 120 bp, Artificial Sequence
  ENSG00000167291_4 (sequence is synthesized)
ggcgcacccggagctcaggagcctcccaccagccctccccgacggagctgcggcctaccctgacccccaaagatgaggacatcctggtggtggcccagagtgttccagaccgcatgctcg

SEQ ID NO: 541071 - DNA, 120 bp, Artificial Sequence
  ENSG00000167291_5 (sequence is synthesized)
ccagccctgcgccagaggatgaggagaagctggcgcagggcttgggggtggatggtgcccagccagcctcgcagcctgcttgcagcccctccgggatcttgtcgacggtcagtccgcagg

SEQ ID NO: 541072 - DNA, 120 bp, Artificial Sequence
  ENSG00000167291_6 (sequence is synthesized)
atgtcaccgaggaggggcgggagccgcggcccgaggccggggaggaggatggctctttggaactgtcagccgagggcgtgagcagagacagctcctttgactcagactcagacaccttct

SEQ ID NO: 541073 - DNA, 120 bp, Artificial Sequence
  ENSG00000167291_7 (sequence is synthesized)
cctcgcccttctgcctctcgcccatcagcgcggcgctggccgagagccgcggctccgtgtttctggaaagtgacagcagccccccgtccagctccgacgccggcctgcggttcccggaca

SEQ ID NO: 541074 - DNA, 120 bp, Artificial Sequence
  ENSG00000167291_8 (sequence is synthesized)
gcaacggcctcctgcagaccccacgctgggacgagccgcagcgggtgtgcgccctggagcagatttgcggcgtgttccgcgtggacctgggccacatgcgctccctccgccttttcttca

SEQ ID NO: 541075 - DNA, 120 bp, Artificial Sequence
  ENSG00000167291_9 (sequence is synthesized)
gcgacgaggcctgcaccagcggccagctggtcgttgccagccgagagagccagtacaaggttttccacttccaccacggcggcctggacaagctgtctgacgtgttccagcagtggaaat

SEQ ID NO: 541076 - DNA, 120 bp, Artificial Sequence
  ENSG00000167291_10 (sequence is synthesized)
actgcaccgagatgcagctcaaagaccagcaggtcgcccccgataagacatgcatgcagttctccatccgccgccccaagctgccgtcctccgagacgcaccccgaggagagcatgtaca

SEQ ID NO: 541077 - DNA, 120 bp, Artificial Sequence
  ENSG00000167291_11 (sequence is synthesized)
agaggctcggcgtctccgcctggctcaaccacctgaatgagctgggccaggtggaggaggagtacaagctgcggaaggccattttctttggcggtattgatgtgtcaatccgcggggagg

SEQ ID NO: 541078 - DNA, 120 bp, Artificial Sequence
  ENSG00000167291_12 (sequence is synthesized)
tctggcccttcctgctgcgctattacagccacgagtccacgtcggaggagcgggaggcgctgcggctgcagaagcgaaaggagtactctgagatccagcagaaaaggctctccatgactc

SEQ ID NO: 541079 - DNA, 120 bp, Artificial Sequence
  ENSG00000167291_13 (sequence is synthesized)
ccgaggagcacagagcgttctggcgtaatgtgcagttcactgtggacaaagacgtggtccggacagatcggaacaaccagttcttccggggggaagacaatcccaatgtggagagcatga

SEQ ID NO: 541080 - DNA, 120 bp, Artificial Sequence
  ENSG00000167291_14 (sequence is synthesized)
ggaggatcctgctgaactacgccgtgtacaaccctgccgtcggctattcccaagggatgtcggacctggtggcgcccatcttggccgaggtcctggatgagtcagacaccttctggtgct

SEQ ID NO: 541081 - DNA, 120 bp, Artificial Sequence
  ENSG00000167291_15 (sequence is synthesized)
ttgtgggtttgatgcagaacacgatcttcgtcagctcaccccgggacgaggacatggagaaacaactgctgtacctgcgcgagctgctgcggctgacgcacgtgcgcttctaccagcacc

SEQ ID NO: 541082 - DNA, 120 bp, Artificial Sequence
  ENSG00000167291_16 (sequence is synthesized)
tggtctcgctgggcgaggacggcctgcagatgctcttctgccaccgctggctccttctgtgcttcaagcgggagttccccgaggccgaagcgctgcggatctgggaggcctgctgggccc

SEQ ID NO: 541083 - DNA, 120 bp, Artificial Sequence
  ENSG00000167291_17 (sequence is synthesized)
actaccagacggactacttccaccttttcatctgcgtggccatcgtggccatctacggggatgacgtcatcgagcagcagctggccacggaccagatgctcctgcacttcggaaacctgg

SEQ ID NO: 541084 - DNA, 120 bp, Artificial Sequence
  ENSG00000167291_18 (sequence is synthesized)
ccatgcacatgaacggggagctcgttctccggaaggcgaggagtttgctgtaccagttccgcctcctgccccggatcccctgcagcctgcacgatctgtgtaagctgtgcgggtcaggca

SEQ ID NO: 541085 - DNA, 120 bp, Artificial Sequence
  ENSG00000167291_19 (sequence is synthesized)
tgtgggacagcggctccatgcccgcggtggagtgcaccggccaccatcccggctcggagagctgtccctacgggggcacggtggagatgccttcccccaagtccctgagggaaggcaaga

SEQ ID NO: 541086 - DNA, 120 bp, Artificial Sequence
  ENSG00000167291_20 (sequence is synthesized)
agggcccaaagacgccgcaggacggcttcggcttccgcagataggtcgggcccccgacaccggacaggggttgaggggacctcctcagaggccctgggcacgggagggggtggggctggg

SEQ ID NO: 541087 - DNA, 120 bp, Artificial Sequence
  ENSG00000167291_21 (sequence is synthesized)
cgtgaaggggacaggggacggtagaaacctaaggaaaatgcttttgggcaacatgagaggaaccttttcatattaatgacaaaattagagtctggaagtgacagaagtcagatctacagc

SEQ ID NO: 541088 - DNA, 120 bp, Artificial Sequence
  ENSG00000167291_22 (sequence is synthesized)
cacccagaggaaagtcagctcctgaaacgctgcagtggaacgcgcagccaccgcacctgagacgcaggctggctgggctctcctgctggctgccctggaggatttcaacatgtcccagga

SEQ ID NO: 541089 - DNA, 120 bp, Artificial Sequence
  ENSG00000167291_23 (sequence is synthesized)
tttgctccaccctcgagggcagccagacagcgtcgccaggcaatgaggaaagcagagacaggagaggaaggcctcactcacccactgcgtcgagggctgcagaacacagcggggtcctgt

SEQ ID NO: 541090 - DNA, 120 bp, Artificial Sequence
  ENSG00000167291_24 (sequence is synthesized)
ccaggcccagggacatctttgcaagccagacacacttcctcttgagacctcgttctctcggagtgagccaaacacacttcccaaaacgtccccagccacagctgggatgccgatggaaag

SEQ ID NO: 541091 - DNA, 120 bp, Artificial Sequence
  ENSG00000167291_25 (sequence is synthesized)
gcatctgccataaaagaaaagcaaaagataaaaagcccaaccgatgtggggatagagaggcggaagagcagtcaggcttgaggagctggcgcttgtaatgtttatccgtttaaacatttc

SEQ ID NO: 541092 - DNA, 120 bp, Artificial Sequence
  ENSG00000167291_26 (sequence is synthesized)
gtcctcctggtacacgaagggaactgtctgcccaggagcctgagcctcaggctgttggagaagcatctgatgcctttttctttgctgggggtcttctacgtgaggttccttggcgttgtt

SEQ ID NO: 541093 - DNA, 120 bp, Artificial Sequence
  ENSG00000167291_27 (sequence is synthesized)
taaggtcaactccaccaaatacagcaaccagctggggcttgaatgggtcgatgtgtgcgtgtgtccctgcgtgcatgcatgcatgcacacgtgcgtgcgtgtttgtgtttgcaagatcct

SEQ ID NO: 541094 - DNA, 120 bp, Artificial Sequence
  ENSG00000167291_28 (sequence is synthesized)
ctgacaatgatctgctttgtcccagggacgtggtagtgtattagctgaccaaccaagacaaggacacctggaaatagttagactcttccacttcccttcaggacctgtgaactcagatat

SEQ ID NO: 541095 - DNA, 120 bp, Artificial Sequence
  ENSG00000167291_29 (sequence is synthesized)
gtaagtcagcttctcaggtggtcggacgtgagagcgaccacagtgaaggagccagcactcagggctctctgccttctatgtgggaatgaggtcttcccaacagactctccctcttccaaa

SEQ ID NO: 541096 - DNA, 120 bp, Artificial Sequence
  ENSG00000167291_30 (sequence is synthesized)
agattgtgtatcagttgctccttctgggatttagagatggacagaaaagggtgtgcgatctatgctgtgagaactcccagccagcttagaagtgtcgagccatttgcacagaaagccact

SEQ ID NO: 541097 - DNA, 120 bp, Artificial Sequence
  ENSG00000167291_31 (sequence is synthesized)
ccttgagcgaggagaccaaatccctcctgaaatcctccatcgcgtccttctggggagaaaaacccttgatgtgctgagaaccatcatggggaccaggatagaaggcttcttcccactcaa

SEQ ID NO: 541098 - DNA, 120 bp, Artificial Sequence
  ENSG00000167291_32 (sequence is synthesized)
agcttttctccctggagggtgggcactgctgggccatgccacttcaaagcagtgttcctcagcaggaaagcggaggtcaccacttaccggcctcctccaccttctcggcttctcttttct

SEQ ID NO: 541099 - DNA, 120 bp, Artificial Sequence
  ENSG00000167291_33 (sequence is synthesized)
ccatgaacccaggtcgtccagcaggtacttccaagttcccaggtctgtctgcctaagagccttttgaggagaccgtcctggagccccatcagtgcccagatcctggggtaccgaccattg

SEQ ID NO: 541100 - DNA, 120 bp, Artificial Sequence
  ENSG00000167291_34 (sequence is synthesized)
ctgtctagcagtgggggatcctgtggtgggaatggggtgggcttctcatccatgttgcttctgggaagagagggttgcctttctgggctagggaggtggctggagcttctgccctgaccc

SEQ ID NO: 541101 - DNA, 120 bp, Artificial Sequence
  ENSG00000167291_35 (sequence is synthesized)
tccgctagaaaccagttatatccattgccacagcaatactgtgtaacaaatccgccaacactcggtggcctgcaacagtcagcactgatctagggcaggagtcagcagtctgggcagggt

SEQ ID NO: 541102 - DNA, 120 bp, Artificial Sequence
  ENSG00000167291_36 (sequence is synthesized)
gattcttctggtctaggctgggcttgtttgtttagggccagtgggttgttaagtcccaggggatgctcatggtgcagaggtcggacctggccctgctctgtggtctcttgcatccctcct

SEQ ID NO: 541103 - DNA, 120 bp, Artificial Sequence
  ENSG00000167291_37 (sequence is synthesized)
gcaggccagccatggcacagccaaaggcacggagggagagacagcaagtgcctttccaagccttggtggacaccacacctgcagctctccccttggccacagcaagtcacgtggctgggc

SEQ ID NO: 541104 - DNA, 120 bp, Artificial Sequence
  ENSG00000167291_38 (sequence is synthesized)
tcagcattaaggggtgggggacaggcctgccactttattgtccgctctgcacagtcgggtggcagtaggctgagaatttggagggctaaacaactgggactctggagagtctgtgtccta

SEQ ID NO: 541105 - DNA, 120 bp, Artificial Sequence
  ENSG00000167291_39 (sequence is synthesized)
ataatgcctgctttggagcactccttccccacccgcctgctccaggggaatagcgtccctggtcctagcatttcactagatacctcgtgcctttgaaccgctgtgtttgggagggaggaa

SEQ ID NO: 541106 - DNA, 120 bp, Artificial Sequence
  ENSG00000167291_40 (sequence is synthesized)
gaggatagacaggtccagggctcccctcacttgggaaggtcctagtagaaggcattccttctgagtctcctggccctacagcttctcacccctgctgctccccaagacctgacccggacc

SEQ ID NO: 541107 - DNA, 120 bp, Artificial Sequence
  ENSG00000167291_41 (sequence is synthesized)
aatcagctgcatctctgcaccaagtgccacccccaccgtgcactgctcgcacctcacgctccccatgggctggcccggaccccagtgaggtctgcacctctcggaccagccaggacctcg

SEQ ID NO: 541108 - DNA, 120 bp, Artificial Sequence
  ENSG00000167291_42 (sequence is synthesized)
gaagccatgagctgggtgttcagggcttggcggaggagacgctgctccgcgggggatggagaagccccgcccctccacaactcccttaatctggatgcaattagaggaaaccagccaaaa

SEQ ID NO: 541109 - DNA, 120 bp, Artificial Sequence
  ENSG00000167291_43 (sequence is synthesized)
accccgcggcagctgttgccccgggattattcccagccagcgagaggcattagggcgataattcagtcattagacttctagccttcccaccgccagaacgtgcaaataggggataatcag

SEQ ID NO: 541110 - DNA, 120 bp, Artificial Sequence
  ENSG00000167291_44 (sequence is synthesized)
ccctgcacggccatcctcagcaatgctgcttatttaacccattttttaaaatgacacttaatgttattggctggcgtacgtgtgtgcgcatacttaaaagttgatgcgtggtgcagctct

SEQ ID NO: 541111 - DNA, 120 bp, Artificial Sequence
  ENSG00000167291_45 (sequence is synthesized)
gggcctctgggaagaggggacacctttgatgtgggcgtgctggcacccaagaggcaacgtggtcaggctcgatgcttgccagccctggaaggtcccgccagggttggggggtcgggtgag

SEQ ID NO: 541112 - DNA, 120 bp, Artificial Sequence
  ENSG00000167291_46 (sequence is synthesized)
cactcagagatctggggaggaagcgaggagcctggtgtcctcaccaggtgcagaggggaaatgcgtactgctccagaaggttctgactcaagtctcggccctgaggactcagaactcaca

SEQ ID NO: 541113 - DNA, 120 bp, Artificial Sequence
  ENSG00000167291_47 (sequence is synthesized)
agtcatggatcaagtacagagggagggagggccccagcccacccctgcgggggaggaggagggtctgaaggtgggagggcagctccatgagcagccactgttcctgaccagccgaagtgc

SEQ ID NO: 541114 - DNA, 120 bp, Artificial Sequence
  ENSG00000167291_48 (sequence is synthesized)
caggcagggggaggtttccatgtccaggagggagaggacctccaccctctgacctttcagttttccatagcagcccagtgtgaagctcggcgggggtgggcagggcatcaggacaagatg

SEQ ID NO: 541115 - DNA, 120 bp, Artificial Sequence
  ENSG00000167291_49 (sequence is synthesized)
aagatgctggctctggaatgaggactccccttgggctaaggggtagtggctggcagaggttgcccagctcttttggaggccacagggaatagaggtggggtggtgcttccgttcctgtga

SEQ ID NO: 541116 - DNA, 120 bp, Artificial Sequence
  ENSG00000167291_50 (sequence is synthesized)
ggcccgcccccctgagccccctcgtctgcttcttgtttggcagaaatagatgtggggcacagcccctagatgatgggaatctgcccaagctgtgccctctggggaatgaaatcttgctcc

SEQ ID NO: 541117 - DNA, 120 bp, Artificial Sequence
  ENSG00000167291_51 (sequence is synthesized)
tcgtgcagcttcccctttcccttgcggggtgggggctgggggtgccaaggctccacccttggagggggttgctgggggtgccaaggctccaccctttgctcgctgggcagagggaaggaa

SEQ ID NO: 541118 - DNA, 120 bp, Artificial Sequence
  ENSG00000167291_52 (sequence is synthesized)
agagggaaggaagcacctccctgtatgctctgcaggggcccctgcaggccactttgcctcagaggaaggaggagaggtcccctgggaaaatgcgcacacacacacacacacacacacaca

SEQ ID NO: 541119 - DNA, 120 bp, Artificial Sequence
  ENSG00000167291_53 (sequence is synthesized)
cacacacgcacgcatgcacacacacacacacatatgtgcaggggtgcagcctaagtcagtggagccaggactggctgcgcagctgggcctgccccattcttggagtccccagggaatgag

SEQ ID NO: 541120 - DNA, 120 bp, Artificial Sequence
  ENSG00000167291_54 (sequence is synthesized)
cctcaggatccacttcgtcccttgtttctaagccaggctgcacggccgttcctgggtgtgaaagcattctgtcctgtctccagtcagagggaaccgcccccaaactagaaagctaatttc

SEQ ID NO: 541121 - DNA, 120 bp, Artificial Sequence
  ENSG00000167291_55 (sequence is synthesized)
ccccgaaggttcatgaagccagaggcatgcccttgggggttggtcgggagaagggtgagaggcagtgctgtggaaggggcctggcccctgctgcctgcgattctccccgggtatgtggcc

SEQ ID NO: 541122 - DNA, 120 bp, Artificial Sequence
  ENSG00000167291_56 (sequence is synthesized)
ttctgcctccttcagcctcagtttcctcacctgtaacatgagaataatgatgcctgcctgcccaggccacctcctgggagtgcattggggactctaagtgtaaaactgtcatgaggatgg

SEQ ID NO: 541123 - DNA, 120 bp, Artificial Sequence
  ENSG00000167291_57 (sequence is synthesized)
tttatgaagtcccagggaccacacctgccactcagggaagagaccgctgacctcagccatcagccgtgtgcatcgtgaggggcagcgagctcaggacggagagctctcccttggttcgga

SEQ ID NO: 541124 - DNA, 120 bp, Artificial Sequence
  ENSG00000167291_58 (sequence is synthesized)
gtcagcacacctgcactcccacacgcccacccagctgtgtgtcctccgccgagggcgagcctctctgtgactcttctgtaaaatgcaccccattctgcccactcctgccacgagacccat

SEQ ID NO: 541125 - DNA, 120 bp, Artificial Sequence
  ENSG00000167291_59 (sequence is synthesized)
cctctgcgatcccgccaggcatgtgtgtgtgaatgcatgtgcaaagctctccatcagaagggtggtgtgggccctgcaggtcctacccctcggccttgaagctccctcgggctgcggact

SEQ ID NO: 541126 - DNA, 120 bp, Artificial Sequence
  ENSG00000167291_60 (sequence is synthesized)
ctgcctcctgggtctgagcattagaaccaggagaggggtgtccctgggcagagccaggggtgcaaacagcctgcagccatctggccttttaagtatagtgtgtcgcatttccgggtagga

SEQ ID NO: 541127 - DNA, 120 bp, Artificial Sequence
  ENSG00000167291_61 (sequence is synthesized)
aggtagcatttcaagttcaaagagaggtcaagtcatgcaaccatctttcctccagcacttttggggtaaggaggacagtttttgttatggtttaggggaaattttcatgaaatttccacc

SEQ ID NO: 541128 - DNA, 120 bp, Artificial Sequence
  ENSG00000167291_62 (sequence is synthesized)
attaccaatagattactgatgtccatggcaagtgatctgttcttggtattttgttttgttttgttttggtttttaaatgtaatcacccattggtcaggcccaggactggtcaccatgagc

SEQ ID NO: 541129 - DNA, 120 bp, Artificial Sequence
  ENSG00000167291_63 (sequence is synthesized)
tctgctagccacggccccaacgatgcttccggctctcatggattccacagcaaataaaactgtactgacaacagatgcacgctgtacagtgcctctggaaggtgcggtgggacttgctgg

SEQ ID NO: 541130 - DNA, 120 bp, Artificial Sequence
  ENSG00000167291_64 (sequence is synthesized)
gtcaaagcacggcaggctctgtgctgggcaaacagggccccgtggcagcccaagggcagcctgcagacgccagtgtgcccggcttctcccatgttctgagatgggggaggggaaggtgta

SEQ ID NO: 541131 - DNA, 120 bp, Artificial Sequence
  ENSG00000167291_65 (sequence is synthesized)
aaagagagctggatgggggctgtggggactgagggtcctgggaggctggccaggggctcagcaagcgcccactttgggaggccttgccctctgggctgtggttggacagcactaggcctg

SEQ ID NO: 541132 - DNA, 120 bp, Artificial Sequence
  ENSG00000167291_66 (sequence is synthesized)
caggctgggctgccaggaggaagagcagctccggacctcaggcccccccagcaggcggcgatggagggtgatgggagaattgacgagtgctcgcggggtctcactcgggaaagggccggt

SEQ ID NO: 541133 - DNA, 120 bp, Artificial Sequence
  ENSG00000167291_67 (sequence is synthesized)
taactctgagcaactgggagcctcgctcccaccccagtgcctggaaacacaaacagtattttattgagccttggctgccggggctctggtttcaggaaaagcctcagtcctgcatttgtg

SEQ ID NO: 541134 - DNA, 120 bp, Artificial Sequence
  ENSG00000167291_68 (sequence is synthesized)
aatttttaaggaggcaaacaaggtgaatttgaccttcctaggagtgggagttagggaaaattcaggctgccctaccaagcccttggaaccgtgcagcaggggtcaggggagggatgggca

SEQ ID NO: 541135 - DNA, 120 bp, Artificial Sequence
  ENSG00000167291_69 (sequence is synthesized)
aaggcggtttggcccatggagcaggtctcctggtcctcccggagcacggggggcggggagctccagctcttcatcaagcgccctttggggtttccaactgttttctgttgttctctgtgt

SEQ ID NO: 541136 - DNA, 120 bp, Artificial Sequence
  ENSG00000167291_70 (sequence is synthesized)
gtcttttccccttttgcctgggggcgggggctggaggggaacatacctcttatctacatcactcgggtctcatgtctgaagggcctgtctcacctgccacctacctggccttggcctcga

SEQ ID NO: 541137 - DNA, 120 bp, Artificial Sequence
  ENSG00000167291_71 (sequence is synthesized)
catctgagcgcctcatcacctcctctccacatgcccaggggtgcccctcccaaggctggctgggcaggtcccacggactaggccccaggaggagcagtgggcttcccccaggaaagagca

SEQ ID NO: 541138 - DNA, 120 bp, Artificial Sequence
  ENSG00000167291_72 (sequence is synthesized)
gagccagcactgcctgcctagggagggcacccactaccaggcatggctggtggctccgtttaaagaaatctttgtccatgtgggagtgggaggtgcttccccatcctgcctggaagccac

SEQ ID NO: 541139 - DNA, 120 bp, Artificial Sequence
  ENSG00000167291_73 (sequence is synthesized)
gtcctggctcttaccgtggactctgcaacagccgtggtggccacatgaagatggaggaacctggtggctcaggggcccctgatgtcaccgcctccaaggcaacgggactgggcagggcag

SEQ ID NO: 541140 - DNA, 120 bp, Artificial Sequence
  ENSG00000167291_74 (sequence is synthesized)
ctcctcaggaaggatgatcccacctgcacgggtcagccctgcagggggacaaggcccaccacaaccccacctcaggccaccaactggacctgtcctgccaagaaggtcccttccaatttg

SEQ ID NO: 541141 - DNA, 120 bp, Artificial Sequence
  ENSG00000167291_75 (sequence is synthesized)
tccggcagctggttccctggatacagcccagacgcagcatcatcctcatgttcacctctgctgtgccctacttcccccgtaaatgacaactgtgtagtcacccacgccgggcaagagaac

SEQ ID NO: 541142 - DNA, 120 bp, Artificial Sequence
  ENSG00000167291_76 (sequence is synthesized)
ataggtgccacctggcgggccacacttttcaggggccgtgcctcgggcaggcccggctctctgttgtcccgcagccctcagggctggcggtggctgctcagtgcctagggagtgcccttg

SEQ ID NO: 541143 - DNA, 120 bp, Artificial Sequence
  ENSG00000167291_77 (sequence is synthesized)
ccacacagctgggcagcgagcatgactcagcgtttacactcaaccagccgcacaggctccagaggggaagttctctggggtccttctatgagagagcatcctgtctgcagccctgttctg

SEQ ID NO: 541144 - DNA, 120 bp, Artificial Sequence
  ENSG00000167291_78 (sequence is synthesized)
gctccttccacatcattcatgcattcatcccacgaggactatggtaccgtgggctcgctctagggaagcaaggcaggagcgcactggggctacttggattcccggggcagacacatatgt

SEQ ID NO: 541145 - DNA, 120 bp, Artificial Sequence
  ENSG00000167291_79 (sequence is synthesized)
accctgcacaccctcaaatgagcaaagccaccccactggcccctgggtgaggccatgtggacccccacacctttggggccggctgggcaaaccttgaacccccaatttctgcgtggcctt

SEQ ID NO: 541146 - DNA, 120 bp, Artificial Sequence
  ENSG00000167291_80 (sequence is synthesized)
tggctgccctccttctccaaggcgtgactcttactccagagactcaggcgagcacgtgtcccttaccttattttctctcaatcaaactgaaacccattgtgatcccccatagtccagtgc

SEQ ID NO: 541147 - DNA, 120 bp, Artificial Sequence
  ENSG00000167291_81 (sequence is synthesized)
ggtctctgttattattacgggtgtctcccttcctccccgtgcccaggacaggccatgagccagagatacaaggggccccaggcaagatgcagggctctctgctcctggctctttatcgtc

SEQ ID NO: 541148 - DNA, 120 bp, Artificial Sequence
  ENSG00000167291_82 (sequence is synthesized)
gtcgggacaccctttgtccaaactcaaggaatcccgggaggtctggctttgccgctttggctgggactcaggtacctgggcatacctgcatctgtgccccctcttcgtcccagtgagacg

SEQ ID NO: 541149 - DNA, 120 bp, Artificial Sequence
  ENSG00000167291_83 (sequence is synthesized)
gaccctcagtatcccccccaacatagaacaggaaggtctcaagccagccccctcctccagttcaatcaccctccctcacatccacccagagaagtccagacctgtggccacttccatgcc

SEQ ID NO: 541150 - DNA, 120 bp, Artificial Sequence
  ENSG00000167291_84 (sequence is synthesized)
ctctccagaccaggagacacctgctgctgacctcgtggaaaacttagattttgacattctgatgcttcggaagtggtggctcctcctccttcacccctccgccacctgtgggcctcctct

SEQ ID NO: 541151 - DNA, 120 bp, Artificial Sequence
  ENSG00000167291_85 (sequence is synthesized)
ctgcatctcaagagaacaaccagatctttgggctcctggggtgtgtgccatgcaatttagacgaagtgctttgaaaatatgccattcagtctctgactaggaaaataagtctgacctgat

SEQ ID NO: 541152 - DNA, 120 bp, Artificial Sequence
  ENSG00000167291_86 (sequence is synthesized)
aggtccgatgtcatcagctcttcaacatgagacaaaagaggggattttatgttttgagtcattagaatgatataataattttctgaattgacatctggatgttgaaattaggatggtgca

SEQ ID NO: 541153 - DNA, 120 bp, Artificial Sequence
  ENSG00000167291_87 (sequence is synthesized)
aaaggggtccagggcctcaggctgggcgcagcagccagctcccaatgacgcagaagctgcttcaaaaccccctcaacaaagaggggcacatgcaagtcaccaaagtgggaagccttcacc

SEQ ID NO: 541154 - DNA, 120 bp, Artificial Sequence
  ENSG00000167291_88 (sequence is synthesized)
aaggccacacccaaagtctactgattgtctgtccaaagttcgttgattcctggccatgaacaagcacaatagaaaaagacacagggtcctagtggctacaagtcaatgtgaattggcaca

SEQ ID NO: 541155 - DNA, 120 bp, Artificial Sequence
  ENSG00000167291_89 (sequence is synthesized)
tggtctagcagttttaaaatctgacagtagagtatggcaatgggcaagggccaagaagtcctgagatgggaggtcagcgctctaactgggctcagtggaggtctgtgaccagtgtctgga

SEQ ID NO: 541156 - DNA, 120 bp, Artificial Sequence
  ENSG00000167291_90 (sequence is synthesized)
cactagctacaggggaccgggcagaggattctgggcagaaggaaaatgtctaaaagtactttgggagggtaaaggacaggggccttatttaaaataaagactgaaggataataagtgtca

SEQ ID NO: 541157 - DNA, 120 bp, Artificial Sequence
  ENSG00000167291_91 (sequence is synthesized)
attcattccgtttttgcggctggggttggagagagtggggggcggcggcacagtgggccggggaggagagagccgcagagggaaaccgattttaagatgaagcaggtcgcccccgataag

SEQ ID NO: 541158 - DNA, 120 bp, Artificial Sequence
  ENSG00000167291_92 (sequence is synthesized)
tgatgaaagcgagtctgaagccaccgagtgccggtaccacacgccgcctttgcatgcggtcatcggctcgcccctggcccgggtctaggtttccctcctggctcagcctgctggacgtgg

SEQ ID NO: 541159 - DNA, 120 bp, Artificial Sequence
  ENSG00000167291_93 (sequence is synthesized)
acgtgcagggtggacgatctgcattaacgaagggaagcacggcatggacggtctgagaggcttcattcccaccactcccgaattaaaaaaaatcgtgcctcattgcacgttttcccagtg

SEQ ID NO: 541160 - DNA, 120 bp, Artificial Sequence
  ENSG00000167302_0 (sequence is synthesized)
agtgattggagggcccgggcctggcggaagcggggcagaccgggaggggacctggatcatggctgccgcgccgccgctacgggaccgcctgagctttctacaccggctcccgattctcct

SEQ ID NO: 541161 - DNA, 120 bp, Artificial Sequence
  ENSG00000167302_1 (sequence is synthesized)
gaaggggacgtccgatgatgatgtcccgtgtccgggctacctgtttgaagagattgctaaaatctcccacgagtctccgggcagcagccagtgcctgctggagtacctcctgagccgcct

SEQ ID NO: 541162 - DNA, 120 bp, Artificial Sequence
  ENSG00000167302_2 (sequence is synthesized)
gcacagcagctccggccacgggaagctcaaggtgctgaagatcctgctctatctgtgcagccacggctcctccttcttcctgctcatcctcaaacgcaactctgccttcatccaggaagc

SEQ ID NO: 541163 - DNA, 120 bp, Artificial Sequence
  ENSG00000167302_3 (sequence is synthesized)
tgcagcttttgcagggcccccagatcctctgcacgggaacagcttgtaccagaaggttcgcgcggccgcgcaggacttggggagcaccctgttctcggacaccgtgttgccgctggctcc

SEQ ID NO: 541164 - DNA, 120 bp, Artificial Sequence
  ENSG00000167302_4 (sequence is synthesized)
ctcccagcctctggggaccccgcctgccacaggcatgggctcccaggccaggccgcacagcaccctccagggtttcggctacagcaaggaacacggccgcacggctgtgaggcatcagcc

SEQ ID NO: 541165 - DNA, 120 bp, Artificial Sequence
  ENSG00000167302_5 (sequence is synthesized)
tgggcaggccggagggggctgggatgagctggacagcggccccagctctcagaattcctcccagaacagcgacctgagcagggtctcggactcgggcagtcattccggcagcgacagcca

SEQ ID NO: 541166 - DNA, 120 bp, Artificial Sequence
  ENSG00000167302_6 (sequence is synthesized)
ttcaggggccagccgggagccgggtgacctggcagaaagggtcgaggtggtggccctgagtgactgtcagcaggagttgagcttggtgaggactgtgactcggggaccacgcgccttcct

SEQ ID NO: 541167 - DNA, 120 bp, Artificial Sequence
  ENSG00000167302_7 (sequence is synthesized)
gagccgcgaggaggcacagcacttcatcaaagcgtgtggactgctcaactgtgaggccgtgctgcagctgctgacctgccacctgcgtgggaccagtgaatgcacgcagctgagggcgct

SEQ ID NO: 541168 - DNA, 120 bp, Artificial Sequence
  ENSG00000167302_8 (sequence is synthesized)
gtgtgccatcgcctccctggggagcagcgacctcctcccccaggagcacatcctcctccgcacccggccgtggctgcaggagctcagcatgggcagcccgggacctgtgaccaacaaggc

SEQ ID NO: 541169 - DNA, 120 bp, Artificial Sequence
  ENSG00000167302_9 (sequence is synthesized)
atcctgaggcactttgaggcctcctgtgggcagctgtcccctgcccggggcacctcagctgagcctggccccacagccgccctcccaggcccatctgacctgctgaccgacgctgtgcct

SEQ ID NO: 541170 - DNA, 120 bp, Artificial Sequence
  ENSG00000167302_10 (sequence is synthesized)
ctccctgggagccaggtcttcctgcagcctctgagttcaaccccggtctcgtcccggagccctgctccctcatctgggatgccgtccagccctgtgcccaccccacccccagatgcctcc

SEQ ID NO: 541171 - DNA, 120 bp, Artificial Sequence
  ENSG00000167302_11 (sequence is synthesized)
cccattccagcccccggagaccccagcgaggccgaggccagactggcagaaagcaggcggtggagacctgaacggatcccagggggcacggacagcccaaagagaggccccagcagctgt

SEQ ID NO: 541172 - DNA, 120 bp, Artificial Sequence
  ENSG00000167302_12 (sequence is synthesized)
gcgtggagccgcgactccttgtttgctggcatggagctggtggcctgtccccgcctggtgggggctggggctgctgcgggagagtcctgtcctgatgctccccgcgccccccaaacatcg

SEQ ID NO: 541173 - DNA, 120 bp, Artificial Sequence
  ENSG00000167302_13 (sequence is synthesized)
tcccagaggacagcagccaaagagcctcctggctcagagccgtcagctttcgcgttcctgaacgcctgacccgatggcctggccctggagtcttcagcttcagctgctgtctggggcggt

SEQ ID NO: 541174 - DNA, 120 bp, Artificial Sequence
  ENSG00000167302_14 (sequence is synthesized)
ctgtgcttcctgagcagcctcaaccgtagctgctacagtctccaggcagcttgacttgagaggacgaccctagggctacctcagtttcccccatctcctctgccagaggctctggctatt

SEQ ID NO: 541175 - DNA, 120 bp, Artificial Sequence
  ENSG00000167302_15 (sequence is synthesized)
tggacttgaatccctacgagggatggcaggtggcagggcttcagaaatgtcgatctcagggctctcagggggcagtccctgcctgtcttgctctcagacatgaggtttcttgtatgaatg

SEQ ID NO: 541176 - DNA, 120 bp, Artificial Sequence
  ENSG00000167302_16 (sequence is synthesized)
cggaagcgactaccaggttccttatttcattttgatctcagctccctccttccccaggaggtcatgagcagcaacaagccactgctcccccgtcccatcggggtgggctaggtgctgagg

SEQ ID NO: 541177 - DNA, 120 bp, Artificial Sequence
  ENSG00000167302_17 (sequence is synthesized)
ctgggtttggtgcatgtgggttgagggtgtcttgtccgggctgccttgtgctgtctggcctgaggccatttcaagtctcagatccctacgtgatccttccctggctctcacctgctcctt

SEQ ID NO: 541178 - DNA, 120 bp, Artificial Sequence
  ENSG00000167302_18 (sequence is synthesized)
taggctgtaattgcttcctacacacgaagcctctgattggagcctctggtccatctcagaaaaaccttccaagagcgctggggtttatgctttctgaataaacactactgtttacatgaa

SEQ ID NO: 541179 - DNA, 120 bp, Artificial Sequence
  ENSG00000167302_19 (sequence is synthesized)
cccgagagtcccagtacccggaggctcctgccgcggggtgacacctaccagcctgccatgatgccttcagccagccacggtcccccaaccctggggaacctactccccggggccattcca

SEQ ID NO: 541180 - DNA, 120 bp, Artificial Sequence
  ENSG00000167302_20 (sequence is synthesized)
ccctgagtgactgtcagcaggagttgagcttggtgaggactgtgactcggggaccacgcgccttcctgagccgcgaggaggcacagcacttcatcaaagcgtgtcccctctgtgcaggtg

SEQ ID NO: 541181 - DNA, 120 bp, Artificial Sequence
  ENSG00000167302_21 (sequence is synthesized)
agattgctagtatccttccttgatgtccccgtgtagtggaaagagcggatggcagggtcccagagtggtgcaaagggttcctggggattctgctgtccctagggggatgcacggctcctt

SEQ ID NO: 541182 - DNA, 120 bp, Artificial Sequence
  ENSG00000167302_22 (sequence is synthesized)
tattattgtaaccaggcatgggtggggtctgaaggctgcaatactgatgacacaggggaccctagaagcccaggtgctcctgatggcagagcctccagtaggcgcctccagggagcgtga

SEQ ID NO: 541183 - DNA, 120 bp, Artificial Sequence
  ENSG00000167302_23 (sequence is synthesized)
actgagaggccccatggcctggtctccctgcggcctggcgcagccctcatcatctcgcccttccctaacccgagcgtgccgcagaaatctcccacgagtctccgggcagcagccagtgcc

SEQ ID NO: 541184 - DNA, 120 bp, Artificial Sequence
  ENSG00000167302_24 (sequence is synthesized)
cctcagagggggctgggtggtcccagggcgcgaccttgggctgccagaagccacgctagggttggtcaaggctctcagtgcaaggtttcgacatagtcgttctgtgctgcgttctgcagt

SEQ ID NO: 541185 - DNA, 120 bp, Artificial Sequence
  ENSG00000167302_25 (sequence is synthesized)
tgtcagctgtcacctgcaaacctcagcagctccccttagggcgtggtgggcaaacagtgtcagtgatgcgtgtccacagcctcgggaaacacttcaggtccacgttttcgtatgttgtca

SEQ ID NO: 541186 - DNA, 120 bp, Artificial Sequence
  ENSG00000167302_26 (sequence is synthesized)
ctagatctcggcccttccgaccgaaaggcttcggcacctcacgcggtgggtcccatgcttgtcctgttaaatactcttgaactctattctgtcctgatactgaataatgcaagaatgggt

SEQ ID NO: 541187 - DNA, 120 bp, Artificial Sequence
  ENSG00000167302_27 (sequence is synthesized)
ggttccagttttcatccctataaaccgtacatctttgtgccagtaagtaagcatgaaacaaataagtacgtctgcgctaagcgaacgtaaaacacacgacatcagtcggttctcggggag

SEQ ID NO: 541188 - DNA, 120 bp, Artificial Sequence
  ENSG00000167302_28 (sequence is synthesized)
cgatggagctagtcacgctgagcggctgtcactctgccattccggcctctggggaggtggaacgattcatagtcccctgtgtggaaaaggggcttgcctgggccttgtttggctttgcta

SEQ ID NO: 541189 - DNA, 120 bp, Artificial Sequence
  ENSG00000167302_29 (sequence is synthesized)
gtcagtaggtaggtacaggagaggtaccttcaaatagccttacatgctggtaagtgcagggaggctgggggctgtgtcccttcttaacccaagtggcgcagctcctccgtggagaaccac

SEQ ID NO: 541190 - DNA, 120 bp, Artificial Sequence
  ENSG00000167302_30 (sequence is synthesized)
cattgatttgcctcttctccgaggctgttcatccctgactgttgagagaggaccctgctgcagcctccctgtggccagtagcacagttctcatcccttcccagtcctctctccggccatg

SEQ ID NO: 541191 - DNA, 120 bp, Artificial Sequence
  ENSG00000167302_31 (sequence is synthesized)
ggaccgcctgagctttctacaccggctgctcctggccccttcgcccgcgccgacgcccctgagctgcccgcccgccgcgccgtcccggggccttccaagccgggccttccaagccggacc

SEQ ID NO: 541192 - DNA, 120 bp, Artificial Sequence
  ENSG00000167302_32 (sequence is synthesized)
cgccgagcgcaagggcgatgggcacagccagaccctgggggaacgaacaggcctcggccagcattcagtggcctccgacgggagggaaggagcggcggacccggtggacgtggagccgct

SEQ ID NO: 541193 - DNA, 120 bp, Artificial Sequence
  ENSG00000167302_33 (sequence is synthesized)
acccctgggttgcagagaacacagacgtctcgaagggacagagaaggacgcaccattgctgttcatccctgactgttgagagaggaccctgctgcagcctccctgtggccagtagcacag

SEQ ID NO: 541194 - DNA, 120 bp, Artificial Sequence
  ENSG00000167302_34 (sequence is synthesized)
ttctcatcccttcccagtcctctctccggccatgtcaacagtgagagctcccgattctcctgaaggggacgtccgatgatgatgtcccgtgtccgggctacctgtttgaagagattgcta

SEQ ID NO: 541195 - DNA, 120 bp, Artificial Sequence
  ENSG00000167302_35 (sequence is synthesized)
ctggatcatggctgccgcgccgccgctacgggaccgcctgagctttctacaccgggtgagtgagggcggtccgcccgggccccggtcccacggctcctctcgagcgccgcattccccgga

SEQ ID NO: 541196 - DNA, 120 bp, Artificial Sequence
  ENSG00000167302_36 (sequence is synthesized)
cacccctgggttgcagagaacacagacgtctcgaagggacagagaaggacgcaccattgtaagcccctcttagtaaaccctctgagaagtagaggccggggcgagttcccaggtgtcgtc

SEQ ID NO: 541197 - DNA, 120 bp, Artificial Sequence
  ENSG00000167302_37 (sequence is synthesized)
gtggcaggcagctctgtgcccttggggtgcccccgggccctgccctgggtgtcccgtgtccggcctgcccagcactgctgaccgccccactccccaggtgctgaagatcctgctctatct

SEQ ID NO: 541198 - DNA, 120 bp, Artificial Sequence
  ENSG00000167302_38 (sequence is synthesized)
gtgcagccacggctcctccttcttcctgctcatcctcaaacgcaactctgccttcatccaggaagctgcaggtacaggggccgcgcacgcgctcaggaagagccagggctttggagaatg

SEQ ID NO: 541199 - DNA, 120 bp, Artificial Sequence
  ENSG00000167302_39 (sequence is synthesized)
ggagctgagggtctgctcaggtgtggcctctgcagggtcctggaggagggcatcccattggctgtgacagaagggccttggtggcaggaacttgccaccctggagtgggcccagggcacc

SEQ ID NO: 541200 - DNA, 120 bp, Artificial Sequence
  ENSG00000167306_0 (sequence is synthesized)
gcgcacgggccgtccgctctgacgcgagcgggtcctccctcctcgccggccctcgcctcctccccacacctgggaggggagtggtgcggcgcggcctcctcccccggcgctcgcaactcc

SEQ ID NO: 541201 - DNA, 120 bp, Artificial Sequence
  ENSG00000167306_1 (sequence is synthesized)
gctcgcaactcctgtccggccgtagctgcgccgccgcggcgggagtaaaggtcgcgccgccgggagcgagccggccgcggcgcctgcgggaagccggcggggcaggtcggagaagagcga

SEQ ID NO: 541202 - DNA, 120 bp, Artificial Sequence
  ENSG00000167306_2 (sequence is synthesized)
gaagatcgagaaactccaggccagcccgggaacatggcgccaggcgggccagccgcggactgagagccgcggggcagccaggagccggggcccgagccccgcccggcccgggccatgtcg

SEQ ID NO: 541203 - DNA, 120 bp, Artificial Sequence
  ENSG00000167306_3 (sequence is synthesized)
gtgggcgagctctacagccagtgcacaagggtctggatccctgaccctgatgaggtatggcgctcagctgagttaaccaaggactacaaagaaggagacaagagcctacagctcagactg

SEQ ID NO: 541204 - DNA, 120 bp, Artificial Sequence
  ENSG00000167306_4 (sequence is synthesized)
gaggatgaaacgattctggaatacccaattgatgtacaacgcaaccagctgcccttcttacggaatccagatatcttggtgggagaaaatgacctgactgcccttagctatcttcatgag

SEQ ID NO: 541205 - DNA, 120 bp, Artificial Sequence
  ENSG00000167306_5 (sequence is synthesized)
cctgcagttttgcataatttgaaggtccgtttcctggagtccaaccatatctacacttactgtggtatcgtacttgttgccattaatccttatgaacagttgccaatctatggacaagat

SEQ ID NO: 541206 - DNA, 120 bp, Artificial Sequence
  ENSG00000167306_6 (sequence is synthesized)
gtcatctatacctacagtggccaaaacatgggagacatggacccccacatctttgctgtggcagaagaagcctacaagcagatggccagagatgagaagaatcagtccatcatagtcagt

SEQ ID NO: 541207 - DNA, 120 bp, Artificial Sequence
  ENSG00000167306_7 (sequence is synthesized)
ggggagtctggagccgggaagacggtatcagccaagtatgccatgcgctatttcgccaccgttggtggctcggccagtgaaaccaacatcgaagagaaggtgctggcatccagtcccatc

SEQ ID NO: 541208 - DNA, 120 bp, Artificial Sequence
  ENSG00000167306_8 (sequence is synthesized)
atggaggccattggaaatgccaagaccacccgcaatgacaacagcagccgttttggcaagtacatccagattggctttgacaaaaggtaccacatcatcggggccaacatgaggacttac

SEQ ID NO: 541209 - DNA, 120 bp, Artificial Sequence
  ENSG00000167306_9 (sequence is synthesized)
ctcttggagaagtccagagtggtcttccaggcagatgatgagaggaattaccacatcttttaccagctctgtgctgctgccggtcttccagaatttaaagagcttgcactaacaagtgca

SEQ ID NO: 541210 - DNA, 120 bp, Artificial Sequence
  ENSG00000167306_10 (sequence is synthesized)
gaggactttttctatacatcacagggaggagacacttccatcgagggtgtggacgatgctgaggactttgagaagactcgacaagccttcacactcctcggagtgaaagagtcccatcag

SEQ ID NO: 541211 - DNA, 120 bp, Artificial Sequence
  ENSG00000167306_11 (sequence is synthesized)
atgagcatttttaagataattgcttctatcttgcaccttggaagtgtggcgattcaggctgagcgtgatggtgattcctgtagtatatcaccccaggatgtatacctaagcaacttctgc

SEQ ID NO: 541212 - DNA, 120 bp, Artificial Sequence
  ENSG00000167306_12 (sequence is synthesized)
cgactgctaggggtggagcacagtcagatggagcactggctgtgtcatcgcaagctggtcaccacctcggagacctacgtcaagaccatgtccctgcagcaggtgatcaatgcgcgcaac

SEQ ID NO: 541213 - DNA, 120 bp, Artificial Sequence
  ENSG00000167306_13 (sequence is synthesized)
gccctggcgaagcacatctatgcccagttgttcggctggattgtggagcacatcaacaaggccctgcacacctccctcaagcagcactccttcatcggggtcctggacatctatgggttt

SEQ ID NO: 541214 - DNA, 120 bp, Artificial Sequence
  ENSG00000167306_14 (sequence is synthesized)
gagacatttgaggtaaacagctttgagcagttctgtatcaactatgcaaatgaaaagctccagcagcagttcaactcgcatgttttcaaactggagcaagaagaatacatgaaggaacag

SEQ ID NO: 541215 - DNA, 120 bp, Artificial Sequence
  ENSG00000167306_15 (sequence is synthesized)
atcccttggaccctgattgatttttatgataaccaaccttgtatcgacctcattgaagccaagctgggtatcttggacctgttggatgaagaatgtaaggtccccaaaggaactgaccag

SEQ ID NO: 541216 - DNA, 120 bp, Artificial Sequence
  ENSG00000167306_16 (sequence is synthesized)
aactgggctcagaagctctatgaccggcactccagcagccagcacttccagaagccccgcatgtccaacacggccttcatcatcgtccactttgcagacaaggtggagtacctctctgat

SEQ ID NO: 541217 - DNA, 120 bp, Artificial Sequence
  ENSG00000167306_17 (sequence is synthesized)
ggttttctggagaaaaacagagacacggtgtatgaagagcagatcaatatcctgaaggccagcaagttcccactagtggctgacttgtttcatgatgacaaggaccctgttcctgccacc

SEQ ID NO: 541218 - DNA, 120 bp, Artificial Sequence
  ENSG00000167306_18 (sequence is synthesized)
acccctgggaaggggtcatcttcgaagatcagcgtccgttctgccagaccccccatgaaagtctccaacaaggagcacaagaaaaccgttggccaccagttccgtacctccctgcatctg

SEQ ID NO: 541219 - DNA, 120 bp, Artificial Sequence
  ENSG00000167306_19 (sequence is synthesized)
ctcatggagaccctgaatgccacgacacctcactatgtccgctgcatcaagcccaacgatgagaagctcccctttcactttgacccaaagagagcagtgcagcaactcagagcctgcggg

SEQ ID NO: 541220 - DNA, 120 bp, Artificial Sequence
  ENSG00000167306_20 (sequence is synthesized)
gtgttggagacgattcgaatcagtgcagctggctacccatccaggtgggcctaccatgactttttcaaccggtatcgggtgctggtcaagaagagagagctcgccaacacagacaaaaag

SEQ ID NO: 541221 - DNA, 120 bp, Artificial Sequence
  ENSG00000167306_21 (sequence is synthesized)
gccatctgcaggtctgtcctggagaacctcatcaaggaccccgacaagttccagtttggccgcaccaagatcttctttcgagcaggccaggtggcctacctggagaagctgcgggctgac

SEQ ID NO: 541222 - DNA, 120 bp, Artificial Sequence
  ENSG00000167306_22 (sequence is synthesized)
aagttccggacagccaccatcatgatccagaaaactgtccggggatggctgcagaaggtgaaatatcacaggctgaagggggctaccttaaccctgcagaggtactgccggggacacctg

SEQ ID NO: 541223 - DNA, 120 bp, Artificial Sequence
  ENSG00000167306_23 (sequence is synthesized)
gcccgcaggctggctgagcacctgcggaggatcagagcggctgtggtgctccagaaacattaccgcatgcagagggcccgccaggcctaccagagggtccgcagagctgccgttgttatc

SEQ ID NO: 541224 - DNA, 120 bp, Artificial Sequence
  ENSG00000167306_24 (sequence is synthesized)
caggccttcacccgggccatgtttgtgcggagaacctaccgccaggtcctcatggagcacaaggccaccaccatccagaagcacgtgcggggctggatggcacgcaggcacttccagcgg

SEQ ID NO: 541225 - DNA, 120 bp, Artificial Sequence
  ENSG00000167306_25 (sequence is synthesized)
ctgcgggatgcagccattgtcatccagtgtgccttccggatgctcaaggccaggcgggagctgaaggccctcaggattgaggcccgctcagcagagcatctgaaacgtctcaacgtgggc

SEQ ID NO: 541226 - DNA, 120 bp, Artificial Sequence
  ENSG00000167306_26 (sequence is synthesized)
atggagaacaaggtggtccagctgcagcggaagatcgatgagcagaacaaagagttcaagacactttcagagcagttgtccgtgaccacctcaacatacaccatggaggtagagcggctg

SEQ ID NO: 541227 - DNA, 120 bp, Artificial Sequence
  ENSG00000167306_27 (sequence is synthesized)
aagaaggagctggtgcactaccagcagagcccaggtgaggacaccagcctcaggctgcaggaggaggtggagagcctgcgcacagagctgcagagggcccactcggagcgcaagatcttg

SEQ ID NO: 541228 - DNA, 120 bp, Artificial Sequence
  ENSG00000167306_28 (sequence is synthesized)
gaggacgcccacagcagggagaaagatgagctgaggaagcgagttgcagacctggagcaagaaaatgctctcttgaaagatgagaaagaacagctcaacaaccaaatcctgtgccagtct

SEQ ID NO: 541229 - DNA, 120 bp, Artificial Sequence
  ENSG00000167306_29 (sequence is synthesized)
aaagatgaatttgcccagaactctgtgaaggaaaatctcatgaagaaagaactggaggaggagcgatcccggtaccagaaccttgtgaaggaatattcacagttggagcagagatacgac

SEQ ID NO: 541230 - DNA, 120 bp, Artificial Sequence
  ENSG00000167306_30 (sequence is synthesized)
aaccttcgggatgaaatgaccatcataaagcaaactccaggtcataggcggaacccatcaaaccaaagtagcttagaatctgactccaattacccctccatctccacatctgagatcgga

SEQ ID NO: 541231 - DNA, 120 bp, Artificial Sequence
  ENSG00000167306_31 (sequence is synthesized)
gacactgaggatgccctccagcaggtggaggaaattggcctggagaaggcagccatggacatgacggtcttcctgaagctgcagaagagagtacgggagctggagcaggagaggaaaaag

SEQ ID NO: 541232 - DNA, 120 bp, Artificial Sequence
  ENSG00000167306_32 (sequence is synthesized)
ctgcaagtgcagctggagaagagagaacagcaggacagcaagaaagtccaggcggaaccaccacagactgacatagatttggacccgaatgcagatctggcctacaatagtctgaagagg

SEQ ID NO: 541233 - DNA, 120 bp, Artificial Sequence
  ENSG00000167306_33 (sequence is synthesized)
caagagctggagtcagagaacaaaaagctgaagaatgacctgaatgagctgaggaaagccgtggccgaccaagccacgcagaataactccagccacggctccccagatagctacagcctc

SEQ ID NO: 541234 - DNA, 120 bp, Artificial Sequence
  ENSG00000167306_34 (sequence is synthesized)
ctgctgaaccagctcaagctggcccacgaggagctcgaggtgcgcaaggaggaggtgctcatcctcaggacccagatcgtgagcgccgaccagcggcgactcgccggcaggaacgcggag

SEQ ID NO: 541235 - DNA, 120 bp, Artificial Sequence
  ENSG00000167306_35 (sequence is synthesized)
ccgaacattaatgccagatcaagttggcctaacagtgaaaagcatgttgaccaggaggatgccattgaggcctatcacggggtctgccagacaaacagcaagactgaggattggggatat

SEQ ID NO: 541236 - DNA, 120 bp, Artificial Sequence
  ENSG00000167306_36 (sequence is synthesized)
ttaaatgaagatggagaactcggcttggcctaccaaggcctaaagcaagttgccaggctgctggaggctcagctgcaggcccagagcctggagcatgaggaggaggtggagcatctcaag

SEQ ID NO: 541237 - DNA, 120 bp, Artificial Sequence
  ENSG00000167306_37 (sequence is synthesized)
gctcagctcgaggccctgaaggaggagatggacaaacagcagcagaccttctgccagacgctactgctctccccagaggcccaggtggaattcggcgttcagcaggaaatatcccggctg

SEQ ID NO: 541238 - DNA, 120 bp, Artificial Sequence
  ENSG00000167306_38 (sequence is synthesized)
accaacgagaatctggaccttaaagaactggtagaaaagctggaaaagaatgagaggaagctcaaaaagcaactgaagatttacatgaagaaagcccaggacctagaagctgcccaggca

SEQ ID NO: 541239 - DNA, 120 bp, Artificial Sequence
  ENSG00000167306_39 (sequence is synthesized)
aggccctcctcatccggaacctggtgacagacttgaagccccagatgctgtcgggcacagtgccctgtctccccgcctacatcctctacatgtgcatccggcacgcggactacaccaacg

SEQ ID NO: 541240 - DNA, 120 bp, Artificial Sequence
  ENSG00000167306_40 (sequence is synthesized)
acgatctcaaggtgcactccctgctgacctccaccatcaacggcattaagaaagtcctgaaaaagcacaatgatgactttgagatgacgtcattctggttatccaacacctgccgccttc

SEQ ID NO: 541241 - DNA, 120 bp, Artificial Sequence
  ENSG00000167306_41 (sequence is synthesized)
ttcactgtctgaagcagtacagcggggatgagggcttcatgactcagaacactgcaaagcagaatgaacactgtcttaagaattttgacctcaccgaataccgtcaggtgctgagtgacc

SEQ ID NO: 541242 - DNA, 120 bp, Artificial Sequence
  ENSG00000167306_42 (sequence is synthesized)
tttccattcagatctaccagcagctcattaaaattgccgagggcgtgttacagccgatgatagtttctgccatgttggaaaatgagagcattcagggtctatctggtgtgaagcccaccg

SEQ ID NO: 541243 - DNA, 120 bp, Artificial Sequence
  ENSG00000167306_43 (sequence is synthesized)
gctaccggaagcgctcctccagcatggcagatggggataactcatactgcctggaagctatcatccgccagatgaatgcctttcatacagtcatgtgtgaccagggcttggaccctgaga

SEQ ID NO: 541244 - DNA, 120 bp, Artificial Sequence
  ENSG00000167306_44 (sequence is synthesized)
tcatcctgcaggtattcaaacagctcttctacatgatcaacgcagtgactcttaacaacctgctcttgcggaaggacgtctgctcttggagcacaggcatgcaactcaggtacaatataa

SEQ ID NO: 541245 - DNA, 120 bp, Artificial Sequence
  ENSG00000167306_45 (sequence is synthesized)
gtcagcttgaggagtggcttcggggaagaaaccttcaccagagtggagcagttcagaccatggaacctctgatccaagcagcccagctcctgcaattaaagaagaaaacccaggaggacg

SEQ ID NO: 541246 - DNA, 120 bp, Artificial Sequence
  ENSG00000167306_46 (sequence is synthesized)
cagaggctatctgctccctgtgtacctccctcagcacccagcagattgtcaaaattttaaacctttatactcccctgaatgaatttgaagaacgggtaacagtggcctttatacgaacaa

SEQ ID NO: 541247 - DNA, 120 bp, Artificial Sequence
  ENSG00000167306_47 (sequence is synthesized)
tccaggcacaactacaagagcggaatgaccctcagcaactgctattagatgccaagcacatgtttcctgttttgtttccatttaatccatcttctctaaccatggactcaatccacatcc

SEQ ID NO: 541248 - DNA, 120 bp, Artificial Sequence
  ENSG00000167306_48 (sequence is synthesized)
cagcgtgtctcaatctggaattcctcaatgaagtctgaagatgcatgtttccagcattagtttgattcccaatgtgagcaagaaggaagtatatacagtaaagtaaattcaaggatctgt

SEQ ID NO: 541249 - DNA, 120 bp, Artificial Sequence
  ENSG00000167306_49 (sequence is synthesized)
taaatctggtaaaagtagatcaaatcagagattgacagcctgtggagggtgctgaactatacagaattagacacaactatgtcattattttttgtacctactgctcagaataaaaacact

SEQ ID NO: 541250 - DNA, 120 bp, Artificial Sequence
  ENSG00000167306_50 (sequence is synthesized)
tgaaatatggaagattttaagtttgatttcagtccaacacatatacataatttatagacaccaagcagtccccatagacatataaaaggtgtcaattctataaaacgaagctgcctagtt

SEQ ID NO: 541251 - DNA, 120 bp, Artificial Sequence
  ENSG00000167306_51 (sequence is synthesized)
ttgatctttgcatagaactagagaatgtccaaattaaaataccaaatatatataagtcacataaattgccttcaaagggctttaacaaataatggtactaataaccatgataatggcata

SEQ ID NO: 541252 - DNA, 120 bp, Artificial Sequence
  ENSG00000167306_52 (sequence is synthesized)
tactgacatttcccaaagtttgcaaaccataggtgtggttgagtttgtggtgagatgttttaagaacaaaaatatggggatgagacttctgagaaatattcccaaaatattttttaatgg

SEQ ID NO: 541253 - DNA, 120 bp, Artificial Sequence
  ENSG00000167306_53 (sequence is synthesized)
ctgattatacacagacagtggtgtaactgacctccagaccagacattttgagtactggtttctgaagcaaaattagaagtgccagtcctcagtgtgctcaaacgcttttgtgttatcttg

SEQ ID NO: 541254 - DNA, 120 bp, Artificial Sequence
  ENSG00000167306_54 (sequence is synthesized)
atttaatggaagagattattaaaatgctgctatcccaaactccaagtgagaaagatggaaaaatattttgtttctgatgctagtccatacactttccaagtcccacaaaactttcacaaa

SEQ ID NO: 541255 - DNA, 120 bp, Artificial Sequence
  ENSG00000167306_55 (sequence is synthesized)
aatgtatataagctaaatattagaaacggataacaaacttgttttatttatagatgtaaaaaccaaacaagtcaatatgaaagcttttaatctcttaataccattaagcttccagtaaga

SEQ ID NO: 541256 - DNA, 120 bp, Artificial Sequence
  ENSG00000167306_56 (sequence is synthesized)
gcatcacataatgctctactgttccagaaaccaaatagtaaaacaaactaaagttcgcacatcagatcatctgaaaaaccttcaaaaataatcagttcagggatattatacaaaagtttg

SEQ ID NO: 541257 - DNA, 120 bp, Artificial Sequence
  ENSG00000167306_57 (sequence is synthesized)
ggttttttttttttaagagaataaaatggcttaggtcaactttcccttttcaggttattttcaacgtttttcaaatttagcacacaaaaaattgtaaatatctctcccacaaaataagga

SEQ ID NO: 541258 - DNA, 120 bp, Artificial Sequence
  ENSG00000167306_58 (sequence is synthesized)
ttttaaaaaagtaattcagtaatataacaggcttagatgtttgctgctcttagaattttttttaacttgtttttggtttcttcaaaagcaagcattcaattggaaacccatattctttcc

SEQ ID NO: 541259 - DNA, 120 bp, Artificial Sequence
  ENSG00000167306_59 (sequence is synthesized)
acacttttttttactgtcttttctgtatttcttgatagcagtatgctgttcccataagaaaaaaatggtatttgcaaatcatggaagaacagcctctgtattacattgagaaaataagat

SEQ ID NO: 541260 - DNA, 120 bp, Artificial Sequence
  ENSG00000167306_60 (sequence is synthesized)
ttatccatgaattggaagtagaacagcctgccttcaccctcttttactcaaccacccaacttaaaaggctcttggaaacacagcacactccacgctaccttctgcactgtgcccttagag

SEQ ID NO: 541261 - DNA, 120 bp, Artificial Sequence
  ENSG00000167306_61 (sequence is synthesized)
cacagcttcctcagttgttctctgcatctcctggggcttaggccagtcttagcctgggttaaggctgctgacattgtgttccaatcagttgtcatgggcattatcccctctacatccaca

SEQ ID NO: 541262 - DNA, 120 bp, Artificial Sequence
  ENSG00000167306_62 (sequence is synthesized)
ttaaacatgccggcttctcttgggcatcggcagagctgtgcctttttctttcagttacagttacataatcactgacgtccatgacacttacccatggatccatgtgctgacttcatttag

SEQ ID NO: 541263 - DNA, 120 bp, Artificial Sequence
  ENSG00000167306_63 (sequence is synthesized)
aaggccaatctaaaacaactgggtttgtggctacctctttaaagttgtttgtgaaggataatttgttttttaatgcactttagtttgaaagtgagtctcttatgtaaggaccatccttaa

SEQ ID NO: 541264 - DNA, 120 bp, Artificial Sequence
  ENSG00000167306_64 (sequence is synthesized)
aagaccaaaaatgccttgttagagtgttaaggagttttgacatgcagtggttccacaaacacagtggcttactatccttatacactgtcttataccatcattctctccatctctcttggt

SEQ ID NO: 541265 - DNA, 120 bp, Artificial Sequence
  ENSG00000167306_65 (sequence is synthesized)
cactactctctgctgtcactggttaatcactaggtgccaagagcttactgaataaaagcttggcaattagaataaatggggagggaaggaccttatgaatagtccatttagcctaagaaa

SEQ ID NO: 541266 - DNA, 120 bp, Artificial Sequence
  ENSG00000167306_66 (sequence is synthesized)
tggcagatttagttcttctcttccaaaagataaaggtatatcctggaattgtacttaaaacttacagatgactaacaaatatatactttatatgtagttaatatttagatctgtcttatt

SEQ ID NO: 541267 - DNA, 120 bp, Artificial Sequence
  ENSG00000167306_67 (sequence is synthesized)
taatacttggaggctagaagaagcatctttaggggaactatataatcttttgttagcattttctctgcattttaaaaaatcatttcaattcaaacatttatcagtgtcatgaaatcagta

SEQ ID NO: 541268 - DNA, 120 bp, Artificial Sequence
  ENSG00000167306_68 (sequence is synthesized)
atgactctttaacaattcaggtttgaactctgcattagatgtctctttaattttttaatatttaaaatttagttgacatttttttcaccaggtgcctttagcggttactaagataactga

SEQ ID NO: 541269 - DNA, 120 bp, Artificial Sequence
  ENSG00000167306_69 (sequence is synthesized)
catcagttgtttctctgaaataagtgttgctgtgggaataattttaatgttcaaggtgatatcatgggggagttttgtcttttaaaacattagaagcattttaaatattaagaatcaaat

SEQ ID NO: 541270 - DNA, 120 bp, Artificial Sequence
  ENSG00000167306_70 (sequence is synthesized)
atttatagatcaaaacttgtgttttaagtattatacgggacctgtttacttatagtaaatgtgaatgtacacatgagttgttgctgaagctgacaagcatattacatacatgcattttcc

SEQ ID NO: 541271 - DNA, 120 bp, Artificial Sequence
  ENSG00000167306_71 (sequence is synthesized)
ctgtgccctcatagttgcagttagagttccagtacctgtaggctcacctgggaggcagattagacccaaaggtagatgtttttcccctttccatgaagcatgtcagtgggagttgcttcc

SEQ ID NO: 541272 - DNA, 120 bp, Artificial Sequence
  ENSG00000167306_72 (sequence is synthesized)
tttgatttccctagtactaaattttaaggcttttgtaaaaacaaaacaaaactaggagcttggaacagttaaaaatcaacactgctaccatcaattcatcaaatatttacttagagcttt

SEQ ID NO: 541273 - DNA, 120 bp, Artificial Sequence
  ENSG00000167306_73 (sequence is synthesized)
catacattaagattccagtaaccaataaattagaattcatttcttctgcataaagtaaattttcatacacttgacctactaagacagcaagggtgtcctaaattgaggcatttgtataat

SEQ ID NO: 541274 - DNA, 120 bp, Artificial Sequence
  ENSG00000167306_74 (sequence is synthesized)
gcctgcataactaaatggtcactaaaatgggacagcatggggcaagaccttgtagttcttcacagaatatttgtggtcagtttctccaattaatttgctgcatgagccaaataaccataa

SEQ ID NO: 541275 - DNA, 120 bp, Artificial Sequence
  ENSG00000167306_75 (sequence is synthesized)
ttcactttttatacccactggtgccataattagagaattagagggtgtagacagaggttaatgccaatgagaaacacaggacagggttttttttattataaaggtcattagatacaaaag

SEQ ID NO: 541276 - DNA, 120 bp, Artificial Sequence
  ENSG00000167306_76 (sequence is synthesized)
attgtttttcaaaaaatttctaattctaacaaaggggatcaatcagaaatgaaactaagctactttctaaagtgacactgtatcagaataatccagatttgaatataacattttgccacc

SEQ ID NO: 541277 - DNA, 120 bp, Artificial Sequence
  ENSG00000167306_77 (sequence is synthesized)
aactgacatttagatgaaggactgcctctctgaaagagttcagatcatattcaggggtgaatccaacaccatggaagaaagactactgatgaaaatattttcccactttgcacaaatctg

SEQ ID NO: 541278 - DNA, 120 bp, Artificial Sequence
  ENSG00000167306_78 (sequence is synthesized)
taaactacacctttgtttatagaaaaatgcttgtaatagtcactgtaatatttagctgtggataaaaatttgtggaaataaatacttttgaataaagaggtgtgccaaatctaaatgaaa

SEQ ID NO: 541279 - DNA, 120 bp, Artificial Sequence
  ENSG00000167306_79 (sequence is synthesized)
ttcattcttccaggaatgctgccagcagttgctgtgacagttggcagaagagaggctggggcatcaactgagggaattctcacctacgctgccaacttctctctccccattccctgagag

SEQ ID NO: 541280 - DNA, 120 bp, Artificial Sequence
  ENSG00000167306_80 (sequence is synthesized)
cagggtctttctctccctctctgaagactaagccagagtaatgagactcacctttgctctgcagtaggtgaggagcgtaatagattcatcaagagcctctgatgagctcgtcatgggcag

SEQ ID NO: 541281 - DNA, 120 bp, Artificial Sequence
  ENSG00000167306_81 (sequence is synthesized)
tcctgagttccagagcaggtggcaacagcctgtgaagagcagctctcctggcagcgtccctgactggcgcatttctgacggctgcccatgggccgcactggtcacctccaactgcaagca

SEQ ID NO: 541282 - DNA, 120 bp, Artificial Sequence
  ENSG00000167306_82 (sequence is synthesized)
gaagccctacattctgctgctgctgcagagtgatgatttttaacagaccagaacttacacatctaaatgagtgttgttgttcagtgaagtcaccttaggacaatgatttaaataacaccg

SEQ ID NO: 541283 - DNA, 120 bp, Artificial Sequence
  ENSG00000167306_83 (sequence is synthesized)
cgatttctcaagaagtttggaacttctcttatggttgagttcaaagccattttatgttatatgtggcccaaacaagttttattagtacaattaaatctttattgaggacttttgatggac

SEQ ID NO: 541284 - DNA, 120 bp, Artificial Sequence
  ENSG00000167311_0 (sequence is synthesized)
gtcgggttaccagcgcgggggctacagttagcctcgagaacctttgctttcagccggactccggactcctccggggacagcgcagcgcccgccagagccctcggcgctccctcccgctgg

SEQ ID NO: 541285 - DNA, 120 bp, Artificial Sequence
  ENSG00000167311_1 (sequence is synthesized)
cggcttccgcagccttcaaggatggcgctggcggctttgatgatcgccctcggcagcctcggcctccacacctggcaggcccaggctgttcccatcctgcccctgggcctggctccagac

SEQ ID NO: 541286 - DNA, 120 bp, Artificial Sequence
  ENSG00000167311_2 (sequence is synthesized)
acctttgacgatacctatgtgggttgtgcagaggagatggaggagaaggcagcccccctgctaaaggaggaaatggcccaccatgccctgctgcgggaatcctgggaggcagcccaggag

SEQ ID NO: 541287 - DNA, 120 bp, Artificial Sequence
  ENSG00000167311_3 (sequence is synthesized)
acctgggaggacaagcgtcgagggcttaccttgccccctggcttcaaagcccagaatggaatagccattatggtctacaccaactcatcgaacaccttgtactgggagttgaatcaggcc

SEQ ID NO: 541288 - DNA, 120 bp, Artificial Sequence
  ENSG00000167311_4 (sequence is synthesized)
gtgcggacgggcggaggctcccgggagctctacatgaggcactttcccttcaaggccctgcatttctacctgatccgggccctgcagctgctgcgaggcagtgggggctgcagcagggga

SEQ ID NO: 541289 - DNA, 120 bp, Artificial Sequence
  ENSG00000167311_5 (sequence is synthesized)
tgaacccaagaggctgggagactctgtccgcttgggccagtttgcctccagctccctggataaggcagtggcccacagatttggtaatgccaccctcttctctctaacaacttgctttgg

SEQ ID NO: 541290 - DNA, 120 bp, Artificial Sequence
  ENSG00000167311_6 (sequence is synthesized)
ggcccctatacaggccttctctgtctttcccaaggagcgcgaggtgctgattcccccccatgaagtctttttggttaccagattctctcaggatggagcccagagcttggtgactctctg

SEQ ID NO: 541291 - DNA, 120 bp, Artificial Sequence
  ENSG00000167311_7 (sequence is synthesized)
gagctataatcagacctgtagccattttaactgcgcctatctgggtggggagaagaggcggggctgtgtgtctgcgccaggagccctgggaacgggtgaccttcatatgacgaagaggca

SEQ ID NO: 541292 - DNA, 120 bp, Artificial Sequence
  ENSG00000167311_8 (sequence is synthesized)
cctccagcagccttgagaagcaagaacatggttccggacccagccctagcagccttctccccaaccaggatgttggcctggggaggccacagcagggctgagggaactctgctatgtgat

SEQ ID NO: 541293 - DNA, 120 bp, Artificial Sequence
  ENSG00000167311_9 (sequence is synthesized)
ggggacttcctgggacaagcaaggaaagtactgaggcagccacttgattgaacggtgttgcaatgtggagacatggagttttattgaggtagctacgtgattaaatggtattgcagtgtg

SEQ ID NO: 541294 - DNA, 120 bp, Artificial Sequence
  ENSG00000167311_10 (sequence is synthesized)
aatcctggacccgggatcccgtgcgcctggagacagggtccagatctgcctccagcccctcgaaaccaggactccagcacctctggtcccgccctcacccggacccctggccctcacgtc

SEQ ID NO: 541295 - DNA, 120 bp, Artificial Sequence
  ENSG00000167311_11 (sequence is synthesized)
tctctgcccccctggaagactctgctcttggcccctggagagttccagctctcaggggttgggccctgaaagtccaacatctgccacttaggagccctgggaacgggtgaccttcatatg

SEQ ID NO: 541296 - DNA, 120 bp, Artificial Sequence
  ENSG00000167315_0 (sequence is synthesized)
agcgtcccccacaccacagacccgcgccgccgacgacccagcagccgccatggctctgctccgaggtgtgtttgtagttgctgctaagcgaacgccctttggagcttacggaggccttct

SEQ ID NO: 541297 - DNA, 120 bp, Artificial Sequence
  ENSG00000167315_1 (sequence is synthesized)
gaaagacttcactgctactgacttgtctgaatttgctgccaaggctgccttgtctgctggcaaagtctcacctgaaacagttgacagtgtgattatgggcaatgtcctgcagagttcttc

SEQ ID NO: 541298 - DNA, 120 bp, Artificial Sequence
  ENSG00000167315_2 (sequence is synthesized)
agatgctatatatttggcaaggcatgttggtttgcgtgtgggaatcccaaaggagaccccagctctcacgattaataggctctgtggttctggttttcagtccattgtgaatggatgtca

SEQ ID NO: 541299 - DNA, 120 bp, Artificial Sequence
  ENSG00000167315_3 (sequence is synthesized)
ggaaatttgtgttaaagaagctgaagttgttttatgtggaggaaccgaaagcatgagccaagctccctactgtgtcagaaatgtgcgttttggaaccaagcttggatcagatatcaagct

SEQ ID NO: 541300 - DNA, 120 bp, Artificial Sequence
  ENSG00000167315_4 (sequence is synthesized)
ggaagattctttatgggtatcattaacagatcagcatgtccagctccccatggcaatgactgcagagaatcttgctgtaaaacacaaaataagcagagaagaatgtgacaaatatgccct

SEQ ID NO: 541301 - DNA, 120 bp, Artificial Sequence
  ENSG00000167315_5 (sequence is synthesized)
gcagtcacagcagagatggaaagctgctaatgatgctggctactttaatgatgaaatggcaccaattgaagtgaagacaaagaaaggaaaacagacaatgcaggtagacgagcatgctcg

SEQ ID NO: 541302 - DNA, 120 bp, Artificial Sequence
  ENSG00000167315_6 (sequence is synthesized)
gccccaaaccaccctggaacagttacagaaacttcctccagtattcaagaaagatggaactgttactgcagggaatgcatcgggtgtagctgatggtgctggagctgttatcatagctag

SEQ ID NO: 541303 - DNA, 120 bp, Artificial Sequence
  ENSG00000167315_7 (sequence is synthesized)
tgaagatgctgttaagaaacataacttcacaccactggcaagaattgtgggctactttgtatctggatgtgatccctctatcatgggtattggtcctgtccctgctatcagtggggcact

SEQ ID NO: 541304 - DNA, 120 bp, Artificial Sequence
  ENSG00000167315_8 (sequence is synthesized)
gaagaaagcaggactgagtcttaaggacatggatttggtagaggtgaatgaagcttttgctccccagtacttggctgttgagaggagtttggatcttgacataagtaaaaccaatgtgaa

SEQ ID NO: 541305 - DNA, 120 bp, Artificial Sequence
  ENSG00000167315_9 (sequence is synthesized)
tggaggagccattgctttgggtcacccactgggaggatctggatcaagaattactgcacacctggttcacgaattaaggcgtcgaggtggaaaatatgccgttggatcagcttgcattgg

SEQ ID NO: 541306 - DNA, 120 bp, Artificial Sequence
  ENSG00000167315_10 (sequence is synthesized)
aggtggccaaggtattgctgtcatcattcagagcacagcctgaagagaccagtgagctcactgtgacccatccttactctacttggccaggccacagtaaaacaagtgaccttcagagca

SEQ ID NO: 541307 - DNA, 120 bp, Artificial Sequence
  ENSG00000167315_11 (sequence is synthesized)
gctgccacaactggccatgccctgccattgaaacagtgattaagtttgatcaagccatggtgacacaaaaatgcattgatcatgaataggagcccatgctagaagtacattctctcagat

SEQ ID NO: 541308 - DNA, 120 bp, Artificial Sequence
  ENSG00000167315_12 (sequence is synthesized)
agaagacattaaaagaaatcgtattcttgccaagtaaccaccacttctgccttagataatatgattataaggaaatcaaataaatgttgccttaacttcagttaatattttcctgtcatt

SEQ ID NO: 541309 - DNA, 120 bp, Artificial Sequence
  ENSG00000167315_13 (sequence is synthesized)
tatatttttaaaaattttaaattgtgataagatacacattacataaactttaccatcttaacccttttttagcgtacaattcactggtattaagtacattcacatttttatacaaacatc

SEQ ID NO: 541310 - DNA, 120 bp, Artificial Sequence
  ENSG00000167315_14 (sequence is synthesized)
cccactttttatcaacagaactttttcagtcaccacacatggaaacaataactcctgattctcccatcccccatcccctgacaaccaccagtgtattttgtttctataaatttgatgact

SEQ ID NO: 541311 - DNA, 120 bp, Artificial Sequence
  ENSG00000167315_15 (sequence is synthesized)
cgaggtacctcataagtgaaattataaatatctgtcctttcgtgactggcttattttactttactttatataatgttctcaagattcatccaccttatggtgtagcatgtgtcagaattt

SEQ ID NO: 541312 - DNA, 120 bp, Artificial Sequence
  ENSG00000167315_16 (sequence is synthesized)
ccttctttttaaaggctgaataatattctgctgtgtgtataaaccttacttccttcttcccagcttaaaggccatctttcatcctttattttctccctttaaaatgcccccacaacactt

SEQ ID NO: 541313 - DNA, 120 bp, Artificial Sequence
  ENSG00000167315_17 (sequence is synthesized)
ccattgctttatttgtctgttctaagactggatatctagtagggcaaggccctattcttgttaacttcatcaaagagccactggaaattttaattaagattaaattgaatttatgggtta

SEQ ID NO: 541314 - DNA, 77 bp, Artificial Sequence
  ENSG00000167315_18 (sequence is synthesized)
ctggaaattttaattaagattaaattgaatttatgggttatacatttattgggggtccaggctggagtgcagtggcg

SEQ ID NO: 541315 - DNA, 64 bp, Artificial Sequence
  ENSG00000167315_19 (sequence is synthesized)
gagatagcatcttgctctgtcacccaggcagaattgcagtggcacagtcatggctcactgaata

SEQ ID NO: 541316 - DNA, 120 bp, Artificial Sequence
  ENSG00000167315_20 (sequence is synthesized)
caggcagaattgcagtggcacagtcatggctcactgaataatagatgttaaataatactagatgttaaataatagtatcataagtacctacactgtttcctcaaccctttgcttatatgg

SEQ ID NO: 541317 - DNA, 120 bp, Artificial Sequence
  ENSG00000167315_21 (sequence is synthesized)
tttccttcatttgattaaaaagctgaagtggcacatacatccccctttctgtcatagagaggcagatgacaagcggcctacccacggtttgggataatggactagtggcaacaggcaagt

SEQ ID NO: 541318 - DNA, 120 bp, Artificial Sequence
  ENSG00000167315_22 (sequence is synthesized)
ccagcttttattgtttgggatccttactgagaagcagcaggcttcctctactgtcataaaaatattaaaaagtaagagccctgtataatttctcataataaaacaatgttttgcagaaca

SEQ ID NO: 541319 - DNA, 120 bp, Artificial Sequence
  ENSG00000167315_23 (sequence is synthesized)
gttcggtcccgcccccagctggcggccgcggccgcccgcgcgccaagttcctcagcccttggctcctgcccagtgtttagggtgttggcggagacaaaggggaagagtcatcgcctgtcg

SEQ ID NO: 541320 - DNA, 120 bp, Artificial Sequence
  ENSG00000167315_24 (sequence is synthesized)
gggctaggatatgatgggtgagaggtgtcaaaccaaattctctcggtttggaaacggagaaaatctaaaaatgaggatgtgaggaaagagtccgctctcaaggcgcgttgtggtctatcc

SEQ ID NO: 541321 - DNA, 120 bp, Artificial Sequence
  ENSG00000167315_25 (sequence is synthesized)
gaaataactaatagaacaaaggaaatctatttaacttgatagcgaaggggtaggcacaggtgtgatttcctctatgataatctctcacacaggaaaccatgatttcagacaaatggttta

SEQ ID NO: 541322 - DNA, 120 bp, Artificial Sequence
  ENSG00000167315_26 (sequence is synthesized)
tctttaaatctcttccacttttagcagatcacagttcagagcctcaaagaggctgtttaatttattatatttgtgtcagcaaataggtaccactaaatttctcactttagacctcacatt

SEQ ID NO: 541323 - DNA, 120 bp, Artificial Sequence
  ENSG00000167315_27 (sequence is synthesized)
taaaactattaaactatatcaactttgggaagttgttcataatcatttggaaatgtatacattctcaaggacataactcagaccatagttttcctaggttcaaaagcctagtttcactac

SEQ ID NO: 541324 - DNA, 120 bp, Artificial Sequence
  ENSG00000167315_28 (sequence is synthesized)
ctattctaggtctcttagtacctccttgaagatggctctgtatatagagtagaaagataatggtggatctaagcacatatgaggcaccatcttgagagaccacaaagtatagtaggaaag

SEQ ID NO: 541325 - DNA, 120 bp, Artificial Sequence
  ENSG00000167315_29 (sequence is synthesized)
agcacaagactgaattttatcccaactctgcaaaagttacctttcttagaatgagtttccttatctataaaattcctgaattaagatcatatgataatacagtactgtaaacttgaagta

SEQ ID NO: 541326 - DNA, 120 bp, Artificial Sequence
  ENSG00000167315_30 (sequence is synthesized)
aggtaattgccagtttgtgtaagtataacataatatacttttcagttctgccacatttcaacatagtaactgttccctttatgtacgtggctttgaaggtttattctttgttgtgtgtca

SEQ ID NO: 541327 - DNA, 120 bp, Artificial Sequence
  ENSG00000167315_31 (sequence is synthesized)
gcttcttggaaggatagctcctagtactgcataataataataatacttgcaaccacttattgagtacttgccatgtttcaggtaacacactggacacttaatactcatgattttatctaa

SEQ ID NO: 541328 - DNA, 120 bp, Artificial Sequence
  ENSG00000167315_32 (sequence is synthesized)
aaacgtgaatttaaagagtttaaagaatatgcataaggtcacaccctaacaaatggtatagccaatatttgaaccatccatccagttctaaaacctgtgggctttctacagtatcccact

SEQ ID NO: 541329 - DNA, 120 bp, Artificial Sequence
  ENSG00000167315_33 (sequence is synthesized)
gtgtctggtatgtgtcaatttatgggattactgagaattgcctctaagggatgcatttgactaaaagtattatttagtaaatatacacattttaaacctgatagctttatgcagaatgat

SEQ ID NO: 541330 - DNA, 120 bp, Artificial Sequence
  ENSG00000167315_34 (sequence is synthesized)
tgtagataaaataactttgcgaggtaatttaaataggaagaaacagcagacttagctgttgataggactggaccattctcatttaaaaattagtttgtgagtaaggatttttgttagtgc

SEQ ID NO: 541331 - DNA, 120 bp, Artificial Sequence
  ENSG00000167315_35 (sequence is synthesized)
tcagtcaacaagaagaaccggctcctaggtttttattagcacccatcccagtacttggcaggaggttttcgctcgacagatcatagctctcctactgctcctagctttgttgggaatgtt

SEQ ID NO: 541332 - DNA, 120 bp, Artificial Sequence
  ENSG00000167315_36 (sequence is synthesized)
gatggagaggcctgcagaaatggtagctggtgttctgctggaagacctgccctgctcccatttcccttctgttgctttagattagagcggtcactctatacctaagttctagggttatga

SEQ ID NO: 541333 - DNA, 120 bp, Artificial Sequence
  ENSG00000167315_37 (sequence is synthesized)
acttgtttaaaacaactgtgtaataaactcccttttcaaaacaagtgggcacagtcaatggaatcttactttaaggatgtacgagtcgaagaacattgaggtggaatacatatcgaggcc

SEQ ID NO: 541334 - DNA, 120 bp, Artificial Sequence
  ENSG00000167315_38 (sequence is synthesized)
ctgagacaggaaaaagcttggcaggatctaagaaccaagcattttggtgctccagggccctgtgggctctgtaagaaggtgtgtttgtagttgctgctaagcgaacgccctttggagctt

SEQ ID NO: 541335 - DNA, 120 bp, Artificial Sequence
  ENSG00000167323_0 (sequence is synthesized)
gacctgggcaccgccagccgcctgggcacgggactgggcgggggcgctgacctcggcctaggaggcccaggatcccggagacgcccgcgccctcaggaccctgcgggtcgcacgccctcc

SEQ ID NO: 541336 - DNA, 120 bp, Artificial Sequence
  ENSG00000167323_1 (sequence is synthesized)
ctccccagcttctgctgctcgccgctcttcggcagggcgaggtcaggtgcccccttctcgcctctcttctcttctcttctcttcctcctccacttctgtgcccgcggagactccggccgc

SEQ ID NO: 541337 - DNA, 120 bp, Artificial Sequence
  ENSG00000167323_2 (sequence is synthesized)
ccccttccgcaggggtgtagtaatctgcggagctgacagcagccccgcagccaccctgcccgaagtctccggaagcggcacgagctcaggccgccgcagccccggcggacccactgttgg

SEQ ID NO: 541338 - DNA, 120 bp, Artificial Sequence
  ENSG00000167323_3 (sequence is synthesized)
acctgaggagccagccctcctcccgcacccaaacttggagcacttgacctttggctgttggagggggcaggctcgcgggtggctggacagctgcggagccgcgagggcatcttgcctgga

SEQ ID NO: 541339 - DNA, 120 bp, Artificial Sequence
  ENSG00000167323_4 (sequence is synthesized)
gaccgtcggctgcactcccgggctcctggctttgcctctgggatcccgaggtgtccacatcagacgcatgttgactgagacctagagtcatggatgtatgcgtccgtcttgccctgtggc

SEQ ID NO: 541340 - DNA, 120 bp, Artificial Sequence
  ENSG00000167323_5 (sequence is synthesized)
tcctctggggactcctcctgcaccagggccagagcctcagccatagtcacagtgagaaggcgacaggaaccagctcgggggccaactctgaggagtccactgcagcagagttttgccgaa

SEQ ID NO: 541341 - DNA, 120 bp, Artificial Sequence
  ENSG00000167323_6 (sequence is synthesized)
ttgacaagcccctgtgtcacagtgaggatgagaaactcagcttcgaggcagtccgtaacatccacaaactgatggacgatgatgccaatggtgatgtggatgtggaagaaagtgatgagt

SEQ ID NO: 541342 - DNA, 120 bp, Artificial Sequence
  ENSG00000167323_7 (sequence is synthesized)
tcctgagggaagacctcaattaccatgacccaacagtgaaacacagcaccttccatggtgaggataagctcatcagcgtggaggacctgtggaaggcatggaagtcatcagaagtataca

SEQ ID NO: 541343 - DNA, 120 bp, Artificial Sequence
  ENSG00000167323_8 (sequence is synthesized)
attggaccgtggatgaggtggtacagtggctgatcacatatgtggagctgcctcagtatgaggagaccttccggaagctgcagctcagtggccatgccatgccaaggctggctgtcacca

SEQ ID NO: 541344 - DNA, 120 bp, Artificial Sequence
  ENSG00000167323_9 (sequence is synthesized)
acaccaccatgacagggactgtgctgaagatgacagaccggagtcatcggcagaagctgcagctgaaggctctggatacagtgctctttgggcctcctctcttgactcgccataatcacc

SEQ ID NO: 541345 - DNA, 120 bp, Artificial Sequence
  ENSG00000167323_10 (sequence is synthesized)
tcaaggacttcatgctggtggtgtctatcgttattggtgtgggcggctgctggtttgcctatatccagaaccgttactccaaggagcacatgaagaagatgatgaaggacttggaggggt

SEQ ID NO: 541346 - DNA, 120 bp, Artificial Sequence
  ENSG00000167323_11 (sequence is synthesized)
tacaccgagctgagcagagtctgcatgaccttcaggaaaggctgcacaaggcccaggaggagcaccgcacagtggaggtggagaaggtccatctggaaaagaagctgcgcgatgagatca

SEQ ID NO: 541347 - DNA, 120 bp, Artificial Sequence
  ENSG00000167323_12 (sequence is synthesized)
accttgctaagcaggaagcccagcggctgaaggagctgcgggagggtactgagaatgagcggagccgccaaaaatatgctgaggaggagttggagcaggttcgggaggccttgaggaaag

SEQ ID NO: 541348 - DNA, 120 bp, Artificial Sequence
  ENSG00000167323_13 (sequence is synthesized)
cagagaaggagctagaatctcacagctcatggtatgctccagaggcccttcagaagtggctgcagctgacacatgaggtggaggtgcaatattacaacatcaagaagcaaaatgctgaga

SEQ ID NO: 541349 - DNA, 120 bp, Artificial Sequence
  ENSG00000167323_14 (sequence is synthesized)
agcagctgctggtggccaaggagggggctgagaagataaaaaagaagagaaacacactctttggcaccttccacgtggcccacagctcttccctggatgatgtagatcataaaattctaa

SEQ ID NO: 541350 - DNA, 120 bp, Artificial Sequence
  ENSG00000167323_15 (sequence is synthesized)
cagctaagcaagcactgagcgaggtgacagcagcattgcgggagcgcctgcaccgctggcaacagatcgagatcctctgtggcttccagattgtcaacaaccctggcatccactcactgg

SEQ ID NO: 541351 - DNA, 120 bp, Artificial Sequence
  ENSG00000167323_16 (sequence is synthesized)
tggatgacatggatgaggagattgtgtctcccttgtccatgcagtcccctagcctgcagagcagtgttcggcagcgcctgacggagccacagcatggcctgggatctcagagggatttga

SEQ ID NO: 541352 - DNA, 120 bp, Artificial Sequence
  ENSG00000167323_17 (sequence is synthesized)
cccattccgattcggagtcctccctccacatgagtgaccgccagcgtgtggcccccaaacctcctcagatgagccgtgctgcagacgaggctctcaatgccatgacttccaatggcagcc

SEQ ID NO: 541353 - DNA, 120 bp, Artificial Sequence
  ENSG00000167323_18 (sequence is synthesized)
accggctgatcgagggggtccacccagggtctctggtggagaaactgcctgacagccctgccctggccaagaaggcattactggcgctgaaccatgggctggacaaggcccacagcctga

SEQ ID NO: 541354 - DNA, 120 bp, Artificial Sequence
  ENSG00000167323_19 (sequence is synthesized)
tggagctgagcccctcagccccacctggtggctctccacatttggattcttcccgttctcacagccccagctccccagacccagacacaccatctccagttggggacagccgagccctgc

SEQ ID NO: 541355 - DNA, 120 bp, Artificial Sequence
  ENSG00000167323_20 (sequence is synthesized)
aagccagccgaaacacacgcattccccacctggctggcaagaaggctgtggctgaggaggataatggctctattggcgaggaaacagactccagcccaggccggaagaagtttcccctca

SEQ ID NO: 541356 - DNA, 120 bp, Artificial Sequence
  ENSG00000167323_21 (sequence is synthesized)
aaatctttaagaagcctcttaagaagtaggcaggatggggtggcagtaaagggacagcttgtccttccctgggtgttctgtctctccttccctcccttccttcaagataactggccccaa

SEQ ID NO: 541357 - DNA, 120 bp, Artificial Sequence
  ENSG00000167323_22 (sequence is synthesized)
gagtggggcatgggaagggctggtccaggggtctgggcactgtacatacctgccccctcatccttgggtccttcattattatttattaactgaccaccatggcctgcctgccctgcctcc

SEQ ID NO: 541358 - DNA, 120 bp, Artificial Sequence
  ENSG00000167323_23 (sequence is synthesized)
gtcccaaccatgggctgctgctgtcactccctctccacttcagtgcatgtcttagttgctgttccctcagctcccagctccacctctggggttcagcttctgtctctgctgtcccagttt

SEQ ID NO: 541359 - DNA, 120 bp, Artificial Sequence
  ENSG00000167323_24 (sequence is synthesized)
tgaggtttggtttcttgtttctgtctcttgctttcgggctcctccctcccaccactccccaacttcccctagcagttgcagggaagataggacgagtagcttctgacatgtgtgcctcag

SEQ ID NO: 541360 - DNA, 120 bp, Artificial Sequence
  ENSG00000167323_25 (sequence is synthesized)
atctgttccaccccactcacagtggttctgtttgctccagactggggctagggcctaatctttgaagtttgttctttggtattgatgtgggtcagaaggagcctcatcctaatctcactc

SEQ ID NO: 541361 - DNA, 120 bp, Artificial Sequence
  ENSG00000167323_26 (sequence is synthesized)
aggcctccagggatccatgggggagtgaaaccaattctcagagaacaacccaccagagacttttaaagagaggccaggcttgggaatgggttgggagaggcatctgttcattggagcatg

SEQ ID NO: 541362 - DNA, 120 bp, Artificial Sequence
  ENSG00000167323_27 (sequence is synthesized)
agtggatgccagaactgtaggttataaggcagtcactttttctctctactcccacccacacctgcctccctcttacccctgctcccccacactgcaggaggatttgtctctaagaggtgc

SEQ ID NO: 541363 - DNA, 120 bp, Artificial Sequence
  ENSG00000167323_28 (sequence is synthesized)
tgccccaaagctccccaagcatcaatactcctagggctcaggacaagtggctcccctggccaggagagccacagccatgatacagggctcttatggagccctggagttgttgggcaagga

SEQ ID NO: 541364 - DNA, 120 bp, Artificial Sequence
  ENSG00000167323_29 (sequence is synthesized)
tgctgtcattttttgaaccaaaagacaaacaggttaaaaggaaaaaaagtaatctgaatttcccaagtgcctacgctgcatattccccttgttagatcccattttcatgttactttgtag

SEQ ID NO: 541365 - DNA, 120 bp, Artificial Sequence
  ENSG00000167323_30 (sequence is synthesized)
ccttggccagaggctcaaaaaggacacaaccagtttggggaaggggtggctaaggaagatggtataggtgaaggcggctgtgtgaccactttcccccacccttcccaccctctagacaac

SEQ ID NO: 541366 - DNA, 120 bp, Artificial Sequence
  ENSG00000167323_31 (sequence is synthesized)
tctctcccttacctgtttttgctatggctgtaaaggtatttttcctctgccccactccctgccatacctttatcctgggatcctattttgggcctggggtgggtatacctggggctggtc

SEQ ID NO: 541367 - DNA, 120 bp, Artificial Sequence
  ENSG00000167323_32 (sequence is synthesized)
ttaggagggtgctaggctgcagactgccttgtactccctggacaccctcaaatggggttttctgtgttatttcataaaattctttgaagtccaataaagcatgtaggagattttaaccac

SEQ ID NO: 541368 - DNA, 120 bp, Artificial Sequence
  ENSG00000167323_33 (sequence is synthesized)
tttctgtttttgaaagatgaagcctgggaggtgccagagctatgccagctgctatggggccagaaacagtcccatcaatatattgtgaggacactcaagaagcatatggaaaaggccatg

SEQ ID NO: 541369 - DNA, 120 bp, Artificial Sequence
  ENSG00000167323_34 (sequence is synthesized)
ttctgaaatacagcagccaggggagatgggtggccttcaggtgtaacacacacacacaggttagaaagcagtgtgtgtctgtgtgtgtatttgttgctgggtggtcgaatttgtggaggt

SEQ ID NO: 541370 - DNA, 120 bp, Artificial Sequence
  ENSG00000167323_35 (sequence is synthesized)
acttcctgagatggctctgtcagttggcagtcctacctgtcagctcagcccattttagaaatcattttccaaagaattttaaccttaaggaagctctcctctttctattgaacaggctgt

SEQ ID NO: 541371 - DNA, 120 bp, Artificial Sequence
  ENSG00000167323_36 (sequence is synthesized)
accaggcataggggccccaggaaccagagacacagcaggctacctttgcatttcctatattggacaaaataagaggaagaaaggaagccaaacagctctcccaggctcagttggcagcag

SEQ ID NO: 541372 - DNA, 120 bp, Artificial Sequence
  ENSG00000167323_37 (sequence is synthesized)
ctaactgccttgccacttccctttatagtgatattgcccataggtctccttctattggaattgccactaaaactgacctgggcacttcatcttcaatttcccatccttttaggacccctg

SEQ ID NO: 541373 - DNA, 120 bp, Artificial Sequence
  ENSG00000167323_38 (sequence is synthesized)
gtgggaggtttctgggaggaggtgccccattctccagattggcattagaggcccagggtggtctccagcaagcatttattcatgggcacctccttacctgccagcccaaagtgggctggc

SEQ ID NO: 541374 - DNA, 120 bp, Artificial Sequence
  ENSG00000167323_39 (sequence is synthesized)
ttctgaaggctacgggaccagctctccatctgcctctgctgctgcttcttgctcctcttccatcaccaccatcaccactaccaccaccaccaccaccaccttcaccaccgtccatgtcca

SEQ ID NO: 541375 - DNA, 120 bp, Artificial Sequence
  ENSG00000167323_40 (sequence is synthesized)
ctacagctcccagcgtgagcgacgcagtagacgggtgatttctgcatttccatttgagttcctgagggaagacctcaattaccatgacccaacagtgaaacacagcaccttccatggtga

SEQ ID NO: 541376 - DNA, 120 bp, Artificial Sequence
  ENSG00000167323_41 (sequence is synthesized)
cagtgaaacacagcaccttccatggtgaggataagctcatcagcgtggaggacctgtggaaggcatggaagtcatcagaagatatgtggtctccctatgttgccctgactgatctcaaac

SEQ ID NO: 541377 - DNA, 120 bp, Artificial Sequence
  ENSG00000167323_42 (sequence is synthesized)
tttgatgtacaggttgagaagtctgtggcctctgttgtgcttaaacagcagatggggcagatacccaggaagatagttcaactcatgaccttggtcaataaagcacaatttactcaggtt

SEQ ID NO: 541378 - DNA, 120 bp, Artificial Sequence
  ENSG00000167323_43 (sequence is synthesized)
aattccatttttgtcatcagtggttaattaaaattttttttccttttctatatttcatttcaatagcacattagcaggtttatatataatgacagtgagtttagattaggataattcata

SEQ ID NO: 541379 - DNA, 120 bp, Artificial Sequence
  ENSG00000167323_44 (sequence is synthesized)
caatttgagtgtcagaagacagagtttcagtctctgctcagctgtatgaccttatggaagtgacctcccttctcagggttcaatttcctcctctctggagccagaaagttttaacgaggg

SEQ ID NO: 541380 - DNA, 120 bp, Artificial Sequence
  ENSG00000167323_45 (sequence is synthesized)
aggctttctggctctgatgttgaatatatgtctcttgtttattactgctgacgggggccctctgtttcacctgttttttccacatactccatcctacaagagacacagcaggctaccttt

SEQ ID NO: 541381 - DNA, 120 bp, Artificial Sequence
  ENSG00000167323_46 (sequence is synthesized)
aagatctgctgacagcacgcttgagaagagaacaggaagtgcaggctttgttgaaggaggctcaggcgtggctctgtcttctttggcgcactcattctcaagtcgctgacacctcctcca

SEQ ID NO: 541382 - DNA, 120 bp, Artificial Sequence
  ENSG00000167323_47 (sequence is synthesized)
gacactaagggatgctgtgaattccatgctccaaggtttaagctgagggcagtggggaggaagggcggagaggtacctgtatccacctggcctgttcactacttaattttcttttgcacc

SEQ ID NO: 541383 - DNA, 120 bp, Artificial Sequence
  ENSG00000167323_48 (sequence is synthesized)
ggcagcccagcctttggggagggacctctggcctgattgttcttatcttgctttggcagtcccaacttttagctgatgagagaggcatagaaggacaggaatcaggctgggtgcagtggc

SEQ ID NO: 541384 - DNA, 120 bp, Artificial Sequence
  ENSG00000167323_49 (sequence is synthesized)
gacgacgtggatgacatggatgaggagattgtgtctcccttgtccatgcagtatgctgcctggctgatggggcgtaggttcagtgaccgctctctctgctctacatccgccggctcggat

SEQ ID NO: 541385 - DNA, 120 bp, Artificial Sequence
  ENSG00000167325_0 (sequence is synthesized)
ccctttgtgcgtcacgggtggcgggcgcgggaaggggatttggattgttgcgcctctgctctgaagaaagtgctgtctggctccaactccagttctttcccctgagcagcgcctggaacc

SEQ ID NO: 541386 - DNA, 120 bp, Artificial Sequence
  ENSG00000167325_1 (sequence is synthesized)
taacccttcccactctgtcaccttctcgatcccgccggcgctttagagccgcagtccagtcttggatccttcagagcctcagccactagctgcgatgcatgtgatcaagcgagatggccg

SEQ ID NO: 541387 - DNA, 120 bp, Artificial Sequence
  ENSG00000167325_2 (sequence is synthesized)
ccaagaacgagtcatgtttgacaaaattacatctcgaatccagaagctttgttatggactcaatatggattttgttgatcctgctcagatcaccatgaaagtaatccaaggcttgtacag

SEQ ID NO: 541388 - DNA, 120 bp, Artificial Sequence
  ENSG00000167325_3 (sequence is synthesized)
tggggtcaccacagtggaactagatactttggctgctgaaacagctgcaaccttgactactaagcaccctgactatgctatcctggcagccaggatcgctgtctctaacttgcacaaaga

SEQ ID NO: 541389 - DNA, 120 bp, Artificial Sequence
  ENSG00000167325_4 (sequence is synthesized)
aacaaagaaagtgttcagtgatgtgatggaagacctctataactacataaatccacataatggcaaacactctcccatggtggccaagtcaacattggatattgttctggccaataaaga

SEQ ID NO: 541390 - DNA, 120 bp, Artificial Sequence
  ENSG00000167325_5 (sequence is synthesized)
tcgcctgaattctgctattatctatgaccgagatttctcttacaattacttcggctttaagacgctagagcggtcttatttgttgaagatcaatggaaaagtggctgaaagaccacaaca

SEQ ID NO: 541391 - DNA, 120 bp, Artificial Sequence
  ENSG00000167325_6 (sequence is synthesized)
tatgttgatgagagtatctgttgggatccacaaagaagacattgatgcagcaattgaaacatataatcttctttctgagaggtggtttactcatgcttcgcccactctcttcaatgctgg

SEQ ID NO: 541392 - DNA, 120 bp, Artificial Sequence
  ENSG00000167325_7 (sequence is synthesized)
taccaaccgcccacaactttctagctgttttcttctgagtatgaaagatgacagcattgaaggcatttatgacactctaaagcaatgtgcattgatttctaagtctgctggaggaattgg

SEQ ID NO: 541393 - DNA, 120 bp, Artificial Sequence
  ENSG00000167325_8 (sequence is synthesized)
tgttgctgtgagttgtattcgggctactggcagctacattgctgggactaatggcaattccaatggccttgtaccgatgctgagagtatataacaacacagctcgatatgtggatcaagg

SEQ ID NO: 541394 - DNA, 120 bp, Artificial Sequence
  ENSG00000167325_9 (sequence is synthesized)
tgggaacaagcgtcctggggcatttgctatttacctggagccttggcatttagacatctttgaattccttgatttaaagaagaacacaggaaaggaagagcagcgtgccagagatctttt

SEQ ID NO: 541395 - DNA, 120 bp, Artificial Sequence
  ENSG00000167325_10 (sequence is synthesized)
ctttgctctttggattccggatctcttcatgaaacgagtggagactaatcaggactggtctttgatgtgtccaaatgagtgtcctggtctggatgaggtttggggagaggaatttgagaa

SEQ ID NO: 541396 - DNA, 120 bp, Artificial Sequence
  ENSG00000167325_11 (sequence is synthesized)
actatatgcaagttatgagaaacaaggtcgtgtccgcaaagttgtaaaagctcagcagctttggtatgccatcattgagtctcagacggaaacaggcaccccgtatatgctctacaaaga

SEQ ID NO: 541397 - DNA, 120 bp, Artificial Sequence
  ENSG00000167325_12 (sequence is synthesized)
ttcctgtaatcgaaagagcaaccagcagaacctgggaaccatcaaatgcagcaacctgtgcacagaaatagtggagtacaccagcaaagatgaggttgctgtttgtaatttggcttccct

SEQ ID NO: 541398 - DNA, 120 bp, Artificial Sequence
  ENSG00000167325_13 (sequence is synthesized)
tcagaacacacatacgactttaagaagttggctgaagtcactaaagtcgttgtccgaaacttgaataaaattattgatataaactactatcctgtaccagaggcatgcctatcaaataaa

SEQ ID NO: 541399 - DNA, 120 bp, Artificial Sequence
  ENSG00000167325_14 (sequence is synthesized)
cgccatcgccccattggaattggggtacaaggtctggcagatgcttttatcctgatgagatacccttttgagagtgcagaagcccagttactgaataagcagatctttgaaactatttat

SEQ ID NO: 541400 - DNA, 120 bp, Artificial Sequence
  ENSG00000167325_15 (sequence is synthesized)
tatggtgctctggaagccagctgtgaccttgccaaggagcagggcccatacgaaacctatgagggctctccagttagcaaaggaattcttcagtatgatatgtggaatgttactcctaca

SEQ ID NO: 541401 - DNA, 120 bp, Artificial Sequence
  ENSG00000167325_16 (sequence is synthesized)
gacctatgggactggaaggttctcaaggagaagattgcaaagtatggtataagaaacagtttacttattgccccgatgcctacagcttccactgctcagatcctggggaataatgagtcc

SEQ ID NO: 541402 - DNA, 120 bp, Artificial Sequence
  ENSG00000167325_17 (sequence is synthesized)
attgaaccttacaccagcaacatctatactcgcagagtcttgtcaggagaatttcagattgtaaatcctcacttattgaaagatcttaccgagcggggcctatggcatgaagagatgaaa

SEQ ID NO: 541403 - DNA, 120 bp, Artificial Sequence
  ENSG00000167325_18 (sequence is synthesized)
aaccagattattgcatgcaatggctctattcagagcataccagaaattcctgatgacctgaagcaactttataaaactgtgtgggaaatctctcagaaaactgttctcaagatggcagct

SEQ ID NO: 541404 - DNA, 120 bp, Artificial Sequence
  ENSG00000167325_19 (sequence is synthesized)
gagagaggtgctttcattgatcaaagccaatctttgaacatccacattgctgagcctaactatggcaaactcactagtatgcacttctacggctggaagcagggtttgaagactgggatg

SEQ ID NO: 541405 - DNA, 120 bp, Artificial Sequence
  ENSG00000167325_20 (sequence is synthesized)
tattatttaaggacaagaccagcggctaatccaatccagttcactctaaataaggagaagctaaaagataaagaaaaggtatcaaaagaggaagaagagaaggagaggaacacagcagcc

SEQ ID NO: 541406 - DNA, 120 bp, Artificial Sequence
  ENSG00000167325_21 (sequence is synthesized)
atggtgtgctctttggagaatagagatgaatgtctgatgtgtggatcctgaggaaagacttggaagagaccagcatgtcttcagtagccaaactacttcttgagcatagataggtatagt

SEQ ID NO: 541407 - DNA, 120 bp, Artificial Sequence
  ENSG00000167325_22 (sequence is synthesized)
gggtttgcttgaggtggtaaggctttgctggaccctgttgcaggcaaaaggagtaattgatttaaagtactgttaatgatgataatgattttttttttaaactcatatattgggattttc

SEQ ID NO: 541408 - DNA, 120 bp, Artificial Sequence
  ENSG00000167325_23 (sequence is synthesized)
accaaaataatgcttttgaaaaaaagaaaaaaaaaacggatatattgagaatcaaagtagaagttttaggaatgcaaaataagtcatcttgcatacagggagtggttaagtaaggtttca

SEQ ID NO: 541409 - DNA, 120 bp, Artificial Sequence
  ENSG00000167325_24 (sequence is synthesized)
tcacccctttagcactgcttttctgaagacttcagttttgttaaggagatttagttttactgctttgactggtgggtctctagaagcaaaactgagtgataactcatgagaagtactgat

SEQ ID NO: 541410 - DNA, 120 bp, Artificial Sequence
  ENSG00000167325_25 (sequence is synthesized)
aggacctttatctggatatggtcctataggttattctgaaataaagataaacatttctaagtgattgtatgagattaattttgtcatttactttcatataaaagtcaaatttgaaaaaca

SEQ ID NO: 541411 - DNA, 120 bp, Artificial Sequence
  ENSG00000167325_26 (sequence is synthesized)
aaatgctgagtcagggtgtccgaggtggcgatcgccatcttggagtcttcaccggagtccaatcactgtgaaccaaaaacgaagtcaaataacaagtttcacactttgggaggccaagct

SEQ ID NO: 541412 - DNA, 120 bp, Artificial Sequence
  ENSG00000167325_27 (sequence is synthesized)
agggaagtctcgctgtgccaaaggtgcagcgtgcttttatggatgctgggtgaggagtggtcagggtaggggcagggtcggttgagtttcacgcttctgagtgtgacacgccctagtggg

SEQ ID NO: 541413 - DNA, 120 bp, Artificial Sequence
  ENSG00000167325_28 (sequence is synthesized)
agctccactacttaactagtaatgtggcctagagttagttattttgtgtctgagtttgtttccttttctgtaaggtgaagaaaatatctaactctgtagaataaagttccagaaggaaat

SEQ ID NO: 541414 - DNA, 120 bp, Artificial Sequence
  ENSG00000167325_29 (sequence is synthesized)
agaggtatgaatagatttctctgcttattggtaattattgaaatccaaattgaaaggaatcaatcatgatcttcaagtcatcatttaaatggttatcaataaaatggtttgagaaaaaga

SEQ ID NO: 541415 - DNA, 120 bp, Artificial Sequence
  ENSG00000167325_30 (sequence is synthesized)
aaatcctagctccactacttaactagtaatgtggcctagagttagttattttgtgtctgagtttgtttccttttctgtaagaagtagagatggagagcagactaatggcaattccaatgg

SEQ ID NO: 541416 - DNA, 120 bp, Artificial Sequence
  ENSG00000167332_0 (sequence is synthesized)
cttctgggaatctccacaccctgaagacacagtgagttagcaccaccaccaggaattggcctttcagctctgtgcctgtctccagtcaggctggaataagtctcctcatatttgcaagct

SEQ ID NO: 541417 - DNA, 120 bp, Artificial Sequence
  ENSG00000167332_1 (sequence is synthesized)
cggccctcccctggaatctaaagcctcctcagccttctgagtcagcctgaaaggaacaggccgaactgctgtatgggctctactgccagtgtgacctcaccctctccagtcacccctcct

SEQ ID NO: 541418 - DNA, 120 bp, Artificial Sequence
  ENSG00000167332_2 (sequence is synthesized)
cagttccagctatgagttcctgcaacttcacacatgccacctttgtgcttattggtatcccaggattagagaaagcccatttctgggttggcttccccctcctttccatgtatgtagtgg

SEQ ID NO: 541419 - DNA, 120 bp, Artificial Sequence
  ENSG00000167332_3 (sequence is synthesized)
caatgtttggaaactgcatcgtggtcttcatcgtaaggacggaacgcagcctgcacgctccgatgtacctctttctctgcatgcttgcagccattgacctggccttatccacatccacca

SEQ ID NO: 541420 - DNA, 120 bp, Artificial Sequence
  ENSG00000167332_4 (sequence is synthesized)
tgcctaagatccttgcccttttctggtttgattcccgagagattagctttgaggcctgtcttacccagatgttctttattcatgccctctcagccattgaatccaccatcctgctggcca

SEQ ID NO: 541421 - DNA, 120 bp, Artificial Sequence
  ENSG00000167332_5 (sequence is synthesized)
tggcctttgaccgttatgtggccatctgccacccactgcgccatgctgcagtgctcaacaatacagtaacagcccagattggcatcgtggctgtggtccgcggatccctcttttttttcc

SEQ ID NO: 541422 - DNA, 120 bp, Artificial Sequence
  ENSG00000167332_6 (sequence is synthesized)
cactgcctctgctgatcaagcggctggccttctgccactccaatgtcctctcgcactcctattgtgtccaccaggatgtaatgaagttggcctatgcagacactttgcccaatgtggtat

SEQ ID NO: 541423 - DNA, 120 bp, Artificial Sequence
  ENSG00000167332_7 (sequence is synthesized)
atggtcttactgccattctgctggtcatgggcgtggacgtaatgttcatctccttgtcctattttctgataatacgaacggttctgcaactgccttccaagtcagagcgggccaaggcct

SEQ ID NO: 541424 - DNA, 120 bp, Artificial Sequence
  ENSG00000167332_8 (sequence is synthesized)
ttggaacctgtgtgtcacacattggtgtggtactcgccttctatgtgccacttattggcctctcagtggtacaccgctttggaaacagccttcatcccattgtgcgtgttgtcatgggtg

SEQ ID NO: 541425 - DNA, 120 bp, Artificial Sequence
  ENSG00000167332_9 (sequence is synthesized)
acatctacctgctgctgcctcctgtcatcaatcccatcatctatggtgccaaaaccaaacagatcagaacacgggtgctggctatgttcaagatcagctgtgacaaggacttgcaggctg

SEQ ID NO: 541426 - DNA, 120 bp, Artificial Sequence
  ENSG00000167332_10 (sequence is synthesized)
tgggaggcaagtgacccttaacactacacttctccttatctttattggcttgataaacataattatttctaacactagcttatttccagttgcccataagcacatcagtacttttctctg

SEQ ID NO: 541427 - DNA, 120 bp, Artificial Sequence
  ENSG00000167332_11 (sequence is synthesized)
acctaaaggactattatgtggaataatacatactaatgaagtattacatgatttaaagactacaataaaaccaaacatgcttataacattaagaaaaacaataaagatacatgattgaaa

SEQ ID NO: 541428 - DNA, 120 bp, Artificial Sequence
  ENSG00000167332_12 (sequence is synthesized)
ccaagttgaaaaatagcatatgccttggaggaaatgtgctcaaattactaatgatttagtgttgtccctactttctctctcttttttctttcttttttttttattatggttagctgtcac

SEQ ID NO: 541429 - DNA, 79 bp, Artificial Sequence
  ENSG00000167332_13 (sequence is synthesized)
aacctccacatcccatgttgaagtaacgtgccaccatgactggctaattttctgtattttttagtagagacagagtttc

SEQ ID NO: 541430 - DNA, 120 bp, Artificial Sequence
  ENSG00000167332_14 (sequence is synthesized)
caggtgtgaaccactgtgcccggcctgtgtacaactttttaaatagggaatatgatagcttcgcatggtggtgtgcacctatagcccccactgcctggaaagctgaggtgggagaatcgc

SEQ ID NO: 541431 - DNA, 120 bp, Artificial Sequence
  ENSG00000167332_15 (sequence is synthesized)
tggtgtgcacctatagcccccactgcctggaaagctgaggtgggagaatcgcttgagtccaggagtttgaggttacagtgatccacgatcgtaccactacactccagcctgggcaacaga

SEQ ID NO: 541432 - DNA, 120 bp, Artificial Sequence
  ENSG00000167332_16 (sequence is synthesized)
aagcataaaatggaataacatatcaaatgaaacagggaaaatgaagctgacaatttatggaagccagggcttgtcacagtctctactgttattatgcattacctgggaatttatataagc

SEQ ID NO: 541433 - DNA, 120 bp, Artificial Sequence
  ENSG00000167332_17 (sequence is synthesized)
ccttaataataatgccaatgaacatctcatgtgtgctcacaatgttctggcactattataagtgcttcacaggttttatgtgttcttcgtaactttatggagtaggtaccatttgtgtct

SEQ ID NO: 541434 - DNA, 120 bp, Artificial Sequence
  ENSG00000167332_18 (sequence is synthesized)
ctttattataagtgagagaaatgaagtttatattatcaaggggactaaagtcacacggcttgtgggcactgtgccaagatttaaaattaaatttgatggttgaatacagttacttaatga

SEQ ID NO: 541435 - DNA, 120 bp, Artificial Sequence
  ENSG00000167332_19 (sequence is synthesized)
ccatgttatattgcttcctgtgtaacatctgccatttatttcctcagctgtacaaatcctctgttttctctctgttacacactaacatcaatggctttgtacttgtgatgagagataacc

SEQ ID NO: 541436 - DNA, 120 bp, Artificial Sequence
  ENSG00000167332_20 (sequence is synthesized)
ttgccctagttgtgggcaacacatgcagaataatcctgttttacagctgcctttcgtgatcttattgcttgcttttttccagattcagggagaatgttgttgtctatttgtctcttacat

SEQ ID NO: 541437 - DNA, 120 bp, Artificial Sequence
  ENSG00000167332_21 (sequence is synthesized)
ctccttgatcatgtcttcattttttaatgtgctctgtacctgtcaaaaattttgaatgtacaccacatgctattgtctgaacttgagtataagataaaataaaattttattttaaatttt

SEQ ID NO: 541438 - DNA, 120 bp, Artificial Sequence
  ENSG00000167333_0 (sequence is synthesized)
agagccgggtgtagtattctgggagctgcgggctactgggcctgcgctgccgggctttgggttctgggcctctgccgctctctggccctaagtgctgagctgccgggaacggcagcttct

SEQ ID NO: 541439 - DNA, 120 bp, Artificial Sequence
  ENSG00000167333_1 (sequence is synthesized)
gacgctgggccattggacgctgcggaaccaggcttcttcactttgagtttccgccgcgaagcgccagtccgggccgaggagggagcctttactacttctccctggtttcattcatgttct

SEQ ID NO: 541440 - DNA, 120 bp, Artificial Sequence
  ENSG00000167333_2 (sequence is synthesized)
gaggagggtgtgagaaggaaccatggatcccacagccttggtggaagccattgtggaagaagtggcctgtcccatctgtatgaccttcctgagggagcccatgagcattgactgtggcca

SEQ ID NO: 541441 - DNA, 120 bp, Artificial Sequence
  ENSG00000167333_3 (sequence is synthesized)
cagcttctgccacagctgtctctctggactctgggagatcccaggagaatcccagaactggggttacacctgtcccctctgtcgagctcctgtccagccaaggaacctgcggcctaattg

SEQ ID NO: 541442 - DNA, 120 bp, Artificial Sequence
  ENSG00000167333_4 (sequence is synthesized)
gcagctggccaatgttgtagaaaaagtccgtctgctaaggctacatccaggaatggggctgaagggtgacctgtgtgagcgccatggggaaaagctgaagatgttctgcaaagaggatgt

SEQ ID NO: 541443 - DNA, 120 bp, Artificial Sequence
  ENSG00000167333_5 (sequence is synthesized)
cttgataatgtgtgaggcctgcagccagtccccagagcatgaggcccacagtgttgtgccaatggaggatgttgcctgggagtacaagtgggaacttcatgaggccctcgaacatctgaa

SEQ ID NO: 541444 - DNA, 120 bp, Artificial Sequence
  ENSG00000167333_6 (sequence is synthesized)
gaaagagcaagaagaggcctggaagcttgaagttggtgaaaggaaacgaactgccacctggaagatacaggtggaaacccgaaaacagagtattgtatgggagtttgaaaaataccagcg

SEQ ID NO: 541445 - DNA, 120 bp, Artificial Sequence
  ENSG00000167333_7 (sequence is synthesized)
attactagagaaaaagcagccaccacatcggcagctgggggcagaggtagcagcagctctggccagcctacagcgggaggcagcggagaccatgcagaaactggagttgaaccatagcga

SEQ ID NO: 541446 - DNA, 120 bp, Artificial Sequence
  ENSG00000167333_8 (sequence is synthesized)
gctcatccagcagagccaggtcctgtggaggatgattgcagagttgaaagagaggtcgcagaggcctgtccgctggatgttgcaggatattcaggaagtgttaaacaggagcaaatcttg

SEQ ID NO: 541447 - DNA, 120 bp, Artificial Sequence
  ENSG00000167333_9 (sequence is synthesized)
gagcttgcagcagccagaaccaatctccctggagttgaagacagattgccgtgtgctggggctaagagagatcctgaagacttatgcagctgatgtgcgcttggatccagatactgctta

SEQ ID NO: 541448 - DNA, 120 bp, Artificial Sequence
  ENSG00000167333_10 (sequence is synthesized)
ctcccgtctcatcgtgtctgaggacagaaaacgtgtgcactatggagacaccaaccagaaactgccagacaatcctgagagattttaccgctataatatcgtcctgggaagccagtgcat

SEQ ID NO: 541449 - DNA, 120 bp, Artificial Sequence
  ENSG00000167333_11 (sequence is synthesized)
ctcctcaggccggcactactgggaggtggaggtgggagacaggtctgagtggggcctgggagtatgtaagcaaaatgtagaccggaaggaggtggtctacttatccccccactatggatt

SEQ ID NO: 541450 - DNA, 120 bp, Artificial Sequence
  ENSG00000167333_12 (sequence is synthesized)
ctgggtgataaggctgaggaagggaaatgagtaccgagcaggcaccgatgagtacccaatcctgtccttgccggtccctcctcgccgggtgggaatcttcgtggattatgaggcccatga

SEQ ID NO: 541451 - DNA, 120 bp, Artificial Sequence
  ENSG00000167333_13 (sequence is synthesized)
ttttagtccttgctacagcattggaaccaacaacactgctcctctggccatctgctccctggatggggaggactaagaaagctaccaccctaaccagagaggcttggaattgggcctggc

SEQ ID NO: 541452 - DNA, 120 bp, Artificial Sequence
  ENSG00000167333_14 (sequence is synthesized)
ccccatggggcttggaggaccgagccactgacaggtatcccctgaaactgagctgagcccagtatccaaggattcctctgtctgatcctttggtctttgctaccaggctgaagtctgtca

SEQ ID NO: 541453 - DNA, 120 bp, Artificial Sequence
  ENSG00000167333_15 (sequence is synthesized)
tgaaaccacttattttaaaaagcagaggcccagtcaaatgagcattgcatcccatgagggaagcacgacagggctgatggtgaggatcagagcagttctaaggtgactcgttggggtaag

SEQ ID NO: 541454 - DNA, 120 bp, Artificial Sequence
  ENSG00000167333_16 (sequence is synthesized)
gatcaggactttgtccatgtagtagccaaccaccctcttccctgattcccgtccggtgtcacagttcagtcagtgaggatgatgaagtagatacagtcttcaggacaccattagatgggc

SEQ ID NO: 541455 - DNA, 120 bp, Artificial Sequence
  ENSG00000167333_17 (sequence is synthesized)
tttcccaataggccaaaaaaatgctgcgcatacccagagctggttgttgtgctgaggccagtcagaggatgcttcccctgaggtttgctataactaagcaacctttatgtgactctcacc

SEQ ID NO: 541456 - DNA, 120 bp, Artificial Sequence
  ENSG00000167333_18 (sequence is synthesized)
ttctgacctcctggcaagagaaattcagtgcagcagggggacacagacctgcccaagccaccccactgccgttccctctctgagcacaagctgggcaaatcactgtcccttggactccag

SEQ ID NO: 541457 - DNA, 120 bp, Artificial Sequence
  ENSG00000167333_19 (sequence is synthesized)
gagaccagtgtcctagtcttgccttttttctctaagtggcaggatcagaaaacctgcgagctttagtttgtattttcactttatgaatgaggaaactgaaatggccttaagggagcaagt

SEQ ID NO: 541458 - DNA, 120 bp, Artificial Sequence
  ENSG00000167333_20 (sequence is synthesized)
tgggattagaggcatgagccactgcgcccggcccctggagcaagttatttcttacaaagctgctgaaggtaagattatcaaaattataaagcatttttcacactcaagtgaaacaaggtt

SEQ ID NO: 541459 - DNA, 120 bp, Artificial Sequence
  ENSG00000167333_21 (sequence is synthesized)
ttcacactcaagtgaaacaaggttgacaaactcacttcgcaggtcacatgcctatacatcacttattatatttgggtctgaaacttctcacatgtttgggaggttttatgtgtcctcatt

SEQ ID NO: 541460 - DNA, 120 bp, Artificial Sequence
  ENSG00000167333_22 (sequence is synthesized)
gggaaaatgggtgtaattcagcataaaacctcatatgattgtcctgcctcatggagctgttgtatagatcccagatccatcccatgatttgttcctgtctgaggcatagaggcaggcaag

SEQ ID NO: 541461 - DNA, 120 bp, Artificial Sequence
  ENSG00000167333_23 (sequence is synthesized)
ccgtggattttgcacatggtgactttcccactgtgccatgatacagtctgcatcttatagcagtgcctttgtctcagggcctctgctggcagtctagaccttttgggcagaaaggagctt

SEQ ID NO: 541462 - DNA, 120 bp, Artificial Sequence
  ENSG00000167333_24 (sequence is synthesized)
caaatggctgtgataaggaatattaaaaattgtgtttctactttaattgtattggctgttcatgtatgtaggagttaaaataggccaaactggagaaataaacgcattctgtccaccatg

SEQ ID NO: 541463 - DNA, 120 bp, Artificial Sequence
  ENSG00000167333_25 (sequence is synthesized)
gtgagtagtaggttttcctggtaaccctgagtgacagctgaagatagactgagactccaggagagagcatcagttacccttcagtagggactgccagccctctgccagctggtcatggat

SEQ ID NO: 541464 - DNA, 120 bp, Artificial Sequence
  ENSG00000167333_26 (sequence is synthesized)
cctgtgtttccccagctaatacctgctgtttccctatccctggctggtggatgacctggtctgttgtagcatcataggtggggcagtgctcaggcagctctggcgtcattccaggccctc

SEQ ID NO: 541465 - DNA, 120 bp, Artificial Sequence
  ENSG00000167333_27 (sequence is synthesized)
tcctctagcccgagagtcttgagatggagcctgaaattggccagttcagccaaagctcagcctgctcttccatccttccataggcttctccttacctctgcatggcatctctccattctt

SEQ ID NO: 541466 - DNA, 120 bp, Artificial Sequence
  ENSG00000167333_28 (sequence is synthesized)
ggtatctgtctcccttcccctagagaaactccctgccagttcgatgtctgttccctctgaggaatagcacttactcagatgctgcatttttttttctccttccaggatattcaggaagtg

SEQ ID NO: 541467 - DNA, 120 bp, Artificial Sequence
  ENSG00000167333_29 (sequence is synthesized)
agaaaagcaggtgctggtccacagtctcgtcccacttacatggtaatggctaaggaatctttgttgatctttcctttttcttctttgtacttgatcaaatgtatatcaagtgaagctgta

SEQ ID NO: 541468 - DNA, 120 bp, Artificial Sequence
  ENSG00000167333_30 (sequence is synthesized)
aaatatgtggtttcaagtagattgctcaaagaggataaaagactgcccatgactccttcatgtccgacagaaaatgtgtgcacttcttcctctcccagaatcaaatatacatccaaccct

SEQ ID NO: 541469 - DNA, 120 bp, Artificial Sequence
  ENSG00000167333_31 (sequence is synthesized)
gctttgctggggttcactatgtccctggccaagcccctcttccctgtactaagataaggcccatgtgacaaagccgggactcctggccctgaggttcaccctcctctaccaggagcaaat

SEQ ID NO: 541470 - DNA, 120 bp, Artificial Sequence
  ENSG00000167346_0 (sequence is synthesized)
gacaaatgagggtttggcatgcagctcgtcatcttaagagttactatcttcttgccctggtgtttcgccgttccagtgccccctgctgcagaccataaaggatgggactttgttgagggc

SEQ ID NO: 541471 - DNA, 120 bp, Artificial Sequence
  ENSG00000167346_1 (sequence is synthesized)
tatttccatcaatttttcctgaccaagaaggagtcgccactccttacccaggagacacaaacacagctcctgcaacaattccatcggaatgggacagacctacttgacatgcagatgcat

SEQ ID NO: 541472 - DNA, 120 bp, Artificial Sequence
  ENSG00000167346_2 (sequence is synthesized)
gctctgctacaccagccccactgtggggtgcctgatgggtccgacacctccatctcgccaggaagatgcaagtggaataagcacactctaacttacaggattatcaattacccacatgat

SEQ ID NO: 541473 - DNA, 120 bp, Artificial Sequence
  ENSG00000167346_3 (sequence is synthesized)
atgaagccatccgcagtgaaagacagtatatataatgcagtttccatctggagcaatgtgacccctttgatattccagcaagtgcagaatggagatgcagacatcaaggtttctttctgg

SEQ ID NO: 541474 - DNA, 120 bp, Artificial Sequence
  ENSG00000167346_4 (sequence is synthesized)
tgatgggccaggtggtatcttaggccatgcctttttaccaaattctggaaatcctggagttgtccattttgacaagaatgaacactggtcagcttcagacactggatataatctgttcct

SEQ ID NO: 541475 - DNA, 120 bp, Artificial Sequence
  ENSG00000167346_5 (sequence is synthesized)
ggttgcaactcatgagattgggcattctttgggcctgcagcactctgggaatcagagctccataatgtaccccacttactggtatcacgaccctagaaccttccagctcagtgccgatga

SEQ ID NO: 541476 - DNA, 120 bp, Artificial Sequence
  ENSG00000167346_6 (sequence is synthesized)
tatccaaaggatccagcatttgtatggagaaaaatgttcatctgacataccttaatgttagcacagaggacttattcaacctgtcctttcagggagtttattggaggatcaaagaactga

SEQ ID NO: 541477 - DNA, 120 bp, Artificial Sequence
  ENSG00000167346_7 (sequence is synthesized)
aagcactagagcagccttggggactgctaggatgaagccctaaagaatgcaacctagtcaggttagctgaaccgacactcaaaacgctactgagtcacaataaagattgttttaaagagt

SEQ ID NO: 541478 - DNA, 120 bp, Artificial Sequence
  ENSG00000167346_8 (sequence is synthesized)
agtttcttacaaaatcgtcctatccagcatgcacttttggatactctttcaactcagaagtcaacataaagggtatggatgatgacgccactcacagattcaaagaaagggcaaactggc

SEQ ID NO: 541479 - DNA, 120 bp, Artificial Sequence
  ENSG00000167346_9 (sequence is synthesized)
taactctctctcacttgctttgcattaatagattctctgctgtgtgggatgatccttcaaatagcagggggcaggatcaaataacctcaccttccagacccaagaattctgtgcacaaga

SEQ ID NO: 541480 - DNA, 120 bp, Artificial Sequence
  ENSG00000167355_0 (sequence is synthesized)
atgtcgtccagcggcagctcccatcccttcctattgactggttttccaggcttggaggaagctcatcactggatttccgtatttttcttgttcatgtatatatccatcctttttggcaat

SEQ ID NO: 541481 - DNA, 120 bp, Artificial Sequence
  ENSG00000167355_1 (sequence is synthesized)
ggcaccctccttcttctcattaaggaagatcacaatcttcatgagcccatgtacttctttctggccatgctggctgccacagacctggggctggccctgaccacaatgcccacggtgctg

SEQ ID NO: 541482 - DNA, 120 bp, Artificial Sequence
  ENSG00000167355_2 (sequence is synthesized)
ggagtcctctggctggatcacagggagattggaagtgcggcctgcttttcccaggcctactttatacactcactttcctttctcgagtctggcattctgcttgccatggcctatgaccgt

SEQ ID NO: 541483 - DNA, 120 bp, Artificial Sequence
  ENSG00000167355_3 (sequence is synthesized)
gttgttcccccaatcaggcccctctatttttttctgtattgtcactcccatgttctttcacatgcattctgccttcaccaggatgtcattaaactcgcctgtgctgataccaccttcaac

SEQ ID NO: 541484 - DNA, 120 bp, Artificial Sequence
  ENSG00000167355_4 (sequence is synthesized)
cgactgtacccagctgtgcttgtagtctttatatttgtgctggattatctgattatcttcatctcctatgtgttgatactcaagactgtcctgagcattgcctccagagaggagagggcc

SEQ ID NO: 541485 - DNA, 120 bp, Artificial Sequence
  ENSG00000167355_5 (sequence is synthesized)
aaggctctcattacctgtgtctcccatatctgctgtgtcctggttttttatgtcacagtgattggattgtctctgattcatcgttttggaaagcaggttccacatattgttcacctcatt

SEQ ID NO: 541486 - DNA, 120 bp, Artificial Sequence
  ENSG00000167355_6 (sequence is synthesized)
atgagctatgcctattttctgttccctccactaatgaatcctataacatatagtgtcaagaccaagcagattcagaatgccattcttcacctttttactacccatagaattggaacctga

SEQ ID NO: 541487 - DNA, 120 bp, Artificial Sequence
  ENSG00000167355_7 (sequence is synthesized)
cttctcctggccatggttgtgaggcctccccagctatgtggaactatgttgagaaggaacaacatgatctaagtctttagaaaccaagagccacgactagctgaggacacaagaattttc

SEQ ID NO: 541488 - DNA, 120 bp, Artificial Sequence
  ENSG00000167355_8 (sequence is synthesized)
acaaaacaaagtagagtgattccatagatcactattatagctgcattaccagtcctaggacagaatatggatgctgaaaaatgattctttcaaagtgctgagttgttgcctcacgcccag

SEQ ID NO: 541489 - DNA, 120 bp, Artificial Sequence
  ENSG00000167355_9 (sequence is synthesized)
aagtgctgagttgttgcctcacgcccagttgtctggcatctcttcactgaaactattacagttagatctcatctctatgggtggaagatttttctctgttgcccaggctagagtgcagtg

SEQ ID NO: 541490 - DNA, 70 bp, Artificial Sequence
  ENSG00000167355_10 (sequence is synthesized)
ttatgatcatgtgccaccacacctggcttatttttgtaattatagtagtgatggtgttttgcctcggcct

SEQ ID NO: 541491 - DNA, 120 bp, Artificial Sequence
  ENSG00000167355_11 (sequence is synthesized)
gctgttttttactcactttttgtctcacagtcattaggcattcatttctgccattatgttgaaattgtcaatattaccaaagacctagttgccccaaacaatcaacacctctatgtttat

SEQ ID NO: 541492 - DNA, 120 bp, Artificial Sequence
  ENSG00000167355_12 (sequence is synthesized)
attaattgataattctatatttttcactattaacctaccatagtatccactcctataaacttcccttttcattgtttttttgtaaatacagatcaactttgctatcctcttacatctgtg

SEQ ID NO: 541493 - DNA, 120 bp, Artificial Sequence
  ENSG00000167355_13 (sequence is synthesized)
gaaatgtcttatgaagaaaatggcccctgctccttaggtagcaggccataggcaaatactgaccctcttgccttctgaagctaagctccagcttcagtatgcacttgcttacctccttcc

SEQ ID NO: 541494 - DNA, 120 bp, Artificial Sequence
  ENSG00000167355_14 (sequence is synthesized)
cctgtccacactgcttttacttgctccctgtctcctgagagcattcattaataaattgcacacatttgaatccctatctcaggtattgctcatagagagtccaacttaagaaaaactgca

SEQ ID NO: 541495 - DNA, 120 bp, Artificial Sequence
  ENSG00000167355_15 (sequence is synthesized)
taaaaaaatcagctttatcatgttttttatccttgtcacgccatgtcacctgagcaacacagtctgaatactaaattgtgagtgtgagtgcatatatgtgatggtaggtttttgtcctgt

SEQ ID NO: 541496 - DNA, 120 bp, Artificial Sequence
  ENSG00000167355_16 (sequence is synthesized)
tttcaatcattcataaaaccaaacatgtgtcccttaattatgctctactacatccacaacttattttattcataaaaatattgtggggtagatattatcactgttttcttgatggggaaa

SEQ ID NO: 541497 - DNA, 120 bp, Artificial Sequence
  ENSG00000167355_17 (sequence is synthesized)
tttaatataaaaaagttaaatattccctccaagggcataacatttttaattggtatagtcatgattcaaatttatatcttctaactataaggccagtgtgaatggtactccactacagta

SEQ ID NO: 541498 - DNA, 120 bp, Artificial Sequence
  ENSG00000167355_18 (sequence is synthesized)
gactatccttagtggcttctactttttgccttgtattccgtcatgcttgtagtacctactttctttttctgaaaatttctcctccttctactccaaaaatattgttccctatgaaaactg

SEQ ID NO: 541499 - DNA, 120 bp, Artificial Sequence
  ENSG00000167355_19 (sequence is synthesized)
atattttgcattgtatctccaaactcctaaccgcagtagaagaacttttttaaaaagaatttttcaatatgacattgcaaaaaaaaaaagagtaatgcttttgttgtagaattactaaaa

SEQ ID NO: 541500 - DNA, 120 bp, Artificial Sequence
  ENSG00000167355_20 (sequence is synthesized)
tgcaatgcttagaattgttaatgacaatgtttttcatcaggcaagtgacttcaaactataataaatatttagagtaaattatagataaagaaatgataataaataaaaagaatcttcaaa

SEQ ID NO: 541501 - DNA, 120 bp, Artificial Sequence
  ENSG00000167355_21 (sequence is synthesized)
ttgtctggcatctcttcactgaaactattacagttagatctcatctctatgggtggaagtttatgtctttataaatggtttcctgaacagttcctaagctttttgtcagcatggcaagtt

SEQ ID NO: 541502 - DNA, 120 bp, Artificial Sequence
  ENSG00000167355_22 (sequence is synthesized)
gaagaagctctggatgatggatctatgttaccttcagaaactcttgaggactctgggatagttgctgtcaaagaatcagtccaaaggcactcagaaaggggcaagagaacagtgagccag

SEQ ID NO: 541503 - DNA, 120 bp, Artificial Sequence
  ENSG00000167355_23 (sequence is synthesized)
tcatttttgcatccctcagggggcctctatgcttgcctgagagtgataaattccactaaagttatgactctcacttttgtcatgtatcacattctaggagactccctaaactattagggc

SEQ ID NO: 541504 - DNA, 120 bp, Artificial Sequence
  ENSG00000167355_24 (sequence is synthesized)
ggaatatttgggtatgtggacagtttctggtactaccaaatttgccacaattaaatgccagcgtagctgttttgctagagactgcagatgttaaatagagggctatctttaggtcaataa

SEQ ID NO: 541505 - DNA, 120 bp, Artificial Sequence
  ENSG00000167355_25 (sequence is synthesized)
aatatacttataaattgtattaactatttccccagtaattaccacacagttttaataaaaccctgtgcatccgcatgtcccaaacgcagctcaggttttgaaaacacgactatagtttaa

SEQ ID NO: 541506 - DNA, 120 bp, Artificial Sequence
  ENSG00000167355_26 (sequence is synthesized)
gaataatcaggcctcctccggcttcctccatctggtccattatctgggtgacagtagatccaaataagtggttagctcttatcctgtacaacaaattttggcattaatccattctcttat

SEQ ID NO: 541507 - DNA, 120 bp, Artificial Sequence
  ENSG00000167355_27 (sequence is synthesized)
aaggcaacattggaaggttaagagaacttataatgatatacacatcactcctgtggcggtagataagttctgccacattaagcactatgcaggtcataattcagtggatcaagttagtta

SEQ ID NO: 541508 - DNA, 120 bp, Artificial Sequence
  ENSG00000167355_28 (sequence is synthesized)
gcagtgtttttagtatccatatgaacatagtctctgctactgcagtgcctagactgacatttttgttatcaacagtgtcccctgaagtagcagccctttcaaaagtcctttcacctttcc

SEQ ID NO: 541509 - DNA, 120 bp, Artificial Sequence
  ENSG00000167355_29 (sequence is synthesized)
tctgtccatctctctccaccaataattgcttatattagagatgttactatgtgccaaaattctgaaacatataattattattgtttctataggtttttataaaataaaaaaggtgcaaag

SEQ ID NO: 541510 - DNA, 120 bp, Artificial Sequence
  ENSG00000167359_0 (sequence is synthesized)
atgctgggtctcaatggcacccccttccagccagcaacactccagctgacaggcattcctgggatacaaacaggcctcacctgggttgccctgattttctgcatcctctacatgatctcc

SEQ ID NO: 541511 - DNA, 120 bp, Artificial Sequence
  ENSG00000167359_1 (sequence is synthesized)
attgtaggtaacctcagcattctcactctggtgttttgggagcctgctctgcatcagcccatgtactacttcctctctatgctcgctctcaatgatctgggagtgtccttttctacactt

SEQ ID NO: 541512 - DNA, 120 bp, Artificial Sequence
  ENSG00000167359_2 (sequence is synthesized)
cccactgtgatttctactttctgcttcaactacaaccatgttgcgtttaatgcttgcctggtccagatgttcttcatccacactttctccttcatggagtcaggcatactgctggccatg

SEQ ID NO: 541513 - DNA, 120 bp, Artificial Sequence
  ENSG00000167359_3 (sequence is synthesized)
accactctcttccctttcccttttgtggtgaaacgactgcccttctgcaaaggcaatgttttgcatcactcctactgtctccatccagatctcatgaaagtagcatgtggagacatccat

SEQ ID NO: 541514 - DNA, 120 bp, Artificial Sequence
  ENSG00000167359_4 (sequence is synthesized)
gttaacaacatttatgggctcttggtgatcatttttacctatggtatggactcaactttcatcctgctttcctacgcattgatcctgagagccatgctggtcatcatatcccaggaacag

SEQ ID NO: 541515 - DNA, 120 bp, Artificial Sequence
  ENSG00000167359_5 (sequence is synthesized)
cggctcaaggcactcaacacctgcatgtcacacatctgtgcagtgctggccttttatgtgcccataattgctgtctccatgattcaccgcttctggaaaagtgctccacctgttgttcat

SEQ ID NO: 541516 - DNA, 120 bp, Artificial Sequence
  ENSG00000167359_6 (sequence is synthesized)
gtcatgatgtccaatgtctacctgtttgtaccacccatgctcaaccctatcatctacagtgtgaaaaccaaggagatccgcaaagggattctcaagttcttccataaatcccaggcctga

SEQ ID NO: 541517 - DNA, 120 bp, Artificial Sequence
  ENSG00000167360_0 (sequence is synthesized)
ttggattaaatggggcaaagagatattatttctaatgtttctttttctccctgagtgaagatcctgaatctgaagacacattcatcagtcatgtcccaggtgactaacaccacacaagaa

SEQ ID NO: 541518 - DNA, 120 bp, Artificial Sequence
  ENSG00000167360_1 (sequence is synthesized)
ggcatctacttcatcctcacggacatccctggatttgaggcctcccacatctggatctccatccccgtctgctgtctctacaccatctccatcatgggcaataccaccatcctcactgtc

SEQ ID NO: 541519 - DNA, 120 bp, Artificial Sequence
  ENSG00000167360_2 (sequence is synthesized)
attcgcacagagccatctgtccaccagcgcatgtatctgtttctctccatgctggccctgacggacctgggtctcaccctcaccaccctacccacagtcatgcagcttctctggttcaac

SEQ ID NO: 541520 - DNA, 120 bp, Artificial Sequence
  ENSG00000167360_3 (sequence is synthesized)
gttcgtagaatcagctctgaggcctgttttgctcagtttttcttccttcatggattctcctttatggagtcttctgtcctcctggctatgtccgttgactgctatgtggccatctgctgt

SEQ ID NO: 541521 - DNA, 120 bp, Artificial Sequence
  ENSG00000167360_4 (sequence is synthesized)
ccatcctcaccaatgaagtcattggtagaactgggttagccatcatttgctgctgtgttctggcggttcttccctcccttttcttactcaagcgactgcctttctgccactcccaccttc

SEQ ID NO: 541522 - DNA, 120 bp, Artificial Sequence
  ENSG00000167360_5 (sequence is synthesized)
tctctcgctcctattgcctccaccaggatatgatccgcctggtctgtgctgacatcaggctcaacagctggtatggatttgctcttgccttgctcattattatcgtggatcctctgctca

SEQ ID NO: 541523 - DNA, 120 bp, Artificial Sequence
  ENSG00000167360_6 (sequence is synthesized)
ttgtgatctcctatacacttattctgaaaaatatcttgggcacagccacctgggctgagcgactccgtgccctcaataactgcctgtcccacattctagctgtcctggtcctctacattc

SEQ ID NO: 541524 - DNA, 120 bp, Artificial Sequence
  ENSG00000167360_7 (sequence is synthesized)
ccatggttggtgtatctatgactcatcgctttgccaagcatgcctctccactggtccatgttatcatggccaatatctacctgctggcacccccggtgatgaaccccatcatttacagtg

SEQ ID NO: 541525 - DNA, 120 bp, Artificial Sequence
  ENSG00000167360_8 (sequence is synthesized)
taaagaacaagcagatccaatggggaatgttaaatttcctttccctcaaaaatatgcattcaagatgagggaatgcatttcttaaattactgacaagtatgagtcataggcttaaggggg

SEQ ID NO: 541526 - DNA, 120 bp, Artificial Sequence
  ENSG00000167363_0 (sequence is synthesized)
agagtcccgcgccccgcactccatggagcagctgctgcgcgccgagctgcgcaccgcgaccctgcgggccttcggcggccccggcgccggctgcatcagcgagggccgagcctacgacac

SEQ ID NO: 541527 - DNA, 120 bp, Artificial Sequence
  ENSG00000167363_1 (sequence is synthesized)
ggacgcaggcccagtgttcgtcaaagtcaaccgcaggacgcaggcccggcagatgtttgagggggaggtggccagcctggaggccctcaggagcacgggcctggtgcgggtgccgaggcc

SEQ ID NO: 541528 - DNA, 120 bp, Artificial Sequence
  ENSG00000167363_2 (sequence is synthesized)
catgaaggtcatcgacctgccgggaggtggggccgcctttgtgatggagcatttgaagatgaagagcttgagcagtcaagcatcaaaacttggagagcagatggcagatttgcatcttta

SEQ ID NO: 541529 - DNA, 120 bp, Artificial Sequence
  ENSG00000167363_3 (sequence is synthesized)
caaccagaagctcagggagaagttgaaggaggaggagaacacagtgggccgaagaggtgagggtgctgagcctcagtatgtggacaagttcggcttccacacggtgacgtgctgcggctt

SEQ ID NO: 541530 - DNA, 120 bp, Artificial Sequence
  ENSG00000167363_4 (sequence is synthesized)
catcccgcaggtgaatgagtggcaggatgactggccgacctttttcgcccggcaccggctccaggcgcagctggacctcattgagaaggactatgctgaccgagaggcacgagaactctg

SEQ ID NO: 541531 - DNA, 120 bp, Artificial Sequence
  ENSG00000167363_5 (sequence is synthesized)
ctctggtcgggaaacgtggctgaggacgacgtggggcccattatttacgacccggcttccttctatggccattccgagtttgaactggcaatcgccttgatgtttggggggttccccaga

SEQ ID NO: 541532 - DNA, 120 bp, Artificial Sequence
  ENSG00000167363_6 (sequence is synthesized)
tccttcttcaccgcctaccaccggaagatccccaaggctccgggcttcgaccagcggctgctgctctaccagctgtttaactacctgaaccactggaaccacttcgggcgggagtacagg

SEQ ID NO: 541533 - DNA, 120 bp, Artificial Sequence
  ENSG00000167363_7 (sequence is synthesized)
agcccttccttgggcaccatgcgaaggctgctcaagtagcggcccctgccctcccttcccctgtccccgtccccgtctccgtctccccgtccctgtccccccgtcccccgtccctgtgcc

SEQ ID NO: 541534 - DNA, 120 bp, Artificial Sequence
  ENSG00000167363_8 (sequence is synthesized)
cccgtccctgtccccctgttcccgtctccccgtccctccgtctccatccccccgtccccccatcctcctgtccccgtccccccgtccccgtccctccatccctgtcccccgtccccctgt

SEQ ID NO: 541535 - DNA, 120 bp, Artificial Sequence
  ENSG00000167363_9 (sequence is synthesized)
ccccctgtccacataccaatccccctgtccccgaccccccatccccgtcccccatctccgtccccgtcccccctgccccgtccccgtctccgttcccccgtccccatcctccatccccgt

SEQ ID NO: 541536 - DNA, 120 bp, Artificial Sequence
  ENSG00000167363_10 (sequence is synthesized)
ctcccatcgccgtccccccgtccccgtcccccgtccccgtcccccctgtccctgtcccccttcccccgacccctcccagatcctggggaccaataaagcccgcagcgggtctcggctggc

SEQ ID NO: 541537 - DNA, 120 bp, Artificial Sequence
  ENSG00000167363_11 (sequence is synthesized)
ctctgggccgcccctctcagcccaccgtcctcctggcagtgggaaagaagcagagacatggctgggcccctggcagggaccccacgggccaggccagcgttctccttcccacaggccttg

SEQ ID NO: 541538 - DNA, 120 bp, Artificial Sequence
  ENSG00000167363_12 (sequence is synthesized)
cttcccacaggccttgtctgtgtttagacctgatttctatctcctgctgaaaatagttctgtttaagaatgtatggaaggccgggcgcggtggttcacacctgtaatcccatcactttgg

SEQ ID NO: 541539 - DNA, 120 bp, Artificial Sequence
  ENSG00000167363_13 (sequence is synthesized)
catgcaattctataggccaaggtattcatggaccacgttcgtcaatgcatgttttcaaccaatgtgtactgtacgtgaggtgagtgttcacctaactgaaaactggaatgtttgtgggaa

SEQ ID NO: 541540 - DNA, 120 bp, Artificial Sequence
  ENSG00000167363_14 (sequence is synthesized)
aaacaggaaggcccaggtcccacgggaggcgttgggggccggccgggtgtgccgtgccttttaccttcccagcccctgccctggacctgaggccccgcctgatgggcccagccctcttct

SEQ ID NO: 541541 - DNA, 120 bp, Artificial Sequence
  ENSG00000167363_15 (sequence is synthesized)
tccctgcctgacgtgtgtgcccaagttagctccagtgaggcctctgctgtggctgccccaccctaagaggcagcaaggaaggtgggtagcccgggggtccagctctggaccttggttcac

SEQ ID NO: 541542 - DNA, 120 bp, Artificial Sequence
  ENSG00000167363_16 (sequence is synthesized)
tcacacctccccacgccctcagtgctcccgggcacccacacgtggcctgtgcatcctcctgtcacagcagcctgcagaccccacacccctcacggcccaggctcagcctcagccttgcag

SEQ ID NO: 541543 - DNA, 120 bp, Artificial Sequence
  ENSG00000167363_17 (sequence is synthesized)
cctctcgtctccgacggggggcccctctgcaccctgccctctgtggtggacgccagctcccagccagagccagctatcagtgaatgaaggtccttgtgactcccacgtggtagcttctgt

SEQ ID NO: 541544 - DNA, 120 bp, Artificial Sequence
  ENSG00000167363_18 (sequence is synthesized)
aacggagctggagcagggaacactgagtcctggagcacacatcagggaggaaggggggcaggggcgggggttcccccaaaagggagtccgaaaggagtgaggagtgaagacacacttggc

SEQ ID NO: 541545 - DNA, 120 bp, Artificial Sequence
  ENSG00000167363_19 (sequence is synthesized)
tcctcgtgcccctctccactgctaggtcaccaggtatttagcctcagactttcctcatgtgaaacacaggtgcttgtaaatggtggtgtttaccatgattactgttcttactatcagtaa

SEQ ID NO: 541546 - DNA, 120 bp, Artificial Sequence
  ENSG00000167363_20 (sequence is synthesized)
cacttgtccactccatcgtgttcctctcccatgggaagatgtgggtaccagatgatccagaatgactgatttcaaaacataactctcggccgggcacagtggttcacgcctgtaatcgca

SEQ ID NO: 541547 - DNA, 120 bp, Artificial Sequence
  ENSG00000167363_21 (sequence is synthesized)
cctgtatcaaaaagaaaaaaaatcaaaatataactctcaaaatgttaaaaaagaatgtgcatgtcaatccagagtgagtatacatcaaagagacttgaactcattaatgaagaaactagg

SEQ ID NO: 541548 - DNA, 62 bp, Artificial Sequence
  ENSG00000167363_22 (sequence is synthesized)
taatgaagaaactagattttacctgaggtcaggatttcaagaccagactggccaatatggtg

SEQ ID NO: 541549 - DNA, 120 bp, Artificial Sequence
  ENSG00000167363_23 (sequence is synthesized)
gctcagggagaagttgaaggaggaggagaacacagtgggtatgttcagattgcttttgggtacccttgatccagccacattgtctaccctagatgggtgctcatggtacttcttggtggc

SEQ ID NO: 541550 - DNA, 120 bp, Artificial Sequence
  ENSG00000167363_24 (sequence is synthesized)
atttcaataataggttgagttgtataccgtctgtctttacactacattatgaaaatgagattattaaataagaattttgatgtagctgataagctagtagaattggcacatgatcccttt

SEQ ID NO: 541551 - DNA, 120 bp, Artificial Sequence
  ENSG00000167363_25 (sequence is synthesized)
tgagggtgttccctgatgccctaatgctggtcacccactctttatatgtgacagaatgctaatctcccaagcaccagcaagattgactacttgatttctgaaagcagagtagaagctgtg

SEQ ID NO: 541552 - DNA, 120 bp, Artificial Sequence
  ENSG00000167371_0 (sequence is synthesized)
gagcacacgggagaggagaagagggagacccgccgcctccctccctccctagctgacttgctccctcccgggctgcggctgctgcaaaagccagcagcggcagcgggagctgtccggagg

SEQ ID NO: 541553 - DNA, 120 bp, Artificial Sequence
  ENSG00000167371_1 (sequence is synthesized)
ccggcgtcgagggtttgccgctgtctctgctattccatcctccccataggggctctctcccctctcccatctcaagatggcagccagcagctctgagatctctgagatgaagggggttga

SEQ ID NO: 541554 - DNA, 120 bp, Artificial Sequence
  ENSG00000167371_2 (sequence is synthesized)
ggagagtcccaaggttccaggcgaagggcctggccattctgaagctgaaactggccctccccaggtcctagcaggggtaccagaccagccagaggccccgcagccaggtccaaacaccac

SEQ ID NO: 541555 - DNA, 120 bp, Artificial Sequence
  ENSG00000167371_3 (sequence is synthesized)
tgcggcccctgtggactcagggcccaaggctgggctggctccagaaaccacagagaccccggctggggcctcagaaacagcccaggccacagacctcagcttaagcccaggaggggaatc

SEQ ID NO: 541556 - DNA, 120 bp, Artificial Sequence
  ENSG00000167371_4 (sequence is synthesized)
aaaggccaactgcagccccgaagacccatgccaagaaacagtgtccaaaccagaagtgagcaaagaggccactgcagaccaggggtccaggctggagtctgcagccccacctgaaccagc

SEQ ID NO: 541557 - DNA, 120 bp, Artificial Sequence
  ENSG00000167371_5 (sequence is synthesized)
cccagagcctgctccccaaccagacccccggccagattcccagcctacccccaagccagcccttcaaccagagctccctacccaggaggaccccacccctgagattctgtctgagagtgt

SEQ ID NO: 541558 - DNA, 120 bp, Artificial Sequence
  ENSG00000167371_6 (sequence is synthesized)
aggggaaaagcaagagaatggggcagtggtgcccctgcaggctggtgatggggaagagggcccagcccctgagcctcactcaccaccctcaaaaaaatcccccccagccaatggggcccc

SEQ ID NO: 541559 - DNA, 120 bp, Artificial Sequence
  ENSG00000167371_7 (sequence is synthesized)
cccccgagtgctgcagcagctggttgaggaggatcgaatgagaagggcacacagtgggcatccaggatctccccgaggtagcctgagccgccaccccagctcccagttggcaggtcctgg

SEQ ID NO: 541560 - DNA, 120 bp, Artificial Sequence
  ENSG00000167371_8 (sequence is synthesized)
ggtggaggggggtgaaggcacccagaaacctcgggactacatcatccttgccatcctgtcctgcttctgccccatgtggcctgtcaacatcgtggccttcgcttatgctgtcatgtcccg

SEQ ID NO: 541561 - DNA, 120 bp, Artificial Sequence
  ENSG00000167371_9 (sequence is synthesized)
gaacagcctgcagcagggggacgtggacggggcccagcgtctgggccgggtagccaagctcttaagcatcgtggcgctggtggggggagtcctcatcatcatcgcctcctgcgtcatcaa

SEQ ID NO: 541562 - DNA, 120 bp, Artificial Sequence
  ENSG00000167371_10 (sequence is synthesized)
ctgccttgggcccatccctcccctggggggagcccaactgatggccctggcccccacccctaaggaccaagggagcctgagcggccttgtttacagcttctgtcctgctcctgcatcttg

SEQ ID NO: 541563 - DNA, 120 bp, Artificial Sequence
  ENSG00000167371_11 (sequence is synthesized)
ccaggctcctctgccaactgtaggcctgcctcatccctgcactggttccaacctccctgcactaatgcctgcatcccctccggcctcttggccccctatccctgcacttctggaaacctc

SEQ ID NO: 541564 - DNA, 120 bp, Artificial Sequence
  ENSG00000167371_12 (sequence is synthesized)
cctgcactctggaaacctccctgaacacctccccaactctgcgctctcagcctccctgcatctctcctggcctccctgcacttcttccagccccccaaattctctggacctccaccctgg

SEQ ID NO: 541565 - DNA, 120 bp, Artificial Sequence
  ENSG00000167371_13 (sequence is synthesized)
ccgcctcctcccaactttcattgtcttggcatctctcaaccctcagtcctctcttccttcccttctttatcatctcccctttcctctccacgtcccgcccccttcctcttcctgcctcct

SEQ ID NO: 541566 - DNA, 120 bp, Artificial Sequence
  ENSG00000167371_14 (sequence is synthesized)
catctcccttaagcatcctcttctccaacctcccgtcaccgtttactctgcaaaattgacagcacttagacgaggcttgggggcagggagcagtgttgggagagggctccccaaccccag

SEQ ID NO: 541567 - DNA, 120 bp, Artificial Sequence
  ENSG00000167371_15 (sequence is synthesized)
gctcggactgttctctgctgggaccacccagggtcggacacccaagggtgcctggcaggtcgcagagttggcaagccgggcctcgtatggggactcgggtgagggtggcgagtactggtt

SEQ ID NO: 541568 - DNA, 120 bp, Artificial Sequence
  ENSG00000167371_16 (sequence is synthesized)
ccgaacgcacgcaggggagaagggagggacgcggcgctgacccttccaggtcagctggagttgacccgcccacctgggcttttcaaccccagtccgcgagtttctttcttgaaggtgtgg

SEQ ID NO: 541569 - DNA, 120 bp, Artificial Sequence
  ENSG00000167371_17 (sequence is synthesized)
gggctagattcattcacgtgcttcgtaatgaaataatccaaaaaataggaccaaagcgcccactggcaggagcgagggcggggcgccgcgctctataattattttctaagatgatggggg

SEQ ID NO: 541570 - DNA, 120 bp, Artificial Sequence
  ENSG00000167371_18 (sequence is synthesized)
tctaagatgatgggggaggtttgttgcacgcgacagcccgctgaggaggcggggaccgagctacaacgcggttcggatttggcgggggtttttttccttaaaaaaaaaaaaaaaaaaaaa

SEQ ID NO: 541571 - DNA, 120 bp, Artificial Sequence
  ENSG00000167371_19 (sequence is synthesized)
agaaaaaaactaaaattcttaaaaaaaaaaaaaaaaggctattatcaaactgatttctccctttttgtatgccggatgctgcatgagtctgaaacaccaataaacggagactgcatgaga

SEQ ID NO: 541572 - DNA, 120 bp, Artificial Sequence
  ENSG00000167371_20 (sequence is synthesized)
ggcaggggaggaatggaagggttggcaagggcagctttactaacccctgcccctgctctctcctgtctgtcctccttacctctcctttgtctctccttgtctccccctccccccgtctgt

SEQ ID NO: 541573 - DNA, 120 bp, Artificial Sequence
  ENSG00000167371_21 (sequence is synthesized)
acttgctccctcccgggctgcggctgctgcaaaagccagcagcggcagcgggagctgtccggaggccggcgtcgagccaatggggcccccccccgagtgctgcagcagctggttgaggag

SEQ ID NO: 541574 - DNA, 120 bp, Artificial Sequence
  ENSG00000167371_22 (sequence is synthesized)
atgccttccttcccctctcctctctgcatggatcccacctccccaattccagggcctttgtttgcctctccctaggacctaaccctctgagccaccactgccctgcccctttgggtggga

SEQ ID NO: 541575 - DNA, 120 bp, Artificial Sequence
  ENSG00000167371_23 (sequence is synthesized)
aagaaacagtgtccaaaccagaatcccggaacagcctgcagcagggggacgtggacggggcccagcgtctgggccgggtagccaagctcttaagcatcgtggcgctggtggggggagtcc

SEQ ID NO: 541576 - DNA, 120 bp, Artificial Sequence
  ENSG00000167371_24 (sequence is synthesized)
ggaattcccaactcggacaggcccagaatagcccctggaggtttgaagaggccccgtcagaaacccaaacagagctgccagacgggaatgccgccctcccccgtccacactcatggccgc

SEQ ID NO: 541577 - DNA, 120 bp, Artificial Sequence
  ENSG00000167371_25 (sequence is synthesized)
tgctcagcccccagccgcatccctccccacgcgcgtcacggccctgaggccatggaatcccggtgaccgttggcgggaggggccggggacttaagaaggaggcgtctctcctggaggcgc

SEQ ID NO: 541578 - DNA, 120 bp, Artificial Sequence
  ENSG00000167371_26 (sequence is synthesized)
ctagctgacttgctccctcccgggctgcggctgctgcaaaagccagcagcggcagcgggagctgtccggaggccggcgtcgaggtgagacccgggcagactgaggctgcggggtttgccg

SEQ ID NO: 541579 - DNA, 120 bp, Artificial Sequence
  ENSG00000167371_27 (sequence is synthesized)
ctcctccttcctcccttacccgccatctatggggctggcctctctctcttctggatgacttttccacctgatcccttctgggctggcttctcctgaccccggctatgtgcctccacccct

SEQ ID NO: 541580 - DNA, 120 bp, Artificial Sequence
  ENSG00000167371_28 (sequence is synthesized)
atcttccttgccctcctgctcgtagagacgcctccacccggtcctgcctgtctcactggtcccgtctcctcgcagaaccctctccgtttcccccaaatccccgtctcttccaggaatccc

SEQ ID NO: 541581 - DNA, 120 bp, Artificial Sequence
  ENSG00000167377_0 (sequence is synthesized)
ctccagcccttctctgagacggggaccaggggatggcagccatgcacctgacagcctggccccagaagtcggtgacctttgaggacgtggctgtgtacttcacccaggcggaatgggatg

SEQ ID NO: 541582 - DNA, 120 bp, Artificial Sequence
  ENSG00000167377_1 (sequence is synthesized)
gcctgtcccctgcacagaggaccctgtacagggatgtgatgctggagaattatgggaatgtggcctccctgggatttccacttctcaaacctgctgtgatctcacaactggagggaggaa

SEQ ID NO: 541583 - DNA, 120 bp, Artificial Sequence
  ENSG00000167377_2 (sequence is synthesized)
gtgagctggggggctcatctccactggctgcaggaacaggcctccagggcctccagactgtagatattcagactgacaatgatttgacaaaggaaatgtatgaaggaaaagagaatgtat

SEQ ID NO: 541584 - DNA, 120 bp, Artificial Sequence
  ENSG00000167377_3 (sequence is synthesized)
catttgaacttcaaagagacttttcccaggaaacagacttttcagaagcctctcttctagagaaacaacaggaagtccactcagcaggaaatataaagaaggagaagagcaacaccattg

SEQ ID NO: 541585 - DNA, 120 bp, Artificial Sequence
  ENSG00000167377_4 (sequence is synthesized)
atggaacagtgaaagatgagacaagccccgtggaggagtgtttttttagtcaaagttcaaactcatatcagtgtcataccatcactggagagcagccctctgggtgtacaggattgggga

SEQ ID NO: 541586 - DNA, 120 bp, Artificial Sequence
  ENSG00000167377_5 (sequence is synthesized)
aatccatcagctttgatacaaaactcgtgaagcatgaaataattaattctgaggaaagacctttcaaatgtgaagaattagtagagccctttaggtgtgactctcaacttattcaacatc

SEQ ID NO: 541587 - DNA, 120 bp, Artificial Sequence
  ENSG00000167377_6 (sequence is synthesized)
aagagaacaacactgaggaaaagccttatcagtgttcggagtgtggcaaagctttcagcattaatgagaaattaatttggcatcagagacttcacagtggggagaaacccttcaaatgtg

SEQ ID NO: 541588 - DNA, 120 bp, Artificial Sequence
  ENSG00000167377_7 (sequence is synthesized)
tggagtgtgggaaaagcttcagctacagttcccattatatcacacatcagacaatccacagtggggagaagccctatcagtgtaagatgtgtgggaaggccttcagtgttaatggaagcc

SEQ ID NO: 541589 - DNA, 120 bp, Artificial Sequence
  ENSG00000167377_8 (sequence is synthesized)
taagtaggcatcagagaatccatacgggagagaagccctatcagtgcaaggaatgtggaaatggcttcagctgtagttctgcatatattacacatcagagagtccacactggagagaaac

SEQ ID NO: 541590 - DNA, 120 bp, Artificial Sequence
  ENSG00000167377_9 (sequence is synthesized)
cttacgagtgtaatgactgtgggaaagcgttcaatgttaatgcaaaattaattcaacatcagagaatccatactggagagaaaccttatgaatgtaatgaatgtggaaaaggcttcaggt

SEQ ID NO: 541591 - DNA, 120 bp, Artificial Sequence
  ENSG00000167377_10 (sequence is synthesized)
gaaaaggcttcaataataatacaaaactcattcagcatcagagaatccacacaggtgagaaaccctatgaatgcactgaatgtggaaaagccttcagtgtcaaagggaagttaatccaac

SEQ ID NO: 541592 - DNA, 120 bp, Artificial Sequence
  ENSG00000167377_11 (sequence is synthesized)
accagagaattcacacaggcgagaaaccctatgagtgtaatgaatgcgggaaagccttcagatgtaactcccaatttcggcagcatctgagaattcacactggggagaagccctatgagt

SEQ ID NO: 541593 - DNA, 120 bp, Artificial Sequence
  ENSG00000167377_12 (sequence is synthesized)
gtaatgagtgtggaaaggccttcagcgttaatgggaaactaatgcggcatcagagaattcacactggggagaaaccttttgaatgtaatgagtgtgggagatgctttacttctaaaagaa

SEQ ID NO: 541594 - DNA, 120 bp, Artificial Sequence
  ENSG00000167377_13 (sequence is synthesized)
acctacttgatcatcaccgaatccatactggagaaaagccctatcaatgtaaggaatgtgggaaagccttcagtatcaatgccaaactaactaggcatcagaggatacatactggggaga

SEQ ID NO: 541595 - DNA, 120 bp, Artificial Sequence
  ENSG00000167377_14 (sequence is synthesized)
aacctttcaaatgtatggaatgtgagaaagcattcagctgtagttctaactatattgtgcaccagagaatccatacaggagagaaaccctttcagtgtaaggagtgtggaaaagccttcc

SEQ ID NO: 541596 - DNA, 120 bp, Artificial Sequence
  ENSG00000167377_15 (sequence is synthesized)
atgttaatgcccatttaattcggcatcagagaagccacactggggagaaacccttcagatgtgtggaatgtggcaaaggcttcagctttagttctgactacattatacatcagacagtcc

SEQ ID NO: 541597 - DNA, 120 bp, Artificial Sequence
  ENSG00000167377_16 (sequence is synthesized)
acacttggaagaaaccctatatgtgtagtgtgtgtgggaaagcattcaggtttagcttccagctcagtcagcatcagagtgtccatagtgaaggaaaatcctaataatgagaaagatata

SEQ ID NO: 541598 - DNA, 120 bp, Artificial Sequence
  ENSG00000167377_17 (sequence is synthesized)
gaaaactcttaaggttaatgccaaaatggatcaagtatcatcagattcatccattgaaaaacctccaagagggcatgaatatggcagagtcttcatatggaaacagtttttattctattc

SEQ ID NO: 541599 - DNA, 120 bp, Artificial Sequence
  ENSG00000167377_18 (sequence is synthesized)
agtttaaatcaggaaaggatgaccagttaaagagaaacatccaaaaatagctttgttttgtaccaacaggaattagaaaatataatgaaaagatttcgttcccagcagcatcaagaaaag

SEQ ID NO: 541600 - DNA, 120 bp, Artificial Sequence
  ENSG00000167377_19 (sequence is synthesized)
tagattttctagaaataaacagttatggaggacttgtatggagaaatttaagtcttcactgagggccactttacaaaggaaatttgaataaatggagagagagagaagccttgttgttgg

SEQ ID NO: 541601 - DNA, 120 bp, Artificial Sequence
  ENSG00000167377_20 (sequence is synthesized)
ataggaaaacccgtactaaagatactctacctacattaatttatttgtttaatttttgacaacaagcatgtattacttttgaaaagatgaaaaataaagatttatttaaaaaaggaaaaa

SEQ ID NO: 541602 - DNA, 120 bp, Artificial Sequence
  ENSG00000167377_21 (sequence is synthesized)
aacattgctactagcgttgtggataggagccaggatcctgcaatgtacaggacagtcctgcccactgaaaaaatgttcacactttcaaatgtcttgctgaacattcaggggtaacagtca

SEQ ID NO: 541603 - DNA, 120 bp, Artificial Sequence
  ENSG00000167377_22 (sequence is synthesized)
ccgtgggccagacccgagctagccgacagggatgcggccacagctggccgggcgtgaccaccaccgaggcgcagcgaccttgctcctagagaggcccggccgcctggtgacgcacttccg

SEQ ID NO: 541604 - DNA, 120 bp, Artificial Sequence
  ENSG00000167377_23 (sequence is synthesized)
gacagcctggccccagggcctgagctatggaattggccctagggcagcaggaacctattgtttcagaagtcggtgacctttgaggacgtggctgtgtacttcacccaggcggaatgggat

SEQ ID NO: 541605 - DNA, 120 bp, Artificial Sequence
  ENSG00000167377_24 (sequence is synthesized)
gttttggggaatacagctgtacacagggaaggtaatgtggaagggaggaagtgctcttaatttttgcttcttaaatgtgaatgtgtaaaggaatcctgaggtcttacagatatgcagtaa

SEQ ID NO: 541606 - DNA, 120 bp, Artificial Sequence
  ENSG00000167377_25 (sequence is synthesized)
gtgtggagtctgcatttctatgaagttccctggtgatgtggcgatgccagtacttctggttaccagaccacacttgaaggagcagggctccaattggtgccagcagagtagctgccaaat

SEQ ID NO: 541607 - DNA, 120 bp, Artificial Sequence
  ENSG00000167377_26 (sequence is synthesized)
gacttctcattccccccgaggccccccgttatttcttatatttagggtctgtgagattctcttgaattttttcagtgagtcttcatttttcttagatggtttctgtaggtttttattcct

SEQ ID NO: 541608 - DNA, 120 bp, Artificial Sequence
  ENSG00000167377_27 (sequence is synthesized)
tttgatcattctatcagacgatatctgaccaaagaaggcatgttttggaaatggagtttgccgtataatggccttgacaaatatagggaaaaaagtgatattgtgaggtcttaatcaaag

SEQ ID NO: 541609 - DNA, 120 bp, Artificial Sequence
  ENSG00000167377_28 (sequence is synthesized)
gaccctgtattttattctgtagacagctgactgtcctgaagtctttgacttttccaggaaacccatcatgatcctagctggtgatagaaacattaatgtagtcagtgtgtgtgggttaat

SEQ ID NO: 541610 - DNA, 120 bp, Artificial Sequence
  ENSG00000167377_29 (sequence is synthesized)
tgggatgaggaatcaaacaggctctaggcaggcagaagggagggcaaagggcatgaggcccatggcagcagtgttgactttctttttaaaaatcttcagaagcccagtcagtgatacctg

SEQ ID NO: 541611 - DNA, 120 bp, Artificial Sequence
  ENSG00000167377_30 (sequence is synthesized)
tttaagactcatttgctgtaactgtgtcaaatggccatcctcactgcaagagaggaaagtgaaaacgagagatatttcacctatcatattgagaataattaaattatattcaatgttggt

SEQ ID NO: 541612 - DNA, 120 bp, Artificial Sequence
  ENSG00000167377_31 (sequence is synthesized)
gagagtgcagcaaagcaggaatagacttctggagaggatgactagacatctgatagtatagatgtcttagtcagtttgggctacaataacagactgccatagattggatggcttataaac

SEQ ID NO: 541613 - DNA, 120 bp, Artificial Sequence
  ENSG00000167377_32 (sequence is synthesized)
aacagaaatttatttcatacagttctagtccaagatcaaggttcaggcaggttctgtctggcaagggcctgcttcccggctaatagacagctgtcttctcactgtatcctcacatggtgg

SEQ ID NO: 541614 - DNA, 120 bp, Artificial Sequence
  ENSG00000167377_33 (sequence is synthesized)
caagaaagggagctctctgggctcttttttaagggcattaatcccattcatgagggttctgccatagctcaacctcctgatacaatcacatcaggggttaggacttcagaatatgaattt

SEQ ID NO: 541615 - DNA, 120 bp, Artificial Sequence
  ENSG00000167377_34 (sequence is synthesized)
gtggggaggacaaacattcagtctatagcaacagatgagtattatttttttagttgggaagagaccagtattatttagaaagtgcttgctggggaatccaggcaattggaggggcttatt

SEQ ID NO: 541616 - DNA, 120 bp, Artificial Sequence
  ENSG00000167377_35 (sequence is synthesized)
gagggcaattatgaaatactggggcagggggcatattacatgtggttgaggagtgatgaaagatgaaaaaatatgaggcagcattttgggactgagcttttgagaaagttgggaacaaat

SEQ ID NO: 541617 - DNA, 120 bp, Artificial Sequence
  ENSG00000167377_36 (sequence is synthesized)
gcagagatgagtagttctagttctaaagactattgggattataaaaagatttttagggaatgatcaagtttaggattagaggaagaagtgaaaggaaaaggcaaggttaatgcagcagta

SEQ ID NO: 541618 - DNA, 120 bp, Artificial Sequence
  ENSG00000167377_37 (sequence is synthesized)
tttggaggggaatgggaagaaaggggatgagatggacctcaaatagagcctgtctaaagtagaaatgaagttgaaggacaaattttggaaagcccacagttaatgttctaaggaaagaaa

SEQ ID NO: 541619 - DNA, 120 bp, Artificial Sequence
  ENSG00000167377_38 (sequence is synthesized)
caaaattatttccattttgctccctggtgctgctgactgttgtcatcttccaagttgccatattctgttggatcctgtgccttttccttcttcagcattttccatttttttttaagtaag

SEQ ID NO: 541620 - DNA, 120 bp, Artificial Sequence
  ENSG00000167377_39 (sequence is synthesized)
gaactgagtgctataggaacaactaagaagaaactgcagggtgtagaaaagcatggtgtgattaaaagaatgctgagctggtggacaagacctagaattttattccactactgtcacttt

SEQ ID NO: 541621 - DNA, 89 bp, Artificial Sequence
  ENSG00000167377_40 (sequence is synthesized)
agatggagtctcgctctgtcgcccaaactggagtgcagtggcaagaacttggctcaccgcaacttccgtttcccgggttcgagcaaact

SEQ ID NO: 541622 - DNA, 79 bp, Artificial Sequence
  ENSG00000167377_41 (sequence is synthesized)
ccgagtagctggaactacaggcacgtaccaccacacccggctaattttttgtgtgcaaactcccaagctcaggcaatct

SEQ ID NO: 541623 - DNA, 120 bp, Artificial Sequence
  ENSG00000167377_42 (sequence is synthesized)
attacaggtgtgagctaccgtgcccagctgtcacttttaaccttcatgtgattggttatgttctctacagtggccttgtattaggcacagtgggaatggtgattttttttttatcattac

SEQ ID NO: 541624 - DNA, 120 bp, Artificial Sequence
  ENSG00000167377_43 (sequence is synthesized)
tggtgattttttttttatcattactttcattgcttttcattactttcataatattgacacctattcaacagtacagaaagtgtataaagtagggaagcaagtccactaaacttcctatgc

SEQ ID NO: 541625 - DNA, 120 bp, Artificial Sequence
  ENSG00000167377_44 (sequence is synthesized)
atgccagtttatttagtttcttatggattcttctagaagttttctaggtatgtacaaatatatatatctgtcttttatatttttctttacacagctgaaaatctattctatatactgttt

SEQ ID NO: 541626 - DNA, 120 bp, Artificial Sequence
  ENSG00000167377_45 (sequence is synthesized)
atttgattgtatcttggatgtctttttacgtcagcatatatggatttattgtattcttttactagttagttacaaattacttatcccaccttatggagaaaccctatgttttttgaccta

SEQ ID NO: 541627 - DNA, 120 bp, Artificial Sequence
  ENSG00000167377_46 (sequence is synthesized)
gtctggtgattttaaggagccccctgattattatggtcttttatagcacagttctcttctttttcctaacatggttcttacatgacattttatgttttctgttttttatagtagatattc

SEQ ID NO: 541628 - DNA, 120 bp, Artificial Sequence
  ENSG00000167377_47 (sequence is synthesized)
ggcactcagacaacgtctatgtgtaaaggcgaccaccttattaggtctcctgcagcagccaagaccaaacacattgaagtatgtgtttttaaacgacagatgacggtcctcttttttttc

SEQ ID NO: 541629 - DNA, 120 bp, Artificial Sequence
  ENSG00000167377_48 (sequence is synthesized)
tctttcattacacttaaggcataacattagtttttaatatgtaggtgtgtatgttatgtatgattttctaggccattatatatgaatatcaggtcaggagaataagatggacattacaaa

SEQ ID NO: 541630 - DNA, 120 bp, Artificial Sequence
  ENSG00000167377_49 (sequence is synthesized)
ctatttgttagaaaaagggggcattgggtgtgacagcgcgccatccactggtccatttccaagactcccacacgtggctgcacctgcagcttcacctccccgggctgggtccccgcttgg

SEQ ID NO: 541631 - DNA, 120 bp, Artificial Sequence
  ENSG00000167377_50 (sequence is synthesized)
gtgacgcacttccggcagcgccggggagcagtccgctacggagctccagcccttctctgagacggggaccaggggatggcagccatgcacctgacagcctggccccagtagatattcaga

SEQ ID NO: 541632 - DNA, 120 bp, Artificial Sequence
  ENSG00000167377_51 (sequence is synthesized)
ggttactgaggggatctctggtaatcctttactgagtgagaaccccagagctgttcctaatctagacttagaggttactggcaggggcaaatgccaagccttttgtaggcctatatagga

SEQ ID NO: 541633 - DNA, 120 bp, Artificial Sequence
  ENSG00000167377_52 (sequence is synthesized)
ctttgcttggaactggtatgcactgttgatccaacccatgaaagctatgttttggaaacactggaatccagttgcttcctgttccacagtggcatcttcagttgccccctcatcttacct

SEQ ID NO: 541634 - DNA, 120 bp, Artificial Sequence
  ENSG00000167377_53 (sequence is synthesized)
gtcttgagtcttttcaaggatctcagtgtactctggattatttcaggccaaggtcaaaaagtggtatccctttgggcagaatctccctgcttgccctgcatgaggtctcctaggcctaca

SEQ ID NO: 541635 - DNA, 120 bp, Artificial Sequence
  ENSG00000167377_54 (sequence is synthesized)
gtctgggccctaaccaggctctcccacacgttcccaagccttcacccccaacccccacatttgcctcccaaagcccttggaagtctccaaggtctctttagtccttcctaagccccacag

SEQ ID NO: 541636 - DNA, 120 bp, Artificial Sequence
  ENSG00000167377_55 (sequence is synthesized)
tactttcccgtagtcctgaggcttgggacctcctggggttcttaccttccctccccattgctgagacagtctgagaagaggcttaggaatttgtctgtgggagtttattcatctgtctct

SEQ ID NO: 541637 - DNA, 120 bp, Artificial Sequence
  ENSG00000167377_56 (sequence is synthesized)
cacttccggcagcgccggggagcagtccgctacggagctccagcccttctctgagacggggaccaggggatggcagccatgcacctgacagcctggccccagggacttcacggatcccct

SEQ ID NO: 541638 - DNA, 120 bp, Artificial Sequence
  ENSG00000167377_57 (sequence is synthesized)
ttgacatgctgaggtctggcaggaacattaacctatgtgcatcccgagtatggaccgtgtgctcccaggctcctgacatagggtcatgaattagggccgagtgggagcgcagagcccctc

SEQ ID NO: 541639 - DNA, 120 bp, Artificial Sequence
  ENSG00000167377_58 (sequence is synthesized)
ccagtcacccggcagcagaagcagcccggcttttggaggacattgtctcctggagcagtgtcagtcccaaaagctccagcccttctctgagacggggaccaggggatggcagccatgcac

SEQ ID NO: 541640 - DNA, 120 bp, Artificial Sequence
  ENSG00000167377_59 (sequence is synthesized)
cggaggtgagtgcagggctccgggcgctgtgtgccgtgccctgtcccccaggctctgggtccggttgagacgcactcccaccctgggtgctgcagggtctcccgtggcctacgctgccag

SEQ ID NO: 541641 - DNA, 120 bp, Artificial Sequence
  ENSG00000167377_60 (sequence is synthesized)
gaggcccaggctgggagagggagcagggcggcggcccggggtgctcttccgcgctcctcgactccagctttggtctttgtggctcaatagcttgcgcccattggaaggggaaacgcacgt

SEQ ID NO: 541642 - DNA, 120 bp, Artificial Sequence
  ENSG00000167377_61 (sequence is synthesized)
tgctgtcccagccacgaggccctgagcatttagcacttggtcgacgggggaagatgtgtcggtgcagctaaaagatggaatatttgcgggcgtgaagcggcccgaggtgataccacaagt

SEQ ID NO: 541643 - DNA, 120 bp, Artificial Sequence
  ENSG00000167378_0 (sequence is synthesized)
caggttaaagctaccgggacgggtcccggcatctctaaatcaccgctccctggcctcttcggcctccgtccgccgcggcccaggggccgggcttctcagctgctgacctactgccaccga

SEQ ID NO: 541644 - DNA, 120 bp, Artificial Sequence
  ENSG00000167378_1 (sequence is synthesized)
ctgcgctctctcccgtgggtcggctttttgctcgccatgcctccgccgcagggtgacgtgaccgccttgttcctggggcctccgggcttggggaagtccgcgctgatcgcagcgctgtgc

SEQ ID NO: 541645 - DNA, 120 bp, Artificial Sequence
  ENSG00000167378_2 (sequence is synthesized)
gacaaggatgtggagacgctcgaggcccccgagggacggccggactccggggttcccagcctaagagctgcgggcccaggcctttttctgggcgagctgagctgcccacccgcagcgccg

SEQ ID NO: 541646 - DNA, 120 bp, Artificial Sequence
  ENSG00000167378_3 (sequence is synthesized)
gggccctgggcggcggaagccaacgtgctggtactggtgctgcccggacccgaggggaacggggaaccgttggctccagccctgggagaggcagcgctggccgccctggcccgagggacc

SEQ ID NO: 541647 - DNA, 120 bp, Artificial Sequence
  ENSG00000167378_4 (sequence is synthesized)
ccgctactggctgtgcggaacctccgtcctggggattcacagactgccgcccaggcccgtgatcagacagcagctctgctgaacagcgcggggttaggagctgcggatctgtttgtgcta

SEQ ID NO: 541648 - DNA, 120 bp, Artificial Sequence
  ENSG00000167378_5 (sequence is synthesized)
ccggcgaactgcggcagcagcgacggctgcgaggagctagagcgcctccgggcggcgctgcagagccaggcagaagcgctgcggaggctcctgccaccggcgcaggatggcttcgaggtg

SEQ ID NO: 541649 - DNA, 120 bp, Artificial Sequence
  ENSG00000167378_6 (sequence is synthesized)
ttgggtgcagcagagctagaggctgtgcgtgaggcctttgagaccggcggccttgaggctgcgctgtcgtgggtgcgctcaggcctggagcgcctgggcagcgcacggctagacctggcc

SEQ ID NO: 541650 - DNA, 120 bp, Artificial Sequence
  ENSG00000167378_7 (sequence is synthesized)
gtggctggcaaggctgacgtgggccttgtggtggacatgctgcttggattggatcctggcgacccaggcgctgcgcctgcttcggtccccacagcacccactcccttcccagccccagag

SEQ ID NO: 541651 - DNA, 120 bp, Artificial Sequence
  ENSG00000167378_8 (sequence is synthesized)
cgcccgaatgtggtgctctggaccgtgcctctgggccacacgggcactgccaccaccgcggccgccgcctctcacccaacgcactacgacgccctcatcctcgtcacccctggggccccc

SEQ ID NO: 541652 - DNA, 120 bp, Artificial Sequence
  ENSG00000167378_9 (sequence is synthesized)
actgagaaggactgggcccaggtccaggccttgctgctaccagatgcgcctcttgtctgcgtgcgcacagacggcgagggcgaggatccggagtgtctgggagaaggcaagatggagaat

SEQ ID NO: 541653 - DNA, 120 bp, Artificial Sequence
  ENSG00000167378_10 (sequence is synthesized)
cccaagggcgagagcttaaagaacgcaggtggagggggattggagaatgcactcagtaagggaagggagaaatgtagcgctggatcgcagaaagcaggcagcggggaaggtcctgggaaa

SEQ ID NO: 541654 - DNA, 120 bp, Artificial Sequence
  ENSG00000167378_11 (sequence is synthesized)
gctggcagcgagggtttgcagcaggttgtcggcatgaagaaatcaggtggtggcgactcagagcgggccgctgcgttaagcccggaggacgagacgtgggaggtgctggaggaggcgccg

SEQ ID NO: 541655 - DNA, 120 bp, Artificial Sequence
  ENSG00000167378_12 (sequence is synthesized)
ccgccagtgttccccctacggcctggcggactcccagggctatgcgaatggctgcggcgagcgctccccccagcccaggcaggggcactgctgctggcgttgccaccagcatctcccagc

SEQ ID NO: 541656 - DNA, 120 bp, Artificial Sequence
  ENSG00000167378_13 (sequence is synthesized)
gctgcccgaaccaaggctgcggcgttgcgagccggggcgtggaggccagctctgctggctagtctggcggcggcggcggcaccactcccagggctgggctgggcatgcgacgtggcactt

SEQ ID NO: 541657 - DNA, 120 bp, Artificial Sequence
  ENSG00000167378_14 (sequence is synthesized)
ctgcggggtcagctggcggagtggcgacggggcctggggctggaacccacggcactggctcgacgtgagcgtgccctgggcctggcttctggagagctggcagcgcgcgctcatttccca

SEQ ID NO: 541658 - DNA, 120 bp, Artificial Sequence
  ENSG00000167378_15 (sequence is synthesized)
ggcccggtgacgcgcgccgaggtggaagcaagactgggcgcctgggcgggcgagggcactgctgggggcgcagcactgggggctctctccttcctgtggcctgcgggtggtgcagcggcg

SEQ ID NO: 541659 - DNA, 120 bp, Artificial Sequence
  ENSG00000167378_16 (sequence is synthesized)
acaggtggcctgggctaccgagcggctcacggcgtcctgctgcaggctctcgatgagatgcgggctgatgctgaggctgtgctggcaccccctgagcctgcccagtgaggagtgggaggg

SEQ ID NO: 541660 - DNA, 120 bp, Artificial Sequence
  ENSG00000167378_17 (sequence is synthesized)
ggcttgggagtccagactctgacaggggatgcctgggcttaatcctgggtgcttgaaggggatgtggactcttgacttccagctgggatgtgtgacttcttatcacctggattcagagag

SEQ ID NO: 541661 - DNA, 83 bp, Artificial Sequence
  ENSG00000167378_18 (sequence is synthesized)
agctgggatgtgtgacttcttatcacctggattcagagagtctgggggacaggaaacgaagtctcttgttgcccaggctggag

SEQ ID NO: 541662 - DNA, 71 bp, Artificial Sequence
  ENSG00000167378_19 (sequence is synthesized)
ggaatcctgatacctttgggaaccatggtgaatgacatctagacccttctgtcctgaagggagttggtggc

SEQ ID NO: 541663 - DNA, 120 bp, Artificial Sequence
  ENSG00000167378_20 (sequence is synthesized)
atgacatctagacccttctgtcctgaagggagttggtggcccagactctagcagggactatgtctttgtctcctagggagtagaaactggagttactggatgtttagtcctccagggagg

SEQ ID NO: 541664 - DNA, 120 bp, Artificial Sequence
  ENSG00000167378_21 (sequence is synthesized)
ctggtagaagtcctgtttcctaattggtggggaggtgtccatgactgggacctgaactccagtataggggagggagacctgagcgccccagggagctggaactcttgggcttcagagcct

SEQ ID NO: 541665 - DNA, 120 bp, Artificial Sequence
  ENSG00000167378_22 (sequence is synthesized)
cagagggaaacagggtctacatttctctgggagaaaaagcctgcacacaggtccccaaggagcagtgggctttgaatcttgatggggtggcggaggcccctggggtctgagacttccggg

SEQ ID NO: 541666 - DNA, 120 bp, Artificial Sequence
  ENSG00000167378_23 (sequence is synthesized)
gttctaagatggctgtggaccttggttcctaaatattgggtaaggggaggtctgcatctggaggagggatcgggggcttgtgcgagaaagctggagacttcttgatctctcctggggagt

SEQ ID NO: 541667 - DNA, 120 bp, Artificial Sequence
  ENSG00000167378_24 (sequence is synthesized)
ggatgggtttctataattgccctccaaaagcatgtagggagggtggtcccacaaaaatgaggtgaggtgggtaagaggtctgggcatggtgggctctgggagtagccagggaccaggaat

SEQ ID NO: 541668 - DNA, 120 bp, Artificial Sequence
  ENSG00000167378_25 (sequence is synthesized)
gaggtcttttgggtgtggaagggcagtaaagcatacctcagagacagctcctccaaaccttgtattgggatcccggcaactgcctctgtgagtgtgactgggaagggatatgactgcctt

SEQ ID NO: 541669 - DNA, 120 bp, Artificial Sequence
  ENSG00000167378_26 (sequence is synthesized)
catcttctaggtgctgagcaattcaggtgatctctggggagtctgtttctctgtctcttttctttaggagtttctatctttttttggcctttttctcctggtatttaaccataacccttt

SEQ ID NO: 541670 - DNA, 120 bp, Artificial Sequence
  ENSG00000167378_27 (sequence is synthesized)
atggccttggtgttttgtgcaccttccttttcagaagagcagctgtactgctgcactggtccaaacacttctgtatggacacctcgggtatccccaagaggctctgctttctgatgtaca

SEQ ID NO: 541671 - DNA, 120 bp, Artificial Sequence
  ENSG00000167378_28 (sequence is synthesized)
tagagggtgctgcattgagccaggggcccaccaaatgggtggtcaggcacttgagaccatgggaatatgccaggagtgaatgaagcaaaggcagaaaccacagtgcctggaatgttctag

SEQ ID NO: 541672 - DNA, 120 bp, Artificial Sequence
  ENSG00000167378_29 (sequence is synthesized)
gctgctagccacatgtgggggaaaagttgcaggttacagaattcttcagtgtcaaaaacagaaaaggaggatctgagaatccaagcgatagaatcccttttgtcgtagacagaaagagca

SEQ ID NO: 541673 - DNA, 120 bp, Artificial Sequence
  ENSG00000167378_30 (sequence is synthesized)
aagtccagagagggcaggcttgaggcccaacagcacacagtaaggccctgtgggtctggcccttgcctattctcattcactgccccttcccactcctgtccagcctgatagactttcctt

SEQ ID NO: 541674 - DNA, 120 bp, Artificial Sequence
  ENSG00000167378_31 (sequence is synthesized)
ctgatagactttccttctttttttttttgaaatggagtctcaccttgtcacccagtctggagtacagggatgtgatgactgtagctgagatgacaggcatgtgccaccacacctggctaa

SEQ ID NO: 541675 - DNA, 75 bp, Artificial Sequence
  ENSG00000167378_32 (sequence is synthesized)
tcctgacctcaggtgatccacccggccgcctgactctttctgatgcctgagtggctaccttgagtcctgcctggg

SEQ ID NO: 541676 - DNA, 120 bp, Artificial Sequence
  ENSG00000167378_33 (sequence is synthesized)
ctttctgatgcctgagtggctaccttgagtcctgcctggggacccatgcacctgctgttctctttccttcaaggctctactcacaacttcctgttctactctcaaaccttcctgtgacgg

SEQ ID NO: 541677 - DNA, 120 bp, Artificial Sequence
  ENSG00000167378_34 (sequence is synthesized)
gctcagtcagatctcagctcacgtatcccctcagagaggacttcccctccctgaccaccctatctgaagtagctcacattcccccactattcatttcggccagttgagtttccttgtagc

SEQ ID NO: 541678 - DNA, 120 bp, Artificial Sequence
  ENSG00000167378_35 (sequence is synthesized)
aattattactgtcaaaaatgatcttatttatttacctgtttattggcttttgacccgttgcctgtcctgttctctgttgtttccccagcatctagaacaataggtgcctgacacaatagg

SEQ ID NO: 541679 - DNA, 120 bp, Artificial Sequence
  ENSG00000167378_36 (sequence is synthesized)
agagacagggtcttgctctgttgccccggctggaatacagtgggatgatcatggctcactgccatctccaactcctgggctcaaacgatcctcccacctccgcctacagagtagctggga

SEQ ID NO: 541680 - DNA, 120 bp, Artificial Sequence
  ENSG00000167378_37 (sequence is synthesized)
acgatcctcccacctccgcctacagagtagctgggactataggtacacagcaccaaattttctgtagagacgggggtcttgctttgtagcccacactagtgttgaactcctggcctcaag

SEQ ID NO: 541681 - DNA, 120 bp, Artificial Sequence
  ENSG00000167378_38 (sequence is synthesized)
acaggtgtgagccaccacacccagcctaaatgtttatttcattggtcagtgtcagaactaggattggaatttagattgttaatctcttgccacaagataggaaaatggagcaagatgagg

SEQ ID NO: 541682 - DNA, 120 bp, Artificial Sequence
  ENSG00000167378_39 (sequence is synthesized)
cacgactttgccactgtcactgtgtgttacttggacagtgccttattttcccatctgtgaaataaaagagctggataagaaccttagttttgagatcctgtctcccttaaaagctgaaga

SEQ ID NO: 541683 - DNA, 120 bp, Artificial Sequence
  ENSG00000167378_40 (sequence is synthesized)
caaaggtaactgatccaagggcagacaagggatggtaccatcatctccagcttggactcccactgctgacaaaatttgtcccttcaaagttgagatagctaccatggggaagagcactta

SEQ ID NO: 541684 - DNA, 120 bp, Artificial Sequence
  ENSG00000167378_41 (sequence is synthesized)
gttctatactgaatggctccaggcattttcatgaaagctctttcagctttggggaagaatattcatccatatctttaccccatcatattagtgtctaagccctgcaatcaggcatgtcag

SEQ ID NO: 541685 - DNA, 120 bp, Artificial Sequence
  ENSG00000167378_42 (sequence is synthesized)
ccacgtgatggaatgggagggctgcagggcagcactgtccagtagaaacgaaatgcaagccacatatgtcattttaagttttctttttttgagatggagtttcactccatcacccaggct

SEQ ID NO: 541686 - DNA, 62 bp, Artificial Sequence
  ENSG00000167378_43 (sequence is synthesized)
tgagccactgcacccgggaactcatggcctcaagttatctgcccacctcagcctcccaaagt

SEQ ID NO: 541687 - DNA, 120 bp, Artificial Sequence
  ENSG00000167378_44 (sequence is synthesized)
ccacctcagcctcccaaagtgctgagtaagccaagttttctaatagccacattagacaagtaaaaggaaacaggttaaattcattttaacatgttttacttaacccaatgtatccaaaat

SEQ ID NO: 541688 - DNA, 120 bp, Artificial Sequence
  ENSG00000167378_45 (sequence is synthesized)
tcattttaacatgttttacttaacccaatgtatccaaaatagcatttcaacatgtcatcggttttttagttttttttttttttgagatagtgcttcgctttgttgcccaggctggagtgc

SEQ ID NO: 541689 - DNA, 66 bp, Artificial Sequence
  ENSG00000167378_46 (sequence is synthesized)
cgtgcctggcgtcatcggtattatttaaatgaattatgttacgttcttttgtgctgtcttcaaaat

SEQ ID NO: 541690 - DNA, 120 bp, Artificial Sequence
  ENSG00000167378_47 (sequence is synthesized)
aaatgaattatgttacgttcttttgtgctgtcttcaaaatctgttatatattttacacttacaccaaatctcaattaccatggtacatttttatctgaaatgcttgacctttattttgat

SEQ ID NO: 541691 - DNA, 120 bp, Artificial Sequence
  ENSG00000167378_48 (sequence is synthesized)
ttcataaaattcatagttggagaagtagattcacatatccaagttgttccaattatataatagttttccaaaaactgagatgggtgtccattttttttttaagtaaagatgcaggtctgg

SEQ ID NO: 541692 - DNA, 62 bp, Artificial Sequence
  ENSG00000167378_49 (sequence is synthesized)
tgggtgtccattttttttttaagtaaagatgcaggtctggttatgttgaccaagttgctggg

SEQ ID NO: 541693 - DNA, 120 bp, Artificial Sequence
  ENSG00000167378_50 (sequence is synthesized)
ctcccaaagtgctggtattacaggcatgggccaccacacctggcctcagctgttcaattaaaagtaaatacaacttaaaattctatgtttcattggcagtagtgcaacattaatactgag

SEQ ID NO: 541694 - DNA, 120 bp, Artificial Sequence
  ENSG00000167378_51 (sequence is synthesized)
atgtttcattggcagtagtgcaacattaatactgagtagccacatgtgattagtggctatggtattggacagggaaggtacagaatacttccatcaacatagaaaattctatcagtctag

SEQ ID NO: 541695 - DNA, 120 bp, Artificial Sequence
  ENSG00000167378_52 (sequence is synthesized)
ctctaggggcagatagtccttccactgacttgggcaagtcactctacaaatggcatctacctcacatggttatggtgagaattcagcgtatgtatgtacatgcaggcacacaatatgcac

SEQ ID NO: 541696 - DNA, 120 bp, Artificial Sequence
  ENSG00000167378_53 (sequence is synthesized)
acagacacataacatagtacaccctttcctgaaaagcctgacacatggagctcaaacatgagtgccacccacccctgggcagcaccaagatggctctagtctgggtgcctttgtctcacc

SEQ ID NO: 541697 - DNA, 120 bp, Artificial Sequence
  ENSG00000167378_54 (sequence is synthesized)
cccatgcctttgctcggagtgtgctcctcatttttctgccactttgaccctgtctctgatttggtcctgtctgacatcactgctatatgctttgctcctctcaatttcctctgccctcat

SEQ ID NO: 541698 - DNA, 120 bp, Artificial Sequence
  ENSG00000167378_55 (sequence is synthesized)
gccagcaggagtcatgccagagatcatatctgagaaagcaagacaattttgtgtgtgtgtctgtgcccatagaggagtgctggttgtgttgatatagttgtagattggttgtgtttacac

SEQ ID NO: 541699 - DNA, 120 bp, Artificial Sequence
  ENSG00000167378_56 (sequence is synthesized)
agttgtatatattgacacccttgagtgttatgacttcttttgggggtggtcgccttttaaatcataacttttaatgggattccattttagtctttgtgaagacataaggttgttggcagg

SEQ ID NO: 541700 - DNA, 120 bp, Artificial Sequence
  ENSG00000167378_57 (sequence is synthesized)
catctgtccctgggagcatccaagcagaaaagactaagactcccttgtagacagatcactggccgccactgaagtgtgtctgcatggcaccacagggctggaagacccttgaaggcagga

SEQ ID NO: 541701 - DNA, 120 bp, Artificial Sequence
  ENSG00000167378_58 (sequence is synthesized)
attcaaggaaatgtatgatgaattttggcattgccatcaaaagcagaacaggcatggaaaacttgggtgagtgggcgagacaacctcctcaccacagcagagttccatccatgcctggat

SEQ ID NO: 541702 - DNA, 120 bp, Artificial Sequence
  ENSG00000167378_59 (sequence is synthesized)
aatgatggagggatttgtgtccactgcagtggggaaccatgaaggacacatcaagggtgtggttggcctgtggtgctctttggaggaatgaataaaaatgaatagaaatcctattgcgtg

SEQ ID NO: 541703 - DNA, 120 bp, Artificial Sequence
  ENSG00000167378_60 (sequence is synthesized)
tctgttcttttggagtttgagggaaaagaaagatccttgagattttgactgggctggaaacctagactccagcgtctggggataggagggatggtggggaatccgctgggaaaaactggg

SEQ ID NO: 541704 - DNA, 120 bp, Artificial Sequence
  ENSG00000167378_61 (sequence is synthesized)
ctgtgatcaagagaatttatcagtatctgagtttttccaccctggaaggagtgcgggcagacttactgtttaaacattgggagcttatgatggtaaagcgccttagttctggagccaggt

SEQ ID NO: 541705 - DNA, 120 bp, Artificial Sequence
  ENSG00000167378_62 (sequence is synthesized)
atacccattaatgaccccaactgggccagcctttctgtagccatgcccttggattgttgctctccttctaggtttgactatgtggtttgcttcagccactagaacaatagcaaacatgat

SEQ ID NO: 541706 - DNA, 68 bp, Artificial Sequence
  ENSG00000167378_63 (sequence is synthesized)
tgtggtttgcttcagccactagaacaatagcaaacatgatacaagcagaggcttggaaagtgcttatg

SEQ ID NO: 541707 - DNA, 120 bp, Artificial Sequence
  ENSG00000167378_64 (sequence is synthesized)
ccagcctgggcaacagagcgagacttctctcaaaaaaaaaaaaccaaagtgcttatgcactgggacttcctctcttgctccccttgggacccctaccaccactgccacatccaaaccccg

SEQ ID NO: 541708 - DNA, 120 bp, Artificial Sequence
  ENSG00000167378_65 (sequence is synthesized)
cccttgggacccctaccaccactgccacatccaaaccccgggctggctgagcatggtggcatatgggtataaacccataatcccagcacttagggaggcaaaggtggaagaatttcatga

SEQ ID NO: 541709 - DNA, 120 bp, Artificial Sequence
  ENSG00000167378_66 (sequence is synthesized)
aaggtggaagaatttcatgagcccaggagatcgagactagcctgagcaacatggcaagacccccatctctacaaaaaagcaacaacaacagaattagccagatgtggtggtgtgcacctg

SEQ ID NO: 541710 - DNA, 120 bp, Artificial Sequence
  ENSG00000167378_67 (sequence is synthesized)
ggtgtgcacctgtggtcccaactacatgggggaggctgaggcaagtggattgtttgagcccaggaagtcgaggctgaagtgagctatgatggctccactgcactccagcctgggtgacag

SEQ ID NO: 541711 - DNA, 120 bp, Artificial Sequence
  ENSG00000167378_68 (sequence is synthesized)
gaaagaaaaggaaaagatctgggctaacctgctgggtaataaagggaaaagagacacatggctccgtcatccttgatccctgccacccatagccaaccaacctctgaaacagagctccct

SEQ ID NO: 541712 - DNA, 120 bp, Artificial Sequence
  ENSG00000167378_69 (sequence is synthesized)
agctgataggcagctgaacccagctgagaccagcaaaagaactgcccagctgatcccagaccaagttgcaacccagagaatcattaactaaataggtgattgttctaaaccactaaattt

SEQ ID NO: 541713 - DNA, 120 bp, Artificial Sequence
  ENSG00000167378_70 (sequence is synthesized)
tggagtggtttgttatgtagcaaaagcaactaatacagacttgttctctctgtgtgtgatgtggtctctttctccccaacaacatgacccaatgattaaaatcttaaattctgccacttt

SEQ ID NO: 541714 - DNA, 120 bp, Artificial Sequence
  ENSG00000167378_71 (sequence is synthesized)
ttagctgtgtgactgccaatgtgacagccttctgagcctctgatgtctcctgaaaacagagatgtgaataatagtgcctatgacatagagttgtgaaaataaaatgaaaaacagcttctt

SEQ ID NO: 541715 - DNA, 120 bp, Artificial Sequence
  ENSG00000167378_72 (sequence is synthesized)
aggacgcctgggattctgggggaatagggtctgggctctggattttttaggtcctggagagtgacactcaagaaccgaaggggacagggtgaaggactgaggcctgggttccgagtgggg

SEQ ID NO: 541716 - DNA, 120 bp, Artificial Sequence
  ENSG00000167380_0 (sequence is synthesized)
aggaagacgacgtagcagccatcttttccctggctttggtgattcagccctgacttctcaaaaagcactgcacagaggaggaggcagcagaaccccatttcagcttcttaggactctgca

SEQ ID NO: 541717 - DNA, 120 bp, Artificial Sequence
  ENSG00000167380_1 (sequence is synthesized)
cttccccagaaggaagaattaaaaatgaatatgttcaaggaagcagtgaccttcaaggacgtggctgtggccttcacggaggaggaattggggctgctgggccctgcccagaggaagctg

SEQ ID NO: 541718 - DNA, 120 bp, Artificial Sequence
  ENSG00000167380_2 (sequence is synthesized)
taccgagatgtgatggtggagaactttaggaacctgctgtcagtggggcatccacccttcaaacaagatgtatcacctatagaaagaaatgagcagctttggataatgacgacagcaacc

SEQ ID NO: 541719 - DNA, 120 bp, Artificial Sequence
  ENSG00000167380_3 (sequence is synthesized)
cgaagacagggaaatttaggagagaaaaatcaaagtaagttaattactgttcaagacagagaatcagaagaagagctttcttgttggcaaatctggcaacaaattgcaaatgacttaacc

SEQ ID NO: 541720 - DNA, 120 bp, Artificial Sequence
  ENSG00000167380_4 (sequence is synthesized)
aggtgtcaagactccatgatcaataattctcagtgtcacaaacaaggtgatttcccttaccaggtagggacagaactgtctattcaaatttctgaagatgagaactatatagtaaataaa

SEQ ID NO: 541721 - DNA, 120 bp, Artificial Sequence
  ENSG00000167380_5 (sequence is synthesized)
gcagatggtcccaataatactgggaatccagagtttcctatcttgagaacccaggattcttggaggaaaacattcctgactgagtcacagagattgaacagagatcagcaaatttccata

SEQ ID NO: 541722 - DNA, 120 bp, Artificial Sequence
  ENSG00000167380_6 (sequence is synthesized)
aaaaataaattatgtcaatgtaagaagggtgttgatcccatcggttggatttcacatcatgatggtcatagagtacacaaaagtgaaaaatcttatagacccaatgattatgaaaaagac

SEQ ID NO: 541723 - DNA, 120 bp, Artificial Sequence
  ENSG00000167380_7 (sequence is synthesized)
aacatgaagattttgacatttgatcacaatagcatgattcacacaggacagaaatcgtaccagtgtaatgagtgtaaaaaacccttcagtgatctctccagctttgatcttcatcagcag

SEQ ID NO: 541724 - DNA, 120 bp, Artificial Sequence
  ENSG00000167380_8 (sequence is synthesized)
ttacaatcaggagagaagtctcttacatgtgttgagcgtggaaaaggcttctgttacagcccagttcttcctgttcatcagaaagtacatgtgggagaaaaacttaagtgtgatgagtgt

SEQ ID NO: 541725 - DNA, 120 bp, Artificial Sequence
  ENSG00000167380_9 (sequence is synthesized)
ggtaaggaattcagtcagggcgctcatctacagacccatcagaaagtccacgtgatagagaaaccatacaaatgtaagcaatgtgggaaaggtttcagtcgtagatcagcacttaatgtt

SEQ ID NO: 541726 - DNA, 120 bp, Artificial Sequence
  ENSG00000167380_10 (sequence is synthesized)
tgtgggagggccttcagtcaggcctctcatcttcaggaccatcagagactccacactggggagaagccattcaaatgtgatgcatgtggtaagagcttcagtcggaattcacatcttcaa

SEQ ID NO: 541727 - DNA, 120 bp, Artificial Sequence
  ENSG00000167380_11 (sequence is synthesized)
tcccatcaaagagttcatacaggagagaaaccatacaaatgtgaggagtgtggtaagggcttcatttgtagctcaaatctttacattcatcagagagtccacacaggagaaaaaccctat

SEQ ID NO: 541728 - DNA, 120 bp, Artificial Sequence
  ENSG00000167380_12 (sequence is synthesized)
aaatgtgaggaatgtggtaaaggctttagtcggccttcaagtcttcaggcccatcagggagttcacactggagagaagtcatacatatgtactgtatgtgggaaaggctttactctgagt

SEQ ID NO: 541729 - DNA, 120 bp, Artificial Sequence
  ENSG00000167380_13 (sequence is synthesized)
tcaaatcttcaagcccatcagagagtccacactggagagaagccatacaaatgcaatgagtgtgggaagagcttcaggaggaattcccattatcaagttcatctagtggtccacacagga

SEQ ID NO: 541730 - DNA, 120 bp, Artificial Sequence
  ENSG00000167380_14 (sequence is synthesized)
gagaaaccctataaatgtgagatatgtgggaagggcttcagtcaaagttcgtatcttcaaatccatcagaaggcccacagtatagagaaaccttttaagtgtgaggagtgtgggcagggt

SEQ ID NO: 541731 - DNA, 120 bp, Artificial Sequence
  ENSG00000167380_15 (sequence is synthesized)
ttcaatcagagctcacgacttcagattcaccagctgatccatacgggtgagaaaccatacaaatgtgaagagtgtggcaagggatttagtcgtagagcagatcttaaaattcactgtagg

SEQ ID NO: 541732 - DNA, 120 bp, Artificial Sequence
  ENSG00000167380_16 (sequence is synthesized)
atccacacaggagagaaaccatataattgtgaggagtgtgggaaggtcttcaggcaggcctcaaatcttttggcccatcagagagtccacagtggagaaaaaccattcaaatgtgaagaa

SEQ ID NO: 541733 - DNA, 120 bp, Artificial Sequence
  ENSG00000167380_17 (sequence is synthesized)
tgtgggaagagtttcggtcggagtgcacatcttcaagcccatcaaaaagtccacactggagataagccatacaaatgtgatgagtgtgggaagggcttcaagtggagcttgaaccttgac

SEQ ID NO: 541734 - DNA, 120 bp, Artificial Sequence
  ENSG00000167380_18 (sequence is synthesized)
atgcatcagagggtgcacacaggagaaaaaccatataaatgtggggagtgtggtaagtacttcagtcaggcctcaagtcttcaacttcatcagagtgtccacacaggagagaaaccatac

SEQ ID NO: 541735 - DNA, 120 bp, Artificial Sequence
  ENSG00000167380_19 (sequence is synthesized)
aaatgtgatgtgtgtggtaaagtcttcagtcggtcttcacaactacagtctcatcagcgagttcacactggggagaaaccttataaatgtgagatatgtggtaagagcttcagttggcga

SEQ ID NO: 541736 - DNA, 120 bp, Artificial Sequence
  ENSG00000167380_20 (sequence is synthesized)
tcaaatcttacagttcatcacagaatccatgttggtgataaatcctataaaagtaataggggtggtaagaacatcagagaatccacacaggaaaaaaaatctataaaatgattctttgtg

SEQ ID NO: 541737 - DNA, 120 bp, Artificial Sequence
  ENSG00000167380_21 (sequence is synthesized)
caaacttccccgaaatgcacttgtggtcagcagctagcggtcttttgtttggggaaaaaaaggagtagcggctaagagcggagccctgacttctcaaaaagcactgcacagaggaggagg

SEQ ID NO: 541738 - DNA, 120 bp, Artificial Sequence
  ENSG00000167380_22 (sequence is synthesized)
ctttgtggcccttgaaattgttccctgagtgtgggaatctgactttcctaatttttgtgggatgcagagacactggatgtttctggtctttctgaacagaatattttaggtctttttcat

SEQ ID NO: 541739 - DNA, 120 bp, Artificial Sequence
  ENSG00000167380_23 (sequence is synthesized)
agaactgtaaatgaacagaatactgctatgccttgtctattctttttcatgttttacacctgtcccagtattgaattataaaaccaacttattgaatgtcatcagcagattttaatgaaa

SEQ ID NO: 541740 - DNA, 120 bp, Artificial Sequence
  ENSG00000167380_24 (sequence is synthesized)
taaaatagggtagaaaatactagaactccttaggaagaatggcacacactgcagcaaaaactctggccaattgcttgagtgatgtgagaaccaatgggagatttaaggaaaacagacatt

SEQ ID NO: 541741 - DNA, 120 bp, Artificial Sequence
  ENSG00000167380_25 (sequence is synthesized)
agttaaaaataggttattcaaacttggttttcataatatgtatttacgcatgtgtgtctgggtcatgaaataaatggtgtttctttactgaagtcacaatttaaataaaagtttgaaaaa

SEQ ID NO: 541742 - DNA, 120 bp, Artificial Sequence
  ENSG00000167380_26 (sequence is synthesized)
cgacgtagcagccatcttttccctggctttggtgattcagaaactcccgttctgtggcgaaattctgtgagtccatgaagctggattgtccctgacctcttttgaggaaggagagggttg

SEQ ID NO: 541743 - DNA, 120 bp, Artificial Sequence
  ENSG00000167380_27 (sequence is synthesized)
cttctaactggtcctgggagatgccactgtgatgtatccgggatgaagacacaatcctggttacttcatagcctgtttttcttccccagccctgacttctcaaaaagcactgcacagagg

SEQ ID NO: 541744 - DNA, 120 bp, Artificial Sequence
  ENSG00000167380_28 (sequence is synthesized)
gatttgaagttagaagaaatgttggaagtcatttatatatgaagaaatgttggaaggactcatatatgcatacattccttgagtgactatgaatgactgccgggcagtaacttctgggct

SEQ ID NO: 541745 - DNA, 120 bp, Artificial Sequence
  ENSG00000167380_29 (sequence is synthesized)
ttttccttattgataccatattatggtaggaaagacatggaataaaaaatttagatagtatgtcagtagttgtgtttttaaatgggtttcattagtgcttagcaattgggagcttggtgg

SEQ ID NO: 541746 - DNA, 120 bp, Artificial Sequence
  ENSG00000167380_30 (sequence is synthesized)
accatctcttggttttggaccatctcttggtttctgtcagtatgtaaaccagaaacttcaaatgtgtcacaaaagatgagcagaactatcccgaggttcattaaagtcttttactctgtc

SEQ ID NO: 541747 - DNA, 120 bp, Artificial Sequence
  ENSG00000167380_31 (sequence is synthesized)
gccctgacttctcaaaaagcactgcacagaggaggaggcagcagaaccccatttgcaaataaataagatacctgactgtgttgtaagagctttctaccttccagcaatccgatgagcttc

SEQ ID NO: 541748 - DNA, 120 bp, Artificial Sequence
  ENSG00000167380_32 (sequence is synthesized)
gacgacgtagcagccatcttttccctggctttggtgattcagccctgacttctcaaaaagcactgcacagaggaggaggcagcagaaccccatgggctgttttgggagagggactgagta

SEQ ID NO: 541749 - DNA, 120 bp, Artificial Sequence
  ENSG00000167380_33 (sequence is synthesized)
cagtgcaacactactcaaactgtggttcacaaagcagcaacattggcatcacccaggtagaaaggctcattcttgagccctaccgaaggccttctgatttagcatttttgcagataggac

SEQ ID NO: 541750 - DNA, 120 bp, Artificial Sequence
  ENSG00000167380_34 (sequence is synthesized)
tctgctttgcttcttcttagccttgttgccatcacctggtccaaattgccaactgtctttcctggattattgcaacaccctttgtactgcttgccctgctcccacccctctcctcttaca

SEQ ID NO: 541751 - DNA, 120 bp, Artificial Sequence
  ENSG00000167380_35 (sequence is synthesized)
ttctgttctttaagtggcaaagtgagtttttgttaccttgtgtcagactatgttgttcttctgctcaaaattctctgtgacttattttacatagagtaaaatccacttaatgtggctgac

SEQ ID NO: 541752 - DNA, 120 bp, Artificial Sequence
  ENSG00000167380_36 (sequence is synthesized)
gtgcttttcatcccccactacctctctaaatatatcttctatactctctttctgtgaattccagccacattgtcctccctcttgcttttcagacctatcaaggatgcttctgcctcacaa

SEQ ID NO: 541753 - DNA, 120 bp, Artificial Sequence
  ENSG00000167380_37 (sequence is synthesized)
ccctgtgtgttcttccctctgcctgaaataatcttttacctataatccttctggtcccttcttcattcatttctttgctcagttttagtattataagaaaggcctcggccgggcacggtg

SEQ ID NO: 541754 - DNA, 88 bp, Artificial Sequence
  ENSG00000167380_38 (sequence is synthesized)
agttttagtattataagaaaggcctcggccgggcacggtggcttgcgcctgtaatcccagcacttcgcgaggctgaggtgggcagatc

SEQ ID NO: 541755 - DNA, 120 bp, Artificial Sequence
  ENSG00000167380_39 (sequence is synthesized)
cctgggcgatagagcgagactgtctcaagaaaaaaaaaaagaaaggcctcctctgaccaccctattaaaaatacattctctccatttactctctgtgcactgccttatattgtgtgtaag

SEQ ID NO: 541756 - DNA, 120 bp, Artificial Sequence
  ENSG00000167380_40 (sequence is synthesized)
cactgattatcacctcatatatgtttttgtttagtgacgtttgtctcctcactggagtgtaatctccaggagtggaggaatgttatctatttgcttctgtctcctcagtgcttagaatag

SEQ ID NO: 541757 - DNA, 120 bp, Artificial Sequence
  ENSG00000167380_41 (sequence is synthesized)
tcctagtatatggcagagacactataaatattagttgaataaatgagttaatggaaatctgtcttccatggaggtaactaataggtggtgaacaaatcagcataaataagggatattgca

SEQ ID NO: 541758 - DNA, 83 bp, Artificial Sequence
  ENSG00000167380_42 (sequence is synthesized)
ataggtggtgaacaaatcagcataaataagggatattgcaaaatattttttgtcttctaatgaattcctaacctaattctaat

SEQ ID NO: 541759 - DNA, 120 bp, Artificial Sequence
  ENSG00000167380_43 (sequence is synthesized)
ggaacctatagtgtcatagttgtaaccaaactgaataacatgctttgtttatgactttctttgagcatttgtagcagagcatattcattcggggagggaatattttacaataaggacttt

SEQ ID NO: 541760 - DNA, 120 bp, Artificial Sequence
  ENSG00000167380_44 (sequence is synthesized)
tatttctatttcttaggtattcccccatagaagggaataaaattcgatttccttatccattatatcaggaaagaaaaagtaaaactaaaaaccaggacatgagcattagcctttccctca

SEQ ID NO: 541761 - DNA, 120 bp, Artificial Sequence
  ENSG00000167380_45 (sequence is synthesized)
aaatgtttgcacagttgcatcccatttgcttcttccaaagtccacattcataaaaagaaatggatcttacattgttgcctctcaaacatttatatcgtgtaggcttatatgtatgtcttt

SEQ ID NO: 541762 - DNA, 120 bp, Artificial Sequence
  ENSG00000167380_46 (sequence is synthesized)
agaaggccttttatgtaatgacaccattactgcttgtgattattctgatatgatactttatctgtttttttttcctaaatatcacaagctattaaatttatttcacaattgactagtaga

SEQ ID NO: 541763 - DNA, 120 bp, Artificial Sequence
  ENSG00000167380_47 (sequence is synthesized)
ccactttgtcaatttggaaaacattcttgttaaagacaaacatatctacatccagaaactttctataccttgctttcaaagagacagcattctttgctagccttccaattttgactcagt

SEQ ID NO: 541764 - DNA, 120 bp, Artificial Sequence
  ENSG00000167380_48 (sequence is synthesized)
gcaaaagccttagaaggatccagtgcataggtcttcatgctttcctttcaccccaagtgattatcaactttgatttttctcttcagcaataactcacttggtgtacccctacctcaggta

SEQ ID NO: 541765 - DNA, 120 bp, Artificial Sequence
  ENSG00000167380_49 (sequence is synthesized)
atctttatgattagcatagcaagggcttctttagtcagaaccttgacctttataaaatgttacttagaagaggggtgttaagagtgaaatttttctcaggccttttataaaagtatcatg

SEQ ID NO: 541766 - DNA, 120 bp, Artificial Sequence
  ENSG00000167380_50 (sequence is synthesized)
gtggacatgccaaaattaagtgtccactagaatgttaactccataaagacagaaactttgttcactactgaatctacataatcttaccattgccatatacttcacaggtgctcaatattt

SEQ ID NO: 541767 - DNA, 120 bp, Artificial Sequence
  ENSG00000167380_51 (sequence is synthesized)
gttaataggtcctttttgaaaattatgttgagatcacctgcagaatatcatgaatttgtaaacaggaaacctgaaagtagccttaataagattaagtcgggagaccattgaaatgtagaa

SEQ ID NO: 541768 - DNA, 120 bp, Artificial Sequence
  ENSG00000167380_52 (sequence is synthesized)
aaccactcaatactgaactccccaatgttaatttggcattgtcttgtgattagatcctgtcctcctttagcctcactaatcaagttgggtcctatcttcccagatgtctagttttctact

SEQ ID NO: 541769 - DNA, 120 bp, Artificial Sequence
  ENSG00000167380_53 (sequence is synthesized)
ggttttataccatatagattcaattatcttttgtaacagataattgtgttcatcttgtaataactggacactacatactacacttattttttcaacactgttaaggcaggggtttaagtg

SEQ ID NO: 541770 - DNA, 120 bp, Artificial Sequence
  ENSG00000167380_54 (sequence is synthesized)
gcacttccgcccaggaagacgacgtagcagccatcttttccctggctttggtgattcagaaactcccgttctgtggcgaaattctccctgacttctcaaaaagcactgcacagaggagga

SEQ ID NO: 541771 - DNA, 120 bp, Artificial Sequence
  ENSG00000167384_0 (sequence is synthesized)
acaagagcagccattgtcccgcgcgcggacgcttgctgtcgccgagcagctcggcccttcagacttaacccccagcggccttgcggatgctgactaggagaggggaccgaactagcttaa

SEQ ID NO: 541772 - DNA, 120 bp, Artificial Sequence
  ENSG00000167384_1 (sequence is synthesized)
cccgagtcggccgtgttgcagaatcggggcagggggttgcctaacccgagttcgtcctgccgcagagccgtgctaggcactgaggcggtgacaggcccagcctgggctgcgggccagcgg

SEQ ID NO: 541773 - DNA, 120 bp, Artificial Sequence
  ENSG00000167384_2 (sequence is synthesized)
acgcccaggttggtaggggcgtggggcagcgcttggtgtccgatgcgcgcatgcgcagggtctacgcgggaagctggaagcggtgctcaggacctcagcaccctgctgtgcctggaggag

SEQ ID NO: 541774 - DNA, 120 bp, Artificial Sequence
  ENSG00000167384_3 (sequence is synthesized)
agcatggaagagcaggatgagaagcccccagagcccccgaaggtctgtgcacaggattctttccttcctcaagagattatcatcaaagtcgagggagaagacactgggtctctgaccatc

SEQ ID NO: 541775 - DNA, 120 bp, Artificial Sequence
  ENSG00000167384_4 (sequence is synthesized)
ccatctcaggaaggagtgaacttcaaaattgtgactgtggacttcacacgggaggaacagggtacttgcaaccctgctcagaggaccctggacagagatgtgatcctggagaaccacagg

SEQ ID NO: 541776 - DNA, 120 bp, Artificial Sequence
  ENSG00000167384_5 (sequence is synthesized)
gacctagtctcttgggacttggcaactgcagttggaaaaaaagattcaacttcaaagcagaggatttttgatgaagaaccagctaatggagtgaagatagaaaggtttacaagggatgat

SEQ ID NO: 541777 - DNA, 120 bp, Artificial Sequence
  ENSG00000167384_6 (sequence is synthesized)
ccttggttatcttcatgtgaagaagtggatgattgtaaagaccagttggagaagcaacaggaaaaacaagagatacttttgcaggaagtggcattcactcaaaggaaagcagttattcat

SEQ ID NO: 541778 - DNA, 120 bp, Artificial Sequence
  ENSG00000167384_7 (sequence is synthesized)
gagagagtctgcaaaagtgatgaaactggggagaagagtggtctgaattccagtctattttcatccccagttatacccataagaaaccattttcataaacatgtatcacatgctaaaaaa

SEQ ID NO: 541779 - DNA, 120 bp, Artificial Sequence
  ENSG00000167384_8 (sequence is synthesized)
tggcatcttaatgctgctgtaaacagtcatcagaagattaatgagaatgagacactatatgaaaataatgaatgtggaaaaccccctcagagcattcaccttattcagtttacaagaact

SEQ ID NO: 541780 - DNA, 120 bp, Artificial Sequence
  ENSG00000167384_9 (sequence is synthesized)
caaacaaaagataaatcctatggatttagtgaccgtattcaatctttttgccatggtacacccctacatatacatgaaaaaattcatggaggaggaaaaacctttgattttaaagaatgt

SEQ ID NO: 541781 - DNA, 120 bp, Artificial Sequence
  ENSG00000167384_10 (sequence is synthesized)
gggcaggttttgaaccccaaaatatcccataatgaacaacagagaattccttttgaagagagtcaatataaatgtagtgaaacctctcatagttcctcccttactcaaaacatgagaaat

SEQ ID NO: 541782 - DNA, 120 bp, Artificial Sequence
  ENSG00000167384_11 (sequence is synthesized)
aattctgaagagaaaccttttgaatgtaatcagtgtgggaaatccttcagctggagctcgcatcttgttgcacatcagagaactcacacaggggagaaaccttatgaatgtagtgaatgt

SEQ ID NO: 541783 - DNA, 120 bp, Artificial Sequence
  ENSG00000167384_12 (sequence is synthesized)
ggaaaatccttcagccggagctcgcaccttgtttcccatcagagaactcatactggagagaaaccttacaggtgtaatcaatgtgggaaatcctttagccagagttatgtccttgttgtg

SEQ ID NO: 541784 - DNA, 120 bp, Artificial Sequence
  ENSG00000167384_13 (sequence is synthesized)
catcaaagaactcatactggggagaagccttatgaatgcaatcagtgtggaaagtcattcaggcagagctataaacttattgcacatcaaagaacacataccggagagaagccctatgaa

SEQ ID NO: 541785 - DNA, 120 bp, Artificial Sequence
  ENSG00000167384_14 (sequence is synthesized)
tgtaatcaatgtgggaaatcatttatccagagctataaacttattgcacatcaaagaattcatactggggaaaaaccctatgaatgcaatcagtgtgggaaatcctttagtcaaagttat

SEQ ID NO: 541786 - DNA, 120 bp, Artificial Sequence
  ENSG00000167384_15 (sequence is synthesized)
aaacttgttgctcatcagagaactcacacaggagaaaaaccctttgaatgtaatcagtgtgggaaatccttcagctggagctctcagcttgttgcacatcaaagaactcacactggagag

SEQ ID NO: 541787 - DNA, 120 bp, Artificial Sequence
  ENSG00000167384_16 (sequence is synthesized)
aaaccgtatgaatgtagtgaatgtggaaaatcttttaaccgcagttctcaccttgttatgcatcagagaattcacactggggaaaaaccgtatgaatgtaatcagtgtgggaaatccttc

SEQ ID NO: 541788 - DNA, 120 bp, Artificial Sequence
  ENSG00000167384_17 (sequence is synthesized)
agccagagttatgttcttgttgtacatcagagaactcatactggagaaaagccctatgaatgcagtcaatgtgggaagtccttcagacagagttcatgccttactcaacatcagagaact

SEQ ID NO: 541789 - DNA, 120 bp, Artificial Sequence
  ENSG00000167384_18 (sequence is synthesized)
ccatttgaatgtaatcagtgtggaaaaacatttagcttgagtgctcgacttattgtgcatcaaagaactcatactggagagaaaccctttacatgtattcagtgtggaaaagctttcatt

SEQ ID NO: 541790 - DNA, 120 bp, Artificial Sequence
  ENSG00000167384_19 (sequence is synthesized)
aatagctataaacttattaggcatcaggcaactcatactgaagagaaactctatgaatgtaactagtttgtaaatcagctgggatttcttcctttttatttcattcttttaaaaaattta

SEQ ID NO: 541791 - DNA, 120 bp, Artificial Sequence
  ENSG00000167384_20 (sequence is synthesized)
ttttaaggtagtacatgtagttggaagaactactataaaaacaatatatgtgggaaaacttccagccctctgttaattgtgtgtctcaaatttgttctggaaaagaaagggggaaagtct

SEQ ID NO: 541792 - DNA, 120 bp, Artificial Sequence
  ENSG00000167384_21 (sequence is synthesized)
atgaacgacttttcaacctggcaattccatatacaatgttaaacttgattcttatgacatattcctatgaaaataataaatactggcacttttccttgcagaaagcactcagacctgaat

SEQ ID NO: 541793 - DNA, 120 bp, Artificial Sequence
  ENSG00000167384_22 (sequence is synthesized)
cagagaaaatcatatgccaaagccaactgccagtgttagacctctttttccataaagagtaaatggaatgctaacactagtgggcttattgagaaaatttaaaggttgctgtagtgttta

SEQ ID NO: 541794 - DNA, 120 bp, Artificial Sequence
  ENSG00000167384_23 (sequence is synthesized)
gaacttaggctggaaaaccatattttagtgcatcattttactacatgatcttccaattagatagcttgtaatctgttccttacagcacttgctgttgttacatgtgaagattttataaat

SEQ ID NO: 541795 - DNA, 120 bp, Artificial Sequence
  ENSG00000167384_24 (sequence is synthesized)
tttaggaaagtgtctatgatatatagtgaaaagtgtgggaaaagaatatagaaataatattcacttctaaaaccattatgataaaatatttgtgtatggattagaatagaaagggattat

SEQ ID NO: 541796 - DNA, 120 bp, Artificial Sequence
  ENSG00000167384_25 (sequence is synthesized)
ggatgtatctattcaatttctcagtttatgttgggccttcctttttggaatgtacgctgttatgctatgataaatgatataatgagtaaaaattattcaaagccaaaaatgaaatacaaa

SEQ ID NO: 541797 - DNA, 120 bp, Artificial Sequence
  ENSG00000167384_26 (sequence is synthesized)
gatttccttctttgactatttaggaaagactaagcaaccaaatagcaaagatccctcaggataatgaggtttatgtttggaatagcatgagcagattactacttaggacatagattccta

SEQ ID NO: 541798 - DNA, 120 bp, Artificial Sequence
  ENSG00000167384_27 (sequence is synthesized)
ggaacattcctcattgaaaataaaatggattcctggaaataggtaactagaaattttggccagaaatggtttcatatgaagaactgagaatgcgtgggaagtatagagggcaagtgggct

SEQ ID NO: 541799 - DNA, 120 bp, Artificial Sequence
  ENSG00000167384_28 (sequence is synthesized)
tattttcatatatgcaaagcaatattaaggaactctattttcatgttttagttcttcccctcatgtagcattgtctctttcctctgggatatgttccctgatgtgagagtcctctgaata

SEQ ID NO: 541800 - DNA, 120 bp, Artificial Sequence
  ENSG00000167384_29 (sequence is synthesized)
gaagggtgcttccctggctcagtgctgaccgtctaaattatgcttgcaaaaatgctttcatgaggcaaagttttagttactctttgatatttaagatttgattaacatgtctttctgacc

SEQ ID NO: 541801 - DNA, 120 bp, Artificial Sequence
  ENSG00000167384_30 (sequence is synthesized)
tttcccttgaatcatgaatttgaatcctgtggatgaccatatattgaagcctctgatcccagaaaggtaataagctgaaagttgaactgagagaccagataatagaggttaatacccttg

SEQ ID NO: 541802 - DNA, 120 bp, Artificial Sequence
  ENSG00000167384_31 (sequence is synthesized)
ggataggaaagaaaacttaaagggtaactgatggggttatccttagcaaaattctatccctatgagatgaccctaagtggagccatctctatgaggattaatccagagattgttgcacac

SEQ ID NO: 541803 - DNA, 120 bp, Artificial Sequence
  ENSG00000167384_32 (sequence is synthesized)
ctggcagtgtcaggtctgggaaaacagttgctgatgttttcatggagtgtgaaatactgaaagctgcgggcatcccttggggaccactgacccacactttgaagaaccctcaatgagtct

SEQ ID NO: 541804 - DNA, 120 bp, Artificial Sequence
  ENSG00000167384_33 (sequence is synthesized)
gaaagaggttcagtatctcttgggaaggatgtgttccaggctccaggcctagtcttacatggccagtggggttgaaagactgtgcccctgcaatggtcttttcctaagacagttgaacaa

SEQ ID NO: 541805 - DNA, 120 bp, Artificial Sequence
  ENSG00000167384_34 (sequence is synthesized)
agttccaagtctgtctgtcctattttaaccatctttaagaagcacaaaggggatatgagaaaaacagatgctgaaatgaaaattttaactgatatcttacttatctcacaagtcgtgtaa

SEQ ID NO: 541806 - DNA, 120 bp, Artificial Sequence
  ENSG00000167384_35 (sequence is synthesized)
agaaagaaatgatatggtcgaatattagattagatggtttaatgatgttttgagtgttatatatgagctatgatgagacctagaaaataaagtaaaaataaaaaatatataagccatgaa

SEQ ID NO: 541807 - DNA, 120 bp, Artificial Sequence
  ENSG00000167384_36 (sequence is synthesized)
gcccccgaaggtctgtgcacagacagagtcttgctctgtcgtccaggttggagtgcagtgacacaatcctagctcactgccgcctcaaacttctgggctcaagccatcctcctgcctcag

SEQ ID NO: 541808 - DNA, 120 bp, Artificial Sequence
  ENSG00000167384_37 (sequence is synthesized)
ttagtgtcttggatcactcagtcagctgcatttagctgcaatgggctggcccagaagacccaaaaagacctcatgtccaggattctttccttcctcaagagattatcatcaaagtcgagg

SEQ ID NO: 541809 - DNA, 80 bp, Artificial Sequence
  ENSG00000167393_0 (sequence is synthesized)
gaagctgccctgagcagcgcgggccggaccgcgccccctcctcggtccccgcgccccgcgagtccgcgcagttcccgagg

SEQ ID NO: 541810 - DNA, 80 bp, Artificial Sequence
  ENSG00000167393_1 (sequence is synthesized)
ggcgcgggcgtccgggggcgccgcgggcccagcccccgccatgccgcccggcaaagtgctgcagccggtcctgaagatga

SEQ ID NO: 541811 - DNA, 120 bp, Artificial Sequence
  ENSG00000167393_2 (sequence is synthesized)
ccggtcctgaagatgaaggtggacgagctgttcctgtactggctcagcgaggccagcacgcagcggatgctgcaggactgcctgcgccggatcaaggcgcccgggcgggaccagccgacc

SEQ ID NO: 541812 - DNA, 80 bp, Artificial Sequence
  ENSG00000167393_3 (sequence is synthesized)
aacccccgggccgggccctgcgctgcccctgggcgccgcctccagccccaggaacgcgccccacgttcgaggcacccgta

SEQ ID NO: 541813 - DNA, 120 bp, Artificial Sequence
  ENSG00000167393_4 (sequence is synthesized)
tccagccccaggaacgcgccccacgttcgaggcacccgtagatccgcagggacgagagtagttcagacacggaaagaagagcctctgcccccggccacgagccaaagcattccgaccttc

SEQ ID NO: 541814 - DNA, 120 bp, Artificial Sequence
  ENSG00000167393_5 (sequence is synthesized)
tacttccccagaggacgcccgcaggactccgtcaacgtggatgccgtcatcagcaagatcgagagcaccttcgcccggttcccccacgagagggccaccatggatgacatgggcctggtg

SEQ ID NO: 541815 - DNA, 120 bp, Artificial Sequence
  ENSG00000167393_6 (sequence is synthesized)
gccaaggcctgcggctgccccctctactggaaggggccgctcttctatggcgccggcggggagcgcacgggctccgtgtccgtccacaagttcgtcgccatgtggagaaaaatcctccag

SEQ ID NO: 541816 - DNA, 120 bp, Artificial Sequence
  ENSG00000167393_7 (sequence is synthesized)
aactgccacgacgacgcggccaagttcgtccatctgctcatgagccccggctgcaactacctggtgcaggaggactttgtccccttcttgcaggacgtggtgaacacgcacccggggctg

SEQ ID NO: 541817 - DNA, 120 bp, Artificial Sequence
  ENSG00000167393_8 (sequence is synthesized)
tcgttcctgaaggaggcgtccgagttccactcgcgctacatcaccacggtcatccagcggatcttctacgccgtgaaccggtcctggtccggcaggatcacctgcgccgagctgcggagg

SEQ ID NO: 541818 - DNA, 120 bp, Artificial Sequence
  ENSG00000167393_9 (sequence is synthesized)
caagttctgggagctggacacggaccacgacctgctcatcgacgcggacgacctggcgcggcacaatgaccacgccctttctaccaagatgatagacaggatcttctcaggagcagtcac

SEQ ID NO: 541819 - DNA, 120 bp, Artificial Sequence
  ENSG00000167393_10 (sequence is synthesized)
acgaggcagaaaagtgcagaaggaagggaagatcagctatgccgactttgtctggtttttgatctctgaggaagacaaaaaaacaccgaccagcatcgagtactggttccgctgcatgga

SEQ ID NO: 541820 - DNA, 120 bp, Artificial Sequence
  ENSG00000167393_11 (sequence is synthesized)
cctggacggggacggcgccctgtccatgttcgagctcgagtacttctacgaggagcagtgccgaaggctggacagcatggccatcgaggccctgcccttccaggactgcctctgccagat

SEQ ID NO: 541821 - DNA, 120 bp, Artificial Sequence
  ENSG00000167393_12 (sequence is synthesized)
gctggacctggtcaagccgaggactgaagggaagatcacgctgcaggacctgaagcgctgcaagctggctaacgtcttcttcgacaccttcttcaacatcgagaagtacctcgaccacga

SEQ ID NO: 541822 - DNA, 120 bp, Artificial Sequence
  ENSG00000167393_13 (sequence is synthesized)
gcagaaagagcagatctccctgctcagggacggtgacagcggcggccccgagctctcggactgggagaagtacgcggccgaggagtacgacatcctggtggccgaggagactgcgggaga

SEQ ID NO: 541823 - DNA, 120 bp, Artificial Sequence
  ENSG00000167393_14 (sequence is synthesized)
gccctgggaggacgggttcgaggccgagctcagccctgtggagcagaagctgagtgcgctgcgctccccgctggcccagaggcccttcttcgaggcgccctcaccgctgggcgccgtgga

SEQ ID NO: 541824 - DNA, 120 bp, Artificial Sequence
  ENSG00000167393_15 (sequence is synthesized)
cctgtacgagtacgcatgcggggacgaggacctggagccgctgtgacgccgcccgcgagaacgccgccgcggggccgctccccacgtgccaccaccgggccaccgcggctcgtgtaaaaa

SEQ ID NO: 541825 - DNA, 120 bp, Artificial Sequence
  ENSG00000167393_16 (sequence is synthesized)
ctgttgtggaaaatgagtgcgtttgtacggaatgataaacttttatttattcacagaagcgtgttgattgccgctgtgggttcgtggctggacctgcccagagctctgtgccagggggac

SEQ ID NO: 541826 - DNA, 120 bp, Artificial Sequence
  ENSG00000167393_17 (sequence is synthesized)
acgtagggccgcgcgtgaatgggacgggttcccacacggacaccctctggcgcttgccgttcccgacccagcctgggttccggggcctgcgtctgtggaaagggtccgtgtgcgcacaac

SEQ ID NO: 541827 - DNA, 120 bp, Artificial Sequence
  ENSG00000167393_18 (sequence is synthesized)
ggtgaccggcggctcccgggcgcctcagtcctggacaggagcctccaccacaggctgtgtgaatgttttgtgtaaacgtacaaaaccgtttctggcgatcacgcttgtacgtttggagga

SEQ ID NO: 541828 - DNA, 80 bp, Artificial Sequence
  ENSG00000167393_19 (sequence is synthesized)
ccggggtggccgcacccccttcccacctgtcctgggcccgtgtagctccggggcgtccccggccagaccctccccgcttt

SEQ ID NO: 541829 - DNA, 120 bp, Artificial Sequence
  ENSG00000167393_20 (sequence is synthesized)
cccgcctgtgccctggcggccccgtgcggctgagaccaagggcgcgcccctctcccggctcccggtctccgtgcggggcgaggctcctgggggtctctgcgcacccaccgcactgacagc

SEQ ID NO: 541830 - DNA, 120 bp, Artificial Sequence
  ENSG00000167393_21 (sequence is synthesized)
catcacgggatgagatcaaatgtccacctcgcaggttgtgtagagatgcaagcaggagactcttgagttcagacacggaaagaagagcctctgcccccggccacgagccaaagcattccg

SEQ ID NO: 541831 - DNA, 120 bp, Artificial Sequence
  ENSG00000167393_22 (sequence is synthesized)
gggcgggccgcgcggacaccgagcacacccttctctcagggcctgcgggtctgcagctgcctctccttccgcactcccagctctgtgtctgcagctgcctctccttcgcactcgccgctc

SEQ ID NO: 541832 - DNA, 120 bp, Artificial Sequence
  ENSG00000167393_23 (sequence is synthesized)
tgtgtctgcagctgcctctccttccccagtcgctgccccgtgtctgggtccccgcgtgcgcctctgcccgaggcctctgcctgggggcgtctacagggtcagtgtgggccgctggtcctg

SEQ ID NO: 541833 - DNA, 120 bp, Artificial Sequence
  ENSG00000167393_24 (sequence is synthesized)
aagctcctggcccgagggccagcagcgctgtggggcttccttgttaacacccgagcaagggcgggcaggccacacgccttccctcaggagctccaggttccagcccccaaggcctggagc

SEQ ID NO: 541834 - DNA, 120 bp, Artificial Sequence
  ENSG00000167393_25 (sequence is synthesized)
agtttccatccaatcccgggctaggtggagccccaggcttagcggtcgttcatatacctccgcgggagccggtgccgcccaggtgtcctcacagcagccactgcctcccggcccctctaa

SEQ ID NO: 541835 - DNA, 120 bp, Artificial Sequence
  ENSG00000167393_26 (sequence is synthesized)
gagtcatccacacttgcaggaactcaaagcggcctgtggcctgtggggcttgagttttctaaaggattcctttaagtgtgctttttaccccaaaaaaccatatgaccaagactgtttccg

SEQ ID NO: 541836 - DNA, 120 bp, Artificial Sequence
  ENSG00000167393_27 (sequence is synthesized)
ggtggcacaagactgtcacgcgaagtctgaggaagggggtggcccaggccccaggtcgggggttcttgtcgggcgctgggcctgagtgagcagtaacgaaggtgcactcctgaccctgcc

SEQ ID NO: 541837 - DNA, 120 bp, Artificial Sequence
  ENSG00000167393_28 (sequence is synthesized)
tggatctggggaaaaccctctggccacggggcctccacctcctccccggagaggcaggaggaggggcaggaggggggcaggaggagggccgggcccggggggctcccctcaccgaggcgc

SEQ ID NO: 541838 - DNA, 120 bp, Artificial Sequence
  ENSG00000167393_29 (sequence is synthesized)
tgacggctgccgcggtgcagaaagcgcccccttgcccggccggacggcccagcccggagcgaacggggagaggagagaagaggaccggagggagcggagggcagtgcagggagcggagaa

SEQ ID NO: 541839 - DNA, 120 bp, Artificial Sequence
  ENSG00000167393_30 (sequence is synthesized)
ggaggagaggagagcagcgccgggagcagccgggtctgcacagtcgcgggtcgggagaggcggccgcccccacccccggcgccatgcgccctcctcagcctgaggaatgcgcgcggcgcg

SEQ ID NO: 541840 - DNA, 80 bp, Artificial Sequence
  ENSG00000167393_31 (sequence is synthesized)
cctcagcctgaggaatgcgcgcggcgcgggccccggccccagagcgcctggcgggcgacgcatggagcgcgctgagcccg

SEQ ID NO: 541841 - DNA, 120 bp, Artificial Sequence
  ENSG00000167393_32 (sequence is synthesized)
cgacctgcgccaggagctggcctcactggcccgcggctgcgacttcgtgctgccctctcggttcaagaagcggctgaaggccttccagcaggttcagacacggaaagaagagcctctgcc

SEQ ID NO: 541842 - DNA, 120 bp, Artificial Sequence
  ENSG00000167393_33 (sequence is synthesized)
agatgcccagacaggccgcgctgagcgtgctgtgtctttctgcagcagagggtctctgggcggcgtcggtcaggcgcgaggtacgcagcaggagcgccggcgtccaggccctgctgactg

SEQ ID NO: 541843 - DNA, 120 bp, Artificial Sequence
  ENSG00000167393_34 (sequence is synthesized)
aattcttctcgtacgagcatttctacgtcatctactgcaagttctgggagctggacacggaccacgacctgctcatcgacgcggacgacctggcgcggcacaatgaccacggtctctctc

SEQ ID NO: 541844 - DNA, 120 bp, Artificial Sequence
  ENSG00000167393_35 (sequence is synthesized)
tccgtctgaaagctgtacctttgaggcctgaatattctgctctttacaagtcggtcttggagccgcggtcagctttgcgctctgtggatttcatgctggacttggctctgctcgacggga

SEQ ID NO: 541845 - DNA, 120 bp, Artificial Sequence
  ENSG00000167393_36 (sequence is synthesized)
aagcgtggtgggcccctaggatgggccgtgcaggggcatcggggccccggggctctcccagacccaggcgtcctctcagcttttcggtccccaccgcatccagtctcggctccggggggt

SEQ ID NO: 541846 - DNA, 120 bp, Artificial Sequence
  ENSG00000167393_37 (sequence is synthesized)
gacggcagccattgcccctgcgaggaccccggtccctctcctcatcgttgcctgacgtgagctttttgtgccccgacagcgagtggttgtcaccccaggccctggcgaggggggcacgtg

SEQ ID NO: 541847 - DNA, 120 bp, Artificial Sequence
  ENSG00000167393_38 (sequence is synthesized)
agtggggaggacgggtgagtggggggacgggtcagtgggaggacgggtgagtggggaggacgggtgagtgggaggacgggtgtgtgtgcagccgggggatgcggggtcagtcaggtgggg

SEQ ID NO: 541848 - DNA, 120 bp, Artificial Sequence
  ENSG00000167393_39 (sequence is synthesized)
tgcgcggacacagaggggcggggtgagacctgacacggggccggtgaggtaaggacagccgatgacagggccgggcctcggtgcagtctgcccgtcattccccgcgtggggttctgtgat

SEQ ID NO: 541849 - DNA, 120 bp, Artificial Sequence
  ENSG00000167393_40 (sequence is synthesized)
cctgggcgcgaggcttcgcacatcaggcccagcacggggaggccgagtcgtgtttcgccaacgacgtctgtccttatcccacggctggcacctgctgggcaggctgcagggcccgtggcc

SEQ ID NO: 541850 - DNA, 120 bp, Artificial Sequence
  ENSG00000167393_41 (sequence is synthesized)
attccagcctccgcttcggccttccagccttggaggccctgagaggccctgggctggttgctttctcacggagcgtgagggttcttcgtgtcttcagcatacaaaccctttatttgcgac

SEQ ID NO: 541851 - DNA, 120 bp, Artificial Sequence
  ENSG00000167393_42 (sequence is synthesized)
gtgttcgcctttttcccagtttgtgacgtatgttttcaccccctcttcacgtggtgtctcagagatgttctgaatttggaggaggagacactgactggttatttttacagcggtgtttct

SEQ ID NO: 541852 - DNA, 120 bp, Artificial Sequence
  ENSG00000167393_43 (sequence is synthesized)
ggtgtcatatctaagaattcatttctgaatccaaagccacgaagattttcctctgcgatgttttgtgttttggtctggggtcctcttgagtaaccttccctgtggggtgtgaagctcgga

SEQ ID NO: 541853 - DNA, 120 bp, Artificial Sequence
  ENSG00000167393_44 (sequence is synthesized)
ttgaggttccccttgtggtacgtgggtgtccgggtgtccgactgtcccagcatcagctttgcaggccgcagcgttgcctcggcgtcgtgactgtgccgtgtgcgggctccgttccggaac

SEQ ID NO: 541854 - DNA, 120 bp, Artificial Sequence
  ENSG00000167393_45 (sequence is synthesized)
cttcctccgtcccactgctgcacgcgtctgtccgttcccgcggcagagctggctgtggtgagaagcctccgacttgggcgccgtgtggaactgtcggggccattctggtgttgggctgcc

SEQ ID NO: 541855 - DNA, 120 bp, Artificial Sequence
  ENSG00000167393_46 (sequence is synthesized)
tgtgtgtgaatcttagactcagcccgtccttgctctgccgtcctgtgggaacgtgtgttggactctgacgtggtggtgagtgctggtcccgggaccacgtggactgtggcccccaccggc

SEQ ID NO: 541856 - DNA, 120 bp, Artificial Sequence
  ENSG00000167393_47 (sequence is synthesized)
ctcccgtggtgcacgctggagcgacgtggtcacttttgccatcccgtgctgagcttctcagttctgcttctgtcccgcgctacgttggctattctggtttctttgcctttgtatgaaaac

SEQ ID NO: 541857 - DNA, 120 bp, Artificial Sequence
  ENSG00000167393_48 (sequence is synthesized)
cgggcaacgagagcaaaactccatttccaaaacaaaaacaaacaatctgaacttttgagtgagatctcgctgagtgaatggatccctgtgggcccagctgccgccttcataaccgcagga

SEQ ID NO: 541858 - DNA, 120 bp, Artificial Sequence
  ENSG00000167393_49 (sequence is synthesized)
ggcccagtccatgggcgccgtccgtgtctctcggcaggatttttgtagctttccgtgtacgcttgatgcgaatgttgtgagacttctgagtgtttcctgatgttttcctgttgtcagcgg

SEQ ID NO: 541859 - DNA, 120 bp, Artificial Sequence
  ENSG00000167393_50 (sequence is synthesized)
tgcttttaaggttcccgtttccagttgttcgttggtagcatatagaatttattgaccttgtgttttgcaccttcatgaaactcacttactggatctcaaagctctgtcggttctttgggg

SEQ ID NO: 541860 - DNA, 120 bp, Artificial Sequence
  ENSG00000167393_51 (sequence is synthesized)
ttttctgcgtggacagcccatgtctgtcagtgggtccgtctctcgtcttccttttcacctctctgtgtacgttacttcctttctcttgcctgctgcatggcctggaacccgcagggagat

SEQ ID NO: 541861 - DNA, 120 bp, Artificial Sequence
  ENSG00000167393_52 (sequence is synthesized)
gtggtggatgtcagggcagaccacggccagccttgagtgagccctgctggtttgtgtgccgtcctcgttcccagtcctgggggacgtctcccctcacgcagcggtaagcacgctcattgg

SEQ ID NO: 541862 - DNA, 120 bp, Artificial Sequence
  ENSG00000167393_53 (sequence is synthesized)
cgaggatgttctccctcttcctggtctgcgggggctttctcgcagtgggggccgaatttctcagatgctttcgctccgtggttcctctgtgtgtccatacagcgagttacaccgagtcat

SEQ ID NO: 541863 - DNA, 120 bp, Artificial Sequence
  ENSG00000167393_54 (sequence is synthesized)
tttcagccagcctcgtgttcccaggatagatcttgccgagtcatgtgttatcctcacatattactggattctctttgcagagattatctgtagtattttattatttttttggagacaggg

SEQ ID NO: 541864 - DNA, 120 bp, Artificial Sequence
  ENSG00000167393_55 (sequence is synthesized)
tctggctgtgtcacgcaggctggagggcattggcgcaatctcagctcactgcaccctccacctgctgggcttaaggaatcctcgcacctgagccccccgagtagctgggcttccaggcac

SEQ ID NO: 541865 - DNA, 120 bp, Artificial Sequence
  ENSG00000167393_56 (sequence is synthesized)
agatggggtttcaccgtgttgcccaggttggtcttggatgcctgagctcgagggttctccccgcctcggtcccccaacgtgccggaattacaggtgtgagcccctgcccagccttgagtg

SEQ ID NO: 541866 - DNA, 120 bp, Artificial Sequence
  ENSG00000167393_57 (sequence is synthesized)
gccggaattacaggtgtgagcccctgcccagccttgagtgagctttgctggtttgtgtgtttcggaaacttgcccgttcccatcagtgggttattgttggtatttcctgctcgtgactct

SEQ ID NO: 541867 - DNA, 120 bp, Artificial Sequence
  ENSG00000167393_58 (sequence is synthesized)
gatgtctgcagaatccagtgatagcgtctctcacgctcctgatactgactttgtgtgtgatcagtgaggcgaggggccgacgaggttcactcctcttcccagggaaccacgggtgtttct

SEQ ID NO: 541868 - DNA, 120 bp, Artificial Sequence
  ENSG00000167393_59 (sequence is synthesized)
cccctttgttctgctgttttccttgagtatcttcaggcagcgacgtgggccatggacaccgcagcccgcggccttctgattttggtgcagctcaaaatactttctggttaccgttgggtt

SEQ ID NO: 541869 - DNA, 120 bp, Artificial Sequence
  ENSG00000167393_60 (sequence is synthesized)
cccgacccatgggttccatggacgtgcattttaacccctgctcccccatcagccgccccgtccgattcctgccaagcagcacagggcccctgcggcccaccctgggccgtctgtcctgtg

SEQ ID NO: 541870 - DNA, 120 bp, Artificial Sequence
  ENSG00000167393_61 (sequence is synthesized)
tgtccgtcctcctcgtggtcattgtttgcacggtggctctgacctggcagccaacctctgggtccccacaacttcccagtctctgccttctcctgtcggacaccctaaggcagctgtggc

SEQ ID NO: 541871 - DNA, 120 bp, Artificial Sequence
  ENSG00000167393_62 (sequence is synthesized)
ccccagacctagcctggatgggtgtgcgcctgtccccaccaccgtctgtcacctctgctccccacctgaccagtgtccacccccacggctgcccggctttgtgtctgcggcacagccagc

SEQ ID NO: 541872 - DNA, 120 bp, Artificial Sequence
  ENSG00000167393_63 (sequence is synthesized)
agcacgctggggtcgactgccttcaccgtgtccacgcctgctccggcagtgggagctcaggtccgtgggggtgaccgcggggagctcagtgccaggctgtcgggggcgtcttggaaagca

SEQ ID NO: 541873 - DNA, 120 bp, Artificial Sequence
  ENSG00000167393_64 (sequence is synthesized)
gaggtgtccccacaggatctctgagagtctgtgtggtccgtggccgcgctgggttccccggagcagcgcccgacgtcactgccgagaccttaagggaaggcgcgcgtccagtcctcgcac

SEQ ID NO: 541874 - DNA, 120 bp, Artificial Sequence
  ENSG00000167393_65 (sequence is synthesized)
tgctgcgtgttctggtcagaacggaagtggtagcctccactgggagcttctgtgctttgggagaatgtgtctaaactgtggtcctgtttgttctccagtcctgtgtggacaccacgaccc

SEQ ID NO: 541875 - DNA, 120 bp, Artificial Sequence
  ENSG00000167393_66 (sequence is synthesized)
agttgtaaacacaggtcccgtgcagctcgctttggggaagaggcgcgcccgcccaggtcctctgtgtgtagctcacgcccggggctccgtcccgtcctgggtgggttttcacctgcaccg

SEQ ID NO: 541876 - DNA, 120 bp, Artificial Sequence
  ENSG00000167393_67 (sequence is synthesized)
caggcccctcccccgggagcattcgtggagccggcgtcctcagccaggagcgcgttgctggctcagcggctggagctcaaggtcggctcaggggactgtctcgtgctggaggttggcggc

SEQ ID NO: 541877 - DNA, 120 bp, Artificial Sequence
  ENSG00000167393_68 (sequence is synthesized)
gtaacccgtgtgcttcctccaggacggtgacagcggcggccccgagctctcggactgggagaagtacgcggccgaggagtacgacatcctggtggccgaggagactgcgggagagccctg

SEQ ID NO: 541878 - DNA, 120 bp, Artificial Sequence
  ENSG00000167394_0 (sequence is synthesized)
agccacacttccggcaagagcagctagaatcgttccggtgcatattgaataggcgcagaaagggagaaaaagattctacagccctggccacagtactttggtgacacttttcgtggggct

SEQ ID NO: 541879 - DNA, 120 bp, Artificial Sequence
  ENSG00000167394_1 (sequence is synthesized)
ctctggaggacttttcccaaggcagatggagaaaacttcgtgaaacccactccttgctattaaaggaaatgttgtggaatataattggacttaggttttgcagagcttgagcatggcctt

SEQ ID NO: 541880 - DNA, 120 bp, Artificial Sequence
  ENSG00000167394_2 (sequence is synthesized)
tttgtcctcccaccttctggttcttgaagacattgccggtgacctggccccagactaacacaaggcgggcgtataccgtcagcctgcctggcgtccccttgcctcagcacacacagagac

SEQ ID NO: 541881 - DNA, 120 bp, Artificial Sequence
  ENSG00000167394_3 (sequence is synthesized)
ctcttgcaagatgcttctctgccgccataggctggaggttccccgggaactttcccttccttcctagctgaggaagatccctcacttccgctcgccgcgccaccggtcccacctccccgc

SEQ ID NO: 541882 - DNA, 120 bp, Artificial Sequence
  ENSG00000167394_4 (sequence is synthesized)
cccccgctgggtcctagcgccggcccctgtttggcagggtccgggctccgtcggtgcgaggagccgacgccgacgccacggagtcagcacaagtctcatcagagaaaccccgttcaccaa

SEQ ID NO: 541883 - DNA, 120 bp, Artificial Sequence
  ENSG00000167394_5 (sequence is synthesized)
ggccatggaagtggaggctgcagaggcccggtccccagcccccggctacaagcgctcgggccgccgctacaagtgcctgtcctgtaccaagacatttccaaacgcgcccagggcagcgcg

SEQ ID NO: 541884 - DNA, 120 bp, Artificial Sequence
  ENSG00000167394_6 (sequence is synthesized)
ccacgctgccacacatgggccggcagactgctctgaagaggtggccgaggtgaagccaaagccagagacagaagctaaggcagaggaagccagtggggagaaggtgtcaggctccgcggc

SEQ ID NO: 541885 - DNA, 120 bp, Artificial Sequence
  ENSG00000167394_7 (sequence is synthesized)
caagcctaggccctatgcgtgtccgctatgccccaaggcctacaagacggcacccgagctgcgcagccacgggcgcagccacacgggggagaagccctttccgtgccccgagtgcggccg

SEQ ID NO: 541886 - DNA, 120 bp, Artificial Sequence
  ENSG00000167394_8 (sequence is synthesized)
ccgcttcatgcagcccgtgtgcctgcgcgtgcacctggcctcgcacgctggcgaactgcccttccgctgtgcgcactgcccgaaggcctatggcgcgctctccaagctcaagatccacca

SEQ ID NO: 541887 - DNA, 120 bp, Artificial Sequence
  ENSG00000167394_9 (sequence is synthesized)
gcgtggccacacaggcgagcggccttacgcctgcgccgactgcggcaagagctttgctgacccttcagtgttccgcaagcaccggcgtactcacgctggcctgcggccctacagctgtga

SEQ ID NO: 541888 - DNA, 120 bp, Artificial Sequence
  ENSG00000167394_10 (sequence is synthesized)
gcgttgcggcaaagcctatgcggagctcaaggacctccgcaaccatgagcggtcccacaccggcgagcgccccttcctctgctccgagtgcgggaagagcttctcccgctcatcctcgct

SEQ ID NO: 541889 - DNA, 120 bp, Artificial Sequence
  ENSG00000167394_11 (sequence is synthesized)
cccggcctgcggcaagggcttcacgcagctcagttcctaccagagccacgagcgcacgcactcgggggagaagcccttcctgtgcccgcgctgcggccgcatgttctccgacccctcgag

SEQ ID NO: 541890 - DNA, 120 bp, Artificial Sequence
  ENSG00000167394_12 (sequence is synthesized)
cttccgtcgccaccagcgcgcccatgaaggggtgaagccataccactgcgagaagtgcggcaaggacttccggcagccggcggacctggccatgcaccggcgtgtgcacacaggcgaccg

SEQ ID NO: 541891 - DNA, 120 bp, Artificial Sequence
  ENSG00000167394_13 (sequence is synthesized)
gccgttcaagtgcctgcaatgtgacaagacgttcgtggcgtcctgggacctcaagcggcacgcgctggtgcactctggccagcggcccttccgctgtgaggagtgcgggcgagccttcgc

SEQ ID NO: 541892 - DNA, 120 bp, Artificial Sequence
  ENSG00000167394_14 (sequence is synthesized)
cgagcgtgccagcctcacgaagcatagccgggtgcactcgggggagcgccccttccactgtaacgcatgtgggaaatcctttgtggtgtcgtcgagcctgaggaagcacgagcggaccca

SEQ ID NO: 541893 - DNA, 120 bp, Artificial Sequence
  ENSG00000167394_15 (sequence is synthesized)
tcgaagcagtgaggccgcgggtgtgccccctgcacaggagctggtggtggggttggcgctgcctgtgggcgtggcaggtgagagttcagccgccccggcagcaggggcggggctggggga

SEQ ID NO: 541894 - DNA, 120 bp, Artificial Sequence
  ENSG00000167394_16 (sequence is synthesized)
ccctccagcagggctgctagggctgcccccggagtcaggtggtgtgatggccacacagtggcaggtggtgggcatgacggtggagcatgtggaatgccaagatgctggtgtccgggaggc

SEQ ID NO: 541895 - DNA, 120 bp, Artificial Sequence
  ENSG00000167394_17 (sequence is synthesized)
tcctggtcccttggaaggggcaggcgaggcggggggtgaggaggctgacgagaagcccccccagtttgtgtgccgagagtgcaaggagaccttctccacaatgacgctgctgcgtcggca

SEQ ID NO: 541896 - DNA, 120 bp, Artificial Sequence
  ENSG00000167394_18 (sequence is synthesized)
cgagcgctcacacccggagctccggcccttcccctgcacccagtgcggcaagagcttctctgaccgggctgggctgcgcaaacacagccgcactcacagctcagtgcgcccctacacctg

SEQ ID NO: 541897 - DNA, 120 bp, Artificial Sequence
  ENSG00000167394_19 (sequence is synthesized)
cccccattgtcccaaggccttcttgagtgccagcgacttgcgcaagcatgaacgcacccaccctgtgcccatggggacccccacacccctggagcccctggtggctttgctaggaatgcc

SEQ ID NO: 541898 - DNA, 120 bp, Artificial Sequence
  ENSG00000167394_20 (sequence is synthesized)
tgaagaggggccggcctgaagcccatgaccccccagcaccacactccgggagcccagcccccatcgggggcttcctgtacctccttttgcctggctctgctctttagactccagatccct

SEQ ID NO: 541899 - DNA, 120 bp, Artificial Sequence
  ENSG00000167394_21 (sequence is synthesized)
acccctcagcaactagctcccctgtcggccagctaagagagctgggacagtggaggctggcagaagctgagacgtgactgtctaggagtaacactcattaaagctttcattttggcacca

SEQ ID NO: 541900 - DNA, 120 bp, Artificial Sequence
  ENSG00000167394_22 (sequence is synthesized)
attgcgggcccagcaggtcctagaacccgccggctgtctccgcggttctgggctgcggacacccaggctcggcccgcgcggctgctggcccggcgcggtgtggtcccgggggtcctagag

SEQ ID NO: 541901 - DNA, 120 bp, Artificial Sequence
  ENSG00000167394_23 (sequence is synthesized)
cccgccatgttttgggtttttgtcccggtcgcgtggcccgcgctgcaagatcccaggcgccggcggccccctcccctgctgaggcccggccaccactcccgcggtcctagagaacgccat

SEQ ID NO: 541902 - DNA, 120 bp, Artificial Sequence
  ENSG00000167394_24 (sequence is synthesized)
cttgcaagcctttgtccctcattcggccttccgtccattcatttgttcatctcctcatccttcgttcagtcctccttgccacgtcctccgaagccacgttttctgaggcttataaccggg

SEQ ID NO: 541903 - DNA, 120 bp, Artificial Sequence
  ENSG00000167394_25 (sequence is synthesized)
gtcctgccctccaggggctgcctggctggcgggggcgccgcgtacagacggttgcgaggagcgaggagctccgggtttctgcaactctcggctcctcggcgcgcttcgtaggccccaccg

SEQ ID NO: 541904 - DNA, 120 bp, Artificial Sequence
  ENSG00000167394_26 (sequence is synthesized)
cccttcaaactcccacaaacttaagggaccccattttactgatgaggaaactgaggtccagagcggcgtggggcccttacctctctactgccataaagtattcctgagggcactagggaa

SEQ ID NO: 541905 - DNA, 120 bp, Artificial Sequence
  ENSG00000167394_27 (sequence is synthesized)
agattccagtctggggcggaggcccgtacagctgtgcaaggccagaattctgtgtgaacagttgctgtctctgaggactaaccatccagaggaggaaagaaaacacaaatgctggggacc

SEQ ID NO: 541906 - DNA, 120 bp, Artificial Sequence
  ENSG00000167394_28 (sequence is synthesized)
tgtcacttccagacagtgccagctaccagatttagcccattggctcagcccttttctggtcccaggtctgtcttttctgggcgcttggagaccttcaggccaggcccacgtctgggtaca

SEQ ID NO: 541907 - DNA, 120 bp, Artificial Sequence
  ENSG00000167394_29 (sequence is synthesized)
gggggttcttgaaggatgtaaaggggctttcccgttggagaaggcaggcaagggctccccgagcccaggaaactgcatctagaggtggaggattgagaattgtggctggaggttcggtcg

SEQ ID NO: 541908 - DNA, 120 bp, Artificial Sequence
  ENSG00000167394_30 (sequence is synthesized)
ctgaagaaggaagatgtggctctgcggacacttggtccaactcctttcttcaatgagcagatcagggaggaaacgaacgcaggatgtcagagccaggaatgctgggcaggaaggatgtgt

SEQ ID NO: 541909 - DNA, 120 bp, Artificial Sequence
  ENSG00000167395_0 (sequence is synthesized)
agtaacaataggaagtgtccgtagagctgggagtagactcctggctcatgccagctgcgccctcttttctctacctccttcctcttccccccttctcctttccctctttcccttccctcc

SEQ ID NO: 541910 - DNA, 120 bp, Artificial Sequence
  ENSG00000167395_1 (sequence is synthesized)
cacctcccgggaaccctggctgagtgtgcgtgtgtgggagcgcgagagccccccgacagccaccccttggggcgcgcggctgcagttagggccttggcccctccaccagaggaaggtgct

SEQ ID NO: 541911 - DNA, 120 bp, Artificial Sequence
  ENSG00000167395_2 (sequence is synthesized)
gccacgtgtctgctccttctgaacctccaggtttctgctacgttgccccatggaggacacacccccctcactcagctgctccgactgtcagcgccactttcccagcctcccagagctctc

SEQ ID NO: 541912 - DNA, 120 bp, Artificial Sequence
  ENSG00000167395_3 (sequence is synthesized)
tcggcaccgagaactgctccatccatctcccaaccaggacagtgaggaggctgacagcatccctcggccctaccgttgtcagcagtgtgggcggggctaccgtcaccccgggagcctggt

SEQ ID NO: 541913 - DNA, 120 bp, Artificial Sequence
  ENSG00000167395_4 (sequence is synthesized)
taaccatcgtcggacccacgagactggccttttcccctgtaccacctgtggcaaggacttctccaatcccatggctctcaagagccatatgaggacacatgctcctgagggccgccgcag

SEQ ID NO: 541914 - DNA, 120 bp, Artificial Sequence
  ENSG00000167395_5 (sequence is synthesized)
gcacaggcccccacgccccaaggaagccactccacacctccagggtgagacggtgtccactgactcctggggccaaaggcttggctctagtgaaggctgggaaaaccagacaaaacatac

SEQ ID NO: 541915 - DNA, 120 bp, Artificial Sequence
  ENSG00000167395_6 (sequence is synthesized)
agaagagacacctgactgtgaatctgtacctgaccccagggcagcttcgggtacgtgggaagatctgcccaccagacaaagagaaggcttggcaagccacccaggtcctgaggatggtgc

SEQ ID NO: 541916 - DNA, 120 bp, Artificial Sequence
  ENSG00000167395_7 (sequence is synthesized)
agacggctggggaccctccactaactctgccagagcccctcctctccccatcccagccagcagccttcttagcaacttggaacagtatctggctgaatcagtagtgaacttcacaggggg

SEQ ID NO: 541917 - DNA, 120 bp, Artificial Sequence
  ENSG00000167395_8 (sequence is synthesized)
ccaggagcccacccagtcccctcctgctgaggaggagcggcggtacaaatgtagtcagtgtggcaagacctacaagcacgccgggagcctcaccaaccaccgccagagccacacgctggg

SEQ ID NO: 541918 - DNA, 120 bp, Artificial Sequence
  ENSG00000167395_9 (sequence is synthesized)
catctacccctgtgccatctgtttcaaggagttctctaacctcatggctctgaagaaccactctcgactgcatgcccagtatcggccttaccactgtccccactgcccccgtgtcttccg

SEQ ID NO: 541919 - DNA, 120 bp, Artificial Sequence
  ENSG00000167395_10 (sequence is synthesized)
gctcccccgggagctgctggaacaccagcagtcccatgagggtgaaaggcaggagccacgctgggaggagaaagggatgcccaccaccaatgggcacacagatgagagcagccaggacca

SEQ ID NO: 541920 - DNA, 120 bp, Artificial Sequence
  ENSG00000167395_11 (sequence is synthesized)
gctccccagtgcacagatgctgaatggctctgcggagctcagcacctctggggagctggaggacagtggcctggaggaataccggcctttccgctgtggggactgtggccgtacttaccg

SEQ ID NO: 541921 - DNA, 120 bp, Artificial Sequence
  ENSG00000167395_12 (sequence is synthesized)
ccatgctgggagcctcatcaaccatcgaaagagccaccagacaggtgtctacccctgctcactctgttctaagcagctgttcaatgcggctgccctcaaaaaccatgtgcgggctcatca

SEQ ID NO: 541922 - DNA, 120 bp, Artificial Sequence
  ENSG00000167395_13 (sequence is synthesized)
caggcccaggcaaggagttggggaaaatgggcagccatcagtcccaccagctcccctgctgctggctgagaccacccacaaagaggaagaggaccccaccaccaccctggaccatcggcc

SEQ ID NO: 541923 - DNA, 120 bp, Artificial Sequence
  ENSG00000167395_14 (sequence is synthesized)
ctataagtgcagtgagtgtggtcgtgcttaccgccaccgggggagcctggtgaaccatcgccacagccatcggactggagagtaccagtgctcactctgtccccgcaagtaccccaatct

SEQ ID NO: 541924 - DNA, 120 bp, Artificial Sequence
  ENSG00000167395_15 (sequence is synthesized)
catggccctgcgcaaccacgtgcgggtacattgcaaggctgctcgccgaagtgcagacatcggggctgagggtgcccccagccacctcaaggtagaactcccgcctgacccagtggaggc

SEQ ID NO: 541925 - DNA, 120 bp, Artificial Sequence
  ENSG00000167395_16 (sequence is synthesized)
agaggcagccccgcacacagatcaggaccatgtgtgcaaacatgaagaagaggccacggacatcaccccagcagcagacaagacagcagcacatatctgtagcatctgtgggctgctctt

SEQ ID NO: 541926 - DNA, 120 bp, Artificial Sequence
  ENSG00000167395_17 (sequence is synthesized)
tgaagacgctgagagccttgaacgtcatggcctgactcatggggcaggggaaaaggaaaatagcagaacagagaccacaatgtcacctcctagggcctttgcctgccgagactgtggaaa

SEQ ID NO: 541927 - DNA, 120 bp, Artificial Sequence
  ENSG00000167395_18 (sequence is synthesized)
gagctatcgccactcaggcagccttatcaaccacaggcagacccaccagacaggagacttcagttgtggggcctgtgccaagcacttccacaccatggctgccatgaagaaccacttgcg

SEQ ID NO: 541928 - DNA, 120 bp, Artificial Sequence
  ENSG00000167395_19 (sequence is synthesized)
ccggcacagtcggcggcggagcaggcggcatcggaagcgggctggcggtgccagcggtgggagagaagccaaactcctggcagcggagagctggacccgggagctagaagacaatgaagg

SEQ ID NO: 541929 - DNA, 120 bp, Artificial Sequence
  ENSG00000167395_20 (sequence is synthesized)
cctggagtctccccaagacccttcaggggaaagtcctcatggggctgaaggcaacctggaaagtgatggggactgtttgcaggctgaatctgaaggggacaaatgtgggcttgagaggga

SEQ ID NO: 541930 - DNA, 120 bp, Artificial Sequence
  ENSG00000167395_21 (sequence is synthesized)
tgagacccatttccagggtgataaagagagcggaggcactggggaaggactggaaaggaaggatgccagtttacttgacaacttggacatcccaggtgaggaaggtggtggcactcactt

SEQ ID NO: 541931 - DNA, 120 bp, Artificial Sequence
  ENSG00000167395_22 (sequence is synthesized)
ctgcgatagcctcactggggtggatgaagaccagaagccagccactggccaacccaactcctcttcccactctgccaatgctgtcactggctggcaggctggggccgctcacacatgctc

SEQ ID NO: 541932 - DNA, 120 bp, Artificial Sequence
  ENSG00000167395_23 (sequence is synthesized)
tgactgtgggcattctttcccccatgccactggcctgctgagccacaggccctgccacccaccaggcatctatcagtgctccctctgcccgaaggagtttgactctctgcctgccctccg

SEQ ID NO: 541933 - DNA, 120 bp, Artificial Sequence
  ENSG00000167395_24 (sequence is synthesized)
cagccacttccagaaccataggcctggggaggcgacctcagcacagcctttcctctgctgcctctgtggcatgatcttccctgggcgggctggctacaggcttcaccggcgccaggccca

SEQ ID NO: 541934 - DNA, 120 bp, Artificial Sequence
  ENSG00000167395_25 (sequence is synthesized)
cagctcctctggcatgactgagggctcagaggaggagggggaagaggaaggagtggcagaggcagcccctgcacgcagtccaccactgcagctctcggaagcagagctgctgaatcagct

SEQ ID NO: 541935 - DNA, 120 bp, Artificial Sequence
  ENSG00000167395_26 (sequence is synthesized)
gcagcgggaggtggaagcgctggacagtgcagggtatgggcacatctgtggctgctgtggtcagacctacgatgacctggggagcctggagcgtcaccaccaaagtcagagttctgggac

SEQ ID NO: 541936 - DNA, 120 bp, Artificial Sequence
  ENSG00000167395_27 (sequence is synthesized)
tactgcagacaaggctcccagccccttgggagtggcaggtgatgccatggagatggtcgtggacagtgtcttggaggacatagtgaattctgtctctggagagggtggagatgccaagtc

SEQ ID NO: 541937 - DNA, 120 bp, Artificial Sequence
  ENSG00000167395_28 (sequence is synthesized)
gaaagtttgttggaggctcagccccgccccttccgctgcaaccagtgtggcaagacctatcgccatgggggcagcctggtgaaccaccgcaagatccaccagactggagactttctctgc

SEQ ID NO: 541938 - DNA, 120 bp, Artificial Sequence
  ENSG00000167395_29 (sequence is synthesized)
cctgtctgctcccgctgctaccccaacctggctgcctaccgtaatcatctgcggaaccaccctcgctgcaaaggctctgagccccaggttgggcccatcccagaggcagcaggtagcagt

SEQ ID NO: 541939 - DNA, 120 bp, Artificial Sequence
  ENSG00000167395_30 (sequence is synthesized)
gagctgcaggttgggcccatcccagaaggaggcagcaacaagccccagcacatggcagaggaggggccggggcaagcagaagtcgagaagctccaggaagaacttaaagtggagcccctg

SEQ ID NO: 541940 - DNA, 120 bp, Artificial Sequence
  ENSG00000167395_31 (sequence is synthesized)
gaggaagtggccagggtgaaagaagaggtgtgggaggagaccactgtgaagggggaggagatagagcccaggctggagactgccgagaagggctgccagactgaagccagctctgagcgg

SEQ ID NO: 541941 - DNA, 120 bp, Artificial Sequence
  ENSG00000167395_32 (sequence is synthesized)
cccttcagctgcgaggtgtgtggccgatcctacaagcacgccggcagcctcatcaaccaccggcagagccaccagaccggccactttggctgtcaggcctgctccaagggcttctcaaac

SEQ ID NO: 541942 - DNA, 120 bp, Artificial Sequence
  ENSG00000167395_33 (sequence is synthesized)
ctcatgtccctcaagaaccaccggcgcatccatgcagatccccgacgtttccgctgcagcgagtgtgggaaggccttccgcctgcggaaacagctggccagccaccagcgggtccacatg

SEQ ID NO: 541943 - DNA, 120 bp, Artificial Sequence
  ENSG00000167395_34 (sequence is synthesized)
gaacggcgtgggggtgggggcacccgaaaggcgactcgggaagatcggcccttccgctgtgggcagtgcgggcggacctatcgccacgccggcagcctcctgaaccaccggcgcagccac

SEQ ID NO: 541944 - DNA, 120 bp, Artificial Sequence
  ENSG00000167395_35 (sequence is synthesized)
gagacgggccagtacagctgccccacctgccccaagacctactccaaccgcatggccctgaaggaccaccagaggctgcactcagagaatcggcggcgacgggctggacggtccaggcgc

SEQ ID NO: 541945 - DNA, 120 bp, Artificial Sequence
  ENSG00000167395_36 (sequence is synthesized)
acagctgtgcgttgcgccctctgtggccgcagcttccctggccggggatctttggagcggcacctgcgggagcatgaggagacagaaagggagccagccaatggccagggaggcctggat

SEQ ID NO: 541946 - DNA, 120 bp, Artificial Sequence
  ENSG00000167395_37 (sequence is synthesized)
ggcacagcggccagtgaggcgaacctgactggcagccagggactagagacccaattgggtggtgctgagccagtaccccacttggaggatggagtcccaaggccaggggagcgcagtcag

SEQ ID NO: 541947 - DNA, 120 bp, Artificial Sequence
  ENSG00000167395_38 (sequence is synthesized)
agccccatcagggcagcaagctcagaagccccagagccactgtcctggggtgcagggaaggcaggtgggtggccggtaggtgggggactggggaatcatagtggaggctgggttcctcag

SEQ ID NO: 541948 - DNA, 120 bp, Artificial Sequence
  ENSG00000167395_39 (sequence is synthesized)
ttcctaactaggtcagaggagccagaggacagtgtccacaggagtccttgccacgctggtgactgccagctcaatggacctactctgagtcacatggatagctgggacaacagagacaac

SEQ ID NO: 541949 - DNA, 120 bp, Artificial Sequence
  ENSG00000167395_40 (sequence is synthesized)
agctctcagctgcagccagggagccactcctcttgcagccagtgtggcaagacttactgccagtcaggcagcctcttgaaccacaacaccaacaagacagaccgacactattgcctgctc

SEQ ID NO: 541950 - DNA, 120 bp, Artificial Sequence
  ENSG00000167395_41 (sequence is synthesized)
tgctccaaggagttcttaaatcctgtggccacaaagagccacagccacaaccacatagacgcccagacctttgcctgtcctgactgtggcaaagcctttgagtcccaccaggaactggcc

SEQ ID NO: 541951 - DNA, 120 bp, Artificial Sequence
  ENSG00000167395_42 (sequence is synthesized)
agccacctgcaggctcatgcccggggccacagccaggtgccagcccagatggaggaggccagagatcccaaagccgggactggggaggaccaggtggttctccctggtcaagggaaagcc

SEQ ID NO: 541952 - DNA, 120 bp, Artificial Sequence
  ENSG00000167395_43 (sequence is synthesized)
caggaggccccatcagaaacccccagaggcccaggagagagtgtggagagagccaggggaggacaagcggtgacgtccatggcggctgaggacaaggagcggcccttccgctgcacccag

SEQ ID NO: 541953 - DNA, 120 bp, Artificial Sequence
  ENSG00000167395_44 (sequence is synthesized)
tgcgggcgctcctaccgccatgctggcagcctgctgaaccaccagaaggcccacaccacagggttgtacccgtgctccctctgtcccaaacttctccctaacctgctgtctcttaagaac

SEQ ID NO: 541954 - DNA, 120 bp, Artificial Sequence
  ENSG00000167395_45 (sequence is synthesized)
cacagcaggacccacacggaccccaagcgccactgctgcagcatctgtggcaaggcctttcggacagctgcccggctggagggccacgggcgggtccatgcaccccgggaggggcctttc

SEQ ID NO: 541955 - DNA, 120 bp, Artificial Sequence
  ENSG00000167395_46 (sequence is synthesized)
acctgcccccattgtccccgccacttccgccgccgaatcagcttcgtgcagcaccagcagcagcaccaggaggagtggacggtggccggctccggagccccagtggcaccagtgacgggc

SEQ ID NO: 541956 - DNA, 120 bp, Artificial Sequence
  ENSG00000167395_47 (sequence is synthesized)
agaggggacttgccattgccccctccacccacccccacgaccccactcctggatccttcaccccagtggcctgcagacctcagcttctccctctgaacttcaagtctccaaagatcagaa

SEQ ID NO: 541957 - DNA, 120 bp, Artificial Sequence
  ENSG00000167395_48 (sequence is synthesized)
tctgggggagggagcgcgtgcagggaggggcttgatctccacattttctcaggagtagttcgggcatccccatatcttctcctctccccttgtgaagaggacccagatctggcttctttc

SEQ ID NO: 541958 - DNA, 120 bp, Artificial Sequence
  ENSG00000167395_49 (sequence is synthesized)
ccaaggagggggtggggtgttcctcgcgtccctgtccttgaaggacctccttcccccagcctcatcaccgtgctcttctcagcgccaccctcagcagccagattgcaacaccagggagag

SEQ ID NO: 541959 - DNA, 120 bp, Artificial Sequence
  ENSG00000167395_50 (sequence is synthesized)
gcggatgcagagccccaccggtgggaaagttgcctgtggaagggagccttttgctacaatttgtaacttattttctaaagtctattttgtaacaatttatttaagtttaaaaaaaggaaa

SEQ ID NO: 541960 - DNA, 120 bp, Artificial Sequence
  ENSG00000167395_51 (sequence is synthesized)
actgctgccccccaaaaaaagaaattttcaaaacaacgtggctggcgtgattgtatctgaaagggtaaaggaggaggaaagctgagacgcctgcttggtagcagagttgggtgtgggagt

SEQ ID NO: 541961 - DNA, 120 bp, Artificial Sequence
  ENSG00000167395_52 (sequence is synthesized)
gtccacagacacccctgtcctgcagggtggggagtgggcacctgtggccccaggcaggttccttcccacagctgctgggcttctgggcctgccctggtgcctggaatcacacatgacagg

SEQ ID NO: 541962 - DNA, 120 bp, Artificial Sequence
  ENSG00000167395_53 (sequence is synthesized)
gtggggaggacaggggcagtaatgccatttgcctgcctgcattctcttgtcctgagaatggccaggtcccctgtcagcagctggttggttggcctgtggggaaggaaggagggtggagtt

SEQ ID NO: 541963 - DNA, 120 bp, Artificial Sequence
  ENSG00000167395_54 (sequence is synthesized)
gtcctcatcctcacggctttggtccctccctccctccccattcctcgaaggaacagggtctgtcttggccgccatgacagatgagaatactgaggctcaaagcggttgagcagcctgctc

SEQ ID NO: 541964 - DNA, 120 bp, Artificial Sequence
  ENSG00000167395_55 (sequence is synthesized)
caagtcacacgatgacaaagaaccagaatctgaatcaaatgggtctgcctgttgctccaccctacccaaggcagctggagtgggttagaacggcacgttctcactggagagagaagggtc

SEQ ID NO: 541965 - DNA, 120 bp, Artificial Sequence
  ENSG00000167395_56 (sequence is synthesized)
ctggagaggcagggtttggcaggaggccccggggccacatacttatgttggccaggcagcttccaggctcagcctcgggctctggttcctcggcgaagtagacctgccagtccaaactgc

SEQ ID NO: 541966 - DNA, 120 bp, Artificial Sequence
  ENSG00000167395_57 (sequence is synthesized)
gagcagattcctactgttcttaaaggacagtaatgccttttgagtctggtctgaagaacataacaggtctgtgatcagaagtaggttgcatctctctcaactttaatttccttagctata

SEQ ID NO: 541967 - DNA, 120 bp, Artificial Sequence
  ENSG00000167395_58 (sequence is synthesized)
cctgtagggatgacttaagcctaggggagctcctatatttgggaagcttgtgcacagggaagccttaaatgatggtgcctgcagattggatctagtagaaattaggtccttgggcatgga

SEQ ID NO: 541968 - DNA, 120 bp, Artificial Sequence
  ENSG00000167395_59 (sequence is synthesized)
tgcttggggaacctctcagtgacctcaggtgaacttgttgctcgtagagccaagaggcgaagttaattcaggccttccttttgaccactgccccctcttcctaggccttggcccctccac

SEQ ID NO: 541969 - DNA, 120 bp, Artificial Sequence
  ENSG00000167395_60 (sequence is synthesized)
cagtggagggggaagtccagccccaaagtcggtgggggagcaaggagtgagaggagagagccccggggattctaagaggtgggtgggggcttggctatggggtgagagaagtagcttgag

SEQ ID NO: 541970 - DNA, 120 bp, Artificial Sequence
  ENSG00000167395_61 (sequence is synthesized)
gatgtgctgagctgagcacccgcaagtcaggtataacaaatagcagggtgggttgggcagcacgtgggggcgtggtcaggccgaggctgctacctgggctcctccattacactgtagcca

SEQ ID NO: 541971 - DNA, 120 bp, Artificial Sequence
  ENSG00000167395_62 (sequence is synthesized)
gaatggaatggtctttctgttcaggggaaggtcactgggtaccccctggctgctgtgtctggaaaccctcctgagtcagccagtaaagtaatgacttccagagaaaaagaggaagccatt

SEQ ID NO: 541972 - DNA, 120 bp, Artificial Sequence
  ENSG00000167395_63 (sequence is synthesized)
ggtttggtctaggttccattctttcctggagcaggccgggtgccagggaacaagggatggggcatgggctccacggcttccctgctgacttggccacggaaactggttcactggttggca

SEQ ID NO: 541973 - DNA, 120 bp, Artificial Sequence
  ENSG00000167395_64 (sequence is synthesized)
ccctactccctgtccctctttccctgcgccttgtctctgctgctcctctccttggaaactagacctctggtccttccctgtcagtgttgctcccatctcttctctaacctttattcagcc

SEQ ID NO: 541974 - DNA, 120 bp, Artificial Sequence
  ENSG00000167395_65 (sequence is synthesized)
ccttttccctctgctgccaacggcctttttaggatccaaccaaaccaccctttctacctgcgcaccctgccaccctctgcacacctttaactggaggactgagtcacagataattgtttc

SEQ ID NO: 541975 - DNA, 120 bp, Artificial Sequence
  ENSG00000167395_66 (sequence is synthesized)
cttgaagtccaggcccagctgcagcaacaacagtcattagcccgtgtcacatccctgatcagagggcatctccgtggggaatcgcctccacccagcactgctggaagccgcagctgccag

SEQ ID NO: 541976 - DNA, 120 bp, Artificial Sequence
  ENSG00000167395_67 (sequence is synthesized)
ggagtggggcggccggttccctcagcaggacctgggctggcctctccacctcccctagtagaggcggacccattccatctagtggccaccgagggtgggtggccctgagatggtgggccc

SEQ ID NO: 541977 - DNA, 120 bp, Artificial Sequence
  ENSG00000167395_68 (sequence is synthesized)
ttgacaggccttgtcagagcagagggcaggtgggagtcacctgaaagctgaaggaatggctttaaggatagaagatttctcatgacctcaagggatatgagggaggagccagtttgccag

SEQ ID NO: 541978 - DNA, 120 bp, Artificial Sequence
  ENSG00000167395_69 (sequence is synthesized)
ggctgggaaaataattaggaggcctagaatccctgttctcatctgggcctccggggccaggggcaggggaatggcctgcagggctgggagggggtacacgctgtgcggggtctgcccctc

SEQ ID NO: 541979 - DNA, 120 bp, Artificial Sequence
  ENSG00000167397_0 (sequence is synthesized)
attcgccgcccggcccctgctccgtggctggttttctccgcgggcgcctcgggcggaacctggagataatgggcagcacctgggggagccctggctgggtgcggctcgctctttgcctga

SEQ ID NO: 541980 - DNA, 120 bp, Artificial Sequence
  ENSG00000167397_1 (sequence is synthesized)
cgggcttagtgctctcgctctacgcgctgcacgtgaaggcggcgcgcgcccgggaccgggattaccgcgcgctctgcgacgtgggcaccgccatcagctgttcgcgcgtcttctcctcca

SEQ ID NO: 541981 - DNA, 120 bp, Artificial Sequence
  ENSG00000167397_2 (sequence is synthesized)
ggtggggcaggggtttcgggctggtggagcatgtgctgggacaggacagcatcctcaatcaatccaacagcatattcggttgcatcttctacacactacagctattgttaggttgcctgc

SEQ ID NO: 541982 - DNA, 120 bp, Artificial Sequence
  ENSG00000167397_3 (sequence is synthesized)
ggacacgctgggcctctgtcctgatgctgctgagctccctggtgtctctcgctggttctgtctacctggcctggatcctgttcttcgtgctctatgatttctgcattgtttgtatcacca

SEQ ID NO: 541983 - DNA, 120 bp, Artificial Sequence
  ENSG00000167397_4 (sequence is synthesized)
cctatgctatcaacgtgagcctgatgtggctcagtttccggaaggtccaagaaccccagggcaaggctaagaggcactgagccctcaacccaagccaggctgacctcatctgctttgctt

SEQ ID NO: 541984 - DNA, 120 bp, Artificial Sequence
  ENSG00000167397_5 (sequence is synthesized)
tggcatgtgagccttgcctaagggggcatatctgggtccctagaaggccctagatgtggggcttctagattaccccctcctcctgccatacccgcacatgacaatggaccaaatgtgcca

SEQ ID NO: 541985 - DNA, 120 bp, Artificial Sequence
  ENSG00000167397_6 (sequence is synthesized)
cacgctcgctcttttttacacccagtgcctctgactctgtccccatgggctggtctccaaagctctttccattgcccagggagggaaggttctgagcaataaagtttcttagatcaatca

SEQ ID NO: 541986 - DNA, 120 bp, Artificial Sequence
  ENSG00000167397_7 (sequence is synthesized)
gtcaagggtgtgtgtggccaaaggagtggttctgtgaatgtatgggagaaagggagaccgaccaccaggaagcactggtgaggcaggacccgggaggatgggaggctgcagcccgaatgg

SEQ ID NO: 541987 - DNA, 120 bp, Artificial Sequence
  ENSG00000167397_8 (sequence is synthesized)
tgcctgaaatagtttcaggggaaatgcttggttcccgaatcggatcgccgtattcgctggatcccctgatccgctggtctctaggtcccggatgctgcaattcttacaacaggacttggc

SEQ ID NO: 541988 - DNA, 120 bp, Artificial Sequence
  ENSG00000167397_9 (sequence is synthesized)
gcgattccgcacgtcccttacccgcttcactagtcccggcattcttcgctgttttcctaactcgcccgcttgactagcgccctggaacagccatttgggtcgtggagtgcgagcacggcc

SEQ ID NO: 541989 - DNA, 120 bp, Artificial Sequence
  ENSG00000167397_10 (sequence is synthesized)
gtgacatggaatcctgacgtggccaaaggtgcccggtgccaggagatcatcgacccttggactaggatgggaggtcggggaacagaggatagcccaggtggcttcttggaaatcaccttt

SEQ ID NO: 541990 - DNA, 120 bp, Artificial Sequence
  ENSG00000167397_11 (sequence is synthesized)
cgggagtgggaggcgtggggcctcggagcagggcggccaggatgccagatgattattctggagtctgggatcggtgtgcccggggaacggacacggggctggactgctcgcggggtcgtt

SEQ ID NO: 541991 - DNA, 120 bp, Artificial Sequence
  ENSG00000167397_12 (sequence is synthesized)
gcacaggggctgagctacccagcgatactggtgttcgaaataagagtgcgaggcaagggaccagacagtgctggggactgggattattccggggactcgcacgtgaattggatgccaagg

SEQ ID NO: 541992 - DNA, 120 bp, Artificial Sequence
  ENSG00000167397_13 (sequence is synthesized)
gcaaggaagaagtgaggaagtagagactgggagtgtagaatctttccaaaaacttgaatgtggaggggtagatgggataatgccgggagaggaggctggtgaaggacctcttagtgaagg

SEQ ID NO: 541993 - DNA, 120 bp, Artificial Sequence
  ENSG00000167397_14 (sequence is synthesized)
gagatttgttgctgtttctgagatgggaaagagaaacaagttgcagtgtagatggggaggatggagaggttgaaggtgtaggagagatgggtcaccatcagatgggacgtctgtgaagga

SEQ ID NO: 541994 - DNA, 120 bp, Artificial Sequence
  ENSG00000167414_0 (sequence is synthesized)
gcagcagcggaactcctggctttctgcgagacgcatgccaaagatgacccgctggtgacgccagtacccgccgcggagaaccccttccgcgacaagcgcctcttttgtgttctgctctga

SEQ ID NO: 541995 - DNA, 120 bp, Artificial Sequence
  ENSG00000167419_0 (sequence is synthesized)
ctttcctgctaagcctcagcgtctcctccaagccacatcaaaatctttccttctgggcctttcccagaagtgaattcttgctggaaggtataaaagaccagctcctccaagcagagcaac

SEQ ID NO: 541996 - DNA, 120 bp, Artificial Sequence
  ENSG00000167419_1 (sequence is synthesized)
tccctggctgccgtgaaaagacaaggcactgggcagtgatgagggtccttctccatctcccagccctcctggcttccctcatcttgcttcaggctgcagcatctaccacaagagcgcaga

SEQ ID NO: 541997 - DNA, 120 bp, Artificial Sequence
  ENSG00000167419_2 (sequence is synthesized)
ctaccagaacctctgccatctccgatactgtgagtcaggccaaggtccaagtcaacaaggccttcctggactcccgaaccaggctgaagaccgccatgagctctgagactcccaccagcc

SEQ ID NO: 541998 - DNA, 120 bp, Artificial Sequence
  ENSG00000167419_3 (sequence is synthesized)
gacagctctcagaatacctcaagcatgccaaaggccggacgcgcacagccatccgcaatggacaggtgtgggaggagtctttaaagagactgaggcagaaggcatccttgaccaatgtca

SEQ ID NO: 541999 - DNA, 120 bp, Artificial Sequence
  ENSG00000167419_4 (sequence is synthesized)
cagatcccagcctggacttgacttcactgtctctggaggtgggctgtggtgctcctgctcccgtggtgagatgcgacccgtgcagcccttaccgcaccattacgggagactgcaataaca

SEQ ID NO: 542000 - DNA, 120 bp, Artificial Sequence
  ENSG00000167419_5 (sequence is synthesized)
ggaggaagcctgcgctgggcgccgccaacagggctctggcgcgctggctgcccgcggagtacgaggacgggctctccctgcccttcggctggacgccggggaagacgcgcaacggcttcc

SEQ ID NO: 542001 - DNA, 120 bp, Artificial Sequence
  ENSG00000167419_6 (sequence is synthesized)
ctctcccgctggcccgggaggtatctaacaagattgttggctatctgaatgaggagggtgttctggaccaaaacaggtccctgctcttcatgcagtggggtcagattgtggatcatgacc

SEQ ID NO: 542002 - DNA, 120 bp, Artificial Sequence
  ENSG00000167419_7 (sequence is synthesized)
tggactttgcccctgacaccgagctggggagtagcgagtactccaaagcccagtgtgatgagtactgtatccagggagacaactgcttccccatcatgttcccacccaatgaccccaagg

SEQ ID NO: 542003 - DNA, 120 bp, Artificial Sequence
  ENSG00000167419_8 (sequence is synthesized)
cggggactcaagggaaatgcatgcctttcttccgagctgggttcgtctgccccactccaccctacaagtccctggcccgagagcagatcaacgctctgacctccttcctggatgccagct

SEQ ID NO: 542004 - DNA, 120 bp, Artificial Sequence
  ENSG00000167419_9 (sequence is synthesized)
ttgtgtacagctccgagccaagcctggccagccgcctccgcaacctcagcagccccctgggcctcatggctgtcaaccaggaggtctcagaccatggactaccctacctgccctatgaca

SEQ ID NO: 542005 - DNA, 120 bp, Artificial Sequence
  ENSG00000167419_10 (sequence is synthesized)
gcaagaagccaagcccctgtgagttcatcaacaccactgcccgtgtgccctgcttcctggcaggagattctcgagcctcagagcatattctgctggccacatcccacaccctctttctcc

SEQ ID NO: 542006 - DNA, 120 bp, Artificial Sequence
  ENSG00000167419_11 (sequence is synthesized)
gctctaccaggaagcccggaaaatcctgggagccttcgtgcagattatcacctttagggactacctacccattttgctaggtgaccacatgcagaagtggatacccccatatcaaggcta

SEQ ID NO: 542007 - DNA, 120 bp, Artificial Sequence
  ENSG00000167419_12 (sequence is synthesized)
cagtgaatctgtggatcccagaatttccaatgtcttcaccttcgccttccgctttggccacttggaggtcccctctagtatgttccgcctggatgagaattatcagccatgggggccaga

SEQ ID NO: 542008 - DNA, 120 bp, Artificial Sequence
  ENSG00000167419_13 (sequence is synthesized)
accagaactccccctccacaccctcttcttcaacacttggaggatggtcaaagatggtggaattgatcctctggtgcggggcctgctggccaagaaatccaagctgatgaaacagaataa

SEQ ID NO: 542009 - DNA, 120 bp, Artificial Sequence
  ENSG00000167419_14 (sequence is synthesized)
aatgatgactggagagctgcgcaacaagcttttccagccaactcacaggatccatggctttgacctggctgccatcaacacacagcgttgccgggaccatgggcaacctgggtacaattc

SEQ ID NO: 542010 - DNA, 120 bp, Artificial Sequence
  ENSG00000167419_15 (sequence is synthesized)
ctggagagccttctgtgacctctcacagccgcagacactagaggagttgaacacagtgctgaagagcaagatgctggccaagaagttactgggtctctacgggacccctgacaacatcga

SEQ ID NO: 542011 - DNA, 120 bp, Artificial Sequence
  ENSG00000167419_16 (sequence is synthesized)
catctggataggggccattgctgagccgctggtggaaaggggtcgggtggggcctctcctggcctgcctcttgggcaagcagttccagcagatccgtgatggagacaggttctggtggga

SEQ ID NO: 542012 - DNA, 120 bp, Artificial Sequence
  ENSG00000167419_17 (sequence is synthesized)
aaaccctggggtcttcacgaacgagcagaaggactctctacagaaaatgtccttctcacgccttgtctgtgacaacacccgcatcaccaaggtcccacgggacccattctgggccaacag

SEQ ID NO: 542013 - DNA, 120 bp, Artificial Sequence
  ENSG00000167419_18 (sequence is synthesized)
ctacccctatgacttcgtggattgctcagccatcgacaagctggacctgtcaccctgggcctcagtgaagaattaggggcccgcgctgcacaggaaagttccctttggtccacagggcca

SEQ ID NO: 542014 - DNA, 120 bp, Artificial Sequence
  ENSG00000167419_19 (sequence is synthesized)
tttcaagcaagttcaatgacctggtcccttagagctccatatcccagtcccagcccttctttgcagctgggcctctctatacccctggatgaacagcttgctcaggccccagggtggctg

SEQ ID NO: 542015 - DNA, 120 bp, Artificial Sequence
  ENSG00000167419_20 (sequence is synthesized)
cctcggccctcccagctcttacactcagctccagtggcttctcctttctgtcaagacttagccccgctgagatgcccttctgctccagcttgctggatgttacctgtcctcttccctcca

SEQ ID NO: 542016 - DNA, 120 bp, Artificial Sequence
  ENSG00000167419_21 (sequence is synthesized)
caagtcttggcccttaacctttatctttcttcctgtcctctcacctagattgtaagctccctgggccaggacttcagcctgcctccgagggtcccctgtggcacctagcatggtgcacag

SEQ ID NO: 542017 - DNA, 120 bp, Artificial Sequence
  ENSG00000167419_22 (sequence is synthesized)
cacattagaagtgctcaaaaacatctgatgactgactaaagatgctaggcgtgacaccgttccctccaaaagcagacctcggaatcactgccaaataagtaactagacgtttacaggcca

SEQ ID NO: 542018 - DNA, 120 bp, Artificial Sequence
  ENSG00000167419_23 (sequence is synthesized)
actacatttggccacaattctgattagtatcataattagtattagatggcacatcaccaccgtaacacccactggcagttggctgaggcctaaaagtggccaagtctatgaggtccttcc

SEQ ID NO: 542019 - DNA, 120 bp, Artificial Sequence
  ENSG00000167419_24 (sequence is synthesized)
cgagctcggcagcaggctgataatgaagaaagttgcttgatgtgattctttgcaggtggactctgtcaagaaaagcccaaaatattcgttaccagacacgcaaccaggagatgaacacaa

SEQ ID NO: 542020 - DNA, 66 bp, Artificial Sequence
  ENSG00000167419_25 (sequence is synthesized)
aatattcgttaccagacacgcaaccaggagatgaacacaaagcaaggatgggggaaacaaaacaga

SEQ ID NO: 542021 - DNA, 120 bp, Artificial Sequence
  ENSG00000167419_26 (sequence is synthesized)
cagggcatgcagtttttgccttccggaactagatcaggatcatgcatttaagctagaaaatggaaagaggagttgcttcacccacagtcagtgctattgcatcaaccaatccctgccatt

SEQ ID NO: 542022 - DNA, 120 bp, Artificial Sequence
  ENSG00000167419_27 (sequence is synthesized)
aactccctggctgccgtgaaaagacaaggcactgggcagtgatgagggtccttctccatctcccagccctcctggcttccctcatcttgcttcaggctgcagcatctaccacaagaggtg

SEQ ID NO: 542023 - DNA, 120 bp, Artificial Sequence
  ENSG00000167419_28 (sequence is synthesized)
agtgtctccctttacgggttttctggggctgctgtcacaaagcacaccaactggatggcctaagacaacagaaatgtattctctcacagtacgggaggatagaagtccaaaatcaaggtg

SEQ ID NO: 542024 - DNA, 120 bp, Artificial Sequence
  ENSG00000167419_29 (sequence is synthesized)
ttggcagggctgtgctccctctgaaggctctagggaagaatgcttcctttcttcttccagcttctggtggccctggtatccttggtgttccctggcttgtagctgcaacactccaatctc

SEQ ID NO: 542025 - DNA, 120 bp, Artificial Sequence
  ENSG00000167419_30 (sequence is synthesized)
tgcctcagtctttgcgtggcctttttcactgggtgtcctctcctcttctcataaaaccaccatttattggatttagggccgatgctaaggcagtatgacctcattttaattcataacatc

SEQ ID NO: 542026 - DNA, 120 bp, Artificial Sequence
  ENSG00000167419_31 (sequence is synthesized)
tacaaagaccctacttccaaataaggtcacattctgaggttccatgcagatgtgaattttgggagggccattatttaacccactacactctccttgttgagaaaacagatcctgtcctcc

SEQ ID NO: 542027 - DNA, 120 bp, Artificial Sequence
  ENSG00000167419_32 (sequence is synthesized)
atgctccagaccccaatacaagagggaacagggaatcccaccattactctcatgccatccccttctgtacgtcagggtcctggtgatcagtgggtcctctttgatgaacttgagatagtc

SEQ ID NO: 542028 - DNA, 120 bp, Artificial Sequence
  ENSG00000167419_33 (sequence is synthesized)
cacaagaccatctcaccaggaaccagagaaatccccacagtccagtagcccaagccaccctgagtggccacactccctcttcatcccatctctgggcattctagtgagatctcaaagagc

SEQ ID NO: 542029 - DNA, 120 bp, Artificial Sequence
  ENSG00000167419_34 (sequence is synthesized)
aattttgacatcttgttgaagatccaagagtattcttcccattctgtgctttttccccttaaggactcttatgaaactttcctaatcttgatctcctgcctacccagatttgaggggtgg

SEQ ID NO: 542030 - DNA, 120 bp, Artificial Sequence
  ENSG00000167419_35 (sequence is synthesized)
tgggggccgaccattccagccactccgccccgccctgccaaggcctttgtcccttgggcactctaggcagatctgccactgccttgcccacctgggctggcgttcccaccttccccacct

SEQ ID NO: 542031 - DNA, 120 bp, Artificial Sequence
  ENSG00000167419_36 (sequence is synthesized)
tctcaagatcgcgcgtctccagccctctccctccagcccactgtgtgtctctggaagcggcacctttccccggggcgggggagccccgcgccttcagggggtgggcgcagttcagagacc

SEQ ID NO: 542032 - DNA, 120 bp, Artificial Sequence
  ENSG00000167419_37 (sequence is synthesized)
ctgactagccccttgcccaccctgatgtagcagacattcccagctcatcagctaggatctctggatagatctgggatactgatttggtagtttcccatgcctcacgtgtccattcgttca

SEQ ID NO: 542033 - DNA, 120 bp, Artificial Sequence
  ENSG00000167419_38 (sequence is synthesized)
ctcatccgtttattcagtaaatagacattgaccaccccataccaggcagtgcactaagcgctgaggattccaaagtgaacaggacaccgctcctgctctcaagaacaaagggccagtgtg

SEQ ID NO: 542034 - DNA, 120 bp, Artificial Sequence
  ENSG00000167419_39 (sequence is synthesized)
ggaattggacaagtaaactactgatagcagaatgggaacactggagaaggttgtctacattcccgacccagcagcattggtaaaacctgcttattagaaatgtaaaatctcagttgggcg

SEQ ID NO: 542035 - DNA, 90 bp, Artificial Sequence
  ENSG00000167419_40 (sequence is synthesized)
tctcaagtctcacccaagatgttaggaaatagattctacatttttaccaagatcaacagagattcattttatacatgataaagtttatac

SEQ ID NO: 542036 - DNA, 120 bp, Artificial Sequence
  ENSG00000167419_41 (sequence is synthesized)
gatcaacagagattcattttatacatgataaagtttatactgctgtacatcatcgtggaggatgacttcaactccactcagaaggacttgaaacctggatgaatccgagtgagcagcagg

SEQ ID NO: 542037 - DNA, 120 bp, Artificial Sequence
  ENSG00000167419_42 (sequence is synthesized)
gatttgtagggatttccatccggaagggagaggagcttgcagcaatgcatcttttcttattattcatgggtattacagttggagagtcatttcttcactcaaagaataaatcgaggctat

SEQ ID NO: 542038 - DNA, 120 bp, Artificial Sequence
  ENSG00000167419_43 (sequence is synthesized)
gtgctgtggtataaagagcataaactgtggaatgaagccaatgatctgaatcctacatctttcccttccagtgtataagttcttaggcaacttacttaacttttctgagccccagttttc

SEQ ID NO: 542039 - DNA, 120 bp, Artificial Sequence
  ENSG00000167419_44 (sequence is synthesized)
tcatctataaaatggaactgaattgtccaccttacagggtttttttgaggactgagatgagttaaagtatgcataattcctggcacatggtaagtccaaaataaatacatggcagctgtt

SEQ ID NO: 542040 - DNA, 120 bp, Artificial Sequence
  ENSG00000167419_45 (sequence is synthesized)
cgtgaaaagacaaggcactgggcagggtgtctggtgctcctttggctttctctgctttctgtggttcaaaccctcccacttggtctctagagaggctcacagtgtgatcctgcatctcgt

SEQ ID NO: 542041 - DNA, 120 bp, Artificial Sequence
  ENSG00000167419_46 (sequence is synthesized)
ttccatcctcctagccctccaagtacatgacaagtaggagcaatagcccacaattcctaaagtcctcagcctgtacatcacctgaaagaggacatctaatctaaccctagaaggactttc

SEQ ID NO: 542042 - DNA, 120 bp, Artificial Sequence
  ENSG00000167419_47 (sequence is synthesized)
ttccacgtggcccaatgtttccttgggccatgcattccagagtcccagaaagcctctcagtaaaagttcttcattcatccagctgatattgactgattcagccaggtccaccagaagccg

SEQ ID NO: 542043 - DNA, 120 bp, Artificial Sequence
  ENSG00000167434_0 (sequence is synthesized)
acccgcggcggcctcctcggtgcgcgacccccggctcagaggactctttgctgtcccgcaagatgcggatgctgctggcgctcctggccctctccgcggcgcggccatcggccagtgcag

SEQ ID NO: 542044 - DNA, 120 bp, Artificial Sequence
  ENSG00000167434_1 (sequence is synthesized)
agtcacactggtgctacgaggttcaagccgagtcctccaactacccctgcttggtgccagtcaagtggggtggaaactgccagaaggaccgccagtcccccatcaacatcgtcaccacca

SEQ ID NO: 542045 - DNA, 120 bp, Artificial Sequence
  ENSG00000167434_2 (sequence is synthesized)
aggcaaaggtggacaaaaaactgggacgcttcttcttctctggctacgataagaagcaaacgtggactgtccaaaataacgggcactcagtgatgatgttgctggagaacaaggccagca

SEQ ID NO: 542046 - DNA, 120 bp, Artificial Sequence
  ENSG00000167434_3 (sequence is synthesized)
tttctggaggaggactgcctgccccataccaggccaaacagttgcacctgcactggtccgacttgccatataagggctcggagcacagcctcgatggggagcactttgccatggagatgc

SEQ ID NO: 542047 - DNA, 120 bp, Artificial Sequence
  ENSG00000167434_4 (sequence is synthesized)
agaggcccaggaccctgaagacgaaattgcggtgctggcctttctggtggaggctggaacccaggtgaacgagggcttccagccactggtggaggcactgtctaatatccccaaacctga

SEQ ID NO: 542048 - DNA, 120 bp, Artificial Sequence
  ENSG00000167434_5 (sequence is synthesized)
gatgagcactacgatggcagagagcagcctgttggacctgctccccaaggaggagaaactgaggcactacttccgctacctgggctcactcaccacaccgacctgcgatgagaaggtcgt

SEQ ID NO: 542049 - DNA, 120 bp, Artificial Sequence
  ENSG00000167434_6 (sequence is synthesized)
ctggactgtgttccgggagcccattcagcttcacagagaacagatcctggcattctctcagaagctgtactacgacaaggaacagacagtgagcatgaaggacaatgtcaggcccctgca

SEQ ID NO: 542050 - DNA, 120 bp, Artificial Sequence
  ENSG00000167434_7 (sequence is synthesized)
gcagctggggcagcgcacggtgataaagtccggggccccgggtcggccgctgccctgggccctgcctgccctgctgggccccatgctggcctgcctgctggccggcttcctgcgatgatg

SEQ ID NO: 542051 - DNA, 120 bp, Artificial Sequence
  ENSG00000167434_8 (sequence is synthesized)
gctcacttctgcacgcagcctctctgttgcctcagctctccaagttccaggcttccggtccttagccttcccaggtgggactttaggcatgattaaaatatggacatatttttggagaaa

SEQ ID NO: 542052 - DNA, 120 bp, Artificial Sequence
  ENSG00000167434_9 (sequence is synthesized)
gtgaaagaggcccaggaccctgaagacgaaattgcggtgctggcctttctggtggagatcgggagaatgaactggccaccaccactggctccctgcagactttctcaagacccttccctc

SEQ ID NO: 542053 - DNA, 120 bp, Artificial Sequence
  ENSG00000167434_10 (sequence is synthesized)
acagagaacagctgctaaggtccctgggccatcagaagcgaatagaacaaacctaagacatcactctccatcaagaggcctgcatgactctttatttacatcatcttccaggaagaggag

SEQ ID NO: 542054 - DNA, 120 bp, Artificial Sequence
  ENSG00000167434_11 (sequence is synthesized)
gaggagctgctttggggacacccacttcctctccttacgtaacaacacactgcatttgcacaagtgtccttggttgtaaagggttccacactcactttcttattcagggcttattacaag

SEQ ID NO: 542055 - DNA, 120 bp, Artificial Sequence
  ENSG00000167434_12 (sequence is synthesized)
cctctcaggtagctatggtcatggtaccctgatcccttgtcaaagatgagcccactgaggctcagggtgactaccgttgtgccaggagttgctaagtggtggatcacagactccagttca

SEQ ID NO: 542056 - DNA, 120 bp, Artificial Sequence
  ENSG00000167434_13 (sequence is synthesized)
agcctgagctgttccatcaccagattgggggctagacaggaggcaggggaaggtggagtcattcagaaaatggtgctggggtttctatcatgaacgaggctctggggagacagcagtgag

SEQ ID NO: 542057 - DNA, 120 bp, Artificial Sequence
  ENSG00000167434_14 (sequence is synthesized)
cccaaaggacccaaatccctacccttgcactgctttcattccaaaacagtggttctcaaagtgcggcccctggaccagtggagtcaacatcatcactgggggaatttgttagaaatgcta

SEQ ID NO: 542058 - DNA, 120 bp, Artificial Sequence
  ENSG00000167434_15 (sequence is synthesized)
atcctcagagctactgaatcaggaactctgggggtggagcccaggcatctggggcccaacaagcccgccccccagctgatgctaacgcatgctcaagtttgagagccacagtcctgtagt

SEQ ID NO: 542059 - DNA, 120 bp, Artificial Sequence
  ENSG00000167434_16 (sequence is synthesized)
caggtgggctggatggaggccccaggcaggcctgggcacccgagttccccaaggactgagaggatggggctcctcccaggagggtgtgccagacccaggcccatctgtgctgtgaggtgg

SEQ ID NO: 542060 - DNA, 120 bp, Artificial Sequence
  ENSG00000167434_17 (sequence is synthesized)
ctgaaaatcccatgggggaggacagcttccaggaggagagagcactctagtatgttttcgttacttttgtcagaccagtctgggatgtgggggcaggaaacgttccaggaagaaggacat

SEQ ID NO: 542061 - DNA, 120 bp, Artificial Sequence
  ENSG00000167447_0 (sequence is synthesized)
tttactaacggaccggaaggactctagagaacgctctgcactatggctggtcccgtgagcttgcgagaccttctaatgggagcatcagcctggatgggctctgaaagtcccggagggtcc

SEQ ID NO: 542062 - DNA, 120 bp, Artificial Sequence
  ENSG00000167447_1 (sequence is synthesized)
cctactgagggcggagggagcgcggctggcggaccggagcctccatggcgggaggatgagatctgcgttgtgggaatcttcggcaagacggctctacgcctgaattccgagaagttctct

SEQ ID NO: 542063 - DNA, 120 bp, Artificial Sequence
  ENSG00000167447_2 (sequence is synthesized)
cttgtgaatacggtgtgcgaccgacaggtctttcctctctttcgccaccaagatcctggggatccaggacctggaatcagaactgaggctggcgccgtgggtgaggccggtggagccgag

SEQ ID NO: 542064 - DNA, 120 bp, Artificial Sequence
  ENSG00000167447_3 (sequence is synthesized)
gaccctggggctgcagccgggggttcagttcggggaagtggagctgtcgcggaaggtaaccgaactgaggcaggctcccaggactacagccttctgcaggcctactacagtcaggaaagc

SEQ ID NO: 542065 - DNA, 120 bp, Artificial Sequence
  ENSG00000167447_4 (sequence is synthesized)
aaagttctgtatcttctcctcacctccatctgtgacaattcacagcttctccgggcttgtcgggctcttcagagcggggaagctggaggtggactctctttacctcatgcagaagcacac

SEQ ID NO: 542066 - DNA, 120 bp, Artificial Sequence
  ENSG00000167447_5 (sequence is synthesized)
gagttctggaagcatcaagagaagctgcagtgcctcagtctcctttacctattctctgtctgtcatatcttgcttctggtccatcccacttgttcctttgatatcacttatgatcgagta

SEQ ID NO: 542067 - DNA, 120 bp, Artificial Sequence
  ENSG00000167447_6 (sequence is synthesized)
ttcagagccctggatgggctgagacagaaggtcctgccgctccttaaaacagccattaaggattgtccagttggcaaagactggaagctaaactgccgaccttgcccacctagactcctt

SEQ ID NO: 542068 - DNA, 120 bp, Artificial Sequence
  ENSG00000167447_7 (sequence is synthesized)
ttcctctttcaactcaatggagccctcaaggtagaacctcctcggaaccaagacccagctcatccagacaagcccaagaaacattctcccaaaaggaggctgcagcatgccctggaggac

SEQ ID NO: 542069 - DNA, 120 bp, Artificial Sequence
  ENSG00000167447_8 (sequence is synthesized)
cagatctatagaatcttccggaagagtcgtgtcttgactaatcagagcatcaactgcctctttactgtgcctgccaaccaagctttcgtgtacatagtaccgggaagccaggaggaggac

SEQ ID NO: 542070 - DNA, 120 bp, Artificial Sequence
  ENSG00000167447_9 (sequence is synthesized)
ccagtaggtatgttgctggaccaacttaggagtcattgtactgtgaaggacccggaatctttgctggtgcctgcacccctttctgggcctaggcgataccaggtgatgaggcagcacagc

SEQ ID NO: 542071 - DNA, 120 bp, Artificial Sequence
  ENSG00000167447_10 (sequence is synthesized)
cgacaacaactttcctttcacattgacagcagcagttccagttcttcaggccagctagtggatttcactcttcgggaattcctatggcagcatgtggagctagttctaagcaagaaaggt

SEQ ID NO: 542072 - DNA, 120 bp, Artificial Sequence
  ENSG00000167447_11 (sequence is synthesized)
ttcgatgacagtgtgggcaggaacccacagccttcccattttgaacttcctacttatcagaagtggatctcagcagcttcaaaactgtatgaggtggctattgatgggaaagaagaggac

SEQ ID NO: 542073 - DNA, 120 bp, Artificial Sequence
  ENSG00000167447_12 (sequence is synthesized)
ttggggtcacccactggagagctaacatctaagattttaagcagtattaaagtcttggaaggatttttggatattgacacaaaattctcagaaaaccgatgccaaaaagctttacccatg

SEQ ID NO: 542074 - DNA, 120 bp, Artificial Sequence
  ENSG00000167447_13 (sequence is synthesized)
tttgcctcataattacacaatgactgtccataagaatcagcttgcccaggctcttcgagtgtacagtcaacatgctagaggtccagcatttcacaaatacgccatgcagttacatgagga

SEQ ID NO: 542075 - DNA, 120 bp, Artificial Sequence
  ENSG00000167447_14 (sequence is synthesized)
ctgctacaaattttggagcaatggccatcagctctgtgaggagaggagtttaactgatcaacactgtgtgcacaaatttcactcattacctaaatcaggagaaaaaccagaggctgatag

SEQ ID NO: 542076 - DNA, 120 bp, Artificial Sequence
  ENSG00000167447_15 (sequence is synthesized)
aaatccgcctgtgctatatcacaatagccgagctcgatctactggtgcttgcaactgtggaaggaaacaagcacctcgagatgatccctttgatatcaaagcagccaattatgacttcta

SEQ ID NO: 542077 - DNA, 120 bp, Artificial Sequence
  ENSG00000167447_16 (sequence is synthesized)
tcagcttctggaagaaaagtgttgtggaaaattggatcatatcaatttcccagtatttgaaccaagtactccagatcctgctcctgctaaaaatgaatcctctcctgctcctccagattc

SEQ ID NO: 542078 - DNA, 120 bp, Artificial Sequence
  ENSG00000167447_17 (sequence is synthesized)
ggatgctgataaacttaaagaaaaagaacctcaaacccaaggagagagcacgagcctgagtttagctttgagtttgggccaatccacagatagcttaggtacctatccagctgatccaca

SEQ ID NO: 542079 - DNA, 120 bp, Artificial Sequence
  ENSG00000167447_18 (sequence is synthesized)
agcaggaggagataatccagaagttcatggtcaagtagaagtgaaaactgagaagaggccaaacttcgttgatcgacaggcatccacagttgagtatctcccaggcatgctacattcaaa

SEQ ID NO: 542080 - DNA, 120 bp, Artificial Sequence
  ENSG00000167447_19 (sequence is synthesized)
ttgccctaaaggtctcctacccaaattctccagctggtctttggttaaactaggccctgctaagtcttataactttcatacaggtttggaccaacagggctttattccaggaacaaatta

SEQ ID NO: 542081 - DNA, 120 bp, Artificial Sequence
  ENSG00000167447_20 (sequence is synthesized)
tcttatgccttgggacattgtcatcaggactagagctgaagatgaaggagacttagacacaaactcttggcctgctccaaataaagctattcctggaaagagaagtgcggttgtaatggg

SEQ ID NO: 542082 - DNA, 120 bp, Artificial Sequence
  ENSG00000167447_21 (sequence is synthesized)
aagaggaagacggcgagatgacatagctcgagcttttgtgggctttgaatatgaagactctcgaggtcggagattcatgtgctctgggcctgacaaagtaatgaaagtaatgggaagtgg

SEQ ID NO: 542083 - DNA, 120 bp, Artificial Sequence
  ENSG00000167447_22 (sequence is synthesized)
gccaaaggaatcagctttaaaagccctaaatagtgacatgcccttatatattctgtcatcctctcaaggtagagggctgaaacctcattatgctcaacttatgaggctttttgttgtggt

SEQ ID NO: 542084 - DNA, 120 bp, Artificial Sequence
  ENSG00000167447_23 (sequence is synthesized)
tcctgatgctcctttgcagataatactaatgcctcaggttcagccaggcccaccaccatgtccggtattctacccagaaaaacaagaaatcacccttccacctgatggcctttgggtttt

SEQ ID NO: 542085 - DNA, 120 bp, Artificial Sequence
  ENSG00000167447_24 (sequence is synthesized)
gagatttccttatgcatatgtgactgagagaggaccttgtttcccccctaaggaaaatgtgcagttaatgagctacaaggtgctccgtggggttcttaaggcagtaacacaataagtgtt

SEQ ID NO: 542086 - DNA, 120 bp, Artificial Sequence
  ENSG00000167447_25 (sequence is synthesized)
ttccagccagttcaatcctatacttgagctggtttttgtttttggtatttgtggctgtgtttttggtatgtgtttactgtgttttcccaaatccaaaatgtgttttggttacaggagttc

SEQ ID NO: 542087 - DNA, 120 bp, Artificial Sequence
  ENSG00000167447_26 (sequence is synthesized)
agtatttggaaactaatttgttctactttttcattatattgttgatatttattgtaaacgtgactacaactttctaataaagattggttgttctagaaaagaatataaaatacatggatg

SEQ ID NO: 542088 - DNA, 71 bp, Artificial Sequence
  ENSG00000167447_27 (sequence is synthesized)
gctcactgcaacctccacctcctttgaggaaacaaactaggagaggagaagaggaggcggaactcaagtga

SEQ ID NO: 542089 - DNA, 120 bp, Artificial Sequence
  ENSG00000167447_28 (sequence is synthesized)
aaaactttgagctgtgttttcattcttgttttaagatagtctgttcactatgtattgatattttagaaagagccctacagaaatttaggtgcatcagctatacgttttctctcctgctgt

SEQ ID NO: 542090 - DNA, 120 bp, Artificial Sequence
  ENSG00000167447_29 (sequence is synthesized)
tgttttttgtttttgatatctcaattcctacagttgaggaaacaaactaggagaggagaagaggaggcggaactcaagtgacgggaaagcaggaactgaagaagcggaggaaggatttca

SEQ ID NO: 542091 - DNA, 120 bp, Artificial Sequence
  ENSG00000167460_0 (sequence is synthesized)
tttcacaattctctgcatttggtgtttcagaggacactgcaatacgaaacacctgtgggagtgccctctttctgcttctaggaatctgaggctgagaaaccttcctgactctatttgtgt

SEQ ID NO: 542092 - DNA, 120 bp, Artificial Sequence
  ENSG00000167460_1 (sequence is synthesized)
atttgtgtagtttttcggccacgttagcctcattctatttttttttcccccagtatgaactcagggcaggagagggagtggtttcctaataattttttttttttgagacggaatcttgct

SEQ ID NO: 542093 - DNA, 68 bp, Artificial Sequence
  ENSG00000167460_2 (sequence is synthesized)
cgcctcccaaagtgttaggattacggatgtgagccaccgcgcccggccttcctaataattttgatagc

SEQ ID NO: 542094 - DNA, 120 bp, Artificial Sequence
  ENSG00000167460_3 (sequence is synthesized)
gtgagccaccgcgcccggccttcctaataattttgatagccttccccagttcagggattcttcatttgttctgataggaaaaagctagcgtggcttcccttttcctctcggttgaggccc

SEQ ID NO: 542095 - DNA, 120 bp, Artificial Sequence
  ENSG00000167460_4 (sequence is synthesized)
gtttgacccgttctcaatattccttccaaagagcaggcatcgctggaaaactcgccttgcctcgtagccctggcaggacctaggggacaggttctgacaaggaagagccctgggtgggtc

SEQ ID NO: 542096 - DNA, 120 bp, Artificial Sequence
  ENSG00000167460_5 (sequence is synthesized)
ttaagaggccattcatttcttaccaattctgagtcactgaataaaaccacttcccccagtggggcccctcggtttcttcacctgtaaaatgggtgcgatgtgtgaggatgaaattgcagt

SEQ ID NO: 542097 - DNA, 120 bp, Artificial Sequence
  ENSG00000167460_6 (sequence is synthesized)
aaaataaaaccgtggcagtaagagatgcctttctctggcacatcccacctgctgggcataagcggcgccaccctctggagttacagcctcaaggcagtccggctgaaggtgatgtggccg

SEQ ID NO: 542098 - DNA, 120 bp, Artificial Sequence
  ENSG00000167460_7 (sequence is synthesized)
ccctcaaccgacgcatccagctcgttgaggaggagttggacagggctcaggaacgactggccacggccctgcagaagctggaggaggcagaaaaagctgcagatgagagtgagagaggaa

SEQ ID NO: 542099 - DNA, 120 bp, Artificial Sequence
  ENSG00000167460_8 (sequence is synthesized)
cattgcggaagaggctgaccgcaaatacgaggaggtagctcgtaagctggtcatcctggagggtgagctggagagggcagaggagcgtgcggaggtgtctgaactaaaatgtggtgacct

SEQ ID NO: 542100 - DNA, 120 bp, Artificial Sequence
  ENSG00000167460_9 (sequence is synthesized)
ggaagaagaactcaagaatgttactaacaatctgaaatctctggaggctgcatctgaaaagtattctgaaaaggaggacaaatatgaagaagaaattaaacttctgtctgacaaactgaa

SEQ ID NO: 542101 - DNA, 120 bp, Artificial Sequence
  ENSG00000167460_10 (sequence is synthesized)
agaggctgagacccgtgctgaatttgcagagagaacggttgcaaaactggaaaagacaattgatgacctggaagagaaacttgcccaggccaaagaagagaacgtgggcttacatcagac

SEQ ID NO: 542102 - DNA, 120 bp, Artificial Sequence
  ENSG00000167460_11 (sequence is synthesized)
actggatcagacactaaacgaacttaactgtatataagcaaaacagaagagtcttgttccaacagaaactctggagctccgtgggtctttctcttctcttgtaagaagttccttttgtta

SEQ ID NO: 542103 - DNA, 120 bp, Artificial Sequence
  ENSG00000167460_12 (sequence is synthesized)
ttgccatcttcgctttgctggaaatgtcaagcaaattatgaatacatgaccaaatattttgtatcggagaagctttgagcaccagttaaatctcattccttccctttttttttcaaatgg

SEQ ID NO: 542104 - DNA, 120 bp, Artificial Sequence
  ENSG00000167460_13 (sequence is synthesized)
caccagctttttcagctctcttattttttccttaagtagcatttattcctaaggtaggcagggtatttcctagtaagcatactttcttaagacggaggccatttggttcctgggagaata

SEQ ID NO: 542105 - DNA, 120 bp, Artificial Sequence
  ENSG00000167460_14 (sequence is synthesized)
ggcagccccacactttgaagaatacagaccccagtatctagtcgtggatataattaaaacgctgaagaccataaccttttgggtcaactgttggtcaaactataggagagaccagggacc

SEQ ID NO: 542106 - DNA, 120 bp, Artificial Sequence
  ENSG00000167460_15 (sequence is synthesized)
atcacatgggtagggattttccatccagagccaataaaaggactggtgggggccgggggtggctattgtgggaagtcataacccacagatagatcaacctaagaatcctggcccttctcc

SEQ ID NO: 542107 - DNA, 120 bp, Artificial Sequence
  ENSG00000167460_16 (sequence is synthesized)
actctccaccatgcaggacaaacatcttctcaagcagtcaacgtagaatgcttgggaaatagtcataattacccacatatagtaattaatagatggtaattaattgatccttgatgtgat

SEQ ID NO: 542108 - DNA, 120 bp, Artificial Sequence
  ENSG00000167460_17 (sequence is synthesized)
attaatagatggtaattaattgatccttgatgtgatgttcttttgcatatttccttcattctaaagttgttccctggccgggagcgttggctttcgcctgtaatcccaacactttgggag

SEQ ID NO: 542109 - DNA, 120 bp, Artificial Sequence
  ENSG00000167460_18 (sequence is synthesized)
actctgccccacagccacagcccctgactgccgcagcccccacagagcccgccgcgcaccccacgtcccccacgccagcgcccagccatggaggccatcaagaagaaaatgcagatgctg

SEQ ID NO: 542110 - DNA, 120 bp, Artificial Sequence
  ENSG00000167460_19 (sequence is synthesized)
aagttggacaaggagaatgccatcgaccgcgcggagcaggcggaggcggataagaaagccgctgaggacaagtgcaagcaggtggaggaggagctgacgcacctccagaagaaactaaaa

SEQ ID NO: 542111 - DNA, 120 bp, Artificial Sequence
  ENSG00000167460_20 (sequence is synthesized)
gtcgacagagtgagactccatctcaagaaaaaataaaaataaagttgttctctgaagagcaaatgtctcattccagtaatgacccactcagcaggaatatggtggagttcagtccaattc

SEQ ID NO: 542112 - DNA, 120 bp, Artificial Sequence
  ENSG00000167460_21 (sequence is synthesized)
cagcaggaatatggtggagttcagtccaattcaggtcagccatatccaaaagaccacaagtcattactaagttgagcaaaagagtttttatctattagcagaaagggcctctctggcagc

SEQ ID NO: 542113 - DNA, 120 bp, Artificial Sequence
  ENSG00000167460_22 (sequence is synthesized)
agagattaaaaactggcccaacttcatttccatacttcagggaacagcaaattgaggatttacttatctaggacttgaattccttctttgggaccaagttaataaaagaccaagaaactc

SEQ ID NO: 542114 - DNA, 120 bp, Artificial Sequence
  ENSG00000167460_23 (sequence is synthesized)
ctgattaaactggataatgaaggattctgtagacagggctgcacgtatcggctttgtttgacttctcttttctcagttaacatctcagagctagaacattccacattccccagcagcgtg

SEQ ID NO: 542115 - DNA, 120 bp, Artificial Sequence
  ENSG00000167460_24 (sequence is synthesized)
tgggggctgactaaagtttacaattccaactaaaaatcaccctgcttctggcttatctgaatcccttacccaccccaccccaccaccctactcctatttattcagcaccacactacccag

SEQ ID NO: 542116 - DNA, 120 bp, Artificial Sequence
  ENSG00000167460_25 (sequence is synthesized)
gaaatacactagcaaattgtgcaatggaataaaatccacactttagattcttgcaactgtatcatatgtaatagtatcactttttctacattttggtcaaataaatttttacataaacta

SEQ ID NO: 542117 - DNA, 120 bp, Artificial Sequence
  ENSG00000167460_26 (sequence is synthesized)
gagagagatctggtttcacaaatccactccgggcttccttcccggagtgtcccctgcaaactcccattgctctctgcccgccttctgccctcagtcccattcttacaccttccggagtcg

SEQ ID NO: 542118 - DNA, 120 bp, Artificial Sequence
  ENSG00000167460_27 (sequence is synthesized)
gcctcatcaatcatagatttcacaagtccttgcagccttacccttggcaaaagaccaggagtgttttccaagccctccaaatactcttcgggcgcacctcgcctctgcctgaaaatgtgg

SEQ ID NO: 542119 - DNA, 120 bp, Artificial Sequence
  ENSG00000167460_28 (sequence is synthesized)
tgccattgcactccagccttggtgacggcgcaagactccatctcaaaaaaaaaattaaaaagaaaatgacaaagcggggattccagcccagcactttttggccctggagttcctggttta

SEQ ID NO: 542120 - DNA, 120 bp, Artificial Sequence
  ENSG00000167460_29 (sequence is synthesized)
atgcttcccattgtacttcctttcttgtaggtaaaaacaccttgaaaagccaataacactattggggtatgtcttccatgcctgcaaccaagttttctttccctttccatatctttttgt

SEQ ID NO: 542121 - DNA, 120 bp, Artificial Sequence
  ENSG00000167460_30 (sequence is synthesized)
cctgccatctctcagccaggcggattgaaggatggaattccaacgaggctcccccgcctcgtcccaccttggtaattgcatggccaacatttaactgagggctccatagtcttgcattta

SEQ ID NO: 542122 - DNA, 120 bp, Artificial Sequence
  ENSG00000167460_31 (sequence is synthesized)
tcttgccattcaggtgaatgggagcggaactcacaggacacaatgagccgggtcactgatggccttgctttctaagaatctcacagtgagccctagaactctctacgtggtaacactgtg

SEQ ID NO: 542123 - DNA, 120 bp, Artificial Sequence
  ENSG00000167460_32 (sequence is synthesized)
tgcctttttcagagaagagcctatcttagatcttagcctaacgttgggtctattgtgttgctggagagaccagcactgacattcatctcaaagcacatggctggagtgcagtggcacgat

SEQ ID NO: 542124 - DNA, 120 bp, Artificial Sequence
  ENSG00000167460_33 (sequence is synthesized)
cctggatgacagagcgagactccatctgaaagaaaagatagatgagaggtgggtggaggggtgtgagtgaacggccgtcctgatgagattgctccttgcagaggaatgaaggtgatagaa

SEQ ID NO: 542125 - DNA, 120 bp, Artificial Sequence
  ENSG00000167460_34 (sequence is synthesized)
ggccggggcgcggctgtgcagctctcgccggagccgagcccagccgagcgtccgccgctgcccgtgcgcctctgcgcctccgcgccatggccggcctcaactccctggaggcggtgaaac

SEQ ID NO: 542126 - DNA, 120 bp, Artificial Sequence
  ENSG00000167460_35 (sequence is synthesized)
tcaactccctggaggcggtgaaacgcaagatccaggccctgcagcagcaggcggacgaggcggaagaccgcgcgcagggcctgcagcgggagctggacggcgagcgcgagcggcgcgaga

SEQ ID NO: 542127 - DNA, 120 bp, Artificial Sequence
  ENSG00000167460_36 (sequence is synthesized)
acatgacctctctctgagaggcagccaggtcgctgccctctgtccttctcacatggtgcctcctacgcccctgtgggcttctaggagctccggtggcctgccttctggtttgaacgtcag

SEQ ID NO: 542128 - DNA, 120 bp, Artificial Sequence
  ENSG00000167460_37 (sequence is synthesized)
agccttcttctgatgtgtctgtgactctacaaccgaaataaagacgggcagtcctcctcttcatgccccctcattctcattttctccacttgctgcctttgagctgtagctgtgtgccct

SEQ ID NO: 542129 - DNA, 120 bp, Artificial Sequence
  ENSG00000167460_38 (sequence is synthesized)
acccaggctggagtgcagtgacaccatcatagttcactgcaacctccacctacaaggctcaagctatcctcccacctcgacctcccaagtagctggaactacagagaaacttgcccaggc

SEQ ID NO: 542130 - DNA, 120 bp, Artificial Sequence
  ENSG00000167460_39 (sequence is synthesized)
gattacaggcatgagccaccacgcttggcgatgctcatcttttgctatggagtggtagatgtttttcccagacattttccgggaagatcatactgaaattttggtatgagtgtaaattcc

SEQ ID NO: 542131 - DNA, 120 bp, Artificial Sequence
  ENSG00000167460_40 (sequence is synthesized)
ctatggcctggactcctgggtgggctttgacggggaagatcaggttaacagagggcaggacatgggggaggctcccactggtggctggcctgatacttcttaacatggctgcacctccga

SEQ ID NO: 542132 - DNA, 120 bp, Artificial Sequence
  ENSG00000167460_41 (sequence is synthesized)
agagaaaagtgtgtgtgtgggcggtgggggaggggggaaacggggaattgctcattttacttaacaagtactttcccatttttaggggaccaggtactcagtgggccacagacaagacca

SEQ ID NO: 542133 - DNA, 120 bp, Artificial Sequence
  ENSG00000167460_42 (sequence is synthesized)
aggcagaaaagacaggcgcctccccacattgcagcaccgggaccccgagcccacccacagccctcttcattcctcccaacgatggatggggaaactgaggcagcccagagcagcccccac

SEQ ID NO: 542134 - DNA, 120 bp, Artificial Sequence
  ENSG00000167460_43 (sequence is synthesized)
tttcactcttgtagaataagccaggagccggcgtgtggtagacttctgggcctgtttcccgacagctggtttcgtttagatttttgtgtgattaactgacatcttcctgttcctttgcca

SEQ ID NO: 542135 - DNA, 120 bp, Artificial Sequence
  ENSG00000167460_44 (sequence is synthesized)
catgtatctagcaagcctcttttaccttataagggaaatcctttgtagcgtgtggaaggctttgattgcaggaaggggtggaacccaaaatgactcggccgtgactagcagtttttcaaa

SEQ ID NO: 542136 - DNA, 120 bp, Artificial Sequence
  ENSG00000167460_45 (sequence is synthesized)
aatacatatatatgtatgcatgtacagatatgcgtgtatctcccaactccagacagctgaaaatctgccaaaagcgttgtttgccaggattcagaatttcccacataagggctactcact

SEQ ID NO: 542137 - DNA, 120 bp, Artificial Sequence
  ENSG00000167460_46 (sequence is synthesized)
tcttaaaagacaactcatgaatcaagcacctctgtttgatctttaaaatcaattcctcgactgctaatgggtacacagttttttgtttgtttgtttgtctttggcgggttatgaaaatgt

SEQ ID NO: 542138 - DNA, 120 bp, Artificial Sequence
  ENSG00000167460_47 (sequence is synthesized)
cctggaattcgataatggtgttggttgcagagtgtttttgcaacatcagttcctggcccagttactgaaggtggtaggaggagttaagatctaggcaattaaaaagaatgaaaggcaccc

SEQ ID NO: 542139 - DNA, 90 bp, Artificial Sequence
  ENSG00000167460_48 (sequence is synthesized)
tggagagaccagcactgacattcatctcaaagcacatggtatgtttgactcctatgttgactcaactacccatcttgtactgggacactc

SEQ ID NO: 542140 - DNA, 120 bp, Artificial Sequence
  ENSG00000167460_49 (sequence is synthesized)
agagagagacggaggactcttgtgaatattgggggggaccgcccctgcacctcggggacgtgaccccccccccaggctgacccgttcctcgctctgtcgtccccaggtggaggaggagct

SEQ ID NO: 542141 - DNA, 120 bp, Artificial Sequence
  ENSG00000167460_50 (sequence is synthesized)
gttgcccaggctagagtgtagtggtccaatcagagctctctgcagccttgaattccagggttcaagccatcttccctcctcagcgtccccattagctgggactacaggtgctcaccacca

SEQ ID NO: 542142 - DNA, 120 bp, Artificial Sequence
  ENSG00000167460_51 (sequence is synthesized)
tgactggctaatttttaaattctttgtagagacggggtctcactatgtgacccaggttggtctcaaattcctgggctcaagtaattctcccaccatggtcccccaaaacactggaatcac

SEQ ID NO: 542143 - DNA, 89 bp, Artificial Sequence
  ENSG00000167460_52 (sequence is synthesized)
gtaattctcccaccatggtcccccaaaacactggaatcacaggtgagagccaccacacccagccctccgttgttgttgttgtttgtttt

SEQ ID NO: 542144 - DNA, 120 bp, Artificial Sequence
  ENSG00000167460_53 (sequence is synthesized)
ctgaccttgtgatccaccagcctcaggctcccaaagtgccaggattccaggcatgagccaccatgcctggctgggcctccttttcttaaagcagtgttttggtttctcccacagtattct

SEQ ID NO: 542145 - DNA, 120 bp, Artificial Sequence
  ENSG00000167460_54 (sequence is synthesized)
gtccggtaactaatcaggctttgggatggagagggccaggatgaggaagcaaccttcccaacaccacgtggctgtgaaaatgacaaagcacggtcgggcgcagtggctcacgcctgtaat

SEQ ID NO: 542146 - DNA, 120 bp, Artificial Sequence
  ENSG00000167460_55 (sequence is synthesized)
agaggacgagctggataaatattccgaggacctgaaggacgcgcaggagaagctggagctcacggagaagaaggcctccgacaggaatgaaggtgatagaaaaccgggccatgaaggatg

SEQ ID NO: 542147 - DNA, 120 bp, Artificial Sequence
  ENSG00000167460_56 (sequence is synthesized)
agagaatgagattgcttaactccagatcatggtgaggctgcacctctgaaactggaatgtgtgtatttctggaaaacatttggagtcttcagtttcccaaaagctgccattgatctccct

SEQ ID NO: 542148 - DNA, 120 bp, Artificial Sequence
  ENSG00000167460_57 (sequence is synthesized)
agagtactggggaccccaataagcccaaaacagctggtcctcaggacgagggaaagatgtgaaaatcccactatcaggtggaggaggagctgacgcacctccagaagaaactaaaaggga

SEQ ID NO: 542149 - DNA, 120 bp, Artificial Sequence
  ENSG00000167460_58 (sequence is synthesized)
gtatcgtgcaggctccgactccggggctggcgccggggtcccgggccgaggggaacccgcgaccggacttgtgggggagaatgaggatgaaaacgtggagcttccattgtctagggtaaa

SEQ ID NO: 542150 - DNA, 120 bp, Artificial Sequence
  ENSG00000167460_59 (sequence is synthesized)
gcgcgcagggcctgcagcgggagctggacggcgagcgcgagcggcgcgagaaaccaggcggattgaaggatggaattccaacgaggctcccccgcctcgtcccaccttggctgaaggtga

SEQ ID NO: 542151 - DNA, 120 bp, Artificial Sequence
  ENSG00000167460_60 (sequence is synthesized)
aggttggtctcaaattcctgggctcaagtaattctcccaccatggtcccccaaaacactggaatcacagtattctgaaaaggaggacaaatatgaagaagaaattaaacttctgtctgac

SEQ ID NO: 542152 - DNA, 120 bp, Artificial Sequence
  ENSG00000167460_61 (sequence is synthesized)
gaggcggataagaaagccgctgaggacaagtgcaagcaggtgaggtgccctccgctgggccgctccgggctgctgggagtcctctctgtgcggaaggccggggtctggagcccagttggg

SEQ ID NO: 542153 - DNA, 120 bp, Artificial Sequence
  ENSG00000167460_62 (sequence is synthesized)
ggtcgcagacacctgcgggaggataggaggctgatgctttggcggaggaagagcgaggggaccattgccttccttggatggggtcctgggctggaagaggggtgacgatcggacccaccc

SEQ ID NO: 542154 - DNA, 120 bp, Artificial Sequence
  ENSG00000167460_63 (sequence is synthesized)
ttctgaagacgtgaaaacaaaagcaaactgggcatgtgctctcagataccgctgttagctaacggcatctgcatgccaataatttttttttgtttttttgttttgagacagggtcttgct

SEQ ID NO: 542155 - DNA, 74 bp, Artificial Sequence
  ENSG00000167460_64 (sequence is synthesized)
ggcctcccaaagtgcagggattacaggcttgagccatcacgcctggccatttttgtactttttgtagaagcggg

SEQ ID NO: 542156 - DNA, 120 bp, Artificial Sequence
  ENSG00000167460_65 (sequence is synthesized)
ccaggctggtcttgaactgctgggctcaggcagtctgcccacctcaccctcccagggtgctgcaattacaggcatgagccaccgcgcccatccccaatggtttttccttaaatagaaatt

SEQ ID NO: 542157 - DNA, 120 bp, Artificial Sequence
  ENSG00000167460_66 (sequence is synthesized)
tagaaattgttgtgaatggaggctcatccttgtaaaccgcttaggcagcttaagagtcaacagggatttggaaaaaccagcaagcctgtgtcaaaaatgaggctccccttgaatggggct

SEQ ID NO: 542158 - DNA, 120 bp, Artificial Sequence
  ENSG00000167460_67 (sequence is synthesized)
tgagctacagattcaaacagcggcagtgacattttgatctccatttcctccttttcttgtgtcttttctctgtgttacactgtgagtgtggtgactggggcttcccgtggctttactctt

SEQ ID NO: 542159 - DNA, 120 bp, Artificial Sequence
  ENSG00000167460_68 (sequence is synthesized)
cactgttcatccagctcccagtcctgggaggaagttcacctccacgccctgcccttagaaaactgactgtacaaggagtgaacgggcctccatgaacagggaaagtgctgtgacgtcaga

SEQ ID NO: 542160 - DNA, 120 bp, Artificial Sequence
  ENSG00000167460_69 (sequence is synthesized)
tggctctgaccggggtctctgctcaagtggacgggcgtcaggggctcatggctcatcttttctcttggcttctgtgacaaagaggtggtgacttgttcttactgccatgggaagcactgc

SEQ ID NO: 542161 - DNA, 120 bp, Artificial Sequence
  ENSG00000167460_70 (sequence is synthesized)
ccacgtgttgaccctttctgcaaagatatgaggaaataggagtgagacaggaggcagcagggaagcccagaagtcccattttcccagagaggatatctcagggggctgtgccatcttaac

SEQ ID NO: 542162 - DNA, 120 bp, Artificial Sequence
  ENSG00000167460_71 (sequence is synthesized)
agaacactgacctgctccagaaggcaggctcccccggtcagtatgtaaatgcttttgctcctgtcagtgtttggccgtgacacattcctggcgggaaggtgagaagcttaaccagaatcc

SEQ ID NO: 542163 - DNA, 120 bp, Artificial Sequence
  ENSG00000167460_72 (sequence is synthesized)
tccattaacattttctccccacattccttctgccccccaccgggggagctgtgtaggtttctcctttggaaaatttattgttggggcgattgctattattgccggctgtaagggaagata

SEQ ID NO: 542164 - DNA, 120 bp, Artificial Sequence
  ENSG00000167460_73 (sequence is synthesized)
tatgaggcattttgctttcccccagcattttaatgagtcttggccttgtcccttatcagccatcacttactgcaaactaagttctctctcgtgctctgtcacgcatagctctaaatggcg

SEQ ID NO: 542165 - DNA, 120 bp, Artificial Sequence
  ENSG00000167460_74 (sequence is synthesized)
tcttttttctctctctctttcttttttaatttaaattgtttcatcagctcagttacttaataacatgcctgtagaatggcttaaatttcgcatttacctggggtttgtctccgttctcct

SEQ ID NO: 542166 - DNA, 120 bp, Artificial Sequence
  ENSG00000167460_75 (sequence is synthesized)
ggattcatagacagttacacaattatgtgtataatttaaacagccattcccagaagctccgaaggaaagatgggttacaggattttagatttaactatcaaaggctcaggggctaattaa

SEQ ID NO: 542167 - DNA, 120 bp, Artificial Sequence
  ENSG00000167460_76 (sequence is synthesized)
ctagcacttgggtggaaatttatattaagtcacacatatctaggactgaaatcttcatgtagcagcacgtcataggttctgaagtatttctcctttattcctcatcataacccccacacc

SEQ ID NO: 542168 - DNA, 120 bp, Artificial Sequence
  ENSG00000167460_77 (sequence is synthesized)
acgcattgatatcgttacccccatttgacagacggggaaaacagacctaggaaggttagatgcttacttaagtgatacaactggagcttaagttcaggtattctgactcaagggttacca

SEQ ID NO: 542169 - DNA, 120 bp, Artificial Sequence
  ENSG00000167460_78 (sequence is synthesized)
gagttcacaaggaaaaatacaggacaccaacttaaatctgagtttcagataagcaatgaataattttttaatcataagtatatctcttgcataagtacatctcatgcaacatttgggata

SEQ ID NO: 542170 - DNA, 120 bp, Artificial Sequence
  ENSG00000167460_79 (sequence is synthesized)
tacttacactaaaatattatttgtggtttatctgaaattcaatttaactgggcgccctgcattttatcttacaactgtgactcccaaatttggtgcttgttccttagtattctgtgatgt

SEQ ID NO: 542171 - DNA, 120 bp, Artificial Sequence
  ENSG00000167460_80 (sequence is synthesized)
ctcccaaatttggtgcttgttccttagtattctgtgatgttctgctgtaattaaaaatacaaagtactggacaggcatggtggctataacccacctgtattcccagcactttgggaggct

SEQ ID NO: 542172 - DNA, 120 bp, Artificial Sequence
  ENSG00000167460_81 (sequence is synthesized)
agaccagcctgggtaacatggtgagaccctgtctctagaaaaaatgcaaaaattggccaggtggtggcatgcacctgcagtcccagctatgcgggaggctgaggtgggaggatcacctga

SEQ ID NO: 542173 - DNA, 78 bp, Artificial Sequence
  ENSG00000167460_82 (sequence is synthesized)
tactttctctcttgtgactttcaccctggcagtttcaggtttagaaatctttgggggggtgctgggcatggtggctca

SEQ ID NO: 542174 - DNA, 120 bp, Artificial Sequence
  ENSG00000167460_83 (sequence is synthesized)
gggtgacagaatgagaccctgtctcaagaagaagaaaaaaaaacaaatctttttttttctttcatttaacaaagacgcttattaatttatctttccccatactcttaatcctcaccagag

SEQ ID NO: 542175 - DNA, 120 bp, Artificial Sequence
  ENSG00000167460_84 (sequence is synthesized)
gtgcaggctccgactccggggctggcgccggggtcccgggccgaggggaacccgcgaccggacttgtgggggagaatgaggatgaaaacgtggagcttccattgtctaggtagagacagt

SEQ ID NO: 542176 - DNA, 65 bp, Artificial Sequence
  ENSG00000167460_85 (sequence is synthesized)
ggcgcccagcctcaattgtgttttctctgccctgggaagagctcatagacaaatggaggcagggg

SEQ ID NO: 542177 - DNA, 120 bp, Artificial Sequence
  ENSG00000167460_86 (sequence is synthesized)
gggaaggagctggctgtgttgggaattggctctgaccggggtctctgctcaagtggacgggcgtcaggggctcatggctcatcttttctcttggcttctgtgacaaagagaaaatgtggt

SEQ ID NO: 542178 - DNA, 120 bp, Artificial Sequence
  ENSG00000167460_87 (sequence is synthesized)
ctcccgagggatgcaggagcctgtcaggttatggggaatctgccctttatttaacagtagcgttggtgcctggcagccagggtttttcccctacagaaagagctggatttctcctgcaca

SEQ ID NO: 542179 - DNA, 120 bp, Artificial Sequence
  ENSG00000167460_88 (sequence is synthesized)
ctcttgagtcctcttccatggggtctgagcaccatctttgatctccatctcaggaggatagagatagaacatgaggctcttcttagcgagatctgagcatagttgtataaataaatacag

SEQ ID NO: 542180 - DNA, 120 bp, Artificial Sequence
  ENSG00000167460_89 (sequence is synthesized)
agcctgcctctcacctgattcccctggttcctccagaaataccatctcaaaggtatagcaatgatcagaggtggaattgggctttttagtttgaaacagcacccaaagcagttgctacgt

SEQ ID NO: 542181 - DNA, 120 bp, Artificial Sequence
  ENSG00000167460_90 (sequence is synthesized)
ggcagctacgtcgggaacaaaggacacacttccacggccgaaccccactgaatttcccagcctcttcctcattcttgctcctgcttttgcagtttcacagacattctttgttctcccatc

SEQ ID NO: 542182 - DNA, 120 bp, Artificial Sequence
  ENSG00000167461_0 (sequence is synthesized)
gagagagtgtaatatggcgaagacctacgattacctgttcaagctgctgctgatcggggactcgggggtggggaagacctgtgtcctgttccgcttctccgaggacgccttcaactccac

SEQ ID NO: 542183 - DNA, 120 bp, Artificial Sequence
  ENSG00000167461_1 (sequence is synthesized)
ttttatctccaccataggaattgactttaaaattaggaccatagagctcgatggcaagagaattaaactgcagatatgggacacagccggtcaggaacggtttcggacgatcacaacggc

SEQ ID NO: 542184 - DNA, 120 bp, Artificial Sequence
  ENSG00000167461_2 (sequence is synthesized)
ctactacaggggtgcaatgggcatcatgctggtctacgacatcaccaacgagaagtccttcgacaacatccggaactggattcgcaacattgaggagcacgcctctgcagacgtcgaaaa

SEQ ID NO: 542185 - DNA, 120 bp, Artificial Sequence
  ENSG00000167461_3 (sequence is synthesized)
gatgatactcgggaacaagtgtgatgtgaatgacaagagacaagtttccaaggaacggggagaaaagctggccctcgactatggaatcaagttcatggagaccagcgcgaaggccaacat

SEQ ID NO: 542186 - DNA, 120 bp, Artificial Sequence
  ENSG00000167461_4 (sequence is synthesized)
caatgtggaaaatgcatttttcactctcgccagagatatcaaagcaaaaatggacaaaaaattggaaggcaacagcccccaggggagcaaccagggagtcaaaatcacaccggaccagca

SEQ ID NO: 542187 - DNA, 120 bp, Artificial Sequence
  ENSG00000167461_5 (sequence is synthesized)
gaagaggagcagctttttccgatgtgttcttctgtgaggaacaccgccttactctgagcctcgctcagcccagctgactgtgcctgttctgagtgagcccctcactcagccggggccctc

SEQ ID NO: 542188 - DNA, 120 bp, Artificial Sequence
  ENSG00000167461_6 (sequence is synthesized)
ccacctccaacgccccgcccacgccgcggccaccgggcccacggccaccagaatgcaattgagaaatcgtttattttagtaactgtctgatctttttcaactttggagatggaataagtt

SEQ ID NO: 542189 - DNA, 120 bp, Artificial Sequence
  ENSG00000167461_7 (sequence is synthesized)
aaaaatttgctatttttcctgtaacatctgctgaacgggcccacccacacgttgtatattcagagagagagagggagtcaaggtgtgaccgtcgaccacagccagtgtcaggcctctgcc

SEQ ID NO: 542190 - DNA, 120 bp, Artificial Sequence
  ENSG00000167461_8 (sequence is synthesized)
tctgggcctttgctttgtggcctcactgcaacacaaagctccaccaggaggctggttcacgtcccctaccacggaagcgaggtcccagaaggccagcggtggttccaggagcaacagctc

SEQ ID NO: 542191 - DNA, 120 bp, Artificial Sequence
  ENSG00000167461_9 (sequence is synthesized)
ccaaaccctgagcaaggcaaccgatcgccaggaccaggaagcatcacccaggagatttggcgcccacttccacctcttctctcagttttggacaagtgacaaaccattttgccccctcac

SEQ ID NO: 542192 - DNA, 120 bp, Artificial Sequence
  ENSG00000167461_10 (sequence is synthesized)
tcctgtgtaaagcattgagaaggaaagaagcctggagcagcctctcctgtccacagccaggggttaggtctgcaggcccgtctgcggtccccatcgagcatcaaggggacgctgtgtgtg

SEQ ID NO: 542193 - DNA, 120 bp, Artificial Sequence
  ENSG00000167461_11 (sequence is synthesized)
ctgcaagtgaccccgaaaacaaccacagccgtcacatggtcctcctgaagttggggcaccctcctctcagcaccaaaatggcccccactccttcgtgtcctcccgctatctccaaatcgg

SEQ ID NO: 542194 - DNA, 120 bp, Artificial Sequence
  ENSG00000167461_12 (sequence is synthesized)
acgttctttctagctgagatttttatttttccacatctgtagtgccatgaagcgattctgtctttgacttccaatggcaaacctgggtgatcgggaacaagcacgttgtacccttggctg

SEQ ID NO: 542195 - DNA, 120 bp, Artificial Sequence
  ENSG00000167461_13 (sequence is synthesized)
gacatggccaagacacaaggcattccacggcggcaagctgaccgcacagcagtctggcttgattttcagccgtcatcattgggttctgttttgacagctctgctgtcccatagggactgc

SEQ ID NO: 542196 - DNA, 85 bp, Artificial Sequence
  ENSG00000167461_14 (sequence is synthesized)
ccttaagctgctgtcaatccaaaccattggcatcatcgtttcttttgaattaaaaccaacatatcagcaatagtctgctctcccc

SEQ ID NO: 542197 - DNA, 120 bp, Artificial Sequence
  ENSG00000167461_15 (sequence is synthesized)
tgaattaaaaccaacatatcagcaatagtctgctctccccgggaatctctaacatgctctgtttacatcgataaatgcacttaaggaaaacaaacaaattaaagctcatcttaaagtcca

SEQ ID NO: 542198 - DNA, 120 bp, Artificial Sequence
  ENSG00000167461_16 (sequence is synthesized)
aggatttttatgtccacattttccctgtaggccacacggacatggccaggtgctgggggtgggtctggacaagatggtagagcccatggattaccccatcgagcggccacctcagaggag

SEQ ID NO: 542199 - DNA, 89 bp, Artificial Sequence
  ENSG00000167461_17 (sequence is synthesized)
agcccatggattaccccatcgagcggccacctcagaggagatgccacccatcatcaaaagactaaattgggaaaagaagcctcctggct

SEQ ID NO: 542200 - DNA, 120 bp, Artificial Sequence
  ENSG00000167461_18 (sequence is synthesized)
cgagaccagcctggccaacatggtgagcctgcgtcacctggcttctggcacacagctcggccactgtgtccctcctgcctccctggcaggtccttctaggggccctctcctggctggctt

SEQ ID NO: 542201 - DNA, 120 bp, Artificial Sequence
  ENSG00000167461_19 (sequence is synthesized)
gctttccagggcattccttccactctatccagggtccttcccaagaccacacccaggtccagtcattccctaggacttggcagagagctgtactcacagccaagatcacagcaaaatcag

SEQ ID NO: 542202 - DNA, 120 bp, Artificial Sequence
  ENSG00000167461_20 (sequence is synthesized)
caaagggaaaaggcatgcagagtgaagtccagaggcaaccagacagaagcatccagaatcctctcacagtggggtcacacaccccatgcttaactcccccaacaatgagttgtaacaaca

SEQ ID NO: 542203 - DNA, 120 bp, Artificial Sequence
  ENSG00000167461_21 (sequence is synthesized)
gagccctctggtttactcatgagaaggccaaggtgcagagacacatacaggccacttgcccacagcctcctagtcagggacatggtgggagcagggactgagatgcaagcagccggcccc

SEQ ID NO: 542204 - DNA, 120 bp, Artificial Sequence
  ENSG00000167461_22 (sequence is synthesized)
agggaccacacactggcctggccccaccccggagcccctcggagcccatccctccagctaggctgttggatctggccagtgtcatggttataagagaaaggatatccaagcttgtggtca

SEQ ID NO: 542205 - DNA, 120 bp, Artificial Sequence
  ENSG00000167461_23 (sequence is synthesized)
ccatgagtgttgggtgctttctagagaaggaagggtctagcacaggtgtgacccttgtagttggagggtgtggtgagcaggcgtcagttgtactttgagctatatcggagcagggtgtga

SEQ ID NO: 542206 - DNA, 120 bp, Artificial Sequence
  ENSG00000167461_24 (sequence is synthesized)
cctggtacaaacgacctgtgttcagaccttgaaccatagagcagtgagaagtaggccaacccctcctcccctcccaaagccagcatcttcatcttctgctccccaaagagctgacctcac

SEQ ID NO: 542207 - DNA, 120 bp, Artificial Sequence
  ENSG00000167461_25 (sequence is synthesized)
agccagagaacttttcccatctataaaaccacagcaaaagggcatatcactgtccacccaggactcatggacctcccaggccaggccgagaggccaccccatcatttgtgagtcattgca

SEQ ID NO: 542208 - DNA, 120 bp, Artificial Sequence
  ENSG00000167461_26 (sequence is synthesized)
ctgggctcacctccccagtgaccctgagagggctgtgctgccaaatttgccagtgcagggctgcaccccagctgggaaagctgtcttcatccgtggagaggaggagagcctggtctttgt

SEQ ID NO: 542209 - DNA, 120 bp, Artificial Sequence
  ENSG00000167461_27 (sequence is synthesized)
gaaaggtctctgtttctggccagcgggcaggagccaccttctggttcatgggaagtgaggcagggagtggcgcagtaggttccagagaccaagtctgagctggtggaagaagacagcagt

SEQ ID NO: 542210 - DNA, 120 bp, Artificial Sequence
  ENSG00000167461_28 (sequence is synthesized)
ttccagtgtccccgtcctccaggaagcgtggtccgctccatggggacccagggagacttgacgaaggagctgcctttgggtatgagggcagagtttgggcaacatcagacagggtggtga

SEQ ID NO: 542211 - DNA, 120 bp, Artificial Sequence
  ENSG00000167461_29 (sequence is synthesized)
agtgcctgcagctggtgacggcctcgagttgcgaccacctcaggcacggcctgtttctggagcccaaaaatagttgaaatgtcagggccaggcgaggtggcttatgcctgtaatcccagc

SEQ ID NO: 542212 - DNA, 86 bp, Artificial Sequence
  ENSG00000167461_30 (sequence is synthesized)
ctactaaaaatacaaaaaattagcctggtatggtggcagatgcctgtaatctcagctattcgggaggttgaggatcgcttgaacct

SEQ ID NO: 542213 - DNA, 120 bp, Artificial Sequence
  ENSG00000167461_31 (sequence is synthesized)
gatgtttctgtggagcccgtgccccaactcctcagggctccttggtcccaagttagtcttaggaacaggctttgtgccccggcctacccccatgtacatacctccccttctggctgcaga

SEQ ID NO: 542214 - DNA, 120 bp, Artificial Sequence
  ENSG00000167461_32 (sequence is synthesized)
gacaatgcaaggtttaaataaagtggaaacataattctttgggaatgaagaaagacacaggaagccggttcttccaggtgagctcagtgcagttaaagccggcatgccccgacttttagg

SEQ ID NO: 542215 - DNA, 120 bp, Artificial Sequence
  ENSG00000167461_33 (sequence is synthesized)
caaggggcagagggcctcggggtcttggggttcttgtgcagaggccttcccctgtccctcctctgccccaggggcctgagacgagttggtcaccccagtggggcacgtgccatgggatga

SEQ ID NO: 542216 - DNA, 120 bp, Artificial Sequence
  ENSG00000167461_34 (sequence is synthesized)
ctccaccatagaagtggaaactgagtcatggggaattggccatgggaaaaagacagtggcatctcaccttaatgagcatttactatgtgccaagtgcttcacgtgcattttcacactctt

SEQ ID NO: 542217 - DNA, 120 bp, Artificial Sequence
  ENSG00000167461_35 (sequence is synthesized)
agatgaggaatctgaggctcagggagggcatggaacttgcccaaggccacacagtctgcacgtggtgagaatgggatttgatggaatttgaacctggctgtgtctcaacccaaaactcga

SEQ ID NO: 542218 - DNA, 120 bp, Artificial Sequence
  ENSG00000167461_36 (sequence is synthesized)
ggcttagctctcctagagagatgccactgcacactcccagctgatgacaagctcagctaatgcaccttggagccgggactctaacccacaccattcctgctcttttctctggagcgttca

SEQ ID NO: 542219 - DNA, 120 bp, Artificial Sequence
  ENSG00000167461_37 (sequence is synthesized)
tcagctcctgttttaggcaagctcagatgcgcccggcggctggtgtgctcatgcgtgtgcctccctctctcacagctggccctcgactatggaatcaagttcatggagaccagcgcgaag

SEQ ID NO: 542220 - DNA, 120 bp, Artificial Sequence
  ENSG00000167468_0 (sequence is synthesized)
attggtcggctggacgaggggaggagccgctggctcccagccccgccgcgatgagcctcggccgcctttgccgcctactgaagccggcgctgctctgtggggctctggccgcgcctggcc

SEQ ID NO: 542221 - DNA, 120 bp, Artificial Sequence
  ENSG00000167468_1 (sequence is synthesized)
tggccgggaccatgtgcgcgtcccgggacgactggcgctgtgcgcgctccatgcacgagttttccgccaaggacatcgacgggcacatggttaacctggacaagtaccggggcttcgtgt

SEQ ID NO: 542222 - DNA, 120 bp, Artificial Sequence
  ENSG00000167468_2 (sequence is synthesized)
gcatcgtcaccaacgtggcctcccagtgaggcaagaccgaagtaaactacactcagctcgtcgacctgcacgcccgatacgctgagtgtggtttgcggatcctggccttcccgtgtaacc

SEQ ID NO: 542223 - DNA, 120 bp, Artificial Sequence
  ENSG00000167468_3 (sequence is synthesized)
caggagccagggagtaacgaagagatcaaagagttcgccgcgggctacaacgtcaaattcgatatgttcagcaagatctgcgtgaacggggacgacgcccacccgctgtggaagtggatg

SEQ ID NO: 542224 - DNA, 120 bp, Artificial Sequence
  ENSG00000167468_4 (sequence is synthesized)
aagatccaacccaagggcaagggcatcctgggaaatgccatcaagtggaacttcaccaagttcctcatcgacaagaacggctgcgtggtgaagcgctacggacccatggaggagcccctg

SEQ ID NO: 542225 - DNA, 120 bp, Artificial Sequence
  ENSG00000167468_5 (sequence is synthesized)
gtgatagagaaggacctgccccactatttctagctccacaagtgtgtggccccgcccgagcccctgcccacgcccttggagccttccaccggcactcatgacggcctgcctgcaaacctg

SEQ ID NO: 542226 - DNA, 120 bp, Artificial Sequence
  ENSG00000167468_6 (sequence is synthesized)
ctggtggggcagacccgaaaatccagcgtgcaccccgccggaggaaggtcccatggcctgctgggcttggctcggcgcccccacccctggctaccttgtgggaataaacagacaaattag

SEQ ID NO: 542227 - DNA, 120 bp, Artificial Sequence
  ENSG00000167468_7 (sequence is synthesized)
aagggcttcgtgtgcatcgtcaccaacgtggcctcccagtgaggcaagaccgaagtaaactacactcagctcgtcgacctgcacgcccgatacgctgagtgtggtttgcggatcctggcc

SEQ ID NO: 542228 - DNA, 120 bp, Artificial Sequence
  ENSG00000167468_8 (sequence is synthesized)
atagagggctgtggaggcagccagggatgcccacacctttgtggcctcctggggacaggatggctcgggggcctgtggggggctgttgggactctcacactgcatggcctcctggggtaa

SEQ ID NO: 542229 - DNA, 120 bp, Artificial Sequence
  ENSG00000167468_9 (sequence is synthesized)
gatggctctgggggggcttgggggcactgtggctgtggaggcagccggggaagctcacacccttgtggcctcctggagacaggacagcttggggactgtggggggctgctggggacgctc

SEQ ID NO: 542230 - DNA, 80 bp, Artificial Sequence
  ENSG00000167468_10 (sequence is synthesized)
agtcctgactacggcctccgggccctttgtccccgctagcggcgctcggggtgggggagccaggaggggcgggagacggg

SEQ ID NO: 542231 - DNA, 120 bp, Artificial Sequence
  ENSG00000167468_11 (sequence is synthesized)
caggcggcggccgcgagcccctcggcggcggaaggccccagcgtgcaggcgcaggagggcgcggcgccggcggaagaagccctgtccccgcagcttgcgaccggagatccacgaatgtcc

SEQ ID NO: 542232 - DNA, 120 bp, Artificial Sequence
  ENSG00000167468_12 (sequence is synthesized)
ggcacatggttaacctggacaagtaccggtgggcgctcgcctggggtggggcgcggggtcgggccctgggagggggccgtgttcttctgcgctgacgccgccgatcctcgcaggggcttc

SEQ ID NO: 542233 - DNA, 80 bp, Artificial Sequence
  ENSG00000167468_13 (sequence is synthesized)
ttgcagggggcggggtccgggacggctggggcggagctggaccgttgagggccacggcggggcgtctccgggccgagcgg

SEQ ID NO: 542234 - DNA, 120 bp, Artificial Sequence
  ENSG00000167470_0 (sequence is synthesized)
gataaaggctgagggccgcgcgcttggcccagaccggcccggccagcgcgcattcggccccggacgaaggtactcgcagcacttggagcgcagaaccggccgcgcccgatcctccgagcg

SEQ ID NO: 542235 - DNA, 120 bp, Artificial Sequence
  ENSG00000167470_1 (sequence is synthesized)
gcggcgacggctgttgctaagggaggggacgcgcgaggaagcgcgacccgggcggcagacggcacccagcgccaccagccgagcggcgccccctccccaggacccttaaccgcgccgcgt

SEQ ID NO: 542236 - DNA, 120 bp, Artificial Sequence
  ENSG00000167470_2 (sequence is synthesized)
cccggtcgcgcccgccgccctttgaaggagaagcaagtgccgtccccacccccggaaggcgcccccaggagccggagcgacctcggagcgccactcggattttggatttcggtctcgcat

SEQ ID NO: 542237 - DNA, 120 bp, Artificial Sequence
  ENSG00000167470_3 (sequence is synthesized)
tccgcggccgggactttctcgaggaggacgcgcgctgctccgcgcccccgagtgcccggaggacccggcatccggggagcctctcgcccctgtcccggaggcgcggcgaggattggcggc

SEQ ID NO: 542238 - DNA, 80 bp, Artificial Sequence
  ENSG00000167470_4 (sequence is synthesized)
cccggcggcgcctgcgagctgggcccggcggccgaggcggcgcccatgagcctcgccatccacagcaccacgggcacccg

SEQ ID NO: 542239 - DNA, 120 bp, Artificial Sequence
  ENSG00000167470_5 (sequence is synthesized)
cgcccatgagcctcgccatccacagcaccacgggcacccgctacgacctggccgtgccgcccgacgagacggtggaggggctgcgcaagcggttgtcccagcgcctcaaagtgcccaagg

SEQ ID NO: 542240 - DNA, 120 bp, Artificial Sequence
  ENSG00000167470_6 (sequence is synthesized)
agcgcctggctcttctccacaaagacacccggctcagttcggggaagctgcaggagttcggcgtgggtgatggcagcaagctgaccttggtacccaccgtggaagcgggcctcatgtctc

SEQ ID NO: 542241 - DNA, 120 bp, Artificial Sequence
  ENSG00000167470_7 (sequence is synthesized)
aggcctcaaggccggaacagtccgtgatgcaagctctcgagagtctcacggagacgcaggtcagtgacttcctgtcgggccgttcgccactgacactggccttgcgtgtgggcgaccaca

SEQ ID NO: 542242 - DNA, 120 bp, Artificial Sequence
  ENSG00000167470_8 (sequence is synthesized)
tgatgttcgtgcagctgcagctcgcggcccagcacgctccactgcaacaccgccatgtgctggccgctgcggccgccgccgctgctgcgcggggggaccccagcatagcctcccccgtgt

SEQ ID NO: 542243 - DNA, 120 bp, Artificial Sequence
  ENSG00000167470_9 (sequence is synthesized)
cctcgccctgccggccggtgtccagtgccgcccgagtccccccggtgcccaccagcccgtcccctgcatctccctcgcccatcacagccggctccttccggtcccacgcagcctccacca

SEQ ID NO: 542244 - DNA, 120 bp, Artificial Sequence
  ENSG00000167470_10 (sequence is synthesized)
cctgcccggagcagatggactgctcccccacggccagcagcagtgccagtcctggtgccagcaccacgtctaccccaggggccagccctgccccccgctcccgaaaacccggcgccgtca

SEQ ID NO: 542245 - DNA, 120 bp, Artificial Sequence
  ENSG00000167470_11 (sequence is synthesized)
tcgagagctttgtgaatcacgccccgggggtcttctcagggaccttctctggcacgctacaccccaactgccaagacagcagcgggcggccgcggcgtgacatcggcaccatcctgcaga

SEQ ID NO: 542246 - DNA, 120 bp, Artificial Sequence
  ENSG00000167470_12 (sequence is synthesized)
tcctgaacgacctcctgagcgccacccggcactaccagggcatgcccccttcgctggcccagctccgctgccacgcccagtgctccccggcctcaccggcccccgacctggcccccagaa

SEQ ID NO: 542247 - DNA, 120 bp, Artificial Sequence
  ENSG00000167470_13 (sequence is synthesized)
ctacctcctgcgagaagctcacggctgccccctcagcctccctgctgcagggccagagccagatccgcatgtgcaagcccccgggggaccggcttcggcagacagaaaaccgcgccacgc

SEQ ID NO: 542248 - DNA, 120 bp, Artificial Sequence
  ENSG00000167470_14 (sequence is synthesized)
gctgcaaggtggaacggctgcagctgcttctgcagcagaaacggctccgtagaaaggcccggcgggacgcgcggggtccgtaccactggtcacccagccgcaaggccggccgcagcgaca

SEQ ID NO: 542249 - DNA, 120 bp, Artificial Sequence
  ENSG00000167470_15 (sequence is synthesized)
gtggaagccagaagtcaaccctgacatcaagtcagagttcgtggtggcttaggatcttcggatcggccaccctcgcccctcgcaccccagcccagggcggcggggactccgagagccccg

SEQ ID NO: 542250 - DNA, 120 bp, Artificial Sequence
  ENSG00000167470_16 (sequence is synthesized)
ccccagcccagggcggcggggactccgagagccccggagagaacgtggcccagccctggagggcaggcggccactcccccagccagaagtctttttttcttttcttcttttttattattt

SEQ ID NO: 542251 - DNA, 120 bp, Artificial Sequence
  ENSG00000167470_17 (sequence is synthesized)
ggactcttcatgggctttgcttcctacctccttcacccttcactcctgccctcctcttcctcctcctcctcctcctccgtctgtctcctttcacctctgcgccaggtcggtcctccctgc

SEQ ID NO: 542252 - DNA, 120 bp, Artificial Sequence
  ENSG00000167470_18 (sequence is synthesized)
caaccttccccagctccaatatgtagcagtctctctggatggcggagagtgaaggagacggagaaacgcgccccatcccttccgccgcctcctttcccccccgaccctattcaggtttta

SEQ ID NO: 542253 - DNA, 120 bp, Artificial Sequence
  ENSG00000167470_19 (sequence is synthesized)
agtcaaaaatgtcgatatgtcattatgcactttacagatgaggggaggggccgcagtgcgcagaacccaccccaccccccagtgcagacttcggggtctccaccccaggccagcagcgcc

SEQ ID NO: 542254 - DNA, 120 bp, Artificial Sequence
  ENSG00000167470_20 (sequence is synthesized)
cactgggctacagcaagccaacaggtcacagaagccaacgaggggactgtttctcttccactcctatcctcttttcttgatcttttttttgcattttccttcatttctttaacaaggaga

SEQ ID NO: 542255 - DNA, 120 bp, Artificial Sequence
  ENSG00000167470_21 (sequence is synthesized)
gcaaagctgttttagcagaggctggggctgaggtccccatggggtttgggtgcaggggcatggcaccctttcctgtcgggaagggagaggggaactacccccccagcctgccctccgccc

SEQ ID NO: 542256 - DNA, 120 bp, Artificial Sequence
  ENSG00000167470_22 (sequence is synthesized)
cgccccagccggcggactgtgctgtttcctccgcccccactcccgtgttttctgacctcctgcctgagtttggggtatttatagactattaattttctgactgagccaatagtggttggg

SEQ ID NO: 542257 - DNA, 120 bp, Artificial Sequence
  ENSG00000167470_23 (sequence is synthesized)
gaactcttgaaaaaggggagagaatggctgggtgctggggagttcccccctccgagccctccttcccggcccaacctgagggatgtggatttgggactgtctgggggcccctcctgcagc

SEQ ID NO: 542258 - DNA, 120 bp, Artificial Sequence
  ENSG00000167470_24 (sequence is synthesized)
gaggatgggagggggtgctgagctgtgaatcccctgggcagggggcgacaactccgtgtagcattaacccccgtggcggggtccgctgctggtctaatttggaccccctgcctctcagtg

SEQ ID NO: 542259 - DNA, 120 bp, Artificial Sequence
  ENSG00000167470_25 (sequence is synthesized)
cccctgccctaggggtgtctgtctccagaggggagggacaaatcccctactggggccatttcaatggggtagtttttggatttttttccccactcactttttattttttaatgataatgg

SEQ ID NO: 542260 - DNA, 120 bp, Artificial Sequence
  ENSG00000167470_26 (sequence is synthesized)
agatgtctggacccttcctcaccccacctgtcggtcttgtcctggctctgcctgtcccccaccgttgttctcgtaggtgaaccccaggtcctcaactccccccctttatgtgttgaaagt

SEQ ID NO: 542261 - DNA, 120 bp, Artificial Sequence
  ENSG00000167470_27 (sequence is synthesized)
taatggtttcagatgtgaacatcacgtgttataactgtagcgctgtaaatttttttgtgggagggtgggcagggaggggtcccagagggtagagctcaaggattttgggttttgttttgt

SEQ ID NO: 542262 - DNA, 120 bp, Artificial Sequence
  ENSG00000167470_28 (sequence is synthesized)
aagaaaaaaaaatagaaaaaaaaggagtaaaaggggcgggtttgttttttgaagaactgtcttggatacctatttaaatgtgtgttctgttttgttttttaacgatttttaaataacgtc

SEQ ID NO: 542263 - DNA, 120 bp, Artificial Sequence
  ENSG00000167470_29 (sequence is synthesized)
aacgatttttaaataacgtctgtgcctccactggttgagggtggaacctccaggcaggaaccggctcgccaccctctgcccggtaagggctgcccaagaaagcattacccgccctcgggg

SEQ ID NO: 542264 - DNA, 120 bp, Artificial Sequence
  ENSG00000167470_30 (sequence is synthesized)
ggtcgggctgtgggggtcccggcacctggcgtgagtttcatgtatgaaaacataaaattgaaaaaaaaaaaaaaacctacacgagcaccgtgatttcaagtaataaacagaaaatgaaac

SEQ ID NO: 542265 - DNA, 120 bp, Artificial Sequence
  ENSG00000167470_31 (sequence is synthesized)
gggctggcggaggaggcttccggaaatacagattcattttatttaagcgtccgtggcaccgacagggaccccagagcccagagaggggcggcgagaggccccaggtcagtgacttcctgt

SEQ ID NO: 542266 - DNA, 120 bp, Artificial Sequence
  ENSG00000167470_32 (sequence is synthesized)
taggacagaagaattcgtgcaggaattccacccacttgctggccctggtgacttagctgggagggggcctgaggtggagcccctcccgtatccacaggcagagaggatctaggggcccat

SEQ ID NO: 542267 - DNA, 120 bp, Artificial Sequence
  ENSG00000167470_33 (sequence is synthesized)
gagggtgggggaaaggcaaagtgaaggttgtttgaggtcagtgactgccagctgggccccgccccctctggcctcagtttccccttgcaagaccgacctagttggccagggaggggcagg

SEQ ID NO: 542268 - DNA, 120 bp, Artificial Sequence
  ENSG00000167470_34 (sequence is synthesized)
atagagcacactggggcccagaggaggagaaagtgcctggttggggtgcagagggggtgccagagtccagggcgggggttccactggagggaaggggtccgaatcgccaggatggggctc

SEQ ID NO: 542269 - DNA, 120 bp, Artificial Sequence
  ENSG00000167470_35 (sequence is synthesized)
ccagcaccagacggagacctctctgcacgcgcttagggccctggatctggaagccgggaaggggtgggggtgggaacttatccgtctctccccacacaagcacagccctcccccgcggcc

SEQ ID NO: 542270 - DNA, 120 bp, Artificial Sequence
  ENSG00000167476_0 (sequence is synthesized)
gtcctgtccacaaggctcagcaaagcggctggcggcctggcctgggacctgctgctgctccagccatgtccatgacaaccagagcctgggaggagctggatggcggcctgggcagctgcc

SEQ ID NO: 542271 - DNA, 120 bp, Artificial Sequence
  ENSG00000167476_1 (sequence is synthesized)
aggccctggaggaccactctgcgctggccgagacccaggaggacagggcttcagcgacacccaggctggccgactccggcagcgtgccccacgactctcaggtggctgaaggccccagtg

SEQ ID NO: 542272 - DNA, 120 bp, Artificial Sequence
  ENSG00000167476_2 (sequence is synthesized)
tggacaccaggcccaagaagatggaaaaagagcctgccgccagggggaccccaggaacggggaaggagaggctgaaagccggagcgagccctcggagcgtccccgcgcgcaagaaggcgc

SEQ ID NO: 542273 - DNA, 120 bp, Artificial Sequence
  ENSG00000167476_3 (sequence is synthesized)
agaccgcgccgcccctgcagccgccgccgccgcccccggccctgagcgaggagctgccctggggagacctgtcgctcaacaagtgcctggtgctcgcctcgctggtggcgctgctgggct

SEQ ID NO: 542274 - DNA, 120 bp, Artificial Sequence
  ENSG00000167476_4 (sequence is synthesized)
gcccgagccctgggtcccgccaagctcagccccgagggagccatcgtcgcccctgcctaagttcgaggcccaggcgcctccatcagcgccgcctgcgccccgggccgaggcagaggtcag

SEQ ID NO: 542275 - DNA, 120 bp, Artificial Sequence
  ENSG00000167476_5 (sequence is synthesized)
acccaagattcccgggagtcgggaggctgcagagaacgacgaagaggagcccggcgaggccaccggagaggccgtccgggaggaccgtgtgaccctcgcagaccggggacccaaggagag

SEQ ID NO: 542276 - DNA, 120 bp, Artificial Sequence
  ENSG00000167476_6 (sequence is synthesized)
gcctcggagagaggggaagccgcggaaggagaagccgcggaaggaggagagacctaagaaagagaggccgcggaaagaggagaggccacgggccgccagggagccccgggaagccctacc

SEQ ID NO: 542277 - DNA, 120 bp, Artificial Sequence
  ENSG00000167476_7 (sequence is synthesized)
ccagcgctgggagtcacgcgaagggggccaccggccgtgggcacgggactccagggacgccgagcccaggaagaagcaggcctgggtgtccccgaggcgtcccgacgaggagcagcggcc

SEQ ID NO: 542278 - DNA, 120 bp, Artificial Sequence
  ENSG00000167476_8 (sequence is synthesized)
tgggagtcgccagaagctccgcgcaggcaaggggcgggactgagccggccccgcgccggagtccaggggccccttctggacgccccgcgactctggcgaaataaagcgagtgctgcggcc

SEQ ID NO: 542279 - DNA, 120 bp, Artificial Sequence
  ENSG00000167476_9 (sequence is synthesized)
agtcgcgcccgcccctcccagcgcctgattggtgaaagggaaagggaaaggaagaggctctctggagattggttgataaattcagatttttcctgtggaaactgaaacttaccctaagga

SEQ ID NO: 542280 - DNA, 120 bp, Artificial Sequence
  ENSG00000167476_10 (sequence is synthesized)
ggtaaactgtttcgcctgtgaggtaaaatgtggacttacctagcaaaaatatttcccctcctggttaaatccagaaaaaaaatctcaggtatgaactgcactttgcttttaataagcaaa

SEQ ID NO: 542281 - DNA, 120 bp, Artificial Sequence
  ENSG00000167476_11 (sequence is synthesized)
gatataactcttggcagtcacatacgggtacatagcttgtgtgtagactaaattatgaatttagcaaaaagttgccactttgcagtgaggtttaataaaatattttttatttcatgtata

SEQ ID NO: 542282 - DNA, 120 bp, Artificial Sequence
  ENSG00000167476_12 (sequence is synthesized)
gggcggggcacttacctctcactgctgctgccgccgcggctgtgcaggcttaggagcggcatggtgcggctggcgtggatggtggcgctgggtttatccccttccttctctctggcgaag

SEQ ID NO: 542283 - DNA, 120 bp, Artificial Sequence
  ENSG00000167476_13 (sequence is synthesized)
cagtggctattgaggatccgctgcagggaggatttcaccatccggccgctggggtccgaaaccaggaaaacctccgctgcgtctctccgcgccgccgccgctgctcgccgttcgcaaaat

SEQ ID NO: 542284 - DNA, 120 bp, Artificial Sequence
  ENSG00000167476_14 (sequence is synthesized)
ggcgcctctgccgccgcccgcctttatagatgctgcgcccaggccacgccccccgcgccgccgggaacgcgaccgcacgaggggcagagccgcggggccgccgggaaaaaaagtcgcgcc

SEQ ID NO: 542285 - DNA, 120 bp, Artificial Sequence
  ENSG00000167483_0 (sequence is synthesized)
gctgagcaggagatgggaattgaaacctgcgcagaggcggctgtgcagggtgagagtggagccgaaaccacagaaagtgaagtttgcttcaacgtcttgtcccggcaggccactcagatg

SEQ ID NO: 542286 - DNA, 120 bp, Artificial Sequence
  ENSG00000167483_1 (sequence is synthesized)
tgagagtgaggaagtgggatggggcctgaccggaaggaggtgcccctgagccgaggaacgcaggcggtggtcgtggggaagggaagaggagccccgggagacgacagcagcatgggtggg

SEQ ID NO: 542287 - DNA, 120 bp, Artificial Sequence
  ENSG00000167483_2 (sequence is synthesized)
cggccttcgagccctctggacaagcagcagcggcagcacctaaggggtcaggtggacaccctgctgaggaacttcctgccttgctaccgtgggcagctggcagcgtctgtcctgcggcag

SEQ ID NO: 542288 - DNA, 120 bp, Artificial Sequence
  ENSG00000167483_3 (sequence is synthesized)
atctctcgagagctgggccctcaggagccgaccggaagccagttgctacgcagcaaaaagctgccccgagtccgtgagcaccgaggacccctgacccagcttcggggccacccaccccgg

SEQ ID NO: 542289 - DNA, 120 bp, Artificial Sequence
  ENSG00000167483_4 (sequence is synthesized)
tggcagccgatcttctgtgttctgcgtggggacggccgcctagagtggttcagccacaaggaggaatatgaaaacgggggccactgccttggctcaacagccctgacaggatacacgctc

SEQ ID NO: 542290 - DNA, 120 bp, Artificial Sequence
  ENSG00000167483_5 (sequence is synthesized)
ctgacttcccagcgagaatatctccgccttttggatgctctctgccctgaatccttgggagaccatactcaggaagagcctgactccctcttggaagtgcctgtgagcttcccgctgttc

SEQ ID NO: 542291 - DNA, 120 bp, Artificial Sequence
  ENSG00000167483_6 (sequence is synthesized)
ctgcagcaccccttccgccggcacctctgcttctctgcagccaccagggaggcacagcatgcctggaggctggccctgcagggtggcatccggcttcagggcatagtcctgcagcgaagc

SEQ ID NO: 542292 - DNA, 120 bp, Artificial Sequence
  ENSG00000167483_7 (sequence is synthesized)
caggcccctgctgcccgggccttcctggacgccgtccgactctaccggcagcaccaaggccactttggcgacgacgacgtgaccctaggctcagacgccgaggtgctgaccgcggtgctg

SEQ ID NO: 542293 - DNA, 120 bp, Artificial Sequence
  ENSG00000167483_8 (sequence is synthesized)
atgcgggagcaacttcccgcgctgcgagcccagacccttcctggcctgcggggggcaggccgcgcccgcgcctgggcctggaccgagcttctagacgccgttcacgcagctgtcctggcc

SEQ ID NO: 542294 - DNA, 120 bp, Artificial Sequence
  ENSG00000167483_9 (sequence is synthesized)
ggggcctccgccgggctctgcgccttccagcccgaaaaggacgagctgcttgcgtcgctggagaagacgatccgcccggacgtggaccagctgctgcggcagcgggcgcgtgtggcgggg

SEQ ID NO: 542295 - DNA, 120 bp, Artificial Sequence
  ENSG00000167483_10 (sequence is synthesized)
ctcgaggcggtgcggaccctcctggctcaaggcatggaccgactgtcccaccgcctgcgccagagcccctcaggcacgcggctgcgcagggaggtttactcatttggggagatgccgtgg

SEQ ID NO: 542296 - DNA, 120 bp, Artificial Sequence
  ENSG00000167483_11 (sequence is synthesized)
gacttggcgctgatgcagacatgctaccgtgaggccgagcggagccgggggcgcttggggcagctggcagcaccgtttggctttctggggatgcagagcctcgtgtttggggcccaagat

SEQ ID NO: 542297 - DNA, 120 bp, Artificial Sequence
  ENSG00000167483_12 (sequence is synthesized)
cttgcacagcagctcatggctgacgccgtggccaccttcctgcagctggctgaccagtgtctgacgacggccctcaactgtgaccaggctgcccagaggctggagagagtcagggggcgc

SEQ ID NO: 542298 - DNA, 120 bp, Artificial Sequence
  ENSG00000167483_13 (sequence is synthesized)
gtgctgaagaaattcaaatcggacagcgggttggcgcagaggaggttcatccgaggctggggtctctgcatctttttaccttttgtgctgagccaactcgagccaggctgcaaaaaggag

SEQ ID NO: 542299 - DNA, 120 bp, Artificial Sequence
  ENSG00000167483_14 (sequence is synthesized)
ctgcctgagttcgagggggatgtccttgccgtgggcagccaggctctgaccactgagggcatctatgaggacgtcatccgggggtgcttgctgcagaggattgaccaagaattgaaaaag

SEQ ID NO: 542300 - DNA, 120 bp, Artificial Sequence
  ENSG00000167483_15 (sequence is synthesized)
acccttggtgccaatgatgtatcctgcactctggacggctgcttggaggtcccatgggaacaggagggagcagctccaaatcttaacttggtgtcaagtttcctggctgggagacaagct

SEQ ID NO: 542301 - DNA, 120 bp, Artificial Sequence
  ENSG00000167483_16 (sequence is synthesized)
tttaccgacttcctctgcttgccagcaaagtcatctgctaactggatattggcagcttctctgctgtcttgcagctgcttccggagtgggttccacagggattcccgtgtgttcttggtt

SEQ ID NO: 542302 - DNA, 120 bp, Artificial Sequence
  ENSG00000167483_17 (sequence is synthesized)
cagcttgcagagggactttcacactccctggagaccgtttcctcccattctgtctggagttttcggcctaccccaagacaatgagatattcctgacctttccacctatttccctccaacc

SEQ ID NO: 542303 - DNA, 120 bp, Artificial Sequence
  ENSG00000167483_18 (sequence is synthesized)
ccaccttccgaaatacatttgctcaatacatttgcacttcataggcttctttagctgtcttccttttaccccggacgggatgtagatgttaattctggaacaattgcagctacaagaatt

SEQ ID NO: 542304 - DNA, 120 bp, Artificial Sequence
  ENSG00000167483_19 (sequence is synthesized)
tgtcatcctgccccttttgagaaaaacattgtttgcccttgggtctaaatccttccagatgggatgggatgtatcttgtcacctcctttttcttacttaatatgaaaagacctttcctca

SEQ ID NO: 542305 - DNA, 120 bp, Artificial Sequence
  ENSG00000167483_20 (sequence is synthesized)
tgaggaaactgaggctgagcgggaaggaggggcttgtcccaggcagccagactctggtgcccagatccagccactctgcccaccgccttctccaggaacattccggagctgaatcttcac

SEQ ID NO: 542306 - DNA, 120 bp, Artificial Sequence
  ENSG00000167483_21 (sequence is synthesized)
ccacatctatcttgtttctattggataaatgtctacaagtggaatttctgggccaaaacggatgtgccatctttaggcttttgtaacccctgcaacttcagaaaactgtaccattttata

SEQ ID NO: 542307 - DNA, 120 bp, Artificial Sequence
  ENSG00000167483_22 (sequence is synthesized)
gggtggggaggtggaggcccacatggggtgtatgggattgtcatgagtgtgggttcatggacggaacagaatgcactttgtctccttacccagccagcctggccaagctcgtgaacaagc

SEQ ID NO: 542308 - DNA, 120 bp, Artificial Sequence
  ENSG00000167483_23 (sequence is synthesized)
tcagtgggaagttgtggagtgcatctgagccacagagggaccctctaaacccaggctctgacatgcatgtgagctcagccctggggggctgagattgtggtgaatttgtgtcccatctct

SEQ ID NO: 542309 - DNA, 120 bp, Artificial Sequence
  ENSG00000167483_24 (sequence is synthesized)
gcagaggatttttcagctcatctgaaatcttcccttgatggtatagttgggacacagaagccacagttcagacctgtcccaggttggttctctgggtaccttttgtaggaatatgaaaac

SEQ ID NO: 542310 - DNA, 120 bp, Artificial Sequence
  ENSG00000167483_25 (sequence is synthesized)
gaggggcgggggtaaaggctgatacatgggcagcggtgggccaaggtggcccctacaaagacccaggtgggaatcctgactgggcccgcccctccgaggctcagttttctcatcattaca

SEQ ID NO: 542311 - DNA, 120 bp, Artificial Sequence
  ENSG00000167483_26 (sequence is synthesized)
atgggtagaagagggcgctcagcgtccctgctcgcgtccccctcgcgagggcccctgcacatccccatctgtgaggcaccttgcggaggggactccagaccagtgtcttccactcccagc

SEQ ID NO: 542312 - DNA, 120 bp, Artificial Sequence
  ENSG00000167483_27 (sequence is synthesized)
aaatcggacagcgggttggcgcagaggaggttcatccgaggctggggtctctgcatctttttaccttttgtgctgagccaactcgagccaggctgcaaaaaggtgagttaatgggaagtg

SEQ ID NO: 542313 - DNA, 120 bp, Artificial Sequence
  ENSG00000167483_28 (sequence is synthesized)
gagccaggctgcaaaaaggtgagttaatgggaagtgtgcaagagggtctgacagcatcaccatgcatccacttaaagtgggcaagaatgctctttgaggctgggcgcagtggctcatgcc

SEQ ID NO: 542314 - DNA, 120 bp, Artificial Sequence
  ENSG00000167483_29 (sequence is synthesized)
gactgcacaaacgatgcaactagaggaacagctagtggctgcagtatgtatggcctgaactgctggtcacggggctgtggctgccagtagagggttccttctaagttgaataaacatgat

SEQ ID NO: 542315 - DNA, 120 bp, Artificial Sequence
  ENSG00000167483_30 (sequence is synthesized)
ggtcttgggggactgtgttccctgtggagggcattgcctatgcaaagttccagagatgggtgagacttgggtgttggggacctggccaggcggagggcttcctccccgggccatcgggag

SEQ ID NO: 542316 - DNA, 71 bp, Artificial Sequence
  ENSG00000167483_31 (sequence is synthesized)
taattttttttttttaaataatagagacaaggtctcgctatgctgcccaggctgatctcaaactcctggac

SEQ ID NO: 542317 - DNA, 77 bp, Artificial Sequence
  ENSG00000167483_32 (sequence is synthesized)
agtgatccactatgtccagcctccaaatcctttctaaacactaggacttttcatgaaaagaaaaaagctatgccagt

SEQ ID NO: 542318 - DNA, 120 bp, Artificial Sequence
  ENSG00000167483_33 (sequence is synthesized)
acactaggacttttcatgaaaagaaaaaagctatgccagttagacacacacagaaatctcatgattttattttgaatttctttgactaaattgaacttacaaataagtttattatggcca

SEQ ID NO: 542319 - DNA, 78 bp, Artificial Sequence
  ENSG00000167483_34 (sequence is synthesized)
caaggagttttgaggccagcttgggcaatgtggtgaaacctgtctctactaaaaaataaaataaataaataaataaat

SEQ ID NO: 542320 - DNA, 85 bp, Artificial Sequence
  ENSG00000167483_35 (sequence is synthesized)
gaagctgggctgagatgggagatttacctgagcctgggaactcaaggctgcagtgagtggtgattgcaccactgcactccagcct

SEQ ID NO: 542321 - DNA, 120 bp, Artificial Sequence
  ENSG00000167483_36 (sequence is synthesized)
gcaccactgcactccagcctgggtgatgggagtgagaccctgtctcaaaaaacaaaatccaaatatgttgattagccatttacatgtttgtagtttttttttttttaatttcagtgaatt

SEQ ID NO: 542322 - DNA, 120 bp, Artificial Sequence
  ENSG00000167483_37 (sequence is synthesized)
ttaatttcagtgaattgcctgttcatagcttttttctacttttcaggagtgtttgcatttttcttattgatatctaataactctttatatctgaaggatatgaacgctttgtgatacagg

SEQ ID NO: 542323 - DNA, 83 bp, Artificial Sequence
  ENSG00000167483_38 (sequence is synthesized)
aacacgaaggcggactaggagcgatctctggataactgtgggcaagcctgactgatatcaggccctccacaagaggtggagga

SEQ ID NO: 542324 - DNA, 89 bp, Artificial Sequence
  ENSG00000167483_39 (sequence is synthesized)
aaaacggtgtttttccttgacacttttcgctaccgctagaccacggtctgcctggcaacaggcatcttcccagacgctggcgtcaccgc

SEQ ID NO: 542325 - DNA, 69 bp, Artificial Sequence
  ENSG00000167483_40 (sequence is synthesized)
tggcgtcaccgctagaccaaggagcccttctgacctcactatgccccctcagctcctatctctgtatgg

SEQ ID NO: 542326 - DNA, 83 bp, Artificial Sequence
  ENSG00000167483_41 (sequence is synthesized)
tatctaatgttatactggaacagctcatgtcctcggtctcttgcctcagcacctgggtggcttgccgcccacaacccgccacc

SEQ ID NO: 542327 - DNA, 74 bp, Artificial Sequence
  ENSG00000167483_42 (sequence is synthesized)
attttgttatactggaacagctcatgtcctcggtctcttgcctcagcacctgggtggcttgccgcccacatggt

SEQ ID NO: 542328 - DNA, 90 bp, Artificial Sequence
  ENSG00000167483_43 (sequence is synthesized)
ttttaaaataaaaatatttaaaaataaagataaggaaactaaggcccaagccccgccccccaaccccacagctaatcaggcccagggcta

SEQ ID NO: 542329 - DNA, 120 bp, Artificial Sequence
  ENSG00000167483_44 (sequence is synthesized)
ccccgccccccaaccccacagctaatcaggcccagggctagggcagaagcctgtgttgtaggcctctagaggggccctcctctccatccgagcccctaacccgccatggttccaggagct

SEQ ID NO: 542330 - DNA, 120 bp, Artificial Sequence
  ENSG00000167483_45 (sequence is synthesized)
gcctgagttcgagggggatgtccttgccgtgggcagccaggctctgaccactgagggcatctatgaggacgtcatccgggggtgcttgctgcagaggattgaccaagacccttggtgcca

SEQ ID NO: 542331 - DNA, 120 bp, Artificial Sequence
  ENSG00000167487_0 (sequence is synthesized)
actcgaacgcgcgacggcggggggaagatggcggagtccggcggtagcagcggtggtgctggtggcggcggcgctttcggcgcgggcccgggccccgagcgcccgaacagcacggccgac

SEQ ID NO: 542332 - DNA, 120 bp, Artificial Sequence
  ENSG00000167487_1 (sequence is synthesized)
aagaacggggccctcaagtgcaccttctcggcacccagccacagcaccagcctcctgcagggcctggccaccctccgcgctcagggccagctcctcgatgttgtgctgactattaacaga

SEQ ID NO: 542333 - DNA, 120 bp, Artificial Sequence
  ENSG00000167487_2 (sequence is synthesized)
gaggcctttcctgcacacaaggtcgtcctggctgcctgcagcgactacttcagggccatgttcaccggcggcatgcgggaggcaagccaggacgtcatcgagctgaagggcgtgtcggcc

SEQ ID NO: 542334 - DNA, 120 bp, Artificial Sequence
  ENSG00000167487_3 (sequence is synthesized)
cgtggcctgcggcacatcatcgacttcgcctacagcgccgaggtgacactggacctggactgcgtgcaggacgtgctgggcgcggccgtgttcttgcagatgctgcccgtggtggagctg

SEQ ID NO: 542335 - DNA, 120 bp, Artificial Sequence
  ENSG00000167487_4 (sequence is synthesized)
tgcgaggagttcctgaaggcggccatgagcgtggagacctgcctcaacatcggccagatggccaccaccttcagcctggcctcgctgcgagagtcggtggatgccttcaccttccggcac

SEQ ID NO: 542336 - DNA, 120 bp, Artificial Sequence
  ENSG00000167487_5 (sequence is synthesized)
ttcctgcagatcgccgaggaggaggatttcctgcgcctgccactggagcgcctggtcttcttcctgcagagcaaccggctgcagagctgtgccgagatcgacctgttccgcgcggccgtc

SEQ ID NO: 542337 - DNA, 120 bp, Artificial Sequence
  ENSG00000167487_6 (sequence is synthesized)
cgctggctgcagcatgacccggcccggcggccgcgcgccagccacgtgctctgccacattcgcttcccgctcatgcagtcgtccgagctggtggacagcgtgcagacgctggacatcatg

SEQ ID NO: 542338 - DNA, 120 bp, Artificial Sequence
  ENSG00000167487_7 (sequence is synthesized)
gtggaggacgtgctgtgccgccagtatctgctggaggccttcaactaccaggtgctgcccttccggcagcacgagatgcagtctccgcgcaccgccgtgcgctcggatgtgccctcgctc

SEQ ID NO: 542339 - DNA, 120 bp, Artificial Sequence
  ENSG00000167487_8 (sequence is synthesized)
gtcaccttcggcggcacgccctacaccgacagcgaccgctcggtcagcagcaaggtctaccagctgcctgagccgggagcccgccacttccgcgagctcacggagatggaggtaggctgc

SEQ ID NO: 542340 - DNA, 120 bp, Artificial Sequence
  ENSG00000167487_9 (sequence is synthesized)
agccacacgtgcgtggccgtgctggacaattttgtgtacgtggccggggggcagcacctgcagtaccgcagcggcgagggcgcagtggacgcctgctaccgctacgacccccacctgaat

SEQ ID NO: 542341 - DNA, 120 bp, Artificial Sequence
  ENSG00000167487_10 (sequence is synthesized)
cgctggctgcgcctgcaggccatgcaggaaagccgcatccagttccagctgaacgtgctgtgcggcatggtgtacgccacgggcggccgcaaccgagccggcagcctggcctccgtggag

SEQ ID NO: 542342 - DNA, 120 bp, Artificial Sequence
  ENSG00000167487_11 (sequence is synthesized)
cggtactgcccccggcgcaatgagtggggctacgcctgctcgctgaagcgccgtacctggggccatgctggggccgcctcagggggccgcctctacatctcgggtggctacgggatctca

SEQ ID NO: 542343 - DNA, 120 bp, Artificial Sequence
  ENSG00000167487_12 (sequence is synthesized)
gtggaggacaagaaggccctgcactgctacgaccccgtggccgaccagtgggagttcaaggcgcccatgagcgaaccccgcgtgctacacgccatggtgggtgccggcggccgcatctat

SEQ ID NO: 542344 - DNA, 120 bp, Artificial Sequence
  ENSG00000167487_13 (sequence is synthesized)
gccctcgggggccgcatggaccacgtggaccgctgcttcgacgtgctggctgtggagtactatgtgccggagacggaccagtggaccagcgtgagccccatgcgggccggccagtcagag

SEQ ID NO: 542345 - DNA, 120 bp, Artificial Sequence
  ENSG00000167487_14 (sequence is synthesized)
gccggctgctgcctgctggagaggaagatctacatcgtcgggggctacaactggcgtctcaacaacgtcacgggcatcgtacaggtgtacaacacggacaccgacgagtgggagcgggac

SEQ ID NO: 542346 - DNA, 120 bp, Artificial Sequence
  ENSG00000167487_15 (sequence is synthesized)
ctgcacttcccggagtccttcgcaggcatagcctgcgcccccgtcctgctgccccgggccgggaccaggaggtagcccccaagacccccgggaccctggcctgaccgcatgttgtctcca

SEQ ID NO: 542347 - DNA, 120 bp, Artificial Sequence
  ENSG00000167487_16 (sequence is synthesized)
agtggggcttggcgaatgcacgtctgcctgagaaccccagtgccccccttcgcccgggctgcccttgaggggcctgctgcgttgataagcccccctcccaggggtccctccctccctcct

SEQ ID NO: 542348 - DNA, 120 bp, Artificial Sequence
  ENSG00000167487_17 (sequence is synthesized)
tcccaaagcagatcctggctgcgagtccatccgagggagcctgccggcaaagcgtctgacatgtggtggcagcaaattcgtccccggggtggtttcctcgcctggcccccgagtccccac

SEQ ID NO: 542349 - DNA, 120 bp, Artificial Sequence
  ENSG00000167487_18 (sequence is synthesized)
gggtccctgtgcagctccatctcacttctctactgcctcccagccccacggtttcaggcattcagatgtgagctcatcaacattgaacccaaagtcggtggtatatgactcaccctcctt

SEQ ID NO: 542350 - DNA, 120 bp, Artificial Sequence
  ENSG00000167487_19 (sequence is synthesized)
ccaagtctcctgcgcgcgtgtttttaaaataaactcacccgaaacgtccgtaacacacggacctccaggagcagtgagaggtggcttagaagcccctggtttggggtgggtggaggagga

SEQ ID NO: 542351 - DNA, 120 bp, Artificial Sequence
  ENSG00000167487_20 (sequence is synthesized)
gggcacgtgtctgcctcccctggggtgccctccttcccccatcccaagctgctgaggggaggccctggtcatgcctcagttcctgccttcatctgctttccggaggaaaaaccatatcaa

SEQ ID NO: 542352 - DNA, 120 bp, Artificial Sequence
  ENSG00000167487_21 (sequence is synthesized)
ctcctagaaacgctccttaggggcttgggaccttccatttggcactgagcatcttgtggggccttaactggctgagacatcccggccctctacatttgccctgttggccaggcagtcccc

SEQ ID NO: 542353 - DNA, 120 bp, Artificial Sequence
  ENSG00000167487_22 (sequence is synthesized)
ttcccgcaattggagggcgacgctaacttcagaatcccatagtggcgcttgccgcaggtctggtggggtgtcttttttctcctccctcctttccacccctccgcgccctgccactccctg

SEQ ID NO: 542354 - DNA, 120 bp, Artificial Sequence
  ENSG00000167487_23 (sequence is synthesized)
gcctgccctgtttttgggtcaacattgctacggagccagcagtgaggcctttcccttcaagggctctgtggtatctctggccacatttgttctaatgtctgaacctctaaatcttttctt

SEQ ID NO: 542355 - DNA, 120 bp, Artificial Sequence
  ENSG00000167487_24 (sequence is synthesized)
tttgattggttttactgtttttaagaagccagcactgctgtctcatagatgggatttgtactcttggggcaacttaaagtgtctctctcgctgctaacagacgattgatgtcttgtctct

SEQ ID NO: 542356 - DNA, 120 bp, Artificial Sequence
  ENSG00000167487_25 (sequence is synthesized)
gtgacccactcaccatgtaaagaattaacctcctatcttagcagacatcgtctcctaatatttccctttatttaataaaaatgttatggtgaagagatggagccggcccagcactgagct

SEQ ID NO: 542357 - DNA, 120 bp, Artificial Sequence
  ENSG00000167487_26 (sequence is synthesized)
tgtgcggcttgggtctgattggtcacagattcctcgtgtgtcctccgcgtgtctgggggctcctctcccccgcctcaaccttttccagcctttcagaggagtcggcagtgggctgggctt

SEQ ID NO: 542358 - DNA, 120 bp, Artificial Sequence
  ENSG00000167487_27 (sequence is synthesized)
gcagtgggctgggctttggctcaggggcgcagaggcagcaggaagcgtggccaggactttcaccctggcgttttttgttgttggtttttttgtttttttgagacggagcctcgctctgtc

SEQ ID NO: 542359 - DNA, 120 bp, Artificial Sequence
  ENSG00000167487_28 (sequence is synthesized)
catgcccggaccaaccttggcactttggaagagccttcagccccctattctcatcatggccggccaaactatgaactgggctgcccagagcaggccacttatcagttgcaggttagcaga

SEQ ID NO: 542360 - DNA, 120 bp, Artificial Sequence
  ENSG00000167487_29 (sequence is synthesized)
gaaagcctgatgttcccggacggccttcccagaagggaggccctgggatatcacacacacatggatctccataagttgctgtgcctgcatgcctggcgctcctgtgtggcagccatcggg

SEQ ID NO: 542361 - DNA, 120 bp, Artificial Sequence
  ENSG00000167487_30 (sequence is synthesized)
gctggggtaacactagaggctgagggggtgggcagtgctaaaataggaacatggttgggaacctaaaagaagcccacactgtcaggggcatcgagacaaaagccgagttccctggggact

SEQ ID NO: 542362 - DNA, 120 bp, Artificial Sequence
  ENSG00000167487_31 (sequence is synthesized)
taccagaacattccagccccacccccgacctgagctcccccaaagagaacccttccccactggaggcatggccccttcaggggagcagtgagaagctttgccagctgcaagtcccctgga

SEQ ID NO: 542363 - DNA, 120 bp, Artificial Sequence
  ENSG00000167487_32 (sequence is synthesized)
tcagctcacacctcagaacatcttgtccccagtgagctggcaggggcgccggcccagggcggggggcgctgctgtatctaaccggatcgattgtgcataaccgtctaggccggttcgtgg

SEQ ID NO: 542364 - DNA, 120 bp, Artificial Sequence
  ENSG00000167487_33 (sequence is synthesized)
aatgttcgtggggccccctgcccctccctcagcctccccccgcatccccccaagaaaggaaaattatttttcgtattgtaaactttaaacatgaaaaagctgtttttaatttagcagaaa

SEQ ID NO: 542365 - DNA, 120 bp, Artificial Sequence
  ENSG00000167487_34 (sequence is synthesized)
actcgaacgcgcgacggcggggggaagatggcggagtccggcggtagcagcggtggtgctggtggcggcggcgctttcggcgcgggcccgggccccgagcgcccgaacagaaccgttctg

SEQ ID NO: 542366 - DNA, 84 bp, Artificial Sequence
  ENSG00000167487_35 (sequence is synthesized)
agaggcctttcctgcacacaaggtcgtcctggctgcctgcagcgactacttcaggctggagtgcagtgccaggggcttcccaaa

SEQ ID NO: 542367 - DNA, 120 bp, Artificial Sequence
  ENSG00000167487_36 (sequence is synthesized)
ttgcatgtttttaatgagcattccgcctactttcctcttgctggctgtgccctgtgttctgtgtccccaggctactgttccccaggccagatcattcctggctggccaaaacacccctca

SEQ ID NO: 542368 - DNA, 120 bp, Artificial Sequence
  ENSG00000167491_0 (sequence is synthesized)
gtgcataccaagcccatactgtttgctctacactgaaaatgaagatgaatggtgaaaaaaagtttctgccattgagagcttaacattgagttgcagtgagagatgaagctcctgagtggc

SEQ ID NO: 542369 - DNA, 120 bp, Artificial Sequence
  ENSG00000167491_1 (sequence is synthesized)
acggagattgttgccagggctctggtgagttcagaatgaccgaagaagcatgccgaacacggagtcagaaacgagcgcttgaacgggacccaacagaggacgatgtggagagcaagaaaa

SEQ ID NO: 542370 - DNA, 120 bp, Artificial Sequence
  ENSG00000167491_2 (sequence is synthesized)
taaaaatggagagaggattgttggcttcagatttaaacactgacggagacatgagggtgacacctgagccgggagcaggtccaacccaaggattgctgagggcaacagaggccacggcca

SEQ ID NO: 542371 - DNA, 120 bp, Artificial Sequence
  ENSG00000167491_3 (sequence is synthesized)
tggccatgggcagaggcgaagggctggtgggcgatgggcccgtggacatgcgcacctcacacagtgacatgaagtccgagaggagacccccctcacctgacgtgattgtgctctccgaca

SEQ ID NO: 542372 - DNA, 120 bp, Artificial Sequence
  ENSG00000167491_4 (sequence is synthesized)
acgagcagccctcgagcccgagagtgaatgggctgaccacggtggccttgaaggagactagcaccgaggccctcatgaaaagcagtcctgaagaacgagaaaggatgatcaagcagctga

SEQ ID NO: 542373 - DNA, 120 bp, Artificial Sequence
  ENSG00000167491_5 (sequence is synthesized)
aggaagaattgaggttagaagaagcaaaactcgtgttgttgaaaaagttgcggcagagtcaaatacaaaaggaagccaccgcccagaagcccacaggttctgttgggagcaccgtgacca

SEQ ID NO: 542374 - DNA, 120 bp, Artificial Sequence
  ENSG00000167491_6 (sequence is synthesized)
cccctcccccgcttgttcggggcactcagaacattcctgctggcaagccatcactccagacctcttcagctcggatgcccggcagtgtcatacccccgcccctggtccgaggtgggcagc

SEQ ID NO: 542375 - DNA, 120 bp, Artificial Sequence
  ENSG00000167491_7 (sequence is synthesized)
aggcgtcctcgaagctggggccacaggcgagctcacaggtcgtcatgcccccactcgtcaggggggctcagcaaatccacagcattaggcaacattccagcacagggccaccgcccctcc

SEQ ID NO: 542376 - DNA, 120 bp, Artificial Sequence
  ENSG00000167491_8 (sequence is synthesized)
tcctggccccccgggcgtcggtgcccagtgtgcagattcagggacagaggatcatccagcagggcctcatccgcgtcgccaatgttcccaacaccagcctgctcgtcaacatcccacagc

SEQ ID NO: 542377 - DNA, 120 bp, Artificial Sequence
  ENSG00000167491_9 (sequence is synthesized)
ccaccccagcatcactgaaggggacaacagccacctccgctcaggccaactccacccccactagtgtggcctctgtggtcacctctgccgagtctccagcaagccgacaggcggccgcca

SEQ ID NO: 542378 - DNA, 120 bp, Artificial Sequence
  ENSG00000167491_10 (sequence is synthesized)
agctggcgctgcgcaaacagctggagaagacgctactcgagatccccccacccaagcccccagccccagagatgaacttcctgcccagcgccgccaacaacgagttcatctacctggtcg

SEQ ID NO: 542379 - DNA, 120 bp, Artificial Sequence
  ENSG00000167491_11 (sequence is synthesized)
gcctggaggaggtggtgcagaacctactggagacacaaggcaggatgtcggccgccactgtgctgtcccgggagccctacatgtgtgcacagtgcaagacggacttcacgtgccgctggc

SEQ ID NO: 542380 - DNA, 120 bp, Artificial Sequence
  ENSG00000167491_12 (sequence is synthesized)
gggaggagaagagcggcgccatcatgtgtgagaactgcatgacaaccaaccagaagaaggcgctcaaggtggagcacaccagccggctgaaggccgcctttgtgaaggcgctgcagcagg

SEQ ID NO: 542381 - DNA, 120 bp, Artificial Sequence
  ENSG00000167491_13 (sequence is synthesized)
aacaggagattgagcagcggctcctgcagcagggcacggcccctgcacaggccaaggccgagcccaccgctgccccacaccccgtgctgaagcaggtcataaaaccccggcgtaagttgg

SEQ ID NO: 542382 - DNA, 120 bp, Artificial Sequence
  ENSG00000167491_14 (sequence is synthesized)
cgttccgctcaggagaggcccgcgactggagtaacggggctgtgctacaggcctccagccagctgtcccggggttcggccacgacgccccgaggtgtcctgcacacgttcagtccgtcac

SEQ ID NO: 542383 - DNA, 120 bp, Artificial Sequence
  ENSG00000167491_15 (sequence is synthesized)
ccaaactgcagaactcagcctcggccacagccctggtcagcaggaccggcagacattctgagagaaccgtgagcgccggcaagggcagcgccacctccaactggaagaagacgcccctca

SEQ ID NO: 542384 - DNA, 120 bp, Artificial Sequence
  ENSG00000167491_16 (sequence is synthesized)
gcacaggcgggacccttgcgtttgtcagcccaagcctggcggtgcacaagagctcctcggccgtggaccgccagcgagagtacctcctggacatgatcccaccccgctccatcccccagt

SEQ ID NO: 542385 - DNA, 120 bp, Artificial Sequence
  ENSG00000167491_17 (sequence is synthesized)
cagccacgtggaaatagtgcgagccaggccccgtggaagacgggctccctcctcccccacctggcccctggtctagaaggacccactgcaccaccctccgctggctcgggaagacaccgt

SEQ ID NO: 542386 - DNA, 120 bp, Artificial Sequence
  ENSG00000167491_18 (sequence is synthesized)
gcccgccccaagagcaagcaccggccatgctgcagaggcaagacctcaattcttggctgcaaagtttcatcagggctagggggctggtgccgcctcataggcagacgaggatcatcgctg

SEQ ID NO: 542387 - DNA, 120 bp, Artificial Sequence
  ENSG00000167491_19 (sequence is synthesized)
ggggacctttcccgtgggctttcttcctttctctctttgcctttagtttgcccgacaccagcagaaaagtggaccttgggggctggttctgctcctggcccccttgttcagcccctgccg

SEQ ID NO: 542388 - DNA, 120 bp, Artificial Sequence
  ENSG00000167491_20 (sequence is synthesized)
gcacacgggcggctcaccctggacactgtgatgcgcatgggcaaggccagcgcccggggcttctgaaccgagcggggtgtttcatttttttgcttttccctgtcttaggctcccagtctt

SEQ ID NO: 542389 - DNA, 120 bp, Artificial Sequence
  ENSG00000167491_21 (sequence is synthesized)
tgactgccttcccatggcgatctataagttgaaagattttttttttttttaatcacctcatgatgatggagttaaaagtaaaccgtgcagaccctggggtccctgttgtacgctgcatca

SEQ ID NO: 542390 - DNA, 120 bp, Artificial Sequence
  ENSG00000167491_22 (sequence is synthesized)
cagccctcgctccagctgaacgcctccattgctgcttgttctggagacccccgcccccgcaccttccagacttagcagaagaacaaactgaagaacagacccagccagagaagcagggat

SEQ ID NO: 542391 - DNA, 120 bp, Artificial Sequence
  ENSG00000167491_23 (sequence is synthesized)
tccagaagctgcccattaagggagaaggagaggatccggtcggcagcagccctgagcagaaagctggaggggggactgtcgcggggtttttctgttgtggtttattttattaaatttttt

SEQ ID NO: 542392 - DNA, 120 bp, Artificial Sequence
  ENSG00000167491_24 (sequence is synthesized)
ccttttttctattcatttcgatggacgcaatcttaagccaccctggccttgctcctgggaggtgagcgtgcacaggtgtgtgcaggtcaggaggtgccgtccaggtgtgcggcgagccgc

SEQ ID NO: 542393 - DNA, 120 bp, Artificial Sequence
  ENSG00000167491_25 (sequence is synthesized)
tgcgcacagatgtcaggatttccgtttgggtctagtttagaacctgtccttaaacctaggggttgctgtcaggatttgctttcagactttttttttttttgtaattccctttagagtcta

SEQ ID NO: 542394 - DNA, 120 bp, Artificial Sequence
  ENSG00000167491_26 (sequence is synthesized)
caaaaatgtttttaaaaggatcaggtctgcttttagtttcatttttgtttctttcccgtcccactctttaaaaactggttccgtgaggaaaggcagaagccgttccgtgtctcttgcagg

SEQ ID NO: 542395 - DNA, 120 bp, Artificial Sequence
  ENSG00000167491_27 (sequence is synthesized)
ctgggccggcttcatgccagtgcgagggcgtcccgtgcccacgtacatacgtatgtctccatgagttctgggctccactggttccaattgagctccagccctggttttcctacccatgca

SEQ ID NO: 542396 - DNA, 120 bp, Artificial Sequence
  ENSG00000167491_28 (sequence is synthesized)
gttagggactttaatttaattttttttttgtagggccaccgccttcaaacacaactgctacaacattctaataaaggctcatttaacccccaggctcctgtcgtgtgaatatcctcagtc

SEQ ID NO: 542397 - DNA, 120 bp, Artificial Sequence
  ENSG00000167491_29 (sequence is synthesized)
tgtaggaaactttttttgacacagcatagaagacctagttttggaaaacattatctaattttttgttgtgcaaatccccaaatttctcactaatttttgtttttttgtgcataacttgga

SEQ ID NO: 542398 - DNA, 120 bp, Artificial Sequence
  ENSG00000167491_30 (sequence is synthesized)
tgggctgaaggaggtgaggacagattggggaagggtggctttcattccaagatccagggatttggggaaaaggaaggaatttgatgttttttggggtgggaggggagggtgtgtttttta

SEQ ID NO: 542399 - DNA, 120 bp, Artificial Sequence
  ENSG00000167491_31 (sequence is synthesized)
caccaaaaaaaaaaaaaaaaatcaagagtatgcaagcatttctattcctcgcatttttctgtgtgcctggcaaataaatacctgtctcctacgaccctgagctgttagccctctctgttc

SEQ ID NO: 542400 - DNA, 120 bp, Artificial Sequence
  ENSG00000167491_32 (sequence is synthesized)
catgacaggggccagatcttccagctcctcccagaaggagcacccaggctggcttcttcccactgaaagccctccccagcgaaccaacctcagttctatgcagtggctggggatcaggca

SEQ ID NO: 542401 - DNA, 120 bp, Artificial Sequence
  ENSG00000167491_33 (sequence is synthesized)
tccagaccgaagtcacctctgcctgctccagcttgggtcagctgggtctgaccagggggccagatccgagccgcacctgccggcccccagccccagctccagctcctgacctctcccagc

SEQ ID NO: 542402 - DNA, 120 bp, Artificial Sequence
  ENSG00000167491_34 (sequence is synthesized)
ctggcctggctgttcctccagggctgatggctgtcaacccatccttgtgagttcatatggactgctgcccctcgaaagggagagggtcggccccatgtccccagggagcattccatcagg

SEQ ID NO: 542403 - DNA, 120 bp, Artificial Sequence
  ENSG00000167491_35 (sequence is synthesized)
gacaacgtacatactgtgatgtaaactttttttttttccccccagggggcaaaagtgtgagatgccttaatctttccttcatttctgctgtctcgaacactctagcccattatttccttt

SEQ ID NO: 542404 - DNA, 120 bp, Artificial Sequence
  ENSG00000167491_36 (sequence is synthesized)
cagttccttgcagcataacctctacgataagccccaagcgggttgttgtattatgacgtttatgatgttccaggtgaaggcattattaagtacctctctgggtgtggggtttggacgcac

SEQ ID NO: 542405 - DNA, 120 bp, Artificial Sequence
  ENSG00000167491_37 (sequence is synthesized)
caggatagctattgattaatgttaagggtgttctacccacagcaaagcacaccctcttaaaccaggcactgcctgggtcctggtcccgagagccctaccaggatcaggttcctgcaagcc

SEQ ID NO: 542406 - DNA, 120 bp, Artificial Sequence
  ENSG00000167491_38 (sequence is synthesized)
gtcagaatgtgggagcccccagcccaactgattgtaactgtcccctgttacctgtgacatgaacctccaacagcacctggaaacggttccctctgtcagctgctctgtagacagggctgg

SEQ ID NO: 542407 - DNA, 120 bp, Artificial Sequence
  ENSG00000167491_39 (sequence is synthesized)
ggagatctcagagttcacacctcgcctgttgtaggggaggttgggggtagggtttggaatggccaagtgcccttggaacctcccacagctatggccgtcctgacctcatcccaggaactc

SEQ ID NO: 542408 - DNA, 120 bp, Artificial Sequence
  ENSG00000167491_40 (sequence is synthesized)
tacggtgaccaggaaccacccctctgacgaggtctgtagcggcccttctcagagtggaacagcccacagtgctagttgtgcctggtcttacctgtactccacggacctcggtgaagcaaa

SEQ ID NO: 542409 - DNA, 120 bp, Artificial Sequence
  ENSG00000167491_41 (sequence is synthesized)
agcttcagggcagagggaatgaggcaacccagtggcagccccgctgggccccgtggctcctgctctcctattggacgtagaggcaggggagagacttctctatacaaatattctcatcac

SEQ ID NO: 542410 - DNA, 120 bp, Artificial Sequence
  ENSG00000167491_42 (sequence is synthesized)
agaagggatgatccttgctgctctgccgtagggtttttgatgctgagctatgctgcacatgacgttaacctaaagaacttggactgagcttttaaaaaaggacagcaaacaattttataa

SEQ ID NO: 542411 - DNA, 120 bp, Artificial Sequence
  ENSG00000167491_43 (sequence is synthesized)
tccttaaagtgtaatagacggttacactagtgcagggtattggggaggctctttgggtgtggaggctgtcacttgtatttattgtgactctaaatctttgatagtaaaacaaatgtaaaa

SEQ ID NO: 542412 - DNA, 120 bp, Artificial Sequence
  ENSG00000167491_44 (sequence is synthesized)
agaaatgtttgccaccagatgggaatagaagttccaataagcaggctggaatgggtggctatacgttgtatcacgaggaagttttagactctgaaggataataaatggatgatgtgtcaa

SEQ ID NO: 542413 - DNA, 120 bp, Artificial Sequence
  ENSG00000167491_45 (sequence is synthesized)
gggcaatttcagtgtgagactgagccgcgagactgagctgcggctccgagcgctgcgcggcggctcctcccgcccagggtcagcgccccggcgcgcgcacgcgcacccccgccgcccgag

SEQ ID NO: 542414 - DNA, 120 bp, Artificial Sequence
  ENSG00000167491_46 (sequence is synthesized)
gcgccgcccgcgcagtcggtcggtcggtcgtctgtcctgtcgccgctgccgccgccgccacagcggccgccgcgggcgccacctgagggagtcgcctccgcgggacgccacaagacctga

SEQ ID NO: 542415 - DNA, 81 bp, Artificial Sequence
  ENSG00000167491_47 (sequence is synthesized)
acaggcgggacatttttagtatttttagggttttaccatgttggccaggatggactcgatctcctgacctcatgatccacc

SEQ ID NO: 542416 - DNA, 86 bp, Artificial Sequence
  ENSG00000167491_48 (sequence is synthesized)
acccagcctcgaaggttggtcagcacattgtctcaagtagccttttgatgtcactgtggccatggccaactggtaggaccagcacc

SEQ ID NO: 542417 - DNA, 120 bp, Artificial Sequence
  ENSG00000167491_49 (sequence is synthesized)
ggccgccgtcagcgagggcgccgagcaacttcggttggtcagcacattgtctcaagtagccttttgatgtcactgtggccatggccaactggtaggaccagcaccccataccccgaagcc

SEQ ID NO: 542418 - DNA, 120 bp, Artificial Sequence
  ENSG00000167491_50 (sequence is synthesized)
gcccacgcatccagtatgtgcagcacacctgctctgtgactgacactcttgcagaagtggggccacttcagggacatggacaaggtgttgtacctgctgtcacagagcctgttatctgtt

SEQ ID NO: 542419 - DNA, 120 bp, Artificial Sequence
  ENSG00000167491_51 (sequence is synthesized)
agagtgcggatattctatgggttttcttcagtccctggacaggtggggtcatcctaggacccctgcaatctttaggggatttagggagaaacagtgtccaggaacatctgaggtctctgt

SEQ ID NO: 542420 - DNA, 120 bp, Artificial Sequence
  ENSG00000167491_52 (sequence is synthesized)
atgtgtgtgctgcaggtacagggcagtggcacgttgatgggccaggcctcactctactcaaagtgtacctcactggcaaccaaagggttaaatgtgatccccagtccccactccccagag

SEQ ID NO: 542421 - DNA, 120 bp, Artificial Sequence
  ENSG00000167491_53 (sequence is synthesized)
gtgagcagggagtgaggagacctcccttccctgaaggggagaagctggggttaactcgagtcaccacagcatagggctagtcccaggccccgaccctgctcctggaacagtgcagtcacc

SEQ ID NO: 542422 - DNA, 80 bp, Artificial Sequence
  ENSG00000167491_54 (sequence is synthesized)
ccgggctccatgtgtgcggccgaggggcgcattatctggccggcggcgcgggcgggcgggcggaccggcgcagcgagcgc

SEQ ID NO: 542423 - DNA, 120 bp, Artificial Sequence
  ENSG00000167491_55 (sequence is synthesized)
cccctccgccgcccggccccgcgggcgaccccggaccagcagcccccgtaacctgcgcgctgccctagggcccggccgacccgcggcccgttcagaatgaccgaagaagcatgccgaaca

SEQ ID NO: 542424 - DNA, 120 bp, Artificial Sequence
  ENSG00000167491_56 (sequence is synthesized)
ctgggattacaagtgtgagccactgtacccagccttgatttgtttttttttttggatggaagagcacgttgctcagtaaaaatgcggctcttctccaggggtcctgcaactgaaagtgac

SEQ ID NO: 542425 - DNA, 120 bp, Artificial Sequence
  ENSG00000167508_0 (sequence is synthesized)
gcggtgggaccatggcctcggagaagccgctggcggcagtcacttgtacagcgccggtcaacatcgcggtcatcaagtactggggcaagcgcgatgaagagctggttctgcccatcaact

SEQ ID NO: 542426 - DNA, 120 bp, Artificial Sequence
  ENSG00000167508_1 (sequence is synthesized)
cctccctgagcgtcactctgcaccaggaccagttaaaaaccaccacaacagccgtcatcagcaaggacttcaccgaggaccggatttggctgaatggccgggaggaggatgtggggcagc

SEQ ID NO: 542427 - DNA, 120 bp, Artificial Sequence
  ENSG00000167508_2 (sequence is synthesized)
cgcggctgcaggcctgcctgcgggagatccgctgcctggcccggaagcggaggaactcacgggatggggacccgctgccctccagcctcagctgcaaggtgcacgtggcatcggtgaaca

SEQ ID NO: 542428 - DNA, 120 bp, Artificial Sequence
  ENSG00000167508_3 (sequence is synthesized)
acttccccacggctgcgggcctggcctcctcagcggcgggctatgcctgcctagcctacaccctggcccgtgtctacggcgtggagagtgacctctcagaagtggctcgccggggctcag

SEQ ID NO: 542429 - DNA, 120 bp, Artificial Sequence
  ENSG00000167508_4 (sequence is synthesized)
gcagcgcctgccggagcctgtatgggggctttgtggagtggcagatgggagagcaggccgacgggaaggacagcatcgctcggcaagtggcccccgagtcacactggcctgaactccgcg

SEQ ID NO: 542430 - DNA, 120 bp, Artificial Sequence
  ENSG00000167508_5 (sequence is synthesized)
tgctcatccttgtggtgagcgctgagaagaagctgacaggcagtaccgtgggcatgcgggccagtgtggagaccagccccctgcttcggttccgggccgagtccgtggtgcccgcgcgca

SEQ ID NO: 542431 - DNA, 120 bp, Artificial Sequence
  ENSG00000167508_6 (sequence is synthesized)
tggcggagatggcccgctgcatccgggagcgagacttccccagcttcgcccagctgaccatgaaggacagcaaccagttccacgccacctgcctcgacaccttcccgcccatctcttacc

SEQ ID NO: 542432 - DNA, 120 bp, Artificial Sequence
  ENSG00000167508_7 (sequence is synthesized)
gacactgtggctgagtttgtggctgctgtgtggcacggctttcccccaggctcgaatggagacacgtttctgaaggggctgcaggtgaggccggcccctctctcagctgagcttcaggct

SEQ ID NO: 542433 - DNA, 120 bp, Artificial Sequence
  ENSG00000167508_8 (sequence is synthesized)
gcgctggccatggagccgacccccggtggggtcaaatacatcattgtcactcaggtggggccagggcctcaaatcctggatgacccctgcgcccacctcctgggtcctgacggcctgccg

SEQ ID NO: 542434 - DNA, 120 bp, Artificial Sequence
  ENSG00000167508_9 (sequence is synthesized)
aagccagctgcctgactgcctcagcagggaccgcatgccgcttggagaaggggtggcctcgccggagctagggagcggatgtggtgggctggccggactcctgggacatgtgggtggtgg

SEQ ID NO: 542435 - DNA, 120 bp, Artificial Sequence
  ENSG00000167508_10 (sequence is synthesized)
cttgaccccgggcccatgggcagcttgctgtggggcagtgcagggagtcctgcggccgcccaggtgtcaggagaggtccccgccgagtgcttcagctgccctaagctgcaccagcgcttt

SEQ ID NO: 542436 - DNA, 120 bp, Artificial Sequence
  ENSG00000167508_11 (sequence is synthesized)
gccaagatgggatggggagggggtatgagaactggcagagcctcggtgcagcagggctgaagggctttctcaccccagctctggctatgcccagttctctgagaaaggagctcagtgggg

SEQ ID NO: 542437 - DNA, 120 bp, Artificial Sequence
  ENSG00000167508_12 (sequence is synthesized)
aggtggtccctccagcggaccagggaaggggtcaccgtgctgggagcagcctccttgggcctcaggaaaccaccaagtgcctcggatggtggctgcccacggcgcttctgctgagaccct

SEQ ID NO: 542438 - DNA, 120 bp, Artificial Sequence
  ENSG00000167508_13 (sequence is synthesized)
gcccccggcccaggtgtctcggagggtggctgcccacggcctgggtgtggctggaatggtggcaggagtgggcaccagtgcggccccggtggccatggggaataaaccagcattgctgcc

SEQ ID NO: 542439 - DNA, 120 bp, Artificial Sequence
  ENSG00000167508_14 (sequence is synthesized)
aggcctgcctgcgggagagtgagctggggtccccataagcccatccctccctgttgtcagcagggtccgagcatccagaaagtgcttctgcctctgtgcccctcctgaggcagcaggcgg

SEQ ID NO: 542440 - DNA, 83 bp, Artificial Sequence
  ENSG00000167508_15 (sequence is synthesized)
aagccgctggcggcagtcacttgtacagcgccggtcaacatcgcggtcatcaagtactgaagctcctgacctcgtgatctgcc

SEQ ID NO: 542441 - DNA, 76 bp, Artificial Sequence
  ENSG00000167508_16 (sequence is synthesized)
aggcaagcgcgatgaagagctggttctgcccatcaactcctccctgagcgtcactctgcaccaggaccagttaaaa

SEQ ID NO: 542442 - DNA, 120 bp, Artificial Sequence
  ENSG00000167508_17 (sequence is synthesized)
gccagctccagggcagtggcccacctcaatgaccagctgggcttgggtcagtctggggttttcccgggtaagaaactctccacgaggagtctggcaggcagaggcctggtgttcagctgt

SEQ ID NO: 542443 - DNA, 120 bp, Artificial Sequence
  ENSG00000167508_18 (sequence is synthesized)
ccggtggcctctgtccctagtcagggctgctgccgggagcaggagcgaaggcgtccatccaggctttgcttggctcctggggtcagcgggggctgaaggaacagaagcgtggttgagtgc

SEQ ID NO: 542444 - DNA, 120 bp, Artificial Sequence
  ENSG00000167508_19 (sequence is synthesized)
tcaggaaccgctcccatgcggcgggcgccaccacccgctgggatctggaagttgcccctgcgtcacccctgctgtggccgggaggcctctgtggtcaggcaggtggcactgactcccacc

SEQ ID NO: 542445 - DNA, 82 bp, Artificial Sequence
  ENSG00000167508_20 (sequence is synthesized)
tggcctcggagaagccgctggcggcagtcacttgtacagcgccggtcaacatcgcggtcatcaagtactactgtcactgcga

SEQ ID NO: 542446 - DNA, 89 bp, Artificial Sequence
  ENSG00000167508_21 (sequence is synthesized)
ccgcgtttatcacccctggaactgtccgccatcctcagagacctcccctcgcacaaaaccgagcagatggtgtgcttagcgaagccgcc

SEQ ID NO: 542447 - DNA, 120 bp, Artificial Sequence
  ENSG00000167508_22 (sequence is synthesized)
caccacgcagcgctcccagggcaaacgtttcctttcgggctttctggaagtttgatttcacgtgctgtcccatggccgtgctgggcagaaaggggtttatcctggatgttcctggggcat

SEQ ID NO: 542448 - DNA, 120 bp, Artificial Sequence
  ENSG00000167508_23 (sequence is synthesized)
atgagcagtgagatgtgaggagttctcagagctgggctccttttgtttgggaaggtggaggggaggcaggccgcggtgggagcgatccgcacctgggcactcacggatgctggagtagaa

SEQ ID NO: 542449 - DNA, 120 bp, Artificial Sequence
  ENSG00000167508_24 (sequence is synthesized)
gtacagcgccggtcaacatcgcggtcatcaagtactggcctcgacagacggggaaactgaggctcagggaggggcgcggcggtggtcgggcggggccgcgcgctccttcgcgtgacaagc

SEQ ID NO: 542450 - DNA, 120 bp, Artificial Sequence
  ENSG00000167508_25 (sequence is synthesized)
cgcccggcgcctgcccattagcgattaccgaactatcgaaatcatcaatcatcgattcccatgaatcaagccgccaccacgactggctaatttttttgtgtttcccttaccaataaagct

SEQ ID NO: 542451 - DNA, 120 bp, Artificial Sequence
  ENSG00000167508_26 (sequence is synthesized)
gcggtgggaccatggcctcggagaagccgctggcggcagtcacttgtacagcgccggtcaacatcgcggtcatcaagtactggtcgcccggcgcctgcccattagcgattaccgaactat

SEQ ID NO: 542452 - DNA, 120 bp, Artificial Sequence
  ENSG00000167508_27 (sequence is synthesized)
gggccggtgaatgctggcctcaaaggctgatggcccagaagccctgtcatctggaaatccccatttgccgtggggtgtgggacgttcctggggcggtgagctgtcagggagcacagcgca

SEQ ID NO: 542453 - DNA, 120 bp, Artificial Sequence
  ENSG00000167508_28 (sequence is synthesized)
ggttcacaggcagacgtgtcaagtaccaggcacttggggtcacagctccactccagtgtggccctgagggcctagactgagctcttggagagcccaaggccgcctggcagaccagagggt

SEQ ID NO: 542454 - DNA, 120 bp, Artificial Sequence
  ENSG00000167508_29 (sequence is synthesized)
actttttcatcacccctaaaagaaacctgtccccacagcagccacctgccgtctccccctccctgagccctgacggccaggaatgcacttcccatctctggacttgcctgttgtagactg

SEQ ID NO: 542455 - DNA, 120 bp, Artificial Sequence
  ENSG00000167508_30 (sequence is synthesized)
acgtggcatcggtgaacaacttccccacggctgcgggcctggcctcctcagcggcgggctatgcctgcctaggggtgacgcttcctggcccacctgggctcctgcgccttccctgaacca

SEQ ID NO: 542456 - DNA, 86 bp, Artificial Sequence
  ENSG00000167508_31 (sequence is synthesized)
gaacattttcatcttccagttgcagctggcgtggggctctcgcctgtaatcccagtacttaagaggctgatgggggagaagcactg

SEQ ID NO: 542457 - DNA, 120 bp, Artificial Sequence
  ENSG00000167508_32 (sequence is synthesized)
agtgagacccccccccatctctacaaaaaataaaaaaatcttcccgttgctgtatgtggagcccctctagattgtcagtgatagaaaccacttcaaactggctcagccctaaaatagcga

SEQ ID NO: 542458 - DNA, 120 bp, Artificial Sequence
  ENSG00000167508_33 (sequence is synthesized)
tgattttgtggctcacgtaactgaggattccaatgggcacagctggttgcaggccccgctggacccagctctctgctggccccaggccacttgctggcagcttcccacccactgtcagag

SEQ ID NO: 542459 - DNA, 120 bp, Artificial Sequence
  ENSG00000167508_34 (sequence is synthesized)
cctgtccccccggtggtggtctcacaccatcttcacccctcaactccaggggtgacgcttcctggcccacctgggctcctgcgccttccctgaaccaccctcggtgaccagggtgggtga

SEQ ID NO: 542460 - DNA, 120 bp, Artificial Sequence
  ENSG00000167508_35 (sequence is synthesized)
ccagacctggaggtggggttgccctgctggagccctgtgggaggaggggagaaggtggctcccgtgctgggtgggcagggggcgcgtcttgtggagtccagctctgtcctggcatcggtc

SEQ ID NO: 542461 - DNA, 120 bp, Artificial Sequence
  ENSG00000167508_36 (sequence is synthesized)
cctgccccacacagccttaaaattccttcccaccctcaaagcccagcttgggtgtcctcgggggcctttctcccgccttccatggggcttcctgctctgccgcaggtaccttttgttgcc

SEQ ID NO: 542462 - DNA, 120 bp, Artificial Sequence
  ENSG00000167513_0 (sequence is synthesized)
ctcccttccttctttccttgctttcgccgcgcactccgccgccatggagcagcgccgcgtcaccgacttcttcgcgcgccgccgccccgggcccccccgcatcgcgccgcccaagctggc

SEQ ID NO: 542463 - DNA, 80 bp, Artificial Sequence
  ENSG00000167513_1 (sequence is synthesized)
aagctggcctgccgcacccccagccccgccaggcccgcactccgcgccccggcctccgctaccagtggcagccgcaagcg

SEQ ID NO: 542464 - DNA, 120 bp, Artificial Sequence
  ENSG00000167513_2 (sequence is synthesized)
ccgcaggagactgcggctgtcggtggacgaggtttccagccccagtacccccgaggccccagacatcccagcctgcccttctccgggccagaagataaagaaatccaccccggcagcagg

SEQ ID NO: 542465 - DNA, 120 bp, Artificial Sequence
  ENSG00000167513_3 (sequence is synthesized)
tcagccgccccacctgacatccgcgcaggaccaggacaccatctctgagcttgcgtcatgcctgcaacgggcccgggagctgggggcaagagtccgggcgctgaaggccagtgcccagga

SEQ ID NO: 542466 - DNA, 120 bp, Artificial Sequence
  ENSG00000167513_4 (sequence is synthesized)
tgctggggagtcctgcaccccagaggccgagggccgccctgaggagccatgtggcgagaaggcgcccgcctaccagcgcttccatgccctggcccagcccggcctgccgggactcgtgct

SEQ ID NO: 542467 - DNA, 120 bp, Artificial Sequence
  ENSG00000167513_5 (sequence is synthesized)
gccctacaagtaccaggtgctggcggagatgttccgcagcatggacaccatcgtgggcatgctccacaaccgctccgagacgcccacctttgccaaggtccagcggggcgtccaggacat

SEQ ID NO: 542468 - DNA, 120 bp, Artificial Sequence
  ENSG00000167513_6 (sequence is synthesized)
gatgcgtaggcgttttgaggagtgcaatgttggccagatcaaaaccgtgtacccggcctcctaccgcttccgccaggagcgcagtgtccccaccttcaaggatggcaccaggaggtcaga

SEQ ID NO: 542469 - DNA, 120 bp, Artificial Sequence
  ENSG00000167513_7 (sequence is synthesized)
ttaccagctcaccatcgagccactgctggagcaggaggctgacggagcagccccccagctcacggcctcgcgcctcctgcagcgacggcagatcttcagccagaagctggtggagcatgt

SEQ ID NO: 542470 - DNA, 120 bp, Artificial Sequence
  ENSG00000167513_8 (sequence is synthesized)
caaggagcaccacaaggccttcctggcctccctgagccccgccatggtggtgccggaggaccagctgacccgctggcacccgcgcttcaacgtggatgaagtacccgacatcgagccggc

SEQ ID NO: 542471 - DNA, 120 bp, Artificial Sequence
  ENSG00000167513_9 (sequence is synthesized)
cgcgctgccccagccacccgccacggagaagctcaccactgctcaggaggtgctggcccgggcccgcaacctgatttcacccaggatggagaaggccttgagtcaattggccctgcgctc

SEQ ID NO: 542472 - DNA, 120 bp, Artificial Sequence
  ENSG00000167513_10 (sequence is synthesized)
tgctgcgcccagcagccccgggtctcccaggccagcactgccggctaccccaccagccaccccgcctgcagcctctcccagtgctctgaagggggtgtcccaggatctgctggagcggat

SEQ ID NO: 542473 - DNA, 120 bp, Artificial Sequence
  ENSG00000167513_11 (sequence is synthesized)
gctggcacagatgacgcggtgcccggagcaggagcagcggctgcagcgcttagaacggctgcctgagctggcccgcgtgctgcggagcgtctttgtgtccgaacgcaagcctgcgctcag

SEQ ID NO: 542474 - DNA, 120 bp, Artificial Sequence
  ENSG00000167513_12 (sequence is synthesized)
catggaggtggcctgtgccaggatggtgggcagctgttgtactatcatgagccctggggaaatggagaagcacctgctgctcctctccgagctgctgccggactggctcagcctccaccg

SEQ ID NO: 542475 - DNA, 120 bp, Artificial Sequence
  ENSG00000167513_13 (sequence is synthesized)
catccgcaccgacacctacgtcaagctggacaaggccgcggacctcgcccacatcactgcacgcctggcccaccagacacgtgctgaggaggggctgtgagcctgggggccactgtggac

SEQ ID NO: 542476 - DNA, 120 bp, Artificial Sequence
  ENSG00000167513_14 (sequence is synthesized)
agacgtgggcttcagaagctcgctggcctgggcccaccagcattttcttttatgaacatgatacactttggccttcctttccccagcgcccctgagggccagaggcagatgtgggctgca

SEQ ID NO: 542477 - DNA, 120 bp, Artificial Sequence
  ENSG00000167513_15 (sequence is synthesized)
ggctgcacagcccgagggtctctggctgcgggcggtgggccccttcatggggctcacctggtggattcacattaaaccggtttctgtgggcacctctgtccttgctgctggtggggaagg

SEQ ID NO: 542478 - DNA, 120 bp, Artificial Sequence
  ENSG00000167513_16 (sequence is synthesized)
gaagccagatccagcaccccctggggggccatcgggagtgtggctgggggtgaagggggctctgtggcaatatggggttgggtagtgtgggtggcaggccatcccctctaatcttggaac

SEQ ID NO: 542479 - DNA, 120 bp, Artificial Sequence
  ENSG00000167513_17 (sequence is synthesized)
gtgtgggtggcaggccatcccctctaatcttggaacctctgaatatgggacctcccacagcaaagggtgacttttgtcattaagaaagactggggtgggtgtggtggctcacgcctgtaa

SEQ ID NO: 542480 - DNA, 68 bp, Artificial Sequence
  ENSG00000167513_18 (sequence is synthesized)
ggagaatggtgtgaacccaggaggcacagcttgcagtgagcgaagatcgcaccactgctcaagactgg

SEQ ID NO: 542481 - DNA, 120 bp, Artificial Sequence
  ENSG00000167513_19 (sequence is synthesized)
ctggagaggtgatcctgaattgtccagctacgccccatgtcatcacagggccttcatgacagggccagagccagccagctttgaagacgcggccctgccccgacacaggcagcctggaga

SEQ ID NO: 542482 - DNA, 120 bp, Artificial Sequence
  ENSG00000167513_20 (sequence is synthesized)
agctgggcaggacaagtaggacatccctggagcctccagaagggactggcctctgcccacaccttgacttcagtatttctgacctcctaaactctaataaagtcatgcttacagccacta

SEQ ID NO: 542483 - DNA, 120 bp, Artificial Sequence
  ENSG00000167515_0 (sequence is synthesized)
gctttggaggccgcgtgaccagcggcgggtcacgtgacgcggtgcctggcgccgagcctcccaagatggcggtgtgcatcgcggtgattgccaaggagaattaccccctctacattcgca

SEQ ID NO: 542484 - DNA, 120 bp, Artificial Sequence
  ENSG00000167515_1 (sequence is synthesized)
gcacccctacggagaacgagctgaagttccactacatggtgcacacatctctggacgtggtggatgagaagatctccgcaatggggaaggccctggtcgaccagagggagctgtacctgg

SEQ ID NO: 542485 - DNA, 120 bp, Artificial Sequence
  ENSG00000167515_2 (sequence is synthesized)
gcctgctctaccccacggaggactacaaggtatacggctacgtcaccaactccaaggtgaagtttgtcatggtggtagattcctccaacacagcccttcgagacaacgaaattcgcagca

SEQ ID NO: 542486 - DNA, 120 bp, Artificial Sequence
  ENSG00000167515_3 (sequence is synthesized)
tgttccggaagctacacaactcctacacagacgtgatgtgcaaccccttctacaacccgggggaccgcatccagtccagcagggcctttgataacatggtgacgtcgatgatgatacagg

SEQ ID NO: 542487 - DNA, 120 bp, Artificial Sequence
  ENSG00000167515_4 (sequence is synthesized)
tgtgctgagtgagctgtgctgccagccatcgcagaggagcccgcgcacgactgtggtggggccgtcggtctgttctggttgcctcttcctgaatgggacgcctggggctttcagggcagg

SEQ ID NO: 542488 - DNA, 120 bp, Artificial Sequence
  ENSG00000167515_5 (sequence is synthesized)
cagctgtgcatgttctctcaactaaaggtcttgtgagaggagatttggctttttccttccgtgtcagccaaggatttaattaagaagaattcaactaaggacttttctggggtgtgggca

SEQ ID NO: 542489 - DNA, 120 bp, Artificial Sequence
  ENSG00000167515_6 (sequence is synthesized)
gaggtttgggatcagatggcgcaggtagcctgtcctcagttgtcccaaaggggcagaggcaggggtgcctggagccaagagttcctgagcctgcaggacctgtgaccatgtgggtcaccc

SEQ ID NO: 542490 - DNA, 120 bp, Artificial Sequence
  ENSG00000167515_7 (sequence is synthesized)
actggctgaacaggtgggctggtctggagggggtggcctcctgagcccagaaccagcctaggatctaggggcacaaggggagccggcgtggcttcccacaggggagggccctcctctttc

SEQ ID NO: 542491 - DNA, 120 bp, Artificial Sequence
  ENSG00000167515_8 (sequence is synthesized)
tggacttggcctccattctttgcatctggctcaatgtctggattccgcccggccttaaaaggagcccttgtgaaacctgggaagcctcgtggccccgcggcgttggctcagctgcagccc

SEQ ID NO: 542492 - DNA, 120 bp, Artificial Sequence
  ENSG00000167515_9 (sequence is synthesized)
gagggggttgggtgctgtgtcacttgatgacgtggctgactaccacccagggcagcggccgagcccatagtggcgtcagtgccgccggcgtccttggggtccagcggtcaaggctcagcc

SEQ ID NO: 542493 - DNA, 120 bp, Artificial Sequence
  ENSG00000167515_10 (sequence is synthesized)
cgctgaggggacccccccggagttggttccagcactggtccaggactggagagtttctcaaggaccttgaggaccccagaagcccttgcagcaggaaaggctgtaagggggggtcagcct

SEQ ID NO: 542494 - DNA, 120 bp, Artificial Sequence
  ENSG00000167515_11 (sequence is synthesized)
agggcaggacctagggaggggaactttcttgatacatatttgccttttcatcccatctagcaagcacagtgttaattttagaaattatagaagaaaaaatcagcaaggagtgtgggaaaa

SEQ ID NO: 542495 - DNA, 120 bp, Artificial Sequence
  ENSG00000167515_12 (sequence is synthesized)
ctgcatgccccaggcctcccccgccccagggtgaattggaagccctggaatgggccgaggcacaccaggcagctgatctgggtgcatgtgggccacagaccactctcacaaggttaaatc

SEQ ID NO: 542496 - DNA, 120 bp, Artificial Sequence
  ENSG00000167515_13 (sequence is synthesized)
tttaacaagagcctcatgtttgttaggagaaggtgggaccccagcccaagcacttccccattgcagcctggcatgaaatctttgccttttagtggggatcactcctgcccgagtcctggc

SEQ ID NO: 542497 - DNA, 120 bp, Artificial Sequence
  ENSG00000167515_14 (sequence is synthesized)
tgtggtggggactctgcaagttgctaacccagcgtccattctctttcctccgtactaacagaaccccggtgcctctgcccagttccaatagcgggcagacgagagccatgtcctgggctc

SEQ ID NO: 542498 - DNA, 120 bp, Artificial Sequence
  ENSG00000167515_15 (sequence is synthesized)
ccttgcagcccggggtgtgcagctgtggcgtggaggtgggtggtgctgggagagacttgcagggaagctcctgtgaaggggactcagctgccacatgcaggacccttcccctttgccttc

SEQ ID NO: 542499 - DNA, 120 bp, Artificial Sequence
  ENSG00000167515_16 (sequence is synthesized)
ttcctgcctggaacatggatgtgatggctggtgctgggacagctgtcctgagagcgtgaggaaagggtcacaccctaaggacagtggagcagaacacaggaaggaccctgggcctttgct

SEQ ID NO: 542500 - DNA, 120 bp, Artificial Sequence
  ENSG00000167515_17 (sequence is synthesized)
gacgcagaacgcgggaaggaccctgggcctttgctgacataccagccccagactacttaaattcagctttttttttaatgtgagaaaataaatgcacccctctctggtttaagccactga

SEQ ID NO: 542501 - DNA, 120 bp, Artificial Sequence
  ENSG00000167515_18 (sequence is synthesized)
ccacggaggactacaaggtgtatctttcagggcagggtgtgtgtcagggaggacctacagttgcaagatgtactttaggatcagataacttgaaaccttttagaagaaaaagaggtgaga

SEQ ID NO: 542502 - DNA, 120 bp, Artificial Sequence
  ENSG00000167515_19 (sequence is synthesized)
gtttttagccagccagggaattagggtagcttgaggtgaatgaaggcctgtaactcttctctttcattggaagagccatttgggaaaagcaaggctagaattccccgtagaatgttttgg

SEQ ID NO: 542503 - DNA, 120 bp, Artificial Sequence
  ENSG00000167515_20 (sequence is synthesized)
ggtttgcagaggaagtgggacacttctgctttgtacctgcaaggatttctttctgtgcttttcagggggagccaccacctttgagcaggggataatagtttcatttatttcattaggcct

SEQ ID NO: 542504 - DNA, 120 bp, Artificial Sequence
  ENSG00000167515_21 (sequence is synthesized)
tgcctcttatgtcactagacactcgtctagtcccttgggacaaatcacttgaggccatggaattcaaagaccttcccaaaagtcatcatgtagcctgtccatggtgacatttgctagtag

SEQ ID NO: 542505 - DNA, 120 bp, Artificial Sequence
  ENSG00000167515_22 (sequence is synthesized)
ccactattttacaaaataatgtggcctctagagaggggatccgccttgttcacgaagcctctggttttgcagttaactttccgggccaggcattgattcatgaagagggtgaggtgttcc

SEQ ID NO: 542506 - DNA, 120 bp, Artificial Sequence
  ENSG00000167515_23 (sequence is synthesized)
agacagacagactcggagtctaggtggttcggctcctggagtgtgaactgggtaaggcttggctgcctgctcttcgcttctcctgcaaacaccagacgtcgccctagcaaagtatttagg

SEQ ID NO: 542507 - DNA, 120 bp, Artificial Sequence
  ENSG00000167515_24 (sequence is synthesized)
aaccccttctacaacccgggggaccgcatccagtccaggtgggccctactttctgtgtcttgccaccttctttctgtaggacatgccttgccattttggttgccaaaatgcaaccatttg

SEQ ID NO: 542508 - DNA, 120 bp, Artificial Sequence
  ENSG00000167515_25 (sequence is synthesized)
gaaaataagggaggaaagatctttttaagctatgagcaccatccccctagggcagaggttttaaagccacaaagccccgtttctccacaccaactcttacacagatctccagcgcataaa

SEQ ID NO: 542509 - DNA, 120 bp, Artificial Sequence
  ENSG00000167515_26 (sequence is synthesized)
gtggatagagtgtgtgtggtgtggggagtagagcttgcccatttggcttcccaggtgtgcccagtgggtacctggggcacctgcaggactcagggccaagcacatgggcagtggctttca

SEQ ID NO: 542510 - DNA, 120 bp, Artificial Sequence
  ENSG00000167515_27 (sequence is synthesized)
gggatcacacgtccttttgtagctacctgatcttttatgttgaatttggaacagtcaggaacctggtttgcaggtgtcttccgaatagtccacaaagtaaacagatttaacttttgaaca

SEQ ID NO: 542511 - DNA, 120 bp, Artificial Sequence
  ENSG00000167515_28 (sequence is synthesized)
tcatgagggaaatgtggggtccatgcccacattccagacttgctttcagtgagtccccagttccaagacataattccctgtggttggcagggaagaggacgctgcagtgatccaaggcag

SEQ ID NO: 542512 - DNA, 120 bp, Artificial Sequence
  ENSG00000167515_29 (sequence is synthesized)
gcccctccctccaccaggacactgtcttggggccatcctggtcccagatgggagcaggcaggcgaatgtccacagtcttgcctcctgggctgcacagggccatccttgccacaccaccgc

SEQ ID NO: 542513 - DNA, 120 bp, Artificial Sequence
  ENSG00000167515_30 (sequence is synthesized)
tctgcctgcccatgctgctccctcctccaccccttcctggggccttgggaggctgcacagggaacttggaggcagcagatgggttctcagtgcccggtggggtgggactcctgtcctggc

SEQ ID NO: 542514 - DNA, 120 bp, Artificial Sequence
  ENSG00000167515_31 (sequence is synthesized)
ctctcagcggagttcacatttctggaccctggagaaggtcccgagcatcctgtggatggagccatgctgcccggcccgtctctgagcagaggggtggagggcctggctctcctctgagtg

SEQ ID NO: 542515 - DNA, 120 bp, Artificial Sequence
  ENSG00000167515_32 (sequence is synthesized)
cagcccagcatgggcatttcctgtgattcaaggttgccacatttctccaaagtgagggcccacagagggccctccaccggcagtccctgtgttacgagtgccttccctaaccagctgtgc

SEQ ID NO: 542516 - DNA, 120 bp, Artificial Sequence
  ENSG00000167515_33 (sequence is synthesized)
gccacgcccgagtgggtgttttgtttttcctttttgactttgttttgaaatgctgagaaactaaaaatctggcagtggctgtgtgtatgtggcaaggtcatggtttgctgggtctttttc

SEQ ID NO: 542517 - DNA, 120 bp, Artificial Sequence
  ENSG00000167515_34 (sequence is synthesized)
gtgcctggcgccgagcctcccaagatggcggtgtgcatcgcggtgattgccaaggaggtgcgtacgcgcggcgtggggcgtccgggctcgcaccatcctcggctctccgctttctttcta

SEQ ID NO: 542518 - DNA, 120 bp, Artificial Sequence
  ENSG00000167515_35 (sequence is synthesized)
cttcttccctgggcttagaaggcaccttaggaaatgggacctggaggaggccttcgccgagctccagcggtcaggggcttcgcggtggacgagccgccaggcagaccctgactgagaccc

SEQ ID NO: 542519 - DNA, 120 bp, Artificial Sequence
  ENSG00000167522_0 (sequence is synthesized)
ggccgcgggctgcatgggcagcgcccgcgccccgccgctgagccgtcgcggagccgcgcagccctcggagcacgaatatatacagccctgctctgggacacacctccattggatttaaaa

SEQ ID NO: 542520 - DNA, 120 bp, Artificial Sequence
  ENSG00000167522_1 (sequence is synthesized)
gacagtcctcgtcagcactgactttcagctatggaatcgcagacggttgatgatgaagcgccggccgtgtaaatgaagatcgggtgaggagcaggacgatgcccaagggtgggtgcccta

SEQ ID NO: 542521 - DNA, 120 bp, Artificial Sequence
  ENSG00000167522_2 (sequence is synthesized)
aagcaccacagcaggaagagcttcccctcagcagcgacatggtggagaagcagactgggaaaaaggataaagataaagtttctctaaccaagaccccaaaactggagcgtggcgatggcg

SEQ ID NO: 542522 - DNA, 120 bp, Artificial Sequence
  ENSG00000167522_3 (sequence is synthesized)
ggaaggaggtgagggagcgagccagcaagcggaagctgcccttcaccgcgggcgccaatggggagcagaaggactcggacacagagaagcagggccctgagcggaagaggattaagaagg

SEQ ID NO: 542523 - DNA, 120 bp, Artificial Sequence
  ENSG00000167522_4 (sequence is synthesized)
agcctgtcacccggaaggccgggctgctgtttggcatggggctgtctggaatccgagccggctaccccctctccgagcgccagcaggtggcccttctcatgcagatgacggccgaggagt

SEQ ID NO: 542524 - DNA, 120 bp, Artificial Sequence
  ENSG00000167522_5 (sequence is synthesized)
ctgccaacagcccagtggacacaacaccaaagcacccctcccagtctacagtgtgtcagaagggaacgcccaactctgcctcaaaaaccaaagataaagtgaacaagagaaacgagcgtg

SEQ ID NO: 542525 - DNA, 120 bp, Artificial Sequence
  ENSG00000167522_6 (sequence is synthesized)
ccatccgcggggacgcccggcgcatcaaagagctcatcagcgagggggcagacgtcaacgtcaaggacttcgcaggctggacggcgctgcacgaggcctgtaaccggggctactacgacg

SEQ ID NO: 542526 - DNA, 120 bp, Artificial Sequence
  ENSG00000167522_7 (sequence is synthesized)
tcgcgaagcagctgctggctgcaggtgcggaggtgaacaccaagggcctagatgacgacacgcctttgcacgacgctgccaacaacgggcactacaaggtggtgaagctgctgctgcggt

SEQ ID NO: 542527 - DNA, 120 bp, Artificial Sequence
  ENSG00000167522_8 (sequence is synthesized)
acggagggaacccgcagcagagcaacaggaaaggcgagacgccgctgaaagtggccaactcccccacgatggtgaacctcctgttaggcaaaggcacttacacttccagcgaggagagct

SEQ ID NO: 542528 - DNA, 120 bp, Artificial Sequence
  ENSG00000167522_9 (sequence is synthesized)
cgacggagagctcagaagaggaagacgcaccatccttcgcaccttccagttcagtcgacggcaacaacacggactccgagttcgaaaaaggctcaagcacaaggccaagaacccagagcc

SEQ ID NO: 542529 - DNA, 120 bp, Artificial Sequence
  ENSG00000167522_10 (sequence is synthesized)
acagaaggccacggcccccgtcaaggacgagtatgagtttgatgaggacgacgagcaggacagggttcctccggtggacgacaagcacctattgaaaaaggactacagaaaagaaacgaa

SEQ ID NO: 542530 - DNA, 120 bp, Artificial Sequence
  ENSG00000167522_11 (sequence is synthesized)
atccaatagttttatctctatacccaaaatggaggttaaaagttacactaaaaataacacgattgcaccaaagaaagcgtcccatcgtatcctgtcagacacgtcggacgaggaggacgc

SEQ ID NO: 542531 - DNA, 120 bp, Artificial Sequence
  ENSG00000167522_12 (sequence is synthesized)
gagtgtcaccgtggggacaggagagaagctgagactctcggcacatacgatattgcctggtagtaagacacgagagccttctaatgccaagcagcagaaggaaaaaaataaagtgaaaaa

SEQ ID NO: 542532 - DNA, 120 bp, Artificial Sequence
  ENSG00000167522_13 (sequence is synthesized)
cgcgccccgccgctgagccgtcgcggagccgcgcagccctcggagcacgcccgtgcagcctgccaggactcttccagacacgggatttgtcggtgaacaacgcagagctgatgcagacat

SEQ ID NO: 542533 - DNA, 120 bp, Artificial Sequence
  ENSG00000167522_14 (sequence is synthesized)
gtttactacactgtgtgttcactgatttcctacccttttagggtgattgccgcagattagccctgcaggttgtcagtccgtagggttaataagctagatatggatcgtgctaacgaggtg

SEQ ID NO: 542534 - DNA, 120 bp, Artificial Sequence
  ENSG00000167522_15 (sequence is synthesized)
ccacagtaaagagaatttaggggttctctgggccagcacctgcttccctaaactgcagccctcactacagggcagctccccacctggcttgtccccgcactgtagcacatcctcagggcg

SEQ ID NO: 542535 - DNA, 80 bp, Artificial Sequence
  ENSG00000167522_16 (sequence is synthesized)
acgccccatcagtagcgtccgcaccgggagccgcggctctcgcccgagccgtgggcgcgcccgaggggcgggctcgcctc

SEQ ID NO: 542536 - DNA, 120 bp, Artificial Sequence
  ENSG00000167522_17 (sequence is synthesized)
gcgacatggtggagaagcagactgggaaaaagatttttccaaaagaatcgtgatctcagtgacatatacgtggaagatggaaatggagcccacaactctgcagtgcatcctgatgccgcg

SEQ ID NO: 542537 - DNA, 120 bp, Artificial Sequence
  ENSG00000167522_18 (sequence is synthesized)
ctgacctgacggcttgtgcgtgtccctttggctgcaccagtgagcacagtggcaggcgtgtcagagaaagggccccttctgcagacggtctctcaccattgccgaccacggaatcccaga

SEQ ID NO: 542538 - DNA, 120 bp, Artificial Sequence
  ENSG00000167522_19 (sequence is synthesized)
accgctgagctgcctcgggaagaaccagcaggtgtctgcatcgttgagtgtgttctgatccaaaggataaagataaagtttctctaaccaagaccccaaaactggagcgtggcgatggcg

SEQ ID NO: 542539 - DNA, 120 bp, Artificial Sequence
  ENSG00000167522_20 (sequence is synthesized)
tagaaaactcacacacataagaactctgtactgattcaacaatagaacatgtcacacacgaactggaaactgattctgtgggcgacaagagtctatagtaaacgttatgacagattcttt

SEQ ID NO: 542540 - DNA, 120 bp, Artificial Sequence
  ENSG00000167522_21 (sequence is synthesized)
gaatgcgctaatctcagactggactaaagttgggattaaatttaatttgtacttgagttcagtgcattgctgttctgggcataggaaatccaggttgctggtgatgaacagctgaaaaga

SEQ ID NO: 542541 - DNA, 120 bp, Artificial Sequence
  ENSG00000167522_22 (sequence is synthesized)
gctgtgtcaccatggttgtctctgtcagtcatgtgaccacccttacccttgtaaaatcaagcaagggagagattattttctaatgtaaatgaaaataaaaaataaagcagcttgcagaaa

SEQ ID NO: 542542 - DNA, 120 bp, Artificial Sequence
  ENSG00000167522_23 (sequence is synthesized)
ttcacacatccggcctgtcctggcatctgggtggttctgtagctttgtttccccgtagctagccggttccatgatgtggggcacaggaaagcgagttttcgccttgcccaccctcaaggc

SEQ ID NO: 542543 - DNA, 120 bp, Artificial Sequence
  ENSG00000167522_24 (sequence is synthesized)
cgagctgtgccctctgtctgcccccagctttccccttctgggtcagcctggacggcctctcacaggtttcccagcaagtgccatctatgaaaggctcgtatccgctagccgtgtaggtct

SEQ ID NO: 542544 - DNA, 120 bp, Artificial Sequence
  ENSG00000167522_25 (sequence is synthesized)
ctcgtctggaatgaggtaacaccaagaggtgtggccagtgcacagaaccatagactcaagctttagaaagtggccattgtggccggcccaggagcagtgggcactgagaggtctcagcct

SEQ ID NO: 542545 - DNA, 120 bp, Artificial Sequence
  ENSG00000167522_26 (sequence is synthesized)
ctgtgggggtcgagagaggtcgtggtgtgcctgacagccccgtcctgccggaaagcaggggtgctgcctggagatgcggcgggtctcactgatgtcttcatcagagctccgtggagagcc

SEQ ID NO: 542546 - DNA, 120 bp, Artificial Sequence
  ENSG00000167522_27 (sequence is synthesized)
cctggttgcaggcaggacagcaaggctgaggggtcacacggggccacatctgctggtgcccgtcgtgctcctctgcagcaagcccagcctggccattgctggaggtcctggagcccacag

SEQ ID NO: 542547 - DNA, 120 bp, Artificial Sequence
  ENSG00000167522_28 (sequence is synthesized)
tgccttggccttaaagagctcacttgagaaacggcttgttccggtggggtggggggtggattgaagactctgagacgagcagggaactcagaacactgagtccctatttgatgttaaaat

SEQ ID NO: 542548 - DNA, 120 bp, Artificial Sequence
  ENSG00000167522_29 (sequence is synthesized)
atgaccgttaaacttctgggtaagataatgaatggcactatggtttatactgtttctgttttatgggctcttccagagacgtgaactggaaaaggctctgcagtgtctgggattcgctca

SEQ ID NO: 542549 - DNA, 120 bp, Artificial Sequence
  ENSG00000167522_30 (sequence is synthesized)
gtgctgcaggggagggcaggtgtgaggggaatggccctggagggtgatggggctggggcatccgatgcagctttatagttctgtaattaccacttttaaactttttattacgaaaaatgt

SEQ ID NO: 542550 - DNA, 120 bp, Artificial Sequence
  ENSG00000167522_31 (sequence is synthesized)
caaggaccctggaattacggtgaggtaggcaggataatggcccccaagatgcccgtgttgtgacccccagaccttgtgagtgcctcacatggggagattgtcctaggtcatcttgcaggc

SEQ ID NO: 542551 - DNA, 120 bp, Artificial Sequence
  ENSG00000167522_32 (sequence is synthesized)
ccagggcagccccatgggcccttaaagcttgagagcctttcctgctgagtctgagagatgccagaagcaggagaggttagaacccgaggagggccgcacctgcgctgctggccttagagg

SEQ ID NO: 542552 - DNA, 120 bp, Artificial Sequence
  ENSG00000167522_33 (sequence is synthesized)
agggccgaggagtgtggtggcccctaagcagctgggactggggacctccgtcccagccctgcaagaaactgaattctgccagcagcccccatgatggaggaaaggaaggatcctgccctg

SEQ ID NO: 542553 - DNA, 120 bp, Artificial Sequence
  ENSG00000167522_34 (sequence is synthesized)
gatcgtatcctgtgagcaggagattctgcgggttcactgccgggcggccaggaccatcgccaaccaggcagtgccattcagcgcctgcacgatgctgctggactccgaggtctacaacat

SEQ ID NO: 542554 - DNA, 120 bp, Artificial Sequence
  ENSG00000167522_35 (sequence is synthesized)
gcccctggagagccagggtgacgagaacaagtcagtgcgcgaccgtttcaacgcccgccagttcatctcctggctccaggacgtggatgacaagtatgaccgcatgaagacttgcctcct

SEQ ID NO: 542555 - DNA, 120 bp, Artificial Sequence
  ENSG00000167522_36 (sequence is synthesized)
catgcggcagcagcacgaggccgcggccctgaacgccgtgcagaggatggagtggcagctgaaggtgcaggaactggaccccgccgggcacaagtccctgtgcgtgaacgaggtgccctc

SEQ ID NO: 542556 - DNA, 120 bp, Artificial Sequence
  ENSG00000167522_37 (sequence is synthesized)
ctatggaatcgcaaatggggtaagggctctgcgtgtcttaatacatcattgccaccagaaggcccatttacaacttgcttagattttgttgagaagaagaggaagaggtgggcttgctct

SEQ ID NO: 542557 - DNA, 120 bp, Artificial Sequence
  ENSG00000167522_38 (sequence is synthesized)
gttgcccagattggcctcaaacttatggcctcaagtcatcttcctgcctcagcctcttgagtagctgtgattaaaggcacgtgctgtcgtgctcacctaaagaagtgttttgaaatccct

SEQ ID NO: 542558 - DNA, 120 bp, Artificial Sequence
  ENSG00000167522_39 (sequence is synthesized)
cccactgccctcagagcggcattctcccagcaggatgggcctcagtgctgcctgcagagccttctggtgatgcggatgttcctctgctgattctgtagcatcataaccaaagaagaaaac

SEQ ID NO: 542559 - DNA, 120 bp, Artificial Sequence
  ENSG00000167522_40 (sequence is synthesized)
cagcgggagaagagttctttatgacagcgacaatggggacagaggaacggtgactggaagattctttccttgcagtgaacgcacgtactgtgggtgctgtgccttcctcggggtgtatgt

SEQ ID NO: 542560 - DNA, 120 bp, Artificial Sequence
  ENSG00000167522_41 (sequence is synthesized)
aggtaggcaggcacacaccagtcagcttgcattctgtgggtgatactctctgaggtggactgggtcacccgggagcttccggggtccgtaaacggggaccactgatgaacgggtggtgca

SEQ ID NO: 542561 - DNA, 120 bp, Artificial Sequence
  ENSG00000167522_42 (sequence is synthesized)
ccgaacactgtggcacaagctcaggccgcagacggtgccggccccgaggacgacactgaggcctcccgtgccgccgccccagccgaaggccctcctggcggcatccagccggaagccgca

SEQ ID NO: 542562 - DNA, 120 bp, Artificial Sequence
  ENSG00000167522_43 (sequence is synthesized)
gaaccaaaacccacggccgaagccccgaaggccccccgagtggaggagatccctcagcgcatgaccaggaaccgggcgcagatgctcgcgaaccagagcaagcagggcccgcccccctcc

SEQ ID NO: 542563 - DNA, 120 bp, Artificial Sequence
  ENSG00000167522_44 (sequence is synthesized)
gagaaggagtgcgcccccacccctgccccggtcaccagggccaaggcccgcggctccgaggacgacgacgcccaggcccagcatccgcgcaaacgccgctttcagcgctccacccagcag

SEQ ID NO: 542564 - DNA, 120 bp, Artificial Sequence
  ENSG00000167522_45 (sequence is synthesized)
ctgcagcagcagctgaacacgtccacgcagcagacgcgggaggtgatccagcagacgctggccgccatcgtggacgccatcaagctggatgccatcgagccctaccacagcgacagggcc

SEQ ID NO: 542565 - DNA, 120 bp, Artificial Sequence
  ENSG00000167522_46 (sequence is synthesized)
aacccctacttcgaatacctgcagatcaggaagaagatcgaggagaagcgcaagatcctgtgctgtatcacgccgcaggcgccccagtgctacgccgagtacgtcacctacacgggctcc

SEQ ID NO: 542566 - DNA, 120 bp, Artificial Sequence
  ENSG00000167522_47 (sequence is synthesized)
tacctcctggacggcaagccgctcagcaagctccacatccccgtggtgagtgcggggcccgggagagccactgccttctctctctgggatgcgtctggggcccctagtcacggcttcctc

SEQ ID NO: 542567 - DNA, 120 bp, Artificial Sequence
  ENSG00000167522_48 (sequence is synthesized)
cagcccgtcttgtcccactcatggcccttgacctctctcgaccttctgccacctgaggagacacagccccacttctgctgtggaggcaaaagccggaagctgcccagctgttctgcagac

SEQ ID NO: 542568 - DNA, 120 bp, Artificial Sequence
  ENSG00000167522_49 (sequence is synthesized)
ccgaggtccttcctccagctggtccgtgccaggcctcggtctcctgacctccccctcaccctgggtgcaccccggtcccactcgtgtggggctcccccttcacgccgctcactctcccct

SEQ ID NO: 542569 - DNA, 120 bp, Artificial Sequence
  ENSG00000167522_50 (sequence is synthesized)
ctccactccccgtccaccaggacggcctcacgagagccaccccctgtgtctcctgcccctgccccgcccccttctcccttggacccgcgtgggttccctgagcctccatacctgcacgat

SEQ ID NO: 542570 - DNA, 120 bp, Artificial Sequence
  ENSG00000167522_51 (sequence is synthesized)
ccccagcctcaccttgttccacctgaccctgtcagcccagttccccaggcatcatccctacctctgcaggctcaggtgaaacatctcggaatcacccccactcccccagctccttgcgct

SEQ ID NO: 542571 - DNA, 120 bp, Artificial Sequence
  ENSG00000167522_52 (sequence is synthesized)
acgtctgggcccaaaatagatccctccaaatggggccctgctctgagcacattcccatgagggctgcctgccctgtgcactctctgccctgggccgcggggcctgactgggttcccacct

SEQ ID NO: 542572 - DNA, 120 bp, Artificial Sequence
  ENSG00000167522_53 (sequence is synthesized)
cctcctacccactggggtctttcccagcaggcacagggattcctcatgggggaggcagagcccacccgtctgtcctcggtgacggcctgagctgtgcacggcctcccctgccctcctgtt

SEQ ID NO: 542573 - DNA, 120 bp, Artificial Sequence
  ENSG00000167522_54 (sequence is synthesized)
ctcaggccccccagggtccatccagccccagcgtgtggcgttctggctcttccctggagtctcctcccagaccacgcgactccactcacactgtgcctagcggactgtgtggttgatgca

SEQ ID NO: 542574 - DNA, 120 bp, Artificial Sequence
  ENSG00000167522_55 (sequence is synthesized)
gccgtctcgcttgagtgtgttgtgttatgcccagaacaggcttgccgtcaccaatggccatttccttctggggattcctgggcactgaaactcgcaggtggcgtgaggtacagccagggg

SEQ ID NO: 542575 - DNA, 120 bp, Artificial Sequence
  ENSG00000167522_56 (sequence is synthesized)
ccctccacacgcgttggctctgtgggcccaggccgcctgaggcccctcgccgtgctggccctgacctggctcagctacccagcacccccctggtgaggatgacggggtctgctgagcttg

SEQ ID NO: 542576 - DNA, 120 bp, Artificial Sequence
  ENSG00000167522_57 (sequence is synthesized)
ccctgagggtgaggctgggtctgtgctgctggccgacatgtcagggacgttgtgcaggatccaggagcgggcgccctcgggccccaccctgccaagctctgagctctgctcccagggagc

SEQ ID NO: 542577 - DNA, 120 bp, Artificial Sequence
  ENSG00000167522_58 (sequence is synthesized)
acgaggggcactgcacccacggtgacctctgcggtctttcccttccccgcgagcctgaccccagccgtccccggggaggctcatccacagaagacagagacggcagttgggtcatgacat

SEQ ID NO: 542578 - DNA, 120 bp, Artificial Sequence
  ENSG00000167522_59 (sequence is synthesized)
tcagaaaaacctgccccaggatctctcctcagtaagaccttctgatcttctgaccttctgtgctttttgttgttttgttttctcgtttaatggatcataacactagtctgactgctgtag

SEQ ID NO: 542579 - DNA, 120 bp, Artificial Sequence
  ENSG00000167522_60 (sequence is synthesized)
ggactcggacacaggtaccagcccgcggcccctcctgcagtcagccctccacaggcagcccggagcagcccaggcagggcgtccctggcccccgcacctccggctttgcactgggacgca

SEQ ID NO: 542580 - DNA, 120 bp, Artificial Sequence
  ENSG00000167522_61 (sequence is synthesized)
aaatgagggagatttaggctgcacttaaaatgagtctaggcagggacagccaagtcaccttccagggaagagtctcccccgggagtgagacccggtgccttctgttgtgtggtcggctgt

SEQ ID NO: 542581 - DNA, 120 bp, Artificial Sequence
  ENSG00000167522_62 (sequence is synthesized)
gcagcatcgtgatgagaaggcacaggggctgcggaactgtctaaagaggggactcccagcttcaaggactgttttatgtgacagccctgccagggaggcctggggacatcatcacagccc

SEQ ID NO: 542582 - DNA, 120 bp, Artificial Sequence
  ENSG00000167522_63 (sequence is synthesized)
ccaccctcagacaacacccatgagtcagcagagcctgttggcctgactcctgagtgccgtgcagcccctggtagaagtcactgacacggctgagtaacggttcctcggccctcggctggc

SEQ ID NO: 542583 - DNA, 120 bp, Artificial Sequence
  ENSG00000167522_64 (sequence is synthesized)
ccatgggccgaagctgcctgccctctgcacgtggatgtttctttggaacaaggggaaaaattatgattttcttattttgctttgacctgtgaatgacaccctggtctctggtgcctgggg

SEQ ID NO: 542584 - DNA, 120 bp, Artificial Sequence
  ENSG00000167522_65 (sequence is synthesized)
tgtgctctctgcagtgctgccaggcacatgctggttccttcagcgttaggtgcttggcaccttcagtcttttcctgacgtcatgtttgttcctggtgcctcagataggagacggctgttc

SEQ ID NO: 542585 - DNA, 120 bp, Artificial Sequence
  ENSG00000167522_66 (sequence is synthesized)
tgacggctcctgcttccccattcctggagggaagacagacttagccactggtatctgtgggacttcttggaactctgaatgccagaccttgcccagtgctagaggcgacaagtgtgtgaa

SEQ ID NO: 542586 - DNA, 120 bp, Artificial Sequence
  ENSG00000167522_67 (sequence is synthesized)
gttgaagaggcttctcccacccgctcagctgcagtggacccgagcgggcagagagagcagagtgcagcaggggccaggctgtgctcgcaggcggggcaggtgcctggagagcatggcgcc

SEQ ID NO: 542587 - DNA, 120 bp, Artificial Sequence
  ENSG00000167522_68 (sequence is synthesized)
cctgggagcctctggccaggaagggcatgtgcactgcagtgtgccgtggaccagtggcctcagctcagtgtgttgacgagggtcccaaggcactcacgtgtgtggggatgttagcaacac

SEQ ID NO: 542588 - DNA, 81 bp, Artificial Sequence
  ENSG00000167522_69 (sequence is synthesized)
atacacaccccacacagggcaggcacctcacacagggcacagaccccatgcaccacacacagggcaggcaccccacacagg

SEQ ID NO: 542589 - DNA, 83 bp, Artificial Sequence
  ENSG00000167522_70 (sequence is synthesized)
acacagggcacagaccccatgcaccaacgcaccccacacagggtacagaccccacacaccccacacagggcaggcaccccaca

SEQ ID NO: 542590 - DNA, 78 bp, Artificial Sequence
  ENSG00000167522_71 (sequence is synthesized)
aggcaccccacacagggcacagaccccacgcagcccacacagggcaggtaccccacacagggaggcacagaccccacg

SEQ ID NO: 542591 - DNA, 85 bp, Artificial Sequence
  ENSG00000167522_72 (sequence is synthesized)
ccccacacagggcaggcatcccacacagggtcacacagggcacagaccccatgcatcccacacagggcaggcaccccacacaggg

SEQ ID NO: 542592 - DNA, 120 bp, Artificial Sequence
  ENSG00000167522_73 (sequence is synthesized)
gaccccacgcaccccacacggggcaggcagctcacacagggcacagaccccaagcaccccacacagggcacagaccccacgcaccccacacagggcacagaccccacacaccccacacag

SEQ ID NO: 542593 - DNA, 81 bp, Artificial Sequence
  ENSG00000167522_74 (sequence is synthesized)
gcaccccacacagggcacagaccccacacaccccacacagggcaggcacctcacacagggcacagaccccatgcatacaca

SEQ ID NO: 542594 - DNA, 120 bp, Artificial Sequence
  ENSG00000167522_75 (sequence is synthesized)
acgcaccccacacagggcagggatcccacgcagggcacagatcccacgcagggcagggccagcccaaggccaggcccctcccctgtagatctcctcccaggcaggaccagagccacagtc

SEQ ID NO: 542595 - DNA, 120 bp, Artificial Sequence
  ENSG00000167522_76 (sequence is synthesized)
acttccacactatctccttccctagaaacctctgcagactcttcctcctctcctcgatacacaggggcccctgccacagcctgactctctgccacctcgtgagtctctggaaagcagggt

SEQ ID NO: 542596 - DNA, 120 bp, Artificial Sequence
  ENSG00000167522_77 (sequence is synthesized)
cggcctctgaatacagaggacttgggtcctgccggaggatgcttggccagtgggtgctggcacgtgagcagcccccggggagtcagagtggggctgcagcgaaggccgtggtggtcgagg

SEQ ID NO: 542597 - DNA, 120 bp, Artificial Sequence
  ENSG00000167522_78 (sequence is synthesized)
tgagggtggtggccaggtcttgttgccgcagtgaggattctggggttaccctaagagccaccacattcaggcactcaagaaaaagcacgtcaaaataaaatattttcacatgattaagaa

SEQ ID NO: 542598 - DNA, 120 bp, Artificial Sequence
  ENSG00000167522_79 (sequence is synthesized)
gtgcacggctcgaaggagcagctgggtggacggcggtgctggcgtggctggagagggtggcctggctccctgttggggttgcccccggtggaaggcgtgtgttttggaattgagcttcct

SEQ ID NO: 542599 - DNA, 120 bp, Artificial Sequence
  ENSG00000167522_80 (sequence is synthesized)
aaagcaccacagcaggaagagcttcccctcagcagcgacatggtggagaagcagactgggaaaaaggaccgccggggtcctgcttgtcctggggcagccacgagggagccctcgtcagga

SEQ ID NO: 542600 - DNA, 78 bp, Artificial Sequence
  ENSG00000167522_81 (sequence is synthesized)
tcaccaagcgtgtagcagaccccacgcaccccacacaggtcaggcaccccacacagggcacagaccccacaacgcacc

SEQ ID NO: 542601 - DNA, 120 bp, Artificial Sequence
  ENSG00000167522_82 (sequence is synthesized)
gttctgctcctcggagtcggagagcgagtcctcagagagtggggaggatgacagggactctctggggagctctggctgcctcaaggggtccccgctggtgctgaaggacccctccctgtt

SEQ ID NO: 542602 - DNA, 120 bp, Artificial Sequence
  ENSG00000167522_83 (sequence is synthesized)
cagctccctctctgcctcctccacctcgtctcacgggagctctgccgcccagaagcagaaccccagccacacagaccagcacaccaagcactggcggacagacaattggaaaaccatttc

SEQ ID NO: 542603 - DNA, 120 bp, Artificial Sequence
  ENSG00000167522_84 (sequence is synthesized)
ttccccggcttggtcagaggtcagttctttatcagactccacaaggacgagactgacaagcgagtctgactactcctctgagggctccagtgtggaatcgctgaagccagtgaggaagag

SEQ ID NO: 542604 - DNA, 120 bp, Artificial Sequence
  ENSG00000167522_85 (sequence is synthesized)
gcaggagcacaggaagcgagcctccctgtcggagaagaagagccccttcctgtccagcgcggagggcgctgtccccaaactggacaaggaggggaaagttgtcaaaaaacataaaacaaa

SEQ ID NO: 542605 - DNA, 120 bp, Artificial Sequence
  ENSG00000167522_86 (sequence is synthesized)
acacaaacacaaaaacaaggagaagggacagtgttccatcagccaagagctgaagttgaaaagttttacttacgaatatgaggactccaagcagaagtcagataaggctatactgttaga

SEQ ID NO: 542606 - DNA, 120 bp, Artificial Sequence
  ENSG00000167522_87 (sequence is synthesized)
gaatgatctttccactgaaaacaagctaaaagtgttaaagcacgatcgcgaccactttaaaaaagaagagaaacttagcaaaatgaaattagaagaaaaagaatggctctttaaagatga

SEQ ID NO: 542607 - DNA, 120 bp, Artificial Sequence
  ENSG00000167522_88 (sequence is synthesized)
aaaatcactgaagagaatcaaagacacaaacaaagacatcagcaggtctttccgagaagagaaagaccgttcgaataaagcagaaaaggagagatcgctgaaggaaaagtctccgaaaga

SEQ ID NO: 542608 - DNA, 120 bp, Artificial Sequence
  ENSG00000167522_89 (sequence is synthesized)
agaaaaactgagactgtacaaagaggagagaaagaagaaatcaaaagaccggccctcaaaattagagaagaagaatgatttaaaagaggacaaaatttcaaaagagaaggagaagatttt

SEQ ID NO: 542609 - DNA, 120 bp, Artificial Sequence
  ENSG00000167522_90 (sequence is synthesized)
taaagaagataaagaaaaactcaaaaaagaaaaggtttatagggaagattctgcttttgacgaatattgtaacaaaaatcagtttctggagaatgaagacaccaaatttagcctttctga

SEQ ID NO: 542610 - DNA, 120 bp, Artificial Sequence
  ENSG00000167522_91 (sequence is synthesized)
cgatcagcgagatcggtggttttctgacttgtccgattcatcctttgatttcaaaggggaggacagctgggactcgccagtgacagactacagggacatgaagagcgactctgtggccaa

SEQ ID NO: 542611 - DNA, 120 bp, Artificial Sequence
  ENSG00000167522_92 (sequence is synthesized)
gctcatcttggagacggtgaaggaggacagcaaggagaggaggcgggacagccgggcccgggagaagcgagactacagagagcccttcttccgaaagaaggacagggactatttggataa

SEQ ID NO: 542612 - DNA, 120 bp, Artificial Sequence
  ENSG00000167522_93 (sequence is synthesized)
aaactctgagaagaggaaagagcagaccgaaaagcataaaagtgtccctggctacctttcggaaaaggacaagaagaggagagagtccgcagaggccgggcgggacagaaaggacgccct

SEQ ID NO: 542613 - DNA, 120 bp, Artificial Sequence
  ENSG00000167522_94 (sequence is synthesized)
ggagagctgcaaggagcgcagggacggcagggccaagcccgaggaggcgcaccgggaggagctgaaggagtgtggctgcgagagtggcttcaaggacaagtccgacggcgactttgggaa

SEQ ID NO: 542614 - DNA, 120 bp, Artificial Sequence
  ENSG00000167522_95 (sequence is synthesized)
gggcctggagccgtgggaacggcaccacccagcacgagagaaggagaagaaggatggccccgataaggaaaggaaggagaagacaaaaccagaaagatacaaagagaaatccagtgacaa

SEQ ID NO: 542615 - DNA, 120 bp, Artificial Sequence
  ENSG00000167522_96 (sequence is synthesized)
ggacaaaagtgagaaatcaatcctggaaaaatgtcagaaggacaaagaatttgataaatgttttaaagagaaaaaagataccaaggaaaaacataaagacacacatggcaaagacaaaga

SEQ ID NO: 542616 - DNA, 120 bp, Artificial Sequence
  ENSG00000167522_97 (sequence is synthesized)
aaggaaagcgtctctcgaccaagggaaagagaagaaggagaaggctttccctgggatcatctcagaagacttctctgaaaaaaaagatgacaagaaaggcaaagagaaaagctggtacat

SEQ ID NO: 542617 - DNA, 120 bp, Artificial Sequence
  ENSG00000167522_98 (sequence is synthesized)
cgcagacatcttcacagatgagagtgaggacgacagagacagctgcatggggagcgggttcaagatgggagaggccagcgacttgccgaggacggacggcctccaggagaaggaggaagg

SEQ ID NO: 542618 - DNA, 120 bp, Artificial Sequence
  ENSG00000167522_99 (sequence is synthesized)
acgggaggcctatgcctccgacagacacaggaagtcttctgacaagcagcaccctgagaggcagaaggacaaggagcccagagacaggagaaaggaccgaggggctgccgacgcggggag

SEQ ID NO: 542619 - DNA, 120 bp, Artificial Sequence
  ENSG00000167522_100 (sequence is synthesized)
agacaaaaaagagaaagtctttgaaaagcacaaggagaagaaggataaagagtccacagaaaagtacaaggacaggaaggacagagcctcagtggactccacgcaagataagaaaaataa

SEQ ID NO: 542620 - DNA, 120 bp, Artificial Sequence
  ENSG00000167522_101 (sequence is synthesized)
acagaagctccccgagaaggctgaaaagaagcacgctgccgaagacaaggctaaaagcaaacacaaagagaagtcggacaaagaacattccaaggagaggaagtcctcgagaagtgccga

SEQ ID NO: 542621 - DNA, 120 bp, Artificial Sequence
  ENSG00000167522_102 (sequence is synthesized)
cgcggaaaaaagcctgcttgaaaagttggaagaagaggctctccatgagtacagagaagactccaacgataaaatcagcgaggtctcctctgacagcttcacggaccgagggcaggagcc

SEQ ID NO: 542622 - DNA, 120 bp, Artificial Sequence
  ENSG00000167522_103 (sequence is synthesized)
gctgaaagagaaggagaggcacagacactcctcatcttcatccaagaagagccacgaccgagagcgagccaagaaagagaaggccgagaagaaagagaagggcgaagattacaaggaggg

SEQ ID NO: 542623 - DNA, 120 bp, Artificial Sequence
  ENSG00000167522_104 (sequence is synthesized)
cggtagcaggaaggactccggccagtacgaaaaggacttcctggaggcggatgcttacggagtttcttacaacatgaaagctgacatagaagatgagctagataaaaccattgaattgtt

SEQ ID NO: 542624 - DNA, 120 bp, Artificial Sequence
  ENSG00000167522_105 (sequence is synthesized)
ttctaccgaaaagaaagataaaaatgattccgagagagaaccttccaagaaaatagaaaaggaactaaagccttatggatctagtgccatcaacatcctaaaagagaagaagaagagaga

SEQ ID NO: 542625 - DNA, 120 bp, Artificial Sequence
  ENSG00000167522_106 (sequence is synthesized)
gaaacacagggagaaatggagagacgagaaggagaggcaccgggacaggcatgcggatgggctgctgcggcatcacagggacgagctcctgcggcatcacagggacgagcagaagcccgc

SEQ ID NO: 542626 - DNA, 120 bp, Artificial Sequence
  ENSG00000167522_107 (sequence is synthesized)
caccagggacaaggacagcccgccccgcgtgctcaaagacaagtccagggacgagggcccgaggctcggcgatgccaaactgaaggagaaattcaaggacggtgcagagaaagaaaaggg

SEQ ID NO: 542627 - DNA, 120 bp, Artificial Sequence
  ENSG00000167522_108 (sequence is synthesized)
cgacccagtgaagatgagcaacgggaatgataaggtagcgccatccaaagacccaggcaagaaagacgccaggcccagggagaagctcctgggggacggcgacctgatgatgaccagctt

SEQ ID NO: 542628 - DNA, 120 bp, Artificial Sequence
  ENSG00000167522_109 (sequence is synthesized)
cgagaggatgctgtcccagaaggacctggagatcgaggagcgccacaagcggcacaaggagaggatgaagcaaatggagaagctgaggcaccggtccggagaccccaagctcaaggagaa

SEQ ID NO: 542629 - DNA, 120 bp, Artificial Sequence
  ENSG00000167522_110 (sequence is synthesized)
ggcgaagccggcagacgacgggcggaagaagggtctggacattcctgctaagaaaccgccggggctggaccctccatttaaagacaaaaagctcaaagagtcgactcctattccacctgc

SEQ ID NO: 542630 - DNA, 120 bp, Artificial Sequence
  ENSG00000167522_111 (sequence is synthesized)
cgcggaaaataagctacacccagcatcaggtgcagactccaaagactggctggcaggccctcacatgaaagaggtcctgcctgcgtcccccaggcctgaccagagccggcccactggcgt

SEQ ID NO: 542631 - DNA, 120 bp, Artificial Sequence
  ENSG00000167522_112 (sequence is synthesized)
gcccacccctacgtcggtgctatcctgccccagctacgaggaggtgatgcacacgcccaggaccccgtcctgcagcgccgatgactacgcggacctcgtgttcgactgcgccgactcgca

SEQ ID NO: 542632 - DNA, 120 bp, Artificial Sequence
  ENSG00000167522_113 (sequence is synthesized)
gcactccacgcccgtgcccaccgctcccaccagcgcctgctccccctcctttttcgacaggttctccgtggcttcaagtgggctttcggaaaacgccagccaggctcctgccaggcctct

SEQ ID NO: 542633 - DNA, 120 bp, Artificial Sequence
  ENSG00000167522_114 (sequence is synthesized)
ctccacaaacctttaccgctcggtctctgtcgacattaggaggacccccgaggaagaattcagcgtcggagacaagctcttcaggcagcagagcgttcctgctgcctccagctacgactc

SEQ ID NO: 542634 - DNA, 120 bp, Artificial Sequence
  ENSG00000167522_115 (sequence is synthesized)
tcccatgccaccctcgatggaagacagggcgcccctgcccccggttcccgcggagaagtttgcctgcttgtcgccagggtactactccccagactatggcctcccgtcgcccaaagtcga

SEQ ID NO: 542635 - DNA, 120 bp, Artificial Sequence
  ENSG00000167522_116 (sequence is synthesized)
cgctttgcactgcccaccggctgccgttgtcactgtcaccccgtctccagagggcgtcttctcaagtttacaagcaaaaccttccccttcccccagagccgagctgctggttccttccct

SEQ ID NO: 542636 - DNA, 120 bp, Artificial Sequence
  ENSG00000167522_117 (sequence is synthesized)
cgaaggggcccttcccccggacctggacacctccgaggaccagcaggcgacggccgccatcatccccccggagcccagctacctggagccgctggacgagggtcccttcagcgccgtcat

SEQ ID NO: 542637 - DNA, 120 bp, Artificial Sequence
  ENSG00000167522_118 (sequence is synthesized)
caccgaggagcccgttgagtgggcccacccctccgagcaggcgcttgcctctagcctgatcgggggcacctctgaaaaccctgtgagctggcctgtgggctcggacctcctgctgaagtc

SEQ ID NO: 542638 - DNA, 120 bp, Artificial Sequence
  ENSG00000167522_119 (sequence is synthesized)
tccacagagattccccgagtccccaaagcgtttctgccccgcggaccccctccactctgccgccccagggcccttcagcgcctcggaggcgccgtaccccgcccctcccgcctctcctgc

SEQ ID NO: 542639 - DNA, 120 bp, Artificial Sequence
  ENSG00000167522_120 (sequence is synthesized)
cccgtacgctctgcccgtcgctgagccggggctggaggacgtcaaggacggagtggacgccgtccccgccgccatctccacctcagaggcggctccctacgcccctccctccgggctgga

SEQ ID NO: 542640 - DNA, 120 bp, Artificial Sequence
  ENSG00000167522_121 (sequence is synthesized)
gtccttcttcagcaactgcaagtcacttccggaagccccgctggacgtggcccccgagcccgcctgtgtagccgctgtggctcaggtggaggctctggggcccctggaaaatagcttcct

SEQ ID NO: 542641 - DNA, 120 bp, Artificial Sequence
  ENSG00000167522_122 (sequence is synthesized)
ggacggcagccgcggcctgtctcacctcggccaggtggagccggtgccctgggcggacgccttcgccggccccgaggacgacctggacctggggcccttctccctgccggagcttcccct

SEQ ID NO: 542642 - DNA, 120 bp, Artificial Sequence
  ENSG00000167522_123 (sequence is synthesized)
gcagactaaagatgccgcagatggtgaagcggaacccgtggaagaaagtcttgctcctccagaagagatgcctccaggggcccccggggtcataaacggtggggatgtttccaccgtagt

SEQ ID NO: 542643 - DNA, 120 bp, Artificial Sequence
  ENSG00000167522_124 (sequence is synthesized)
ggctgaggagccgccggcactgcctcctgaccaggcctccacccggctccctgcagagctcgagcctgagccctcaggggagccaaagctggacgtggctctagaagctgcggtggaggc

SEQ ID NO: 542644 - DNA, 120 bp, Artificial Sequence
  ENSG00000167522_125 (sequence is synthesized)
ggagacggtgccggaagagagggcccgtggggatccggactccagcgtggagcccgcgcccgttcccccagaacagcgcccactggggagcggagaccagggggctgaggctgaaggccc

SEQ ID NO: 542645 - DNA, 120 bp, Artificial Sequence
  ENSG00000167522_126 (sequence is synthesized)
atgacaccgcgggacggccgcaggacgcaggcgagggccgcacggctgcccaggactgctgctgagccccaggggcggaggagggagcgccctgtccacccgggcggggagagaccccga

SEQ ID NO: 542646 - DNA, 120 bp, Artificial Sequence
  ENSG00000167522_127 (sequence is synthesized)
gagagactgcacttggccacagcgcctccatcccttccagactggtccagacgtcggggaggtgaaacacgtctcttctctaccagctgccgcggcgggggcaaagcccccagagcctca

SEQ ID NO: 542647 - DNA, 120 bp, Artificial Sequence
  ENSG00000167522_128 (sequence is synthesized)
ctggccccggcgggatgaggagaccatgccgggcgcgcacacacggcagcttctgtttgaaaacggcgaccttcgggcccttttctccagcaactgcagaggcatttcaggagttggaga

SEQ ID NO: 542648 - DNA, 120 bp, Artificial Sequence
  ENSG00000167522_129 (sequence is synthesized)
tttaaaattttttgttccattctgatcaactaaagaaaattaaggtgtccacctctcacaaacagtgacctgcaggtcggaggggcaggagccccatcccagccgtggttctgttgccgc

SEQ ID NO: 542649 - DNA, 120 bp, Artificial Sequence
  ENSG00000167522_130 (sequence is synthesized)
cgagctgcgacggcctcagactgggcttcagacctggtgcggagccaggcggagggacacagagccaggactcccagccgtattgaaatggagtcaaatccgcgtggtttgtatcttctt

SEQ ID NO: 542650 - DNA, 120 bp, Artificial Sequence
  ENSG00000167522_131 (sequence is synthesized)
tcctttaatcttgggcattttgtttctctttctgagaacgtaacttgaaacactacagagccaataatcatataaaaagtgtatccgtaaacgctgtacagttttatataccttcacaat

SEQ ID NO: 542651 - DNA, 120 bp, Artificial Sequence
  ENSG00000167522_132 (sequence is synthesized)
gtacttttgctgccttctagataatttattttgcaacacattactgcacagttgtaaataacttatgtactgtaacatcactttcagttatgtgtaaagaaataaataaattaattaaaa

SEQ ID NO: 542652 - DNA, 120 bp, Artificial Sequence
  ENSG00000167522_133 (sequence is synthesized)
attgattcagtcccctctcaaagagggattgtactgttaactcttgtgtttgtgttatttgggaaggttggtcggggggagtcttgatttttctcgaggcttgctcttttcctggtgccc

SEQ ID NO: 542653 - DNA, 120 bp, Artificial Sequence
  ENSG00000167522_134 (sequence is synthesized)
cggacacagtgctctgtgttgatgccttcagatgcctccagcccagtccctgttgtggtgctgcaaggctggtacgctcctcgaagcaccatggcatgagatggaggttcctagaagcaa

SEQ ID NO: 542654 - DNA, 120 bp, Artificial Sequence
  ENSG00000167522_135 (sequence is synthesized)
cctgccatgtcccggccccaagacagctctgcccaccgagccctctcagaccagcttgccctgggacttctagcccatcttgcctgccctgctctgcctgccctgtctgcccggggcctc

SEQ ID NO: 542655 - DNA, 120 bp, Artificial Sequence
  ENSG00000167522_136 (sequence is synthesized)
ttgtatctgcttttgaagtctgtcctctaccacctcaagggtggtctcagtttaaaaagccttatcactgaaagcattcatattaaattatatgatatctgggatttgcttcaaatgata

SEQ ID NO: 542656 - DNA, 120 bp, Artificial Sequence
  ENSG00000167522_137 (sequence is synthesized)
atgtaattgggttcctgtagcaaatggggtaagggctctgcgtgtcttaatacatcattgccaccagaaggcccatttacaacttgcttagattttgttgagaagaagaggaaggctgac

SEQ ID NO: 542657 - DNA, 120 bp, Artificial Sequence
  ENSG00000167522_138 (sequence is synthesized)
ggacaaccaagacaggtctgcttcaacacatcacgaccatgttcttgaactgcatggaccctggagcatctcagcgtggcatcacagtgctgctcatggaaaacatgaactggcagaccc

SEQ ID NO: 542658 - DNA, 120 bp, Artificial Sequence
  ENSG00000167522_139 (sequence is synthesized)
attgagacattttcaaaacataaacattgtttttcttatttccatcgtttacccattgtagaaaatgtaagaaaacatgaaaagggtgaaaatctaacttaaactcccttatacaggtaa

SEQ ID NO: 542659 - DNA, 120 bp, Artificial Sequence
  ENSG00000167522_140 (sequence is synthesized)
agaccccagagcacaacttgaagggaaaaggtacggcaggaaccgtccaatgcgttacctgcaaagacagcggccggctttggtgtaggcttgtgtgtagcacggttgatgatgaagcgc

SEQ ID NO: 542660 - DNA, 120 bp, Artificial Sequence
  ENSG00000167522_141 (sequence is synthesized)
agacatgggcgacgcggggaccgctggagggaggcgcgccctgacgcaggctgcactggtgactgctcagttggagacccttccttgaaaacatgagctgtgactcatctgtaataaacc

SEQ ID NO: 542661 - DNA, 120 bp, Artificial Sequence
  ENSG00000167522_142 (sequence is synthesized)
aaggggctctgcctggtcgcagcctcatggctgtgctgaggacaagccctgtgcaaagggacctcgtgatggtggcctgggctcttgaagattggacaaagcaggaccaccccacagtaa

SEQ ID NO: 542662 - DNA, 120 bp, Artificial Sequence
  ENSG00000167522_143 (sequence is synthesized)
gagcagtgggtcatgggagaggaagggcgatggaataaaccgtgtggaccaaatggagggagacgagagcgatgaaagaactgaggctgaaattattattgacatgagctaatctcactc

SEQ ID NO: 542663 - DNA, 120 bp, Artificial Sequence
  ENSG00000167522_144 (sequence is synthesized)
tcttgtttcagaatatatacagccctgctctgggacacacctccattggatttaaaagacagtcctcgtcagcactgactttcagctatggaatcgatgtaattgggttcctgtagcaaa

SEQ ID NO: 542664 - DNA, 120 bp, Artificial Sequence
  ENSG00000167522_145 (sequence is synthesized)
tggggtaagggctctgcgtgtcttaatacatcattgccaccagaaggcccatttacaacttgcttagattttgttgagaagaagaggaagaaatgatctgccagtactcatgtccgaaca

SEQ ID NO: 542665 - DNA, 120 bp, Artificial Sequence
  ENSG00000167522_146 (sequence is synthesized)
accagagtttgcatgtcggtcggtcattctttgactgaagattggtgcttcctgtccagaggccgctgtgtctggtgtgcggcagcagtgctttgtgcatacttgttttgtcatgaagga

SEQ ID NO: 542666 - DNA, 120 bp, Artificial Sequence
  ENSG00000167522_147 (sequence is synthesized)
tgcacaagatgaatgctgcgtgctcgggacgtagtgcgttgaaacagtcttgccgcaccaccccagcagtcctccagtgaactggctcatcagtgcggtgtcacccagctgagaaggcat

SEQ ID NO: 542667 - DNA, 120 bp, Artificial Sequence
  ENSG00000167522_148 (sequence is synthesized)
tgttattaagcaggtagttttacacctgggaagcaagtgtaccaagctattcagtctgtgtgctgggtgagaaaatgttgttgaatgaatcaggagtggaaggtctccctgagcctgtgt

SEQ ID NO: 542668 - DNA, 120 bp, Artificial Sequence
  ENSG00000167522_149 (sequence is synthesized)
tctaggttccgaacataccatgaatttcatctcaggtgcactggcttctagaatgctgtcattcccgacttcatgctttcgtgccattttagtggtgaaagtaaatattggaaccactga

SEQ ID NO: 542669 - DNA, 120 bp, Artificial Sequence
  ENSG00000167522_150 (sequence is synthesized)
tccggcaccactctgctgaggagctcactgttggcgggaggggagagccttcgtgagaagattcctgggaagtcgtctacttgcggcaacggagaaatggtggaaaaaaatccaaaggag

SEQ ID NO: 542670 - DNA, 120 bp, Artificial Sequence
  ENSG00000167522_151 (sequence is synthesized)
gcagagcccttctgaaggagagcacaggaggggtgcgggagcccccgcggctgcagcccttcccacagaggagccacagcctcgcccaccacacccagagcctcgccaggcagtccctgg

SEQ ID NO: 542671 - DNA, 120 bp, Artificial Sequence
  ENSG00000167522_152 (sequence is synthesized)
gcgctcggctcccacaccctcagaccgtgaggggctgctctcgggtcgaaccccagggttctcggaaggggctgccgtgttatgcggaacggtagaggagttgtgcttctccagcagtcc

SEQ ID NO: 542672 - DNA, 120 bp, Artificial Sequence
  ENSG00000167523_0 (sequence is synthesized)
atggtgacgcacgccgctggcgcgaggaccttttgtgaggagcaaaagaagggatccacctattcagttccaaaatctaaggagaagttgatggagaagcattcccaggaagccaggcag

SEQ ID NO: 542673 - DNA, 120 bp, Artificial Sequence
  ENSG00000167523_1 (sequence is synthesized)
gcagacagggagtcggagaagcctgtggacagcctccacccgggggccgggacagccaagcacccgccgccggcagcttcgctggaagagaaacctgatgtaaagcaaaagtccagcagg

SEQ ID NO: 542674 - DNA, 120 bp, Artificial Sequence
  ENSG00000167523_2 (sequence is synthesized)
aagaaagtggtcgttccacagatcatcatcacgcgagcgtcgaatgagacgctagtcagttgcagttccagcgggagtgaccagcagagaaccattcgggagccggaggactggggcccc

SEQ ID NO: 542675 - DNA, 120 bp, Artificial Sequence
  ENSG00000167523_3 (sequence is synthesized)
taccggcggcacaggaaccccagtacagcagacgcctataattcacatctcaaagaataaacaagcacctttgcatggcactcgctactccctgcgataggcgtctcgggaacagccgcc

SEQ ID NO: 542676 - DNA, 120 bp, Artificial Sequence
  ENSG00000167523_4 (sequence is synthesized)
tcaccctgtgagaagccgaggccccttctccagtgctctcggggaggttgcaccaggcccaccccaccctgtgagaaactgcagcccccttctccagtgctttcggggagggtgcaccag

SEQ ID NO: 542677 - DNA, 120 bp, Artificial Sequence
  ENSG00000167523_5 (sequence is synthesized)
gcccgccccaccttgtgagaagccgtggcccccttctccagtgctctcagggagggtgcaccaggcctgcccccgccgtgagaaactgcagtccccttctccagtgctctcggggagggt

SEQ ID NO: 542678 - DNA, 120 bp, Artificial Sequence
  ENSG00000167523_6 (sequence is synthesized)
gcaccaggcccaccccaccctgtgagaacctgcagcccccttctccaatgctctcggggagggtacaccagggttgccccaccctgtgagaagccaccgcccccttctccagtgctctcg

SEQ ID NO: 542679 - DNA, 120 bp, Artificial Sequence
  ENSG00000167523_7 (sequence is synthesized)
gggagggtgcaccagggctgccccacgctgtaagaagccgccgcccccttctccagtgctctccagcccgccccaccctgtgagaagccatggccccttctccagtgcttttggggaggg

SEQ ID NO: 542680 - DNA, 120 bp, Artificial Sequence
  ENSG00000167523_8 (sequence is synthesized)
tgcaccagggccaccccaccctgtgagaagccgtggcccccttctccagtgctttcggggagggtacaccaggcccgccccaccctgtgagaagccgtggcccccttctcccgtgctctc

SEQ ID NO: 542681 - DNA, 120 bp, Artificial Sequence
  ENSG00000167523_9 (sequence is synthesized)
tgagaaactgcagcccccttctccagtgctctgggggagggtgcaccaggcctgcccaccctgtgagaaactgcacccccttctccagtgctctcggggagggtgcaccaggcccgcccc

SEQ ID NO: 542682 - DNA, 120 bp, Artificial Sequence
  ENSG00000167523_10 (sequence is synthesized)
accctgtgagaagccgcagcccgttctccattgccatttggtcctgccttccccagagctgctagcagctcggtcgaggcaagagtgactggctcagagagcgagctttgtggtattgat

SEQ ID NO: 542683 - DNA, 120 bp, Artificial Sequence
  ENSG00000167523_11 (sequence is synthesized)
aaatgaataaattagtatgttcatgttggaagtggctggctctgcagagtgatggacagcaggtggcatcttacattgtgatttgtggtgcacagttaaaacacttcccttcgtttcaga

SEQ ID NO: 542684 - DNA, 120 bp, Artificial Sequence
  ENSG00000167523_12 (sequence is synthesized)
aggagacaatgtgaatacttggaaattatagtgaataagatgcctcccaaacttgaggaaaaggtcagattctaagagctaaacgttaagatgtaatgttccagaacaaagaggcccaga

SEQ ID NO: 542685 - DNA, 120 bp, Artificial Sequence
  ENSG00000167523_13 (sequence is synthesized)
gtcactgaacggggccccagggctcctagcttgagtgtaatctgagtcagcttatgaaaaggccccaaagaagaaagtggaatgtgtgctgggcacatgggacagccatggcactgagac

SEQ ID NO: 542686 - DNA, 120 bp, Artificial Sequence
  ENSG00000167523_14 (sequence is synthesized)
tttggaagtggccttgccagcgctgtcctgtctttctggcccacagatgagggctcctgattgtggaaggccacggaagggacctgaacacgatggcacgagacaagttatctcctgtga

SEQ ID NO: 542687 - DNA, 120 bp, Artificial Sequence
  ENSG00000167523_15 (sequence is synthesized)
ctgctcctctccagcaaccctcagctcaggctagactttccccctgtgttgagaatgccctgccctgtgtggaagcctgatgcatttagtgacagtgtgttagctttgttagtttctagt

SEQ ID NO: 542688 - DNA, 120 bp, Artificial Sequence
  ENSG00000167523_16 (sequence is synthesized)
ctggccagcaggctttccatgtgatctgccattggcttgcttcagtggccagtggagccaggggtgtccaccagagtcttggacacagacttctgaggtggcagcgggagggagcctgct

SEQ ID NO: 542689 - DNA, 120 bp, Artificial Sequence
  ENSG00000167523_17 (sequence is synthesized)
ccctgccacacacgtacaatttctaatccatacaggcctatgtagtatatacacacatacgcagagccttaggaattgtgaaaggccaatcaaaacttggggccctaatttcactctgcc

SEQ ID NO: 542690 - DNA, 120 bp, Artificial Sequence
  ENSG00000167523_18 (sequence is synthesized)
ggtgacgcacgccgctggcgcgaggaccttttgtgagtcgctcccggctccgcggccgcggaggtgtggggacccgggcttgcgtcggagggggcggtgggctcacccatgggcctttcc

SEQ ID NO: 542691 - DNA, 120 bp, Artificial Sequence
  ENSG00000167523_19 (sequence is synthesized)
aggctcggcccggtgcgaaccgttcctgccgccgagtccgccacggacggcgcgtttcccgcctgaggcggttacggaaacgcggagactcgagacttgaagccagcttattctggaccc

SEQ ID NO: 542692 - DNA, 120 bp, Artificial Sequence
  ENSG00000167523_20 (sequence is synthesized)
cttcgctggaaggtaggagacggcgggagggagcgaagcgaggtcagtggcttggaggatctggggctggggtgaggagcctactgtaagaccctaccggatggacactagtagcaggca

SEQ ID NO: 542693 - DNA, 120 bp, Artificial Sequence
  ENSG00000167523_21 (sequence is synthesized)
cgcgccgtaaagatgaaactggtttgttttgggaactttatgtaggaggtaaatatccagaaatcttagttgaaaacataagtttaatgaaaatgtaggtcagttcccgagtgataagtg

SEQ ID NO: 542694 - DNA, 120 bp, Artificial Sequence
  ENSG00000167523_22 (sequence is synthesized)
cgtaccaggtggtcgaggggctggggcagtgtgcgtgtgtctcacctgaggttctcctcgagggctgggtatcttggtgccactgagaatccctgagcctccgcacactggaacagagca

SEQ ID NO: 542695 - DNA, 120 bp, Artificial Sequence
  ENSG00000167523_23 (sequence is synthesized)
ttgggaggccgtcccaggctggactgtagctctccgagggctgtggggataagtacattgcggagggtgaccgaggagtagaacctgggtgcgacaaaggtgtcttttataacagcctag

SEQ ID NO: 542696 - DNA, 120 bp, Artificial Sequence
  ENSG00000167523_24 (sequence is synthesized)
tgtggccagacctttgggtgtgtgtggggaagatgaggccccaaaagtaggaagaagctagaatacaaagttttccatcagttttaccacgtggagctggaagcgttaaatattttaaac

SEQ ID NO: 542697 - DNA, 120 bp, Artificial Sequence
  ENSG00000167523_25 (sequence is synthesized)
ctggaagcgttaaatattttaaacaacggaggtgctgcctggggcggtagttcacacctgtcctcccagttatttggccgaggcaggaggatcttttgagcccaggagttcaagaccagc

SEQ ID NO: 542698 - DNA, 120 bp, Artificial Sequence
  ENSG00000167523_26 (sequence is synthesized)
ctctacaaaaaataaatatttaaaaataaaaaacaagggcggcatgatgaggtctgtgcctaccaacaggggaagccagttcgcaggggaggtggcccggtcagagacccattgctgtgg

SEQ ID NO: 542699 - DNA, 120 bp, Artificial Sequence
  ENSG00000167523_27 (sequence is synthesized)
cccagtgggagccagcaaggccttgcagtaggaattgcagaagggtcaggcagggagaacccgcagagcctgccgtccgaggagattgggggcctgtgccaggaggaggtgttttaagtt

SEQ ID NO: 542700 - DNA, 69 bp, Artificial Sequence
  ENSG00000167523_28 (sequence is synthesized)
taataaggagagaaccactcgggtcagacaagaaagaatgtcagggggatgactggcctgctaggcaga

SEQ ID NO: 542701 - DNA, 120 bp, Artificial Sequence
  ENSG00000167523_29 (sequence is synthesized)
gaggctctgggccttggacttggaagaaagacttggatttgaattcccaactttggaacctcccactggagggtggaacccctcacaggagggcgcaaccccccaccggaggatggaacc

SEQ ID NO: 542702 - DNA, 120 bp, Artificial Sequence
  ENSG00000167523_30 (sequence is synthesized)
ctgcaggaatagcatcacccttgggtggcagtttggaaaatgctacctgtctgtcacggtgcttttagctgaaagttacagaaaagctcactaaacgcagctttaacacagggatttaat

SEQ ID NO: 542703 - DNA, 120 bp, Artificial Sequence
  ENSG00000167523_31 (sequence is synthesized)
gtctcacgaatgaagggtcagaggtggagcttccaggttggcttgttagcacaacagtgacatcaaagactttgcgtgtctcttcttgaccactctcagtgtccacagcccccgatgagt

SEQ ID NO: 542704 - DNA, 120 bp, Artificial Sequence
  ENSG00000167523_32 (sequence is synthesized)
gtacagccccccacacgcaggcaggactgcatctactgcaaaggcattgctccttgcttcatattagcaaggaaacctttcccaggaaggcttcgcctgcccagcctctgcaggactcat

SEQ ID NO: 542705 - DNA, 120 bp, Artificial Sequence
  ENSG00000167523_33 (sequence is synthesized)
tcaatggtgcaaattcaccaggggctggagggagctgtgaagcatgggagtgggcaggacctctgccagtaacggaagtgggggaaggaggaccgcctgttggaagggccccagcagtgt

SEQ ID NO: 542706 - DNA, 120 bp, Artificial Sequence
  ENSG00000167523_34 (sequence is synthesized)
ctgtcacaccagagggtgggggaggaaggtggacatgaagggaaaacagcagagcaagagtgagaacagagtttcagcagataaaatgaagtgtgcacgctctccatgcagtgacgggct

SEQ ID NO: 542707 - DNA, 120 bp, Artificial Sequence
  ENSG00000167523_35 (sequence is synthesized)
gagcgacagtgaggagcaggctgctgactcccttgccacaccgtgaaggagtcccaaaggtgggacactgagtgagacaagccagaggaaagaccactcatgttgcagttccctttccat

SEQ ID NO: 542708 - DNA, 120 bp, Artificial Sequence
  ENSG00000167523_36 (sequence is synthesized)
ggaatgtccagaaaaggcacatttacagagagaagcagatgagtggttgctgggcagaaatgggagccggccacagctgagcacaagaggactttggagggtgatggaaatggttttcga

SEQ ID NO: 542709 - DNA, 120 bp, Artificial Sequence
  ENSG00000167523_37 (sequence is synthesized)
cctgaatctgaacatgggaagcactgcagtttagtagtcctggtccctaagcccttccagcccaggagccagacctgtgagcaaacaagcctttagtgattccaggctctggctggaacc

SEQ ID NO: 542710 - DNA, 120 bp, Artificial Sequence
  ENSG00000167523_38 (sequence is synthesized)
ttgagtcttctcagcttggggcatgcacctcagggggagccagcatcagtgtccagccccaagagcttccctgtacgtctcagtgagtcttcacatgcctccaactgcctggacaaccac

SEQ ID NO: 542711 - DNA, 120 bp, Artificial Sequence
  ENSG00000167523_39 (sequence is synthesized)
acgtgatacctgtcctgccaaacgtgtcctgaacccataaaatccagagaaaagaaaatcgttttaaactgctgaggtttggggtaagttactatgaagcagtagtgagaagaacagaag

SEQ ID NO: 542712 - DNA, 120 bp, Artificial Sequence
  ENSG00000167523_40 (sequence is synthesized)
ggccatgatggggagaaagtttggccataagttaatcactgtggcagctgttaggatattgatgtggcttggctgtgtcctcacccaaatctcattttgaattcccacatgtgggaggaa

SEQ ID NO: 542713 - DNA, 120 bp, Artificial Sequence
  ENSG00000167523_41 (sequence is synthesized)
ttatgggggcaggtctttcctgtgctgttttcgtgatagtgaatgagtgtcacgagatccgatggttttaaaaacgggagtttcctgcataagctctctctctgcctgctgccatccatg

SEQ ID NO: 542714 - DNA, 90 bp, Artificial Sequence
  ENSG00000167523_42 (sequence is synthesized)
ggagtttcctgcataagctctctctccgctcctccctaccttccgccgtgattgtgaggcgtccccagccatgtggaactgtaagtccat

SEQ ID NO: 542715 - DNA, 120 bp, Artificial Sequence
  ENSG00000167524_0 (sequence is synthesized)
atgggagcagtaagctgtcggcaggggcagcacacccagcagggggaacacacccgggtggctgtccctcacaagcagggtggcaacatccggggtccctgggcccgaggctggaagagc

SEQ ID NO: 542716 - DNA, 120 bp, Artificial Sequence
  ENSG00000167524_1 (sequence is synthesized)
ctctggacaggtttgggaaccatcaggtcagatctggaagaactctgggaactacgggggcaccactatctgcaccaggaatccctaaagccagccccagtactggtagagaagcctctg

SEQ ID NO: 542717 - DNA, 120 bp, Artificial Sequence
  ENSG00000167524_2 (sequence is synthesized)
ccagagtggccagtgcctcagttcatcaacctctttctaccagagtttcccattaggcccattagggggcagcagcagctgaagattttaggcctcgtggctaaaggctcctttggaact

SEQ ID NO: 542718 - DNA, 120 bp, Artificial Sequence
  ENSG00000167524_3 (sequence is synthesized)
gtcctcaaggtgctagattgcacccagaaagctgtatttgcagtgaaggtggtgcccaaggtaaaggtcctacagagggataccgtgaggcagtgcaaagaggaggttagcatccagcga

SEQ ID NO: 542719 - DNA, 120 bp, Artificial Sequence
  ENSG00000167524_4 (sequence is synthesized)
cagatcaaccatccctttgtacacagcttgggggacagctggcagggaaaacggcaccttttcattatgtgtagctactgcagcacagatctgtactccctttggtcggctgttggctgc

SEQ ID NO: 542720 - DNA, 120 bp, Artificial Sequence
  ENSG00000167524_5 (sequence is synthesized)
gagttggtgctggtactgtgttatctccatgacttgggcatcatgcatcgagatgtgaagatggagaatattcttctagatgaacgaggccatctgaaactgacagactttggtctgtcc

SEQ ID NO: 542721 - DNA, 120 bp, Artificial Sequence
  ENSG00000167524_6 (sequence is synthesized)
cgccacgtgccccagggagctcaagcctacactatctgtggcactcttcagtacatggccccagaggtcctaagtggaggaccttacaaccatgctgctgattggtggtccctgggtgtc

SEQ ID NO: 542722 - DNA, 120 bp, Artificial Sequence
  ENSG00000167524_7 (sequence is synthesized)
ttgcttttctctctggcgactggaaagtttccagtggctgcagagagagatcatgtggccatgttggcaagtgtgacccacagtgactctgagatcccagcttctcttaaccagggcctc

SEQ ID NO: 542723 - DNA, 120 bp, Artificial Sequence
  ENSG00000167524_8 (sequence is synthesized)
tcactcctgctccatgagctcttatgccagaaccccctccatcgtctacgttatctgcatcacttccaggtccaccctttctttcggggtgtggccttcgacccagagctcctacagaag

SEQ ID NO: 542724 - DNA, 120 bp, Artificial Sequence
  ENSG00000167524_9 (sequence is synthesized)
cagccagtgaactttgtcacggagacacaagctacccagcccagttcagcggagaccatgccctttgacgactttgactgtgatctggagtccttcttgctctaccctatccctgcttga

SEQ ID NO: 542725 - DNA, 120 bp, Artificial Sequence
  ENSG00000167524_10 (sequence is synthesized)
acagatcaaccatccctttgtacacagcttgggggacagctggcagggaaaacggcaccttttcattagtgagtgactggactctctcctcatcccccagggtctttgtaccatgttccc

SEQ ID NO: 542726 - DNA, 120 bp, Artificial Sequence
  ENSG00000167524_11 (sequence is synthesized)
cacctgagattacctctttggcttgttctgcctttgctctgtcccccttctcatggcacctctctgtcccaaagggaggggaacagcaggtggtatcagtttgggcaggaggcctacaat

SEQ ID NO: 542727 - DNA, 120 bp, Artificial Sequence
  ENSG00000167524_12 (sequence is synthesized)
gccttgagcccaggcattgcagctcccaaacattgcctagacttctggcaatgtatgtagctccacactggctttgcagtgtgtagctactgcagcacagatctgtactccctttggtcg

SEQ ID NO: 542728 - DNA, 120 bp, Artificial Sequence
  ENSG00000167524_13 (sequence is synthesized)
gcctctctactgtaaattggggcccggctgggagcctgaagatctccatccctgcctactcagtatgaccaccttgataatccagtttgtttttattttgtagcctcttaccgttctgct

SEQ ID NO: 542729 - DNA, 120 bp, Artificial Sequence
  ENSG00000167524_14 (sequence is synthesized)
ctcctaggctttagaccagagttccaacctggacattctgctactggcagccacagctggccctattccttccctatcatacaacctacctctcaattcaacatgtcagatcagggtggt

SEQ ID NO: 542730 - DNA, 120 bp, Artificial Sequence
  ENSG00000167524_15 (sequence is synthesized)
gaccttttccttttctttacttctccagtgctctttaccctcaggctgtcagccagagctgcttctgcttgtttctctgccatgtttcctttcttgagcaataataatacttcatgggct

SEQ ID NO: 542731 - DNA, 85 bp, Artificial Sequence
  ENSG00000167524_16 (sequence is synthesized)
catgtttcctttcttgagcaataataatacttcatgggctcccagggtgctattgatgtgtttaataggcttgtcagaagcaata

SEQ ID NO: 542732 - DNA, 120 bp, Artificial Sequence
  ENSG00000167524_17 (sequence is synthesized)
tctgtggcactcttcagtacatgggtgagagaggttaaagctgatgggtaagcattgggcaggaggatagctaaaggatgtctgtgatgagtatctttgaaatctgtagccccagaggtc

SEQ ID NO: 542733 - DNA, 120 bp, Artificial Sequence
  ENSG00000167524_18 (sequence is synthesized)
gggaattttgcctcatgctcaaaaatgtacctctaggggttgagacttaaggggagggagtgcctagtaagatgggtggaacctgctatgcctcaggagcagaaagtttagagtggctcc

SEQ ID NO: 542734 - DNA, 120 bp, Artificial Sequence
  ENSG00000167524_19 (sequence is synthesized)
gacagcagatttagcagagagaggaggcagaggctgggaatgggagcagtaagctgtcggcaggggcagcacacccagcagggggaacacacccgggtggctgtccctcacaagggtggc

SEQ ID NO: 542735 - DNA, 120 bp, Artificial Sequence
  ENSG00000167524_20 (sequence is synthesized)
ggtcccttctgagagagtggaacactgtacactcatctgaaaactcacaagcacagctccttattcccacctttgccccaaattagcctctatttctccctcttttacaaatcatctact

SEQ ID NO: 542736 - DNA, 120 bp, Artificial Sequence
  ENSG00000167524_21 (sequence is synthesized)
cttcagggttcttattcctaccctccacagctccatgaacttctttcttcttttccatcctttctgttcaggcctgtcctgtcctagtcactcatccttcatgctctattttccttcagc

SEQ ID NO: 542737 - DNA, 70 bp, Artificial Sequence
  ENSG00000167524_22 (sequence is synthesized)
ggcctcccaaagtgctggaattacaggtaggtgtgagccactgcaccacgtcacccaggttggagtgcag

SEQ ID NO: 542738 - DNA, 88 bp, Artificial Sequence
  ENSG00000167524_23 (sequence is synthesized)
ggcatgagcctccacacccagcctgtgaatttttcaaaagtctcaaaagctggcatttcaacccctaaataatgcagctaaaaaatat

SEQ ID NO: 542739 - DNA, 120 bp, Artificial Sequence
  ENSG00000167524_24 (sequence is synthesized)
gctggcatttcaacccctaaataatgcagctaaaaaatatagtctgggagcttgaggccagtctgcaataaatctaatttttaaaaattgaaaagtgaataaaataatctagtgaggaag

SEQ ID NO: 542740 - DNA, 120 bp, Artificial Sequence
  ENSG00000167524_25 (sequence is synthesized)
tttttaaactgacaatttctcctagtgagcccatgattcagtttctgatgggcaaaccaagagattaagaggcatgcatcaaccttaagatttaaggttatttgggaggccaaggtgggc

SEQ ID NO: 542741 - DNA, 85 bp, Artificial Sequence
  ENSG00000167524_26 (sequence is synthesized)
aaccttaagatttaaggttatttgggaggccaaggtgggcagatcagttgaggtcaattgtgtctactaaaaaaatacaaaaatt

SEQ ID NO: 542742 - DNA, 87 bp, Artificial Sequence
  ENSG00000167524_27 (sequence is synthesized)
agctactcagaaggctgaagcaggagaactgcttgaaccctggaggaactcctgggtgacagaggtagactctgtctcaaaaaaaaa

SEQ ID NO: 542743 - DNA, 120 bp, Artificial Sequence
  ENSG00000167524_28 (sequence is synthesized)
aaaaaaaaaaagatttaaggttagagacatatctcaataaccttttcctttagtaaggaaaatcatctggaccttaaatttgtatacagttttggcctttatgacttcttttcatttttc

SEQ ID NO: 542744 - DNA, 120 bp, Artificial Sequence
  ENSG00000167524_29 (sequence is synthesized)
ttaaactaatttctcacaattttcatttttgtcctgagacttgaagggaaagtaagttttaatctagaccatattatttagttacatctaatctctctagacaaaagacagtctggagag

SEQ ID NO: 542745 - DNA, 120 bp, Artificial Sequence
  ENSG00000167524_30 (sequence is synthesized)
tactctttagttctatttattaattttgtctctagattgagccagatttccccatgcatagctggcattttattggcctctgcagaattgctttttctggattggactttggtaatccat

SEQ ID NO: 542746 - DNA, 68 bp, Artificial Sequence
  ENSG00000167524_31 (sequence is synthesized)
tgcagaattgctttttctggattggactttggtaatccatatgaaaatctctatgaaatttaattgct

SEQ ID NO: 542747 - DNA, 87 bp, Artificial Sequence
  ENSG00000167524_32 (sequence is synthesized)
cctggccaacatggtgaaaccccgtttctccccaaaaaatacaaaaattagctggtcatgagggcacaggaagaattgcttgaaccc

SEQ ID NO: 542748 - DNA, 120 bp, Artificial Sequence
  ENSG00000167524_33 (sequence is synthesized)
gatggaggttgcaatgagtgaagatcgtgccactgcatccagcctgagcaacagagtgagatcttgtctcaggaaaaaaataaatttaattgctgtggatactgtaaagggtgtttatcg

SEQ ID NO: 542749 - DNA, 120 bp, Artificial Sequence
  ENSG00000167524_34 (sequence is synthesized)
taacagttcataatattctatttaagaatgcgtgggagaaattttctctggacccagttatgcttttcctgaattgctgtttggtttttaccttaaggacactaaatattcagctgattg

SEQ ID NO: 542750 - DNA, 120 bp, Artificial Sequence
  ENSG00000167524_35 (sequence is synthesized)
tatttttctgtttgtactgatactagaccatttagagcccaatttgtggtctaccttcagcaagtgtttatgtattttgtatgctagtcatgttcttggttctgtcttccttttctactt

SEQ ID NO: 542751 - DNA, 120 bp, Artificial Sequence
  ENSG00000167524_36 (sequence is synthesized)
ttattttccttattctcatttttctaagttttaatcgttttatattactataatatctgcatcttgtaagcctttttgtaataaggttgggatataaataaataaggcaatgtatccttt

SEQ ID NO: 542752 - DNA, 120 bp, Artificial Sequence
  ENSG00000167525_0 (sequence is synthesized)
gggaagactacgcagcctggagccgggctggggaggccggcgggggctgcgccagcatgaggcggggttaggggctaggcgggggcgaagccgagactggagttcacggctgggccgagg

SEQ ID NO: 542753 - DNA, 120 bp, Artificial Sequence
  ENSG00000167525_1 (sequence is synthesized)
gctcggccgggctgaggctcagggttggacttcacgcaagagtcctgtagagacgaagacctgggcggagagcgatgtgggtcaggacgacgctcacaattgaaagatggactaaggaaa

SEQ ID NO: 542754 - DNA, 120 bp, Artificial Sequence
  ENSG00000167525_2 (sequence is synthesized)
agaccgagcccaaggcccgctcgtgggatgagagcagatgccgcggtgactgcaaggagcctgacaagtgctgctggagacacaagcagtgcactgggcacatcatctaccctttcgcct

SEQ ID NO: 542755 - DNA, 120 bp, Artificial Sequence
  ENSG00000167525_3 (sequence is synthesized)
ctgactgtgtccgccacagcctgcacctacactctgtcaaccactgcaactgtaattctaggctgaaggactcttcagaggatagcagcagctcccggggcgcgggcccaacctgctccc

SEQ ID NO: 542756 - DNA, 120 bp, Artificial Sequence
  ENSG00000167525_4 (sequence is synthesized)
atgtcatcgagtccccttgctttgagctcacaccggaggaggagcatgtggagcgattccggtatggctggtgcaaaagctacagacctgtctctgtggcagtgatccaccatccactct

SEQ ID NO: 542757 - DNA, 120 bp, Artificial Sequence
  ENSG00000167525_5 (sequence is synthesized)
accatgagtgtggggcagatgatctaaatgaagaagaggaagaggaggaggaggaaagcaagccccccatcccgacacaggtggggcccgccaccgcctcccctgacctaggcaccagca

SEQ ID NO: 542758 - DNA, 120 bp, Artificial Sequence
  ENSG00000167525_6 (sequence is synthesized)
ctggtacccctgactccacagcgcccatcaccatctggcgctctgagagccccacagggaagggtcagggcagcaaggtgatcaagaaggtaaagaagaaaaaggaaaaagagaaagaca

SEQ ID NO: 542759 - DNA, 120 bp, Artificial Sequence
  ENSG00000167525_7 (sequence is synthesized)
aggaggagatggatgagaaggcaaagctgaagaaaaaagccaagaaaggccagttgactaagaagaaaagcccggttaaattggagccttccccgccagacgtgagccgatcattaagcg

SEQ ID NO: 542760 - DNA, 120 bp, Artificial Sequence
  ENSG00000167525_8 (sequence is synthesized)
caagacagctggccaggatgtccgagtccagcccagaaagccgggaagagctggagagcgaggacagttacaatggccgggggcagggagaactgtccagcgaggatattgtggaatcat

SEQ ID NO: 542761 - DNA, 120 bp, Artificial Sequence
  ENSG00000167525_9 (sequence is synthesized)
catcgcccaggaagagagagaacacagtccaggccaaaaagacaggggcaaagccctcacaagccaggaaggtaaacaagagaaaatctcccccaggatcaaaccccaacctcagttgag

SEQ ID NO: 542762 - DNA, 120 bp, Artificial Sequence
  ENSG00000167525_10 (sequence is synthesized)
gccagggtggtcagggtgcagaataaatgccatcgagcctgtggctggccctctgctgctgttctctccctccaacctggctgtttcttgcggggcaaggggtgggctcagggctgcagg

SEQ ID NO: 542763 - DNA, 120 bp, Artificial Sequence
  ENSG00000167525_11 (sequence is synthesized)
ggtttctcaaaggcaatccagctttcacaaaggaagcccatgggaaggcaggtgggagggaaaggaaggggcacagccctatttcttcctacctgctaggacaaggtggaagagtgtatc

SEQ ID NO: 542764 - DNA, 120 bp, Artificial Sequence
  ENSG00000167525_12 (sequence is synthesized)
tggggtgggaaggagggcttcccctctctgctgcgagagactggtctgtgtgaaatccacttctgggacaggcagtactgtctgcagcgatacccccaataaacggaactttttaaccca

SEQ ID NO: 542765 - DNA, 120 bp, Artificial Sequence
  ENSG00000167525_13 (sequence is synthesized)
atgtgggtcaggacgacgctcacaattgaaagatggactaaggaaaagaccgagcccaaggcccgctcgtgggatgaggctctctcagatgtaaacaggttacccagctgggagagagga

SEQ ID NO: 542766 - DNA, 120 bp, Artificial Sequence
  ENSG00000167525_14 (sequence is synthesized)
acgaagacctgggcggagagcgatgtgggtcaggacgacgctcacaattgaaagatggactaaggaaaagaccgagcccaaggcccgctcgtgggatgagagcagatgccgcgatgtaaa

SEQ ID NO: 542767 - DNA, 120 bp, Artificial Sequence
  ENSG00000167525_15 (sequence is synthesized)
caggttacccagctgggagagaggacatctgctggctggtgtggcgtccagcactgatgtgtctaccttctctgaaggtgactgcaaggagcctgacaagtgctgctggagacacaagca

SEQ ID NO: 542768 - DNA, 120 bp, Artificial Sequence
  ENSG00000167525_16 (sequence is synthesized)
gcacaccttgctctgctctaagagaaatggggaggaggtctgttggcctgaggcaggcccagcggaagcccactgtccctcaggcttctggctctgggtccctgggggagtgatgggagc

SEQ ID NO: 542769 - DNA, 120 bp, Artificial Sequence
  ENSG00000167525_17 (sequence is synthesized)
agggtacaagaggggaggagagagacacagatcacccatgggtcagcagtgtagtgaggacccaggacttcacagccttgtgtggggaagggaaggaggaagaaatgtgggtaagcctca

SEQ ID NO: 542770 - DNA, 120 bp, Artificial Sequence
  ENSG00000167525_18 (sequence is synthesized)
ggccaagctgctgcactgtgaggccacttggactcacacccacagcctgggctcattcctggctggtggccggtatgaggtctcaccctagttccactcctcgtgggggctggcaaaggc

SEQ ID NO: 542771 - DNA, 120 bp, Artificial Sequence
  ENSG00000167525_19 (sequence is synthesized)
acaatcctcggcctgtttgagggtaacccagccacagcaccccaagccagtgcctgctccctccctcccctaggagtgctggggaatccgaggtgactgcaaggagcctgacaagtgctg

SEQ ID NO: 542772 - DNA, 120 bp, Artificial Sequence
  ENSG00000167525_20 (sequence is synthesized)
caaattttgagtacttgccgtgctgtggaaaacaggaggaggagctgaccagagacttataggaggatgaccaagtgccactgaaggcttgctgaagaccccaagcaatcagtttccctt

SEQ ID NO: 542773 - DNA, 120 bp, Artificial Sequence
  ENSG00000167525_21 (sequence is synthesized)
ccttaagcagacctcaagtccagtgcctcaagggataaagctagttgtgggaaggaaaggcaaaggggcagactgtcttgtggctgctaatggctgagggagctgccaccccagttggag

SEQ ID NO: 542774 - DNA, 120 bp, Artificial Sequence
  ENSG00000167525_22 (sequence is synthesized)
gtctgcttagggtcatcctctgtccaggctccacacaccctgggacagtttctggagctgtccctccttgcctagaccctggctggctcctattcatcactaactctagtgatgctcctt

SEQ ID NO: 542775 - DNA, 120 bp, Artificial Sequence
  ENSG00000167525_23 (sequence is synthesized)
ccaagaagtcttccatagtccccagtcctcctttccagtcctggtaggtggcccttgtcctgtgctaccctttccctgtcagcatctgcatcacattactgtcatgaacctcccgtgtcc

SEQ ID NO: 542776 - DNA, 120 bp, Artificial Sequence
  ENSG00000167525_24 (sequence is synthesized)
cacccccccccccccccccgcaaccccttaagagcagggactgttgtttaatctctgcatctccaggatgcagcgagggcctgacatgtggagtttctcggggtatgtttggtgaataaa

SEQ ID NO: 542777 - DNA, 120 bp, Artificial Sequence
  ENSG00000167525_25 (sequence is synthesized)
catgtggagtttctcggggtatgtttggtgaataaatggcacagggagggggctgctgccaccactgccactctatgctctctcagatgtaaacaggttacccagctgggagagaggaca

SEQ ID NO: 542778 - DNA, 120 bp, Artificial Sequence
  ENSG00000167525_26 (sequence is synthesized)
tctgctggctggtgtggcgtccagcactgatgtgtctaccttctctgaaggtgggtccaggagacctttgacccaggggatcctcatcacccctcacctgggaaagctgacacctggtgg

SEQ ID NO: 542779 - DNA, 120 bp, Artificial Sequence
  ENSG00000167525_27 (sequence is synthesized)
aagcttggtcctgaggcagggagggagggaagtgtggtcctgaagctgccccatcctcaacccatcccctacagatgccagaggggacccctttctcaaggccgcaatcaccccattcgt

SEQ ID NO: 542780 - DNA, 120 bp, Artificial Sequence
  ENSG00000167525_28 (sequence is synthesized)
ttatatagaactttatggcacataagtatctttgacatatgtgaattgagtccgcccaacaaccctgcaaaattggtatgaccaccatcccattttgtggatgaggaaattaaaggctca

SEQ ID NO: 542781 - DNA, 120 bp, Artificial Sequence
  ENSG00000167525_29 (sequence is synthesized)
gagaagtaaagaaatttgccctaagccacccggctagtaagtgacagacccacgacttgggcttaggcctgactacaagttcagggcactttgccactatgctgccctttggcccagctc

SEQ ID NO: 542782 - DNA, 120 bp, Artificial Sequence
  ENSG00000167525_30 (sequence is synthesized)
gaatccgaggtaaggtcccttgtcctttgtcgtgtgagtgagattctgggctgtgagaggcgcagagtcgcctcatgggcttacctttgagatagaggcctgaggggacagccgggcctt

SEQ ID NO: 542783 - DNA, 120 bp, Artificial Sequence
  ENSG00000167525_31 (sequence is synthesized)
aggcagtgtcagaggtgaggcagtggtggtagaccggggaaactcctgtcttcaggactggcattgagctgagcagcagaggtgggggcctttctccagggcttttccctaaccccaaat

SEQ ID NO: 542784 - DNA, 120 bp, Artificial Sequence
  ENSG00000167525_32 (sequence is synthesized)
tctcaccccagcagcttcttcctgtgccctgggaaaggggatgtggtctctgtgctgcctaaaagggtgcttaggctgggggtgggtcattcgaaagcctggggctctagggactgggga

SEQ ID NO: 542785 - DNA, 120 bp, Artificial Sequence
  ENSG00000167525_33 (sequence is synthesized)
gagtgtgggaaggtgctgagtgaagagcagggaaaggatcaagaagggggcatgggaagggaggggagtgagaaaggtgtcaggcaggagaaaaaaaggggcttgaaggagaagggagga

SEQ ID NO: 542786 - DNA, 120 bp, Artificial Sequence
  ENSG00000167525_34 (sequence is synthesized)
gggggaagtggggagggaaggacgagtcagaagctaaggagcatgatgcaggccttagctcctggccaggctgtgagagatcagcgtgggccagggcaggtgtaggaactgaggatgctg

SEQ ID NO: 542787 - DNA, 120 bp, Artificial Sequence
  ENSG00000167525_35 (sequence is synthesized)
cggctctgctgctcctggggctgtggggtgccatagcaggagggccttctcctaccaggcgccttgtggagcagggctgccactcattgtcagcacctggttgaggggcaggcaggagct

SEQ ID NO: 542788 - DNA, 120 bp, Artificial Sequence
  ENSG00000167525_36 (sequence is synthesized)
ggtggaggcctcccactggagggagaggacagaagtaacagggaatcacaggactgcagggggcttgataagggtctcctgtgtatcagacatggaaccagacactttgctgggacatgg

SEQ ID NO: 542789 - DNA, 120 bp, Artificial Sequence
  ENSG00000167525_37 (sequence is synthesized)
ggttactctgcggccaagttactactactgaagcagaaacacttcttggggtggacagctggtggtggcaggtgaatttggtgaggttttagcttgagctgtgggaagacccagaggtct

SEQ ID NO: 542790 - DNA, 120 bp, Artificial Sequence
  ENSG00000167525_38 (sequence is synthesized)
tttccaaggagacgcgggcgcactgcccctcccttgcttcctcctcttccctccttcctctcctagtttcttccctcccttcccgccctactccttccctcccttcccaccctactcctt

SEQ ID NO: 542791 - DNA, 120 bp, Artificial Sequence
  ENSG00000167525_39 (sequence is synthesized)
agagctggaacgctcggctatcggactgggtggcaccgggcgcaggccgctgcccttgaagcgccggccttggctggagcccgtggaccagcgcccacccggacgccggggcgggagcgg

SEQ ID NO: 542792 - DNA, 120 bp, Artificial Sequence
  ENSG00000167526_0 (sequence is synthesized)
ccagagtgcattgcggggccgcttcctttccgctcggctgttttcctgcgcaggagccgcagggccgtaggcagccatggcgcccagccggaatggcatggtcttgaagccccacttcca

SEQ ID NO: 542793 - DNA, 120 bp, Artificial Sequence
  ENSG00000167526_1 (sequence is synthesized)
caaggactggcagcggcgcgtggccacgtggttcaaccagccggcccgtaagatccgcagacgtaaggcccggcaagccaaggcgcgccgcatcgccccgcgccccgcgtcgggtcccat

SEQ ID NO: 542794 - DNA, 120 bp, Artificial Sequence
  ENSG00000167526_2 (sequence is synthesized)
ccggcccatcgtgcgctgccccacggttcggtaccacacgaaggtgcgcgccggccgcggcttcagcctggaggagctcagggtggccggcattcacaagaaggtggcccggaccatcgg

SEQ ID NO: 542795 - DNA, 120 bp, Artificial Sequence
  ENSG00000167526_3 (sequence is synthesized)
catttctgtggatccgaggaggcggaacaagtccacggagtccctgcaggccaacgtgcagcggctgaaggagtaccgctccaaactcatcctcttccccaggaagccctcggcccccaa

SEQ ID NO: 542796 - DNA, 120 bp, Artificial Sequence
  ENSG00000167526_4 (sequence is synthesized)
gaagggagacagttctgctgaagaactgaaactggccacccagctgaccggaccggtcatgcccgtccggaacgtctataagaaggagaaagctcgagtcatcactgaggaagagaagaa

SEQ ID NO: 542797 - DNA, 120 bp, Artificial Sequence
  ENSG00000167526_5 (sequence is synthesized)
tttcaaagccttcgctagtctccgtatggcccgtgccaacgcccggctcttcggcatacgggcaaaaagagccaaggaagccgcagaacaggatgttgaaaagaaaaaataaagccctcc

SEQ ID NO: 542798 - DNA, 120 bp, Artificial Sequence
  ENSG00000167526_6 (sequence is synthesized)
tggggacttggaatcagtcggcagtcatgctgggtctccacgtggtgtgtttcgtgggaacaactgggcctgggatggggcttcactgctgtgacttcctcctgccaggggatttggggc

SEQ ID NO: 542799 - DNA, 120 bp, Artificial Sequence
  ENSG00000167526_7 (sequence is synthesized)
tttcttgaaagacagtccaagccctggataatgctttactttctgtgttgaagcactgttggttgtttggttagtgactgatgtaaaacggttttcttgtggggaggttacagaggctga

SEQ ID NO: 542800 - DNA, 120 bp, Artificial Sequence
  ENSG00000167526_8 (sequence is synthesized)
gaggctgacttcagagtggacttgtgttttttctttttaaagaggcaaggttgggctggtgctcacagctgtaatcccagcactttgaggttggctgggagttcaagaccagcctggcca

SEQ ID NO: 542801 - DNA, 120 bp, Artificial Sequence
  ENSG00000167526_9 (sequence is synthesized)
gaactactaaaaataaagaaatcagccatgcttggtgctgcacacttgtagttgcagctcctgggaggcagaggtgagggatcacttaacccaggaggcagaggctgcactgagccagga

SEQ ID NO: 542802 - DNA, 120 bp, Artificial Sequence
  ENSG00000167526_10 (sequence is synthesized)
gccactgcactctagcctgggcaacagtgagactgtctcaaaaaaaaaaaaagagacagggtcttcggcacccaggctggagtacagtgccacaatcatggctcactgcagtcttgaact

SEQ ID NO: 542803 - DNA, 120 bp, Artificial Sequence
  ENSG00000167526_11 (sequence is synthesized)
aactcatggcctcaagcagtcctccctcagcctcccaagtagaggggtttataggcacgagaccctgcacccaacctagagttgccttttttaagcaaagcagtttctagttaatgtagc

SEQ ID NO: 542804 - DNA, 120 bp, Artificial Sequence
  ENSG00000167526_12 (sequence is synthesized)
atcttggactttggggcgtcattcttaagcttgttgtgcccggtaaccatggtcctcttgctctgattaacccttccttcaatgggcttcttcacccagacaccaaggtatgagatggcc

SEQ ID NO: 542805 - DNA, 120 bp, Artificial Sequence
  ENSG00000167526_13 (sequence is synthesized)
ctgccaagtgtcggcctctcctgttaaacaaaaacattctaaagccattgttcttgcttcatggacaagaggcagccagagagagtgccagggtgccctggtctgagctggcatccccat

SEQ ID NO: 542806 - DNA, 120 bp, Artificial Sequence
  ENSG00000167526_14 (sequence is synthesized)
gtcttctgtgtccgagggcagcatggtttctcgtgcagtgctcagacacagcctgccctagtcctaccagctcacagcagcacctgctctccttggcagctatggccatgacaaccccag

SEQ ID NO: 542807 - DNA, 120 bp, Artificial Sequence
  ENSG00000167526_15 (sequence is synthesized)
agaagcagcttcagggaccgagtcagattctgttttgtctacatgcctctgccgggtgccggtattgaggcacccagggagctgttactggcgtggaaataggtgatgctgctacctctg

SEQ ID NO: 542808 - DNA, 120 bp, Artificial Sequence
  ENSG00000167526_16 (sequence is synthesized)
ctgctgcactcacagccacacttgatacacgatgacaccttgcttgtttggaaacatctaaacatctagtagatgacttgcaggctgttggctaccagtttcctgtctgaggtgtatatg

SEQ ID NO: 542809 - DNA, 120 bp, Artificial Sequence
  ENSG00000167526_17 (sequence is synthesized)
ctgttggctaccagtttcctgtctgaggtgtatatgttaacttcgtgatcagtttgtatgtttgggactcttgtcctatgtaaagttaaggtgggccgggtgcagtggctcacgcctgta

SEQ ID NO: 542810 - DNA, 120 bp, Artificial Sequence
  ENSG00000167526_18 (sequence is synthesized)
ccaggaggcagagattgcagtgagccgagctgcaccactgtgctccagcctgggtgacagcgagactcagtctcaaaaaaagttgtacaaggtggatggttggaagcttgagcctaggct

SEQ ID NO: 542811 - DNA, 120 bp, Artificial Sequence
  ENSG00000167526_19 (sequence is synthesized)
aaggtggatggttggaagcttgagcctaggctcgaatccctctcacgtgagagggcctgaagatttctggtggattccaacctggctgaagactggccgtggggggtgcaggggtctcca

SEQ ID NO: 542812 - DNA, 120 bp, Artificial Sequence
  ENSG00000167526_20 (sequence is synthesized)
gcgctctgccctccagcctgcttcctccctgcccacaccgcactaggggaagggcctttcctgctgcctgcggggccgcacctggagtaggtaatgccatgtggtgacgtgaatggagca

SEQ ID NO: 542813 - DNA, 120 bp, Artificial Sequence
  ENSG00000167526_21 (sequence is synthesized)
gaggtctgtgccccatcacaccgccttgctgtttttactgtgggacaaaagcactctgatctgcgtgttccgggggccctcctaccagccgacttgacgggaagtcagggttcaggtatc

SEQ ID NO: 542814 - DNA, 120 bp, Artificial Sequence
  ENSG00000167526_22 (sequence is synthesized)
atctgtgcacctggggcggggtagtctgcactgaacctgccagagtcccctcctcatttcactgaaagtcacagtctccagggctgtgttgctaaccttacgttctctccgtttgcttaa

SEQ ID NO: 542815 - DNA, 120 bp, Artificial Sequence
  ENSG00000167526_23 (sequence is synthesized)
tctattaagagccctaacaggagaggatgggctttctctgttgtctggggccctgctgttggccggtgctcttagcaagaggtcatttttctaggttgcgctgggacattgtgagtttgg

SEQ ID NO: 542816 - DNA, 120 bp, Artificial Sequence
  ENSG00000167526_24 (sequence is synthesized)
tgagggtcatggatgtgggctgggctgggctgggctgggccgggctgcctgctgcctgctgctcccctacctgaaatgcagctagtgcggctctgcccttcctggggctgaggaaggctt

SEQ ID NO: 542817 - DNA, 120 bp, Artificial Sequence
  ENSG00000167526_25 (sequence is synthesized)
ctgcaggatagctggggggctgggcaggtgggtgaggcagcctccctgctgacactcagtccttgtagctggagcaagatctcctgatccaggtacgggcctgtctgctccaagaaagac

SEQ ID NO: 542818 - DNA, 120 bp, Artificial Sequence
  ENSG00000167526_26 (sequence is synthesized)
tctgccaccagatgcaaaggggccctttgttttaacttagtccctggggaccgcctgattcagcacctgtcggcccaggataccccgctggtggggacaagtgcctgagtgtgggccgtg

SEQ ID NO: 542819 - DNA, 120 bp, Artificial Sequence
  ENSG00000167526_27 (sequence is synthesized)
cccgagtgtggccatccctgagtggggccgtcctgactaggaagtggcttttcagttgtgatgtgtgggcctgacctagggggcgctgtggaacccgggctggaaccagccctctgtgcc

SEQ ID NO: 542820 - DNA, 120 bp, Artificial Sequence
  ENSG00000167526_28 (sequence is synthesized)
aggccgcagacaggttccgccggccctgaggggcagctgccatggcgtgggtcactgggagctgagaggaagggcccccaccgcacctcaggcaaagcggctctgggaacaccttgattt

SEQ ID NO: 542821 - DNA, 120 bp, Artificial Sequence
  ENSG00000167526_29 (sequence is synthesized)
cgtccatgtgagccgtcccagggagggcagccaagctgtgaagcctgagaaactgacctgtgtgccacgagcttgtggtctgctgcccggtggaggaagtgcaggtgcgcccaggctcct

SEQ ID NO: 542822 - DNA, 120 bp, Artificial Sequence
  ENSG00000167526_30 (sequence is synthesized)
cattccgttttgcaggattccttcggggtgtgagcatttcctattcagcctgtcgcccccggggagcacgggctggctctgtggtgcccgtggccttttgtagaagcgttggttttacgg

SEQ ID NO: 542823 - DNA, 120 bp, Artificial Sequence
  ENSG00000167526_31 (sequence is synthesized)
caggttcatctctggggcagcctcccacagtgggtggggctttgccagcagtgcccacgggggtcatggggccaggcgcgctccggcgcctgcagaactgatcggggatagtctcaggag

SEQ ID NO: 542824 - DNA, 120 bp, Artificial Sequence
  ENSG00000167526_32 (sequence is synthesized)
gcgctagtcacgtgccccggtgatcggggatagtctcagaaggcgctagtctcctgccccggtgatcggggatagtctcaggaggcacgagtcgcctgcctcggtgatgcaccgtttctc

SEQ ID NO: 542825 - DNA, 120 bp, Artificial Sequence
  ENSG00000167526_33 (sequence is synthesized)
acaccggctgctctggcccgagctaaaggggaagacgtgtgcggataggagctgcacacaattttcctccatgtattgtttattttgctttttcttttggctagacattaggaatttcag

SEQ ID NO: 542826 - DNA, 120 bp, Artificial Sequence
  ENSG00000167526_34 (sequence is synthesized)
ttttcccaagttgtatttttccttttctattttaaaattatcatgcagggctgggtgaggtcgctcacgcctatagtctcaaaactttgggaggctgaggggggaggatggcatgagccc

SEQ ID NO: 542827 - DNA, 120 bp, Artificial Sequence
  ENSG00000167526_35 (sequence is synthesized)
aggagtttaaggctgcagtgagccgagatcgctccactgtcctccagcctgcatgacagagcgagaccctatctcaggaaaaaaaaaaacaaaactattatgcagtagtttcgaccctgg

SEQ ID NO: 542828 - DNA, 120 bp, Artificial Sequence
  ENSG00000167526_36 (sequence is synthesized)
aagacgagtgtgcatctttgagttgtaacacgtgtacctcgcccatccaggcgtagtttcatttggaatctggttatcctgtagttgctttgttaaaaatatatgtaattgcaaatcatt

SEQ ID NO: 542829 - DNA, 120 bp, Artificial Sequence
  ENSG00000167526_37 (sequence is synthesized)
aggtgagggagactgggtcctggcctttgggcatcatccagcgccatcggcctggcgcttcagccaacgcgggagtggatgggccccttcttcttcgcagacagcgttcggccgctgccc

SEQ ID NO: 542830 - DNA, 120 bp, Artificial Sequence
  ENSG00000167526_38 (sequence is synthesized)
tcttcttcgcagacagcgttcggccgctgcccgggctctaggcgcggccggacggcccagtctggagggttcggggcggaggcccgggggggtgcgcgcgcccggggtccggcctctcac

SEQ ID NO: 542831 - DNA, 120 bp, Artificial Sequence
  ENSG00000167526_39 (sequence is synthesized)
tggccacgtggttcaaccagccggcccgtaagatccgcaggtgagccctgcgctcggggctgcccctggggctcgtgcccgcggctgcgccttggcttgcgggtggccgatgccagggcg

SEQ ID NO: 542832 - DNA, 120 bp, Artificial Sequence
  ENSG00000167526_40 (sequence is synthesized)
gggggcgctgtctgcaaccgtcgcggagcgctggcctggcggccttaggcaagggtgaccgccgctgcgcttctctccaccagacgtaaggcccggcaagccaaggcgcgccgcatcgcc

SEQ ID NO: 542833 - DNA, 120 bp, Artificial Sequence
  ENSG00000167526_41 (sequence is synthesized)
ccgaagtcccctctgttggcctcagtcgcgtgatgacattctccggaatcgctgtacggccttgatgaaagcacatttgaacccttttccatctgattgctgaggcttttcatccaggcc

SEQ ID NO: 542834 - DNA, 120 bp, Artificial Sequence
  ENSG00000167526_42 (sequence is synthesized)
tgagaagaaccaaaacattgtgggtgatgagctaagcgggactgctaaggttcacctgtgcgtttccgcagagataaccttaatggacatggcaaggctgtgtgacttggaggcagcttt

SEQ ID NO: 542835 - DNA, 120 bp, Artificial Sequence
  ENSG00000167526_43 (sequence is synthesized)
ttccattgacgttgctctccctaaaatgcttcgtattccaaaatatttctagaaagaccttgtaggataaggttgataaagagtccattgtatacgtttccgggtagttaaattagggaa

SEQ ID NO: 542836 - DNA, 120 bp, Artificial Sequence
  ENSG00000167526_44 (sequence is synthesized)
cagttttctctgccccgcccgtggttcacaggtagataactgtctcgtgcgtgttgcgtcaactcagtaagatatagtcacctaactaataaggactgttcttaacattggggccacaaa

SEQ ID NO: 542837 - DNA, 120 bp, Artificial Sequence
  ENSG00000167526_45 (sequence is synthesized)
gtgtgttgtagaaaaggctcagacactggtcctgaacacggaatccccaggggaaagtttggggccaggtgagggtggagtccttgcagcagtgcggccaaccccacttaactcttctca

SEQ ID NO: 542838 - DNA, 120 bp, Artificial Sequence
  ENSG00000167526_46 (sequence is synthesized)
ttcaccaacaggctgaagaactgaaactggccacccagctgaccggaccggtcatgcccgtccggaacgtaagtgaacacttactcaaatccaggcttcagacgagatcagtgggtgaac

SEQ ID NO: 542839 - DNA, 120 bp, Artificial Sequence
  ENSG00000167526_47 (sequence is synthesized)
acgtgggtatctgagatgcgggtgatgggggtcaggcttaagaacgttaatagtggcagttgtgggtgtggaggtttgcggaaaggaacatttcttcttagtttttacttcttgcaacca

SEQ ID NO: 542840 - DNA, 120 bp, Artificial Sequence
  ENSG00000167526_48 (sequence is synthesized)
tgaagccatacattgggaagtatttttgtttgttttgtgtttttttgttgttgttggaaagagagtttctctatgctgcttacattggttttgaattgctgggtttacaggcttgagccg

SEQ ID NO: 542841 - DNA, 120 bp, Artificial Sequence
  ENSG00000167526_49 (sequence is synthesized)
ccatgtccagctcagggagggtttttctttttttttttaaatcccagggaaggtgattgactcagggttgcttttcagcagtacttatggcagcgaacctgacccccaatccccgggagg

SEQ ID NO: 542842 - DNA, 120 bp, Artificial Sequence
  ENSG00000167526_50 (sequence is synthesized)
tcctccaggttctcctgacgcttggttgttcccttgccctttggtgcatgtgggtttaacaacctgtctttctcttctaggtctataagaaggagaaagctcgagtcatcactgaggaag

SEQ ID NO: 542843 - DNA, 120 bp, Artificial Sequence
  ENSG00000167526_51 (sequence is synthesized)
accggtcatgcccgtccggaacgtaagtgaacacttactcaaatccaggcttcagacgagatcagtgggtgaacacgtctataagaaggagaaagctcgagtcatcactgaggaagagaa

SEQ ID NO: 542844 - DNA, 120 bp, Artificial Sequence
  ENSG00000167528_0 (sequence is synthesized)
ggccgccggctcccagacgcaagcggagggcggaggggaggggcaggcggcgcccgggagggaggcaccgggccgcgggccaagcctaccgggggtcacaatttgggtctgcagcagaaa

SEQ ID NO: 542845 - DNA, 120 bp, Artificial Sequence
  ENSG00000167528_1 (sequence is synthesized)
ctgcagcagaaatgctttcagaacagacagcagcgctggggacaggatgggaatcaatgaatgtacagctggatggagcagagccccaggtggaaaggggaagccaggaagagcggccat

SEQ ID NO: 542846 - DNA, 120 bp, Artificial Sequence
  ENSG00000167528_2 (sequence is synthesized)
ggagaacagtaccaggacctctggagcacctgtgctgtgaccttgaagaggagccacagtcccttcaggagaaggctcagtctgctccctgggttcctgcaattccccaggaggggaaca

SEQ ID NO: 542847 - DNA, 120 bp, Artificial Sequence
  ENSG00000167528_3 (sequence is synthesized)
ctggagactgggagatggcagctgcacttcttgcggctggatcacagggcctggtaaccatcaaggatgtgtcactgtgcttctctcaggaggagtggcggagcctggacccctctcaga

SEQ ID NO: 542848 - DNA, 120 bp, Artificial Sequence
  ENSG00000167528_4 (sequence is synthesized)
cagacttttatggagaatatgtcatgcaggaaaactgtgggatagtagtctctctgagatttccaattcccaaactggacatgctttctcaactagaaggaggagaagaacaatgggtcc

SEQ ID NO: 542849 - DNA, 120 bp, Artificial Sequence
  ENSG00000167528_5 (sequence is synthesized)
ctgacccccaggacttagaggagagggacattctgagggtcacatatacaggagatggaagtgaacatgagggggatacccctgaactagaagcagaacctcccagaatgttatccagcg

SEQ ID NO: 542850 - DNA, 120 bp, Artificial Sequence
  ENSG00000167528_6 (sequence is synthesized)
tgtctgaagatactgttctctggaacccggagcatgatgagagctgggattccatgcccagcagctccagaggaatgctcctggggcccccttttcttcaggaagatagtttctcaaacc

SEQ ID NO: 542851 - DNA, 120 bp, Artificial Sequence
  ENSG00000167528_7 (sequence is synthesized)
tccctgttaagaccccacacatgcccccagtgtgggaaacagtttgtatggggttcccaccttgccaggcatcaacaaacacacactggggagagaccctacagctgcctcaagtgtgag

SEQ ID NO: 542852 - DNA, 120 bp, Artificial Sequence
  ENSG00000167528_8 (sequence is synthesized)
aagacctttgggcgaagacatcacctcatcaggcaccagaaaacccacctacatgacaagaccagcaggtgctctgagtgtggtaagaatttccgatgcaactcccatctggccagccac

SEQ ID NO: 542853 - DNA, 120 bp, Artificial Sequence
  ENSG00000167528_9 (sequence is synthesized)
cagagagtgcatgcagaaggcaaatcctgcaaaggccaagaggttggagagagccctggcacaaggaaacggcagcgtgccccaccagtgccaaagtgtcacgtgtgcactgaatgtggg

SEQ ID NO: 542854 - DNA, 120 bp, Artificial Sequence
  ENSG00000167528_10 (sequence is synthesized)
aagagctttggccgaaggcaccaccttgtgagacactggctgacccacactggggagaagcccttccagtgccctcgctgtgagaagagctttggccgaaaacatcacctggacaggcac

SEQ ID NO: 542855 - DNA, 120 bp, Artificial Sequence
  ENSG00000167528_11 (sequence is synthesized)
ctgctcacccaccagggacaaagtccccggaacagctgggacagaggaacatctgtcttttgaaatctgtttccactacagctatggtcaagtctatcagccggtgctaccaggagtcac

SEQ ID NO: 542856 - DNA, 120 bp, Artificial Sequence
  ENSG00000167528_12 (sequence is synthesized)
tgccagggctgccgttctcctgaaccccagtggccagaatcataagccctgaccccatccctagaaagatgaggtcccagcaatggccagagcatttctcaccagttctgtgagatagca

SEQ ID NO: 542857 - DNA, 120 bp, Artificial Sequence
  ENSG00000167528_13 (sequence is synthesized)
cataaaaatagagttctttgggcaaaacttttgggaagcaatgcatcctacatgggctgatattcagcctgagctgttctcaagaggagagtggtactggcagtttatggctgaaatcca

SEQ ID NO: 542858 - DNA, 120 bp, Artificial Sequence
  ENSG00000167528_14 (sequence is synthesized)
ttctgattggttggagtctatgctataccagttgttaaacattttgagtatcactcttgcatactgttactattatattttctctatatatagacagaaaggccattttagaatattaaa

SEQ ID NO: 542859 - DNA, 120 bp, Artificial Sequence
  ENSG00000167528_15 (sequence is synthesized)
ggccgccggctcccagacgcaagcggagggcggaggggaggggcaggcggcgcccgggagggaggcaccgggccgcgggccaagcctaccgggggtcccttgctacccatatgtgtgaag

SEQ ID NO: 542860 - DNA, 120 bp, Artificial Sequence
  ENSG00000167528_16 (sequence is synthesized)
atatgtgtgaagaaaagggggaaatgaaagccctagaacccacactgcagtgggcatgggatcatcctggaaccaggagaaacgaggttagggctaccaccttaaccgcccaggtgctgg

SEQ ID NO: 542861 - DNA, 120 bp, Artificial Sequence
  ENSG00000167528_17 (sequence is synthesized)
aggcagtgtttcctaaatgtatttgacctcagtatcctttctatttacatcccacagaactggtgactatgaaacactctggtgaacactgggttagagagtaacaaggaaacaagagat

SEQ ID NO: 542862 - DNA, 120 bp, Artificial Sequence
  ENSG00000167528_18 (sequence is synthesized)
tacatcacctctcaccctcacctgctgaaaaaataacctttttacccattattcctactcccttcatcctgcacatacatatatccagctgagagatcacactacaaggctaagagatga

SEQ ID NO: 542863 - DNA, 120 bp, Artificial Sequence
  ENSG00000167528_19 (sequence is synthesized)
tctaatacccccaaatagccctggcccacacagaaaaacagaaaaacaaaaaaaactttatccccttgaacagtcccctctctcctcttgactgtctttatgtgtctgtgtatttgtgtg

SEQ ID NO: 542864 - DNA, 120 bp, Artificial Sequence
  ENSG00000167528_20 (sequence is synthesized)
cagggtctttgaagacagcatgctatgtgcaaactgtacaagctaggttttctaggggctgtgttctggggatgagggtagtggggattatatggggttttttctttgtttcaagacagg

SEQ ID NO: 542865 - DNA, 120 bp, Artificial Sequence
  ENSG00000167528_21 (sequence is synthesized)
aagcagtctggttaagggagaactagtggaaagggttaaatgacaggttaagttgagtacaaagctttcccagtactgctgagattaagacaattgtggatgtgtatgtctaggtttgaa

SEQ ID NO: 542866 - DNA, 120 bp, Artificial Sequence
  ENSG00000167528_22 (sequence is synthesized)
tctctgggctgcagattgcttttgccctggcagagaaagaggagtctttggggaggtgagctgtttcttgttgatttcaggcaagaggcacatagaaactttgtattgagtggggatttt

SEQ ID NO: 542867 - DNA, 120 bp, Artificial Sequence
  ENSG00000167528_23 (sequence is synthesized)
gttttaagtgctggaaaattagggcaggaattacgtgtttgcaagttgttgccatcactggtttgaatttgactgcctcatcaaggggcaagagttattcttgaagatctcattctccca

SEQ ID NO: 542868 - DNA, 120 bp, Artificial Sequence
  ENSG00000167528_24 (sequence is synthesized)
gaaacagaactttagggaaaatggctgtggcttagcttttcagctgctgcagggtaataagctttctggttggttttccttccaattctggaaaggtgtccacactaagacccttaactc

SEQ ID NO: 542869 - DNA, 120 bp, Artificial Sequence
  ENSG00000167528_25 (sequence is synthesized)
tagggcttgcataagtattctagcatcgttagctaatgagttggtcattgtttctctttatcaataattgtgttaataccaatcttataatttaaaaattatcttgtatgtaagagcagt

SEQ ID NO: 542870 - DNA, 120 bp, Artificial Sequence
  ENSG00000167528_26 (sequence is synthesized)
tcggggttagggaggaagaggagcaaagtgggatattttctctttaatgcttagatactgtttcttccctaagatgtgtttctcaaccacaattggtggaatgaaccagagaggcaagag

SEQ ID NO: 542871 - DNA, 120 bp, Artificial Sequence
  ENSG00000167528_27 (sequence is synthesized)
gaagtgaattgcaccaatttagtttagcgactgtgccttttgcaggaaaaactgggtgaatcacagctcctcagagtcctggactcaactagaattgaagatagacttattttgctgact

SEQ ID NO: 542872 - DNA, 120 bp, Artificial Sequence
  ENSG00000167528_28 (sequence is synthesized)
gggcttcttagagtttatgtgacttgaacagcttggcccctgcctcccttctgctactgtgagcagccttccttcttccttcattcttcctggaatgcagttctcttgcttatgatccta

SEQ ID NO: 542873 - DNA, 120 bp, Artificial Sequence
  ENSG00000167528_29 (sequence is synthesized)
tgaataaggcaaaatggctggtctttgtaaggcaggtcttgccctagcttctcagaaacaggagcattttaggatcagtattaggagatgccccagggagtaagaaagtattgggttcag

SEQ ID NO: 542874 - DNA, 120 bp, Artificial Sequence
  ENSG00000167528_30 (sequence is synthesized)
tgataaatctggactctgacatttcttttactctccctctttaatactaaaagctctgcataagcaatggttcagaacctgtcttgggtacagacctgttgaatctgacagaaaccagaa

SEQ ID NO: 542875 - DNA, 120 bp, Artificial Sequence
  ENSG00000167528_31 (sequence is synthesized)
acgcacttttgagaaaaagacatttgtaattcactcagttttccatacacatttagcaggttcaaagcccatctgtggaatccctaaactgccttcaaagaaagggagttccccgatcta

SEQ ID NO: 542876 - DNA, 120 bp, Artificial Sequence
  ENSG00000167528_32 (sequence is synthesized)
aaatggtcattatatatttgtgtcaagaattagaaggcaagggtcactaaatattttaaggattaaggtaccagaggcatcagtggtataaggatggagtctggtctttaattacgacaa

SEQ ID NO: 542877 - DNA, 120 bp, Artificial Sequence
  ENSG00000167528_33 (sequence is synthesized)
gggtattgcttacattctactctctggttttcaaaaagatctgacatgctgacaaatccagctcctcacaaatcttgtttgaaggacttgtgggaagtgatattccttactattagatca

SEQ ID NO: 542878 - DNA, 120 bp, Artificial Sequence
  ENSG00000167528_34 (sequence is synthesized)
cgccccttataactacatgttaacatccagccttttatctgtttgagtaattgtagggatagaaagtgaagcccccagagttaggtgcaagtatagcacccagctgaaaggcatcatgga

SEQ ID NO: 542879 - DNA, 120 bp, Artificial Sequence
  ENSG00000167528_35 (sequence is synthesized)
gtctaagggccttctacagaaggggcaatcctttgggttatttctggtgtaccactgtcttctctacctcggtccaacaccacctctcttggacaaaaaataaaacaagcaacagccatc

SEQ ID NO: 542880 - DNA, 120 bp, Artificial Sequence
  ENSG00000167528_36 (sequence is synthesized)
agatgagtgaatagatttgaatgatttttcccacagggaatcagcctcaaatgttcatgtttcaccccgtcccctttaaataaaaagaatctctgtgttctctttgggcaaaatgtaaaa

SEQ ID NO: 542881 - DNA, 120 bp, Artificial Sequence
  ENSG00000167528_37 (sequence is synthesized)
catgttcgtttaatccctcctctgcctcagagagttccagagacaaaaggtttagagatttttttcttcaaaagcaagggagtgtaatagaatgatgtagcaggcactttgtggatttga

SEQ ID NO: 542882 - DNA, 120 bp, Artificial Sequence
  ENSG00000167528_38 (sequence is synthesized)
ggggcactgtgacaagaagaagggaagaagcaaccttacccctgagcaggctcccgtcccgcccatgccctacccgtggcaggggccagggttctctgatggacggagccaactcgtccg

SEQ ID NO: 542883 - DNA, 120 bp, Artificial Sequence
  ENSG00000167528_39 (sequence is synthesized)
gtggtcccatcactgctgcctttgtattgctttcgcatcagcccattgatgagttggctcacatgatcatcaatggatttccaattcccaaactggacatgctttctcaactagaaggag

SEQ ID NO: 542884 - DNA, 120 bp, Artificial Sequence
  ENSG00000167528_40 (sequence is synthesized)
aagtgactcctcctcagtgctctctcaagccctttatcctatcgtgaaaactagagggtacgctccttgaggaattccagactgttgtctggagaaatcgctctcggcctcggtctggcc

SEQ ID NO: 542885 - DNA, 120 bp, Artificial Sequence
  ENSG00000167528_41 (sequence is synthesized)
gccggagggagctgcggctggagggagggacgcctggcttcccggggcggctggtgggggctcggtcacccataggggctgggaggaggatcggcgcgtcttccgggttgctgcctttcc

SEQ ID NO: 542886 - DNA, 120 bp, Artificial Sequence
  ENSG00000167528_42 (sequence is synthesized)
cgggggtctgccccgctgacattctgtgcccgcctctcgccctgtctccccgtgcccatcgcaactgtcaggccctgcgggctcccgccgctgtcactcgcgcacaggttaccccgtggc

SEQ ID NO: 542887 - DNA, 120 bp, Artificial Sequence
  ENSG00000167528_43 (sequence is synthesized)
tcccctttccaccccaacatagtatctttcaaagaatcccttgcataggagactgtaaccgaaagtgttagcttttcaccaggctatttacactttacgccttagttctaattgtggaag

SEQ ID NO: 542888 - DNA, 120 bp, Artificial Sequence
  ENSG00000167528_44 (sequence is synthesized)
gaaaaacttttcccttgtcaaagtaatgttatggcttcagagaaccaaagaggtgataatttgggacaaaattcctccctttccaacattcctgcaatcaaatcactgtttcctatttcc

SEQ ID NO: 542889 - DNA, 120 bp, Artificial Sequence
  ENSG00000167528_45 (sequence is synthesized)
atcaagggcaggtcctgactcagacctacaaaggccagaaggccagttctttccatctctgaattaggatgcatgcactgaatgggagtgggtggggctgggcaatatcagaaaagtgaa

SEQ ID NO: 542890 - DNA, 120 bp, Artificial Sequence
  ENSG00000167528_46 (sequence is synthesized)
atccattcctttagatccttagagagcctgagctagcaaaattttcctcttttcccttgtgagccataccaaactgtggctctcaaaatttggtctttgggccagcagcataaatatcac

SEQ ID NO: 542891 - DNA, 120 bp, Artificial Sequence
  ENSG00000167528_47 (sequence is synthesized)
ctggaaacttgtttgaaatgcaaattcttagcccccgccccaggagaactactgaatcagaaactcgggaaggagctcaacgttcagtcttttaactaaatgccctcctggatgtgtgat

SEQ ID NO: 542892 - DNA, 120 bp, Artificial Sequence
  ENSG00000167528_48 (sequence is synthesized)
acaagctaaagtttgagaaccactggctaggggattcatatttcaagcagtggtacctcacccttttcggatggatcttcacactcctgttgtcaggtttattctctgtagcctcactag

SEQ ID NO: 542893 - DNA, 120 bp, Artificial Sequence
  ENSG00000167528_49 (sequence is synthesized)
gctagacctcagttccattccccttagttgcaaggtcttcttccactcttaactcagtaaaagaactggggctagtcaccaatatcagaaactatggtggggcaactaccaagctcctgt

SEQ ID NO: 542894 - DNA, 120 bp, Artificial Sequence
  ENSG00000167528_50 (sequence is synthesized)
gattcattggggctggggcttccaatatgggcactgaggatacttgggtccagaaatctgaaaggacagaaaggaataaacaactcaaaggtggaaaatccaatgtaaaactgaaaaact

SEQ ID NO: 542895 - DNA, 120 bp, Artificial Sequence
  ENSG00000167528_51 (sequence is synthesized)
gacatccgaggaaatgattctcctttgccttgtccttttcactggctcttctaataagaggcaggtggagtgggcatctagcacaaaggtagagtaaggcctaccatgccaagcccttaa

SEQ ID NO: 542896 - DNA, 120 bp, Artificial Sequence
  ENSG00000167528_52 (sequence is synthesized)
gaacccaagttttccaacataaaaattggattagagaccaacgaggggccatggaagggatttctaaccatgatttggcataccctatgggcaagggcagcaggaacatcagagtcccca

SEQ ID NO: 542897 - DNA, 120 bp, Artificial Sequence
  ENSG00000167528_53 (sequence is synthesized)
gggcataagagagaactaggtttttctagtaagatttgacacaagcaagatttaaatccagactctgcttactaggtagaggttgtaaccaatgaagccatggtgcccaaaatgcattct

SEQ ID NO: 542898 - DNA, 120 bp, Artificial Sequence
  ENSG00000167528_54 (sequence is synthesized)
gctgcttagaagattctgacagattcaggctgtggggaggaatctgccttgcagtctctgaccctgctacctcctccagttcctctcccaggcgcacctatgaggacagactgaactgac

SEQ ID NO: 542899 - DNA, 120 bp, Artificial Sequence
  ENSG00000167528_55 (sequence is synthesized)
agttataaatctgcccacaggtcttctccaaggtcaaaagattagaccccaaggctgagactttcttcaactccaggcctcatgctgtctccctctttcctgccaccacctcctttttcc

SEQ ID NO: 542900 - DNA, 120 bp, Artificial Sequence
  ENSG00000167528_56 (sequence is synthesized)
caacaggcagcattcttcctctacaatttgttcatactctttttcagatttttttgtttgtttgagttttgctttgttctgactgagcaataacatgcccttccaagggcatttgttctc

SEQ ID NO: 542901 - DNA, 120 bp, Artificial Sequence
  ENSG00000167528_57 (sequence is synthesized)
tccaacccccattccttcttccattctagtttatctcttcaagcttctggccaattctattccatcatgagtccacttactacctattcctctgcctactgtccagtttcttttctatca

SEQ ID NO: 542902 - DNA, 120 bp, Artificial Sequence
  ENSG00000167528_58 (sequence is synthesized)
gctttaagcctactaagcaggggtcaattcatacttaccactctcatcctccaaattcttggcttggctatagcagttcatcagccacctcaccactctgcccctttctcatacacactc

SEQ ID NO: 542903 - DNA, 120 bp, Artificial Sequence
  ENSG00000167528_59 (sequence is synthesized)
ccacaggacaccaccactactccaccccctgcctagtactgccaaatctggcccctctactccattccctagaggttcttcttccaatcaggtaacttccaaagttgttttccacttttc

SEQ ID NO: 542904 - DNA, 120 bp, Artificial Sequence
  ENSG00000167528_60 (sequence is synthesized)
caatcaggtaacttccaaagttgttttccacttttcaccatttttaatttacttccttccagtctcctgtgactcctgagaatcaaactctctctttttttttttttgagatggagtctt

SEQ ID NO: 542905 - DNA, 120 bp, Artificial Sequence
  ENSG00000167528_61 (sequence is synthesized)
ccaaactctcaattctacaagcaattttttgtgtccttattatgtgccaggcactggcaatttcaggcctgggagatcaaatgtgacccttgctcctgctctcagtgtgttcttcagcca

SEQ ID NO: 542906 - DNA, 120 bp, Artificial Sequence
  ENSG00000167528_62 (sequence is synthesized)
agccctcccccaccaccactttcctgccttgtctcttgccaccaggcacctgggcatcctcttccaggaaactttggggatgaatgcccacttgccatgcagcccaactgctccgtgcct

SEQ ID NO: 542907 - DNA, 120 bp, Artificial Sequence
  ENSG00000167528_63 (sequence is synthesized)
atcagatttctagctattatctgaattggttccttctgatgaactgtgaacttccttgggttacccaacaggggacttatggtccctgtcagttgaataaaagatgtattggctgtgtca

SEQ ID NO: 542908 - DNA, 120 bp, Artificial Sequence
  ENSG00000167531_0 (sequence is synthesized)
atttcaggttcttgggggtagccaaaatgaggttctttgtccctctgttcctggtgggcatcctgttccctgccatcctggccaagcaattcacaaaatgtgagctgtcccagctgctga

SEQ ID NO: 542909 - DNA, 120 bp, Artificial Sequence
  ENSG00000167531_1 (sequence is synthesized)
aagacatagatggttatggaggcatcgctttgcctgaattgatctgtaccatgtttcacaccagtggttatgacacacaagccatagttgaaaacaatgaaagcacggaatatggactct

SEQ ID NO: 542910 - DNA, 120 bp, Artificial Sequence
  ENSG00000167531_2 (sequence is synthesized)
tccagatcagtaataagctttggtgcaagagcagccaggtccctcagtcaaggaacatctgtgacatctcctgtgacaagttcctggatgatgacattactgatgacataatgtgtgcca

SEQ ID NO: 542911 - DNA, 120 bp, Artificial Sequence
  ENSG00000167531_3 (sequence is synthesized)
ctggatattaaaggaattgactactggttggcccataaagccctctgcactgagaagctggaacagtggctttgtgagaagttgtgagtgtctgctgtccttggcacccctgcccactcc

SEQ ID NO: 542912 - DNA, 120 bp, Artificial Sequence
  ENSG00000167531_4 (sequence is synthesized)
acactcctggaatacctcttccctaatgccacctcagtttgtttctttctgttcccccaaagcttatctgtctctgagccttgggccctgtagtgacatcaccgaattcttgaagactat

SEQ ID NO: 542913 - DNA, 120 bp, Artificial Sequence
  ENSG00000167531_5 (sequence is synthesized)
tttccagggatgcctgagtggtgcactgagctctagacccttactcagtgccttcgatggcactttcactacagcacagatttcacctctgtcttgaataaaggtcccactttgaagtca

SEQ ID NO: 542914 - DNA, 120 bp, Artificial Sequence
  ENSG00000167531_6 (sequence is synthesized)
tttcctcttaccctatctcttggtcatttaatctagaatacagtgtctgaaacaaagcttacctagagactcaggtttctgttattaagcctctctcgctccgctccttggtagcaattt

SEQ ID NO: 542915 - DNA, 120 bp, Artificial Sequence
  ENSG00000167531_7 (sequence is synthesized)
cctttcacttagacttggacatctaattccacttgtttagttctatgccctaaagcaagctgttggtaacattgcatctcttttttaaccctacaattttcttggatattttttatggac

SEQ ID NO: 542916 - DNA, 120 bp, Artificial Sequence
  ENSG00000167531_8 (sequence is synthesized)
tgtattccacttgatggcttgtgtcgcttgacatcaggccaggaatgtctttctgtaattctcgtccacgctcttccacttcagccctcctgggaatgaatgtaaagattcagtcagcta

SEQ ID NO: 542917 - DNA, 80 bp, Artificial Sequence
  ENSG00000167535_0 (sequence is synthesized)
ccccttcctccccgccgccacggccccgtaggtgctcggggacccaccttccacctagcacgggttcgttcccctctccc

SEQ ID NO: 542918 - DNA, 120 bp, Artificial Sequence
  ENSG00000167535_1 (sequence is synthesized)
gcccccgccttctcccggggagggggtcaggtgggcgggcactattgttgtaggagccggcgccagattcctcagccgcgctcggggtgggaccggctgggtttgggggggtggggtggg

SEQ ID NO: 542919 - DNA, 120 bp, Artificial Sequence
  ENSG00000167535_2 (sequence is synthesized)
gggagcggtgatctgagctccgagcagctggtcttcgcggctcgctccctccttcgcgctctctcgctccctgccgccgcccgcagggctgcggggctcggtggcatctcccgggcgcgg

SEQ ID NO: 542920 - DNA, 120 bp, Artificial Sequence
  ENSG00000167535_3 (sequence is synthesized)
cccgcagtccttgcccctgcctccgggccgctcccgcccccggcgccgctcgctcccccgacccggactcccccatgtatgacgactcctacgtgcccgggtttgaggactcggaggcgg

SEQ ID NO: 542921 - DNA, 120 bp, Artificial Sequence
  ENSG00000167535_4 (sequence is synthesized)
gttcagccgactcctacaccagccgcccatctctggactcagacgtctccctggaggaggaccgggagagtgcccggcgtgaagtagagagccaggctcagcagcagctcgaaagggcca

SEQ ID NO: 542922 - DNA, 120 bp, Artificial Sequence
  ENSG00000167535_5 (sequence is synthesized)
agcacaaacctgtggcatttgcggtgaggaccaatgtcagctactgtggcgtactggatgaggagtgcccagtccagggctctggagtcaactttgaggccaaagattttctgcacatta

SEQ ID NO: 542923 - DNA, 120 bp, Artificial Sequence
  ENSG00000167535_6 (sequence is synthesized)
aagagaagtacagcaatgactggtggatcgggcggctagtgaaagagggcggggacatcgccttcatccccagcccccagcgcctggagagcatccggctcaaacaggagcagaaggcca

SEQ ID NO: 542924 - DNA, 120 bp, Artificial Sequence
  ENSG00000167535_7 (sequence is synthesized)
ggagatctgggaacccttccagcctgagtgacattggcaaccgacgctcccctccgccatctctagccaagcagaagcaaaagcaggcggaacatgttcccccatatgacgtggtgccct

SEQ ID NO: 542925 - DNA, 120 bp, Artificial Sequence
  ENSG00000167535_8 (sequence is synthesized)
ccatgcggcctgtggtgctggtgggaccctctctgaaaggttatgaggtcacagacatgatgcagaaggctctcttcgacttcctcaaacacagatttgatggcaggatctccatcaccc

SEQ ID NO: 542926 - DNA, 120 bp, Artificial Sequence
  ENSG00000167535_9 (sequence is synthesized)
gagtcacagccgacctctccctggcaaagcgatctgtgctcaacaatccgggcaagaggaccatcattgagcgctcctctgcccgctccagcattgcggaagtgcagagtgagatcgagc

SEQ ID NO: 542927 - DNA, 120 bp, Artificial Sequence
  ENSG00000167535_10 (sequence is synthesized)
gcatatttgagctggccaaatccctgcagctagtagtgttggacgctgacaccatcaaccacccagcacagctggccaagacctcgctggcccccatcatcgtctttgtcaaagtgtcct

SEQ ID NO: 542928 - DNA, 120 bp, Artificial Sequence
  ENSG00000167535_11 (sequence is synthesized)
caccaaaggtactccagcgtctcattcgctcccgggggaagtcacagatgaagcacctgaccgtacagatgatggcatatgataagctggttcagtgcccaccggagtcatttgatgtga

SEQ ID NO: 542929 - DNA, 120 bp, Artificial Sequence
  ENSG00000167535_12 (sequence is synthesized)
tggaggtttactggcgggccacgcaccacccagcccctggccccggacttctgggtcctcccagtgccatccccggacttcagaaccagcagctgctgggggagcgtggcgaggagcact

SEQ ID NO: 542930 - DNA, 120 bp, Artificial Sequence
  ENSG00000167535_13 (sequence is synthesized)
ccccccttgagcgggacagcttgatgccctctgatgaggccagcgagagctcccgccaagcctggacaggatcttcacagcgtagctcccgccacctggaggaggactatgcagatgcct

SEQ ID NO: 542931 - DNA, 120 bp, Artificial Sequence
  ENSG00000167535_14 (sequence is synthesized)
accaggacctgtaccagcctcaccgccaacacacctcggggctgcctagtgctaacgggcatgacccccaagaccggcttctagcccaggactcagagcacaaccacagtgaccggaact

SEQ ID NO: 542932 - DNA, 120 bp, Artificial Sequence
  ENSG00000167535_15 (sequence is synthesized)
ggcagcgcaaccggccttggcccaaggatagctactgacagcctcctgctgccctaccctggcaggcacaggcgcagctggctggggggcccactccaggcagggtggcgttagactggc

SEQ ID NO: 542933 - DNA, 120 bp, Artificial Sequence
  ENSG00000167535_16 (sequence is synthesized)
atcaggctggcactaggctcagcccccaaaaccccctgcccagccccagcttcagggctgcctgtggtcccaaggttctgggagaaacaggggaccccctcacctcctgggcagtgaccc

SEQ ID NO: 542934 - DNA, 120 bp, Artificial Sequence
  ENSG00000167535_17 (sequence is synthesized)
ctactaggctcccattccaggtactagctgtgtgttctgcacccctggcaccttcctctcctcccacacaggaagctgccccactgggcagtgccctcaggccaggatccccttagcagg

SEQ ID NO: 542935 - DNA, 120 bp, Artificial Sequence
  ENSG00000167535_18 (sequence is synthesized)
gtccttcccaccagactcagggaagggatgccccattaaagtgacaaaagggtggggtgtgggcaccatggcatgaggaagaaacaaggtccctgagcaggcacaagtcctgacagtcaa

SEQ ID NO: 542936 - DNA, 120 bp, Artificial Sequence
  ENSG00000167535_19 (sequence is synthesized)
gggactgctttggcatccagggcctccagtcacctcactgccatacattagaaatgagacaatcaaagcccccccagggtggcacacccatctgtttgctggggtgtggcagccacatcc

SEQ ID NO: 542937 - DNA, 120 bp, Artificial Sequence
  ENSG00000167535_20 (sequence is synthesized)
aagactggagcagcaggctggccacgctcgggccagagagagctcacagctgaagctcttggagggaagggctctcctcaccctgccaggaagcttcttaacatgtgacaggaccaggga

SEQ ID NO: 542938 - DNA, 120 bp, Artificial Sequence
  ENSG00000167535_21 (sequence is synthesized)
ccaggagcatggtgaagccaagtggcagatgggagccaacctggatgggggtttggggaaggagggcatgtgtagcagagaacttaggggggcctccttgcctttctcattcttttgccc

SEQ ID NO: 542939 - DNA, 120 bp, Artificial Sequence
  ENSG00000167535_22 (sequence is synthesized)
tgcatcctgtcatttctgttcttgtccctcatacatctttggagaaccgggctccagactttgttccctgactcatagctgccgcttgttaggttagggttagatggggagagacagggc

SEQ ID NO: 542940 - DNA, 120 bp, Artificial Sequence
  ENSG00000167535_23 (sequence is synthesized)
acagaggacctgtctccccggctactcttgccttatggctctagtgtgtgacctacagagcatgctccacaagcccctgcctcacctcactgtcatcactaataaacatcatgcacagtc

SEQ ID NO: 542941 - DNA, 120 bp, Artificial Sequence
  ENSG00000167535_24 (sequence is synthesized)
aggcgtgcaggcgggagcagcgtgcagagcagcggccgggttttgctcccgcctcggagcccctggcccgggggagggggagaggccgctagcctggtctatgtctttttctgactccag

SEQ ID NO: 542942 - DNA, 120 bp, Artificial Sequence
  ENSG00000167535_25 (sequence is synthesized)
cctttgtttcccggcggagtagttcctgggttgccgagcgtctctgtctccgcatctctcctcgccccgcctcctccctgcctggatccgccctgcccgcagcctctcctccccttcctc

SEQ ID NO: 542943 - DNA, 120 bp, Artificial Sequence
  ENSG00000167535_26 (sequence is synthesized)
tcccccgacccggactcccccatgtatgacgactcctacgtgcccgggtttgaggactcggaggcgccccctgctgaggcttcctctgcagcgggcatcctgagctcttgcccagcatgg

SEQ ID NO: 542944 - DNA, 120 bp, Artificial Sequence
  ENSG00000167535_27 (sequence is synthesized)
agggcctggaggtgaggccagaggagctgagggcctggggatggagaggaagcgctttgctcagagaaacaggcaaccgataaatatttaattctcctctttgcttttatctcctgaccc

SEQ ID NO: 542945 - DNA, 120 bp, Artificial Sequence
  ENSG00000167535_28 (sequence is synthesized)
actgagacaaatcagctcattaagcagtgattcccggagctcagacagcagggagagtgcctggaaagatggggcaagaatgcggagcagcttctcagccccttggagctgacaactttc

SEQ ID NO: 542946 - DNA, 120 bp, Artificial Sequence
  ENSG00000167535_29 (sequence is synthesized)
gtcgcttcgcctcgcccttccccttcgcggagctgagacccgctgcaccagaacccaggagaggggggagacggcagagactccgcgggcgcggggcgatcccagctgggctctctccac

SEQ ID NO: 542947 - DNA, 120 bp, Artificial Sequence
  ENSG00000167535_30 (sequence is synthesized)
agggatgccgatccctctggagacacagagccgagccggggacgggtggatgggcgccttgacgcttgggcgggcgagcagagcaccagcactcttgcttttcggtcctttcccccgccg

SEQ ID NO: 542948 - DNA, 120 bp, Artificial Sequence
  ENSG00000167535_31 (sequence is synthesized)
aggtcggggtcgcagccgccgccggaggatgggcggccggcgcacggagcagggccgggagggagcagaagcttccgccaagagctcaggagctggggcagccctggagctcttcctgcc

SEQ ID NO: 542949 - DNA, 120 bp, Artificial Sequence
  ENSG00000167535_32 (sequence is synthesized)
cttctgcccgcggcggcggaaactccagagtccctactctttctcgggaggactttagggaagaagcagagcggcaggggaagccgaggagcgagggtgcgacgtggggatggaaggaca

SEQ ID NO: 542950 - DNA, 120 bp, Artificial Sequence
  ENSG00000167535_33 (sequence is synthesized)
gtgggaggcacacggaaaaacagaacgaggaccttagacaggagagacggaagtggagagaggctgggctgaaaggcagggagagccagagactgacagaggcggcgagaaaggaaggga

SEQ ID NO: 542951 - DNA, 120 bp, Artificial Sequence
  ENSG00000167535_34 (sequence is synthesized)
ctgaaagaaggaattgaagagaaaggatgaaagagggggatacaaggaatactgcgtaactgggtgagggcacaaaagtgggcagtgtctgggaacttccaatacagaagaatccagtat

SEQ ID NO: 542952 - DNA, 120 bp, Artificial Sequence
  ENSG00000167535_35 (sequence is synthesized)
atgaccaaaccccagttggtgctggactcaggagaggagacagtcccttcagccacaggggctgcaacaaagttgtttgtcaaacccagcatgaggaaggtgctgggcagggctgctctg

SEQ ID NO: 542953 - DNA, 120 bp, Artificial Sequence
  ENSG00000167535_36 (sequence is synthesized)
cattggcaaccgacgctcccctccgccatctctaggtagcctccccccaacccacccattttgggtaggtgggtagctaagacacagggaaagaggggatcctgcccaagtgaactgtgt

SEQ ID NO: 542954 - DNA, 120 bp, Artificial Sequence
  ENSG00000167535_37 (sequence is synthesized)
gggaagggtttgtggagggattggaaggggtggggagaagccagtatctcccctggggacggggataccatgcccccagggacctttcccccttcaccaactttaatcttgtatttcctt

SEQ ID NO: 542955 - DNA, 120 bp, Artificial Sequence
  ENSG00000167535_38 (sequence is synthesized)
ttccaaaaagccaagcagaagcaaaagcaggtgagtcaaggaagggacctgggctggggggatcatggcttatggctctggggacagtgttctaggcagtcattgttggagggcagaaca

SEQ ID NO: 542956 - DNA, 120 bp, Artificial Sequence
  ENSG00000167535_39 (sequence is synthesized)
agaaaggggcgggaggggtactgacccgaggagcggtcccgcgactctgtactccctgctgcccagtcccggccaggacgctgcccggcttagctggggcgcccctcgagaccaggatgg

SEQ ID NO: 542957 - DNA, 120 bp, Artificial Sequence
  ENSG00000167535_40 (sequence is synthesized)
ttttcttgctcttgctccagatcctaatgcttctgacttgaatcctcagtctaattccccaagctaatcagctcttctccttaacacacacctgtccacccctcatatctaagatctcat

SEQ ID NO: 542958 - DNA, 120 bp, Artificial Sequence
  ENSG00000167535_41 (sequence is synthesized)
agttcctgggttgccgagcgtctctgtctccgcatctctcctcgccccgcctcctccctgcctggatccgccctgcccgcagcctctcctccccttcctccccgccgccacggccccgca

SEQ ID NO: 542959 - DNA, 120 bp, Artificial Sequence
  ENSG00000167535_42 (sequence is synthesized)
agagaggagctgcagcctgcccacacactcactaggcaaggggggcaccaccagggcactgtgccaactcctggcagctccaaagtactgaaactctggctattttggcgtagcagggta

SEQ ID NO: 542960 - DNA, 120 bp, Artificial Sequence
  ENSG00000167535_43 (sequence is synthesized)
ggaaagaggagttcatgttcaagtcttctcccatcacttactgccaggcccaggatagatgaatgctgatgttcagaataggcaactgtccttttctgggactggtctccttctgggccc

SEQ ID NO: 542961 - DNA, 120 bp, Artificial Sequence
  ENSG00000167535_44 (sequence is synthesized)
aattctccatggggcctctggggctaattacattgccgctagatcagatcattttcaaggctctggtggacacctctttctgacagttgaagggacagctggtatagcccagggtgccaa

SEQ ID NO: 542962 - DNA, 120 bp, Artificial Sequence
  ENSG00000167535_45 (sequence is synthesized)
ggtgagcttgaaaacaaacctctctgtggggctggatggccctaggaggttcttcccatccctggtgagaaggcaagggctattgcaaggagcagactgacatgtggatggtgttggagg

SEQ ID NO: 542963 - DNA, 120 bp, Artificial Sequence
  ENSG00000167535_46 (sequence is synthesized)
gcagcctgctgacccattgctccctcccatctctctctggctctgatcaccctcccccacttccctttctcttgcctggctccttgctctccctgaggccccctctgaagcagtaggagg

SEQ ID NO: 542964 - DNA, 120 bp, Artificial Sequence
  ENSG00000167535_47 (sequence is synthesized)
ggacttgggagtaatggagagggggttccattctgagcacaactcattaaatatttaggaagagatcctgtgattcccatcccagggtgagaggtcaggtaagccagatgcctcaggcgt

SEQ ID NO: 542965 - DNA, 74 bp, Artificial Sequence
  ENSG00000167535_48 (sequence is synthesized)
cccagggtgagaggtcaggtaagccagatgcctcaggcgttatgattactaaattaggccgccagatcacttga

SEQ ID NO: 542966 - DNA, 89 bp, Artificial Sequence
  ENSG00000167535_49 (sequence is synthesized)
tactaaattaaaccaggcatagagactcatgcctataatcccaatgctttgggaggctaaggtaggaagatggcttaagcccaggagtt

SEQ ID NO: 542967 - DNA, 120 bp, Artificial Sequence
  ENSG00000167535_50 (sequence is synthesized)
tgagaccagcctaggcaacatagcaagatcctgtctctacaaaaaactagtaggcatggtagcgcatgcctgtagtcgtagctactcaggagacaggaggatcgcttgagcccaggagtt

SEQ ID NO: 542968 - DNA, 89 bp, Artificial Sequence
  ENSG00000167535_51 (sequence is synthesized)
aaaaaactagtaggcatggtagcgcatgcctgtagtcgtagctactcaggagacctgcagtgagctacgattgtgccactacactccag

SEQ ID NO: 542969 - DNA, 120 bp, Artificial Sequence
  ENSG00000167535_52 (sequence is synthesized)
ctaaagatgtcagtctgaagatgcagctcttctttgtcttgccaagataacaccgataagtgacccaggtgggaagccacttggtttgggtgggctttctctctcccatgcacagtgctt

SEQ ID NO: 542970 - DNA, 80 bp, Artificial Sequence
  ENSG00000167536_0 (sequence is synthesized)
ctcctgcccgcctccgccttcggaggctgacgcgcccgggcgccgttccaggcctgtgcagggcggatcggcagccgcct

SEQ ID NO: 542971 - DNA, 120 bp, Artificial Sequence
  ENSG00000167536_1 (sequence is synthesized)
ggaggcgcggccggcatggaggcgctgctgctgggcgcggggttgctgctgggcgcttacgtgcttgtctactacaacctggtgaaggccccgccgtgcggcggcatgggcaacctgcgg

SEQ ID NO: 542972 - DNA, 120 bp, Artificial Sequence
  ENSG00000167536_2 (sequence is synthesized)
ggccgcacggccgtggtcacgggcgccaacagcggcatcggaaagatgacggcgctggagctggcgcgccggggagcgcgcgtggtgctggcctgccgcagccaggagcgcggggaggcg

SEQ ID NO: 542973 - DNA, 120 bp, Artificial Sequence
  ENSG00000167536_3 (sequence is synthesized)
gctgccttcgacctccgccaggagagtgggaacaatgaggtcatcttcatggccttggacttggccagtctggcctcggtgcgggcctttgccactgcctttctgagctctgagccacgg

SEQ ID NO: 542974 - DNA, 120 bp, Artificial Sequence
  ENSG00000167536_4 (sequence is synthesized)
ttggacatcctcatccacaatgccggtatcagttcctgtggccggacccgtgaggcgtttaacctgctgcttcgggtgaaccatatcggtccctttctgctgacacatctgctgctgcct

SEQ ID NO: 542975 - DNA, 120 bp, Artificial Sequence
  ENSG00000167536_5 (sequence is synthesized)
tgcctgaaggcatgtgcccctagccgcgtggtggtggtagcctcagctgcccactgtcggggacgtcttgacttcaaacgcctggaccgcccagtggtgggctggcggcaggagctgcgg

SEQ ID NO: 542976 - DNA, 120 bp, Artificial Sequence
  ENSG00000167536_6 (sequence is synthesized)
gcatatgctgacactaagctggctaatgtactgtttgcccgggagctcgccaaccagcttgaggccactggcgtcacctgctatgcagcccacccagggcctgtgaactcggagctgttc

SEQ ID NO: 542977 - DNA, 120 bp, Artificial Sequence
  ENSG00000167536_7 (sequence is synthesized)
ctgcgccatgttcctggatggctgcgcccacttttgcgcccattggcttggctggtgctccgggcaccaagagggggtgcccagacacccctgtattgtgctctacaagagggcatcgag

SEQ ID NO: 542978 - DNA, 120 bp, Artificial Sequence
  ENSG00000167536_8 (sequence is synthesized)
gggagatattttgccaactgccatgtggaagaggtgcctccagctgcccgagacgaccgggcagcccatcggctatgggaggccagcaagaggctggcagggcttgggcctggggaggat

SEQ ID NO: 542979 - DNA, 120 bp, Artificial Sequence
  ENSG00000167536_9 (sequence is synthesized)
gctgaacccgatgaagacccccagtctgaggactcagaggccccatcttctctaagcaccccccaccctgaggagcccacagtttctcaaccttaccccagccctcagagctcaccagat

SEQ ID NO: 542980 - DNA, 120 bp, Artificial Sequence
  ENSG00000167536_10 (sequence is synthesized)
ttgtctaagatgacgcaccgaattcaggctaaagttgagcctgagatccagctctcctaaccctcaggccaggatgcttgccatggcacttcatggtccttgaaaacctcggatgtgtgc

SEQ ID NO: 542981 - DNA, 120 bp, Artificial Sequence
  ENSG00000167536_11 (sequence is synthesized)
gaggccatgccctggacactgacgggtttgtgatcttgacctccgtggttactttctggggccccaagctgtgccctggacatctcttttcctggttgaaggaataatgggtgattattt

SEQ ID NO: 542982 - DNA, 120 bp, Artificial Sequence
  ENSG00000167536_12 (sequence is synthesized)
cttcctgagagtgacagtaaccccagatggagagataggggtatgctagacactgtgcttctcggaaatttggatgtagtattttcaggccccacccttattgattctgatcagctctgg

SEQ ID NO: 542983 - DNA, 120 bp, Artificial Sequence
  ENSG00000167536_13 (sequence is synthesized)
agcagaggcagggagtttgcaatgtgatgcactgccaacattgagaattagtgaactgatccctttgcaaccgtctagctaggtagttaaattacccccatgttaatgaagcggaattag

SEQ ID NO: 542984 - DNA, 120 bp, Artificial Sequence
  ENSG00000167536_14 (sequence is synthesized)
gctcccgagctaagggactcgcctagggtctcacagtgagtaggaggagggcctgggatctgaacccaagggtctgaggccagggccgactgccgtaagatgggtgctgagaagtgagtc

SEQ ID NO: 542985 - DNA, 120 bp, Artificial Sequence
  ENSG00000167536_15 (sequence is synthesized)
agggcagggcagctggtatcgaggtgccccatgggagtaaggggacgccttccgggcggatgcagggctggggtcatctgtatctgaagcccctcggaataaagcgcgttgaccgccgaa

SEQ ID NO: 542986 - DNA, 120 bp, Artificial Sequence
  ENSG00000167536_16 (sequence is synthesized)
gagcaacactttgtcttatggaagaggttataccaggataacaagatctgtcatattcatattaccatactgcattttagatagtcactgcctaaggctcattagtaattataatagcga

SEQ ID NO: 542987 - DNA, 120 bp, Artificial Sequence
  ENSG00000167536_17 (sequence is synthesized)
acaggacttgagctagaagaaaagatggagagagactgagaattgtttcagacatgggacacagcatgaacaaaatctgggatgtggggtgaacaagcagtctggatggaagcgaagagg

SEQ ID NO: 542988 - DNA, 120 bp, Artificial Sequence
  ENSG00000167536_18 (sequence is synthesized)
cttcatgcaggaaatgagtgaagtcacctcgcagaagccccgaatgcctgggcctgtgaactcggagctgttcctgcgccatgttcctggatggctgcgcccacttttgcgcccattggc

SEQ ID NO: 542989 - DNA, 120 bp, Artificial Sequence
  ENSG00000167536_19 (sequence is synthesized)
gtggagaccatgaacagccctcagtaggctccggactgtcagaatagcctttggaaggaactcctttgtggctgcgtggtgcctggagtgggggggcaagagcgggagagaggagaccag

SEQ ID NO: 542990 - DNA, 120 bp, Artificial Sequence
  ENSG00000167536_20 (sequence is synthesized)
tgagaagttacagattttagggtaaatggtaatggggaaaggaggtgataataataatagcaagtacctacccagtgctgctagagtgtattttacacgttaactcctttcatcctcaca

SEQ ID NO: 542991 - DNA, 120 bp, Artificial Sequence
  ENSG00000167536_21 (sequence is synthesized)
aaagctcagtgagattgggactgttgttattattattccctttacgcagtgagagaactgagacccagagagattaagtatcttgcccaaggtcacactttagtaaaaggcaaagtcagg

SEQ ID NO: 542992 - DNA, 80 bp, Artificial Sequence
  ENSG00000167536_22 (sequence is synthesized)
ggccgtggtcacgggtgagtgcggaggcgggtgagtgcgagctggcggggcgcgcggagaggaggccgggccggcggtag

SEQ ID NO: 542993 - DNA, 120 bp, Artificial Sequence
  ENSG00000167543_0 (sequence is synthesized)
gctccctcgctggcggagcggctgggcggcgggccgggcccggggccgcttggaatggcgcctcctccgccttcgccccaactgcttctcctggcagccctcgcgaggctcctgggtccc

SEQ ID NO: 542994 - DNA, 120 bp, Artificial Sequence
  ENSG00000167543_1 (sequence is synthesized)
tcccagcgaggtgatggctggaccggcggaggaggcgggagcccattgtcccgagagcctgtggcctctgcctccgcaggtgtcaccaagagtgacctacacacgagtgagcccagggca

SEQ ID NO: 542995 - DNA, 120 bp, Artificial Sequence
  ENSG00000167543_2 (sequence is synthesized)
ggctgaggatgtcaccttcctctaccacccctgtgcccatccctggctgaagctccagcttgccctcctggcctatgcttgtatggctaacccttccctcacccctgacttcagcctcac

SEQ ID NO: 542996 - DNA, 120 bp, Artificial Sequence
  ENSG00000167543_3 (sequence is synthesized)
gcaggatcggcccctggtgctgactgcatgggggctggcgctggagatggcctgggtagagccagcctgggctgcccactggctgatgaggaggcggaggaggaagcagaggaagaagaa

SEQ ID NO: 542997 - DNA, 120 bp, Artificial Sequence
  ENSG00000167543_4 (sequence is synthesized)
ggcatggatctactgtgaaagcctttcagggcctgctccctccgagccaactcccggtagagggaggctgtgccgaagagggtgtgtgcaggccctggctctggcctttgctctgcggag

SEQ ID NO: 542998 - DNA, 120 bp, Artificial Sequence
  ENSG00000167543_5 (sequence is synthesized)
ctggcggccccctggcacagaggtgacatctcaagggcccaggcagccctcttctagtggtgccaagaggcggaggctgcgggctgcccttggtccccagcccactcgctcagccctgag

SEQ ID NO: 542999 - DNA, 120 bp, Artificial Sequence
  ENSG00000167543_6 (sequence is synthesized)
caagcagtccatggcgggaatccctggtagggagagtaatgccccatctgtgcccactgtctccctgctgccgggggcgcctggaggcaatgccagctccaggacagaggctcaggtgcc

SEQ ID NO: 543000 - DNA, 120 bp, Artificial Sequence
  ENSG00000167543_7 (sequence is synthesized)
caacgggcaaggcagcccagggggctgtgtctgttcaagtcaggcttccccggcccctcgcgcagcagcgcctccacgggcagcccggggccccaccccacgcactgaagaggccgcctg

SEQ ID NO: 543001 - DNA, 120 bp, Artificial Sequence
  ENSG00000167543_8 (sequence is synthesized)
ggctgccatggccctgaccttcctgctggtgctgctcaccctggccacgctctgcacacggctgcacagaaacttccgacgcggggagagcatctactgggggcccacagcggacagcca

SEQ ID NO: 543002 - DNA, 120 bp, Artificial Sequence
  ENSG00000167543_9 (sequence is synthesized)
ggacacagtggctgctgtgctgaagcggaggctgctgcagccctcgcgccgggtcaagcgctcgcgccggagacccctcctcccgcccacgccggacagcggcccggaaggcgagagctc

SEQ ID NO: 543003 - DNA, 120 bp, Artificial Sequence
  ENSG00000167543_10 (sequence is synthesized)
ggagtgacggcctgggacctgccactgtggcgtgcggctcctccccgcgccgcgaggccgcgacctctgccacgtggaccgcgcgcggggcgctccctggtggcgatggcgcggcactgg

SEQ ID NO: 543004 - DNA, 120 bp, Artificial Sequence
  ENSG00000167543_11 (sequence is synthesized)
ccgagcactgcgggggctttcctccttgttggttgctgagtgggcggccaaggggagaaaaggagccgcttctgcctcccttgccaaaactccgtttctaattaaattatttttagtaga

SEQ ID NO: 543005 - DNA, 120 bp, Artificial Sequence
  ENSG00000167543_12 (sequence is synthesized)
aattgcaacaagtgggagcagagggtgagaggagccggggccaccagggagggagggcgcgccggcagccggaagggagtggggagggcacgagccggggagagcggtgttggccatgga

SEQ ID NO: 543006 - DNA, 120 bp, Artificial Sequence
  ENSG00000167543_13 (sequence is synthesized)
gacgtggggagactggaggccgaggcttggggacccgactgtcatcagggtcttccgccagaccctgggcgctgcgccctcagaggccgatgaaaagaagcagaagggagaggtcacacc

SEQ ID NO: 543007 - DNA, 120 bp, Artificial Sequence
  ENSG00000167543_14 (sequence is synthesized)
gacaaatctgaagcgggtttgccaggggagtgtacccgtctccccagcctgggccacccggtccacagggattccatttccggccttacactccgctccacgatctcatccaggcgctgc

SEQ ID NO: 543008 - DNA, 120 bp, Artificial Sequence
  ENSG00000167543_15 (sequence is synthesized)
gcagctgctctacagactgcagggacctgctgagacgaatccccggacgaggaaaggggccccccgcctgccctactgagccttgcgcgctgacccggttcctacacttaacttttccgg

SEQ ID NO: 543009 - DNA, 120 bp, Artificial Sequence
  ENSG00000167543_16 (sequence is synthesized)
gatgtatgtgaccgcctccttgaggtcggacgggtccccgaaaggctgcagccgggggctgaccagtgggcaaccgtggtggccgcggcgatggaagatgaccgggtagtagccgcgctc

SEQ ID NO: 543010 - DNA, 120 bp, Artificial Sequence
  ENSG00000167543_17 (sequence is synthesized)
tcaccagaagcaccgcaggaaggcccccggcgctggtgatccggcggccccgaacacaaggtcctaccacccagtccagggccactagcccatcgtccgccaactgcagaccctgggcgc

SEQ ID NO: 543011 - DNA, 120 bp, Artificial Sequence
  ENSG00000167543_18 (sequence is synthesized)
tgcgccctcagaggccgatgaaaagaagcagaagggagaggtgagtaagtcgcagctccgggcgccggctcccgggaccccgtggggcggcggccgcgcgcgcgctctgccctcgggcgg

SEQ ID NO: 543012 - DNA, 120 bp, Artificial Sequence
  ENSG00000167543_19 (sequence is synthesized)
ttaagtaagcttcgtctgacctctccacatccttggttcctctccagttgtgtcgggctgtttgccacacaaatgagtgccagcctcgcccttaccacagcccctttgctcctgtttatt

SEQ ID NO: 543013 - DNA, 120 bp, Artificial Sequence
  ENSG00000167543_20 (sequence is synthesized)
ctcctccacacctggcctatcctgactcggagagtgcagctccctgccctcctgccatactcccccagccatcttcccagtcccagctggcatcagctccccctgagacactgcccgatg

SEQ ID NO: 543014 - DNA, 120 bp, Artificial Sequence
  ENSG00000167543_21 (sequence is synthesized)
gcatcagcctttattcctcccctcctcctctgaatctatctctgataatttaacaactaatcactaagttttattagtttgctgttttatttgcattagttgtttccctgagtttctcac

SEQ ID NO: 543015 - DNA, 120 bp, Artificial Sequence
  ENSG00000167543_22 (sequence is synthesized)
acactccttgcaagcagagtccaggagttctttggcatctcccacagcatctagcacagcactgagcaccaagtcaactcaatcaaagaataatgaatgattgatggagtatttccatcc

SEQ ID NO: 543016 - DNA, 120 bp, Artificial Sequence
  ENSG00000167543_23 (sequence is synthesized)
tgagattgtgcacctgctgcctgcctgccctgtatttggatgctcttgggagactgtatagattggatcgatggtcttcatttgggggttgcttatggcttggattgtggacctgtagag

SEQ ID NO: 543017 - DNA, 120 bp, Artificial Sequence
  ENSG00000167543_24 (sequence is synthesized)
ccatcgttacacctgcagggaaatatggctagagtgtggtctgagtctggcaggattatccaggcatgctgtgagctttgaagggtggcacttgatggagaggaagggtgaaaggaacac

SEQ ID NO: 543018 - DNA, 120 bp, Artificial Sequence
  ENSG00000167543_25 (sequence is synthesized)
tcagaggcaagagtgggtacatgccaatacccagggccctttgtcctttcctgggccctgaaggtagaagagccatccagctatcctgggagtacctttaaactggtcccctggatggga

SEQ ID NO: 543019 - DNA, 120 bp, Artificial Sequence
  ENSG00000167543_26 (sequence is synthesized)
gccgcaccctccacagtcaccatctgaggacctctgccggttcctcagtcctcagtagccaacttctccatcccagcctggcgcttggggcctgccgtcccctccccaccacacacacac

SEQ ID NO: 543020 - DNA, 120 bp, Artificial Sequence
  ENSG00000167543_27 (sequence is synthesized)
ggagtcccccaactgccctaagctctgttctttccccatgtataggtgtcaccaagagtgacctacacacgagtgagcccagggcaggtgagtacaagcaggggcccaccacccttggtg

SEQ ID NO: 543021 - DNA, 120 bp, Artificial Sequence
  ENSG00000167543_28 (sequence is synthesized)
ctttccatgctggtctgcggcctccgttacccacctgctgagggcgatcttctggtggagcagaaagccccgctcgtagggccagggcaggccggcctcgaaccactctcggcagcgcag

SEQ ID NO: 543022 - DNA, 120 bp, Artificial Sequence
  ENSG00000167543_29 (sequence is synthesized)
acgggcgagatgcaggcggcgcctgtcacgtagctggaggagccgcactcgcccaggtcacaccgacaaatctgaagcgggtttgccaggggagtgtacccgtctccccagcctgggcca

SEQ ID NO: 543023 - DNA, 120 bp, Artificial Sequence
  ENSG00000167543_30 (sequence is synthesized)
gggcgacggcggaggtggggaagacagcagcctctcggctagctccggcctcccggggcttctgggtttggagagtttggggagcggagacacctcccgaggctcctccgcgttggaccc

SEQ ID NO: 543024 - DNA, 120 bp, Artificial Sequence
  ENSG00000167543_31 (sequence is synthesized)
gtaaggtgacccgctcctgggaaggcctcggcccgcgagctcaaagcgctttgccaaaagttcgtcctggaaggagtggcgcgccgagggggacgcggagttcttccgctggcgggctgg

SEQ ID NO: 543025 - DNA, 120 bp, Artificial Sequence
  ENSG00000167548_0 (sequence is synthesized)
atggacagccagaagctggctggtgaggataaagattcagaaccggcagctgatggacctgcagcttctgaggacccaagtgccactgagtcagacctgcccaacccacatgtgggagag

SEQ ID NO: 543026 - DNA, 120 bp, Artificial Sequence
  ENSG00000167548_1 (sequence is synthesized)
gtctctgtccttagttctgggagtcccaggcttcaggagactcctcaggactgcagtgggggtccggtgcggcgttgtgctctctgtaactgcggggagcccagtctacacgggcagcgg

SEQ ID NO: 543027 - DNA, 120 bp, Artificial Sequence
  ENSG00000167548_2 (sequence is synthesized)
gagctacggcgctttgagttgccatttgattggccccggtgtccagtggtgtcccctggggggagcccagggcccaatgaggcagtgctgcccagtgaggacctatcacagattggtttc

SEQ ID NO: 543028 - DNA, 120 bp, Artificial Sequence
  ENSG00000167548_3 (sequence is synthesized)
cctgagggccttacacctgcccacctaggagaacctggagggtcctgctgggctcaccattggtgtgctgcatggtcggcaggcgtatgggggcaggagggcccagaactatgtggtgtg

SEQ ID NO: 543029 - DNA, 120 bp, Artificial Sequence
  ENSG00000167548_4 (sequence is synthesized)
gacaaggccatcttctcagggatctcacagcgctgctcccactgcaccaggctcggtgcctccatcccttgccgctcacctggatgtccacggctttaccacttcccctgcgcgactgcc

SEQ ID NO: 543030 - DNA, 120 bp, Artificial Sequence
  ENSG00000167548_5 (sequence is synthesized)
agcggttccttcctatccatgaaaacactgcagctgctatgcccagagcacagtgagggggctgcatatctggaggaggctcgctgtgcagtgtgtgaggggccaggggagttgtgtgac

SEQ ID NO: 543031 - DNA, 120 bp, Artificial Sequence
  ENSG00000167548_6 (sequence is synthesized)
ctgttcttctgtaccagctgtgggcatcactatcacggggcctgcctggacactgctctgactgcccgcaaacgtgctggctggcagtgccctgaatgcaaagtgtgccaagcctgcagg

SEQ ID NO: 543032 - DNA, 120 bp, Artificial Sequence
  ENSG00000167548_7 (sequence is synthesized)
aaacctgggaatgactctaagatgttggtttgtgagacgtgtgacaaaggataccatactttctgcctaaaaccacccatggaggaactgcctgctcactcttggaagtgcaaggcgtgc

SEQ ID NO: 543033 - DNA, 120 bp, Artificial Sequence
  ENSG00000167548_8 (sequence is synthesized)
cgggtgtgccgggcctgtggggcgggctcagcagaactgaatcccaactcggagtggtttgagaactactctctctgtcaccgctgtcacaaagcccagggaggtcagactatccgctcc

SEQ ID NO: 543034 - DNA, 120 bp, Artificial Sequence
  ENSG00000167548_9 (sequence is synthesized)
gttgctgagcagcataccccggtgtgtagcagattttcacccccagagcctggcgatacccccactgacgagcccgatgctctgtacgttgcatgccaagggcagccaaagggtgggcac

SEQ ID NO: 543035 - DNA, 120 bp, Artificial Sequence
  ENSG00000167548_10 (sequence is synthesized)
gtgacctctatgcaacccaaggaaccagggcccctgcaatgtgaagccaaaccactagggaaagcaggggtccaacttgagccccagttggaggcccccctaaacgaggagatgccactg

SEQ ID NO: 543036 - DNA, 120 bp, Artificial Sequence
  ENSG00000167548_11 (sequence is synthesized)
ctgcccccacctgaggagtcacccctgtccccaccacctgaggaatcacccacgtccccaccacctgaggcatcacgcctgtcaccaccacctgaggaattgcccgcatccccacttcct

SEQ ID NO: 543037 - DNA, 120 bp, Artificial Sequence
  ENSG00000167548_12 (sequence is synthesized)
gaggcattgcacctgtcccggccgctggaggaatcgcccctctctccgccgcctgaggagtctcctctgtctcccccacctgaatcatcacctttttctccactggaggagtcgcccttg

SEQ ID NO: 543038 - DNA, 120 bp, Artificial Sequence
  ENSG00000167548_13 (sequence is synthesized)
tctccaccggaagagtcacccccatctcctgcacttgagacgcctctatccccaccacctgaagcatcgcccctgtccccaccatttgaagaatctcctttgtccccgccacctgaggaa

SEQ ID NO: 543039 - DNA, 120 bp, Artificial Sequence
  ENSG00000167548_14 (sequence is synthesized)
ttgcccacttccccgccacctgaagcatctcgcctgtctccaccacctgaggagtcacccatgtcccctccacctgaagagtcacccatgtctccaccaccggaggcatctcgtctgttc

SEQ ID NO: 543040 - DNA, 120 bp, Artificial Sequence
  ENSG00000167548_15 (sequence is synthesized)
ccaccatttgaagagtctcctctgtcccctccacctgaggagtctcccctttccccaccacctgaggcatcacgcctgtccccaccacctgaggactcgcctatgtccccaccacctgaa

SEQ ID NO: 543041 - DNA, 120 bp, Artificial Sequence
  ENSG00000167548_16 (sequence is synthesized)
gaatcacctatgtcccccccacctgaggtatcgcgcctatcccccctgcctgtggtgtcacgcctgtctccaccgcctgaggaatctcccttgtccccaccgcctgaggagtctcccacg

SEQ ID NO: 543042 - DNA, 120 bp, Artificial Sequence
  ENSG00000167548_17 (sequence is synthesized)
tcccctccacctgaggcttcacgcctctccccaccacctgaggactcccccacatccccaccacctgaggactcacctgcttccccaccaccggaggactcgctcatgtccctgccgctg

SEQ ID NO: 543043 - DNA, 120 bp, Artificial Sequence
  ENSG00000167548_18 (sequence is synthesized)
gaggagtcacccctgttgccactacctgaggagccgcaactctgcccccggtccgaggggccgcacctgtcaccccggcctgaggagccgcacctgtccccccggcctgaggagccacac

SEQ ID NO: 543044 - DNA, 120 bp, Artificial Sequence
  ENSG00000167548_19 (sequence is synthesized)
ctatctccgcaggctgaggagccacacctgtccccccagcctgaggagccatgcctatgcgctgtgcctgaggagccacacttgtccccccaggctgagggaccacatctgtcccctcag

SEQ ID NO: 543045 - DNA, 120 bp, Artificial Sequence
  ENSG00000167548_20 (sequence is synthesized)
cctgaggaattgcacctgtccccccagactgaggagccgcacctgtctcctgtgcctgaggagccatgcttgtccccccaacctgaggaatcacacctgtccccccagtctgaggagcca

SEQ ID NO: 543046 - DNA, 120 bp, Artificial Sequence
  ENSG00000167548_21 (sequence is synthesized)
tgcctgtccccccggcctgaggaatcgcatctgtcccctgagcttgagaagccacccctgtcccctcggcctgaaaagccccctgaggagccaggccaatgccctgcacctgaggagctg

SEQ ID NO: 543047 - DNA, 120 bp, Artificial Sequence
  ENSG00000167548_22 (sequence is synthesized)
cccttgttccctccccctggggaaccatccttatctcccttgcttggagagccagccctgtctgagcctggggaaccacctctgtcccctctgcccgaggagctgccgttgtccccatct

SEQ ID NO: 543048 - DNA, 120 bp, Artificial Sequence
  ENSG00000167548_23 (sequence is synthesized)
ggggagccatccttgtcgcctcagctgatgccaccagatccccttcctcctccactctcacccatcatcacagctgcggccccaccggccctgtctcctttgggggagttagagtacccc

SEQ ID NO: 543049 - DNA, 120 bp, Artificial Sequence
  ENSG00000167548_24 (sequence is synthesized)
tttggtgccaaaggggacagtgaccctgagtcaccgttggctgcccccatcctggagacacccatcagccctccaccagaagctaactgcactgaccctgagcctgtcccccctatgatc

SEQ ID NO: 543050 - DNA, 120 bp, Artificial Sequence
  ENSG00000167548_25 (sequence is synthesized)
cttcccccatctccaggctccccagtggggccggcttctcccatcctgatggagccccttcctcctcagtgttcgccactccttcagcattccctggttccccaaaactcccctccttcc

SEQ ID NO: 543051 - DNA, 120 bp, Artificial Sequence
  ENSG00000167548_26 (sequence is synthesized)
cagtgctctcctcctgccctaccactgtccgttccctccccgttgagtcccatagggaaggtagtgggggtctcagatgaggctgagctgcacgagatggagactgagaaagtttcagaa

SEQ ID NO: 543052 - DNA, 120 bp, Artificial Sequence
  ENSG00000167548_27 (sequence is synthesized)
cctgaatgcccagccttggaacccagtgccaccagtcctctcccttccccaatgggggacctttcctgccccgcccccagccctgccccagccctggatgacttctctggcctaggggaa

SEQ ID NO: 543053 - DNA, 120 bp, Artificial Sequence
  ENSG00000167548_28 (sequence is synthesized)
gacacagcccctctggatgggattgatgctccgggttcacagccagagcctggacagacccctggcagtttggctagtgaacttaaaggctcccctgtgctcctggaccccgaggagctg

SEQ ID NO: 543054 - DNA, 120 bp, Artificial Sequence
  ENSG00000167548_29 (sequence is synthesized)
gcccctgtgacccctatggaggtctaccccgaatgcaagcagacagcagggcagggctcaccatgtgaagaacaggaagagccacgtgcaccggtggcccccacaccacccactctcatc

SEQ ID NO: 543055 - DNA, 120 bp, Artificial Sequence
  ENSG00000167548_30 (sequence is synthesized)
aaatccgacatcgttaacgagatctctaatctgagccagggtgatgccagtgccagttttcctggctcagagcccctcctgggctctccagacccggaggggggtggctccctgtccatg

SEQ ID NO: 543056 - DNA, 120 bp, Artificial Sequence
  ENSG00000167548_31 (sequence is synthesized)
gagttgggggtctctacggatgttagtccagcccgagatgagggctccctacggctctgtactgactcactgccagagactgatgactcactattgtgcgatgctgggacagctatcagc

SEQ ID NO: 543057 - DNA, 120 bp, Artificial Sequence
  ENSG00000167548_32 (sequence is synthesized)
ggaggcaaagctgagggggagaaggggcggcggcgcagctccccagcccgttcccgcatcaaacagggtcgcagcagcagtttcccaggaagacgccggcctcgtggaggagcccatgga

SEQ ID NO: 543058 - DNA, 120 bp, Artificial Sequence
  ENSG00000167548_33 (sequence is synthesized)
ggacgtggtagaggacgggcccggctaaagtcaactgcttcttccattgagactctggtagttgctgacattgatagctctcccagtaaggaggaggaggaagaagatgatgacaccatg

SEQ ID NO: 543059 - DNA, 120 bp, Artificial Sequence
  ENSG00000167548_34 (sequence is synthesized)
cagaataccgtggttctcttctccaacacagacaaatttgtcctaatgcaggacatgtgtgtggtatgtggcagctttggccggggggcagagggccacctccttgcctgttcgcagtgc

SEQ ID NO: 543060 - DNA, 120 bp, Artificial Sequence
  ENSG00000167548_35 (sequence is synthesized)
tctcagtgctatcacccttactgtgtcaacagcaagatcaccaaggtgatgctgctcaagggctggcgttgtgtggagtgtattgtgtgtgaggtgtgtggccaggcctccgacccctca

SEQ ID NO: 543061 - DNA, 120 bp, Artificial Sequence
  ENSG00000167548_36 (sequence is synthesized)
cgcctgctgctctgtgatgactgtgatattagctaccacacatactgcctggaccccccactgctcaccgtccccaagggcggctggaagtgcaagtggtgtgtgtcctgtatgcagtgt

SEQ ID NO: 543062 - DNA, 120 bp, Artificial Sequence
  ENSG00000167548_37 (sequence is synthesized)
ggggctgcttcccctggcttccactgtgaatggcagaatagttacacacactgtgggccctgtgccagcctggtgacctgccctatctgtcatgctccttacgtagaagaggacctacta

SEQ ID NO: 543063 - DNA, 120 bp, Artificial Sequence
  ENSG00000167548_38 (sequence is synthesized)
atccagtgccgccactgtgaacggtggatgcatgcaggctgtgagagcctcttcacagaggacgatgtggagcaggcagccgatgaaggctttgactgtgtctcctgccagccctacgtg

SEQ ID NO: 543064 - DNA, 120 bp, Artificial Sequence
  ENSG00000167548_39 (sequence is synthesized)
gtaaagcctgtggcgcctgttgcacctccagagctggtgcccatgaaggtgaaagagccagagccccagtactttcgcttcgaaggtgtgtggctgacagaaactggcatggccttgctg

SEQ ID NO: 543065 - DNA, 120 bp, Artificial Sequence
  ENSG00000167548_40 (sequence is synthesized)
cgtaacctgaccatgtcaccactgcacaagcggcgccaacggcgaggacggcttggcctcccaggcgaggcaggattggagggttctgagccctcagatgcccttggccctgatgacaag

SEQ ID NO: 543066 - DNA, 120 bp, Artificial Sequence
  ENSG00000167548_41 (sequence is synthesized)
aaggatggggacctggacaccgatgagctgctcaagggtgaaggtggtgtggagcacatggagtgcgaaattaaactggagggccccgtcagccctgatgtggagcctggcaaagaggag

SEQ ID NO: 543067 - DNA, 120 bp, Artificial Sequence
  ENSG00000167548_42 (sequence is synthesized)
accgaggaaagcaaaaaacgcaagcgtaaaccatatcggcctggcattggtggtttcatggtgcgacagcggaaatcccacacacgcacgaaaaaggggcctgctgcacaggcggaggtg

SEQ ID NO: 543068 - DNA, 120 bp, Artificial Sequence
  ENSG00000167548_43 (sequence is synthesized)
ttgagtggggatgggcagcccgacgaggtgatacctgctgacctgcctgcagagggcgccgtggagcagagcttagctgaaggggatgagaagaagaagcaacagcggcgagggcgcaag

SEQ ID NO: 543069 - DNA, 120 bp, Artificial Sequence
  ENSG00000167548_44 (sequence is synthesized)
aagagcaaactggaggacatgttccctgcttacttgcaggaagccttctttgggaaggagctgctggacctgagccgtaaggccctttttgcagttggggtgggccggccaagctttgga

SEQ ID NO: 543070 - DNA, 120 bp, Artificial Sequence
  ENSG00000167548_45 (sequence is synthesized)
ctagggaccccaaaagccaagggagatggaggctcagaaaggaaggaactccccacatcgcagaaaggagatgatggtccagatattgcagatgaagaatcccgtggcctcgagggcaaa

SEQ ID NO: 543071 - DNA, 120 bp, Artificial Sequence
  ENSG00000167548_46 (sequence is synthesized)
gccgatacaccaggacctgaggatgggggcgtgaaggcatccccagtgcccagtgaccctgagaagccaggcaccccaggtgaagggatgcttagctctgacttagacaggatttccaca

SEQ ID NO: 543072 - DNA, 120 bp, Artificial Sequence
  ENSG00000167548_47 (sequence is synthesized)
gaagaactgcccaagatggaatccaaggacctgcagcagctcttcaaggatgttctgggctctgaacgagaacagcatctgggttgtggaacccctggcctagaaggcagccgtacgcca

SEQ ID NO: 543073 - DNA, 120 bp, Artificial Sequence
  ENSG00000167548_48 (sequence is synthesized)
ctgcagaggccctttcttcaaggtggactccctttgggcaatctgccctccagcagcccaatggactcctacccaggcctctgccagtccccgttcctggattctagggagcgcgggggc

SEQ ID NO: 543074 - DNA, 120 bp, Artificial Sequence
  ENSG00000167548_49 (sequence is synthesized)
ttctttagcccggaacccggtgagcccgacagcccctggacgggctcaggtggcaccacgccctccacccccacaacccccaccacggagggtgagggcgacggactctcctataaccag

SEQ ID NO: 543075 - DNA, 120 bp, Artificial Sequence
  ENSG00000167548_50 (sequence is synthesized)
cggagtcttcagcgctgggagaaggatgaggagttgggccagctgtccaccatctcacctgtgctctatgccaacattaattttcctaatctcaagcaagactacccagactggtcaagc

SEQ ID NO: 543076 - DNA, 120 bp, Artificial Sequence
  ENSG00000167548_51 (sequence is synthesized)
cgttgcaaacaaatcatgaagctctggagaaaggttccagcagctgacaaagccccctacctgcaaaaggccaaagataaccgggcagctcaccgcatcaacaaggtgcagaagcaggct

SEQ ID NO: 543077 - DNA, 120 bp, Artificial Sequence
  ENSG00000167548_52 (sequence is synthesized)
gagagccagatcaacaagcagaccaaggtgggcgacatagcccgtaagactgaccgaccggccctacatctccgcattcccccgcagccaggggcactgggcagcccgccccccgctgct

SEQ ID NO: 543078 - DNA, 120 bp, Artificial Sequence
  ENSG00000167548_53 (sequence is synthesized)
gcccccaccattttcattggcagccccactacccccgccggcttgtctacctctgcggacgggttcctgaagccgccggcgggctcggtgcctggccctgactcgcctggtgagctcttc

SEQ ID NO: 543079 - DNA, 120 bp, Artificial Sequence
  ENSG00000167548_54 (sequence is synthesized)
ctcaagctcccaccccaggtgcccgcccaagtgccttcgcaggacccctttggactggcccctgcctatcccctggagccccgcttccccacggcaccgcccacctatcccccctatcct

SEQ ID NO: 543080 - DNA, 120 bp, Artificial Sequence
  ENSG00000167548_55 (sequence is synthesized)
agtcctacgggggcccctgcgcagcccccgatgctgggcgcctcatctcgtcctggggctggccagccaggggaattccacactaccccacctggcacccccagacaccagccctccaca

SEQ ID NO: 543081 - DNA, 120 bp, Artificial Sequence
  ENSG00000167548_56 (sequence is synthesized)
cctgacccattcctcaaaccccgctgcccctcgctggataacttggctgtgcctgagagccctggggtagggggaggcaaagcttccgagcccctgctctcgcccccaccttttggggag

SEQ ID NO: 543082 - DNA, 120 bp, Artificial Sequence
  ENSG00000167548_57 (sequence is synthesized)
tcccggaaggccctagaggtgaagaaggaagagcttggggcatcctctcctagctatgggcccccaaacctgggctttgttgactcaccctcctcaggcacccacctgggtggcctggag

SEQ ID NO: 543083 - DNA, 120 bp, Artificial Sequence
  ENSG00000167548_58 (sequence is synthesized)
ttaaagacacctgatgtcttcaaagcccccctgacccctcgggcatctcaggtagagccccagagcccgggcttgggcctaaggccccaggagccaccccctgcccaggctttggcacct

SEQ ID NO: 543084 - DNA, 120 bp, Artificial Sequence
  ENSG00000167548_59 (sequence is synthesized)
tctcctccaagtcacccagacatctttcgccctggctcctacactgacccatatgctcagcccccattgactcctcggccccaacctccgccccctgagagctgctgtgctctgccccct

SEQ ID NO: 543085 - DNA, 120 bp, Artificial Sequence
  ENSG00000167548_60 (sequence is synthesized)
cgctcactgccctccgaccctttctcccgagtgcctgccagtcctcagtcccagtccagctcccagtctccactgacaccccggcctctgtctgctgaagctttttgcccatcacccgtt

SEQ ID NO: 543086 - DNA, 120 bp, Artificial Sequence
  ENSG00000167548_61 (sequence is synthesized)
acccctcgcttccagtcccctgacccttattctcgcccaccctcacgccctcagtcccgtgacccatttgccccattgcataagccaccccgaccccagccccctgaagttgcctttaag

SEQ ID NO: 543087 - DNA, 120 bp, Artificial Sequence
  ENSG00000167548_62 (sequence is synthesized)
gctgggtctctagcccacacttcgctgggggctggggggttcccagcagccctgcccgcggggccagcaggtgagctccatgccaaggtcccaagtgggcagccccccaattttgtccgg

SEQ ID NO: 543088 - DNA, 120 bp, Artificial Sequence
  ENSG00000167548_63 (sequence is synthesized)
tcccctgggacgggtgcatttgtgggcaccccctctcccatgcgtttcactttccctcaggcagtaggggagccttccctaaagccccctgtccctcagcctggtctcccgccaccccat

SEQ ID NO: 543089 - DNA, 120 bp, Artificial Sequence
  ENSG00000167548_64 (sequence is synthesized)
gggatcaacagccattttgggcccggccccaccttgggcaagcctcaaagcacaaactacacagtagccacagggaacttccacccatcgggcagccccctggggcccagcagcgggtcc

SEQ ID NO: 543090 - DNA, 120 bp, Artificial Sequence
  ENSG00000167548_65 (sequence is synthesized)
acaggggagagctatgggctgtccccactacgccctccgtcggttctgccaccacctgcacccgacggatccctcccctacctgtcccatggagcctcacagcgatcaggcatcacctct

SEQ ID NO: 543091 - DNA, 120 bp, Artificial Sequence
  ENSG00000167548_66 (sequence is synthesized)
cctgtcgaaaagcgagaagacccagggactggaatgggtagctctttggcgacagctgaactcccaggtacccaggacccaggcatgtccggccttagccaaacagagctggagaagcaa

SEQ ID NO: 543092 - DNA, 120 bp, Artificial Sequence
  ENSG00000167548_67 (sequence is synthesized)
cggcagcgccagcgactacgagagctgctgattcggcagcagatccagcgcaacaccctgcggcaggagaaggaaacagctgcagcagctgcaggagcagtggggcctccaggcagctgg

SEQ ID NO: 543093 - DNA, 120 bp, Artificial Sequence
  ENSG00000167548_68 (sequence is synthesized)
ggtgctgagcccagcagccctgcctttgagcagctgagtcgaggccagaccccctttgctgggacacaggacaagagcagccttgtggggttgcccccaagcaagctgagtggccccatc

SEQ ID NO: 543094 - DNA, 120 bp, Artificial Sequence
  ENSG00000167548_69 (sequence is synthesized)
ctggggccagggtccttccctagcgatgaccgactctcccggccacctccaccagccacgccttcctctatggatgtgaacagccggcaactggtaggaggctcccaagctttctatcag

SEQ ID NO: 543095 - DNA, 120 bp, Artificial Sequence
  ENSG00000167548_70 (sequence is synthesized)
cgagcaccctatcctgggtccctgcccttacagcagcaacagcaacaactgtggcagcaacaacaggcaacagcagcaacctccatgcgatttgccatgtcagctcgctttccatcaact

SEQ ID NO: 543096 - DNA, 120 bp, Artificial Sequence
  ENSG00000167548_71 (sequence is synthesized)
cctggacctgaacttggccgccaagccctaggttccccgttggcgggaatttccacccgtctgccaggccctggtgagccagtgcctggtccagctggtcctgcccagttcattgagctg

SEQ ID NO: 543097 - DNA, 120 bp, Artificial Sequence
  ENSG00000167548_72 (sequence is synthesized)
cggcacaatgtacagaaaggactgggacctgggggcactccgtttcctggtcagggcccacctcagagaccccgtttttaccctgtaagtgaggacccccaccgactggctcctgaaggg

SEQ ID NO: 543098 - DNA, 120 bp, Artificial Sequence
  ENSG00000167548_73 (sequence is synthesized)
cttcggggcctggcggtatcaggtcttcccccacagaaaccctcagccccaccggcccctgaattgaacaacagtcttcatccaacaccccacaccaagggtcctaccctgccaactggt

SEQ ID NO: 543099 - DNA, 120 bp, Artificial Sequence
  ENSG00000167548_74 (sequence is synthesized)
ttggagctggtcaaccggcccccgtcgagcactgagcttggccgccccaatcctctggccctggaagctgggaagttgccctgtgaggatcccgagctggatgacgattttgatgcccac

SEQ ID NO: 543100 - DNA, 120 bp, Artificial Sequence
  ENSG00000167548_75 (sequence is synthesized)
aaggccctagaggatgatgaagagcttgctcacctgggtctgggtgtggatgtggccaagggtgatgatgaacttggcaccttagaaaacctggagaccaatgacccccacttggatgac

SEQ ID NO: 543101 - DNA, 120 bp, Artificial Sequence
  ENSG00000167548_76 (sequence is synthesized)
ctgctcaatggagacgagtttgacctgctggcatatactgatcctgagctggacactggggacaagaaggatatcttcaatgagcacctgaggctggtagaatcggctaatgagaaggct

SEQ ID NO: 543102 - DNA, 120 bp, Artificial Sequence
  ENSG00000167548_77 (sequence is synthesized)
gaacgggaggccctgctgcggggggtggagccaggacccttgggccctgaggagcgccctccccctgctgctgatgcctctgaaccccgcctggcatctgtgctccctgaggtgaagccc

SEQ ID NO: 543103 - DNA, 120 bp, Artificial Sequence
  ENSG00000167548_78 (sequence is synthesized)
aaggtggaggagggtggacgccacccttctccttgccaattcaccattgctacccccaaggtagagcccgcacctgctgccaattcccttggcctggggctaaagccaggacagagcatg

SEQ ID NO: 543104 - DNA, 120 bp, Artificial Sequence
  ENSG00000167548_79 (sequence is synthesized)
atgggcagccgggatacccggatgggcacagggccattttctagcagtgggcacacagctgagaaggcctcctttggggccacgggaggaccaccagctcacctgctgacccccagccca

SEQ ID NO: 543105 - DNA, 120 bp, Artificial Sequence
  ENSG00000167548_80 (sequence is synthesized)
gacaagatggagagctcactggtagccagcgagttacccctgctcattgaggacctgttggagcatgagaagaaggagctgcagaagaagcagcagctttcagcacagttgcagcctgcc

SEQ ID NO: 543106 - DNA, 120 bp, Artificial Sequence
  ENSG00000167548_81 (sequence is synthesized)
cagcagcagcagcaacagcagcagcagcattccctactgtctgcaccaggccctgcccaggccatgtctttgccacatgagggctcttctcccagtttggctgggtcccaacagcagctt

SEQ ID NO: 543107 - DNA, 120 bp, Artificial Sequence
  ENSG00000167548_82 (sequence is synthesized)
tccctgggtcttgcaggtgcccgacagccaggtttgccccagccactgatgcccacccagccaccagctcatgccctccagcaacgcctggctccatccatggctatggtgtccaatcaa

SEQ ID NO: 543108 - DNA, 120 bp, Artificial Sequence
  ENSG00000167548_83 (sequence is synthesized)
gggcatatgctaagtgggcagcatggagggcaggcaggcttggtaccccagcagagctcacagccagtgctatcacagaagcccatgggcaccatgccaccttccatgtgcatgaagccg

SEQ ID NO: 543109 - DNA, 120 bp, Artificial Sequence
  ENSG00000167548_84 (sequence is synthesized)
cagcaattggcaatgcagcagcagctggcaaacagcttcttcccagatacagacctggacaaatttgctgcagaagatatcattgatcccattgcaaaggccaagatggtggctttgaaa

SEQ ID NO: 543110 - DNA, 120 bp, Artificial Sequence
  ENSG00000167548_85 (sequence is synthesized)
ggcatcaagaaagtgatggctcagggcagcattggggtggcacctggtatgaacagacagcaagtgtctctgctagcccagaggctctcggggggacctagcagtgatctgcagaaccat

SEQ ID NO: 543111 - DNA, 120 bp, Artificial Sequence
  ENSG00000167548_86 (sequence is synthesized)
gtggcagctgggagtggccaggagcggagtgctggtgatccctcccagcctcgtcccaacccgcccacttttgctcagggagtgatcaatgaagctgaccagcggcagtatgaggagtgg

SEQ ID NO: 543112 - DNA, 120 bp, Artificial Sequence
  ENSG00000167548_87 (sequence is synthesized)
ctgttccatacccagcagctcctacagatgcagctgaaggtgctagaggagcagattggtgtacaccgcaagtcccggaaggctctgtgtgccaagcagcgcactgccaaaaaagctggc

SEQ ID NO: 543113 - DNA, 120 bp, Artificial Sequence
  ENSG00000167548_88 (sequence is synthesized)
cgtgagttcccagaagctgatgctgagaagctcaagctggttacagagcagcagagcaagatccagaaacaactggatcaggtccggaaacagcagaaggagcacactaatctcatggca

SEQ ID NO: 543114 - DNA, 120 bp, Artificial Sequence
  ENSG00000167548_89 (sequence is synthesized)
gaatatcggaacaagcagcagcaacaacagcagcagcagcagcaacaacagcaacagcactcagctgtgctggctctcagcccttcccagagtccccggctgctcaccaagctccctggt

SEQ ID NO: 543115 - DNA, 120 bp, Artificial Sequence
  ENSG00000167548_90 (sequence is synthesized)
cagctgctccctggccatgggctgcagccaccacaggggcctccgggtgggcaagccggaggtcttcgcctgacccctgggggtatggcactacctggacagcctggtggccccttcctt

SEQ ID NO: 543116 - DNA, 120 bp, Artificial Sequence
  ENSG00000167548_91 (sequence is synthesized)
aatacagctctggcccaacagcagcaacagcaacattctggtggggctggatccctggctggcccttcagggggcttcttccctggcaaccttgctcttcgaagcctcggacctgattca

SEQ ID NO: 543117 - DNA, 120 bp, Artificial Sequence
  ENSG00000167548_92 (sequence is synthesized)
aggcttttacaggaaaggcagctgcagctgcagcagcaacgtatgcagctggcccagaaactgcagcagcagcagcagcagcaacagcagcagcagcaccttctaggacaggtggcaatc

SEQ ID NO: 543118 - DNA, 120 bp, Artificial Sequence
  ENSG00000167548_93 (sequence is synthesized)
cagcagcaacagcagcagggtcctggagtacagacaaaccaagctctgggtcccaagccccagggccttatgcctcccagcagccaccaaggcctcctggtccagcagctgtcccctcaa

SEQ ID NO: 543119 - DNA, 120 bp, Artificial Sequence
  ENSG00000167548_94 (sequence is synthesized)
ccaccccaggggccccagggcatgctgggccctgcccaggtggctgtgttgcagcagcagcaccctggagctttgggcccccagggccctcacagacaggtgcttatgacccagtcccgg

SEQ ID NO: 543120 - DNA, 120 bp, Artificial Sequence
  ENSG00000167548_95 (sequence is synthesized)
gtgctcagttccccccagctggcacagcagggtcagggccttatgggacacaggctggtcacagcccagcagcagcagcagcaacaacagcaccaacagcaagggtccatggcagggctg

SEQ ID NO: 543121 - DNA, 120 bp, Artificial Sequence
  ENSG00000167548_96 (sequence is synthesized)
tcccatcttcagcagagtctgatgtcacacagtgggcagcccaaactgagcgctcagcccatgggctctttacagcagcttcagcagcagcagcagctgcaacagcaacagcaacttcag

SEQ ID NO: 543122 - DNA, 120 bp, Artificial Sequence
  ENSG00000167548_97 (sequence is synthesized)
cagcagcagcagcagcagctacaacagcaacagcaacttcagcagcaacagcttcaacagcagcaacagcagcagcagcttcaacaacagcagcagcaacagcttcaacagcagcaacag

SEQ ID NO: 543123 - DNA, 120 bp, Artificial Sequence
  ENSG00000167548_98 (sequence is synthesized)
cagctacaacagcaacagcaacaacaacagcagcagtttcaacagcagcagcaacagcagcagatgggccttttaaaccagagtcgaactttactgtctcctcagcaacaacagcagcag

SEQ ID NO: 543124 - DNA, 120 bp, Artificial Sequence
  ENSG00000167548_99 (sequence is synthesized)
caagtggcacttggccctggcatgccagcaaagcctcttcaacacttttctagccctggagccctgggtccaaccctcctcctgacgggcaaggaacaaaacaccgtagacccagccgtt

SEQ ID NO: 543125 - DNA, 120 bp, Artificial Sequence
  ENSG00000167548_100 (sequence is synthesized)
tcttcagaggccactgaggggccctctacacatcagggagggccgttagcaataggaactacccctgagtcaatggccactgaaccaggagaggtaaagccctcactctctggggactca

SEQ ID NO: 543126 - DNA, 120 bp, Artificial Sequence
  ENSG00000167548_101 (sequence is synthesized)
caactcctgcttgtccaaccccagccccagcctcagcccagctctctgcagctgcagccacctctgaggcttccaggacaacagcagcagcaagttagcctgctccacacagcaggtgga

SEQ ID NO: 543127 - DNA, 120 bp, Artificial Sequence
  ENSG00000167548_102 (sequence is synthesized)
ggaagccatgggcagctaggcagtggatcatcttctgaggcctcatctgtgccccacctgctggctcagccctctgtttccttaggggatcagcctgggtccatgacccagaaccttctg

SEQ ID NO: 543128 - DNA, 120 bp, Artificial Sequence
  ENSG00000167548_103 (sequence is synthesized)
ggcccccaacagcccatgctagagcggcccatgcaaaataatacagggccacaacctcccaaaccaggacctgtcctccagtctgggcagggtctgcctggggttggaatcatgcctacg

SEQ ID NO: 543129 - DNA, 120 bp, Artificial Sequence
  ENSG00000167548_104 (sequence is synthesized)
gtgggtcagcttcgagcacagctccaaggagtcctggccaaaaacccacagctgcggcacttaagtcctcagcagcagcagcagctacaggcactcctcatgcagcggcagctgcagcag

SEQ ID NO: 543130 - DNA, 120 bp, Artificial Sequence
  ENSG00000167548_105 (sequence is synthesized)
agtcaggcagtacgccagaccccaccctaccaggagcctgggacccagacctctcccctccagggcctcctgggctgccaacctcaacttgggggcttccctggaccacagacaggcccc

SEQ ID NO: 543131 - DNA, 120 bp, Artificial Sequence
  ENSG00000167548_106 (sequence is synthesized)
ctccaggagctaggggcagggcctcgacctcagggcccaccccggctccctgccccaccaggagccttatctacaggaccagtccttggccctgtccatcccacacctccaccatccagc

SEQ ID NO: 543132 - DNA, 120 bp, Artificial Sequence
  ENSG00000167548_107 (sequence is synthesized)
cctcaagagccaaagagaccttcacaattaccttcccccagctcccagcttcccactgaggcccagctccctcccacccatccagggacccccaaacctcaggggccaaccttggagccg

SEQ ID NO: 543133 - DNA, 120 bp, Artificial Sequence
  ENSG00000167548_108 (sequence is synthesized)
cctcctgggagggtctcacctgctgctgcccagcttgcagataccttgtttagcaagggtctgggaccttgggatcccccagacaacctagcagaaacccagaagccagagcagagcagc

SEQ ID NO: 543134 - DNA, 120 bp, Artificial Sequence
  ENSG00000167548_109 (sequence is synthesized)
ctggtacctgggcatctggaccaggtgaatggacaggtggtgcctgaggcatcccaactcagcatcaagcaggaacctcgggaagagccatgtgccctgggagcccagtcagtgaagagg

SEQ ID NO: 543135 - DNA, 120 bp, Artificial Sequence
  ENSG00000167548_110 (sequence is synthesized)
gaggccaatggggagccaataggggcaccaggaaccagcaaccacctcctgctggcaggccctcgctcagaagctgggcatctgctcttgcagaagctactccgggcaaagaatgtgcaa

SEQ ID NO: 543136 - DNA, 120 bp, Artificial Sequence
  ENSG00000167548_111 (sequence is synthesized)
ctcagcactgggcgggggtccgaggggctgcgagctgagatcaacgggcacattgacagcaagctggctgggctggagcagaaactacagggtacccccagcaacaaggaggatgcagca

SEQ ID NO: 543137 - DNA, 120 bp, Artificial Sequence
  ENSG00000167548_112 (sequence is synthesized)
gcaaggaagcctttgacaccgaagcccaagcgggtacagaaggcaagcgacaggttggtgagctcccgaaagaagctgcggaaggaggacggggtcagggccagcgaggccttgctgaaa

SEQ ID NO: 543138 - DNA, 120 bp, Artificial Sequence
  ENSG00000167548_113 (sequence is synthesized)
cagctgaaacaggagctgtccctgctgcccctaacggagcctgctatcaccgccaattttagcctctttgccccctttggcagtggctgcccagtcaatgggcagagccagctgaggggg

SEQ ID NO: 543139 - DNA, 120 bp, Artificial Sequence
  ENSG00000167548_114 (sequence is synthesized)
gcctttggaagtggggcgctgcccactggccctgactactattcccagctgcttaccaagaataacctgagtaacccgccgacaccaccctcgtcgctgccccccaccccacccccatcg

SEQ ID NO: 543140 - DNA, 120 bp, Artificial Sequence
  ENSG00000167548_115 (sequence is synthesized)
gtgcagcagaagatggtgaatggcgtcaccccatctgaagagctgggggagcaccccaaggatgctgcctctgcccgggatagtgaaagggcactgagggatacttcagaggtgaagagt

SEQ ID NO: 543141 - DNA, 120 bp, Artificial Sequence
  ENSG00000167548_116 (sequence is synthesized)
ctagacctgctggctgccttgcctacaccccctcacaatcagactgaggatgtcaggatggagagtgatgaggatagcgattctcctgacagcattgtgccagcttcatcccctgagagc

SEQ ID NO: 543142 - DNA, 120 bp, Artificial Sequence
  ENSG00000167548_117 (sequence is synthesized)
atcttgggggaggaggcccctcgtttccctcatctgggctcaggccggtgggagcaagaggaccgggccctctcccctgtcatccccctcattcctcgggccagcatcccagtcttccca

SEQ ID NO: 543143 - DNA, 120 bp, Artificial Sequence
  ENSG00000167548_118 (sequence is synthesized)
gataccaaaccttatggggcccttggcctggaggtccctggaaagctgcctgtcacaacttgggaaaagggcaaaggaagtgaggtgtcagtcatgctcacagtctctgctgctgcagcc

SEQ ID NO: 543144 - DNA, 120 bp, Artificial Sequence
  ENSG00000167548_119 (sequence is synthesized)
aagaacctgaatggcgtgatggtggcagtggcggagctgctgagcatgaagatccccaactcctatgaggtgctgttcccagagagccccgcccgggcaggcactgagccaaagaagggg

SEQ ID NO: 543145 - DNA, 120 bp, Artificial Sequence
  ENSG00000167548_120 (sequence is synthesized)
gaagctgagggtcctggtgggaaggaaaagggtctggaaggcaagagcccagacactggccctgattggctgaagcagtttgatgcagtgttgcctggctataccctgaagagccaacta

SEQ ID NO: 543146 - DNA, 120 bp, Artificial Sequence
  ENSG00000167548_121 (sequence is synthesized)
gacatcttgagcctcctgaaacaggagagccccgccccagagccacccactcagcacagctatacctacaatgtctccaatctggatgtgcgacagctctcggccccacctcctgaagaa

SEQ ID NO: 543147 - DNA, 120 bp, Artificial Sequence
  ENSG00000167548_122 (sequence is synthesized)
ccctccccgcccccttcccccttggcaccttctcctgccagtccccctactgagcccttggttgaacttcccaccgaacccttggctgagccacccgtcccctcacctctgccactggcc

SEQ ID NO: 543148 - DNA, 120 bp, Artificial Sequence
  ENSG00000167548_123 (sequence is synthesized)
tcatcccctgaatcagcccgacccaagccccgtgcccggccccctgaagaaggtgaagattcccgtcctcctcgcctcaagaaatggaaaggagtgcgctggaagcggcttcggctgctg

SEQ ID NO: 543149 - DNA, 120 bp, Artificial Sequence
  ENSG00000167548_124 (sequence is synthesized)
ctgaccatccagaagggcagtgggcggcaggaggatgagcgggaagtggcagagtttatggagcagcttggcacagccttgcgacctgacaaggtaccgcgagacatgcgtcgctgctgt

SEQ ID NO: 543150 - DNA, 120 bp, Artificial Sequence
  ENSG00000167548_125 (sequence is synthesized)
ttctgtcatgaggagggtgacggggccactgatgggcctgcccgtctgctgaacctggacctggacctgtgggtgcacctcaactgtgccctttggtccacggaggtgtatgagacccag

SEQ ID NO: 543151 - DNA, 120 bp, Artificial Sequence
  ENSG00000167548_126 (sequence is synthesized)
ggcggggcactgatgaatgtggaggttgccctgcaccgaggactgctaaccaagtgctccctgtgccagcgaactggtgccaccagcagctgcaatcgcatgcgttgccccaatgtctac

SEQ ID NO: 543152 - DNA, 120 bp, Artificial Sequence
  ENSG00000167548_127 (sequence is synthesized)
cattttgcttgtgccatccgtgccaagtgcatgttcttcaaggacaagaccatgctgtgtccaatgcataagatcaaggggccctgtgagcaagagctgagctcttttgctgtcttccgg

SEQ ID NO: 543153 - DNA, 120 bp, Artificial Sequence
  ENSG00000167548_128 (sequence is synthesized)
cgggtctacattgagcgggacgaggtgaagcaaatcgctagcatcattcagcggggagaacggctgcacatgttccgtgtggggggccttgtgttccacgccatcggacagctgctgcct

SEQ ID NO: 543154 - DNA, 120 bp, Artificial Sequence
  ENSG00000167548_129 (sequence is synthesized)
caccagatggctgactttcatagtgccactgccctctatcccgtgggctacgaggccacgcgcatctattggagcctccgcaccaacaatcgtcgctgctgctatcgctgttctattggt

SEQ ID NO: 543155 - DNA, 120 bp, Artificial Sequence
  ENSG00000167548_130 (sequence is synthesized)
gagaacaacgggcggccggagtttgtaatcaaagtcatcgagcagggcctggaggacctggtcttcactgacgcctctccccaggccgtgtggaatcgcatcattgagcctgtggctgcc

SEQ ID NO: 543156 - DNA, 120 bp, Artificial Sequence
  ENSG00000167548_131 (sequence is synthesized)
atgagaaaagaggctgacatgctgcgactcttccctgagtatctgaagggcgaggagctctttgggctgacggtgcatgccgtgcttcgcatagctgaatcactgcccggggtggagagc

SEQ ID NO: 543157 - DNA, 120 bp, Artificial Sequence
  ENSG00000167548_132 (sequence is synthesized)
tgtcaaaactatttattccgctatgggcgccacccccttatggagctgccactcatgatcaaccccactggctgtgcccgatcagagcctaaaatcctcacacactacaaacggccccat

SEQ ID NO: 543158 - DNA, 120 bp, Artificial Sequence
  ENSG00000167548_133 (sequence is synthesized)
accctgaacagcaccagcatgtctaaggcatatcagagcaccttcacaggcgagaccaacaccccctacagcaagcagtttgtgcactccaagtcatctcagtaccggcggctgcgcacc

SEQ ID NO: 543159 - DNA, 120 bp, Artificial Sequence
  ENSG00000167548_134 (sequence is synthesized)
gaatggaagaacaacgtgtacctggctcgctcccgtatccagggcctggggctctatgcagccaaggacctagaaaagcacacaatggttatcgagtacattggcaccatcattcggaac

SEQ ID NO: 543160 - DNA, 120 bp, Artificial Sequence
  ENSG00000167548_135 (sequence is synthesized)
gaggtggccaaccggcgggagaaaatctacgaagagcagaatcgaggcatctacatgttccgaataaacaatgaacatgtgattgatgctacgttgaccggcggccctgccaggtacatt

SEQ ID NO: 543161 - DNA, 120 bp, Artificial Sequence
  ENSG00000167548_136 (sequence is synthesized)
aaccattcctgtgcccctaactgtgtggccgaagtcgtgacatttgacaaagaggacaaaatcatcatcatctccagccggcgaatccccaaaggagaggagctaacctatgactatcag

SEQ ID NO: 543162 - DNA, 120 bp, Artificial Sequence
  ENSG00000167548_137 (sequence is synthesized)
tttgattttgaggacgatcagcacaagatcccctgccactgtggagcctggaattgtcggaaatggatgaactaagaagctttgaggctaccaggcaggggagtccccctacccacaacc

SEQ ID NO: 543163 - DNA, 120 bp, Artificial Sequence
  ENSG00000167548_138 (sequence is synthesized)
tcttccctgaaagggatgagggggaagagaggtagcagccagagccaggacccagggttggggctgccggctgacccggagcccctggagcaggaggctggggcagagggccctaggcca

SEQ ID NO: 543164 - DNA, 120 bp, Artificial Sequence
  ENSG00000167548_139 (sequence is synthesized)
agcccaccctgggcaccagggacaatcctcttccccaccaccggccctcaggctggcatctctgcccccagctccaggaggggccagacagaagcagccattgggcatctcaggtttgag

SEQ ID NO: 543165 - DNA, 120 bp, Artificial Sequence
  ENSG00000167548_140 (sequence is synthesized)
ggggatatgggccgggaactacccagaagcatctgggaggcagcagggtgggggaagaggatgtgtggccgggcctcacagccctgctgctcccactgacctctccggcccaactcacgg

SEQ ID NO: 543166 - DNA, 120 bp, Artificial Sequence
  ENSG00000167548_141 (sequence is synthesized)
ctgcaaagagacttgactaagcttgacaatcccaaaggccgggtcccacacctggccctgcctgccgggtcctgcccccaccctcacccccatccccctccctcttgatctgtctctgtt

SEQ ID NO: 543167 - DNA, 120 bp, Artificial Sequence
  ENSG00000167548_142 (sequence is synthesized)
tccctcttttcctctgtgtttctgtctctctatgggttgtgtttccttgttttccactctgacaaatgcaacatgaacgggaaagaggcgcccagctgcctaggagggcaagctgggcaa

SEQ ID NO: 543168 - DNA, 120 bp, Artificial Sequence
  ENSG00000167548_143 (sequence is synthesized)
gccgggcaaggagaccccgcacccacacctacctcatttaagtgttggattttttgctgttttgaaatgtgagaccctctccaagccccctactgccccaaccctctcccccacctcact

SEQ ID NO: 543169 - DNA, 120 bp, Artificial Sequence
  ENSG00000167548_144 (sequence is synthesized)
gccctcttctgagtgggtggaaggggggtaggaggaggaagaaaaacaacaacaaaaaatccatctttgtttttaattatgggcatgggatggtggttgaggcaaatgatgatgaagatt

SEQ ID NO: 543170 - DNA, 120 bp, Artificial Sequence
  ENSG00000167548_145 (sequence is synthesized)
ggggatgactggcccctagttgctctaggacttccttctccatctggacatgggggcaggagggagctaaacctaggaccaggatatctccctcctgttttcccaacctcatcatgagcc

SEQ ID NO: 543171 - DNA, 120 bp, Artificial Sequence
  ENSG00000167548_146 (sequence is synthesized)
tgtttgccctccagcccctggacgggttgggtggggggtagggtgagggctatccctgagtggcatgcccatacctagtgaggcagggtgtggcccggagctcccactttccctcagtca

SEQ ID NO: 543172 - DNA, 120 bp, Artificial Sequence
  ENSG00000167548_147 (sequence is synthesized)
ccaaactgctgctggtctggtgggaaggggtggtgatgtgggggtgggggagcttagtgtcagcgcggggagggtggggggtatttatctatttatacatgggattgtacatagtcttgt

SEQ ID NO: 543173 - DNA, 120 bp, Artificial Sequence
  ENSG00000167548_148 (sequence is synthesized)
ggggcatgggggagccggctggaggtgagaaccctcccctctccccccaccccccggggagagcaaatgtaaaactactaatttttgtgctttatatattctatataaatatatctattt

SEQ ID NO: 543174 - DNA, 120 bp, Artificial Sequence
  ENSG00000167548_149 (sequence is synthesized)
tctttttacaaaaccagtttataaatggtaggggggtgtggggcggacacatggagctccccttgtgggggggccccctccattacccgacctaccgcccttttcctcaccccccacccc

SEQ ID NO: 543175 - DNA, 120 bp, Artificial Sequence
  ENSG00000167548_150 (sequence is synthesized)
actccccaccccctggctgtgactgctgtaagatgggggtatagaggctgggcaattcccaccccctgttgtatagttggactatgttataacgcacaaaagagagctgaccccaggggg

SEQ ID NO: 543176 - DNA, 120 bp, Artificial Sequence
  ENSG00000167548_151 (sequence is synthesized)
agccagagggtgatgggttccttgcctccctttccttcccctttctgcccaagcttgtgctgcagttgaacctcttcctgggggtgggagtaggtaaggggtgggtgaggccccaaaccc

SEQ ID NO: 543177 - DNA, 120 bp, Artificial Sequence
  ENSG00000167548_152 (sequence is synthesized)
ctctctggtagggaaccgtggggatgaagatgaagcttatatgcagttctcttctaggggctgtgggcaaagggcattttgtaattaatattttcaagaatcagatgtctggagtgtagg

SEQ ID NO: 543178 - DNA, 120 bp, Artificial Sequence
  ENSG00000167548_153 (sequence is synthesized)
ggtgggcttggtggtggtggacgggcgggcctgctggagggggagcttggtcgctgttgtgattttaggtttgtttttgttttgttttgaatttggggggttgtggattgttgggggtag

SEQ ID NO: 543179 - DNA, 120 bp, Artificial Sequence
  ENSG00000167548_154 (sequence is synthesized)
ggagattttttttttttaaagctgcttcctcaactgtttcaagctgcaaatgtttaagagaataacagcccccactcccacaggaaccgctgtaattaaatcagacagtaggaagactgg

SEQ ID NO: 543180 - DNA, 120 bp, Artificial Sequence
  ENSG00000167548_155 (sequence is synthesized)
gctgctgccctcaaagccacagcccttggatgttccttttccgagagcagaaggtctaggctacagggagggggagattggctcccgtgagtcaggctgtgtttggggcttgggccctgg

SEQ ID NO: 543181 - DNA, 120 bp, Artificial Sequence
  ENSG00000167548_156 (sequence is synthesized)
gattgggaaaaggggatggggcagactttgtaagcatatgctaggtatccgatagtcctgtagaatttagtgaagaaaccttatacagtttttaatttttatataaactataactcagac

SEQ ID NO: 543182 - DNA, 120 bp, Artificial Sequence
  ENSG00000167548_157 (sequence is synthesized)
ccaagctacaaggttggaattttggttggttttttttttaagtaccctgcctgtataattgcatcagaatcccccaccccaccccccgcccccgtgtttgtattttgggttggtttacac

SEQ ID NO: 543183 - DNA, 120 bp, Artificial Sequence
  ENSG00000167548_158 (sequence is synthesized)
tcgcacatactcagttttcagttttcccctttacagtcttctcccctcacctccaggaccctccccctttttaaaaaataaatcgctgacaagtgtgaatcccgtgaagactttattttg

SEQ ID NO: 543184 - DNA, 120 bp, Artificial Sequence
  ENSG00000167548_159 (sequence is synthesized)
tgttgtgtgtatcctgtacagcaaggttggtccttcgtaacaacggatgaaatggttcccttttttaaagcgccctctctccctccaccctcagcgcccctgtccttggcatgttttgta

SEQ ID NO: 543185 - DNA, 120 bp, Artificial Sequence
  ENSG00000167548_160 (sequence is synthesized)
tcagcgatcattctgaactgtacatatttatgttgcgagaggcaaagggcaagttttggattttgcttcttccaagtttgtttttaaacgacaaataaaaaaagaacattttaaatacaa

SEQ ID NO: 543186 - DNA, 120 bp, Artificial Sequence
  ENSG00000167548_161 (sequence is synthesized)
cagcaattggcaatgcagcagcagctggcaaacagcttcttcccagatacagaagaggaaacagaagtggaggttaagtaacttgtccaagattacacagcagctagcagagctagatct

SEQ ID NO: 543187 - DNA, 120 bp, Artificial Sequence
  ENSG00000167548_162 (sequence is synthesized)
ggtcggtactcctcttaactgtttactgcctcaggattccaggagagggagtttgggttagtccttaagaaagtgggagctctggccaggtgctgtggctcacgcctttaatcccagcac

SEQ ID NO: 543188 - DNA, 120 bp, Artificial Sequence
  ENSG00000167548_163 (sequence is synthesized)
ggggggagggtggccactccgacctggatttaccgttcttggcccccctaagcccccccgtgcggggggcggctgtgatcgctctggcggttggaggtcggggagcggcccgggctctgg

SEQ ID NO: 543189 - DNA, 120 bp, Artificial Sequence
  ENSG00000167548_164 (sequence is synthesized)
cccactggccctgactactattcccagctgcttaccaaggtcagaaaaatggcaatattttttgggaatagtgaagttcttgggaaggtgagggtgggaatagaaaacttgagggaattg

SEQ ID NO: 543190 - DNA, 120 bp, Artificial Sequence
  ENSG00000167548_165 (sequence is synthesized)
ctgacgtagagtggggccaggagattatatcagtctccctatgccatcttgcacacaacaccccaccccccacccctcagaataacctgagtaacccgccgacaccaccctcgtcgctgc

SEQ ID NO: 543191 - DNA, 120 bp, Artificial Sequence
  ENSG00000167548_166 (sequence is synthesized)
gggaccccaaaagccaagggagatggaggctcagaaaggaaggaactccccacatcgcagaaaggttagttatgtgggagtgagtggtgtgagagaatccaactttcttctggcttagga

SEQ ID NO: 543192 - DNA, 120 bp, Artificial Sequence
  ENSG00000167549_0 (sequence is synthesized)
gatggcagcggcagctggggctgcagcggcgccgggctctagagagccgcaggatcggccagagtgcggagctggacacccgggtcccagatactacagacacccggagaggtggctcct

SEQ ID NO: 543193 - DNA, 120 bp, Artificial Sequence
  ENSG00000167549_1 (sequence is synthesized)
tcgccctgaagccttcctcggccccctacgcactcgggccccttccgcagaggattcgcagcgtgagcgccccgcagcccgctcaggaccagctatgagcagacgtgtggttcggcaaag

SEQ ID NO: 543194 - DNA, 120 bp, Artificial Sequence
  ENSG00000167549_2 (sequence is synthesized)
caagttccgccatgtgtttgggcaggcagcaaaggccgaccaggcctacgaggacatccgtgtgtccaaggtcacatgggacagctccttctgtgccgtcaaccccaaattcctggccat

SEQ ID NO: 543195 - DNA, 120 bp, Artificial Sequence
  ENSG00000167549_3 (sequence is synthesized)
tattgtggaggctggaggcgggggtgccttcatcgtcctgcctctggccaagacagggcgagtggataagaactacccactggtcactgggcacactgcccctgtgctggatattgactg

SEQ ID NO: 543196 - DNA, 120 bp, Artificial Sequence
  ENSG00000167549_4 (sequence is synthesized)
gtgtccacacaatgacaacgttatcgccagtgcctcagacgacaccaccatcatggtgtggcagattccagactatacccccatgcgcaacattacggaacctatcatcacacttgaggg

SEQ ID NO: 543197 - DNA, 120 bp, Artificial Sequence
  ENSG00000167549_5 (sequence is synthesized)
ccactccaagcgtgtgggcatcctctcctggcaccctactgccaggaatgtcctgctcagtgcaggtggtgacaatgtgatcatcatctggaatgtgggcaccggggaggtgctgctgag

SEQ ID NO: 543198 - DNA, 120 bp, Artificial Sequence
  ENSG00000167549_6 (sequence is synthesized)
cctggatgatatgcacccagacgtcatccacagtgtgtgctggaacagcaacggtagcctgctagccaccacctgcaaggacaagaccttgcgcatcattgaccccagaaaaggccaagt

SEQ ID NO: 543199 - DNA, 120 bp, Artificial Sequence
  ENSG00000167549_7 (sequence is synthesized)
ggtggcggagaggtttgcggcccacgaggggatgaggcccatgcgggccgtcttcacgcgccagggccatatcttcaccacgggcttcacccgcatgagccagcgagagctgggcctgtg

SEQ ID NO: 543200 - DNA, 120 bp, Artificial Sequence
  ENSG00000167549_8 (sequence is synthesized)
ggacccgaacaacttcgaggagccagtggcactgcaggagatggacacaagcaacggggtcctattgcccttttacgatcccgactccagcatcgtctacctgtgtggcaagggcgacag

SEQ ID NO: 543201 - DNA, 120 bp, Artificial Sequence
  ENSG00000167549_9 (sequence is synthesized)
cagcattcggtactttgagattaccgacgagccgcctttcgtgcactacctgaacacgttcagcagcaaagagccgcagcggggcatgggtttcatgcccaaaaggggactggatgtcag

SEQ ID NO: 543202 - DNA, 120 bp, Artificial Sequence
  ENSG00000167549_10 (sequence is synthesized)
tcttccaggacgatctgtacccggatacgccaggcccggagccggccctagaagcggacgaatggctatccggccaggacgccgaacccgtgctcatttcgctgagggacggctatgtgc

SEQ ID NO: 543203 - DNA, 120 bp, Artificial Sequence
  ENSG00000167549_11 (sequence is synthesized)
cccccaagcaccgcgagctccgggtcacgaagcgcaacatcctggacgtgcgcccgccctccggcccccgccgcagccagtcggccagcgacgcccccttgtcgcagcagcacaccctgg

SEQ ID NO: 543204 - DNA, 120 bp, Artificial Sequence
  ENSG00000167549_12 (sequence is synthesized)
agacgctgctggaagagatcaaggccctccgcgagcgggtgcaggcccaggagcagcgcatcacggctctggagaacatgctgtgcgagctggtggacggcacggactagccccgcgcgc

SEQ ID NO: 543205 - DNA, 120 bp, Artificial Sequence
  ENSG00000167549_13 (sequence is synthesized)
caggcaggcggagcggggcggggcgcacaagctcggccccgccccggcttttagtcccgaactccggaccccgccttcttgggctgggcccgggggcgggactggggagggaactccgcc

SEQ ID NO: 543206 - DNA, 120 bp, Artificial Sequence
  ENSG00000167549_14 (sequence is synthesized)
cctcgcgggagaccagaactcttggagcttaggggagacccacgtcgctccagcggaggctggactgcgagcctcgtctgggactcggctggagctggcctagggaggcctggggtaacc

SEQ ID NO: 543207 - DNA, 120 bp, Artificial Sequence
  ENSG00000167549_15 (sequence is synthesized)
tggggggctcagcaatggtgctgcacggcgaggtggtgtccccctttgtcctccgcccagggcagggaaagtgcttagtattagcgtgatgcttggggttattggagcctgagcttgacc

SEQ ID NO: 543208 - DNA, 120 bp, Artificial Sequence
  ENSG00000167549_16 (sequence is synthesized)
tcaaacgggtggcgatttgatgggtacccccaggctggggaaaatgacagcgcttctcctaatcagctcactggattccatcaccctgagcggtaaaccagatgggcgtcaccccagttc

SEQ ID NO: 543209 - DNA, 120 bp, Artificial Sequence
  ENSG00000167549_17 (sequence is synthesized)
tgcagacacatacacaacccgtttgctgcagagccggacccagtggctacacccacagcggtctgtggtagagaactctcttccttctttccaccgacaggggcgagggctgcttcctcg

SEQ ID NO: 543210 - DNA, 120 bp, Artificial Sequence
  ENSG00000167549_18 (sequence is synthesized)
cggcagcccccgcgaagaaatctcgagagaactggcatgaggagttaggttcatcacaaatacacacacactgcccccaaccctctgccgttgcctctctcagaaaaacaagacgtactg

SEQ ID NO: 543211 - DNA, 120 bp, Artificial Sequence
  ENSG00000167549_19 (sequence is synthesized)
aatgaaatattttactaagcgttcagtctgtgcctcctgcatgggtgggagtgaggggaacgagacccccagcctctgcaaatgctacccccaggctcctgggagacctggcgatgcact

SEQ ID NO: 543212 - DNA, 120 bp, Artificial Sequence
  ENSG00000167549_20 (sequence is synthesized)
cctgggctcagggtccatcaggcagcctcttaccctagagctctctccactctgaggttcagaaggaccccaacccacaccgtaggcgttccccccaagtaaagttaggtagcaaaagcc

SEQ ID NO: 543213 - DNA, 120 bp, Artificial Sequence
  ENSG00000167549_21 (sequence is synthesized)
ggtggcggtctctgccctaagtaagcccccagcctgcaattctctgcccggctcctgttccctcccctcccttgcatctcagaagctcagagaagggctcctcgctttgggattgaggag

SEQ ID NO: 543214 - DNA, 120 bp, Artificial Sequence
  ENSG00000167549_22 (sequence is synthesized)
gggagaagctggaaactccatcctcccaccagaacctgcatgaaacctgagctcctggacccctctcctctcagccggcacccagacgcatcttccagggtctggggcctgacactggct

SEQ ID NO: 543215 - DNA, 120 bp, Artificial Sequence
  ENSG00000167549_23 (sequence is synthesized)
cgagggctggccctttctccttgtggacccgctgggcgggggatggggcaaccctcgcgcgttgcttatcccagccggatgccctgggagggcggcggccctggcctcgccagcctcaag

SEQ ID NO: 543216 - DNA, 120 bp, Artificial Sequence
  ENSG00000167549_24 (sequence is synthesized)
tctaacctggggtgcgggtgcgtgggccgcgtgcatgtctgcgtggagcaagcgcgccgagagcggtcggggctggcgccggggcgctctaacccactaacccggcgagcaggagcaagc

SEQ ID NO: 543217 - DNA, 120 bp, Artificial Sequence
  ENSG00000167549_25 (sequence is synthesized)
ccggcctcacgagggcgcccgcccgctgcgggctgtcttcaccgcagacgggaagctgctcagcaccggcttcagcaggatgagtgagcggcaactcgcgctctgggacccggtaggcca

SEQ ID NO: 543218 - DNA, 120 bp, Artificial Sequence
  ENSG00000167549_26 (sequence is synthesized)
ggccgcgccgggcgcgctagctcgctccttctctgggtctgccgggagcgccttcccgggctgtggctggcgcccaagaggccagagcggagcggggagctcccattcgggaaaagcctc

SEQ ID NO: 543219 - DNA, 120 bp, Artificial Sequence
  ENSG00000167549_27 (sequence is synthesized)
gctgcgactccggggagccagcagacacccctgctctagggatcggcctttgagcgcgcttaagggttcgggatcggctgagagccgcgtgcctcctgctctctccaggcccggatgctc

SEQ ID NO: 543220 - DNA, 120 bp, Artificial Sequence
  ENSG00000167549_28 (sequence is synthesized)
tccaggtcaggggccagacgtggccccgcaggaagctgagtgcttaggccccatttgtctcttccccgcatccgctcctccaccccggacacccaagtcagcaagctggttgctcatccc

SEQ ID NO: 543221 - DNA, 120 bp, Artificial Sequence
  ENSG00000167549_29 (sequence is synthesized)
ggagagtggccaggcgccccccacccgcagggcatgcccacctggacaggactgaaggctgctgccacctctgcagcgcctgccattctcacacccacccctctgcccagttttgctgcg

SEQ ID NO: 543222 - DNA, 120 bp, Artificial Sequence
  ENSG00000167549_30 (sequence is synthesized)
tcgcgtgaaggatcctgcgctggcgcccccacctggtgatgccgagtccctgggggtggtttgctgtgactgcatgcggcgcgcagcgggtatatgtgcaggggaggaggagctatgtgc

SEQ ID NO: 543223 - DNA, 120 bp, Artificial Sequence
  ENSG00000167549_31 (sequence is synthesized)
gcaggggaggaggagagatgtgcccaggggaggggcctgcaactctggtcactagaggtttggggcatagggtttgggaaggccaggaagcgtaaaggggcttctgggggtcccgaagta

SEQ ID NO: 543224 - DNA, 120 bp, Artificial Sequence
  ENSG00000167549_32 (sequence is synthesized)
cgcagacgggaagctgctcagcaccggcttcagcaggatgagtgagcggcaactcgcgctctgggacccgttttgctgcgtcgcgtgaaggatcctgcgctggcgcccccacctggtgat

SEQ ID NO: 543225 - DNA, 120 bp, Artificial Sequence
  ENSG00000167550_0 (sequence is synthesized)
gttagacgtgctgtgttgtgatcacgtgggcagctccgggcgcggcgcttgttttggtttccttctaacttgcccacggcagcttcggggtgagcgactttcctgcaccagctgccgcgc

SEQ ID NO: 543226 - DNA, 120 bp, Artificial Sequence
  ENSG00000167550_1 (sequence is synthesized)
ctgctcacaccctgacctcgttttcgggctctctgagcccgcagttccgcaagcccctggggcgggctcctgccatgccgctagtccgctacaggaaggtggtcatcctcggataccgct

SEQ ID NO: 543227 - DNA, 120 bp, Artificial Sequence
  ENSG00000167550_2 (sequence is synthesized)
gtgtagggaagacatctttggcacatcaatttgtggaaggcgagttctcggaaggctacgatcctacagtggagaatacttacagcaagatagtgactcttggcaaagatgagtttcacc

SEQ ID NO: 543228 - DNA, 120 bp, Artificial Sequence
  ENSG00000167550_3 (sequence is synthesized)
tacatctggtggacacagcagggcaggatgagtacagcattctgccctattcattcatcattggggtccatggttatgtgcttgtgtattctgtcacctctctgcatagcttccaagtca

SEQ ID NO: 543229 - DNA, 120 bp, Artificial Sequence
  ENSG00000167550_4 (sequence is synthesized)
gagaggtacaggcagttgaaggaaagaagctggcagagtcctggggtgcgacatttatggagtcatctgctcgagagaatcagctgactcaaggcatcttcaccaaagtcatccaggaga

SEQ ID NO: 543230 - DNA, 120 bp, Artificial Sequence
  ENSG00000167550_5 (sequence is synthesized)
ttgcccgtgtggagaattcctatgggcaagagcgtcgctgccatctcatgtgagcccttgggtgtggggtaactgccttgcttctgcccccggcacttgccatgttccagtggggggcag

SEQ ID NO: 543231 - DNA, 120 bp, Artificial Sequence
  ENSG00000167550_6 (sequence is synthesized)
atcctcaggacttcacgggtatggttgccagctgtgttcctggcccctggacacacagtgtggcatcctcatgtttgcacactttccccaggctccagtggcctggatgtcaatgtttac

SEQ ID NO: 543232 - DNA, 120 bp, Artificial Sequence
  ENSG00000167550_7 (sequence is synthesized)
aaaggggcaaggacctctcatggacactggcctctagccctctgtttttgtttgatgaattctgttataacctatggggtcaggatatgagtcctgggcattatttatccaggacccatc

SEQ ID NO: 543233 - DNA, 120 bp, Artificial Sequence
  ENSG00000167550_8 (sequence is synthesized)
ctcttgggtgggttttgggtgttggctgggtaaggggagccggggacttctgaaatagagctggctccctggggtgacaatgtatatatgcaaataaattgagaaatcttttgttgttga

SEQ ID NO: 543234 - DNA, 120 bp, Artificial Sequence
  ENSG00000167552_0 (sequence is synthesized)
tcttttctttcgtaagctctctgggcgagggtggtggtatgttttgtgaggtttagcttagccccaaatcctcaagccccgccgccgccgcagtgcgggtgcaggaaccgggccagtact

SEQ ID NO: 543235 - DNA, 120 bp, Artificial Sequence
  ENSG00000167552_1 (sequence is synthesized)
gcgcccagggcgcagcagagcgctggggaggaacaaaggcggcgcctaggcgcctgtgttatccgagagactttcgggggccgcgggcagcccgtctgccgcgaccgaggggtctggggc

SEQ ID NO: 543236 - DNA, 120 bp, Artificial Sequence
  ENSG00000167552_2 (sequence is synthesized)
gtcccggctgggccccgtgtctgtgcgcacggtttcgctgatgctgaggggccactttctgtctcgcgttgttctctggggaccgggagaggaggaggcacccaaaaagagcgggggcgt

SEQ ID NO: 543237 - DNA, 120 bp, Artificial Sequence
  ENSG00000167552_3 (sequence is synthesized)
tgggcgagctgggggacgtgggagggggaacgggaacaaagcgcagcctagggttagcgtgggaagaccctccgcggtctttggcgttttggaaagatacccacacattcccgggaaaac

SEQ ID NO: 543238 - DNA, 120 bp, Artificial Sequence
  ENSG00000167552_4 (sequence is synthesized)
atgcgtgagtgcatctccatccacgttggccaggctggtgtccagattggcaatgcctgctgggagctctactgcctggaacacggcatccagcccgatggccagatgccaagtgacaag

SEQ ID NO: 543239 - DNA, 120 bp, Artificial Sequence
  ENSG00000167552_5 (sequence is synthesized)
accattgggggaggagatgattccttcaacaccttcttcagtgagacgggggctggcaagcatgtgccccgggcagtgtttgtagacttggaacccacagtcattgatgaagttcgcact

SEQ ID NO: 543240 - DNA, 120 bp, Artificial Sequence
  ENSG00000167552_6 (sequence is synthesized)
ggcacctaccgccagctcttccaccctgagcaacttatcacaggcaaagaagatgctgccaataactatgcccgagggcactacaccattggcaaggagatcattgacctcgtgttggac

SEQ ID NO: 543241 - DNA, 120 bp, Artificial Sequence
  ENSG00000167552_7 (sequence is synthesized)
acctcgctgctcatggaacgtctctcagttgattatggcaagaagtccaagctggagttctctatttacccggcgccccaggtttccacagctgtagttgagccctacaactccatcctc

SEQ ID NO: 543242 - DNA, 120 bp, Artificial Sequence
  ENSG00000167552_8 (sequence is synthesized)
accacccacaccaccctggagcactctgattgtgccttcatggtagacaatgaggccatctatgacatctgtcgtagaaacctcgatattgagcgtccaacctatactaacctgaatagg

SEQ ID NO: 543243 - DNA, 120 bp, Artificial Sequence
  ENSG00000167552_9 (sequence is synthesized)
ttaataggtcaaattgtgtcctccatcactgcttccctgagatttgatggagccctgaatgttgacctgacagaattccagaccaacctggtgccctatccccgcatccacttccctctg

SEQ ID NO: 543244 - DNA, 120 bp, Artificial Sequence
  ENSG00000167552_10 (sequence is synthesized)
gccacatatgcccctgtcatctctgctgagaaagcctaccatgaacagctttctgtagcagagatcaccaatgcttgctttgagccagccaaccagatggtgaaatgtgaccctcgccat

SEQ ID NO: 543245 - DNA, 120 bp, Artificial Sequence
  ENSG00000167552_11 (sequence is synthesized)
ggtaaatacatggcttgctgcctgttgtaccgtggtgacgtggttcccaaagatgtcaatgctgccattgccaccatcaagaccaagcgtaccatccagtttgtggattggtgccccact

SEQ ID NO: 543246 - DNA, 120 bp, Artificial Sequence
  ENSG00000167552_12 (sequence is synthesized)
ggcttcaaggttggcatcaactaccagcctcccactgtggtgcctggtggagacctggccaaggtacagagagctgtgtgcatgctgagcaacaccacagccattgctgaggcctgggct

SEQ ID NO: 543247 - DNA, 120 bp, Artificial Sequence
  ENSG00000167552_13 (sequence is synthesized)
cgcctggaccacaagtttgacctgatgtatgccaaacgtgcctttgttcactggtacgttggggaggggatggaggaaggtgagttttcagaggcccgtgaggacatggctgcccttgag

SEQ ID NO: 543248 - DNA, 120 bp, Artificial Sequence
  ENSG00000167552_14 (sequence is synthesized)
aaggattatgaggaggttggtgtggattctgttgaaggagagggtgaggaagaaggagaggaatactaaagttaaaacgtcacaaaggtgctgcttttacagggaagcttattctgtttt

SEQ ID NO: 543249 - DNA, 120 bp, Artificial Sequence
  ENSG00000167552_15 (sequence is synthesized)
agtgtatgctctcatatacaattactgacctatgctctaaaacatgaatgctttgttacagacccaagctgtccatttctgtgatgggttttgaataaagtattccctgtcttaaatgaa

SEQ ID NO: 543250 - DNA, 120 bp, Artificial Sequence
  ENSG00000167552_16 (sequence is synthesized)
aggttctcttacatcgaccgcctaagagtcgcgctgtaagaagcaacaacctctcctcttcgtctccgccatcagctcggcagtcgcgaagcagcaaccatggtgagaatcggcttcggc

SEQ ID NO: 543251 - DNA, 120 bp, Artificial Sequence
  ENSG00000167552_17 (sequence is synthesized)
atcgaccgcctaagagtcgcgctgtaagaagcaacaacctctcctcttcgtctccgccatcagctcggcagtcgcgaagcagcaaccatgcatggtagtaggcacaatgggctggtacca

SEQ ID NO: 543252 - DNA, 120 bp, Artificial Sequence
  ENSG00000167552_18 (sequence is synthesized)
acaatgagatcatgtaggcagctgctggaaatagagcttgctctgttaaataatgtagcagacagtacaggctagcaccaggcacagcaaatacagcaatgcagcaatgcagaaggcaga

SEQ ID NO: 543253 - DNA, 120 bp, Artificial Sequence
  ENSG00000167552_19 (sequence is synthesized)
ccttgtctaaactcctagtattgatggattctgcagacagactgcagaagggtgtggcttcttgcctcagctgcagtacagatgtccggattataatatcaagtcctattcagaggaaac

SEQ ID NO: 543254 - DNA, 120 bp, Artificial Sequence
  ENSG00000167552_20 (sequence is synthesized)
gtcataattggatttacttcattttacaaaatttgtgctttgaatactgaatactttttaaatatgaaaaatcttctattcaagcatggtagtaggcacaatgggctggtaccacgtgct

SEQ ID NO: 543255 - DNA, 120 bp, Artificial Sequence
  ENSG00000167552_21 (sequence is synthesized)
attaatgagcctaaagaacacatttgaaataatgctttttttttcaaacacagaattgaactgttattttaataaagagtggaatgagtcattcttttggggtttttaaaattcagttaa

SEQ ID NO: 543256 - DNA, 120 bp, Artificial Sequence
  ENSG00000167552_22 (sequence is synthesized)
atgttaatgagaattttttaaaaagcatttgtcaaaataagatctaagtcctggaagatgtatgaaaagtgaaaatatatttactatgattgtactacaaagaataaaaacttaaccttt

SEQ ID NO: 543257 - DNA, 80 bp, Artificial Sequence
  ENSG00000167553_0 (sequence is synthesized)
gaacttttgaatccgccaatcagcgccgcgcgcccccactccgcgggtgcggccgggcgcaggccagggctcgaaggtgg

SEQ ID NO: 543258 - DNA, 120 bp, Artificial Sequence
  ENSG00000167553_1 (sequence is synthesized)
cgacacgtggccggggaccgggtatataaggcccttcggggccggccaccctttcactacttctcccccggactccttggtagtctgttagtgggagatccttgttgccgtcccttcgcc

SEQ ID NO: 543259 - DNA, 120 bp, Artificial Sequence
  ENSG00000167553_2 (sequence is synthesized)
tccttcaccgccgcagaccccttcaagttctagtcatgcgtgagtgcatctccatccacgttggccaggctggtgtccagattggcaatgcctgctgggagctctactgcctggaacacg

SEQ ID NO: 543260 - DNA, 120 bp, Artificial Sequence
  ENSG00000167553_3 (sequence is synthesized)
gcatccagcccgatggccagatgccaagtgacaagaccattgggggaggagatgattccttcaacaccttcttcagtgaaacgggtgctggcaagcatgtgccccgggcagtgtttgtag

SEQ ID NO: 543261 - DNA, 120 bp, Artificial Sequence
  ENSG00000167553_4 (sequence is synthesized)
acttggaacccacagtcattgatgaagttcgcactggcacttaccgccagctcttccaccctgagcaactcatcacaggcaaggaagatgctgccaataactatgcccgagggcactaca

SEQ ID NO: 543262 - DNA, 120 bp, Artificial Sequence
  ENSG00000167553_5 (sequence is synthesized)
ccattggcaaggagatcattgacctcgtgttggaccgaattcgcaagctggctgaccagtgcaccggtcttcagggcttcttggttttccacagctttggtgggggaactggttctgggt

SEQ ID NO: 543263 - DNA, 120 bp, Artificial Sequence
  ENSG00000167553_6 (sequence is synthesized)
tcacctcgctgctcatggaacgtctctcagttgattatggcaagaagtccaagctggagttctccatttacccggcgccccaggtttccacagctgtagttgagccctacaactccatcc

SEQ ID NO: 543264 - DNA, 120 bp, Artificial Sequence
  ENSG00000167553_7 (sequence is synthesized)
tcaccacccacaccaccctggagcactctgattgtgccttcatggtagacaatgaggccatctatgacatctgtcgtagaaacctcgatatcgagcgcccaacctacactaaccttaacc

SEQ ID NO: 543265 - DNA, 120 bp, Artificial Sequence
  ENSG00000167553_8 (sequence is synthesized)
gccttattagccagattgtgtcctccatcactgcttccctgagatttgatggagccctgaatgttgacctgacagaattccagaccaacctggtgccctacccccgcatccacttccctc

SEQ ID NO: 543266 - DNA, 120 bp, Artificial Sequence
  ENSG00000167553_9 (sequence is synthesized)
tggccacatatgcccctgtcatctctgctgagaaagcctaccacgaacagcttactgtagcagagatcaccaatgcttgctttgagccagccaaccagatggtgaaatgtgaccctcgcc

SEQ ID NO: 543267 - DNA, 120 bp, Artificial Sequence
  ENSG00000167553_10 (sequence is synthesized)
atggtaaatacatggcttgctgcctgttataccgtggtgacgtggttcccaaagatgtcaatgctgccattgccaccatcaaaaccaagcgtaccatccagtttgtggattggtgcccca

SEQ ID NO: 543268 - DNA, 120 bp, Artificial Sequence
  ENSG00000167553_11 (sequence is synthesized)
ctggcttcaaggttggcattaattaccagcctcccactgtggtgcctggcggagacctggccaaggtacagagagctgtgtgcatgctgagcaataccacagctgttgccgaggcctggg

SEQ ID NO: 543269 - DNA, 120 bp, Artificial Sequence
  ENSG00000167553_12 (sequence is synthesized)
tcgcctggaccacaagtttgacctgatgtatgccaagcgtgcctttgttcactggtacgtgggtgaggggatggaggaaggcgagttttcagaggcccgtgaggacatggctgcccttga

SEQ ID NO: 543270 - DNA, 120 bp, Artificial Sequence
  ENSG00000167553_13 (sequence is synthesized)
gaaggattatgaggaggttggagcagatagtgctgacggagaggatgagggtgaagagtattaacctgtgtgctgtacttttacactcctttgtcttggaactgtcttatttttgttctg

SEQ ID NO: 543271 - DNA, 120 bp, Artificial Sequence
  ENSG00000167553_14 (sequence is synthesized)
taaatgtctattgccgtaaattgttaataaaattgaagtttccattttaaatgtcgagctgacttaaatacttgatccagttaaagttggatgtatgaggctggtagatgaaaccacctg

SEQ ID NO: 543272 - DNA, 87 bp, Artificial Sequence
  ENSG00000167553_15 (sequence is synthesized)
cacccaggctggagtgcagtggcatgataatacatagctcattgcagcctcgagctcctggactcatgtgactgcaggtgcacacca

SEQ ID NO: 543273 - DNA, 120 bp, Artificial Sequence
  ENSG00000167553_16 (sequence is synthesized)
gggactgcaggtgcacaccaccatgcccagctatttttatttcttgtagagatggggccttgctatgctgcccagggtggtcttcaactggcttcaagtgatcctcctgcctcaacctct

SEQ ID NO: 543274 - DNA, 120 bp, Artificial Sequence
  ENSG00000167553_17 (sequence is synthesized)
caaagttttgattataggcatgagccactgcccagcttcttggtttatctgtttaatttgggcctgaattaagtggttatagaatcattttgtaagtgaggaaacgggttcagattgagc

SEQ ID NO: 543275 - DNA, 120 bp, Artificial Sequence
  ENSG00000167553_18 (sequence is synthesized)
cagtgcttctctaactaaaatggatgtgaatcacctgtagatattaaaatgcaggtttggggtcaacctggtggctcatgcacttcgggaggccaagttgggtggatcacgagcccagga

SEQ ID NO: 543276 - DNA, 120 bp, Artificial Sequence
  ENSG00000167553_19 (sequence is synthesized)
acatggtgaaaacccatctctaccaaaacaaaaatttgcatgctgtgatggcacctgcctataggtgggaggaccacctgagcccaaggaggttgaggtagtgagccatgattgcaccac

SEQ ID NO: 543277 - DNA, 120 bp, Artificial Sequence
  ENSG00000167553_20 (sequence is synthesized)
tgcaccactgcattccagcctgggtgacggagacccctgactctcaaatttaaaaacaaaatgcaggttctaattctataggcttgaggtgaggcttcagacacgtcttaaatttttttt

SEQ ID NO: 543278 - DNA, 120 bp, Artificial Sequence
  ENSG00000167553_21 (sequence is synthesized)
acacgtcttaaattttttttctttgagatggtctctttcccaggctgcagtgcaatggcaccatcatagctcacccccaccttgacctgggctaagccatcctcccacctcagcctccca

SEQ ID NO: 543279 - DNA, 120 bp, Artificial Sequence
  ENSG00000167553_22 (sequence is synthesized)
gggattacaggagtgagccactacacctggcccctagatacgttttttaataacctcccaaatgatgctgttggtctgatgtgaccacatgtacagtagcaaagggttagataacagtaa

SEQ ID NO: 543280 - DNA, 120 bp, Artificial Sequence
  ENSG00000167553_23 (sequence is synthesized)
ccacatgtacagtagcaaagggttagataacagtaactgctggagccaaaattcaagtgcccagccacactgccagaactattgctgtcagtctttaataaagtattagtcacacgagaa

SEQ ID NO: 543281 - DNA, 120 bp, Artificial Sequence
  ENSG00000167553_24 (sequence is synthesized)
attggcaatttaaagggaagaaattaagctttatcttctcttttccatattaactatgtttcaggcaaccaaatagcacttctttacaaaatcattttagctaataaatgtagaaaaaag

SEQ ID NO: 543282 - DNA, 120 bp, Artificial Sequence
  ENSG00000167553_25 (sequence is synthesized)
tacagaattcgaaaattgccacttcgcaccccttaatagcaaataattgactcaggtaaaggtcatcaaaggatgataccattacaagcaagttgaggcattttacaatgaaggcaccag

SEQ ID NO: 543283 - DNA, 120 bp, Artificial Sequence
  ENSG00000167553_26 (sequence is synthesized)
cgcacggcacggcctgtgagatagacccttgaatccggatctgatgaaggcttcgagctaccttcttacaggactcttcagctccctgcgccttttaacacatgcacatccagcaaaagc

SEQ ID NO: 543284 - DNA, 120 bp, Artificial Sequence
  ENSG00000167553_27 (sequence is synthesized)
agaggagaacctggctgtgattcaaagtgtgtgaacccagctctgtcccttgggttccgtacatataaatggagcagctgagggaactggataagaagtcgattttgtagttacaggctg

SEQ ID NO: 543285 - DNA, 120 bp, Artificial Sequence
  ENSG00000167553_28 (sequence is synthesized)
agtgaacaatgggcgcccagctctaaaatgacagcctggttcaatggggtggaggagctagggagggatgagtgctttgtgtgcttggaattagatccttcaaatggatcctttctgaat

SEQ ID NO: 543286 - DNA, 71 bp, Artificial Sequence
  ENSG00000167553_29 (sequence is synthesized)
gcacatccagcaaaagcagaggagaacctggctgtgattcaaagagtctcactctagccttccgggttcca

SEQ ID NO: 543287 - DNA, 120 bp, Artificial Sequence
  ENSG00000167553_30 (sequence is synthesized)
tggaccgaattcgcaagctggtaagtatagtactttaaataaagtgggatgagagtttcttttgcagttctgagaccaaactacagaaatcattctttgcaactaaaatgagactatttg

SEQ ID NO: 543288 - DNA, 120 bp, Artificial Sequence
  ENSG00000167553_31 (sequence is synthesized)
cattgcaactaaaatgtatctgttcactaaattaattggatttctgaaccagatgatcttggatttatgggacaactatggggtagaagtaagtgctctttagcctattttgcttcaagc

SEQ ID NO: 543289 - DNA, 120 bp, Artificial Sequence
  ENSG00000167553_32 (sequence is synthesized)
cgccgcctttgttcctccccagcgctctgctgcgccctgggcgcagtactggcccggttcctgcacccgcactgcggcggcggcggggcttgaggatttggggctaagctaaacctcaca

SEQ ID NO: 543290 - DNA, 120 bp, Artificial Sequence
  ENSG00000167553_33 (sequence is synthesized)
aaacataccaccaccctcgcccagagagcttacgaaagaaaagagcttaaaggttttccaagtagagcctgggggcgctgactccacccaacggccacaaagagccgaagccgattctca

SEQ ID NO: 543291 - DNA, 120 bp, Artificial Sequence
  ENSG00000167553_34 (sequence is synthesized)
aggcggtcgatgtaagagaacctgcggcacataggcggatgcggctccctatatacaactcggtcaccatggggatgggccggggccttttcctgttggtccagacccccaatctgccca

SEQ ID NO: 543292 - DNA, 120 bp, Artificial Sequence
  ENSG00000167553_35 (sequence is synthesized)
gagaagccatgacaggagactggtgattggtgcaagcgacgtgggatgagctggagaaccggaaactgtgtgcctcctcgtgtgatgcagtgtgaagcgcacggcacggcctgtgagata

SEQ ID NO: 543293 - DNA, 120 bp, Artificial Sequence
  ENSG00000167554_0 (sequence is synthesized)
agacccggaagcggatcgcgtgggtagaaggtcacaccgcagcgcgtcagtttccctttgtttagattcaatctgggcttcccagctcccccgcgcttctgtacccgggatctgagagtc

SEQ ID NO: 543294 - DNA, 120 bp, Artificial Sequence
  ENSG00000167554_1 (sequence is synthesized)
aacacagaccttgaaatccccgcaccgctccctccaccccgtgtaaattcaggcgtctccgtgagagtccggcgctcgcttccctgtgtgttaaaatcgctcggcgacgggtcctgtccc

SEQ ID NO: 543295 - DNA, 120 bp, Artificial Sequence
  ENSG00000167554_2 (sequence is synthesized)
cgctcgttctgccttgggccagacacaggagtgttgccatgttgtccaaactggtctcgaaattctggagtcaagcagtctgcctgcctcgttctccaaacgtgctgggattacaggcat

SEQ ID NO: 543296 - DNA, 120 bp, Artificial Sequence
  ENSG00000167554_3 (sequence is synthesized)
gagccactacgcctggccaagtattcggattgacttataaacagtcatgctatgtgatgaagaagcccagaagaggaaagcaaaggagtcagggatggctcttcctcagggacgcttgac

SEQ ID NO: 543297 - DNA, 120 bp, Artificial Sequence
  ENSG00000167554_4 (sequence is synthesized)
attcatggacgtggccatcgaattctctcaggaggagtggaaatccctggaccctggacagagggctttatacagggacgtgatgttggagaactacaggaacctggtctttctgggaat

SEQ ID NO: 543298 - DNA, 120 bp, Artificial Sequence
  ENSG00000167554_5 (sequence is synthesized)
ctgtcttcctgacctaagtattatttccatgttgaagcaaaggagagagcccttgattctgcaaagtcaagttaaaatagtaaaaaatacagatggaagggaatgtgtcagaagcgtgaa

SEQ ID NO: 543299 - DNA, 120 bp, Artificial Sequence
  ENSG00000167554_6 (sequence is synthesized)
cacagggaggagctgtgtattgggaagcaatgcagaaaacaagcctattaaaaatcaacttggattaacccttgaggcacatctgtctgaattgcagctgtttcaagccggaaggaaaat

SEQ ID NO: 543300 - DNA, 120 bp, Artificial Sequence
  ENSG00000167554_7 (sequence is synthesized)
ttacagaagtaatcaagttgaaaagtttacaaaccatcgttcctcagtttcaccacttcaaaaaatttcttctagtttcacaacacacatttttaataaatatagaaatgatcttattga

SEQ ID NO: 543301 - DNA, 120 bp, Artificial Sequence
  ENSG00000167554_8 (sequence is synthesized)
atcaagtaatccatactgcagagaaaccttacaaatgtactgaatgtggcaaggtcttcagtcgcaattcacaccttgtagaacattggagaattcatactggacagaagccttacaaat

SEQ ID NO: 543302 - DNA, 120 bp, Artificial Sequence
  ENSG00000167554_9 (sequence is synthesized)
gtagtgaatgtgacaaggtgtttaatcgcaattcaaaccttgcacgacatcaaagaattcatactggagagaagcctcacaaatgtaacgaatgtggcaaagcttttagagagtgttcgg

SEQ ID NO: 543303 - DNA, 86 bp, Artificial Sequence
  ENSG00000167554_10 (sequence is synthesized)
aaccttacaaatgtaatgagtgtggcaagaacttcaggcacaaattttctctaaccaatcatcagagaagtcacacggcggaatta

SEQ ID NO: 543304 - DNA, 120 bp, Artificial Sequence
  ENSG00000167554_11 (sequence is synthesized)
ttacaaatgtaatgaatgtggcaaggtctttagtctgctttcataccttgcacggcatcaaataattcatagtacagagaagccctacaaatgtaacgaatgtggaagagcatttcacaa

SEQ ID NO: 543305 - DNA, 88 bp, Artificial Sequence
  ENSG00000167554_12 (sequence is synthesized)
acaaagtctttgggcgcaaattatacctaaccaaccatcagagaattcatactggagagagaccttacaagtgtaatgcatgtggcaa

SEQ ID NO: 543306 - DNA, 120 bp, Artificial Sequence
  ENSG00000167554_13 (sequence is synthesized)
atactggagagagaccttacaagtgtaatgcatgtggcaaggtcttcaatcaaaatccacacctttcacgacatcggaaaattcatgctggagagaattcactgcgtaccttacagatgg

SEQ ID NO: 543307 - DNA, 120 bp, Artificial Sequence
  ENSG00000167554_14 (sequence is synthesized)
aatgaatgtggcaaaatctttagttagaattcacacctagcacaacattggaggactcaggagaaaaaccttacaaatatcataaatgtggcaaagaatttagtttgcattgaagcctca

SEQ ID NO: 543308 - DNA, 120 bp, Artificial Sequence
  ENSG00000167554_15 (sequence is synthesized)
tcactcatctcttgatccacactgaaaggaaaccctacaaatgtaaagttaataacatatataaataatctataaagagagaacagttatatcagaatagagcatttaatgaaaactacc

SEQ ID NO: 543309 - DNA, 120 bp, Artificial Sequence
  ENSG00000167554_16 (sequence is synthesized)
agtatagcatattcttgagtaggattcacatttaactgctggcaccgtaatttgtaactctttgatttagaatgtacatacttctcatgttttaagtaataaagtttaaagttttttttt

SEQ ID NO: 543310 - DNA, 120 bp, Artificial Sequence
  ENSG00000167554_17 (sequence is synthesized)
aggcagctttaacctgggtgtgggtgaggatgacactgtgatgctcctagaggtggttcatgaggaatggacgaataagtggttggaactgatatgagaacacatagctgaagaagagac

SEQ ID NO: 543311 - DNA, 120 bp, Artificial Sequence
  ENSG00000167554_18 (sequence is synthesized)
tcggtatttataaaatctacagtagtacacagttatgtcgtaggccatcacattcggtcaccacacactcactgactcatccagagcaatttctagtcctgcaagcgccattcatggatt

SEQ ID NO: 543312 - DNA, 120 bp, Artificial Sequence
  ENSG00000167554_19 (sequence is synthesized)
ccggcctagtttaaatttttcttagtgtgaatgaattacatcctttctaccagcgttgtttaatcttacctcaggaggatactttatagtagagaataataacccattatgattttaagg

SEQ ID NO: 543313 - DNA, 120 bp, Artificial Sequence
  ENSG00000167554_20 (sequence is synthesized)
ttgaagcagccagaaaagtgtgtgtgtgtgtatgtgtgtgagacataaaacaacatacgcttctgggtgcaatatacttaagtaagtatgatgttgagtaattacacttagtacttgagt

SEQ ID NO: 543314 - DNA, 120 bp, Artificial Sequence
  ENSG00000167554_21 (sequence is synthesized)
tagtttctctgtactctggtgtaggatgtttatgtgggtaaagtcaaaatcactttaatagtacaatttcagccttgtacaccctcaaatgtgtgtgagtgttaaagagtatgccctgta

SEQ ID NO: 543315 - DNA, 120 bp, Artificial Sequence
  ENSG00000167554_22 (sequence is synthesized)
tttaaacatgtatatcatattattattgtaccttttctatgtcgagacatgtttttatttacaagtacataccattgtgtcacagttgcctgtagtattcagtacataacatgatgtaca

SEQ ID NO: 543316 - DNA, 120 bp, Artificial Sequence
  ENSG00000167554_23 (sequence is synthesized)
ggtttttagcaataggctataccatataccctaggtgtgtagtagactataccatcttggtttatgtaagtgcagtctgtaatgaaatggtctgaaaacacatttctcagaaccggtccc

SEQ ID NO: 543317 - DNA, 120 bp, Artificial Sequence
  ENSG00000167555_0 (sequence is synthesized)
agtttccggtagacccggaagccgattgcagggagaaactgttttcgcagcagtgcgcctcccttttccagccaccggttctcctgaccccgagtgtggggggtgacttcagtctcctga

SEQ ID NO: 543318 - DNA, 120 bp, Artificial Sequence
  ENSG00000167555_1 (sequence is synthesized)
catccagtgttctctcgagccagtttccagcccacagaaaatgagctcttccggaagtgggcatcttattccaatcccctccctgtgaatgtgtggagaaaaagagatgggaacgaggca

SEQ ID NO: 543319 - DNA, 120 bp, Artificial Sequence
  ENSG00000167555_2 (sequence is synthesized)
gaggaaatagagaaattttgaaagagaaatgaagaatgagagacccattaacagaaggcaaagtagaaggttcacaaattttaagaaagggagaataaagtgaaaaaaatctcagaagga

SEQ ID NO: 543320 - DNA, 120 bp, Artificial Sequence
  ENSG00000167555_3 (sequence is synthesized)
atccactcaacagacgaggattcacttccaaagagacatattatgcaaggaagcaacttggaagaggaaagaaaagaagtcaggaatggcccttactcagggacccttgaaattcatgga

SEQ ID NO: 543321 - DNA, 120 bp, Artificial Sequence
  ENSG00000167555_4 (sequence is synthesized)
ccttgaaattcatggatgtggccatagagttctctcaggaagagtggaaatgcctggaccctgcgcagaggactttatacagggacgtgatgttggagaattataggaacctggtctccc

SEQ ID NO: 543322 - DNA, 120 bp, Artificial Sequence
  ENSG00000167555_5 (sequence is synthesized)
tgacctgagtgttacctccatgttagagcaaaagagagatccctggactctgcagagtgaagagaaaatagcaaacgatccagacggcagggagtgcatcaaaggtgtgaacacagagag

SEQ ID NO: 543323 - DNA, 120 bp, Artificial Sequence
  ENSG00000167555_6 (sequence is synthesized)
gagctctaaattgggaagtaatgcaggaaacaagccttgtaaaaatcaacttggattcacttttcagttacatctgagtgatctacagctatttcaagctgaaaggaaaatttctgggtg

SEQ ID NO: 543324 - DNA, 120 bp, Artificial Sequence
  ENSG00000167555_7 (sequence is synthesized)
taagcattttgaaaaacccgtcagtgacaattcctcagtttcaccgcttgaaaaaatttcttccagtgtcaaatcccaccttttaaataaatatagaaataattttgatcatgctccatt

SEQ ID NO: 543325 - DNA, 120 bp, Artificial Sequence
  ENSG00000167555_8 (sequence is synthesized)
acttccacaagaacagaaagcacacattagggaaaaagcttataaatgtaatgagcacggccaagtctttagagcatctgcaagccttactaaccaagtaatccataacgcagataatcc

SEQ ID NO: 543326 - DNA, 120 bp, Artificial Sequence
  ENSG00000167555_9 (sequence is synthesized)
ttacaaatgcagtgaatgtggcaaggtctttagttgcagttcaaagcttgtgatacatcgaagaatgcatactggagagaagccttacaaatgtcatgaatgtggcaagctcttcagtag

SEQ ID NO: 543327 - DNA, 120 bp, Artificial Sequence
  ENSG00000167555_10 (sequence is synthesized)
caattcaaacctttcacaacatcaaagaattcatactggagagaagccttacaaatgtcatgaatgtgacaaggtctttcgaagcagttcaaagcttgcacaacatcaaagaattcatac

SEQ ID NO: 543328 - DNA, 120 bp, Artificial Sequence
  ENSG00000167555_11 (sequence is synthesized)
tggagagaagccttacaaatgtcatgaatgtgacaaggtcttcaatcaaattgcacaccttgtacgacatcaaaaaattcatactggagagaaaccttacagttgtaataaatgtggcaa

SEQ ID NO: 543329 - DNA, 120 bp, Artificial Sequence
  ENSG00000167555_12 (sequence is synthesized)
atactggagagaaaccttacagttgtaataaatgtggcaaggtctttagtcgccattcatatctagcagaacatcaaacggttcatactggtgagaaaccttacaaatgtgaagaatgtg

SEQ ID NO: 543330 - DNA, 120 bp, Artificial Sequence
  ENSG00000167555_13 (sequence is synthesized)
gttaattcacactggaaggaaaccttacaaatgtaaagaatgtgacaaggtctttgggcgcaagtgtttcctgacctctcatcagagaattcatactagagagagaccttatggatgcag

SEQ ID NO: 543331 - DNA, 120 bp, Artificial Sequence
  ENSG00000167555_14 (sequence is synthesized)
tcagtgtggcaagatctttagtcagaaatcagaccttatacgacatcgaaaaactcatactgatgagaagccttacaaatgtaataaatgtggcacagcgtttagagagttttcagacct

SEQ ID NO: 543332 - DNA, 120 bp, Artificial Sequence
  ENSG00000167555_15 (sequence is synthesized)
tactgcccattttctaatccatagtggagagaaaccttatgaatgtaaagaatgtggcaaagtcttcaggtacaagtcttctctaaccagtcatcatagaattcatactggagagaagcc

SEQ ID NO: 543333 - DNA, 120 bp, Artificial Sequence
  ENSG00000167555_16 (sequence is synthesized)
cgcagttcaaacctggtatgccatcagaaaattcatacaggagaaaagccttacaaatgtaatcaatgtggcaaggtctttaatcaagcatcataccttacaagacatcaaataattcat

SEQ ID NO: 543334 - DNA, 120 bp, Artificial Sequence
  ENSG00000167555_17 (sequence is synthesized)
actggagagaggccttacagatgtagtaaatgtggcaaagcatttcgagggtgttcaggccttactgcccatcttgcaatccatactgaaaagaaatctcatgagtgtaaagaatgtggc

SEQ ID NO: 543335 - DNA, 120 bp, Artificial Sequence
  ENSG00000167555_18 (sequence is synthesized)
aagatcttcactcagaagtcttccctcaccaatcaccatagaattcacattggagagaaaccttacaaatgcaccctgtgcagtaaggtcttcagtcacaattctgaccttgcacagcat

SEQ ID NO: 543336 - DNA, 120 bp, Artificial Sequence
  ENSG00000167555_19 (sequence is synthesized)
cagagagttcattcatgagagtccctacaaactgtatggcaaaaccatcatcatgagttctagcattaatcaacatcagtgagtccatactaagtggaaatcatataaatgaaatgtatg

SEQ ID NO: 543337 - DNA, 120 bp, Artificial Sequence
  ENSG00000167555_20 (sequence is synthesized)
tgacacaggctttatcaaggcctgccaaatcactggacatcaccacatcactgtggaggatgaaagcacacagatgaattgtgtgtacttgggctattattcaaggaccattgctataga

SEQ ID NO: 543338 - DNA, 120 bp, Artificial Sequence
  ENSG00000167555_21 (sequence is synthesized)
acacgataggatttacacaagaagtaactctgtctctggttctctgatactaatctatgatattgcatgatgcagaataatgctaagtcaaaatatgttgaatctcatgacctgatgtat

SEQ ID NO: 543339 - DNA, 120 bp, Artificial Sequence
  ENSG00000167555_22 (sequence is synthesized)
atcaaaggtgcaacggcttgtaaatgaccagttttattcaggctataaagcattcaattatttggggcttatagaaaaggctactttactctttgtgacttcgaaatcttttcatgtgcc

SEQ ID NO: 543340 - DNA, 120 bp, Artificial Sequence
  ENSG00000167555_23 (sequence is synthesized)
ttccatacaggccattcactgtggtccctgggaaagaatcagtaggatgacagggctgacttcattagctgaggattatttctatccaatttcctgatgaaggacattgccttttgagat

SEQ ID NO: 543341 - DNA, 120 bp, Artificial Sequence
  ENSG00000167555_24 (sequence is synthesized)
taaatattgtctgatttagagagcatggaggtgggcagagtaacataaaactgatgaccgtcatcatactgttgcagttagcacactttctcctgacataagtgcacagagcttcagtgt

SEQ ID NO: 543342 - DNA, 120 bp, Artificial Sequence
  ENSG00000167555_25 (sequence is synthesized)
ccaccaactgaccatgaaatagagtatgctgtaatcttaaggcataggttattagtgggaagagagtaataggttgctagtgtctgattatatggtagaaataatgcaaggaaaaaggta

SEQ ID NO: 543343 - DNA, 120 bp, Artificial Sequence
  ENSG00000167555_26 (sequence is synthesized)
ataatgcaaggaaaaaggtagccaccttctccattgaacagcagtacctgctgtttagcaaagactgatgagaagtagacttttttttttttggagatagagtctcactctgttgcccag

SEQ ID NO: 543344 - DNA, 120 bp, Artificial Sequence
  ENSG00000167555_27 (sequence is synthesized)
tcttggctcactgcaccctccgcctcctgggctcaagcagtccttctgccttagcctcctaagtagctgagactacagacgtgcgccaccacacccagttcatttttgtatttttagtag

SEQ ID NO: 543345 - DNA, 89 bp, Artificial Sequence
  ENSG00000167555_28 (sequence is synthesized)
ccacacccagttaccatgttggccaggcaggtctccaactcctgacctcaagtgatatgttcacctcagcctcccaaagtgctgggatt

SEQ ID NO: 543346 - DNA, 120 bp, Artificial Sequence
  ENSG00000167555_29 (sequence is synthesized)
ttgaaatggaatagagaacagttatatcacagttgagagtttaatcaaaatgaccggatcagcatattctttttttagatgagacagagtttcgcccttgtcacccaggctgtagtgcgg

SEQ ID NO: 543347 - DNA, 77 bp, Artificial Sequence
  ENSG00000167555_30 (sequence is synthesized)
ctcaaactcctgacctcaggcgatccatctgcctcagcctctcagcatattcttaagtaggattcacatttaattct

SEQ ID NO: 543348 - DNA, 120 bp, Artificial Sequence
  ENSG00000167555_31 (sequence is synthesized)
cagctcagcatattcttaagtaggattcacatttaattcttggtattataagttgcaaccatttgatttagaatgtatgcagctctcatgtttgtagtaataaagtttcatttttcctaa

SEQ ID NO: 543349 - DNA, 120 bp, Artificial Sequence
  ENSG00000167555_32 (sequence is synthesized)
attctttgtactggggtctctatttctgctactgaaggaggtggtacagatgttgctgcaactggagggggtggtaaaaaccaatttttatcctccctctcctgttttttgttttcaatt

SEQ ID NO: 543350 - DNA, 120 bp, Artificial Sequence
  ENSG00000167555_33 (sequence is synthesized)
ggatctgtgggtgggacaacagattctttcagatttttagactcagcctgctgcccagcagaataatgagataatggcagaacagtacgaaccagactccacgtgaagatagaagaatca

SEQ ID NO: 543351 - DNA, 120 bp, Artificial Sequence
  ENSG00000167555_34 (sequence is synthesized)
actttaagacctttttgatgagcctcttttaatccttttcctgctgtgtcccaattttccacatcaagagtgcctgcctgtggaaaccatgggccatgcatcataatctcctgcagaagc

SEQ ID NO: 543352 - DNA, 120 bp, Artificial Sequence
  ENSG00000167555_35 (sequence is synthesized)
ttaatgtctgtgaattaacctgagttccaggctgtctcaatagaacttgaaacaactgcacgtagtgtttttttcaacagacaagttctgccccacgttaccctgattcagaaaacttcc

SEQ ID NO: 543353 - DNA, 120 bp, Artificial Sequence
  ENSG00000167555_36 (sequence is synthesized)
cgttcgcagtactttagagcaccgacctcatatcgctcccagtacctcttcagggcactgaccttatatccgctgccagccgactcatccaggtttccccattcaccttgtgaatttcag

SEQ ID NO: 543354 - DNA, 120 bp, Artificial Sequence
  ENSG00000167555_37 (sequence is synthesized)
ttcctctactccagcagaaccttctttgttcacgtcctcaaagtcctatgttcggaggccacttgtccgacatcctcggagtccctcttctgggtcaccagttgccacctgcacagacct

SEQ ID NO: 543355 - DNA, 120 bp, Artificial Sequence
  ENSG00000167555_38 (sequence is synthesized)
tgggggactgaacgaagggggcgaacattggaataaaagacaaaggtgtatatttggaagaaggggtcagggggctccttctagtgaacaagggccctgagctttagagccctttgtatt

SEQ ID NO: 543356 - DNA, 120 bp, Artificial Sequence
  ENSG00000167555_39 (sequence is synthesized)
ttattgggtaaaggagatggtggcagggggagggggtggttattggtcagcggcttgatttacaacaggtttgcaagactgcattctttgaacaatagactgtagatgtcccagtagata

SEQ ID NO: 543357 - DNA, 120 bp, Artificial Sequence
  ENSG00000167555_40 (sequence is synthesized)
caatagactgtagatgtcccagtagataatttcaatgagcatggcaccagggagtgattaccttcagcaaaccttctggtgtcaggcgcagtcgtgagtttgcccacatcctgcattcat

SEQ ID NO: 543358 - DNA, 120 bp, Artificial Sequence
  ENSG00000167555_41 (sequence is synthesized)
ccagtggaatgttgagctggtcacatctcttgggccttcagcttcctacatgtgggaacactcagtccttttctggggatgtgtttcttctggcttgtggaagtaccattattaatgtct

SEQ ID NO: 543359 - DNA, 120 bp, Artificial Sequence
  ENSG00000167555_42 (sequence is synthesized)
atacagctcttcttggatttctgattttccctaagaggctcatccctgcttcttcccagaagttttcagtctctgttgtatttctctgctcatagtctgtttcagatttacccataattc

SEQ ID NO: 543360 - DNA, 120 bp, Artificial Sequence
  ENSG00000167555_43 (sequence is synthesized)
tctcgactcctgcagattccccactgctccaatgcatcacctcagttccttgtgttttctgcactgccagcatgatacacacaataccctgatactcctaccaatgtctgagtcaggtga

SEQ ID NO: 543361 - DNA, 120 bp, Artificial Sequence
  ENSG00000167555_44 (sequence is synthesized)
agtgcgtgagtttccctttgtctatgttaagtctaggctagccagttcttctctgcttctatacccgggagctgaggggcatgcagaccttgaaatcccggcaccgctccctccaccccg

SEQ ID NO: 543362 - DNA, 120 bp, Artificial Sequence
  ENSG00000167555_45 (sequence is synthesized)
tgggcagagtggaggccccataatttttgttttttgagacagggtctaacgctgtcatccaggctagagtgcggtggcaatcatagctcactgcagccttgaattcctggacttaaggga

SEQ ID NO: 543363 - DNA, 120 bp, Artificial Sequence
  ENSG00000167555_46 (sequence is synthesized)
tctccctggctcgctcttccaaagtgttgggattacagccatgagccactgtaccctgcaaagccacactattacatagcgtttgggaaactctctgcaaatgggagaattctgtgggaa

SEQ ID NO: 543364 - DNA, 81 bp, Artificial Sequence
  ENSG00000167555_47 (sequence is synthesized)
ctgagtagctgggattacaggcgcccatcctttttgccatatttgccaggctgctctccaactcctgacctcaagtgatcc

SEQ ID NO: 543365 - DNA, 63 bp, Artificial Sequence
  ENSG00000167555_48 (sequence is synthesized)
cactgtacctggcctgattgtgtcttttaaattgtaggaaagaattaaaagtcaagttacaaa

SEQ ID NO: 543366 - DNA, 120 bp, Artificial Sequence
  ENSG00000167555_49 (sequence is synthesized)
tctcttggaatggccgccggggaaggtaaaccttgctgtaatgcacccattggtttaatttgtgcattaatagctctcaaatcatgcagcagtcaccgtcttccaggcttttttggaata

SEQ ID NO: 543367 - DNA, 120 bp, Artificial Sequence
  ENSG00000167555_50 (sequence is synthesized)
acaaataccagtgaatttcaggggctaactcacttctctatatgtcctgcattcaattgttcttttaccaacagatgaagttgatctagcttcccctgtgttaggggcccacacaagttt

SEQ ID NO: 543368 - DNA, 120 bp, Artificial Sequence
  ENSG00000167555_51 (sequence is synthesized)
ctcactaagccattctaatggtaaggcagtgggcagaggagaaatatgaatgacccccatcagaaatcctgacgtcctagcccttttctgtttttccagttactgagaacgggttagggt

SEQ ID NO: 543369 - DNA, 120 bp, Artificial Sequence
  ENSG00000167555_52 (sequence is synthesized)
ttccttgtaggaatttccctaaaccttttctactttcatatcccatgtccttcaacatttcaaatcctgggttaccaaagttttcatttgtaagtctcatatttcatgctgtaagtctcc

SEQ ID NO: 543370 - DNA, 120 bp, Artificial Sequence
  ENSG00000167555_53 (sequence is synthesized)
accccataaattgatggctgtatttacaacataagactggaaagtacctgactgaccatccagaccaagacaaggtaaaatctcagcactctgttgaacacttttagctgctcctactcc

SEQ ID NO: 543371 - DNA, 120 bp, Artificial Sequence
  ENSG00000167555_54 (sequence is synthesized)
cactaggggtgtggaggttagtctgagagtcgatgctgggggccagtctttactggatatgactgacacatcagctcctgtgtccattcgcccataaaatttctttcctttaattagtac

SEQ ID NO: 543372 - DNA, 120 bp, Artificial Sequence
  ENSG00000167555_55 (sequence is synthesized)
tacacaggtaggtctattagaggctatggattgggatagataagtttcctatgtagttgtgctcccaaaccctttatttcctcatttctccttttatgaagatgggtgtaatttgcaggg

SEQ ID NO: 543373 - DNA, 71 bp, Artificial Sequence
  ENSG00000167555_56 (sequence is synthesized)
ctcatttctccttttatgaagatgggtgtaatttgcagggaataagcaatagctaagcagtatattctcct

SEQ ID NO: 543374 - DNA, 120 bp, Artificial Sequence
  ENSG00000167555_57 (sequence is synthesized)
gccttgcaagttaaggcggcctttgcctaaaattagttccatgtatcctcttggtaaaggtcctcaaatgccagtgggaattttgataggtttgtctccaccaactactgttatttctct

SEQ ID NO: 543375 - DNA, 120 bp, Artificial Sequence
  ENSG00000167555_58 (sequence is synthesized)
tgactgggagatctaatcctgcacttcctggtgttcctggggtgagggaatcaatgtttctcttgggacccatccctgaaatgggcttgtggtctggactgagaatgccctgattgtttg

SEQ ID NO: 543376 - DNA, 120 bp, Artificial Sequence
  ENSG00000167555_59 (sequence is synthesized)
aggggcccgggtccaggccaccttctcatttcccagcaggaggggtgccattctgatgaagtcttgagtggcactgatgagcccagtgatttcctttgttacagcgaggacagagtgctg

SEQ ID NO: 543377 - DNA, 120 bp, Artificial Sequence
  ENSG00000167555_60 (sequence is synthesized)
gcgtttttctgctgggtgttgggggggggcactgcattgtgaagtcctttctgtcctgagatctggtggcattcctttttaaaatgtctggttttaccgcaagtacaacattttcccaat

SEQ ID NO: 543378 - DNA, 120 bp, Artificial Sequence
  ENSG00000167555_61 (sequence is synthesized)
ttagcgtttgacccttggctccttttagatttgtcaactactaaattagccatgcttcagctatcattgaagagcaatgaagctcagttccttcatcctaacaagctctgagaaaatttc

SEQ ID NO: 543379 - DNA, 120 bp, Artificial Sequence
  ENSG00000167555_62 (sequence is synthesized)
tgtggcagtggcatgaggaatctgacgcttcactgcctcttgtaatctcgcaagaaattgtgcatagggctcctacaacccttgcatgatatgcaaaaaggattgtactaggactccctc

SEQ ID NO: 543380 - DNA, 120 bp, Artificial Sequence
  ENSG00000167555_63 (sequence is synthesized)
atctggaattgtggcccaggcgcatttagcagcctgtgaacgctgctgataagcagcagctgggggtgccatttgatgttccaggtctgaataagggtcattactcaatagcatatcctc

SEQ ID NO: 543381 - DNA, 120 bp, Artificial Sequence
  ENSG00000167555_64 (sequence is synthesized)
tgtaatgtctccttgacaagcagcacgattctgtctagcctggtttgcacacagttcttgccaatttaaattccgtgtcagatacgcagtagcagacaagtttgcgccaaaagttttaca

SEQ ID NO: 543382 - DNA, 120 bp, Artificial Sequence
  ENSG00000167555_65 (sequence is synthesized)
tcaaagagtagaaggcacgtagcaccgaatacagattctagcaatcctaaagtgaatgggctctgtactccatcgttaactacactcgtttgtaattccttcaacaactaaactctaggg

SEQ ID NO: 543383 - DNA, 120 bp, Artificial Sequence
  ENSG00000167555_66 (sequence is synthesized)
gggggcgaacattggaataaaagacaaagattccccactgctccaatgcatcacctcagttccttgtgttttctgcactgccagcatgatacacacaataccctgatactcctaccaatg

SEQ ID NO: 543384 - DNA, 120 bp, Artificial Sequence
  ENSG00000167562_0 (sequence is synthesized)
acacatccgcgcagaccaggaagcggatcccgtggagtgaaggtcgcaccgcggcggattgacttctaaagacttggtacgtgaggaaaaaacacggaagaggaagaggaaagcaaagga

SEQ ID NO: 543385 - DNA, 69 bp, Artificial Sequence
  ENSG00000167562_1 (sequence is synthesized)
gtgaggaaaaaacacggaagaggaagaggaaagcaaaggagtcagggatggctcttcttcagggtctac

SEQ ID NO: 543386 - DNA, 120 bp, Artificial Sequence
  ENSG00000167562_2 (sequence is synthesized)
ggagaattataggaacctggtctccctggatacctcttccaaatgcatgatgaagatgttctcatcaacaggacaaggcaatacagaagtggtccacacagggacattgcaaatacatgc

SEQ ID NO: 543387 - DNA, 120 bp, Artificial Sequence
  ENSG00000167562_3 (sequence is synthesized)
aagtcatcacattggagatacttgcttccaggaaattgagaaagatattcatgactttgtgtttcagtggcaagaaaatgaaacaaatggccatgaagcactcatgacaaaaaccaaaaa

SEQ ID NO: 543388 - DNA, 120 bp, Artificial Sequence
  ENSG00000167562_4 (sequence is synthesized)
gttgatgagtagtacagagcgacatgatcaaaggcatgctggaaacaaacctattaaaaatgagcttggatcaagctttcattcgcatctgcctgaagtgcacatatttcaccccgaagg

SEQ ID NO: 543389 - DNA, 120 bp, Artificial Sequence
  ENSG00000167562_5 (sequence is synthesized)
gaaaattggtaatcaagttgagaaggctatcaacgatgctttctcagtttcagcatcccaacgaatttcctgtaggccaaaaactcgtatttctaataagtataggaataatttcctcca

SEQ ID NO: 543390 - DNA, 120 bp, Artificial Sequence
  ENSG00000167562_6 (sequence is synthesized)
gtcttcattactcacacaaaaacgggaagtacacacaagagaaaaatctttccaacgtaatgagagtggcaaagcctttaatggtagctcactcttaaaaaaacatcagataatccattt

SEQ ID NO: 543391 - DNA, 120 bp, Artificial Sequence
  ENSG00000167562_7 (sequence is synthesized)
aggagacaaacagtataaatgtgatgtatgcggcaaggactttcatcagaagcgataccttgcatgccatagatgtcacactggtgagaatccttacacgtgtaatgagtgtggcaagac

SEQ ID NO: 543392 - DNA, 71 bp, Artificial Sequence
  ENSG00000167562_8 (sequence is synthesized)
ctggtgagaatccttacacgtgtaatgagtgtggcaagacattcagtcacaattcagccctgttagttcac

SEQ ID NO: 543393 - DNA, 75 bp, Artificial Sequence
  ENSG00000167562_9 (sequence is synthesized)
cttacaaatgtgaagaatgtgacaaagttttcagtcgcaaatcacaccttgaaagacataggagaattcacagac

SEQ ID NO: 543394 - DNA, 84 bp, Artificial Sequence
  ENSG00000167562_10 (sequence is synthesized)
agtgtaatgagtgtggcaagacctttgttcaaaattcatctcttgtaatgcataaggtcattcatactggagagaaacgcaaat

SEQ ID NO: 543395 - DNA, 120 bp, Artificial Sequence
  ENSG00000167562_11 (sequence is synthesized)
taatgaatgtggcaaggtttttaatcgaaaatcaaaccttgaacgtcatcatagacttcatactggaaagaaatcttagaagtgtaaatttgcaaggtttttaggcaacagtcaaacctt

SEQ ID NO: 543396 - DNA, 78 bp, Artificial Sequence
  ENSG00000167562_12 (sequence is synthesized)
agaaatcttagaagtgtaaatttgcaaggtttttaggcaacagtcaaaccttgcatgtcatcatagacttagttttca

SEQ ID NO: 543397 - DNA, 120 bp, Artificial Sequence
  ENSG00000167562_13 (sequence is synthesized)
atacaaatgtaaggtttgtgacaaggatttcgggtgtgattcacacctggcccaacatactggaattcacactggaaaggaactgtacaagtgtaatgagtgtggcagagcctttggtgg

SEQ ID NO: 543398 - DNA, 120 bp, Artificial Sequence
  ENSG00000167562_14 (sequence is synthesized)
agcctttggtggtcagtcaacacttactcaccatcaagcaatccatggtatagggaaacttgactaatgtaatgattgtcacaaagtcttcagtaatattacagccattgcaaaacattg

SEQ ID NO: 543399 - DNA, 120 bp, Artificial Sequence
  ENSG00000167562_15 (sequence is synthesized)
gagaatccataatgaaggaggtcttacaagtgtaataaatgtggcaagtttttcagacatcattcataacttgcagttcattggcgatcttatacaggagagaaatcttacaaatgtgat

SEQ ID NO: 543400 - DNA, 120 bp, Artificial Sequence
  ENSG00000167562_16 (sequence is synthesized)
gattgtggcaaggtcttcagtcaagcttcatcttttgcaaaacgggagaattcatacaggagagaaacctcacaagtgtgatgattgtgagcaaagcctttacttcacgttcacaccaca

SEQ ID NO: 543401 - DNA, 120 bp, Artificial Sequence
  ENSG00000167562_17 (sequence is synthesized)
ttagatatcagaggatccatactggacagaaatcttacaaacgtcctatgtgtggcaaggtcttcagtccgaggttactccttgcagaatatcataacgttcatttttgaggtaatagtt

SEQ ID NO: 543402 - DNA, 120 bp, Artificial Sequence
  ENSG00000167562_18 (sequence is synthesized)
acaaatgcggtgagcacagcaaaccatcaaggattgacagtagagtcaattcagaattgacttgagtttgagttgacttaaaacattcagttgaagcattaattgacattaaagtgttta

SEQ ID NO: 543403 - DNA, 120 bp, Artificial Sequence
  ENSG00000167562_19 (sequence is synthesized)
tgttaagaggattgggccaggcgtgtggctcacgcctgtaaatccagcactttaggagcccaaggtggatagatcacttgaggtcatgagtttgagatcagcctggccaacagacgtgag

SEQ ID NO: 543404 - DNA, 120 bp, Artificial Sequence
  ENSG00000167562_20 (sequence is synthesized)
tcacttttcccagcctgctttttgtttctttaacaaaaaccaataggggtttttataggtattgtgttgaatctgaatcacattggcttatataataacaatattgatttttccaaacca

SEQ ID NO: 543405 - DNA, 120 bp, Artificial Sequence
  ENSG00000167562_21 (sequence is synthesized)
gtctcaacctttaggcgcctgaagcgcaaacgtcgcgatcccagtctcagggaggccgagttctctgcctggtgctgggatcttgtggaccccaccgaaggcgtcgtcgcaccccacctc

SEQ ID NO: 543406 - DNA, 120 bp, Artificial Sequence
  ENSG00000167562_22 (sequence is synthesized)
ccgcctcatgctgggccttgctgcaccccaagtctccccttagcagtcaccactttccttgagccagcgttggggaggtgccaggggccagtcctgtgacacgagatggggtttctccat

SEQ ID NO: 543407 - DNA, 62 bp, Artificial Sequence
  ENSG00000167562_23 (sequence is synthesized)
tccctgttttgaaggattgacttctaaagacttggtacgtgaggaaaaaacacggaagagga

SEQ ID NO: 543408 - DNA, 120 bp, Artificial Sequence
  ENSG00000167562_24 (sequence is synthesized)
attcctaagtatttcttactttaagatctctagcaaatggaagtgttttttaattttcgtttaaattttttattgtttatggaaattcaattaatttttggtgctgctattgcattgtgc

SEQ ID NO: 543409 - DNA, 120 bp, Artificial Sequence
  ENSG00000167562_25 (sequence is synthesized)
aaatccactgaatgtgttgattagttccagtagtattttggttgactcaggccccgcccacctcttcgcctcccgtctggcctgacccaggccccgcccacctcctcgggggtctccccg

SEQ ID NO: 543410 - DNA, 120 bp, Artificial Sequence
  ENSG00000167562_26 (sequence is synthesized)
cgggtctggcttctgtactgtgctgattggcacagacccggaagctgatggcatggactgaaggttgccccgttgagtttgcgcttcccagttctctggtactgctataccggggacgtg

SEQ ID NO: 543411 - DNA, 120 bp, Artificial Sequence
  ENSG00000167562_27 (sequence is synthesized)
ggtgtctccacagacctggaaattccggcccctctttctcaactcagagcaaattgagacgtccgggtgggagtccgtgagtcttttccttttgagtttaaagtcgccctgaggctggtc

SEQ ID NO: 543412 - DNA, 120 bp, Artificial Sequence
  ENSG00000167562_28 (sequence is synthesized)
ccgtcccggtcttttctgcagtagggccgtgcagacacctcctgtagcgaaactttccttctcaaaacccttcccgacccgtcctcccgcctcgcgctgtttcaggtcctcaccagcgag

SEQ ID NO: 543413 - DNA, 120 bp, Artificial Sequence
  ENSG00000167562_29 (sequence is synthesized)
ttggactctcgccctgggctcctcatcggcgcctggagggcagcgctgcagccccactcccgggaaggccgcgtcctctgcctggtcctgggatcctgcagaccccacccctgtccgaag

SEQ ID NO: 543414 - DNA, 120 bp, Artificial Sequence
  ENSG00000167562_30 (sequence is synthesized)
gcgccatcgcccaccacctccctcctcgtgccggccctgcttctccccagttccaaccccaggaaaacgtgcttctcctggaggcaaccctctttttccaccctcgccctgttgttcccg

SEQ ID NO: 543415 - DNA, 120 bp, Artificial Sequence
  ENSG00000167562_31 (sequence is synthesized)
gaaggcaggcctggaatgtgaagtttccaggtagatggatattaaacatagaattgaagaaaaaaaaaaaaaccccacaaagtaacaaaagaatgaagcggcgaaagcagaaatttactc

SEQ ID NO: 543416 - DNA, 120 bp, Artificial Sequence
  ENSG00000167562_32 (sequence is synthesized)
aaccaagaaagcaccccacagggtgggggtgggcccaagcgagcgtctccagggccccatttacaaagtttttggaggttatttttttttgaggtccctatgggctaccccttatctgga

SEQ ID NO: 543417 - DNA, 120 bp, Artificial Sequence
  ENSG00000167562_33 (sequence is synthesized)
tgaagaatttggcccttggccaaggaaataactgaggtaaattggcctgaggccagagcagatgggtgccctatgcagatgaaggggtggccggtgcttggccttggccactcctgggct

SEQ ID NO: 543418 - DNA, 120 bp, Artificial Sequence
  ENSG00000167562_34 (sequence is synthesized)
ctttctctttccacctgcgacctggtggaagggggagggtgttagggagagtagcctttgatcctttgttactttgggtgggaagatggggtttttccttttagtctagttttggaaagt

SEQ ID NO: 543419 - DNA, 90 bp, Artificial Sequence
  ENSG00000167562_35 (sequence is synthesized)
ggaagatggggtttttccttttagtctagttttggaaagttcgcgttaattggttttagattccctgcctccctagacccaggacccatg

SEQ ID NO: 543420 - DNA, 120 bp, Artificial Sequence
  ENSG00000167562_36 (sequence is synthesized)
gggctcaagggatcctcccacctcagcctgcagagtagctgggaccacagccgcgcgccaccacaccgcgccaatttttgtgttcttggtagagaccgggttttgccttgttgtctaggt

SEQ ID NO: 543421 - DNA, 120 bp, Artificial Sequence
  ENSG00000167562_37 (sequence is synthesized)
ccacaccgcgccaatttttgtgttcttggtagagaccgggttttgccttgttgtctaggttgggctccaactgcagggctaaagcgatccaagagcatcagcctcccaaagtgctgggat

SEQ ID NO: 543422 - DNA, 85 bp, Artificial Sequence
  ENSG00000167562_38 (sequence is synthesized)
agactgaagaggccgattctcctctatccaggagacgggtttcaccattttgccaggtttgtctcaaactcctcggcttaactga

SEQ ID NO: 543423 - DNA, 90 bp, Artificial Sequence
  ENSG00000167562_39 (sequence is synthesized)
tgtgaggccgattctcctctatccaggagacgggtttcaccattttgccaggtttgtctcaaactcctcggcttaactgatccgcttgct

SEQ ID NO: 543424 - DNA, 120 bp, Artificial Sequence
  ENSG00000167562_40 (sequence is synthesized)
ggatggccaacgcagcctgttgacccttcctggccatcacatgaaaatcagcgactcttccttcttacaaaactcggagcttctcaggataacttggtgaaacgtcccccgctgtgaacc

SEQ ID NO: 543425 - DNA, 120 bp, Artificial Sequence
  ENSG00000167562_41 (sequence is synthesized)
tcagtgagcccacctgtaatatacaggtgagggagaagaccagaaaagctcagtcagagtgacactgacccctgaaatgatgggcacaatggagtgtgtggcttttcctgtaggacaggg

SEQ ID NO: 543426 - DNA, 120 bp, Artificial Sequence
  ENSG00000167562_42 (sequence is synthesized)
aggtatttagttgtagtttgaactttaaaggattccagtcctccgaaaaacaggattagactcaaatcaccttgaaccttatcatctcatggctttgacccacctacatggctccgtgtc

SEQ ID NO: 543427 - DNA, 120 bp, Artificial Sequence
  ENSG00000167562_43 (sequence is synthesized)
ccctgcaggcctcgccccggagctctacaatcctgtgtgcagttgtctccgcagctctctgctgggacatcaaacaggcatctccaccttcatgtgtctataagtgacttcctaaacccc

SEQ ID NO: 543428 - DNA, 120 bp, Artificial Sequence
  ENSG00000167562_44 (sequence is synthesized)
caaacacattcccttacagtcctacacatctcagatgagggtgacagtgtacttctgggtgcttagctgaggttgacaccatgtattttaaatatggaaaataaattacattatttgtaa

SEQ ID NO: 543429 - DNA, 120 bp, Artificial Sequence
  ENSG00000167562_45 (sequence is synthesized)
gtcaagcttcatcctatgcaaaacaggagaattcatacaggagagaaacctcacaagtgtgatgattgtggcaaagcctttacttcacattcacacctcgttggacatcagagaatccat

SEQ ID NO: 543430 - DNA, 120 bp, Artificial Sequence
  ENSG00000167562_46 (sequence is synthesized)
actggacagaaatcttgcaaatgtcatcagtgtggcaaggtcttcagtccgaggtcactccttgcagaacatgagaaaattcatttttgagataactgttcccaatgcaacaattccagg

SEQ ID NO: 543431 - DNA, 120 bp, Artificial Sequence
  ENSG00000167562_47 (sequence is synthesized)
ccgccccggccccgccctctgccggttctaaagggcaaggtctctccgcctggggccccgcctctacctcgatcaggccccgcccaccttctcgttggctccacccaggcctggctttag

SEQ ID NO: 543432 - DNA, 120 bp, Artificial Sequence
  ENSG00000167562_48 (sequence is synthesized)
tcctgtgcgcacacatccgcgcagaccaggaagcggatcccgtggagtgaaggtcgcaccgcggcggattgacttctaaagacttggtacgtgaggaaaaaacacggaagaggaagagga

SEQ ID NO: 543433 - DNA, 120 bp, Artificial Sequence
  ENSG00000167562_49 (sequence is synthesized)
caaatgtgaagcatgtgacaaagttttcagtcgcaaatcacaccttaaaagacataggataattcatactgaagagaaatcttctgagtgtaataaatgtggcatgtttttcagacattg

SEQ ID NO: 543434 - DNA, 120 bp, Artificial Sequence
  ENSG00000167562_50 (sequence is synthesized)
gtggctcaggcctgtaatcccagcacgttggaagaccaaggcacataggtcacttgaggtcagaagtttgaaaccaccatggccaacagatgtcggccactttcgccatcctgttttttg

SEQ ID NO: 543435 - DNA, 86 bp, Artificial Sequence
  ENSG00000167562_51 (sequence is synthesized)
cttgaggtcagaagtttgaaaccaccatggccaacagatgtcggccactttcgccatcctgttttttgtttcttattttgtcactc

SEQ ID NO: 543436 - DNA, 72 bp, Artificial Sequence
  ENSG00000167562_52 (sequence is synthesized)
tgcccagcctagagtgcaatgattctgcctcagcctccctagttgctgggattacaggcatgtgccaccaca

SEQ ID NO: 543437 - DNA, 80 bp, Artificial Sequence
  ENSG00000167562_53 (sequence is synthesized)
tgatctgcccaccttggcaggtcttgtttcttattttctattttttatttttttgagaggcaggagaatggcgggtgaac

SEQ ID NO: 543438 - DNA, 88 bp, Artificial Sequence
  ENSG00000167562_54 (sequence is synthesized)
ggcatgagccaccgtacccggtcttgtttcttattttctattttttatttttttgagaggcaggagaatggcggcagatagcaccatt

SEQ ID NO: 543439 - DNA, 120 bp, Artificial Sequence
  ENSG00000167562_55 (sequence is synthesized)
gcacacatccgcgcagaccaggaagcggatcccgtggagtgaaggtcgcaccgcggcggccaccatgtaagaattccgttacatcttttcactcatctcagaccttctcagcgtgactcg

SEQ ID NO: 543440 - DNA, 120 bp, Artificial Sequence
  ENSG00000167562_56 (sequence is synthesized)
gtgaaaatgtccccgttctgaggatgtcacagctaaatctaaagcagatcatagtctcgctctgtcctccaggctgtgagtgcagtcttgtgatcttggctcactgcaacctttgtctcc

SEQ ID NO: 543441 - DNA, 120 bp, Artificial Sequence
  ENSG00000167565_0 (sequence is synthesized)
agacggagaggccccgccgaggtgagcgaggctccaaccggtcactggtgggtcctggcactggcgggtcgcaacgctgtgggcgttccaggaggtggtcgtggcgaacctggcagctgc

SEQ ID NO: 543442 - DNA, 120 bp, Artificial Sequence
  ENSG00000167565_1 (sequence is synthesized)
gggcatcatggtgggaggcttgaagaggaaacactctgatttggaagaggaggaggagaggtgggagtggagtccagcaggccttcagagctaccagcaagccctgctccgcatctccct

SEQ ID NO: 543443 - DNA, 120 bp, Artificial Sequence
  ENSG00000167565_2 (sequence is synthesized)
agacaaagtccagcgcagcctgggcccccgagcacccagcctccgcaggcatgtcctcatccataacaccctccaacagctgcaggctgcacttcgcctggctcccgcccctgccctgcc

SEQ ID NO: 543444 - DNA, 120 bp, Artificial Sequence
  ENSG00000167565_3 (sequence is synthesized)
ccccgagcccctcttcctgggcgaggaggatttctccctgtcagccaccattggctctatcctcagggagctggacacctccatggatgggactgagccccctcagaatccagtgactcc

SEQ ID NO: 543445 - DNA, 120 bp, Artificial Sequence
  ENSG00000167565_4 (sequence is synthesized)
ccttggcctccagaatgaagtgccaccccagcctgatccagtcttcttagaagctctgagctcccggtacttgggggactctggcctggatgacttctttctggacattgacacatctgc

SEQ ID NO: 543446 - DNA, 120 bp, Artificial Sequence
  ENSG00000167565_5 (sequence is synthesized)
acctcttctgtgccccaggttcttgggagtggaatgaactggatcacatcatggaaatcattctggggtcctaaaactgtgatagaggggatcgatccttcctcatgtcatcttcggtgg

SEQ ID NO: 543447 - DNA, 120 bp, Artificial Sequence
  ENSG00000167565_6 (sequence is synthesized)
cctggatccctgaatgcaactctgggtgtgtgtttttgtgggggctcgaagcagtgactatggcctcctttgttcccatttcagggttccacaaactgtcttgcatgtgtgtgtgtgtct

SEQ ID NO: 543448 - DNA, 120 bp, Artificial Sequence
  ENSG00000167565_7 (sequence is synthesized)
ggttaccccgaccttctgtgaaggtgggtcttcctgaattaatttatctattccaaatgccttaacgagactctgtttctgggagtctgattttccacttacacatttcttccacctttc

SEQ ID NO: 543449 - DNA, 120 bp, Artificial Sequence
  ENSG00000167565_8 (sequence is synthesized)
ctgctagttcccactcccctgtgaccactggggcctcagggaagataaagaaagctgggcctgtcgaaggatgacagggatgtgctgccaggttgctatagaaacccaggctctgcctct

SEQ ID NO: 543450 - DNA, 120 bp, Artificial Sequence
  ENSG00000167565_9 (sequence is synthesized)
tgcaccttgagggggtgggaggggctggtgtcctccctccaggctgaaccccacttcctcggcaggaccccagtctcagcagcctcctgatttcataaccaggccggaccacgtgcaata

SEQ ID NO: 543451 - DNA, 120 bp, Artificial Sequence
  ENSG00000167565_10 (sequence is synthesized)
gggtggaaaccaaactgctccatgccgggttatttaaaagaaaggcagagtttgtggtggcttttttttttttttttggattgtttgtaatttttttaaataaaagtattttggaaggag

SEQ ID NO: 543452 - DNA, 120 bp, Artificial Sequence
  ENSG00000167565_11 (sequence is synthesized)
aggaaactgaggccctgagaattgactcattcagatcacttcccatgatcacgcagctgagcagtttccaatacagaattcagatttggggttccctacttccaatccaggtctctgtgc

SEQ ID NO: 543453 - DNA, 120 bp, Artificial Sequence
  ENSG00000167565_12 (sequence is synthesized)
tccacacttgtctttcgtgctccatgtttgaagaaattaatattgtggaagaacagttttaaggcttagaggaacttgagttaggatccgtacttggcagatgaggaaattgattctcat

SEQ ID NO: 543454 - DNA, 120 bp, Artificial Sequence
  ENSG00000167565_13 (sequence is synthesized)
tatggcctcctttgttcccatttcagggttccacaaactgtcttgcatgtgtgtgtgtgtctggttaccccgaccttctgtgaagataaagaaagctgggcctgtcgaaggatgacaggg

SEQ ID NO: 543455 - DNA, 120 bp, Artificial Sequence
  ENSG00000167565_14 (sequence is synthesized)
gagttcaagacccaggaggggaggcgaggttgttggggcagtattttcaagtggagggagtttgaagctgggacgttgggcttttggagaagcgagagaacagaggggaggaacttttga

SEQ ID NO: 543456 - DNA, 120 bp, Artificial Sequence
  ENSG00000167566_0 (sequence is synthesized)
ggcacccccctttctctgccccccgcccccaagccgcggccatggacctggcggatccggcctgccctggcccagctcaacacctgatttcggcaaggtgaccgttctggatgctagagt

SEQ ID NO: 543457 - DNA, 120 bp, Artificial Sequence
  ENSG00000167566_1 (sequence is synthesized)
gagtgtgcccacctgcgtaagggggcagagacagcctgccggggcttctcttccttgttcccagggccagatgtcagaggccatggaccagccagctgggggtcctggaaacccaaggcc

SEQ ID NO: 543458 - DNA, 120 bp, Artificial Sequence
  ENSG00000167566_2 (sequence is synthesized)
aggagagggtgatgatggcagcatggagccaggcacctgccaggagcttctgcaccgactgcgggagctggaggcagagaactcggcacttgcccaggccaacgaaaaccagcgggagac

SEQ ID NO: 543459 - DNA, 120 bp, Artificial Sequence
  ENSG00000167566_3 (sequence is synthesized)
ttatgagcgctgtctggacgaggttgccaaccatgtggtacaggcgttgctgaaccagaaggacctgcgagaggagtgcatcaagctgaagaagagagtgtttgacctggaacggcagaa

SEQ ID NO: 543460 - DNA, 120 bp, Artificial Sequence
  ENSG00000167566_4 (sequence is synthesized)
ccagatgctgagtgccctgtttcagcagaaactccagctcacgacaggctcgctccctcagatcccactcactccactccagccaccatcagagccaccagcctccccctccctgagctc

SEQ ID NO: 543461 - DNA, 120 bp, Artificial Sequence
  ENSG00000167566_5 (sequence is synthesized)
cactgagggaccggctgccccgctgcctctggggcactgtgctgggcagagagaggtatgttgggagcagcagctgaggccaggaggcccaggccccccagccgccccacccccagcgct

SEQ ID NO: 543462 - DNA, 120 bp, Artificial Sequence
  ENSG00000167566_6 (sequence is synthesized)
ggatgccctatccccgttccttcggaagaaggcccagattctggaggtgctgagagccctggaagagactgaccccttgcttctctgctcacctgccaccccctggcggcctccaggcca

SEQ ID NO: 543463 - DNA, 120 bp, Artificial Sequence
  ENSG00000167566_7 (sequence is synthesized)
ggggcctggctccccagagcccatcaacggcgagctgtgtggcccgcctcagcctgaaccctcaccctgggcgccctgcctgctgctaggccctggcaacctgggaggcctgctgcactg

SEQ ID NO: 543464 - DNA, 120 bp, Artificial Sequence
  ENSG00000167566_8 (sequence is synthesized)
ggagcgcctcttggggggtctgggaggggaagaggacactgggcggccctggggtcctagcaggggacctcctcaggcccagggcaccagctctggcccaaactgtgccccaggcagcag

SEQ ID NO: 543465 - DNA, 120 bp, Artificial Sequence
  ENSG00000167566_9 (sequence is synthesized)
ctcctcctcctcttctgatgaggcaggtgaccccaatgaggcacccagccccgacaccctgctcggtgccctggcccgcagacagttgaacctgggccagctccttgaggacacagagtc

SEQ ID NO: 543466 - DNA, 120 bp, Artificial Sequence
  ENSG00000167566_10 (sequence is synthesized)
ttacctacaggccttcctggccggggctgcaggcccactcaatggggaccacccaggtcctgggcagtcatcctccccagaccaggcgcccccacagctgtctaagtccaaaggcctccc

SEQ ID NO: 543467 - DNA, 120 bp, Artificial Sequence
  ENSG00000167566_11 (sequence is synthesized)
caagtcagcttggggtgggggtaccccagaggcccacaggccaggcttcggtgctacctcagagggccaggggcccctccccttccttagcatgttcatgggtgctggggatgccccact

SEQ ID NO: 543468 - DNA, 120 bp, Artificial Sequence
  ENSG00000167566_12 (sequence is synthesized)
gggctctcggcctggccacccccattcctcatctcaggtgaaaagcaagctccaaattggccccccttctcctggggaagctcagggaccccttctgccctctccagctaggggtctcaa

SEQ ID NO: 543469 - DNA, 120 bp, Artificial Sequence
  ENSG00000167566_13 (sequence is synthesized)
gtttctaaagctgcctccaacctcggagaagagccccagcccaggaggcccgcagctcagtccccagctcccccggaactcgcgaatcccctgtcggaacagtggctcagacggcagccc

SEQ ID NO: 543470 - DNA, 120 bp, Artificial Sequence
  ENSG00000167566_14 (sequence is synthesized)
ctccccactgttggcccgaaggggtctgggtggaggagagctgtccccagagggggcgcaaggcctgcccaccagcccttcaccctgctacacaaccccagactccacacagctcagacc

SEQ ID NO: 543471 - DNA, 120 bp, Artificial Sequence
  ENSG00000167566_15 (sequence is synthesized)
cccgcagtcagccttgtccaccacgctgtccccaggcccagtggtgtctccctgctatgagaacattctggacctttctcggagcacctttagggggccttccccagagccacctccatc

SEQ ID NO: 543472 - DNA, 120 bp, Artificial Sequence
  ENSG00000167566_16 (sequence is synthesized)
cccactgcaggtgcccacctacccacagctaactctggaggtaccacaggcccctgaggtcctcagaagccctggagtaccccccagtccttgcctcccagaatcgtacccctatgggag

SEQ ID NO: 543473 - DNA, 120 bp, Artificial Sequence
  ENSG00000167566_17 (sequence is synthesized)
cccccaagagaagagtttggacaaggcaggctcggagtctccccatcccggccgcaggaccccaggcaactcatccaagaagcccagccaggggtcaggacggcgacctggggatcctgg

SEQ ID NO: 543474 - DNA, 120 bp, Artificial Sequence
  ENSG00000167566_18 (sequence is synthesized)
cagcacacctctgcgggacagactggcggccctggggaagctgaagacaggccccgagggggccctgggctcagagaagaatggggtgccagccaggcctggcaccgaaaagacccgggg

SEQ ID NO: 543475 - DNA, 120 bp, Artificial Sequence
  ENSG00000167566_19 (sequence is synthesized)
acctgggaagtcaggggagagtgctggagacatggtgccctccatccacaggccactggagcagctagaagccaagggggggatacggggggcagtggccttgggcacaaacagcctgaa

SEQ ID NO: 543476 - DNA, 120 bp, Artificial Sequence
  ENSG00000167566_20 (sequence is synthesized)
cctgtctcaccaaggagctgcctcaccaaagtggagctggccaagagccggctggcaggggccctgtgcccccaggtaccccgtacccctgccaaagtgccaacctcagccccaagcctg

SEQ ID NO: 543477 - DNA, 120 bp, Artificial Sequence
  ENSG00000167566_21 (sequence is synthesized)
ggcaagcccaataagagccctcacagcagccccaccaagctcccttccaagtcaccaaccaaggtggtgcctcgacctggggctccgctagtcaccaaggagtcccccaagcctgacaaa

SEQ ID NO: 543478 - DNA, 120 bp, Artificial Sequence
  ENSG00000167566_22 (sequence is synthesized)
gggaagggccctccctgggcagactgtggtagtaccacggcccagtccacacccctagtacctggccccactgacccaagtcagggccctgaggggctggccccacactcagccatcgag

SEQ ID NO: 543479 - DNA, 120 bp, Artificial Sequence
  ENSG00000167566_23 (sequence is synthesized)
gagaaggtgatgaagggcattgaggagaacgtgctgcggctccagggccaggagcgagcccctggcgccgaggtcaagcaccgcaacaccagcagcatcgccagctggttcggccttaag

SEQ ID NO: 543480 - DNA, 120 bp, Artificial Sequence
  ENSG00000167566_24 (sequence is synthesized)
aagagcaagctgccagcgctgaaccgccgcacagaggccaccaagaacaaggagggggctggcgggggctccccgctccggagggaagtcaagatggaagcccggaagctggaggccgag

SEQ ID NO: 543481 - DNA, 120 bp, Artificial Sequence
  ENSG00000167566_25 (sequence is synthesized)
agcctcaacatctccaagctgatggccaaggcggaagacctgcgtcgggcactggaagaggagaaggcctacctaagcagccgggcccggccacggcctggtggcccagccccagggccc

SEQ ID NO: 543482 - DNA, 120 bp, Artificial Sequence
  ENSG00000167566_26 (sequence is synthesized)
aacacggggctggggcaggtgcagggccagctggctggcatgtaccaaggtgcagacaccttcatgcagcagctgctaaacagggtggatggcaaggagctgccatccaagagctggcgg

SEQ ID NO: 543483 - DNA, 120 bp, Artificial Sequence
  ENSG00000167566_27 (sequence is synthesized)
gagcccaagcctgagtacggggatttccagccggtgtcttctgaccccaagagcccctggccagcctgtgggccccggaatggcctggtgggccctcttcagggctgcggaaaacctcct

SEQ ID NO: 543484 - DNA, 120 bp, Artificial Sequence
  ENSG00000167566_28 (sequence is synthesized)
ggaaagccgagcagcgagccagggaggcgggaagagatgccctcggaggacagcctggccgagccagtgcccacctcacacttcacagcctgtggctccttgactcgaaccttggacagt

SEQ ID NO: 543485 - DNA, 120 bp, Artificial Sequence
  ENSG00000167566_29 (sequence is synthesized)
ggcattgggaccttcccacccccagaccatggtagcagtgggacccccagcaagaatcttcctaagaccaagccaccgcggctggatcccccacctggggtacccccagctcggccccca

SEQ ID NO: 543486 - DNA, 120 bp, Artificial Sequence
  ENSG00000167566_30 (sequence is synthesized)
ccccttaccaaagtcccccgccgcgcccacacactggagcgggaggtgccaggcatagaggagctgctggtgagtgggcggcaccccagcatgccagccttccctgcactgctacccgct

SEQ ID NO: 543487 - DNA, 120 bp, Artificial Sequence
  ENSG00000167566_31 (sequence is synthesized)
gctccgggccaccggggccatgagacctgtcctgatgatccctgtgaagacccaggccccacccctcctgtccagctggccaagaactggaccttccccaatactagggcagccggcagc

SEQ ID NO: 543488 - DNA, 120 bp, Artificial Sequence
  ENSG00000167566_32 (sequence is synthesized)
tcctcggaccctctcatgtgcccaccccgacaactggaggggctgcccaggacccccatggccctgcccgtggaccggaagcgaagccaggagcccagccgcccgtcccctacgccccag

SEQ ID NO: 543489 - DNA, 120 bp, Artificial Sequence
  ENSG00000167566_33 (sequence is synthesized)
ggcccacctttcgggggtagccgcacccccagcacttcggacatggccgaggaaggcagagtggccagcgggggccccccagggctggagacctcggagtctctcagtgactcactctac

SEQ ID NO: 543490 - DNA, 120 bp, Artificial Sequence
  ENSG00000167566_34 (sequence is synthesized)
gactcgctgtcctcttgtgggagtcagggctgaggggctgcgccacgccacggccccgctggagctggggaccacagactggaccggctctcttcatgcccagcccccggagacggggac

SEQ ID NO: 543491 - DNA, 120 bp, Artificial Sequence
  ENSG00000167566_35 (sequence is synthesized)
ccctccctgaagggaccaaggaggcaggtggataagaaggtgaaaagggggtccctggcacaccccaccacccactgcttcggcggatgagatgaccgtgctcagctcagggagagaccc

SEQ ID NO: 543492 - DNA, 120 bp, Artificial Sequence
  ENSG00000167566_36 (sequence is synthesized)
cgcccttggtcccttctctcacccagagtaaggctcttcctggaagggactgggggttaaaggccactgtgtcgcagccctccagtccctacttcaggctgagccatcttgtggtgctgg

SEQ ID NO: 543493 - DNA, 120 bp, Artificial Sequence
  ENSG00000167566_37 (sequence is synthesized)
gcttcctgcccaccagccgtgccatctctgcccaacccggctgctcctctgccccgaagccctcgcgaggccctcctggaggcccccgtgctggtggagtttgggggccagggggacaag

SEQ ID NO: 543494 - DNA, 120 bp, Artificial Sequence
  ENSG00000167566_38 (sequence is synthesized)
ttgccttctctctctgccctggtcctccctgctgtctggatggtgctgccctcctctgccccatgcctttggggtctgttcgtccgtcttttttgttgttgtttttatatattgaagcgc

SEQ ID NO: 543495 - DNA, 120 bp, Artificial Sequence
  ENSG00000167566_39 (sequence is synthesized)
ctggcccagcccccagcccccagccccgcactgcggttaatttatgtgttgtttaaaatgcggctgctctgcttcctgcctctgcttctgccgtatccctaataaaatgtggaggccccc

SEQ ID NO: 543496 - DNA, 120 bp, Artificial Sequence
  ENSG00000167566_40 (sequence is synthesized)
aatggcaatggtttggtggggtgggaggatcccatggtgtgatgcaggtctgagccctggccgtgctggatgtggtcatgagcttcgtctagtcatcagtctgtctcctacatgccaggg

SEQ ID NO: 543497 - DNA, 120 bp, Artificial Sequence
  ENSG00000167566_41 (sequence is synthesized)
atcccaccaggaggcatgtgagtttggatggggaggcaaatgcagtgttcctgccctcacggagttgactgtctggtgggggaggctggtgtacaatcttgcaggagcatcgcctgggag

SEQ ID NO: 543498 - DNA, 120 bp, Artificial Sequence
  ENSG00000167566_42 (sequence is synthesized)
ccctgaaggatgaatagggaggagctggccaagtcgaaaggagcgggtggtgtcaagagaccccagcagaaggaccatcgtgcacaaagagcctgatctgacggggcctagctcctgcca

SEQ ID NO: 543499 - DNA, 120 bp, Artificial Sequence
  ENSG00000167566_43 (sequence is synthesized)
gggcagtgggtgcctagtgaggctggagctagaaagcagagccccggaggggtgcagggcacttcccactttgtccaggaggagcctgaggcccagggatcgggaccttgccctgggata

SEQ ID NO: 543500 - DNA, 120 bp, Artificial Sequence
  ENSG00000167566_44 (sequence is synthesized)
acccagcaagtgagcactggagccagagctagagctaagggcgccaggccccaggctcaactgtattctccccatgtgctgagtcgtgttctcagggtgctcttccctacgtggtcacat

SEQ ID NO: 543501 - DNA, 120 bp, Artificial Sequence
  ENSG00000167566_45 (sequence is synthesized)
ttgactctcacaatgaccctgtaagggaggaagaattcttctgcccatttctcagaactaggaaactgaggatcatctggttgaccgagtgaatgaatgagctcggttttcatatgttca

SEQ ID NO: 543502 - DNA, 120 bp, Artificial Sequence
  ENSG00000167566_46 (sequence is synthesized)
cccagttcatactaagcagagccaggcagaggcttttggccgcaaagccagggttttatccattgtctccactatctaaagcatgtgcctgctccaggcaggggatcaccgatgcccagg

SEQ ID NO: 543503 - DNA, 120 bp, Artificial Sequence
  ENSG00000167566_47 (sequence is synthesized)
cacagacctaatctttgtttgcaaacactgaatgagattaggggatattggtgttattttacaaatagagggactgagacccagggaggctgaatgacgtgccagcttgaggccagtccc

SEQ ID NO: 543504 - DNA, 120 bp, Artificial Sequence
  ENSG00000167566_48 (sequence is synthesized)
agtagagaaatcaggtttcttgtgtgagtatggggctttctaaaacaatggtctctgttcttaagatgaggagagtatctgtgttgtctgccccgtgaccgtgaccaggagatacccagc

SEQ ID NO: 543505 - DNA, 120 bp, Artificial Sequence
  ENSG00000167566_49 (sequence is synthesized)
ctggccctgagttattacagtgtcatgcatataggtcacactgacctaagctccaaggagactaaagggtttcatctttgtcctcctccttctcacttcctcctcattccctggagtagc

SEQ ID NO: 543506 - DNA, 120 bp, Artificial Sequence
  ENSG00000167566_50 (sequence is synthesized)
tagtgggactggggggatgtggctcatctgctcctggcagaagctggggtcagctgatggctctgcctcggggctttctgtccccaggttgccaaccatgtggtacaggcgttgctgaac

SEQ ID NO: 543507 - DNA, 120 bp, Artificial Sequence
  ENSG00000167566_51 (sequence is synthesized)
cagaaggtgagtaacccagacaccctggggagaagccctgggcacagcagatgagacccttcctggagactaagggcttggaggacatgggctgttgccctccagtgattccccgtcttt

SEQ ID NO: 543508 - DNA, 120 bp, Artificial Sequence
  ENSG00000167566_52 (sequence is synthesized)
ccgccttgggcgggtccattctgttctacctagagacagaggtgggactaggtaaggccaggtctctgagcagtggtcactgatttgagcatgacttcttcccttaccctgtccccagct

SEQ ID NO: 543509 - DNA, 120 bp, Artificial Sequence
  ENSG00000167566_53 (sequence is synthesized)
acctacttagttttctctgttctagacgccctcattccacccccgctcggcccagcccggcgtcctctacccaggcacggctgaggtttaccaagcccggcccggcctggagaaagtgtt

SEQ ID NO: 543510 - DNA, 120 bp, Artificial Sequence
  ENSG00000167566_54 (sequence is synthesized)
tctataagggggaagggaggtccttcccaccaaagcggaagcggcgcgcgccggccgggcagacttagctcgcgtcctgggaacatctggagggggctgggaggggcgcgcatccaggct

SEQ ID NO: 543511 - DNA, 120 bp, Artificial Sequence
  ENSG00000167566_55 (sequence is synthesized)
ggctgcccaggacccccatggtgagaattgcagcagaggaaagggaaaggactcgggagcaggagggagtgatgtggggagaccagtttctccagtaaggtacggcctgtgtgtcgcaca

SEQ ID NO: 543512 - DNA, 120 bp, Artificial Sequence
  ENSG00000167566_56 (sequence is synthesized)
gtctcagtgctgcaccctctgggaggaggacccctgggatgccctgtgagcggccctccccactgccctccttgcacttctctcgtggggaaaggtttctgtccctccccagaaccttgt

SEQ ID NO: 543513 - DNA, 120 bp, Artificial Sequence
  ENSG00000167566_57 (sequence is synthesized)
aggactgttctcagttgtacctccagcctgtttcctctgaagtataccccaccttgggccccctctggagcagccccccatcaggtgcacagacgcccctcagagctcagtgcctctgag

SEQ ID NO: 543514 - DNA, 87 bp, Artificial Sequence
  ENSG00000167566_58 (sequence is synthesized)
tttttcttttggtagatgcggtctcagtatgttgcccaggctgggcttgaactcctagccgtaagcgtcacaaggcataagccacca

SEQ ID NO: 543515 - DNA, 120 bp, Artificial Sequence
  ENSG00000167566_59 (sequence is synthesized)
cgcccaaccccatttttcttttgtgggggcttcaatggcacaaggggtagtcagtgatggaccaagcttccacccttttataataggaagggttgcccatctactggaaacctccacaat

SEQ ID NO: 543516 - DNA, 120 bp, Artificial Sequence
  ENSG00000167566_60 (sequence is synthesized)
gataacttcttgacattggggccactttaactccaaggccttgctctgtcttatataggcccttttttgatgtgtggtttctaagaggcagagggccaggcgcggtggctcacgcctgca

SEQ ID NO: 543517 - DNA, 120 bp, Artificial Sequence
  ENSG00000167578_0 (sequence is synthesized)
ggaagtggcggtgccgggcccggggagtaggaaggagccggggctgtagccggagtggagcggctgccagccgaggagcaggcgcggccgcggcgccatattgcggccctcagcggccgc

SEQ ID NO: 543518 - DNA, 120 bp, Artificial Sequence
  ENSG00000167578_1 (sequence is synthesized)
gaccgagtcatggctgagacctacgacttcctcttcaaattcctggtgattggcagtgcaggaactggcaaatcatgtctccttcatcagttcattgagaataagttcaaacaggactcc

SEQ ID NO: 543519 - DNA, 120 bp, Artificial Sequence
  ENSG00000167578_2 (sequence is synthesized)
aaccacacaatcggcgtggagtttggatcccgggtggtcaacgtgggtgggaagactgtgaagctacagatttgggacacggctggccaggagcggtttcggtcagtgacgcggagttat

SEQ ID NO: 543520 - DNA, 120 bp, Artificial Sequence
  ENSG00000167578_3 (sequence is synthesized)
taccgaggggcggctggagccctgctggtgtacgacatcaccagccgggagacatacaactcactggctgcctggctgacggatgcccgcaccctggccagccccaacatcgtggtcatc

SEQ ID NO: 543521 - DNA, 120 bp, Artificial Sequence
  ENSG00000167578_4 (sequence is synthesized)
agctgatgttcctggagaccagcgctctcacaggcgagaacgtggaggaggcgttcctcaagtgtgcccgcactatcctcaacaagattgactcaggcgagctagacccggagaggatgg

SEQ ID NO: 543522 - DNA, 120 bp, Artificial Sequence
  ENSG00000167578_5 (sequence is synthesized)
gctctggcattcagtacggggatgcgtccctccgccagcttcggcagcctcggagtgcccaggccgtggcccctcagccgtgtggctgctgagctctgtggagccagctcacctgttctc

SEQ ID NO: 543523 - DNA, 120 bp, Artificial Sequence
  ENSG00000167578_6 (sequence is synthesized)
caggaccagccctgctggggcccaggcccaggctctgagaggccgtgtcctaacctgccctggccccggagaagctacgttgccacctgtcccccttccctggcctggtggggcctggct

SEQ ID NO: 543524 - DNA, 120 bp, Artificial Sequence
  ENSG00000167578_7 (sequence is synthesized)
ttggggcaagactgagccacgggggaagggggaatcccgtacctgctgctgcttcctctgtcttggctaacgtctgtccccctgaacccctaaccataccccaagagctcccaaagcctg

SEQ ID NO: 543525 - DNA, 120 bp, Artificial Sequence
  ENSG00000167578_8 (sequence is synthesized)
agaccagggtcatttgtccccaactccccatctggccctgctgttgctagtacctgttatttattacctggaggcctgtccagcacccaccctacccccataaagcattgtttacacctg

SEQ ID NO: 543526 - DNA, 120 bp, Artificial Sequence
  ENSG00000167578_9 (sequence is synthesized)
ccaggactttgcacctgctgtgcctgagcctaagtttgctcatctgtaaaatgaggctaataatagcacctgcttctatagatgttgagaagaagaaatacattaattcacgaaagtgct

SEQ ID NO: 543527 - DNA, 120 bp, Artificial Sequence
  ENSG00000167578_10 (sequence is synthesized)
cagaatggggcctgatggtcaagacttgatcgatgagggctgtttttaaagttttcttcttatccatctttgggctgagctcaaatgaatgggtgtgtcttcttcacctcagggcttagc

SEQ ID NO: 543528 - DNA, 120 bp, Artificial Sequence
  ENSG00000167578_11 (sequence is synthesized)
agagactctgtcctagagagtttgccctcagtaggtgaaatgtaacaaggcaaggcaaggctttttcacactttgctgactgcaatctacaggaggaaatatattttatgtgttaatcaa

SEQ ID NO: 543529 - DNA, 120 bp, Artificial Sequence
  ENSG00000167578_12 (sequence is synthesized)
gaccctgaggtgagaaccagcttgtcattttcagggaatagactgaaggtcaggagctatagtggagtgaatgagtcagagggtggtaggaggtgaagaggaacaagggctatatcgtag

SEQ ID NO: 543530 - DNA, 120 bp, Artificial Sequence
  ENSG00000167578_13 (sequence is synthesized)
tccttgtttaaatagctttcaagagactttagcgacaaaatagctaagatctgggactctggagcccttggcctaggtttgaatctcacttctgcccagctgtgtcactttgggcaagtc

SEQ ID NO: 543531 - DNA, 120 bp, Artificial Sequence
  ENSG00000167578_14 (sequence is synthesized)
agttaacctttctggcctgttacctcatccggaaaatgggaataatttttagtctacctccctcatagagttttcctgaggatgatgtgagctgttgatgtgagtaaagacctttagaac

SEQ ID NO: 543532 - DNA, 120 bp, Artificial Sequence
  ENSG00000167578_15 (sequence is synthesized)
gatgatgtgagctgttgatgtgagtaaagacctttagaactgttcctggcccacaacaacacacaattgacccatgtaacaaacctgcacatgtgggctgggcgcggtggctcatgcctg

SEQ ID NO: 543533 - DNA, 80 bp, Artificial Sequence
  ENSG00000167578_16 (sequence is synthesized)
aaagtgaaactctgtctcaaaaaaacaaaaacaacgacaaaaaaacccctgcacatgtactccctgaatctaaaataaaa

SEQ ID NO: 543534 - DNA, 120 bp, Artificial Sequence
  ENSG00000167578_17 (sequence is synthesized)
aaaaacccctgcacatgtactccctgaatctaaaataaaagttgaaaaaaaatatatagaatgtgcctggcacatggcaagtactacataagagttatctgttactgttacctattggtt

SEQ ID NO: 543535 - DNA, 120 bp, Artificial Sequence
  ENSG00000167578_18 (sequence is synthesized)
tgtttctgcctatgtctgtttctctccctctaactgtgatggttagagagagagattggattggaatccatcttttttccctgtatctttctctccctgtgggtatccctgattttggct

SEQ ID NO: 543536 - DNA, 120 bp, Artificial Sequence
  ENSG00000167578_19 (sequence is synthesized)
tgcaagtataaactcatttgaaaacattgtgttggccaaaccacccacatctggtggcttgagatctgcctgtgttcccctgttttgcaacctccaggtttaaaggaggttttgccatca

SEQ ID NO: 543537 - DNA, 120 bp, Artificial Sequence
  ENSG00000167578_20 (sequence is synthesized)
gagaggtgtgggtgtgaattcagctctgattttctgactgtggggccttgtcatgctgctgatgggtagactctggttggcctgttcctgtcctagatggtgctagagacacagtgttgg

SEQ ID NO: 543538 - DNA, 120 bp, Artificial Sequence
  ENSG00000167578_21 (sequence is synthesized)
agacagccctaggcccaaccttcatggagctcacagttcagtgggtgagggtggaaggacagacccacttccagacagtgacacctcaggaaggtcagggcttgatggtgaagcaccggg

SEQ ID NO: 543539 - DNA, 120 bp, Artificial Sequence
  ENSG00000167578_22 (sequence is synthesized)
agacaggggtcagagccagcaggggagagccccagagggtcagggccagtactgggggggcaggcagagggatcggggtgggatggagaacacaggcagaggggtcagggctgggatagg

SEQ ID NO: 543540 - DNA, 120 bp, Artificial Sequence
  ENSG00000167578_23 (sequence is synthesized)
gcaggcagaggcagaggggtcagttgggatgaggggacacaggcagaggagttacatgggatggggggcaagggcagaggggttggggtgggatggggggcccaggtagaggggtcaagg

SEQ ID NO: 543541 - DNA, 120 bp, Artificial Sequence
  ENSG00000167578_24 (sequence is synthesized)
ccaagtttgggaggcacaggcagagcggttgcatgggatgggggagcatgggcagagggctcaggggtggaatggggcaggcctaggcagaagggtcaggggtggaatggggcaggtcca

SEQ ID NO: 543542 - DNA, 120 bp, Artificial Sequence
  ENSG00000167578_25 (sequence is synthesized)
ggcagaagggtcaggaaaggaatggggcaggcccaggcagaagggtcaggggtgggatggggacccaggcagagggttggggccaggatgaggaagcacaagcagtggggtcagggccag

SEQ ID NO: 543543 - DNA, 120 bp, Artificial Sequence
  ENSG00000167578_26 (sequence is synthesized)
cagcccaggaagtcagggaggacttcttggaggaggagctgtgtgagctgagctctgaaggaagagctgggtgggcatatcgggaagcggacattagtggcagggaaatggcatgcgcag

SEQ ID NO: 543544 - DNA, 120 bp, Artificial Sequence
  ENSG00000167578_27 (sequence is synthesized)
aggcctgaggtgagggtaaggggggatggaacattggaggaacaggatgagagtcagcaggtgagagctcagtggagggtggggactaactggggccctgacctcagagtgtgtgcccct

SEQ ID NO: 543545 - DNA, 120 bp, Artificial Sequence
  ENSG00000167578_28 (sequence is synthesized)
tccttgacctcaagtcactccagcaaggagaatgggtttgtagagactgagagggccttggaggatgggggatcctctgagctgtctcctctctccctgtactgccccttctgttcctcc

SEQ ID NO: 543546 - DNA, 120 bp, Artificial Sequence
  ENSG00000167580_0 (sequence is synthesized)
gaaagagagcgatagagtgcgagagcgagtgcccggagcatcctggccctgagacagctgggccagccccgcagggctctgcagcatgtgggagctccgctccatagccttctccagggc

SEQ ID NO: 543547 - DNA, 120 bp, Artificial Sequence
  ENSG00000167580_1 (sequence is synthesized)
tgtgttcgcagagttcctggccacactcctcttcgtcttctttggcctcggctctgccctcaactggccacaggccctgccctctgtgctacagattgccatggcgtttggcttgggtat

SEQ ID NO: 543548 - DNA, 120 bp, Artificial Sequence
  ENSG00000167580_2 (sequence is synthesized)
tggcaccctggtacaggctctgggccacataagcggggcccacatcaaccctgccgtgactgtggcctgcctggtgggctgccacgtctccgttctccgagccgccttctacgtggctgc

SEQ ID NO: 543549 - DNA, 120 bp, Artificial Sequence
  ENSG00000167580_3 (sequence is synthesized)
ccagctgctgggggctgtggccggagccgctctgctccatgagatcacgccagcagacatccgcggggacctggctgtcaatgctctcagcaacagcacgacggctggccaggcggtgac

SEQ ID NO: 543550 - DNA, 120 bp, Artificial Sequence
  ENSG00000167580_4 (sequence is synthesized)
tgtggagctcttcctgacactgcagctggtgctctgcatcttcgcctccaccgatgagcgccgcggagagaacccgggcacccctgctctctccataggcttctctgtggccctgggcca

SEQ ID NO: 543551 - DNA, 120 bp, Artificial Sequence
  ENSG00000167580_5 (sequence is synthesized)
cctccttgggatccattacaccggctgctctatgaatcctgcccgctccctggctccagctgtcgtcactggcaaatttgatgaccactgggtcttctggatcggacccctggtgggcgc

SEQ ID NO: 543552 - DNA, 120 bp, Artificial Sequence
  ENSG00000167580_6 (sequence is synthesized)
catcctgggctccctcctctacaactacgtgctgtttccgccagccaagagcctgtcggagcgcctggcagtgctgaagggcctggagccggacaccgattgggaggagcgcgaggtgcg

SEQ ID NO: 543553 - DNA, 120 bp, Artificial Sequence
  ENSG00000167580_7 (sequence is synthesized)
acggcggcagtcggtggagctgcactcgccgcagagcctgccacggggtaccaaggcctgagggccgccagcggcctctacggccccgacggacgcttgtgaggcccgaggcagaagggc

SEQ ID NO: 543554 - DNA, 120 bp, Artificial Sequence
  ENSG00000167580_8 (sequence is synthesized)
ccaccccgtccctcctctcccgcaggtctgaagttggccccccagcgcagagtagctgcttcctggacgtgcgcgcccaggccagtgctgtgagcaggcggggaggaggctgccggaggg

SEQ ID NO: 543555 - DNA, 120 bp, Artificial Sequence
  ENSG00000167580_9 (sequence is synthesized)
agccctgagcctggcaggtcccctgccctgaggctgtgagcagctagtggtggcttctccagcctttttcagggaactgggaacttaggggactgagctggggagggaggcaggtgggtg

SEQ ID NO: 543556 - DNA, 120 bp, Artificial Sequence
  ENSG00000167580_10 (sequence is synthesized)
gtaagagggaaactctggagagcctgcacccaggtactgagtggggagtgtacagacccctgccttgggggttccgggaatgatgcaactggttttactagtgtgcaagtgtgttcatcc

SEQ ID NO: 543557 - DNA, 120 bp, Artificial Sequence
  ENSG00000167580_11 (sequence is synthesized)
ccaagttctcttttgtcctcacatgcagagttgtgcatgcccctgagtgtgaacaggtttgcctacgttggtgcaagtgtgcatggctggggacttctcacttccccttgcaccccttcc

SEQ ID NO: 543558 - DNA, 120 bp, Artificial Sequence
  ENSG00000167580_12 (sequence is synthesized)
tccccaacctgcaataaatccgcttctcctgcagtggatgagtgtgggtgccagtcctcctcaggagaaggggaagggaaggaggccactttgagagggctgaagggagggccttgattt

SEQ ID NO: 543559 - DNA, 120 bp, Artificial Sequence
  ENSG00000167580_13 (sequence is synthesized)
ccagccgcaatctggctcctcctggaaaatttcccccacctgcagcgctgggccccaaggcttgccaagactcattgctggaggtagagaggtgtcaaccagagaacagctcccctagac

SEQ ID NO: 543560 - DNA, 120 bp, Artificial Sequence
  ENSG00000167580_14 (sequence is synthesized)
atggcctctggaaaaaggaaatctttggtggccaaagatttcctttctgtggtgagggagaacctctccaaagaggaagcaggcatatgagtgcgcacgccttcacgtgtgtgtatgctg

SEQ ID NO: 543561 - DNA, 120 bp, Artificial Sequence
  ENSG00000167580_15 (sequence is synthesized)
tgtgtgcccgggacccccgtctccaggggtgccccagacccagagattagcctcccacttcggcgcagaaaacaaaagccctttgtgggacccgggcctttgtcttgggtgaggggagat

SEQ ID NO: 543562 - DNA, 120 bp, Artificial Sequence
  ENSG00000167580_16 (sequence is synthesized)
ttgcacctagacacttcttgaaaggagacactcagtttcacaagtgagccctcttgcccagcacacacctatggctggctgggcaaggcgctcaggcatgcaaccatgggcaccaggcaa

SEQ ID NO: 543563 - DNA, 120 bp, Artificial Sequence
  ENSG00000167580_17 (sequence is synthesized)
gcccgtgatcccctgcttctggctcctaccactggacagtcattgtggatagagcagcctgctgctctcaggaccagagaagggaaatgacttctccaggcagaggcagatctgagtcta

SEQ ID NO: 543564 - DNA, 120 bp, Artificial Sequence
  ENSG00000167580_18 (sequence is synthesized)
gaacccaggcttctaaatttctaggccagtactactgctctcaaaagagattaactgggattaagtgagatgacgcatgtaaagatgctgtgtaaactgtaattcttaataccattatca

SEQ ID NO: 543565 - DNA, 120 bp, Artificial Sequence
  ENSG00000167580_19 (sequence is synthesized)
cgcattactagaatcatttcattatttctgcttcctgggggaaggatgcagaaggagtctgatgctcaacatcccttacctcctttcgttgatggccaaagcaaaggagagtcctgggag

SEQ ID NO: 543566 - DNA, 120 bp, Artificial Sequence
  ENSG00000167580_20 (sequence is synthesized)
cccacaagatccaggcagaaggagatgggtttggggctggccccatcctggcccagcctcttaacctcttcttaccctgaatgtgtgccctatcttttctcccacctccttcctcctacc

SEQ ID NO: 543567 - DNA, 120 bp, Artificial Sequence
  ENSG00000167580_21 (sequence is synthesized)
acccagccctatccattctctccttccctctccagcctgctgtataagtaacatgtgggtcataccttgaacccccctccgcccccatgctctctgtggcctccatgccttcaagacttc

SEQ ID NO: 543568 - DNA, 120 bp, Artificial Sequence
  ENSG00000167580_22 (sequence is synthesized)
tgtctgtatctatctcacactgcaccaagcacccactgtgcaccaggcactaagtctctagcctctttctcccttctgctcccatccaagaaagacagtgtataaggaacatctctgtaa

SEQ ID NO: 543569 - DNA, 120 bp, Artificial Sequence
  ENSG00000167580_23 (sequence is synthesized)
ttgtgtcccctctcatctatgctctttcctgtcttccttgaccaaagctctctttgaggtccaaaaaaggctgccctgggccatatgtgctatggagaggactctcccaaacccccaata

SEQ ID NO: 543570 - DNA, 120 bp, Artificial Sequence
  ENSG00000167580_24 (sequence is synthesized)
gctagtgacagccacttggcctcactaccagaagaagggtggagtcagaaaccaaagtgacctccagagctgtcctcctggcacctgagtgtccttgctctagaggttcaaaggcagcaa

SEQ ID NO: 543571 - DNA, 120 bp, Artificial Sequence
  ENSG00000167580_25 (sequence is synthesized)
ggcagtgagctatgagcccagcatggatgtgtctcaggcacctcatccccaccccacctcaccccaacaaactcctctagaagaagccaagaatttctctctatgtctgtttcacttttt

SEQ ID NO: 543572 - DNA, 120 bp, Artificial Sequence
  ENSG00000167580_26 (sequence is synthesized)
ggattgcatctccccaaaaactaaatgtgaaatccctaccatttctagcctctattgcccagattggagtcagaggtcaaaaaaggattccaagtgatggaactccaggggtggagggaa

SEQ ID NO: 543573 - DNA, 120 bp, Artificial Sequence
  ENSG00000167580_27 (sequence is synthesized)
attggcagttcctggcatctcttgtgtaccagctgctgtgctgggtgccttgcatgcacggacttatctgatcttcctcaaacttcagataggttagggaaggacaaaggcccccagcca

SEQ ID NO: 543574 - DNA, 120 bp, Artificial Sequence
  ENSG00000167580_28 (sequence is synthesized)
tgaagggttttgctatttccaaagcttccccttatcgtcccctgtgattatctcccaaccccgtgacaaaggtagagcaaatattgttcttcccattttacagattcagaaaccaaggct

SEQ ID NO: 543575 - DNA, 120 bp, Artificial Sequence
  ENSG00000167580_29 (sequence is synthesized)
aagggactggtctaaagtctcacaggtagtatatggtggagccaacacttgaactcagacctttttacacaaaatcccatgatttttccactgagacaaatcctaggctcctgggaggcc

SEQ ID NO: 543576 - DNA, 120 bp, Artificial Sequence
  ENSG00000167580_30 (sequence is synthesized)
ctggcagaagccagaacacatggctgggcctttccagcccaacccactgtcttgcagtggacggagagccttggcgagggcagcagggtagagaggacaaagaatgtggggctggtttct

SEQ ID NO: 543577 - DNA, 120 bp, Artificial Sequence
  ENSG00000167580_31 (sequence is synthesized)
gccctttaagagcacccggtcagtcagagaacagagatcacacacaccaaaccagacagaggcagggcagcatggagacaggtagacagacctccaggtccctaagctggggacagagaa

SEQ ID NO: 543578 - DNA, 120 bp, Artificial Sequence
  ENSG00000167580_32 (sequence is synthesized)
ggttctgagctgtcccatactcccactttgtgccaaatgactttgcacctgcaaatggtgcttcaatgtcgttttgtatctttaagctgtgatgttgtatatatacaatgcctcccagct

SEQ ID NO: 543579 - DNA, 120 bp, Artificial Sequence
  ENSG00000167580_33 (sequence is synthesized)
agactgtaagccctttggggacaagggctgcttccagttcttggatggcgttctcctatctaccttccttcaactgctctgcatataataagcactcaataaatgctcatttgccaataa

SEQ ID NO: 543580 - DNA, 120 bp, Artificial Sequence
  ENSG00000167580_34 (sequence is synthesized)
acatacacagaactctcaagaggaacagacaccccagagatccattacaccggctgctctatgaatcctgcccgctccctggctccagctgtcgtcactggcaaatttgatgaccactgg

SEQ ID NO: 543581 - DNA, 120 bp, Artificial Sequence
  ENSG00000167588_0 (sequence is synthesized)
agggagtgtggcactgagccggctcaggcagagacgcggcaccatggctagcaagaaagtctgcattgtaggctccgggaactggggctcagccatcgccaagatcgtgggtggcaatgc

SEQ ID NO: 543582 - DNA, 120 bp, Artificial Sequence
  ENSG00000167588_1 (sequence is synthesized)
agcccagctggcacagtttgacccacgggtgaccatgtgggtatttgaggaagacattggaggcaaaaagctgactgagatcatcaacacgcagcatgagaatgtcaaatacctgccagg

SEQ ID NO: 543583 - DNA, 120 bp, Artificial Sequence
  ENSG00000167588_2 (sequence is synthesized)
gcacaagttgcccccaaatgtggtggctgtcccagatgtggtccaggctgcagaggatgctgacatcctgatctttgtggtgccccatcagttcatcggcaagatctgtgaccagctcaa

SEQ ID NO: 543584 - DNA, 120 bp, Artificial Sequence
  ENSG00000167588_3 (sequence is synthesized)
gggccatctgaaggcaaacgccactggcatatctcttattaagggggtagacgagggccccaatgggctgaagctcatctcggaagtgattggggagcgcctcggcatccccatgagtgt

SEQ ID NO: 543585 - DNA, 120 bp, Artificial Sequence
  ENSG00000167588_4 (sequence is synthesized)
gctgatgggggccaacattgccagcgaggtggctgatgagaagttctgtgagacaaccattggctgcaaggacccggcccagggacaactcctgaaagagctgatgcagacaccaaactt

SEQ ID NO: 543586 - DNA, 120 bp, Artificial Sequence
  ENSG00000167588_5 (sequence is synthesized)
ccgtatcacagtggtgcaagaggtggacacagtagagatctgtggagccttaaagaatgtagtggccgtgggggctggcttctgtgatggcctgggctttggcgacaacaccaaggcggc

SEQ ID NO: 543587 - DNA, 120 bp, Artificial Sequence
  ENSG00000167588_6 (sequence is synthesized)
agtgatccggctgggactcatggagatgatagccttcgccaagctcttctgcagtggccctgtgtcctctgccaccttcttggagagctgtggtgttgctgacctgatcactacctgcta

SEQ ID NO: 543588 - DNA, 120 bp, Artificial Sequence
  ENSG00000167588_7 (sequence is synthesized)
tggagggcggaaccggaaagtggctgaggcctttgcgcgtacaggaaagtccattgagcagctggagaaagagttgctgaatgggcagaaactgcaggggcccgagacagcccgggagct

SEQ ID NO: 543589 - DNA, 120 bp, Artificial Sequence
  ENSG00000167588_8 (sequence is synthesized)
atacagcatcctccagcacaagggcctggtagacaagtttcccttgttcatggctgtgtacaaggtgtgctacgagggccagccagtgggtgaattcatccactgcctgcagaatcatcc

SEQ ID NO: 543590 - DNA, 120 bp, Artificial Sequence
  ENSG00000167588_9 (sequence is synthesized)
agaacatatgtgagtggggccagggcccaggccaggccgcttttttaccccagtggagaccagcagaagcctggggtacctagtcaccaggatctccaggactcccagggagcagagtct

SEQ ID NO: 543591 - DNA, 120 bp, Artificial Sequence
  ENSG00000167588_10 (sequence is synthesized)
tctcatcttttcactggaggacaggaggctatggggcccagctacgcacctggagatcctgaactgtcaagccactggcagcctcatgccaccacatttgccagaaatgcagttgccctg

SEQ ID NO: 543592 - DNA, 120 bp, Artificial Sequence
  ENSG00000167588_11 (sequence is synthesized)
tccctctccagatgtggggctttctccatatcctctgggaggggtggaatcaagccccagtgctgcctgcttggtggcgggggtgatgtatgtggagaagggttgggggagaggccggta

SEQ ID NO: 543593 - DNA, 120 bp, Artificial Sequence
  ENSG00000167588_12 (sequence is synthesized)
ggctgctagtggctgtctcacatacaccagtaatcctgttaaagggctgaagaagtatcttagccacaggagcgatgaggcaaggattgtcagggaggggtctgggcttctgagctgatg

SEQ ID NO: 543594 - DNA, 120 bp, Artificial Sequence
  ENSG00000167588_13 (sequence is synthesized)
caggccccaaggacccctttgctgacctctgccaggacccacacagcttcgatggatctcagtgtttgttaacaaaatacaaagatctcaaacaaaccccttttagcttctcctagcaac

SEQ ID NO: 543595 - DNA, 120 bp, Artificial Sequence
  ENSG00000167588_14 (sequence is synthesized)
atctgtgtcctcagaaacctctggttctcccccttccccctcccccaggctgccctggcacccaaattgctgccatgctggcatctgtagctcggtggcttgacattctccccagggact

SEQ ID NO: 543596 - DNA, 120 bp, Artificial Sequence
  ENSG00000167588_15 (sequence is synthesized)
tcccggttcctagttctttgccagctcctccccactctgtgcgacctttccaagccttccctcaccctccccgccagcaccctctttggggagcaggaacttaatctgctgacagagcta

SEQ ID NO: 543597 - DNA, 120 bp, Artificial Sequence
  ENSG00000167588_16 (sequence is synthesized)
cacctttcataacaggctcagatcactcagctccctgtgacctttgtattcacccaggcttccttctcagtagctctagctgggggaggtgtcagctgggcccctcctgtgctatctccc

SEQ ID NO: 543598 - DNA, 120 bp, Artificial Sequence
  ENSG00000167588_17 (sequence is synthesized)
cagaggacatccctgactccacccctttcttcctcccaaactctgcacctcttcctcagctgctccagaccggccagggtaaccagctaaccatgcctggcatctggaagccagcaggcc

SEQ ID NO: 543599 - DNA, 120 bp, Artificial Sequence
  ENSG00000167588_18 (sequence is synthesized)
agagggtggcccaaaggctgatgaacggtagggaagggtgagcagattcctatgttggtgggcaccaatattccaagggcagctctctttgctgaatgagggccttctcgtgaggtactg

SEQ ID NO: 543600 - DNA, 120 bp, Artificial Sequence
  ENSG00000167588_19 (sequence is synthesized)
acaacaccagcaactcgagagctgggaaactcaaggaggaggaagaaaatcaaaaccaccctactccctggggtgaggaaagaacaggaggggaggaggaggagtgtgctctgcacttgc

SEQ ID NO: 543601 - DNA, 120 bp, Artificial Sequence
  ENSG00000167588_20 (sequence is synthesized)
cttgctccaggatggggtggcagcagaggaatgtcacaggtcagcagcctaggcctccagctataaatagtccggagggcccgagaggctcccgcccgtccagcagggctgtcagcttcc

SEQ ID NO: 543602 - DNA, 120 bp, Artificial Sequence
  ENSG00000167588_21 (sequence is synthesized)
tgtgtggcagcacctggcacactggctctggccagcattatgctaaaaccctgttactctccaatgaaccagggaggcgggctcctctctgcgcctatcccttgagaattctgtcttacc

SEQ ID NO: 543603 - DNA, 120 bp, Artificial Sequence
  ENSG00000167588_22 (sequence is synthesized)
agtgaagggtggggctgcccagatcaggcagcaggagtgaggggcacagtcaccccaggccttgctgagcccaggtctgggtactgagtgtccagagctgcctccccaggaggttaaggt

SEQ ID NO: 543604 - DNA, 120 bp, Artificial Sequence
  ENSG00000167588_23 (sequence is synthesized)
gggggcaaaggggaagcttcaagcactttgcctacttttgttcactccccagtgcactgtgactcaggccttcccatcaggcctatttgtctacccaataaagcgtgttttttccagaaa

SEQ ID NO: 543605 - DNA, 120 bp, Artificial Sequence
  ENSG00000167588_24 (sequence is synthesized)
aggtggacacagtagagatctgtggagccttaaagtccattgagcagctggagaaagagttgctgaatgggcagaaactgcaggggcccgagacagcccgggagctatacagcatcctcc

SEQ ID NO: 543606 - DNA, 120 bp, Artificial Sequence
  ENSG00000167588_25 (sequence is synthesized)
gatgagaagtggggctcccttctctagtagcaaagggtgaggagactgagtctcctttctactgccaggtcactggggactatttgtcatgggagtggaggtgataaggaaggggctcag

SEQ ID NO: 543607 - DNA, 120 bp, Artificial Sequence
  ENSG00000167588_26 (sequence is synthesized)
agagctgatgcagacaccaaacttccgtatcacagtggtgcaagaggtggacacagtagagatctgtggagccttaaagtgggtgtcacggctgatgaaatgagtatgagggggctccac

SEQ ID NO: 543608 - DNA, 120 bp, Artificial Sequence
  ENSG00000167588_27 (sequence is synthesized)
aaatgctcctagccggcagaggagctagggagtgtggcactgagccggctcaggcagagacgcggcaccatggctagcaagaaagtctgcattgtaggctccgggaactggtcactgggg

SEQ ID NO: 543609 - DNA, 120 bp, Artificial Sequence
  ENSG00000167588_28 (sequence is synthesized)
attaaggtgccagggacaccttcatgtggatgggggagggtgcggctcactgttgtggggttcagggtgggtgaagcaaggagaacagaaaatggcagacgcaggccaagagtttgctgg

SEQ ID NO: 543610 - DNA, 120 bp, Artificial Sequence
  ENSG00000167588_29 (sequence is synthesized)
agaaaagagaggcagttggctctggagaggcttaggaaagcagtgaggtgctgggggtcactggaagggaggctgaagggaggagacgagattggtttggaggtcctctcggggagtttc

SEQ ID NO: 543611 - DNA, 120 bp, Artificial Sequence
  ENSG00000167588_30 (sequence is synthesized)
ggaggtataaaggaatgcctgggagatatgagaagcgggctggtttgagaagtgtgaagagtagctggtttggagcagtgactggtcactgaatggcagtttgttggggcagtcaggcgg

SEQ ID NO: 543612 - DNA, 120 bp, Artificial Sequence
  ENSG00000167588_31 (sequence is synthesized)
aggggaagcagggaagagagcagaaaggctggggctcccccttcccagctggggttcctgaggagctgggtgatgaaatcttatttgagctctttcttttgccaagcccaggctgctttt

SEQ ID NO: 543613 - DNA, 120 bp, Artificial Sequence
  ENSG00000167588_32 (sequence is synthesized)
ggcctcccgcactgtcccacagccaagggataggagagtgctgggatgaggtttccaggagtcctcaagagcccaggacagctggagggagacagagtggtagctggggggagggagtag

SEQ ID NO: 543614 - DNA, 120 bp, Artificial Sequence
  ENSG00000167588_33 (sequence is synthesized)
agtgtcttattcctccaagttcagtccttctagattcagtcccaaacaagccttcctgctcccctaccagcctcactctttggctcccagatctcctgaatagggttccacaggggctag

SEQ ID NO: 543615 - DNA, 120 bp, Artificial Sequence
  ENSG00000167595_0 (sequence is synthesized)
gatgcgcgcggggcctgttgggtgaaggagcagagcggccggaagcgcggagggagccgcgggatggaccgcagcctgccagttttctccattcaagatagtccctttggagatgcgccc

SEQ ID NO: 543616 - DNA, 120 bp, Artificial Sequence
  ENSG00000167595_1 (sequence is synthesized)
ctgggtcgaagccactactggccatcccagagccagacctggtgtcccaagaccctgagcccatccaggtctcagagatccaggctcccacaagctcccaaggctctagccacaggtccc

SEQ ID NO: 543617 - DNA, 120 bp, Artificial Sequence
  ENSG00000167595_2 (sequence is synthesized)
aactcccctgagctgtttgaggagtcctggccatccagttcagggaccccctccctgcccagcaccactgagggacagatgtgggcctccccagcacccaccctgattgacagcggggac

SEQ ID NO: 543618 - DNA, 120 bp, Artificial Sequence
  ENSG00000167595_3 (sequence is synthesized)
tccgtggtggccaagtatataaacaggttccgccaggctcagcccaccagtcgagaggagcgccagcctgcaggcccaaccccagctgacttttggtggctgcagtctgactctccagac

SEQ ID NO: 543619 - DNA, 120 bp, Artificial Sequence
  ENSG00000167595_4 (sequence is synthesized)
cccagcagtcaaagtgcagcagcaggagccaacaaaccagaaggaagaccccatacagctgtccctactgcggtcaacgtgaccagtgcatcccatgctgtggctccccttcaggaaata

SEQ ID NO: 543620 - DNA, 120 bp, Artificial Sequence
  ENSG00000167595_5 (sequence is synthesized)
aagcagaacctccacacatggaactcatccctgctggacctggagacgctgagcctacagagcagagctgccaggctgctcaaacgcagcaaagcctccatctcctcctcctcctccctc

SEQ ID NO: 543621 - DNA, 120 bp, Artificial Sequence
  ENSG00000167595_6 (sequence is synthesized)
agccccagcgatgccagcacttcctcattccccaccagctctgatggcctctctcccttctcggagaccttcatccctgactccagcaagggccttggccccagggcacccgcatccccg

SEQ ID NO: 543622 - DNA, 120 bp, Artificial Sequence
  ENSG00000167595_7 (sequence is synthesized)
gcaccagcccaggcccagacccccacccctgctccagccccagcctcctcccaagcaccccttcggccagaggatgacattctgtaccagtggcggcagcggcggaagcttgaacaggct

SEQ ID NO: 543623 - DNA, 120 bp, Artificial Sequence
  ENSG00000167595_8 (sequence is synthesized)
tacggaagagcgaagccactccttcccctggagcctgcctgcagcccgaggtcccactctctccagctgagcaggcaaccacagtcaaggcctcgccgccagccttccaggtggggtctc

SEQ ID NO: 543624 - DNA, 120 bp, Artificial Sequence
  ENSG00000167595_9 (sequence is synthesized)
cggaggccctggccccgcccccgcccgctgctgaccacgccccctcggaggccctgcttgcccaggccgccctgctgctgcaggctgcagaagactccgacggcagcgagttccaggacg

SEQ ID NO: 543625 - DNA, 120 bp, Artificial Sequence
  ENSG00000167595_10 (sequence is synthesized)
atcccgtgctgcaggtgctaagagcccatagggcagagctgagtcggcagaaaagggaagcggatgcccgattatcgttcctgttggaccaggctgaagacctgggatcttggtcccctc

SEQ ID NO: 543626 - DNA, 120 bp, Artificial Sequence
  ENSG00000167595_11 (sequence is synthesized)
cagccgggtcgccccctaggtccccaaggaggctgctaagaagggaaggagattccctggaggccagaagactttgaattgtacagattctattttacccagtgaggctctttttttttt

SEQ ID NO: 543627 - DNA, 120 bp, Artificial Sequence
  ENSG00000167595_12 (sequence is synthesized)
tttcatacagttactggttatctgtgagaaaggggttgtttggaaaggccaaggggtcatgccaatttaaggaaatgccccccatcctccgctgccccatggctctgccctgccccccac

SEQ ID NO: 543628 - DNA, 120 bp, Artificial Sequence
  ENSG00000167595_13 (sequence is synthesized)
cccttcctgaccacggaaacaagatctcctttctggttatatcttccttggggcagagggagtttcagacaagacttctggcaagactgggacccaccttatctggcttcactcaggagc

SEQ ID NO: 543629 - DNA, 120 bp, Artificial Sequence
  ENSG00000167595_14 (sequence is synthesized)
cctggctcaaatggaccaaaggactgccctccacggaggaagctactagggtcatcagagtgttggatgatggtcaggctatagcccacacatgcttgagcagcagcagcatctggtgca

SEQ ID NO: 543630 - DNA, 120 bp, Artificial Sequence
  ENSG00000167595_15 (sequence is synthesized)
gctgacccctccctccttgaagcactttctctccctgcttccagcccttctctctgcacctctctggtcaggcctagtcactagcccagcatgtcaactttggcatgacccagggccatg

SEQ ID NO: 543631 - DNA, 120 bp, Artificial Sequence
  ENSG00000167595_16 (sequence is synthesized)
gcgttgacatctctatctgcacccacccataggtgctcttgtctagcttaatgactctaaaccccgtctctattctgataatcctcaaatttctgtctgtaacctagacctggccacgaa

SEQ ID NO: 543632 - DNA, 83 bp, Artificial Sequence
  ENSG00000167595_17 (sequence is synthesized)
aaataaagcaggtgacatccccattcactccctcccttgggtgcctgaactgacaacaccagccctaggacagaattagaaga

SEQ ID NO: 543633 - DNA, 86 bp, Artificial Sequence
  ENSG00000167595_18 (sequence is synthesized)
tccaggtgtggtggtatgtacctgtaatcccagctacttgagagcctgaggctggaggatggcttgagcctaggagttcaaggctg

SEQ ID NO: 543634 - DNA, 81 bp, Artificial Sequence
  ENSG00000167595_19 (sequence is synthesized)
tgtggtggtatgtacctgtaatcccagctacttgagagcctgaggctggaggatggcttgagcctaggagttcaaggctgc

SEQ ID NO: 543635 - DNA, 120 bp, Artificial Sequence
  ENSG00000167595_20 (sequence is synthesized)
gagggagggaggagcctggggggagctggaggaggggctgggtctgagggggactgaggaccctccaccctctctctctctgtctcagatctctcttatctgtctacagacctctcctgc

SEQ ID NO: 543636 - DNA, 120 bp, Artificial Sequence
  ENSG00000167595_21 (sequence is synthesized)
tccagtggagaccctcagttctctggggacccagcctaaccatgtcccactgtggagcagtgtggcccagcctggtccaccagaggccttctatgtggagaggcctccttttccctcagt

SEQ ID NO: 543637 - DNA, 120 bp, Artificial Sequence
  ENSG00000167595_22 (sequence is synthesized)
gtcctctccacacatcttttgggcccccagctcccacgggttcttctgggccccacagtctgggccttgggtatcccttggggctgttcctcccacgcagcaggcctccaccctagcaca

SEQ ID NO: 543638 - DNA, 120 bp, Artificial Sequence
  ENSG00000167595_23 (sequence is synthesized)
tctgggctctaccctcgcgcccccggcttccctggcctccaccctcgaacccccggcctccaccccagctcccctggcctccacccttgcacccccagcctccaccccggctcccctggc

SEQ ID NO: 543639 - DNA, 120 bp, Artificial Sequence
  ENSG00000167595_24 (sequence is synthesized)
ctgtacccctgcacctccagcctccaccctcgcatccccagctgtcccccagggcctgcccatccctgacccaagcagctgtgcccagcctaagagcctggggcccaagtctcggaggag

SEQ ID NO: 543640 - DNA, 120 bp, Artificial Sequence
  ENSG00000167595_25 (sequence is synthesized)
cagagcccctcgcccagaggctgccgagcaagtccctgcagctggccagggacctggccctcagctcaggggtgtcctgggccaggtagtggcagctcggctgttccctgacagcctgga

SEQ ID NO: 543641 - DNA, 120 bp, Artificial Sequence
  ENSG00000167595_26 (sequence is synthesized)
ggacacgcctcctcacttcgagggcccccctccacccaaggctggatctccgaaagtccaggccacacaaccccaaaccaaggtcactccccctccatctgaatcccagtgtcgggccaa

SEQ ID NO: 543642 - DNA, 120 bp, Artificial Sequence
  ENSG00000167595_27 (sequence is synthesized)
aagacatctcaaattccataggtcctaaatggagtttccaatctttccccctaggcgtgcctctccccagcttctttttttttttttttttggatggagtctagctctgtcacccaggct

SEQ ID NO: 543643 - DNA, 65 bp, Artificial Sequence
  ENSG00000167595_28 (sequence is synthesized)
tgggccccccctccccaactttcttcggctctgtcctttgccgctcagaccaaaaaccttagagt

SEQ ID NO: 543644 - DNA, 120 bp, Artificial Sequence
  ENSG00000167595_29 (sequence is synthesized)
cggctctgtcctttgccgctcagaccaaaaaccttagagttgtctttgacttctgtctttcccttccacccacagttaaccaggaaatcctgccatctccgcctttattttattttattt

SEQ ID NO: 543645 - DNA, 120 bp, Artificial Sequence
  ENSG00000167595_30 (sequence is synthesized)
gcggagggagccgcgggatggaccgcaggtgaggccgatcgctcttccagggactacaggaggctggggaggaccaacggcgagagcagcacagcctaggacgggctggatacggtctgg

SEQ ID NO: 543646 - DNA, 120 bp, Artificial Sequence
  ENSG00000167595_31 (sequence is synthesized)
agtcgctagggctccaccgcactggaactacaattcccaacatgctccacagccgttggcctctccagccgtagccgttagcatcccgggggtcccctaagagtcttatgttcctctctg

SEQ ID NO: 543647 - DNA, 120 bp, Artificial Sequence
  ENSG00000167595_32 (sequence is synthesized)
agtgggccccaaggaattattgcctctaaaggtgtccaagaaaggcttgagatctgaatttcttcattttgaaatggcccccagacacgcctgggcgttgtctttgaactttctcgcgga

SEQ ID NO: 543648 - DNA, 120 bp, Artificial Sequence
  ENSG00000167595_33 (sequence is synthesized)
ggcggagcccagtggatcctggggcttgtagtccatctaccctttgccttcgtgtcccccaggaatgtatgggaaatgctcggtgatataatccagccgcggttctttctttctttcttt

SEQ ID NO: 543649 - DNA, 86 bp, Artificial Sequence
  ENSG00000167595_34 (sequence is synthesized)
cggtgatataatccagccgcggttctttctttctttctttttttttaagacagagtctctcgctctgttgactgcaacctctgccc

SEQ ID NO: 543650 - DNA, 120 bp, Artificial Sequence
  ENSG00000167595_35 (sequence is synthesized)
caggcgtgagccaccacgcccggcgagccgcgattcttaacctgaactccacttcgcaatcacctgggacgctgcggaaaagacacggaggcccagccccactaatagatattctgattc

SEQ ID NO: 543651 - DNA, 120 bp, Artificial Sequence
  ENSG00000167595_36 (sequence is synthesized)
ccagccccactaatagatattctgattctgttggtctggaatgggaaccgcgcgcctgtaacgttgaaaagcccctcctagactggatccagggttgagaaccaccggctgtcagttcct

SEQ ID NO: 543652 - DNA, 120 bp, Artificial Sequence
  ENSG00000167595_37 (sequence is synthesized)
gagttgctccctgttaagactgctccaggggcgggctcccaggactcacccttccactgtcgatatcctgaatgtgcaacggtgcttcatggaaatgacagtccgtctcctccaggaatc

SEQ ID NO: 543653 - DNA, 120 bp, Artificial Sequence
  ENSG00000167595_38 (sequence is synthesized)
tatgggaattgtctggttctgccctcctctaatgtccccctccccagggctgcggcgaaaccacgtgctgcctgaaccccactttcctcttgcagcctgccagttttctccattcaagat

SEQ ID NO: 543654 - DNA, 120 bp, Artificial Sequence
  ENSG00000167595_39 (sequence is synthesized)
agacagccccttgtcccctccccacggccctgcccttgtccccctctctaccacctggattccccatctgagcccccatcacactaggttgttatcattacaggatgtgtttcctcccct

SEQ ID NO: 543655 - DNA, 120 bp, Artificial Sequence
  ENSG00000167595_40 (sequence is synthesized)
ctggactgagactttgtgtgtgtcctggttcccctgcagggatgacccatgagacctcacactttttcttcttgtgctcttccctgatcttagaccctgagcccatccaggtctcagaga

SEQ ID NO: 543656 - DNA, 120 bp, Artificial Sequence
  ENSG00000167595_41 (sequence is synthesized)
agagcccatagggcagagctgagtcggcagaaaaggtgaccgaccctccatccccagagtctatgacactgggccccggagacctctgagacccggttaggcatccagccctcctcatcc

SEQ ID NO: 543657 - DNA, 120 bp, Artificial Sequence
  ENSG00000167595_42 (sequence is synthesized)
cctgtcccagcagtccgtccacagccccagattctaagcctgagcacataccccagcctctgctctcccggcctttctccagggaagcggatgcccgattatcgttcctgttggaccagg

SEQ ID NO: 543658 - DNA, 120 bp, Artificial Sequence
  ENSG00000167595_43 (sequence is synthesized)
aaaagacatctcaaattccataggttgcagtggaaaaaaaaaaaaagataatttctctctctttctctctctctctgacacttgctttagaggctacattaaaaaaaaaaactagttgcc

SEQ ID NO: 543659 - DNA, 120 bp, Artificial Sequence
  ENSG00000167595_44 (sequence is synthesized)
atgctggggaggggtttgggttacacaggtgtatgcacttatgaaacttagtgaagtgtgtgaatttcattgtatgtaaagtttacctcaaaagaaaatattgaacgccagttaaagata

SEQ ID NO: 543660 - DNA, 120 bp, Artificial Sequence
  ENSG00000167595_45 (sequence is synthesized)
aagcgacggagatgcgcgcggggcctgttgggtgaaggagcagagcggccggaagcgcggagggagccgcgggatggaccgcagttttctccattcaagatagtccctttggagatgcgc

SEQ ID NO: 543661 - DNA, 120 bp, Artificial Sequence
  ENSG00000167595_46 (sequence is synthesized)
tcaaagtgcagcaggtacctctttcagtgccatccactactcccacccctaaacctttgctgatcaatgcccccagcagccactcctcctggccctcatacctcaactggggcttctcag

SEQ ID NO: 543662 - DNA, 120 bp, Artificial Sequence
  ENSG00000167600_0 (sequence is synthesized)
agccgcgcggagcgcctgggagaggagaaggagccgacctgccgagatggaggcgaccggcacctgggcgctgctgctggcgctggcgctgctcctgctgctgacgctggcgctgtccgg

SEQ ID NO: 543663 - DNA, 120 bp, Artificial Sequence
  ENSG00000167600_1 (sequence is synthesized)
gaccagggcccgaggccacctgccccccgggcccacgccgctaccactgctgggaaacctcctgcagctacggcccggggcgctgtattcagggctcatgcggctgagtaagaagtacgg

SEQ ID NO: 543664 - DNA, 120 bp, Artificial Sequence
  ENSG00000167600_2 (sequence is synthesized)
accggtgttcaccatctacctgggaccctggcggcctgtggtggtcctggttgggcaggaggctgtgcgggaggccctgggaggtcaggctgaggagttcagcggccggggaaccgtagc

SEQ ID NO: 543665 - DNA, 120 bp, Artificial Sequence
  ENSG00000167600_3 (sequence is synthesized)
gatgctggaagggacttttgatggccatggggttttcttctccaacggggagcggtggaggcagctgaggaagtttaccatgcttgctctgcgggacctgggcatggggaagcgagaagg

SEQ ID NO: 543666 - DNA, 120 bp, Artificial Sequence
  ENSG00000167600_4 (sequence is synthesized)
cgaggagctgatccaggcggaggcccggtgtctggtggagacattccaggggacagaaggacgcccattcgatccctccctgctgctggcccaggccacctccaacgtagtctgctccct

SEQ ID NO: 543667 - DNA, 120 bp, Artificial Sequence
  ENSG00000167600_5 (sequence is synthesized)
cctctttggcctccgcttctcctatgaggataaggagttccaggccgtggtccgggcagctggtggtaccctgctgggagtcagctcccaggggggtcagacctacgagatgttctcctg

SEQ ID NO: 543668 - DNA, 120 bp, Artificial Sequence
  ENSG00000167600_6 (sequence is synthesized)
gttcctgcggcccctgccaggcccccacaagcagctcctccaccacgtcagcaccttggctgccttcacagtccggcaggtgcagcagcaccaggggaacctggatgcttcgggccccgc

SEQ ID NO: 543669 - DNA, 120 bp, Artificial Sequence
  ENSG00000167600_7 (sequence is synthesized)
acgtgaccttgtcgatgccttcctgctgaagatggcacaggaggaacaaaacccaggcacagaattcaccaacaagaacatgctgatgacagtcatttatttgctgtttgctgggacgat

SEQ ID NO: 543670 - DNA, 120 bp, Artificial Sequence
  ENSG00000167600_8 (sequence is synthesized)
gacggtcagcaccacggtcggctataccctcctgctcctgatgaaataccctcatgtccaaaagtgggtacgtgaggagctgaatcgggagctgggggctggccaggcaccaagcctagg

SEQ ID NO: 543671 - DNA, 120 bp, Artificial Sequence
  ENSG00000167600_9 (sequence is synthesized)
ggaccgtacccgcctcccttacaccgacgcggttctgcatgaggcgcagcggctgctggcgctggtgcccatgggaataccccgcaccctcatgcggaccacccgcttccgagggtacac

SEQ ID NO: 543672 - DNA, 120 bp, Artificial Sequence
  ENSG00000167600_10 (sequence is synthesized)
gtttcctggatgcagatggacggttcaggaagcatgaggcgttcctgcccttctccttagggaagcgtgtctgccttggagagggcctggcaaaagcggagctcttcctcttcttcacca

SEQ ID NO: 543673 - DNA, 120 bp, Artificial Sequence
  ENSG00000167600_11 (sequence is synthesized)
ccatcctacaagccttctccctggagagcccgtgcccgccggacaccctgagcctcaagcccaccgtcagtggccttttcaacattcccccagccttccagctgcaagtccgtcccactg

SEQ ID NO: 543674 - DNA, 120 bp, Artificial Sequence
  ENSG00000167600_12 (sequence is synthesized)
accttcactccaccacgcagaccagatgaaggaaggcaacttggaagtggtgggtgcccaggacggtgcctccagcctcaacagtgggcatggacagggttaatgtctccagagtgtaca

SEQ ID NO: 543675 - DNA, 120 bp, Artificial Sequence
  ENSG00000167600_13 (sequence is synthesized)
ctgcaggcagccacatttacacgcctgcagttgttttccggagtctgtcccacggcccacacgctcacttgactcatgctgctaagatgcacaaccgcacacccatacacaactacaagg

SEQ ID NO: 543676 - DNA, 120 bp, Artificial Sequence
  ENSG00000167600_14 (sequence is synthesized)
gccacaaagcaactgctgggttagctttccacagacataaatatagtccatctgcaatcacaagcacatagccaggtaacccaccaactcccctggatctgcagcccacacgtgggagtc

SEQ ID NO: 543677 - DNA, 120 bp, Artificial Sequence
  ENSG00000167600_15 (sequence is synthesized)
tggctgtcaccttcacaagccacagaaacggccacacatgttcacagctcacacgccctctccattcatcgaacttctcagtgtccctgtccctggtgcctggcacagggaacagcatgc

SEQ ID NO: 543678 - DNA, 120 bp, Artificial Sequence
  ENSG00000167600_16 (sequence is synthesized)
cccctccggggtcatgccacccagagactgtcgctgtctatggccccaactcatgctccctctcttggctacaccactctcccagcctgtgaccaccgatgtccacacacccccaaccac

SEQ ID NO: 543679 - DNA, 120 bp, Artificial Sequence
  ENSG00000167600_17 (sequence is synthesized)
ttgtccacacagctacccacgtacgacatcgtcctggctccccagagtatcttcccactgagacacgccgcccccacagaggcacagtccccagccacctctgcaactgcagccctcagt

SEQ ID NO: 543680 - DNA, 120 bp, Artificial Sequence
  ENSG00000167600_18 (sequence is synthesized)
cacccctttttaagcaccctgattctaccaaatgcaaacacatctgggtctgcgattatgcacagagactttggacatacgaggaccctcagaccggaggaacacctgcccaaccccaac

SEQ ID NO: 543681 - DNA, 120 bp, Artificial Sequence
  ENSG00000167600_19 (sequence is synthesized)
acgtgcttatgtaaccacgtggaaagcggcccctgctgcccctccacacacacatacacactcactgatctacagcccctgttcggcgtcagagtccccactagacccagtggaaggggt

SEQ ID NO: 543682 - DNA, 120 bp, Artificial Sequence
  ENSG00000167600_20 (sequence is synthesized)
tagagaccaagtaggggccagtttccaattcaccctgtcagggagtgagccggatctgacgttccttgtgacttaagggtccggcttgggaattaaagtttgtttctggcctttagccta

SEQ ID NO: 543683 - DNA, 120 bp, Artificial Sequence
  ENSG00000167600_21 (sequence is synthesized)
tgatccaggcggaggcccggtgtctggtggagacattccaggggacagaaggaggaacaaaacccaggcacagaattcaccaacaagaacatgctgatgacagtcatttatttgctgttt

SEQ ID NO: 543684 - DNA, 120 bp, Artificial Sequence
  ENSG00000167600_22 (sequence is synthesized)
gctgtttgctgggacgatgacggtcagcaccacggtcggctataccctcctgctcctgatgaaataccctcatgtccaaaggcacggaggtcttccccctccttggctccatcctgcatg

SEQ ID NO: 543685 - DNA, 120 bp, Artificial Sequence
  ENSG00000167601_0 (sequence is synthesized)
gagaaggcggctgctgggcagagccggtggcaagggcctcccctgccgctgtgccaggcaggcagtgccaaatccggggagcctggagctggggggagggccggggacagcccggccctg

SEQ ID NO: 543686 - DNA, 120 bp, Artificial Sequence
  ENSG00000167601_1 (sequence is synthesized)
ccccctcccccgctgggagcccaacaacttctgaggaaagtttggcacccatggcgtggcggtgccccaggatgggcagggtcccgctggcctggtgcttggcgctgtgcggctgggcgt

SEQ ID NO: 543687 - DNA, 120 bp, Artificial Sequence
  ENSG00000167601_2 (sequence is synthesized)
gcatggcccccaggggcacgcaggctgaagaaagtcccttcgtgggcaacccagggaatatcacaggtgcccggggactcacgggcacccttcggtgtcagctccaggttcagggagagc

SEQ ID NO: 543688 - DNA, 120 bp, Artificial Sequence
  ENSG00000167601_3 (sequence is synthesized)
cccccgaggtacattggcttcgggatggacagatcctggagctcgcggacagcacccagacccaggtgcccctgggtgaggatgaacaggatgactggatagtggtcagccagctcagaa

SEQ ID NO: 543689 - DNA, 120 bp, Artificial Sequence
  ENSG00000167601_4 (sequence is synthesized)
tcacctccctgcagctttccgacacgggacagtaccagtgtttggtgtttctgggacatcagaccttcgtgtcccagcctggctatgttgggctggagggcttgccttacttcctggagg

SEQ ID NO: 543690 - DNA, 120 bp, Artificial Sequence
  ENSG00000167601_5 (sequence is synthesized)
agcccgaagacaggactgtggccgccaacacccccttcaacctgagctgccaagctcagggacccccagagcccgtggacctactctggctccaggatgctgtccccctggccacggctc

SEQ ID NO: 543691 - DNA, 120 bp, Artificial Sequence
  ENSG00000167601_6 (sequence is synthesized)
caggtcacggcccccagcgcagcctgcatgttccagggctgaacaagacatcctctttctcctgcgaagcccataacgccaagggggtcaccacatcccgcacagccaccatcacagtgc

SEQ ID NO: 543692 - DNA, 120 bp, Artificial Sequence
  ENSG00000167601_7 (sequence is synthesized)
tcccccagcagccccgtaacctccacctggtctcccgccaacccacggagctggaggtggcttggactccaggcctgagcggcatctaccccctgacccactgcaccctgcaggctgtgc

SEQ ID NO: 543693 - DNA, 120 bp, Artificial Sequence
  ENSG00000167601_8 (sequence is synthesized)
tgtcagacgatgggatgggcatccaggcgggagaaccagaccccccagaggagcccctcacctcgcaagcatccgtgcccccccatcagcttcggctaggcagcctccatcctcacaccc

SEQ ID NO: 543694 - DNA, 120 bp, Artificial Sequence
  ENSG00000167601_9 (sequence is synthesized)
cttatcacatccgcgtggcatgcaccagcagccagggcccctcatcctggacccactggcttcctgtggagacgccggagggagtgcccctgggcccccctgagaacattagtgctacgc

SEQ ID NO: 543695 - DNA, 120 bp, Artificial Sequence
  ENSG00000167601_10 (sequence is synthesized)
ggaatgggagccaggccttcgtgcattggcaagagccccgggcgcccctgcagggtaccctgttagggtaccggctggcgtatcaaggccaggacaccccagaggtgctaatggacatag

SEQ ID NO: 543696 - DNA, 120 bp, Artificial Sequence
  ENSG00000167601_11 (sequence is synthesized)
ggctaaggcaagaggtgaccctggagctgcagggggacgggtctgtgtccaatctgacagtgtgtgtggcagcctacactgctgctggggatggaccctggagcctcccagtacccctgg

SEQ ID NO: 543697 - DNA, 120 bp, Artificial Sequence
  ENSG00000167601_12 (sequence is synthesized)
aggcctggcgcccagggcaagcacagccagtccaccagctggtgaaggaaccttcaactcctgccttctcgtggccctggtggtatgtactgctaggagcagtcgtggccgctgcctgtg

SEQ ID NO: 543698 - DNA, 120 bp, Artificial Sequence
  ENSG00000167601_13 (sequence is synthesized)
tcctcatcttggctctcttccttgtccaccggcgaaagaaggagacccgttatggagaagtgtttgaaccaacagtggaaagaggtgaactggtagtcaggtaccgcgtgcgcaagtcct

SEQ ID NO: 543699 - DNA, 120 bp, Artificial Sequence
  ENSG00000167601_14 (sequence is synthesized)
acagtcgtcggaccactgaagctaccttgaacagcctgggcatcagtgaagagctgaaggagaagctgcgggatgtgatggtggaccggcacaaggtggccctggggaagactctgggag

SEQ ID NO: 543700 - DNA, 120 bp, Artificial Sequence
  ENSG00000167601_15 (sequence is synthesized)
agggagagtttggagctgtgatggaaggccagctcaaccaggacgactccatcctcaaggtggctgtgaagacgatgaagattgccatctgcacgaggtcagagctggaggatttcctga

SEQ ID NO: 543701 - DNA, 120 bp, Artificial Sequence
  ENSG00000167601_16 (sequence is synthesized)
gtgaagcggtctgcatgaaggaatttgaccatcccaacgtcatgaggctcatcggtgtctgtttccagggttctgaacgagagagcttcccagcacctgtggtcatcttacctttcatga

SEQ ID NO: 543702 - DNA, 120 bp, Artificial Sequence
  ENSG00000167601_17 (sequence is synthesized)
aacatggagacctacacagcttcctcctctattcccggctcggggaccagccagtgtacctgcccactcagatgctagtgaagttcatggcagacatcgccagtggcatggagtatctga

SEQ ID NO: 543703 - DNA, 120 bp, Artificial Sequence
  ENSG00000167601_18 (sequence is synthesized)
gtaccaagagattcatacaccgggacctggcggccaggaactgcatgctgaatgagaacatgtccgtgtgtgtggcggacttcgggctctccaagaagatctacaatggggactactacc

SEQ ID NO: 543704 - DNA, 120 bp, Artificial Sequence
  ENSG00000167601_19 (sequence is synthesized)
tgccattgagagtctagctgaccgtgtctacaccagcaagagcgatgtgtggtccttcggggtgacaatgtgggagattgccacaagaggccaaaccccatatccgggcgtggagaacag

SEQ ID NO: 543705 - DNA, 120 bp, Artificial Sequence
  ENSG00000167601_20 (sequence is synthesized)
cgagatttatgactatctgcgccagggaaatcgcctgaagcagcctgcggactgtctggatggactgtatgccttgatgtcgcggtgctgggagctaaatccccaggaccggccaagttt

SEQ ID NO: 543706 - DNA, 120 bp, Artificial Sequence
  ENSG00000167601_21 (sequence is synthesized)
tacagagctgcgggaagatttggagaacacactgaaggccttgcctcctgcccaggagcctgacgaaatcctctatgtcaacatggatgagggtggaggttatcctgaaccccctggagc

SEQ ID NO: 543707 - DNA, 120 bp, Artificial Sequence
  ENSG00000167601_22 (sequence is synthesized)
tgcaggaggagctgaccccccaacccagccagaccctaaggattcctgtagctgcctcactgcggctgaggtccatcctgctggacgctatgtcctctgcccttccacaacccctagccc

SEQ ID NO: 543708 - DNA, 120 bp, Artificial Sequence
  ENSG00000167601_23 (sequence is synthesized)
cgctcagcctgctgataggggctccccagcagccccagggcaggaggatggtgcctgagacaaccctccacctggtactccctctcaggatccaagctaagcactgccactggggaaaac

SEQ ID NO: 543709 - DNA, 120 bp, Artificial Sequence
  ENSG00000167601_24 (sequence is synthesized)
tccaccttcccactttcccaccccacgccttatccccacttgcagccctgtcttcctacctatcccacctccatcccagacaggtccctccccttctctgtgcagtagcatcaccttgaa

SEQ ID NO: 543710 - DNA, 120 bp, Artificial Sequence
  ENSG00000167601_25 (sequence is synthesized)
agcagtagcatcaccatctgtaaaaggaaggggttggattgcaatatctgaagccctcccaggtgttaacattccaagactctagagtccaaggtttaaagagtctagattcaaaggttc

SEQ ID NO: 543711 - DNA, 120 bp, Artificial Sequence
  ENSG00000167601_26 (sequence is synthesized)
aaaggttctaggtttcaaagatgctgtgagtctttggttctaaggacctgaaattccaaagtctctaattctattaaagtgctaaggttctaaggcctactttttttttttttttttttt

SEQ ID NO: 543712 - DNA, 120 bp, Artificial Sequence
  ENSG00000167601_27 (sequence is synthesized)
tgagattacaggcatgagccactgcactcaaccttaagacctactgttctaaagctctgacattatgtggttttagattttctggttctaacatttttgataaagcctcaaggttttagg

SEQ ID NO: 543713 - DNA, 120 bp, Artificial Sequence
  ENSG00000167601_28 (sequence is synthesized)
caaggttttaggttctaaagttctaagattctgattttaggagctaaggctctatgagtctagatgtttattcttctagagttcagagtccttaaaatgtaagattatagattctaaaga

SEQ ID NO: 543714 - DNA, 120 bp, Artificial Sequence
  ENSG00000167601_29 (sequence is synthesized)
ttctatagttctagacatggaggttctaaggcctaggattctaaaatgtgatgttctaaggctctgagagtctagattctctggctgtaaggctctagatcataaggcttcaaaatgtta

SEQ ID NO: 543715 - DNA, 120 bp, Artificial Sequence
  ENSG00000167601_30 (sequence is synthesized)
tcttctcaagttctaagattctaatgatgatcaattatagtttctgaggctttatgataatagattctcttgtataagatcctagatcctaagggtcgaaagctctagaatctgcaattc

SEQ ID NO: 543716 - DNA, 120 bp, Artificial Sequence
  ENSG00000167601_31 (sequence is synthesized)
aaaagttccaagagtctaaagatggagtttctaaggtccggtgttctaagatgtgatattctaagacttactctaagatcttagattctctgtgtctaagattctagatcagatgctcca

SEQ ID NO: 543717 - DNA, 120 bp, Artificial Sequence
  ENSG00000167601_32 (sequence is synthesized)
agattctagatgattaaataagattctaacggtctgttctgtttcaaggcactctagattccattggtccaagattccggatcctaagcatctaagttataagactctcacactcagttg

SEQ ID NO: 543718 - DNA, 120 bp, Artificial Sequence
  ENSG00000167601_33 (sequence is synthesized)
tgactaactagacaccaaagttctaataatttctaatgttggacacctttaggttctttgctgcattctgcctctctaggaccatggttaagagtccaagaatccacatttctaaaatct

SEQ ID NO: 543719 - DNA, 120 bp, Artificial Sequence
  ENSG00000167601_34 (sequence is synthesized)
tatagttctaggcactgtagttctaagactcaaatgttctaagtttctaagattctaaaggtccacaggtctagactattaggtgcaatttcaaggttctaaccctatactgtagtattc

SEQ ID NO: 543720 - DNA, 120 bp, Artificial Sequence
  ENSG00000167601_35 (sequence is synthesized)
tttggggtgcccctctccttcttagctatcattgcttcctcctccccaactgtgggggtgtgcccccttcaagcctgtgcaatgcattagggatgcctcctttcccgcaggggatggacg

SEQ ID NO: 543721 - DNA, 120 bp, Artificial Sequence
  ENSG00000167601_36 (sequence is synthesized)
atctcccacctttcgggccatgttgcccccgtgagccaatccctcaccttctgagtacagagtgtggactctggtgcctccagaggggctcaggtcacataaaactttgtatatcaacga

SEQ ID NO: 543722 - DNA, 120 bp, Artificial Sequence
  ENSG00000167601_37 (sequence is synthesized)
ctaaaggctgtagagaatctggcctgctgggcttctgtacatgtgtgagccaaaagtttctaaaggccttgggatactagaatgtcagaaccacagaccctagaaataacagatttgtgg

SEQ ID NO: 543723 - DNA, 86 bp, Artificial Sequence
  ENSG00000167601_38 (sequence is synthesized)
agcacacgcgtaaacaacacgcagaactgcagtcgcacttacaagacttggtcccagggccgggcaccgagtggctctgcctgcga

SEQ ID NO: 543724 - DNA, 120 bp, Artificial Sequence
  ENSG00000167604_0 (sequence is synthesized)
ttcgccggagcgcgacccggggactcccaggcctgtgggcgggccctgcccaggactgggcggtgccataacccctagtttaaaaactcgcgggtaccggacccaagatcggggacccgg

SEQ ID NO: 543725 - DNA, 120 bp, Artificial Sequence
  ENSG00000167604_1 (sequence is synthesized)
cggcggctccgcgggggaaacagcgaggctggcgcagcgccgaggccgcggccctgggggcccgcaatccacgccacggaatccccgagtgagcaggggtgagcgcagccactgcccaac

SEQ ID NO: 543726 - DNA, 120 bp, Artificial Sequence
  ENSG00000167604_2 (sequence is synthesized)
gcaaaccgtgaagaagcttctggaagagcagaggcgccgccagcagcagcagcccgacgctggcggggtgcagggacaatttctccctcccccagagcagcccctgaccccatctgtgaa

SEQ ID NO: 543727 - DNA, 120 bp, Artificial Sequence
  ENSG00000167604_3 (sequence is synthesized)
tgaggctgtgactggccaccctcccttcccagcacactcggagactgtgggttctggacctagcagcctgggctttccagactgggaccccaacacgcatgctgcctacactgacagccc

SEQ ID NO: 543728 - DNA, 120 bp, Artificial Sequence
  ENSG00000167604_4 (sequence is synthesized)
ctactcttgccctgcttctgctgccgaaaatttcctgcctcctgacttctacccaccctcggacccagggcagccgtgcccatttccccagggcatggaggctggaccctggagagtttc

SEQ ID NO: 543729 - DNA, 120 bp, Artificial Sequence
  ENSG00000167604_5 (sequence is synthesized)
tgcacccccttcaggacccccacagttccccgctgtggtccctggaccatcgctggaggtggcccgagctcacatgctggctttggggccacagcagctgctggcccaggatgaggaggg

SEQ ID NO: 543730 - DNA, 120 bp, Artificial Sequence
  ENSG00000167604_6 (sequence is synthesized)
ggacacgctccttcacctgtttgcggctcgggggctgcgctgggcggcatatgctgcggctgaggtgctccaggtgtaccggcgtcttgacattcgtgagcataagggcaagacccctct

SEQ ID NO: 543731 - DNA, 120 bp, Artificial Sequence
  ENSG00000167604_7 (sequence is synthesized)
gtggaggatctgttgaacctgggagcagagcccaatgccgctgaccatcagggacgttcggtcttgcacgtggccgctacctacgggctcccaggagttctcttggctgtgcttaactct

SEQ ID NO: 543732 - DNA, 120 bp, Artificial Sequence
  ENSG00000167604_8 (sequence is synthesized)
ggggtccaggttgacctggaagccagagacttcgagggcctcaccccgctccacacggccatcctggcccttaacgttgctatgcgcccttccgacctctgtccccgggtgctgagcaca

SEQ ID NO: 543733 - DNA, 120 bp, Artificial Sequence
  ENSG00000167604_9 (sequence is synthesized)
caggcccgagacaggctggattgtgtccacatgttgctgcaaatgggtgctaatcacaccagccaggagatcaagagcaacaagacagttctgcacttggccgtgcaggctgccaacccc

SEQ ID NO: 543734 - DNA, 120 bp, Artificial Sequence
  ENSG00000167604_10 (sequence is synthesized)
actctggttcagctgctgctggagctgccccggggagacctgcggacctttgtcaacatgaaggcccacgggaacacagccctccacatggcggctgccctgccccctgggccggcccag

SEQ ID NO: 543735 - DNA, 120 bp, Artificial Sequence
  ENSG00000167604_11 (sequence is synthesized)
gaggccatcgtgcggcacctgttggcagctggggcggaccccacactgcgcaacctggagaatgagcagcccgttcacctgctgcggcccgggccgggccctgaggggctccggcagctg

SEQ ID NO: 543736 - DNA, 120 bp, Artificial Sequence
  ENSG00000167604_12 (sequence is synthesized)
ttgaagaggagccgtgtggcgccgccaggcctgtcctcttaggactcaaacccagaccctggactgattttccagtccccaccgtcctgcgggacagccagcgtatgctaatgttgcaaa

SEQ ID NO: 543737 - DNA, 120 bp, Artificial Sequence
  ENSG00000167604_13 (sequence is synthesized)
cccatgataatgtatgtggaatatcctgccattggggttttacattaaaaccccagaatggctgcagaggggtgaacaggccccaatatttggggtgctgtgatacccctcttctaccca

SEQ ID NO: 543738 - DNA, 120 bp, Artificial Sequence
  ENSG00000167604_14 (sequence is synthesized)
caaggagccctcttgatgatttctgtgaaatcgaggccccttgattgtttctgtgaaacaccctgcacccctagtcctttccccactgagatctttcgggttctctcccctaactcagct

SEQ ID NO: 543739 - DNA, 120 bp, Artificial Sequence
  ENSG00000167604_15 (sequence is synthesized)
aaaatttgctgattaaatgaatgtgggtgtgtttgagagggatcctagacagccaagccttctggcatgaaacgctgagaagatgggagtgtctgctggcagagatgaaagtgagcaggg

SEQ ID NO: 543740 - DNA, 120 bp, Artificial Sequence
  ENSG00000167604_16 (sequence is synthesized)
gagtgggtacaggatgctgaagggcccctaaaaattcgcagttgcactcctgcagtattctgagatgtctggagctcagttacgattcccttttccaggccgggcgtggtggctcacacc

SEQ ID NO: 543741 - DNA, 120 bp, Artificial Sequence
  ENSG00000167604_17 (sequence is synthesized)
attttggcttccagggccaggaggccaggggatacccttacccagcagtctgccttctcttcctcccaggctgtgcttaactctggggtccaggttgacctggaagccagagacttcgag

SEQ ID NO: 543742 - DNA, 120 bp, Artificial Sequence
  ENSG00000167604_18 (sequence is synthesized)
ggtaagttgggtgtgggcagggctggtgtggttggtgtggctgggcgaggtgggtgcagatgcgggtccctcactgtctccattctgcaggcctcaccccgctccacacggccatcctgg

SEQ ID NO: 543743 - DNA, 120 bp, Artificial Sequence
  ENSG00000167604_19 (sequence is synthesized)
agtgctaggattacaggcgtgaaccaccgcactccgccaagggagatcaagagcaacaagacagttctgcacttggccgtgcaggctgccaaccccactctggttcagctgctgctggag

SEQ ID NO: 543744 - DNA, 120 bp, Artificial Sequence
  ENSG00000167604_20 (sequence is synthesized)
cacccttcaggtcctcaccctgagacaggagggaccctctgagatcagggacccttaggtctcactgctctctgattcagagctcagctgggcccccagttccagaccccagcattcccg

SEQ ID NO: 543745 - DNA, 120 bp, Artificial Sequence
  ENSG00000167604_21 (sequence is synthesized)
cccggtcactccctccctaatctgagcatcactcaagctctttattaaactcaatttgggccagatttggtggctcatgcctgtaatcctaacactctgggaggccgaggcgggcggatc

SEQ ID NO: 543746 - DNA, 120 bp, Artificial Sequence
  ENSG00000167608_0 (sequence is synthesized)
ttacctggggcagtgtctgcctggtggccactagagacagcccagcctggggccatggaagaaaacccgaccttggaatcagaagcctggggctcctctagggagtggctggccccccgg

SEQ ID NO: 543747 - DNA, 120 bp, Artificial Sequence
  ENSG00000167608_1 (sequence is synthesized)
gaggccagaggaggcccatcgctgtcttctgtgctgaacgagctgcccagtgctgccacccttcggtaccgagaccctggggtgctgccttggggggcgctggaggaggaggaggaggat

SEQ ID NO: 543748 - DNA, 120 bp, Artificial Sequence
  ENSG00000167608_2 (sequence is synthesized)
ggaggaaggagcagaaaggccttcacagaagtcacccagacagagctgcaggaccctcacccttcccgggaactgccctggcccatgcaggccagacgggcacacaggcaaagaaatgcc

SEQ ID NO: 543749 - DNA, 120 bp, Artificial Sequence
  ENSG00000167608_3 (sequence is synthesized)
agcagggaccaggtggtctatggctctggaactaagacggaccgatgggcgcggctacttcggaggtccaaggagaaaacaaaggaaggcttgcgaagcctgcagccctgggcgtggaca

SEQ ID NO: 543750 - DNA, 120 bp, Artificial Sequence
  ENSG00000167608_4 (sequence is synthesized)
ctgaagaggatcgggggccagtttggcgccggcacggagtcctacttctccctgctgcgcttcctgctccttcttaacgtgctggcctctgtgctcatggcctgcatgacgctgctgccc

SEQ ID NO: 543751 - DNA, 120 bp, Artificial Sequence
  ENSG00000167608_5 (sequence is synthesized)
acctggttgggaggcgctcccccaggccctcccggccccgacatctcctcgccctgcggctcctataacccccactcccagggcctggtcacctttgccacccagctcttcaacttgctc

SEQ ID NO: 543752 - DNA, 120 bp, Artificial Sequence
  ENSG00000167608_6 (sequence is synthesized)
tcgggtgagggttacctggaatggtcccctctcttctatggcttctacccgccccgcccacgcctggcggtcacctacctgtgctgggcctttgccgttggcctcatctgcctcctgctc

SEQ ID NO: 543753 - DNA, 120 bp, Artificial Sequence
  ENSG00000167608_7 (sequence is synthesized)
atcctgcatcgctcggtgtctgggctgaagcagacactgctggcggagtccgaggctctgaccagctacagccaccgggtgttctcggcctgggacttcggtctctgcggggacgtccac

SEQ ID NO: 543754 - DNA, 120 bp, Artificial Sequence
  ENSG00000167608_8 (sequence is synthesized)
gtgcggctgcgccagcgcatcatcttgtacgaattaaaggtggagctggaggagacagtggtgcggcgccaggctgcggtgcggacgctgggccagcaagccagggtttggttggtgcgg

SEQ ID NO: 543755 - DNA, 120 bp, Artificial Sequence
  ENSG00000167608_9 (sequence is synthesized)
ccccttgtccaggagttgccactgctgaagcttggggtgaattaccttccgtccatcttcatcgctggggtcaattttgtgctgccgcccgtgttcaagctcattgctccactggagggc

SEQ ID NO: 543756 - DNA, 120 bp, Artificial Sequence
  ENSG00000167608_10 (sequence is synthesized)
tacactcggagtcgccagatcgtttttatcctgctcaggaccgtgtttcttcgcctcgcctccctggtggtcctgctcttctctctctggaatcagatcacttgtgggggcgactccgag

SEQ ID NO: 543757 - DNA, 120 bp, Artificial Sequence
  ENSG00000167608_11 (sequence is synthesized)
gctgaggactgcaaaacctgtggctacaattacaaacaacttccgtgctgggagactgtcctgggccaggaaatgtacaaacttctgctctttgatctgctgactgtcttggcagtcgcg

SEQ ID NO: 543758 - DNA, 120 bp, Artificial Sequence
  ENSG00000167608_12 (sequence is synthesized)
ctgctcatccagtttcctagaaagctcctctgtggcctctgtcctggggcgctgggtcgtctggcggggacccaagagttccaggtgcccgacgaggtgctggggctcatctacgcgcag

SEQ ID NO: 543759 - DNA, 120 bp, Artificial Sequence
  ENSG00000167608_13 (sequence is synthesized)
acggtggtctgggtggggagttttttctgccctttactgcccctgcttaacacggtcaagttcctgctgcttttctacctgaagaagcttaccctcttctccacctgctccccggctgcc

SEQ ID NO: 543760 - DNA, 120 bp, Artificial Sequence
  ENSG00000167608_14 (sequence is synthesized)
cgcaccttccgggcctccgcggcgaatttctttttccccttggtccttctcctgggtctggccatctccagcgttcccctgctttacagcatcttcctgatcccgccttctaagctgtgt

SEQ ID NO: 543761 - DNA, 120 bp, Artificial Sequence
  ENSG00000167608_15 (sequence is synthesized)
ggtccattccgggggcagtcgtccatctgggcccagatccctgagtctatttccagcctccctgagaccacccagaatttcctcttcttcctggggacccaggcttttgctgtgcccctt

SEQ ID NO: 543762 - DNA, 120 bp, Artificial Sequence
  ENSG00000167608_16 (sequence is synthesized)
ctgctgatctccagcatcctgatggcgtacactgtggctctggctaactcctacggacgcctcatctctgagctcaaacgtcagagagagacggaggcgcagaataaagtcttcctggca

SEQ ID NO: 543763 - DNA, 120 bp, Artificial Sequence
  ENSG00000167608_17 (sequence is synthesized)
cggcgcgctgtggcgctgacctccaccaaaccggctctttgacccccgcagcccacgtcccgctttcagaccccaggcccattgtaagcctaggtcacaacatctgtaaactaggagaac

SEQ ID NO: 543764 - DNA, 120 bp, Artificial Sequence
  ENSG00000167608_18 (sequence is synthesized)
tggagaagactccacgcccttccagctttggtatctggagatttccagggcccctcgccgccacgtccctgactctcgggtgatcttccttgtatcaataaatacagccgaggttgctga

SEQ ID NO: 543765 - DNA, 120 bp, Artificial Sequence
  ENSG00000167608_19 (sequence is synthesized)
ttgccacccagctcttcaacttgctctcgggtgaggtaggtgcctgggtccctgggggattccccgcccacctgtgaccccagtgccttcaatgacacgaacctcaaaccctgaccccag

SEQ ID NO: 543766 - DNA, 120 bp, Artificial Sequence
  ENSG00000167608_20 (sequence is synthesized)
tcagcttcatctgtgagatgggttgaatgcgggcgcgttccactgagaagggaactgccacatggtgggtaccgggtcagggcccattctctgccttccccccttcaggaccgtgtttct

SEQ ID NO: 543767 - DNA, 120 bp, Artificial Sequence
  ENSG00000167608_21 (sequence is synthesized)
cctgagtctatttccagcctccctgagaccacccagaatttcctcttcttcctggggacccaggcttttgctgtgccccttctgctgatctccaggagccagacgtttggatataatgga

SEQ ID NO: 543768 - DNA, 120 bp, Artificial Sequence
  ENSG00000167608_22 (sequence is synthesized)
ggagacggctgcatcagttcacgttaaggaggatctctggagagccagacctggggaaccgggaggcccgcgccttgggaaatggagtccaagcgggcatctctcctgccttcaggtgga

SEQ ID NO: 543769 - DNA, 120 bp, Artificial Sequence
  ENSG00000167612_0 (sequence is synthesized)
gcttcctggggagggatagtccacctggaggcattcggagacccagtgattgtgctccgcggagcctgggctgtgccccgcgttgactgcctcatagataccctacgaaccccaaatgcc

SEQ ID NO: 543770 - DNA, 120 bp, Artificial Sequence
  ENSG00000167612_1 (sequence is synthesized)
agctgcatgagaaaagggactcaccttctggttccctgcctggaagaggaagagctggcattgcacaggagacggctggacatgtctgaggcactgccctgcccgggcaaggagaccccc

SEQ ID NO: 543771 - DNA, 120 bp, Artificial Sequence
  ENSG00000167612_2 (sequence is synthesized)
accccaggctgcaggctgggggccctgtattgggcctgtgtccacaatgatcccacccagctccaagccatactggatggtggggtctccccagaggaggccacccaggtggacagcaat

SEQ ID NO: 543772 - DNA, 120 bp, Artificial Sequence
  ENSG00000167612_3 (sequence is synthesized)
gggagggcctcatggtcgcatgctaccacggcttccagagtgttgtggccctgctcagccactgtcctttccttgatgtgaaccagcaggacaaaggaggggacacggccctcatgttgg

SEQ ID NO: 543773 - DNA, 120 bp, Artificial Sequence
  ENSG00000167612_4 (sequence is synthesized)
ctgcccaagcaggccacgtgcctctagtgagtctcctgctcaactactatgtgggcctggacctggaacgccgggaccagcgggggctcacggcgttaatgaaggctgccatgcggaacc

SEQ ID NO: 543774 - DNA, 120 bp, Artificial Sequence
  ENSG00000167612_5 (sequence is synthesized)
gctgtgagtgcgtggccaccctcctcatggcaggtgctgacctgacagcagtggaccctgttcggggcaagacggccctggaatgggcagtgctgaccgacagcttcgacaccgtgtgga

SEQ ID NO: 543775 - DNA, 120 bp, Artificial Sequence
  ENSG00000167612_6 (sequence is synthesized)
ggccttgtccgggctcgtggcccaggcccaggcccaggcccaggttgccccttcactcctagaacggctgcaggctaccttgagcctcccctttgccccgtctcctcaggaggggggtgt

SEQ ID NO: 543776 - DNA, 120 bp, Artificial Sequence
  ENSG00000167612_7 (sequence is synthesized)
tctggaccaccttgtgactgccacaaccagcctggccagtcccttcgtcaccactgcctgccacactctgtgccctgaccatccaccttcgctgggcacccgaagcaagtccgtgccaga

SEQ ID NO: 543777 - DNA, 120 bp, Artificial Sequence
  ENSG00000167612_8 (sequence is synthesized)
gctgttagtgccagccgaagcccagtccttcaggacaccaaagtctggcccttcctctctggcgataccaggagctcaggatagagaagaggaaacaggaggaggaggccagaatggcac

SEQ ID NO: 543778 - DNA, 120 bp, Artificial Sequence
  ENSG00000167612_9 (sequence is synthesized)
agaagtaggggaagatgggataggacaggctgggaacaggtaatcaggcccctcccagggcttctttcccctctggagtgcctccggcctccccatccacctctgcctaagtaaatctgc

SEQ ID NO: 543779 - DNA, 120 bp, Artificial Sequence
  ENSG00000167612_10 (sequence is synthesized)
tctcaacctatatatatacaaggtcattcattctagcattgtttgcaagagtgaaagagtggaaacacccgaagtgtccatcagtaagggacaggctagattgattacggatgtaattgc

SEQ ID NO: 543780 - DNA, 120 bp, Artificial Sequence
  ENSG00000167612_11 (sequence is synthesized)
tgtccatccatacagagcatactctacagtgtattctaaaataagactaaggaagctgtttatattctgatatgaaactaccatcaagatgtataaagtaaaaataactaaggagtggaa

SEQ ID NO: 543781 - DNA, 120 bp, Artificial Sequence
  ENSG00000167612_12 (sequence is synthesized)
cgtctttgtgagcccgccccggcggggaggagctgcccggctcaggccccgcccacccggaggatcttggggctggtctgagtccgctcctgagacgtgaccacccgccccgcatggggc

SEQ ID NO: 543782 - DNA, 120 bp, Artificial Sequence
  ENSG00000167612_13 (sequence is synthesized)
gggtgctgacctagagtgaaccctgcttgcttagggctcctgacccagcgcttgtcctttctcagggtggatggggcgagacccctgctgggataaatgttttccctggggcaagggctg

SEQ ID NO: 543783 - DNA, 120 bp, Artificial Sequence
  ENSG00000167612_14 (sequence is synthesized)
gtgagatgtcctggcttcccagaacagctgggggcatctttgcatccccaccacaccgtcctggcctggctccctgagaggggttcaggggcaatacctcctgcagtcctaaggaggaag

SEQ ID NO: 543784 - DNA, 120 bp, Artificial Sequence
  ENSG00000167612_15 (sequence is synthesized)
ggaatggttaagggcgggtcttcacggggtttggggcaggctctgggacagatatgggtttagagggtgcaaggggccctggagtggcccagggggaaagcaggggatctgagctgcccc

SEQ ID NO: 543785 - DNA, 120 bp, Artificial Sequence
  ENSG00000167612_16 (sequence is synthesized)
tggcctccagtccctcctccaagccttcccaccagacactaagtcagctgtgattatttgcagaaaggagagaggtggagatgggggatcaatctagttcaccttcctggaggggggggc

SEQ ID NO: 543786 - DNA, 120 bp, Artificial Sequence
  ENSG00000167612_17 (sequence is synthesized)
acatgatttgggcttcgtacaatcaaccaagtcctgctattgatagctcagacattgtgtgtggaggtcccaggaaggaaagtgtgggaggggaacctagcccagctggaaaatctaaca

SEQ ID NO: 543787 - DNA, 120 bp, Artificial Sequence
  ENSG00000167612_18 (sequence is synthesized)
cgaaaaaaggctggcatctggaaccagcccctgttcctagctgagtggcttccctctttgggcctcaccagtattgtgagggtgttagctttccctgggactacctccaactctgacaag

SEQ ID NO: 543788 - DNA, 120 bp, Artificial Sequence
  ENSG00000167612_19 (sequence is synthesized)
tccacattgtccatggagttgtttgggggcccttcttccccgcagtggggctgccctctgctggtcactctgggggacccctgcctccatttttcccttccccacacaccccactgggtt

SEQ ID NO: 543789 - DNA, 120 bp, Artificial Sequence
  ENSG00000167612_20 (sequence is synthesized)
tggagtgaaaaaggagtgaatgaaaaaggagggcgctctacaccctttcttttgtcttagagtgactgctcctcccacaaccccaagatgggagagggagatggtgagaagagaagaacc

SEQ ID NO: 543790 - DNA, 120 bp, Artificial Sequence
  ENSG00000167612_21 (sequence is synthesized)
aggagagggaaccagccgatcatccccacccacctgccccagagggtgcagctcaggcctctgcctgtcctgggcagcctgcaccgctgctctgctcagctccttggattgaggagatcc

SEQ ID NO: 543791 - DNA, 120 bp, Artificial Sequence
  ENSG00000167612_22 (sequence is synthesized)
ctattctgccctaggtggagccccacaataggtctctctgaagtcttttcccctctctggacctaagtgtcttaatctctcttaaacaggaggttgcaacactggcctccctgattccac

SEQ ID NO: 543792 - DNA, 120 bp, Artificial Sequence
  ENSG00000167612_23 (sequence is synthesized)
cttcaacaggatgggactctatggcttcgaatgtaacccacatcagtcttgctcctaaagaatctgcccttccacaaatcaccaacccctatcccgccccatgtcaccccctgtgctcct

SEQ ID NO: 543793 - DNA, 120 bp, Artificial Sequence
  ENSG00000167612_24 (sequence is synthesized)
tcccctaccagagccctcagggcatattgagcaagtgccttcagtggctacaacccagggatagcaccagccccaggccccaagtccccaagatcctcctctccaaggcatcctcatcct

SEQ ID NO: 543794 - DNA, 120 bp, Artificial Sequence
  ENSG00000167613_0 (sequence is synthesized)
agttgctgtggaagccccataggcaggaggcccccgggcagcacatcctgtctgcttgtgtctgctgcagagttctgtccttgcattggtgcgcctcaggccaggctgcactgctgggac

SEQ ID NO: 543795 - DNA, 120 bp, Artificial Sequence
  ENSG00000167613_1 (sequence is synthesized)
ctgggccatgtctccccaccccaccgccctcctgggcctagtgctctgcctggcccagaccatccacacgcaggaggaagatctgcccagaccctccatctcggctgagccaggcaccgt

SEQ ID NO: 543796 - DNA, 120 bp, Artificial Sequence
  ENSG00000167613_2 (sequence is synthesized)
gatccccctggggagccatgtgactttcgtgtgccggggcccggttggggttcaaacattccgcctggagagggacagtagatccacatacaatgatactgaagatgtgtctcaagctag

SEQ ID NO: 543797 - DNA, 120 bp, Artificial Sequence
  ENSG00000167613_3 (sequence is synthesized)
tccatctgagtcagaggccagattccgcattgactcagtaagagaaggaaatgccgggctttatcgctgcatctattataagccccctaaatggtctgagcagagtgactacctggagct

SEQ ID NO: 543798 - DNA, 120 bp, Artificial Sequence
  ENSG00000167613_4 (sequence is synthesized)
gctggtgaaagaaagctctggaggcccggactccccggacacagagcccggctcctcagctggacccacgcagaggccgtcggacaacagtcacaatgagcatgcacctgcttcccaagg

SEQ ID NO: 543799 - DNA, 120 bp, Artificial Sequence
  ENSG00000167613_5 (sequence is synthesized)
cctgaaagctgagcatctgtatattctcatcggggtctcagtggtcttcctcttctgtctcctcctcctggtcctcttctgcctccatcgccagaatcagataaagcaggggccccccag

SEQ ID NO: 543800 - DNA, 120 bp, Artificial Sequence
  ENSG00000167613_6 (sequence is synthesized)
aagcaaggacgaggagcagaagccacagcagaggcctgacctggctgttgatgttctagagaggacagcagacaaggccacagtcaatggacttcctgagaaggacagagagacggacac

SEQ ID NO: 543801 - DNA, 120 bp, Artificial Sequence
  ENSG00000167613_7 (sequence is synthesized)
ctcggccctggctgcagggagttcccaggaggtgacgtatgctcagctggaccactgggccctcacacagaggacagcccgggctgtgtccccacagtccacaaagcccatggccgagtc

SEQ ID NO: 543802 - DNA, 120 bp, Artificial Sequence
  ENSG00000167613_8 (sequence is synthesized)
catcacgtatgcagccgttgccagacactgaccccatacccacctggcctctgcacctgagggtagaaagtcactctaggaaaagcctgaagcagccatttggaaggcttcctgttggat

SEQ ID NO: 543803 - DNA, 120 bp, Artificial Sequence
  ENSG00000167613_9 (sequence is synthesized)
tcctcttcatctagaaagccagccaggcagctgtcctggagacaagagctggagactggaggtttctaaccagcatccagaaggttcgttagccaggtggtcccttctacaatcgagcag

SEQ ID NO: 543804 - DNA, 120 bp, Artificial Sequence
  ENSG00000167613_10 (sequence is synthesized)
ctccttggacagactgtttctcagttatttccagagacccagctacagttccctggctgtttctagagacccagctttattcacctgactgtttccagagacccagctaaagtcacctgc

SEQ ID NO: 543805 - DNA, 120 bp, Artificial Sequence
  ENSG00000167613_11 (sequence is synthesized)
ctgttctaaaggcccagctacagccaatcagccgatttcctgagcagtgatgccacctccaagcttgtcctaggtgtctgctgtgaacctccagtgaccccagagactttgctgtaatta

SEQ ID NO: 543806 - DNA, 120 bp, Artificial Sequence
  ENSG00000167613_12 (sequence is synthesized)
tctgccctgctgaccctaaagaccttcctagaagtcaagagctagccttgagactgtgctatacacacacagctgagagccaagcccagttctctgggttgtgctttactccacgcatca

SEQ ID NO: 543807 - DNA, 120 bp, Artificial Sequence
  ENSG00000167613_13 (sequence is synthesized)
ataaataattttgaaggcctcacatctggcagccccaggcctggtcctgggtgcataggtctctcggacccactctctgccttcacagttgttcaaagctgagtgagggaaacaggactt

SEQ ID NO: 543808 - DNA, 120 bp, Artificial Sequence
  ENSG00000167613_14 (sequence is synthesized)
acgaaaacgtgtcagcgttttctttttaaaatttaattgatcaggattgtacgtattcaaggtgtaaaatgtgataatttgtcgtacacgtacattgtgcaatgacagtcacaatcaatt

SEQ ID NO: 543809 - DNA, 120 bp, Artificial Sequence
  ENSG00000167613_15 (sequence is synthesized)
cctcagcgcacccatcgccacagatacgatacattagatattctgaacttgctcatcttaggacttcacattggtgtcagtgttttctgacaaatcacgtgtatcaggaatgaatgaggg

SEQ ID NO: 543810 - DNA, 120 bp, Artificial Sequence
  ENSG00000167613_16 (sequence is synthesized)
aggtgtggctgggtgaaggcagagagccgaccctacaggtccacatctgcacatacatgcacaggaatgcatgctctcacacacatgcatacacacacgcacacacacagacatgcacat

SEQ ID NO: 543811 - DNA, 120 bp, Artificial Sequence
  ENSG00000167613_17 (sequence is synthesized)
acactcacacgccccaggaaatccaaggaatcactgagcctgctgttggttgaggcatttctgagtatccaccctacctgtagggtcagatgtactgattgacacagaaaattaccctat

SEQ ID NO: 543812 - DNA, 120 bp, Artificial Sequence
  ENSG00000167613_18 (sequence is synthesized)
tactgattgacacagaaaattaccctatgtaccactaggaggcggcagaatctcatttgggttaatctgtgtttgtctttaaaaaacaaaaacaggccgggcatggaggctcacgcctgt

SEQ ID NO: 543813 - DNA, 120 bp, Artificial Sequence
  ENSG00000167613_19 (sequence is synthesized)
gggcgacagagcgagactccgtcaaaaaagaaaagaaaagaaaagaaagatttttaagaattcagcaaaaactcagccagctctttctatggggcagttgctaatttagttctaggcaaa

SEQ ID NO: 543814 - DNA, 120 bp, Artificial Sequence
  ENSG00000167613_20 (sequence is synthesized)
taggcaaacgtggacacattaaattctcctacaaaccctccacagcgtgctctattattttcctcatttataaaaacagaaactatggaccgagacatgaagtaacctgtccaaggtcgg

SEQ ID NO: 543815 - DNA, 120 bp, Artificial Sequence
  ENSG00000167613_21 (sequence is synthesized)
ccaagtctcagagacaggggcttcagacccacctgaggctcctgactccacattatgaaccccgggatgggctgcagctcggtctgctgggaggtttctgtgctggttcaaagagggtgg

SEQ ID NO: 543816 - DNA, 120 bp, Artificial Sequence
  ENSG00000167613_22 (sequence is synthesized)
tacctgactggcctacccaattttaatttgtactgagctttaattttctatttgtgctcaggtttaatttcctcctgggatctgcttcccagtgctgtactctgtatctttgctttcttg

SEQ ID NO: 543817 - DNA, 120 bp, Artificial Sequence
  ENSG00000167613_23 (sequence is synthesized)
tgtgaacattgtgaccgattttccctgttcttcacgtgggacacattctccctgctctgtctgtctctgtccctgtctctctttctgtctttctctctcactgtgtgtctctctgtctct

SEQ ID NO: 543818 - DNA, 120 bp, Artificial Sequence
  ENSG00000167613_24 (sequence is synthesized)
tacaggcatgagccactgcgtccagccgtctttgtctctttttctacatctctgtctttcttctctggttgtttttcaaccatcagctgggtgttttctcccataacgtcttgtttgttt

SEQ ID NO: 543819 - DNA, 120 bp, Artificial Sequence
  ENSG00000167613_25 (sequence is synthesized)
catcagctgggtgttttctcccataacgtcttgtttgtttgactatgaggttgacaggtgggtacatgaactctatagcagaaggtggacagtctgcacatagcagaggatgggtgaatt

SEQ ID NO: 543820 - DNA, 120 bp, Artificial Sequence
  ENSG00000167613_26 (sequence is synthesized)
tttctaccccttgcagagcacaggagagctgagcagatgccagtgtctgctccagtgtaaggaagtccaggaagttcaggtggtgaggtcacagtggaaagcaggacagatagagtttag

SEQ ID NO: 543821 - DNA, 120 bp, Artificial Sequence
  ENSG00000167613_27 (sequence is synthesized)
gggaaattaagcaaaaataccacactgttatttcttgacatattagtggaaagaggaagggcccagagagaagacagaaaattagatgcaggggcttgttttttctcttgacttgccaac

SEQ ID NO: 543822 - DNA, 120 bp, Artificial Sequence
  ENSG00000167613_28 (sequence is synthesized)
ccgcccaacgcaggggccagaactcagggtggtgagatctgggaacattgctgtgcggagaagatgtccctcctgctgcacgggcccccaagcaccacctgggggaagagccatgtttaa

SEQ ID NO: 543823 - DNA, 120 bp, Artificial Sequence
  ENSG00000167613_29 (sequence is synthesized)
ttcacctggcagtgcagtgtggccaggcagagagggagggcctaccctgtgcttatgatcccaccccagttcccctggggtgtgccctggcggtgaacaccaggaggctgcagtggggcc

SEQ ID NO: 543824 - DNA, 120 bp, Artificial Sequence
  ENSG00000167613_30 (sequence is synthesized)
caacgtgaaagggaggagcagcctcaccggggccagatggggcagcagcagatattcacagatgtccctgtgagtaaccagggcagaggccaggggtctggccttccctttcttggagcc

SEQ ID NO: 543825 - DNA, 120 bp, Artificial Sequence
  ENSG00000167613_31 (sequence is synthesized)
ctgggccagctgggcaaggcgttgagagaaagattacccggtgacctttatcaaagcagagtaaggagggctttattcagaaccatcactgtaggtaccaggaccccagcggtgggattt

SEQ ID NO: 543826 - DNA, 120 bp, Artificial Sequence
  ENSG00000167613_32 (sequence is synthesized)
tgggattttgtagtaggggaaagaaaatgggctcgacgttgaatacagcatgaacaagtgagaatgtttgttatacaaactatagggtggactttttttttcttttttttaacttttttt

SEQ ID NO: 543827 - DNA, 120 bp, Artificial Sequence
  ENSG00000167613_33 (sequence is synthesized)
agtgtaaaactgaacatagaaaataaattcatgaagaagggatattttctgagggtgtccagggctgcccaacacctcgtctaccttctctgtcatagccccatttaaaacactctctct

SEQ ID NO: 543828 - DNA, 120 bp, Artificial Sequence
  ENSG00000167613_34 (sequence is synthesized)
ggatgaatacaccaaacctcacagtctttgctctcttgctaggaagaggagcaagagcgtgtttcactcttggctcctgcttacacacctgctgtccaatggaaactactacttaagaca

SEQ ID NO: 543829 - DNA, 120 bp, Artificial Sequence
  ENSG00000167613_35 (sequence is synthesized)
tttaaaaatagttgtggtgatagcatgttgtgttttggttggtgatgccagttagtctctgaaaactttctgtgatgagtgtaaaattctacaccttaatctcctttcttgtaggatctg

SEQ ID NO: 543830 - DNA, 120 bp, Artificial Sequence
  ENSG00000167613_36 (sequence is synthesized)
ggaagcagtatgcacttgattgcaccaaagattttacgttcatagaaaatttctggcatctgtgtgaagaaagtaaactatatcttccatttagacaaataaaatatctttttgataaaa

SEQ ID NO: 543831 - DNA, 120 bp, Artificial Sequence
  ENSG00000167613_37 (sequence is synthesized)
tggtatagcagaagctttttcacatctatgacacccgctatgtcttggtaaaccctggaagggaaaggaggacaaggttaaaatactgttccgaggacctggtctctccacagcgcaggc

SEQ ID NO: 543832 - DNA, 120 bp, Artificial Sequence
  ENSG00000167613_38 (sequence is synthesized)
tggaggtggcagcccgtggaaagccaagttcatccaccatcggagcccaggccaggctgccaaggctaatattcaggacaaagccaggcacaggtcgggaatcctatgaagatgatcatc

SEQ ID NO: 543833 - DNA, 120 bp, Artificial Sequence
  ENSG00000167613_39 (sequence is synthesized)
ccgcagagggcagaaattagcgatgtctactacagcttcacgcccaggaaacgcgctgtatctgcaccgtccagtagggatggcatcaggcccgtggggtcactgagtcctggaggtgca

SEQ ID NO: 543834 - DNA, 120 bp, Artificial Sequence
  ENSG00000167613_40 (sequence is synthesized)
gacggtgcagccagcttctcatgccattcaactttggataaatttaaatatcaatagctatgtgtgactctcatgctggacagtagatgtagaaagtttccatcatcacagaagactctg

SEQ ID NO: 543835 - DNA, 120 bp, Artificial Sequence
  ENSG00000167613_41 (sequence is synthesized)
ctggtcggtgctggtctagagggagcagtcagggtcctggggagtgaagggagatccccacagtggatgtgggaggactcagagccttctctgtccagctcaggactctaactcctcctc

SEQ ID NO: 543836 - DNA, 120 bp, Artificial Sequence
  ENSG00000167613_42 (sequence is synthesized)
ggtcaggctttggggttgatcagattcctgctctgccaatggcagtctgtgtccctgtgcagaggactccagcactcaggaccccggtggtggaagaaggggataacgatccctgtactg

SEQ ID NO: 543837 - DNA, 120 bp, Artificial Sequence
  ENSG00000167613_43 (sequence is synthesized)
caggactattatttacctaagatattttatatattagtaagtctatgaaacgcacgtgacgtgtgtgtggtatacagtaggtgctcaataaatgcacactgctgaaatcctgtttctgtc

SEQ ID NO: 543838 - DNA, 120 bp, Artificial Sequence
  ENSG00000167613_44 (sequence is synthesized)
atagatttagaaagaggctgacacatctggtaactagtttacggtcatctgcctctaagcgacatttaggtgctctgcctggcccagaccatccacacgcaggaggatctgcccagaccc

SEQ ID NO: 543839 - DNA, 120 bp, Artificial Sequence
  ENSG00000167613_45 (sequence is synthesized)
ctgggccatgtctccccaccccaccgccctcctgggcctagcaagaaggattacatggagacagtgatgtcgaggagggttggcttggtcgttatgaaatgctgaatgccccccagctcc

SEQ ID NO: 543840 - DNA, 120 bp, Artificial Sequence
  ENSG00000167613_46 (sequence is synthesized)
gggcactgggcatttttctcactggggcttctcttccagtgctctgcctggcccagaccatccacacgcaggaggtggacgctgagatcctgctctgcttccctcctagaagatctgccc

SEQ ID NO: 543841 - DNA, 120 bp, Artificial Sequence
  ENSG00000167613_47 (sequence is synthesized)
gagcagagtgactacctggagctgctggtgaaagaaagctctggaggcccggactccccggacacagagcccggctcctcagctgggactgtgccaggcactgaagcctccggatttgat

SEQ ID NO: 543842 - DNA, 120 bp, Artificial Sequence
  ENSG00000167613_48 (sequence is synthesized)
gcaccaagaatgaggagaaatggcctcccgtcttgtgaacttcaatggggagaaatagttagaatgagcaatagaaatgcactgattcccatacatgcatatacagataaaaatatatga

SEQ ID NO: 543843 - DNA, 120 bp, Artificial Sequence
  ENSG00000167613_49 (sequence is synthesized)
gccctctgccctgggcttggagtcaaggtctagggaggccacgggaaggcaccgacacccaccaagctctgggaggtcgctaatgctcacagagaccatagcagcaatggacccacgcag

SEQ ID NO: 543844 - DNA, 120 bp, Artificial Sequence
  ENSG00000167613_50 (sequence is synthesized)
aaataaataaataaatcagtcaacaaatacatatcaaaaaggaaccagtggccacatggaggcaaaggagcatgaggaatcttctgagcagtgaagaaaatcttggatatgttggtggtt

SEQ ID NO: 543845 - DNA, 120 bp, Artificial Sequence
  ENSG00000167613_51 (sequence is synthesized)
tcacagctgtcagaattcactgaattgcacagattaagtggatgcagtttgtgtgcaaaggatcctttgataaagctgaataaaaatcactaatgaagacctaaagtgaaaagaggcagg

SEQ ID NO: 543846 - DNA, 120 bp, Artificial Sequence
  ENSG00000167613_52 (sequence is synthesized)
cagtaaaagaagagtcagaagcaggaaagtcattctcaggagccactgtgttttggcctcatgttcaatgctaagtttcaaaacaaatgtagtattccttgcaaccatgagaagttggtg

SEQ ID NO: 543847 - DNA, 120 bp, Artificial Sequence
  ENSG00000167613_53 (sequence is synthesized)
agtgatttgaaatcattcttatgatgaggtggaagcttttggaatctgtacccctgcactttatccttgtcctcatgatttacaaaaccatgaaaataaagctcagttaattcatcatca

SEQ ID NO: 543848 - DNA, 120 bp, Artificial Sequence
  ENSG00000167613_54 (sequence is synthesized)
aaaggtgaggacgtcacctgggccctgccccagtctcagctcgaccctcgagcttgtccccaggtccctggaccctgtcccagctgctgtcctctgtggccaaccttgtcctcctcctga

SEQ ID NO: 543849 - DNA, 120 bp, Artificial Sequence
  ENSG00000167613_55 (sequence is synthesized)
attctgccttgtcccatagatttagaaagaggctgacacatctggtaactagtttacggtcatctgcctctaagcgacatttagggtaagcgacatttttcagaaaccaaggccctccct

SEQ ID NO: 543850 - DNA, 120 bp, Artificial Sequence
  ENSG00000167613_56 (sequence is synthesized)
aagcaaggacgaggagcagaagccacagcagaggtgaggcccctgggaatgactcctggacctccacccagtcctcggccgccaggctgcccctgaggttcacttttatttttcctctta

SEQ ID NO: 543851 - DNA, 120 bp, Artificial Sequence
  ENSG00000167613_57 (sequence is synthesized)
aaggttggaggagatgacgggcgggcctgcaatgcgctgcgtagggagcctgggcggtgccccacacactcgcccgctagctgcagggcttcaggaaagaggagcacatcgggacttgga

SEQ ID NO: 543852 - DNA, 120 bp, Artificial Sequence
  ENSG00000167613_58 (sequence is synthesized)
ttcttcccacaggagggcgggttacatccccgtcagagggttgccgggagggcagataaaatcagacatgaggattcttgccctctggtgggaacccagaaggaggtcagggagggaagg

SEQ ID NO: 543853 - DNA, 80 bp, Artificial Sequence
  ENSG00000167614_0 (sequence is synthesized)
ccgccccgctgccccctcccccgggggccatgggggcgcccccgggctaccggccctcagcttgggtgcatctcctccac

SEQ ID NO: 543854 - DNA, 120 bp, Artificial Sequence
  ENSG00000167614_1 (sequence is synthesized)
cttgggtgcatctcctccaccagctgccccgcgccgacttccagctccgcccggtgcccagcgttttcgcgccccaagagcaggaataccagcaggccttgttgctggtggcggccttgg

SEQ ID NO: 543855 - DNA, 120 bp, Artificial Sequence
  ENSG00000167614_2 (sequence is synthesized)
cgggcctgggcttgggcctgagcctcattttcatcgctgtctacctcatccgcttctgctgctgccggccccccgagccccccgggtccaagatcccctcgcccgggggaggctgcgtca

SEQ ID NO: 543856 - DNA, 120 bp, Artificial Sequence
  ENSG00000167614_3 (sequence is synthesized)
cctggagctgcattgtcgcccttctcgccggctgcactggcattggcatcggtttctatggcaacagtgagaccagtgatggggtgtcccagctcagctctgcgctgctgcacgccaacc

SEQ ID NO: 543857 - DNA, 120 bp, Artificial Sequence
  ENSG00000167614_4 (sequence is synthesized)
acacactcagcaccattgaccacctggtgttggagacggtggagaggctgggcgaggcggtgaggacagagctgaccaccctggaggaggtgctcgagccgcgcacggagctggtggctg

SEQ ID NO: 543858 - DNA, 120 bp, Artificial Sequence
  ENSG00000167614_5 (sequence is synthesized)
ccgcccgaggggctcgacggcaggcggaggctgcggcccagcagctgcaggggctggccttctggcagggagtgcccctgagccccctgcaggtggctgaaaatgtgtcctttgtggagg

SEQ ID NO: 543859 - DNA, 120 bp, Artificial Sequence
  ENSG00000167614_6 (sequence is synthesized)
agtacaggtggctggcctacgtcctcctgctgctcctggagctgctggtctgcctcttcaccctcctgggcctggcgaagcagagcaagtggctggtgatcgtgatgacagtcatgagtc

SEQ ID NO: 543860 - DNA, 120 bp, Artificial Sequence
  ENSG00000167614_7 (sequence is synthesized)
tcctggttctcgtcctgagctggggctccatgggcctggaggcagccacggccgtgggcctcagtgacttctgctccaatccagacccttatgttctgaacctgacccaggaggagacag

SEQ ID NO: 543861 - DNA, 120 bp, Artificial Sequence
  ENSG00000167614_8 (sequence is synthesized)
cctgagctattatctcctctgcaaccgggccgtctccaaccccttccaacagaggctgactctgtcccagcgagctctggccaacatccactcccagctgctgggcctggagcgagaagc

SEQ ID NO: 543862 - DNA, 120 bp, Artificial Sequence
  ENSG00000167614_9 (sequence is synthesized)
tgtgcctcagttcccttcagcgcagaagcctctgctgtccttggaggagactctgaatgtgacagaaggaaatttccaccagttggtggcactgctacactgccgcagcctgcacaagga

SEQ ID NO: 543863 - DNA, 120 bp, Artificial Sequence
  ENSG00000167614_10 (sequence is synthesized)
ctatggtgcagccctgcggggcctgtgcgaagacgccctggaaggcctgctcttcctgctactcttctccctgctgtctgcaggagcgctggccactgccctctgcagcctgccccgagc

SEQ ID NO: 543864 - DNA, 120 bp, Artificial Sequence
  ENSG00000167614_11 (sequence is synthesized)
ctgggccctcttcccacccagtgacgactacgatgacacagacgatgacgaccctttcaaccctcaggaatccaagcgctttgtgcagtggcagtcgtctatctgagcccctcctcccgg

SEQ ID NO: 543865 - DNA, 120 bp, Artificial Sequence
  ENSG00000167614_12 (sequence is synthesized)
ctggactggagcctggctcccctcttcgttccttccctggctgccggaggagaccccactaacccagcctgcctgggctctgaccactaacactcttggccatggacagcctgcacagga

SEQ ID NO: 543866 - DNA, 120 bp, Artificial Sequence
  ENSG00000167614_13 (sequence is synthesized)
ccgcctccctgctcttggccactgtgctcccatttctgtccttggccttgggagtagctgagggggcagactagggagtagggctggcaggggagggggcagacagcctcgcctcgcacc

SEQ ID NO: 543867 - DNA, 120 bp, Artificial Sequence
  ENSG00000167614_14 (sequence is synthesized)
cttcatccctggctgccggtcccatccttggagggactaagctgggggtgggggacatgagtccccctgctgcccctgccacatcccagtgggctctgaccccctgatctcaactcgtgg

SEQ ID NO: 543868 - DNA, 120 bp, Artificial Sequence
  ENSG00000167614_15 (sequence is synthesized)
cactaacttggaaaagggttgatttaaaataaaagggaagactattttacaagcagctgggtcctccttatttctcctctcccttgattcggcctcctggccagggctgggacatcctcc

SEQ ID NO: 543869 - DNA, 120 bp, Artificial Sequence
  ENSG00000167614_16 (sequence is synthesized)
catcctccctgctgtcctctctcccccggcctcccagctgccaggaatttctgcgcctgtccaggctcagcaaggggtccaaagacattgttctttaaaaaaaaaaaaaaaaaaatcaaa

SEQ ID NO: 543870 - DNA, 120 bp, Artificial Sequence
  ENSG00000167614_17 (sequence is synthesized)
acaacacacagggcagcgccgtcaccacagagaatgatctggctcaaaatgtcagcagggcccaggttatgaagccctcgcccctggaccaaggcggagctggcggtggctggcctgtgg

SEQ ID NO: 543871 - DNA, 120 bp, Artificial Sequence
  ENSG00000167614_18 (sequence is synthesized)
gcctctgcccccctcccgccctccgagctgctccaggcatgggctgcgtgcctcctgctgggtggatcgcaccgggcaggccctccagcctgcatcactgccctgtctctccctctctcc

SEQ ID NO: 543872 - DNA, 120 bp, Artificial Sequence
  ENSG00000167614_19 (sequence is synthesized)
acgcttgggtcccgggtgggggaaggccgagagctccaggctcagcgtccccccaggagatggtggcagctgccccccttgtacccttaggaacccccaggagcactggcattggcatcg

SEQ ID NO: 543873 - DNA, 120 bp, Artificial Sequence
  ENSG00000167614_20 (sequence is synthesized)
atcccttttgctctctgcctttttctgactcatgcccgaaccttgtcttatctttgtctctttttttggttgtgtctttctgcctgtgcctccctccatctctctctctctctctttctg

SEQ ID NO: 543874 - DNA, 120 bp, Artificial Sequence
  ENSG00000167614_21 (sequence is synthesized)
ttctgtcttcactcttccagtttccatttctgagtcttgcatacacacacacacacacgttgccacacagcccctcgtcccgtccctgggtgacaagctcaggcgctgtggggtgtagcg

SEQ ID NO: 543875 - DNA, 120 bp, Artificial Sequence
  ENSG00000167614_22 (sequence is synthesized)
acggccacctccaacaacgccgctccaccggctccggcctcggcccagactcacgcccgctctggcccggagacctcccgaagccgcacgcggggatccgcggccccagtcaccgccaga

SEQ ID NO: 543876 - DNA, 120 bp, Artificial Sequence
  ENSG00000167614_23 (sequence is synthesized)
agggaggaggggctggggtcccacagtacaaagccaattcccactccattccctcctctcccccgctaccccgaatctcctagcaggaatccaagcgctttgtgcagtggcagtcgtcta

SEQ ID NO: 543877 - DNA, 120 bp, Artificial Sequence
  ENSG00000167614_24 (sequence is synthesized)
acattcccttacttccctcccagctggcccgacgcttgggtcccgggtgggggaaggccgagagctccaggctcagcgtccccccaggagatggtggcagctgccccccttgtaccctta

SEQ ID NO: 543878 - DNA, 120 bp, Artificial Sequence
  ENSG00000167614_25 (sequence is synthesized)
atgcctggaggttctcctgggacgcgcgctgggggtccagacctcgagctctctaaataagggaaggctggggacctgcacccctgagttcatggagaggaggggaggggggcccggatt

SEQ ID NO: 543879 - DNA, 120 bp, Artificial Sequence
  ENSG00000167614_26 (sequence is synthesized)
cctcatccgcttctgctgctgccggccccccgagccccccgggtccaagatcccctcgcccgggggaggctgcgtcacctggagctgcattgtcgcccttctcgccggctggtaatgggg

SEQ ID NO: 543880 - DNA, 120 bp, Artificial Sequence
  ENSG00000167614_27 (sequence is synthesized)
ccccagggtgggtgggcggtggggacagggctccccaagctctttgctggccttcctgggggtgtcctccggggacatggaggaagcagacaggaaggaggaaactccctcgtccctgtc

SEQ ID NO: 543881 - DNA, 120 bp, Artificial Sequence
  ENSG00000167614_28 (sequence is synthesized)
cctgccatttgcaagcccacttcagcgcacagcaggaaggactgtcccatttgatggatggagaaagtgaggctctggagaggaagtgaatcaagggcagccatctgcactggcattggc

SEQ ID NO: 543882 - DNA, 120 bp, Artificial Sequence
  ENSG00000167614_29 (sequence is synthesized)
atcggtttctatggcaacagtgagaccagtgatggggtgtcccagctcagctctgcgctgctgcacgccaaccacacactcagcaccattgaccacctgacggtggagaggctgggcgag

SEQ ID NO: 543883 - DNA, 120 bp, Artificial Sequence
  ENSG00000167614_30 (sequence is synthesized)
tctgtctcgacccacagaactacctcctccttctccttggacccctgccattgcgcctgaggatatctctgtatcctctgtttatatgatttatctgtcctatatctattctctacctat

SEQ ID NO: 543884 - DNA, 120 bp, Artificial Sequence
  ENSG00000167614_31 (sequence is synthesized)
ttataacctgtcgtctacctacctatcaagcattatccatattccttccctcctccctccctttccccccaactcccgcactccccgctgggtccccatcccaccctccccgtcccttcc

SEQ ID NO: 543885 - DNA, 120 bp, Artificial Sequence
  ENSG00000167614_32 (sequence is synthesized)
tgccaccttttccttccttgtcttctctcctctctccgtcctcctgcctctccctccctcctagaggctgccgcttagtgagttctggagcaagactgcctgggttccagtcctacctcc

SEQ ID NO: 543886 - DNA, 120 bp, Artificial Sequence
  ENSG00000167614_33 (sequence is synthesized)
tgaccaagggcaagtcacctaacttctctgtacctcagttagttccctcacttataaacctgggattgcaagagtgggcacctgtccagctcccctgcggcttgtgctgttcatacactg

SEQ ID NO: 543887 - DNA, 120 bp, Artificial Sequence
  ENSG00000167614_34 (sequence is synthesized)
gacaggcaggggtgggcagggtgcccaggaggaaagatatctggtgtcctgcaggctccagtttgggctctgccgcaggctgcacggccataggcaggtgagcgtggctgactctgcttc

SEQ ID NO: 543888 - DNA, 70 bp, Artificial Sequence
  ENSG00000167614_35 (sequence is synthesized)
gtttttttttcactggatggctgtgaggattgaaaaaaaaaatccccttataaaacagtaggagctggcc

SEQ ID NO: 543889 - DNA, 120 bp, Artificial Sequence
  ENSG00000167614_36 (sequence is synthesized)
gcctgggcaacaagagcgaaactctgtcacaaacaaacaaacaaaaccagtaagagctgttctaaaacacacacccgaggatgcctttccccggccagtcttcccatcaaagacctcaca

SEQ ID NO: 543890 - DNA, 120 bp, Artificial Sequence
  ENSG00000167614_37 (sequence is synthesized)
atgcctttccccggccagtcttcccatcaaagacctcacatgtgcatagcttcaccaagtacctgaccctgttgcatttcacaggtggtaactcatcgatgcctcataacaatgctatga

SEQ ID NO: 543891 - DNA, 120 bp, Artificial Sequence
  ENSG00000167614_38 (sequence is synthesized)
agaaggaactatgattatcccacctaacaggttagaagatgaggagcagagttgagggaccttcccaaggtcacacggccagccagcccatgcacactgaggagagagggaccttccgga

SEQ ID NO: 543892 - DNA, 120 bp, Artificial Sequence
  ENSG00000167614_39 (sequence is synthesized)
gggccccgccctctgccccccacagccaggcagttgcccagttttgtcctttctgcttctggaatgtcttcatccatctactctcaatgcccaatgcccctgccgcagctgaggcctcgt

SEQ ID NO: 543893 - DNA, 120 bp, Artificial Sequence
  ENSG00000167614_40 (sequence is synthesized)
tctctcccctgcagaaggaagcatggccccctccccatccatccccccatggaccctagaatagggctgccagattcagcaaacagcaaaccactctgctataagtacgcccggtgcaat

SEQ ID NO: 543894 - DNA, 120 bp, Artificial Sequence
  ENSG00000167614_41 (sequence is synthesized)
gctggggagatacttatactagaaaattatgtattgggcatccgatactcaaatgtaactggaagtcctgaatttgatctggcaaccctacccaagagggatttgtctacgccatcgcat

SEQ ID NO: 543895 - DNA, 120 bp, Artificial Sequence
  ENSG00000167614_42 (sequence is synthesized)
ggatctgagctttccctggtctggctcagacagaccccttctgtggctcccactgcctcccacccttctggaactggcattccaaaaagggagtggggagtaagcactgaagccatgctc

SEQ ID NO: 543896 - DNA, 120 bp, Artificial Sequence
  ENSG00000167614_43 (sequence is synthesized)
agaattgctgactattgagctgagaaaggctgggcccccacccagcccagggctgccctgatcttttgcataaggataaactggggttcaggcgcttttctgtggcctaggcagaaactg

SEQ ID NO: 543897 - DNA, 120 bp, Artificial Sequence
  ENSG00000167614_44 (sequence is synthesized)
ggctggaatacaggcccccagactcctttgtggagggagggaagggaaggaagaggacagatcactctacccttccctaccactgcaccatgagaccctgggtctccatctcccctgtca

SEQ ID NO: 543898 - DNA, 82 bp, Artificial Sequence
  ENSG00000167614_45 (sequence is synthesized)
cactgcaccatgagaccctgggtctccatctcccctgtcagtgtgccagggtcctcacagattaaaatcaagaataagcggc

SEQ ID NO: 543899 - DNA, 77 bp, Artificial Sequence
  ENSG00000167614_46 (sequence is synthesized)
atcgagccactgcactccagccgaggagggggctagggatgggtgcctcgtgcctataaacccagcactttgggagg

SEQ ID NO: 543900 - DNA, 120 bp, Artificial Sequence
  ENSG00000167614_47 (sequence is synthesized)
aaaaaaaaaaaaataggagggggctagggatgggtgcctcgtgcctataaacccagcactttgggaggcccagtggggcagatcagaactccttgagctcaggagttcaagaccagcctg

SEQ ID NO: 543901 - DNA, 120 bp, Artificial Sequence
  ENSG00000167614_48 (sequence is synthesized)
aaacgctggctgctgcggtgctgggatgggattgagagtctgaaatggggaagggggcttcaggggctgaggaccagggctggaaaatgaaggggctctgggagaggaagcttcttgccc

SEQ ID NO: 543902 - DNA, 120 bp, Artificial Sequence
  ENSG00000167614_49 (sequence is synthesized)
gtcccaagaaagaaggggtggtcagggcgctgcaggggtgagggccgagatgaggctgggtttggggagcctcgggatgacagacccgggtcccgagggtggggccggtgtgggaacctc

SEQ ID NO: 543903 - DNA, 120 bp, Artificial Sequence
  ENSG00000167614_50 (sequence is synthesized)
acagaagccggtgtccctggggaaggggcccggctcggggcagctccaatgggcgaaagagctgtcccctgacccagtttaattcaagtccttgacttcgagattaatgaggagaaaggc

SEQ ID NO: 543904 - DNA, 120 bp, Artificial Sequence
  ENSG00000167614_51 (sequence is synthesized)
ttggctgagctggggacgggtgggggtgctgggagtcccgatgtggccccaggacgggtcctggccctgctgatggggcctgagcccctgggctccgtcttgggttgctcctgggagaag

SEQ ID NO: 543905 - DNA, 120 bp, Artificial Sequence
  ENSG00000167614_52 (sequence is synthesized)
ggggctgggattggagagctcagggggcgtggagggggtcccagaaaagcgcggaggggatgagtgctgtgttctgagctatttgggtcacggctggcacagccctgagcagctcttccc

SEQ ID NO: 543906 - DNA, 120 bp, Artificial Sequence
  ENSG00000167614_53 (sequence is synthesized)
acgtttccgcggcctgcctgtcttccgggccttggctctctccgcctctctgtccttgtgtgtctctcccgtctccatagtgttctcacgctctctctcccttactctgctcttcctctc

SEQ ID NO: 543907 - DNA, 120 bp, Artificial Sequence
  ENSG00000167614_54 (sequence is synthesized)
cctggagctgcattgtcgcccttctcgccggctgcccacttcagcgcacagcaggaaggactgtcccatttgatggatggagaaagtgaggctctggagaggaagtgaatcaagggcagc

SEQ ID NO: 543908 - DNA, 120 bp, Artificial Sequence
  ENSG00000167615_0 (sequence is synthesized)
ccactgtactctatcgtgggcgacgacagagcaagagcaagactccgtctccgagaacaacaacaacagcaacaagaaaacaacaataaaaaaaataaggctgcgtgggaggcagaaaga

SEQ ID NO: 543909 - DNA, 120 bp, Artificial Sequence
  ENSG00000167615_1 (sequence is synthesized)
gctaatgcggccacgcttgtctcctcggggccaccgtccccacccagacttccggtctgccttaaaatgttcatgcgtaagtgcgtgggcaggaaggcgggctcaagcgcagctcgtggc

SEQ ID NO: 543910 - DNA, 120 bp, Artificial Sequence
  ENSG00000167615_2 (sequence is synthesized)
gttcattggctgtgcagggccgagggaggcggtgcaaggccgccgcgtgacgtcaggacgccgcggtcaggacgtcgaagccaaagaagaccagagccagccgggtggcacagcggtgtc

SEQ ID NO: 543911 - DNA, 120 bp, Artificial Sequence
  ENSG00000167615_3 (sequence is synthesized)
gtggccgtgttgctgatcgcctgggtggttgttggcgtgtccctgcagcgaaggatcctggttgacagtgaaaaagcagtctggctcccgaggtccaccccttataccccaaggtccaga

SEQ ID NO: 543912 - DNA, 120 bp, Artificial Sequence
  ENSG00000167615_4 (sequence is synthesized)
tggcggccaacgtgggtgatcaacgtagcacagattggtcttctcagtacagcatggtggctggggcaggccgagagaatggcatggagacgccgatgcacgagaacccggagtgggaga

SEQ ID NO: 543913 - DNA, 120 bp, Artificial Sequence
  ENSG00000167615_5 (sequence is synthesized)
aggcccgtcaggccctggccagcatcagcaagtcaggagctgccggcggctctgccaagtccagcagcaatgggcctgtggccagtgcacagtacgtgtcccaggcagaagcctcagctt

SEQ ID NO: 543914 - DNA, 120 bp, Artificial Sequence
  ENSG00000167615_6 (sequence is synthesized)
tgcagcagcagcagtactaccagtggtaccagcagtacaactatgcctacccctacagctactactatcccatgagcatgtaccagagctatggctccccttcccagtatgggatggccg

SEQ ID NO: 543915 - DNA, 120 bp, Artificial Sequence
  ENSG00000167615_7 (sequence is synthesized)
gctcctatggctcagccacaccccagcagccatccgcaccccaacaccaagggactctgaaccagcccccagtccccggcatggatgagagcatgtcctaccaggctccccctcagcagc

SEQ ID NO: 543916 - DNA, 120 bp, Artificial Sequence
  ENSG00000167615_8 (sequence is synthesized)
tgccgtcggctcagccccctcagccctcaaatcccccacatggggctcacacgctgaacagtggccctcagcctgggacagctccagccacacagcacagccaggcggggcccgccacgg

SEQ ID NO: 543917 - DNA, 120 bp, Artificial Sequence
  ENSG00000167615_9 (sequence is synthesized)
gccaggcctatgggccacacacctacaccgaacctgccaagcccaagaagggccaacagctgtggaaccgcatgaaacccgcccctgggactggaggtctcaagttcaacatccagaagc

SEQ ID NO: 543918 - DNA, 120 bp, Artificial Sequence
  ENSG00000167615_10 (sequence is synthesized)
gaccctttgctgttaccacccagagctttggctccaacgcagagggccagcacagtggttttggcccccagcccaaccctgagaaagttcagaaccacagcgggtcctctgcccggggga

SEQ ID NO: 543919 - DNA, 120 bp, Artificial Sequence
  ENSG00000167615_11 (sequence is synthesized)
acctgtctgggaagccggatgactggccccaggacatgaaagagtatgtggagcgctgcttcaccgcctgtgagtcggaggaggacaaggaccgcacggaaaagctgctcaaggaggtgc

SEQ ID NO: 543920 - DNA, 120 bp, Artificial Sequence
  ENSG00000167615_12 (sequence is synthesized)
tgcaggcgcggctgcaggacggctcggcctataccattgactggagccgggagcccttgccggggctgacccgggagcctgtggctgagagccctaagaagaagcggtgggaggccgcta

SEQ ID NO: 543921 - DNA, 120 bp, Artificial Sequence
  ENSG00000167615_13 (sequence is synthesized)
gcagccttcaccctcctagaggggcaggctcggcgacaaggggcgggggtgccccgtcccagcgagggacgcccggggctgggggtgccggtcgagcccggggcaacagcttcaccaagt

SEQ ID NO: 543922 - DNA, 120 bp, Artificial Sequence
  ENSG00000167615_14 (sequence is synthesized)
ttggcaaccgcaacgtcttcatgaaggacaacagctcttcttccagcacagactcccgctcccgctcctcctccaggtccccgacgcgccacttccgcagaagtgactcccactcagact

SEQ ID NO: 543923 - DNA, 120 bp, Artificial Sequence
  ENSG00000167615_15 (sequence is synthesized)
ccgacagctcctactcagggaatgagtgtcaccctgtgggccgcaggaacccgccccctaagggccggggcggtcgaggggcccatatggatcggggccgaggcagggcgcagcgtggga

SEQ ID NO: 543924 - DNA, 120 bp, Artificial Sequence
  ENSG00000167615_16 (sequence is synthesized)
tcgaaagaagatggcggcgctggagtgtgaggacccggagcgagagctgaagaagcagaagcgggcagcccgcttccagcacggacactcccgccgcctgcgcctcgagcccctggtgct

SEQ ID NO: 543925 - DNA, 120 bp, Artificial Sequence
  ENSG00000167615_17 (sequence is synthesized)
gcagatgagcagcctggagagcagtggggctgaccctgactggcaggagctgcagatcgtgggcacctgccctgacatcaccaagcactacctgcgcctcacctgtgcccccgacccgtc

SEQ ID NO: 543926 - DNA, 120 bp, Artificial Sequence
  ENSG00000167615_18 (sequence is synthesized)
caccgtgcgccctgtggcagttttgaaaaagtcgctgtgcatggtcaagtgccactggaaagagaagcaggactacgcgtttgcctgcgagcagatgaagtcgatccggcaggatctgac

SEQ ID NO: 543927 - DNA, 120 bp, Artificial Sequence
  ENSG00000167615_19 (sequence is synthesized)
ggtgcagggcatccgcaccgagttcacggtggaggtgtacgagacccatgcccggatcgccttggagaagggtgaccatgaagagtttaaccagtgccagacgcagctcaagtcgctgta

SEQ ID NO: 543928 - DNA, 120 bp, Artificial Sequence
  ENSG00000167615_20 (sequence is synthesized)
cgccgagaacttgcctggcaatgtgggcgagtttactgcctaccgaatcctctactacatcttcaccaagaactcgggagacatcaccacggagctggcatacctcacacgagaactgaa

SEQ ID NO: 543929 - DNA, 120 bp, Artificial Sequence
  ENSG00000167615_21 (sequence is synthesized)
ggcagatccttgcgtggcccacgccttggcattaaggacagcctgggccctgggcaactaccaccgctttttccggctctactgccatgcaccctgcatgtctggctacctcgtggacaa

SEQ ID NO: 543930 - DNA, 120 bp, Artificial Sequence
  ENSG00000167615_22 (sequence is synthesized)
gtttgcagatcgggagcgcaaggtcgccctcaaggccatgatcaaaaccttccgccctgcgctgccagtctcctacctgcaggccgagctggccttcgagggcgaggccgcctgccgggc

SEQ ID NO: 543931 - DNA, 120 bp, Artificial Sequence
  ENSG00000167615_23 (sequence is synthesized)
cttcctagagcccctgggcctggcctacacgggcccggacaactccagcatcgactgccgcctcagcctggcgcagctgtcagccttctgagcacccagcgaggaggggcgggggcaggg

SEQ ID NO: 543932 - DNA, 120 bp, Artificial Sequence
  ENSG00000167615_24 (sequence is synthesized)
gctgcagcccccagcgctgcctttgcggattctgtttttgagccgtggacttgggttgtaaatttatttgtggggagtgcgctccaggaagagccaccatccctgcccccgttttcccac

SEQ ID NO: 543933 - DNA, 120 bp, Artificial Sequence
  ENSG00000167615_25 (sequence is synthesized)
cggggagtctgtacagagatttttctacgtttttattttttgcctcagagggatgggattggggaggaggggatgggcagcggagggttgggggcatggtctgcaggctcatctgtgtcc

SEQ ID NO: 543934 - DNA, 120 bp, Artificial Sequence
  ENSG00000167615_26 (sequence is synthesized)
gcctttcactccactaatgctgtctcagtgttttctctctctctctttcgagcttgcactccggtacccgacccggcgccctggcccatcccatgccggggggccagtggaaagaagaca

SEQ ID NO: 543935 - DNA, 120 bp, Artificial Sequence
  ENSG00000167615_27 (sequence is synthesized)
ggccgtccagcccgtgcccgcctgcggcgggggcacccagcaagcccgcccaccgcccgctgcctcacctgcttcgccacagactcttgttcccagccccttggggcctccgtgtttggg

SEQ ID NO: 543936 - DNA, 120 bp, Artificial Sequence
  ENSG00000167615_28 (sequence is synthesized)
gtgggggagctgcttagagactgtgcccgtcctcggccccccaccctgaagtgccagcaccaccagcaccagatcctccgccgccacaccgcactgaggacacgccggccgggccgcctc

SEQ ID NO: 543937 - DNA, 120 bp, Artificial Sequence
  ENSG00000167615_29 (sequence is synthesized)
gtctcaagttgtataaagttgtctccgtgtcccctcctccctctgcccccagtgtttcttctgatttttttttcccctttccctccctccctctccgcattcttcccttggttcagcaca

SEQ ID NO: 543938 - DNA, 120 bp, Artificial Sequence
  ENSG00000167615_30 (sequence is synthesized)
ggtaaaacggttcccctccctccctgccttcatggatcaccagctcacgtcatgttgccttctcttttctttgtgtgtgtgtttatttaagttatttttcttcctcctctcccttttctt

SEQ ID NO: 543939 - DNA, 120 bp, Artificial Sequence
  ENSG00000167615_31 (sequence is synthesized)
tttggccctccctccctccctcttctgccatgtaactggaggatgtgctatgagtttgcaaacagctggactgtcaggctgctttttttccagatgttcctcctctgcctccccttcccc

SEQ ID NO: 543940 - DNA, 120 bp, Artificial Sequence
  ENSG00000167615_32 (sequence is synthesized)
tcctctcccctccttttccttccttccttcctttccttggagcactgagcaccatttggaagcttgagagaaaccaaaattaaagagagaaagagagagcgtgcacgctcctgctttgtc

SEQ ID NO: 543941 - DNA, 120 bp, Artificial Sequence
  ENSG00000167615_33 (sequence is synthesized)
cagccgggtggcacagcggtgtcgtggccgtgttgctgatcgcctgggtggttgttggcgtgtccctgcagcgaaggatcctgacagtgaaaaagcagtctggctcccgaggtccacccc

SEQ ID NO: 543942 - DNA, 120 bp, Artificial Sequence
  ENSG00000167615_34 (sequence is synthesized)
agctcccttctgcctttgctcttcccatccttccgcctcgcaccgcccctcagaccagctcctggccgcaggcctcccccagcccccaacccttgtcctggtccttgcttccccatcatc

SEQ ID NO: 543943 - DNA, 120 bp, Artificial Sequence
  ENSG00000167615_35 (sequence is synthesized)
tttctccattcagccctcccctctccagttcctcttgctctccttgttggtcacctctgtgttccgggtcactcctctccctctccccactgttcccagctcactgcctctggggcctct

SEQ ID NO: 543944 - DNA, 120 bp, Artificial Sequence
  ENSG00000167615_36 (sequence is synthesized)
agcttgtcgctgtgctcccaccatagagaccatctagacagcctctggtctaccaggacaaggcccagtcccactcagctcctttgagagcaccagaaacgcttagggagacacctgtgt

SEQ ID NO: 543945 - DNA, 120 bp, Artificial Sequence
  ENSG00000167615_37 (sequence is synthesized)
tgaggccacactgggcgcggtgccagaggcccctggtcaggccatgcccctgcagtgtccttcgttcactagacattgcgcctggcttgctgtgggtggggatgagttgcttgactcatg

SEQ ID NO: 543946 - DNA, 120 bp, Artificial Sequence
  ENSG00000167615_38 (sequence is synthesized)
tttagacgcatggttctgtctggtgattgaggtgcccaggcgacgctgggcaatgtcaagagaggttttcgcttgtcacagcaaggggatgctcttggcatctagtgagtggaggccagg

SEQ ID NO: 543947 - DNA, 120 bp, Artificial Sequence
  ENSG00000167615_39 (sequence is synthesized)
gatgctgccctgccactgccattgggcctcagagctcagtcttgccaaggtggagaaattctggtcgaagaggttgaccggtagactgaagaggccttgagagcctggccaggtggctgt

SEQ ID NO: 543948 - DNA, 120 bp, Artificial Sequence
  ENSG00000167615_40 (sequence is synthesized)
ccacgtgaggtcatagtcacagcatggaggccttgagagcctggccaggtggccctccacgtgaggtcatggtcacagcatgggggccttgagtgcctggccaggtggccctccacgtga

SEQ ID NO: 543949 - DNA, 120 bp, Artificial Sequence
  ENSG00000167615_41 (sequence is synthesized)
ggtcatggtcacagcatggaggccttgagagcctggccaggtggccctccacgtgaggttgtggtcacagcatgggggccttgagagcctggccaggtggccctccacgtgaggtcatgg

SEQ ID NO: 543950 - DNA, 120 bp, Artificial Sequence
  ENSG00000167615_42 (sequence is synthesized)
tcacagcatggaggccttgagagcctggccaggtggccctccgtgtgaggtcatggtcacagcatagtttggagctagggagggactgtcagcctggaggtttggagactcattctggaa

SEQ ID NO: 543951 - DNA, 120 bp, Artificial Sequence
  ENSG00000167615_43 (sequence is synthesized)
tctagtgtgggtcaagccaacttcagggagaggctgagccagggtaggagtcacaggagcagacgaggatgtggggtgccgtgcacagagctccatgaccagcttgggaagttagaagga

SEQ ID NO: 543952 - DNA, 120 bp, Artificial Sequence
  ENSG00000167615_44 (sequence is synthesized)
aggggaggcaggaggctgcttagtctgctgccatgatgggccccatgaatggtggctctcaagcttctgtgctacacaggggtgtgtggttgggcgagtgtccttgttaattgataccta

SEQ ID NO: 543953 - DNA, 120 bp, Artificial Sequence
  ENSG00000167615_45 (sequence is synthesized)
attggccttggttgggaacatagccatgagtgcccctcgtgggtggggcgccagtctgtcattgacctcattgtgtcagcaccttccccccaaggaggctgaccctgccctgccagctga

SEQ ID NO: 543954 - DNA, 120 bp, Artificial Sequence
  ENSG00000167615_46 (sequence is synthesized)
gactgggagacggagtgggctctgatcccagggcttccaggaaagctctggctttggagcagaagcgggttctaggacttagtgcccctcactcggtgcctgggttcctgtgtgtgtgga

SEQ ID NO: 543955 - DNA, 120 bp, Artificial Sequence
  ENSG00000167615_47 (sequence is synthesized)
aagggtagggctgcaccctgtggaagagggttcagggagctctgaggacctggctcgtgctagatgctcagtcagtagtgtgttttagcagcagccggaagtgactgctttcagtgtgta

SEQ ID NO: 543956 - DNA, 120 bp, Artificial Sequence
  ENSG00000167615_48 (sequence is synthesized)
gtggtgagtgctagctggcacccctgcgcctggcttcccagacactgtaacgcagggcaggggaggcagcgagggctgggtccccacggtggccctggcagccccgccatccccatcccc

SEQ ID NO: 543957 - DNA, 120 bp, Artificial Sequence
  ENSG00000167615_49 (sequence is synthesized)
tgccacgtgctgctccctccatctggtccctgcccctcagccagcggaggagcccgctgggcccttccctgcccgtccccgctcctccctggcccccgcacaggtaagtgagggtgaggg

SEQ ID NO: 543958 - DNA, 120 bp, Artificial Sequence
  ENSG00000167615_50 (sequence is synthesized)
gggcacaggggactggggtcactaaccccccccgggccccccccgagcccctgaggtggggaggctgggaggcgggtggggagccagcaggcactgtgctgaggaaatcctgtgggcacc

SEQ ID NO: 543959 - DNA, 120 bp, Artificial Sequence
  ENSG00000167615_51 (sequence is synthesized)
cgaatgggggggcctccccgctcgtggggccctcccctgccctcccgcccgcccgcctcatcaccttctcctcttgtctccatagcttccgccctgcgctgccagtctcctacctgcagg

SEQ ID NO: 543960 - DNA, 120 bp, Artificial Sequence
  ENSG00000167615_52 (sequence is synthesized)
tcctgcgcgtctttctggggcgtggtgcgcaggcgcggcctgggcagtggctccgtggctagtcgtggggatccgagcggcctcctccacccggcgtcctcctttgccttcgcccagcct

SEQ ID NO: 543961 - DNA, 120 bp, Artificial Sequence
  ENSG00000167615_53 (sequence is synthesized)
cagttagatatgggatccaggggctggaatttgcctcccaacttgcccacctgtgtacagtggggagaacaggtgtgacttgatgtcctctctctctgcaggtcttctcagtacagcatg

SEQ ID NO: 543962 - DNA, 120 bp, Artificial Sequence
  ENSG00000167615_54 (sequence is synthesized)
caccgctttttccggctctactgccatgcaccctgcatgtctggctacctcgtggacaagtttgcagatcgggagcgcaaggtcgccctcaaggccatgatcaaaactgttttctctctc

SEQ ID NO: 543963 - DNA, 120 bp, Artificial Sequence
  ENSG00000167617_0 (sequence is synthesized)
acacttagtcctggcctcctcccgcccccacactccgcccagaggggcctcagcttttccaccactgctttctagtcctttaactcctagaggcaaacttttgggggataagaaagcctg

SEQ ID NO: 543964 - DNA, 120 bp, Artificial Sequence
  ENSG00000167617_1 (sequence is synthesized)
ggaggggcctgtgccaaaaccctctctgcctggggactgggcggtgattccgcttctgcctgggctcctgccatggcccccgagaggggctgacactttagctcccggtgcaggtgagaa

SEQ ID NO: 543965 - DNA, 120 bp, Artificial Sequence
  ENSG00000167617_2 (sequence is synthesized)
cccgcccggaggaagaaggaaggcgcgggccggggattaggagacggaggcggactcggagccagggaaccaggggtccgggctagagctggagtcgtgagcgcgcgcccgccccgctct

SEQ ID NO: 543966 - DNA, 120 bp, Artificial Sequence
  ENSG00000167617_3 (sequence is synthesized)
cggcctgatcgcggcgccctgtccatctccgcgccgctcggcgacttccggcacacgctgcacgtggggcgcggcggcgacgccttcggggacacctcgttcctgagccgccacggcggc

SEQ ID NO: 543967 - DNA, 120 bp, Artificial Sequence
  ENSG00000167617_4 (sequence is synthesized)
cgcgctccccgccgccgcccgccgtcccgcagtccgcagcgccctcgcctgccgacccgctgctgtccttccacctggatctggggccctccatgctggacgcggtgctgggcgtcatgg

SEQ ID NO: 543968 - DNA, 120 bp, Artificial Sequence
  ENSG00000167617_5 (sequence is synthesized)
gtccttccacctggatctggggccctccatgctggacgcggtgctgggcgtcatggacgcggcgcgcccggaggcggctgccgccaagcccgacgcggaaccccgccccgggacgcagcc

SEQ ID NO: 543969 - DNA, 120 bp, Artificial Sequence
  ENSG00000167617_6 (sequence is synthesized)
cgccccaacgcggacctcgagctgaacgacgtcatcggcctctaggttccctcattccccgcgcccttcccgcccggcaccccacttctgtatacataaacggccaaggtgtgtgcccgg

SEQ ID NO: 543970 - DNA, 120 bp, Artificial Sequence
  ENSG00000167618_0 (sequence is synthesized)
agttgctgtggaagccccacgggcaggaggcccccggccagcacatcctgtctgcttgtgtctgctgcagagttctgggaccggggccatgtctccacacctcactgctctcctgggcct

SEQ ID NO: 543971 - DNA, 120 bp, Artificial Sequence
  ENSG00000167618_1 (sequence is synthesized)
agtgctctgcctggcccagaccatccacacgcaggagggggcccttcccagaccctccatctcggctgagccaggcactgtgatctccccggggagccatgtgactttcatgtgccgggg

SEQ ID NO: 543972 - DNA, 120 bp, Artificial Sequence
  ENSG00000167618_2 (sequence is synthesized)
atgtgtttcgacttggtccatctgagtcagaggccagattccacattgactcagtaagtgaaggaaatgccgggctttatcgctgcctctattataagccccctggatggtctgagcaca

SEQ ID NO: 543973 - DNA, 120 bp, Artificial Sequence
  ENSG00000167618_3 (sequence is synthesized)
gtgacttcctggagctgctggtgaaagaaagctctggaggcccggactccccggacacagagcccggctcctcagctgggactgtgccaggcactgaagcctccggatttgatgcaccat

SEQ ID NO: 543974 - DNA, 120 bp, Artificial Sequence
  ENSG00000167618_4 (sequence is synthesized)
gaatgaggagaaatggcctcccgtcttgtgaacttcaatggggagaaataattagaatgagcaatagaaatgcacagatgcctatacatacatatacaaataaaaagatacgattcgcaa

SEQ ID NO: 543975 - DNA, 120 bp, Artificial Sequence
  ENSG00000167618_5 (sequence is synthesized)
cttcttaaggatttgagctgtgatgctggcacctggcagaccacatcctgtgcggttttcagttttgctctgttcctgaccctggtatagcagaagctttttcacatctatgacacccgc

SEQ ID NO: 543976 - DNA, 120 bp, Artificial Sequence
  ENSG00000167618_6 (sequence is synthesized)
tatgtcttggtaaaccctggaagggaaaggaggacaaggttaaaatactgttccgaggacctggtctctccacagcgcaggctggaggtggcagcccgtggaaagccaagttcatccacc

SEQ ID NO: 543977 - DNA, 80 bp, Artificial Sequence
  ENSG00000167619_0 (sequence is synthesized)
gcgcgctctcgcctccattgccgggccagtgcgggagccggagcggagccggggccggagcgggcggaatggagcccctg

SEQ ID NO: 543978 - DNA, 120 bp, Artificial Sequence
  ENSG00000167619_1 (sequence is synthesized)
tcctgctgctgtcactgcccccccgcgcccgggccaagtacgtgcggggcaacctcagttccaaggaggactgggtgttcctgacaagattttgtttcctctcggattacggccgactgg

SEQ ID NO: 543979 - DNA, 120 bp, Artificial Sequence
  ENSG00000167619_2 (sequence is synthesized)
acttccgtttccgctaccctgaggccaagtgctgtcagaacatcctcctctattttgatgacccatcccagtggccagccgtgtacaaggcaggggacaaggactgcctggccaaggagt

SEQ ID NO: 543980 - DNA, 120 bp, Artificial Sequence
  ENSG00000167619_3 (sequence is synthesized)
cagtgatccggccggagaacaaccaggtcatcaacctcaccacccagtatgcctggtccggctgtcaggtggtatcagaggagggaacccgctacctgagctgctccagtggccgcagct

SEQ ID NO: 543981 - DNA, 120 bp, Artificial Sequence
  ENSG00000167619_4 (sequence is synthesized)
tccgctcaggtgatggattgcagctggagtatgagatggtcctcaccaatggcaagtccttctggacacgacacttctccgctgatgagtttgggatcctggagacagatgtgaccttcc

SEQ ID NO: 543982 - DNA, 120 bp, Artificial Sequence
  ENSG00000167619_5 (sequence is synthesized)
tcctcatcttcatcctcatcttcttcctctcttgttactttggatatttgctgaaaggtcgtcagttgctccacacaacttataaaatgttcatggccgcagcaggagtagaggtcctga

SEQ ID NO: 543983 - DNA, 120 bp, Artificial Sequence
  ENSG00000167619_6 (sequence is synthesized)
gcctcctatttttctgcatctactggggtcaatatgccaccgatggcattggcaacgagagtgtgaagatcttggccaagctgctcttctcctccagcttcctcatcttcctgctgatgc

SEQ ID NO: 543984 - DNA, 120 bp, Artificial Sequence
  ENSG00000167619_7 (sequence is synthesized)
acgaggcggaattctttgacccaggccaggtactgtacacgtatgagtcgccggccggctacgggctcattggactgcaggtggcggcctacgtgtggttctgctatgctgtgcttgtct

SEQ ID NO: 543985 - DNA, 120 bp, Artificial Sequence
  ENSG00000167619_8 (sequence is synthesized)
cactgcgacactttcctgagaagcagcctttttatgtgcccttctttgctgcctataccctctggttctttgcggttcctgtcatggccctgattgccaatttcggcatccccaagtggg

SEQ ID NO: 543986 - DNA, 120 bp, Artificial Sequence
  ENSG00000167619_9 (sequence is synthesized)
cccgggagaagattgtcaatggcatccagctggggatccacttgtacgcccatggcgtgtttctgatcatgacccgcccatcagcggccaacaagaacttcccgtaccacgtgcgcacgt

SEQ ID NO: 543987 - DNA, 120 bp, Artificial Sequence
  ENSG00000167619_10 (sequence is synthesized)
cgcagatcgcttcagccggagtccctggacccggagggagccaatccgctgacaaggccttcccgcagcacgtctatgggaacgtgacgtttatcagcgactcggtgcccaacttcacgg

SEQ ID NO: 543988 - DNA, 120 bp, Artificial Sequence
  ENSG00000167619_11 (sequence is synthesized)
agctcttctccatccccccgcccgccacctcccccctgccccgagcggcgccggattctgggctcccgctgttccgtgacctccggccccctggcccccttcgagacctctgaccccgct

SEQ ID NO: 543989 - DNA, 120 bp, Artificial Sequence
  ENSG00000167619_12 (sequence is synthesized)
ggactccggaacacccgtggtgaccgccgggaccctgcctgtgactctccaggactctgcgaccccgggatggatattgcgatgctggtctcgaccctgaaaccctccctcggatctgtg

SEQ ID NO: 543990 - DNA, 120 bp, Artificial Sequence
  ENSG00000167619_13 (sequence is synthesized)
acctcggacccgtactccatctgccgcatctccattccgggggccttccctcgggtccctggcagaaagacattttaccccttcttgccaaaataaaaaaggattcgtttttatctataa

SEQ ID NO: 543991 - DNA, 120 bp, Artificial Sequence
  ENSG00000167619_14 (sequence is synthesized)
ccactgccttccccaccctccttgatctctccactctccccctgcccctgcccaaattctgccatcacaggccactgttcaggaagaagcatctggggtggcacagggtgaagcttttgg

SEQ ID NO: 543992 - DNA, 77 bp, Artificial Sequence
  ENSG00000167619_15 (sequence is synthesized)
aggaagaagcatctggggtggcacagggtgaagcttttgggctcctgggtcggcaacaggagggtacagcaccacag

SEQ ID NO: 543993 - DNA, 62 bp, Artificial Sequence
  ENSG00000167619_16 (sequence is synthesized)
cggctcactgcaacttctgcctcccaagttcatgcagcaaattttttttgtatttttagtag

SEQ ID NO: 543994 - DNA, 120 bp, Artificial Sequence
  ENSG00000167619_17 (sequence is synthesized)
agtgagccactgcgcctggcccccaccacgtctattctttgccctggttcacatcctatctgacattcttggtgacagttctaatattcattaatttattcatcaattgttcactgggca

SEQ ID NO: 543995 - DNA, 120 bp, Artificial Sequence
  ENSG00000167619_18 (sequence is synthesized)
cccagcgcccggacccctgagccctcctcctgcctttcgcactccccgcgccccaacaccgcgccgcgaccgtcccctggcgcccgcgcccaccctgcctgactgggttctggcgctgtt

SEQ ID NO: 543996 - DNA, 120 bp, Artificial Sequence
  ENSG00000167619_19 (sequence is synthesized)
ccctgcctgactgggttctggcgctgttgcgcacacccccgcagactccctgcgccgtgcccccaccgcccgccttccgcggctctcccccagctccccggccgccgccggagttcgccc

SEQ ID NO: 543997 - DNA, 120 bp, Artificial Sequence
  ENSG00000167619_20 (sequence is synthesized)
tttgagtacctggccccgctgcccaggcgccccgccacccagtccttccctgactgacaacgtgcgtccacacctggggtggaagggttctccgggggagggggacgggccttcggggcc

SEQ ID NO: 543998 - DNA, 120 bp, Artificial Sequence
  ENSG00000167619_21 (sequence is synthesized)
gcatctgccccccgagggtcccggacggcctctgaccctgacccccctcccaggccgggaagcaggtggaggagacagcggtggcggcggcggtggccccgaggggccgcgtggtgacca

SEQ ID NO: 543999 - DNA, 120 bp, Artificial Sequence
  ENSG00000167619_22 (sequence is synthesized)
ggtgaccatggccgagccgggcgcagcctcccccccacttcccgctcggttccccaaggcggccgactcgggctgggacggcccgacgccgccctaccagccgctcgtgccccagacggc

SEQ ID NO: 544000 - DNA, 120 bp, Artificial Sequence
  ENSG00000167619_23 (sequence is synthesized)
acaccggcttcaccgaatacttcagcatgcacacggccgggggcactgcacccccggtctgagcacccctgcccgcccctgccccatgggccatgaccgggccccggccgggctccggac

SEQ ID NO: 544001 - DNA, 120 bp, Artificial Sequence
  ENSG00000167619_24 (sequence is synthesized)
ccctgctttatcccggcccgagagctcgcccatccccggccttcccgacccttcccaccccgcgcgcccaggttgggtacgctgcgtcccgcccccctcccctctgtgccaaacggtccc

SEQ ID NO: 544002 - DNA, 78 bp, Artificial Sequence
  ENSG00000167619_25 (sequence is synthesized)
catccccaagtgggcccgggagaagattgtcaatggcatccagctggggatccacttgtacgcccatggcgtgtttct

SEQ ID NO: 544003 - DNA, 120 bp, Artificial Sequence
  ENSG00000167625_0 (sequence is synthesized)
agtgaggggtcccacacgcctggagccgagggtctgtgtcaagagcggcaggggctgcaggagataagagaaacgggctgccgtggggtgtgtgtaggcttcagagacatgggatcacgg

SEQ ID NO: 544004 - DNA, 120 bp, Artificial Sequence
  ENSG00000167625_1 (sequence is synthesized)
aagactgaagcagaaacagtggattaagacttcctgagcgatagctggcactgccttccccacaatggcagaggtggtggctgaggtggccgagatgccaacacagatgtcaccaggggc

SEQ ID NO: 544005 - DNA, 120 bp, Artificial Sequence
  ENSG00000167625_2 (sequence is synthesized)
agtggagatgtcaacacctatgtcggcagagatgatggagatgtcaacagaagtgactgagatgacacctggggaggcccttgcctcatccctcttcttccagcatcaccagttcatgtg

SEQ ID NO: 544006 - DNA, 120 bp, Artificial Sequence
  ENSG00000167625_3 (sequence is synthesized)
ctctgagtgtggcagcctctataacacactggaggaagtcctctcacaccaggagcagcacatgcttgctgtctcagaggaggaggcactgaccacacagaatgttggcctggagccgga

SEQ ID NO: 544007 - DNA, 120 bp, Artificial Sequence
  ENSG00000167625_4 (sequence is synthesized)
gctggtgccgggtgctgaggggcccttccagtgtggtgaatgcagccagctcatcctctcccctggggagctcctggcccaccaggatgcccacctccgagagtctgcaaaccagatcca

SEQ ID NO: 544008 - DNA, 120 bp, Artificial Sequence
  ENSG00000167625_5 (sequence is synthesized)
ataccagtgctgggactgccaggagctgttcccctcgcccgagctgtgggtggctcatcgaaaggcccagcacctttctgctacggtagctgagccaccagtgccacctcctttgcctcc

SEQ ID NO: 544009 - DNA, 120 bp, Artificial Sequence
  ENSG00000167625_6 (sequence is synthesized)
cccaacaccactgcctccaccttctcccccatccgaagtcaagatggagccctatgagtgtcctgagtgctctaccctctgcgccacccctgaggagttcttggagcatcagggcaccca

SEQ ID NO: 544010 - DNA, 120 bp, Artificial Sequence
  ENSG00000167625_7 (sequence is synthesized)
ctttgactccctagagaaagaggagcgcaatgggttggaggaggaggaagaggacgatgaggaggatgaagaagatgatgaagagatggaggatgaggaggccatggcagaggtcggtga

SEQ ID NO: 544011 - DNA, 120 bp, Artificial Sequence
  ENSG00000167625_8 (sequence is synthesized)
tgatgctgtgggaggtgacgagtccacagctggctgggctcagggctgcggggactgtccccagcaccagccctcagcaggggctcgccggcaacaccggcggacggctcacagcccggc

SEQ ID NO: 544012 - DNA, 120 bp, Artificial Sequence
  ENSG00000167625_9 (sequence is synthesized)
atctgccacccaccccttccactgcagccagtgtcagcgcagtttcagctccgccaaccggctgcaggctcatgggcgggcccatgttggtggcacacatgagtgtacaacctgctccaa

SEQ ID NO: 544013 - DNA, 120 bp, Artificial Sequence
  ENSG00000167625_10 (sequence is synthesized)
ggtcttcaagaaagcagcatcgcttgagcagcacttgcggctgcatcgcggggaagcccgctacctctgtgtagactgtggccgcggctttggcacagaactcacgttggtggctcaccg

SEQ ID NO: 544014 - DNA, 120 bp, Artificial Sequence
  ENSG00000167625_11 (sequence is synthesized)
gcgggcccacactgccaacccattgcatcgctgtcgttgcggcaagacgttcagcaacatgaccaagttcctctaccaccggcgcactcacgccggcaaaagcggggcacctcccacagg

SEQ ID NO: 544015 - DNA, 120 bp, Artificial Sequence
  ENSG00000167625_12 (sequence is synthesized)
agcaacagctcccccagctccagcggagcccacccctccaccaccaccccctgccccacctgcccagctgccctgcccacagtgctccaagtcctttgcctcagcttcccggctgtcccg

SEQ ID NO: 544016 - DNA, 120 bp, Artificial Sequence
  ENSG00000167625_13 (sequence is synthesized)
gcaccggcgtgcagtacacgggccccctgaacggcgtcaccgctgtggggtttgtggcaagggcttcaagaagctgatccacgtgcgcaaccacctgcggacacacacgggtgagaggcc

SEQ ID NO: 544017 - DNA, 120 bp, Artificial Sequence
  ENSG00000167625_14 (sequence is synthesized)
cttccagtgccactcatgtggcaagacctttgcttctttggccaacctcagccgccaccagctgacccatacgggtgcacgtccctaccaatgcctggactgtggcaagcgcttcacaca

SEQ ID NO: 544018 - DNA, 120 bp, Artificial Sequence
  ENSG00000167625_15 (sequence is synthesized)
gagctccaacctgcagcagcaccggcggttgcacttgcggccagtcgcctttgcccgcgccccccgcctccccatcactggtctctacaacaagagtccctactactgcgggacttgtgg

SEQ ID NO: 544019 - DNA, 120 bp, Artificial Sequence
  ENSG00000167625_16 (sequence is synthesized)
ggcttgcgactgcatcagcgggtccatgcccgagctcggactttgacgctacagcctcccagatcaccatctcctgccccacccccacctccagagcctcaacagactatcatgtgcaca

SEQ ID NO: 544020 - DNA, 120 bp, Artificial Sequence
  ENSG00000167625_17 (sequence is synthesized)
gagctgggggagaccatcgccatcattgagacatcccagccactggcgcttgaggacaccctgcagctgtgccaggctgcactgggggccagtgaagcaggcgggctcttgcagttggac

SEQ ID NO: 544021 - DNA, 120 bp, Artificial Sequence
  ENSG00000167625_18 (sequence is synthesized)
acggccttcgtgtgacgcagctgaaaagcaacaacaaaagggtttggttgcaacagccagtgtgggtacctctggggagagaggacctcctctgacaaactggtctggtacccaccatgt

SEQ ID NO: 544022 - DNA, 120 bp, Artificial Sequence
  ENSG00000167625_19 (sequence is synthesized)
gccaggatccaccctggcctctttttacccactgactccccagaacaacccttccaggcttctcttgtcatctttctctgcctgaggggaaactgaagctctgaaatgcgatgtgatctg

SEQ ID NO: 544023 - DNA, 120 bp, Artificial Sequence
  ENSG00000167625_20 (sequence is synthesized)
taccaggtcacccagctatgctgcaaagtgggttggccaaggccctttgcactgcatcaccctggtgcccagcaacatcaggtaaccttcactgagcaccaagcttatgccaggtctgtg

SEQ ID NO: 544024 - DNA, 120 bp, Artificial Sequence
  ENSG00000167625_21 (sequence is synthesized)
ctggccactctcatatacctcttcagatcctctgcttgtacccccagcccttgccttccctggattttgggcacccaggactttgctctgcctggtggagggtacttgatttctctgggc

SEQ ID NO: 544025 - DNA, 120 bp, Artificial Sequence
  ENSG00000167625_22 (sequence is synthesized)
ttccttcatctcaattctgacagtgtggaaggaaatctgtaggtacccaggtcctcagctccagactgggtgatgctggagacccaggagcaagtcagcacaggctctgcccacaggagg

SEQ ID NO: 544026 - DNA, 120 bp, Artificial Sequence
  ENSG00000167625_23 (sequence is synthesized)
catgcacaatctggtaggagaaacgcacaagtacagatagcttgctctctgagtgtgtctcattgattcattcagcctgtgtgtcctaaagcctcccttctcccatactgggtgatgctg

SEQ ID NO: 544027 - DNA, 120 bp, Artificial Sequence
  ENSG00000167625_24 (sequence is synthesized)
ggggcagagatgagtcaggcctaaggcttctctgggctgtgatggggatgtgcagggacagtgggatcccaggaaacagacctccatggtgggagatcaggagttaaggacttcctagag

SEQ ID NO: 544028 - DNA, 120 bp, Artificial Sequence
  ENSG00000167625_25 (sequence is synthesized)
aaggtagtccctgaaggaaaagtaggaatctggcagtgaaagaggaaaagaacattccaggcagacagcactgcaagagggtgagctcttggtgtatttggagaccatccagttattcat

SEQ ID NO: 544029 - DNA, 120 bp, Artificial Sequence
  ENSG00000167625_26 (sequence is synthesized)
ctgactgcctacctgaggcaagcaccacacttaccactgtatgtgtactatgatcccaacaggcttgtgacatagatttcatattatccctgttgtatagatttttaaaactggtggctg

SEQ ID NO: 544030 - DNA, 90 bp, Artificial Sequence
  ENSG00000167625_27 (sequence is synthesized)
gggcgacagagtgagactccctctcaaaagaaaataaaaataaaaataaactggccaggtgcggtggctcacgcttgcaatcccagtgaa

SEQ ID NO: 544031 - DNA, 120 bp, Artificial Sequence
  ENSG00000167625_28 (sequence is synthesized)
aggagttcgagaccagcctgggcaacagcaagacctcatctctacaaaacttaaaagttagccaggcctggtggcacatgcctgtaatccgagtgctttgggaggctgaggcaggaggat

SEQ ID NO: 544032 - DNA, 120 bp, Artificial Sequence
  ENSG00000167625_29 (sequence is synthesized)
gctgaggcaggaggatcactcgagctcaagaattcaagacctgggcaagagagagagactttgtctctattaaaaataaaaatgattggccgagcatggtggtgcacaccagtattccca

SEQ ID NO: 544033 - DNA, 120 bp, Artificial Sequence
  ENSG00000167625_30 (sequence is synthesized)
aatgattggccgagcatggtggtgcacaccagtattcccagctactctggaggctgaggcggaggcaggattgcttgatatgagggagattgaggctgcagtgagctgtgttcacaccac

SEQ ID NO: 544034 - DNA, 120 bp, Artificial Sequence
  ENSG00000167625_31 (sequence is synthesized)
aagagaaacgggtgagggcgccgcgcggggctggactgggaagagaacgctgggcggacggagggggcggaaggaaaactaaggggtctgcagggatcgaagagccttggggcctgcgct

SEQ ID NO: 544035 - DNA, 120 bp, Artificial Sequence
  ENSG00000167625_32 (sequence is synthesized)
agggcgggagcggcgcgggctggaaggagagcactccttcctgtgtgccctggggctcctttagtgtgcgggagcctacgctggaactcgcccaccacccactgctgcgagctctcaccc

SEQ ID NO: 544036 - DNA, 120 bp, Artificial Sequence
  ENSG00000167632_0 (sequence is synthesized)
agtaggaagcgccagcccagagcctgggaagtggccgcagaggctgctcggccccgctgcccgccaggtcgtgggctcccgctccgggcccggggccaccggctgtggacttcaaaatga

SEQ ID NO: 544037 - DNA, 120 bp, Artificial Sequence
  ENSG00000167632_1 (sequence is synthesized)
gcgtccctgactacatgcagtgtgctgaggaccaccagacgctgctcgtggtggtccagcctgtgggcatcgtctccgaggagaacttcttcaggatctataagaggatttgctctgtga

SEQ ID NO: 544038 - DNA, 120 bp, Artificial Sequence
  ENSG00000167632_2 (sequence is synthesized)
gtcagatcagcgtgcgggactcccagcgagtcctctacatccgctacaggcaccactacccacccgagaacaacgagtggggtgacttccagacccaccgcaaagtcgtgggcctcatca

SEQ ID NO: 544039 - DNA, 120 bp, Artificial Sequence
  ENSG00000167632_3 (sequence is synthesized)
ccatcacagactgcttctcggccaaggactggccacagacctttgagaagttccacgtgcagaaggagatctacggctccacactgtatgactcccggctctttgtcttcgggctgcagg

SEQ ID NO: 544040 - DNA, 120 bp, Artificial Sequence
  ENSG00000167632_4 (sequence is synthesized)
gggagatcgtggagcagccgcgcaccgacgtggctttctaccccaactacgaggactgccagacggtggagaagagaatcgaggacttcatcgagtcactgttcatcgtgctggagtcca

SEQ ID NO: 544041 - DNA, 120 bp, Artificial Sequence
  ENSG00000167632_5 (sequence is synthesized)
agcgtctggacagagccacagacaagtctggggataagatcccccttctctgtgtcccgtttgagaaaaaggactttgtaggactggacacagacagcagacattacaagaagcggtgcc

SEQ ID NO: 544042 - DNA, 120 bp, Artificial Sequence
  ENSG00000167632_6 (sequence is synthesized)
aaggccgcatgcggaagcacgtgggggacctgtgcctgcaggcagggatgctgcaggactccctggtgcattaccacatgtcggtggagctgctgcgttctgtgaatgactttctgtggc

SEQ ID NO: 544043 - DNA, 120 bp, Artificial Sequence
  ENSG00000167632_7 (sequence is synthesized)
ttggagctgccctggaaggattgtgttcagcttctgtcatctatcactatcctggtggaactggtgggaagagtggagctcggaggttccagggcagcacccttcctgctgaagcagcca

SEQ ID NO: 544044 - DNA, 120 bp, Artificial Sequence
  ENSG00000167632_8 (sequence is synthesized)
atagacaccggccaggggcacaggaagttctcattgatccaggtgccctcaccaccaatggcatcaaccctgacaccagtactgagatcggacgtgctaagaactgccttagccctgaag

SEQ ID NO: 544045 - DNA, 120 bp, Artificial Sequence
  ENSG00000167632_9 (sequence is synthesized)
acataattgacaagtataaagaggcgatttcctattacagcaagtataagaatgcgggagtgattgagttggaagcgtgcatcaaggctgtacgtgtccttgcaattcagaaacggagca

SEQ ID NO: 544046 - DNA, 120 bp, Artificial Sequence
  ENSG00000167632_10 (sequence is synthesized)
tggaagcatcagaatttcttcagaatgcagtttacattaaccttcgacagctttctgaggaagagaaaattcagcgctacagcatcctctccgagctctatgagctgatcggcttccatc

SEQ ID NO: 544047 - DNA, 120 bp, Artificial Sequence
  ENSG00000167632_11 (sequence is synthesized)
gcaagtctgcgttcttcaagcgcgtggccgccatgcagtgcgtggccccaagcatcgcggagcctgggtggagggcctgctacaaactcctcctggaaacgctgcccggctacagtctgt

SEQ ID NO: 544048 - DNA, 120 bp, Artificial Sequence
  ENSG00000167632_12 (sequence is synthesized)
cgctggatcccaaagatttcagcagaggcacgcacagaggctgggctgcggtccagatgcgtttgctccatgaattggtctacgcctcccgaaggatggggaaccctgccctctctgtca

SEQ ID NO: 544049 - DNA, 120 bp, Artificial Sequence
  ENSG00000167632_13 (sequence is synthesized)
gacacctgtccttccttctacagaccatgctggacttcttgtcggatcaggaaaagaaagatgtggcccaaagcctagagaactatacgtccaagtgtcctgggaccatggagcccatcg

SEQ ID NO: 544050 - DNA, 120 bp, Artificial Sequence
  ENSG00000167632_14 (sequence is synthesized)
ccctccctggcggcctcaccctgccaccggtgcccttcaccaagcttcccatcgtcaggcatgtgaaactattgaaccttcctgctagcctccggccacacaaaatgaaaagcttgctgg

SEQ ID NO: 544051 - DNA, 120 bp, Artificial Sequence
  ENSG00000167632_15 (sequence is synthesized)
gtcagaacgtgtcaaccaaaagtcctttcatctattcaccaattatcgcacacaaccgtggagaagagcggaacaagaaaatagatttccagtgggttcaaggagatgtgtgtgaagttc

SEQ ID NO: 544052 - DNA, 120 bp, Artificial Sequence
  ENSG00000167632_16 (sequence is synthesized)
agctgatggtatataacccaatgccgtttgaacttcgagttgaaaacatggggctgctcaccagcggagtggagttcgagtctctccctgcggcgctttctcttccggctgaatctggtc

SEQ ID NO: 544053 - DNA, 120 bp, Artificial Sequence
  ENSG00000167632_17 (sequence is synthesized)
tgttcagtgactgtttgctggataacctgccgggaataaaaaccagtggctccacagtggaagtcattcccgcgttgccaagactgcagatcagcacctctctgcccagatctgcacatt

SEQ ID NO: 544054 - DNA, 120 bp, Artificial Sequence
  ENSG00000167632_18 (sequence is synthesized)
cattgcaaccttcttctggtgatgaaatatctactaatgtatctgtccagctttacaatggagaaagtcagcaactaatcattaaattggaaaatattggaatggaaccattggagaaac

SEQ ID NO: 544055 - DNA, 120 bp, Artificial Sequence
  ENSG00000167632_19 (sequence is synthesized)
tggaggtcacctcgaaagttctcaccactaaagaaaaattgtatggcgacttcttgagctggaagctagaggaaacccttgcccagttccctttgcagcctgggaaggtggccacgttca

SEQ ID NO: 544056 - DNA, 120 bp, Artificial Sequence
  ENSG00000167632_20 (sequence is synthesized)
caatcaacatcaaagtgaagctggatttctcctgccaggagaatctcctgcaggatctcagtgatgatggaatcagtgtgagtggctttcccctgtccagtccttttcggcaggtcgttc

SEQ ID NO: 544057 - DNA, 120 bp, Artificial Sequence
  ENSG00000167632_21 (sequence is synthesized)
ggccccgagtggagggcaaacctgtgaacccacccgagagcaacaaagcaggcgactacagccacgtgaagaccctggaagctgtcctgaatttcaaatactctggaggcccgggccaca

SEQ ID NO: 544058 - DNA, 120 bp, Artificial Sequence
  ENSG00000167632_22 (sequence is synthesized)
ctgaaggatattacaggaatctctccctggggctgcatgtagaagtcgagccgtctgtatttttcacccgagtcagcaccctcccagcaaccagtacccggcagtgtcacctgctcctgg

SEQ ID NO: 544059 - DNA, 120 bp, Artificial Sequence
  ENSG00000167632_23 (sequence is synthesized)
atgtcttcaactccaccgagcatgagctgaccgtcagcaccaggagcagcgaggcactcatcctgcacgccggtgagtgccagcgaatggctattcaagtggacaagttcaactttgaga

SEQ ID NO: 544060 - DNA, 120 bp, Artificial Sequence
  ENSG00000167632_24 (sequence is synthesized)
gtttcccggagtcccctggggagaaggggcaatttgcaaaccccaagcagctggaggaagagcggcgggaagcccgaggcctggagatccacagcaagctgggcatctgctggagaatcc

SEQ ID NO: 544061 - DNA, 120 bp, Artificial Sequence
  ENSG00000167632_25 (sequence is synthesized)
cctccctgaagcgcagtggcgaggcgagtgtggaaggactcctgaaccagctcgtcctggagcacctgcagctggcgcctctgcagtgggatgtgctggtggacggacagccatgtgacc

SEQ ID NO: 544062 - DNA, 120 bp, Artificial Sequence
  ENSG00000167632_26 (sequence is synthesized)
gcgaggctgtggcggcctgccaggtgggcgaccccgtgcgcctggaggtgcggctgaccaaccggagcccgcgcagcgtagggcccttcgccctcactgtggtccccttccaggaccacc

SEQ ID NO: 544063 - DNA, 120 bp, Artificial Sequence
  ENSG00000167632_27 (sequence is synthesized)
agaacggcgtgcacaactacgacctgcacgacaccgtctccttcgtgggctccagcaccttctacctcgacgcggtgcagccgtccggccagtcggcctgcctcggggccctcctcttcc

SEQ ID NO: 544064 - DNA, 120 bp, Artificial Sequence
  ENSG00000167632_28 (sequence is synthesized)
tctacacgggagacttcttcctccacatccggttccacgaggacagcaccagcaaggagctgccaccctcttggttctgcctgcccagtgtgcacgtgtgtgccctggaggcgcaggcct

SEQ ID NO: 544065 - DNA, 120 bp, Artificial Sequence
  ENSG00000167632_29 (sequence is synthesized)
gagcccgcctacttccgtccctctttctgcagggccagaggtgaccctgcctggcctcccacaccccctgcaatgagcaaggccttcactgcagccccatctcctcctcctcccccagac

SEQ ID NO: 544066 - DNA, 120 bp, Artificial Sequence
  ENSG00000167632_30 (sequence is synthesized)
ccctcccagccctctcctcctgttcctcctgtagcatctttgctgggctacgcagaagccccggacatggcagccccaccccatgccacgccccttcctacactgttccctggaccatac

SEQ ID NO: 544067 - DNA, 120 bp, Artificial Sequence
  ENSG00000167632_31 (sequence is synthesized)
acaggctgaagcagaggaaatcccaaagcgggtgcccatccagcccaggtcccaggatccctgcacccatttctgtgacctggggccccagccgtgctgtgctgctcatcccagcagagg

SEQ ID NO: 544068 - DNA, 120 bp, Artificial Sequence
  ENSG00000167632_32 (sequence is synthesized)
gacctccctcgtccagcgacttccctttggccatagaaagaaatggtgagcatgagactgggcacagcctgagggcgtgggcagcttcccaccctccctgggccttggaatcccccaagg

SEQ ID NO: 544069 - DNA, 120 bp, Artificial Sequence
  ENSG00000167632_33 (sequence is synthesized)
ctggttttcttcctggagacccccatgggcaacttggcaggagagatggtgccgtaggaggtcgtggatggttgatgccaagagaggccctccacccgtggtgggcaaatgtccaggcct

SEQ ID NO: 544070 - DNA, 120 bp, Artificial Sequence
  ENSG00000167632_34 (sequence is synthesized)
gggctggcagcccagggctgtttctgggtgctccctggccccagggtggcgtctggttaccatggctgtgtgtgtccatgtctgcaagcagttcttcaataaatggcctgcctccccctc

SEQ ID NO: 544071 - DNA, 120 bp, Artificial Sequence
  ENSG00000167632_35 (sequence is synthesized)
aaagtcgggagtgccatggtgccagctggggatcaagaccgcgcgccacacagggggaagccggcccaggctggggctcgcacctcacgtgcctcccgggccctgcgatcctggaggcgc

SEQ ID NO: 544072 - DNA, 120 bp, Artificial Sequence
  ENSG00000167632_36 (sequence is synthesized)
tcccaggccgcgcgcgccacggtcacccacccacgtggggggcacgaccgtgggagtcacggggggtaccgtgagggtcacagggggtgccgcagggatccacagtgggcttccgcgggg

SEQ ID NO: 544073 - DNA, 120 bp, Artificial Sequence
  ENSG00000167632_37 (sequence is synthesized)
ccaggaagggacgggttctgagttagagatctcacataagcaaacgctgagacaggaatctggtcaccagcagcttgtctgggaggtggaaggaggcctgcaggggagggagatcaccag

SEQ ID NO: 544074 - DNA, 120 bp, Artificial Sequence
  ENSG00000167632_38 (sequence is synthesized)
tgaaggagtgtgactgggcccgagctgccgccacagtgggcagctggccctgcgttcctcagggaggaccggagagagaaagcacacggctcacatctcccttgagggccagagctgggg

SEQ ID NO: 544075 - DNA, 120 bp, Artificial Sequence
  ENSG00000167632_39 (sequence is synthesized)
tgtgtctacactacccacaagagtcctgttctgggggcaggcttctggctgtgttgacccttagctccccaggtcccagggaggataaacagcccttggtccccagcagataccaggctc

SEQ ID NO: 544076 - DNA, 120 bp, Artificial Sequence
  ENSG00000167632_40 (sequence is synthesized)
gtcaggtgcccgttgggcactgaaactcccatggagtattgggggacagagagcggggcttcctaaaggccagttggccaaacaggcagagccaggaagtggctgccctggcctcccatg

SEQ ID NO: 544077 - DNA, 120 bp, Artificial Sequence
  ENSG00000167632_41 (sequence is synthesized)
gggcagagtcatgttggcatcaggaggcctgcggggctgagggaacttcctgaggacctgaagtcccaggcccaaacctccctcgctgggagcaaggtcaccctgtggcctccggcctaa

SEQ ID NO: 544078 - DNA, 120 bp, Artificial Sequence
  ENSG00000167632_42 (sequence is synthesized)
ggaacaaattttttgttccatctgtggcctcctgttgtcgctcagtgaatgatgggagcacactgtgatgtggtgtgggctgggggcatgtgggggcgggtgtccagtggccctcagttc

SEQ ID NO: 544079 - DNA, 120 bp, Artificial Sequence
  ENSG00000167632_43 (sequence is synthesized)
ctggagctcattcagcatctgctcgaggctccccagggaaggcagccccagaaggtctggctgcagtagggggtggagaccccagggcggtctcttcagcccttccgttcaggatgcctc

SEQ ID NO: 544080 - DNA, 120 bp, Artificial Sequence
  ENSG00000167632_44 (sequence is synthesized)
agcgtagttgagggcctggccacctgggctgtttctgaatggaacaaacagcatccatgtgtgtcaacctcaacagagcccaaaaatacgccattgaatgaaacaacacattgcaggatg

SEQ ID NO: 544081 - DNA, 120 bp, Artificial Sequence
  ENSG00000167632_45 (sequence is synthesized)
atgggctcagcccaacctcacttgtgtagacaatgtccccccaaattataaattttctatgcctcagaacgtgtctataacaacatgtttaaaaggtagaaaggatacacatcccctgta

SEQ ID NO: 544082 - DNA, 120 bp, Artificial Sequence
  ENSG00000167632_46 (sequence is synthesized)
gaagagtgacctgaactggagttgcatttgacatctgatgtcagcatgagggtgctggtcaccggggacttgagtacgtactttcctttcaaaagcacaatagatcaagatacaggtaca

SEQ ID NO: 544083 - DNA, 120 bp, Artificial Sequence
  ENSG00000167632_47 (sequence is synthesized)
cacatagctacagatatagatccagccacagatccagattagatatagatgcatatagaagcctagaaaagccaatatggaaaactctggcagtgtttgattctgagtggcaagcatatt

SEQ ID NO: 544084 - DNA, 120 bp, Artificial Sequence
  ENSG00000167632_48 (sequence is synthesized)
ggtgactgtaattatttcttgcagttttctatattttttagtttcccaaactgcaaaaaatacccacaacagttaccagagaaaatgctggatgccacaagaaggaagaacctcaagggg

SEQ ID NO: 544085 - DNA, 120 bp, Artificial Sequence
  ENSG00000167632_49 (sequence is synthesized)
caggaggcaaagttgtcttcttggaggagggggtgttagaaataacccaggcctcctggaaaatgacccaaatacagcctggctctgccagccccaggcccttccccacccccagggcac

SEQ ID NO: 544086 - DNA, 120 bp, Artificial Sequence
  ENSG00000167632_50 (sequence is synthesized)
cctttctgtcccagtagagaaggtgacctggagtcaggccttgtgtgtgctccaagcgtttggagctttaccgtgggatgtggggagccaggggtgttgtttgctggcatttctgtggct

SEQ ID NO: 544087 - DNA, 120 bp, Artificial Sequence
  ENSG00000167632_51 (sequence is synthesized)
gggtctttctggctgtggagctgtgtttgtgggcagtggctgagatggaggacctggggcaggtgtctcagtgacagcgcagtatcctccagcctcttccagggccccacgctactggct

SEQ ID NO: 544088 - DNA, 120 bp, Artificial Sequence
  ENSG00000167632_52 (sequence is synthesized)
acctggcaatacagtccagcagttgctgcttctctaggcccctggtgcattcagaaacctcctgaaggccagcggagggtaagccaggaacagatcatgtccattgcacttcactagctg

SEQ ID NO: 544089 - DNA, 120 bp, Artificial Sequence
  ENSG00000167632_53 (sequence is synthesized)
agcgagttggttctgcccttctgatccttggtccctcagggccaggacaggcccggtgaccccataatcatgcagccgtcatgctccgtcatctgaaattcacaaggaaggcaaggattc

SEQ ID NO: 544090 - DNA, 120 bp, Artificial Sequence
  ENSG00000167632_54 (sequence is synthesized)
aaaggaagatgtctgagatgctgaactccagctcagccacttgtcaactccttgaccttggacaagttacttaaattaagccttgattttttttcatctgaataaatagagataaaaata

SEQ ID NO: 544091 - DNA, 120 bp, Artificial Sequence
  ENSG00000167632_55 (sequence is synthesized)
cttatttcatggacactttcatatcagtttatttgatttaacctcctagatttttttttagcacatgatagcaacttcttaataaatactgggtcccttctcctagccttcccattgctg

SEQ ID NO: 544092 - DNA, 120 bp, Artificial Sequence
  ENSG00000167632_56 (sequence is synthesized)
ttctttttaattccatccacatgtcctgtgcctgaaatatcctgtgccatgtgcctgaaattccattcttctcctggaacccttaacaggccacattgctatgctccgttagtcccctgc

SEQ ID NO: 544093 - DNA, 120 bp, Artificial Sequence
  ENSG00000167632_57 (sequence is synthesized)
atggcttaatgtattaggtaacatgaagcatgtaaggaagaactttctaacacaggtgctgaaatgggacaggaaatgctgatggagtgagctctttgtcaatagaagtattcaagcaaa

SEQ ID NO: 544094 - DNA, 120 bp, Artificial Sequence
  ENSG00000167632_58 (sequence is synthesized)
taatcagaagtttccattttacattgtgtaatgctgcagtgtctcttaattatttatttctgtaagtattcatgtcttgctctctaatgcatagtactatatgcctaaaatgttttcttt

SEQ ID NO: 544095 - DNA, 120 bp, Artificial Sequence
  ENSG00000167632_59 (sequence is synthesized)
ttctgattcaaaacagtgtaggtttagtataataaatttggaaaagagagaaaaaaggctctcatggcctgcgtactcacagataatgattgttaatattttatatctattttctggttc

SEQ ID NO: 544096 - DNA, 120 bp, Artificial Sequence
  ENSG00000167632_60 (sequence is synthesized)
agctctctcagttgctccggactcggagcaagcagcctccacgccgtcatacacacgaggcacttgaggccagtcgtagtccccacccatctcttcttggatatgtttccctgtgaataa

SEQ ID NO: 544097 - DNA, 120 bp, Artificial Sequence
  ENSG00000167632_61 (sequence is synthesized)
tgccaggagaatctcctgcaggatctcagtgatggtaagcgctttcctaattttaattagcacgtcagggtcctagatactgtgtagcaacccccatcccttgatgcctgctgtttgctg

SEQ ID NO: 544098 - DNA, 120 bp, Artificial Sequence
  ENSG00000167632_62 (sequence is synthesized)
tttgtaactcacttgtcattcattaactcaagctgcctgagacatctcctgggcactttgttaacagagtgtgttactgtatgtgtctgaaagtaataaaagtactttttatctaaatga

SEQ ID NO: 544099 - DNA, 120 bp, Artificial Sequence
  ENSG00000167632_63 (sequence is synthesized)
acagcgtggcggcgcagccgagggaaaggtcagcctgctcctgcttccctggagctctcaggagcaccttcctggtgctgggtctcctttggacactgaaagttttccaacacccgtaag

SEQ ID NO: 544100 - DNA, 120 bp, Artificial Sequence
  ENSG00000167632_64 (sequence is synthesized)
agcgagtcagactggttcctactgtgtcgggcgtgcacccatcaccccatttatctcctccacatctccctgaccagcactgtggctcccatgaaggaaattgagtctcagccatgaggg

SEQ ID NO: 544101 - DNA, 120 bp, Artificial Sequence
  ENSG00000167632_65 (sequence is synthesized)
gtttcagagaaagctggtggaaaaagcagctttgaatcacccatctcaagaagatcatagagcctgctgcctcactgagaatgtaaattgccagaggaataattggaaaccatgtagaaa

SEQ ID NO: 544102 - DNA, 120 bp, Artificial Sequence
  ENSG00000167632_66 (sequence is synthesized)
gaataatgcatgaaccctgtcctgagagctcacggctcagtgtaggaggcagacatgtgcactgaattgaactgaattccgactgcacatcctgtattatttctactgcatgttgactaa

SEQ ID NO: 544103 - DNA, 120 bp, Artificial Sequence
  ENSG00000167632_67 (sequence is synthesized)
gtgaaaatgaggttcaacttgtcttaatatattctatcaggcaaaagaaacaaattccccagggaggggtagtccagctgctgccactcctggagtgagcctgtggacagtctctccagc

SEQ ID NO: 544104 - DNA, 120 bp, Artificial Sequence
  ENSG00000167632_68 (sequence is synthesized)
aactcacatttcagataaggaagaaatgggtcaaaacattttaaagctgctgctttccctgacaacatcctttgcttgttaagcacgcttcaatttgatttggttcccaggcttgctttg

SEQ ID NO: 544105 - DNA, 120 bp, Artificial Sequence
  ENSG00000167632_69 (sequence is synthesized)
atctccctgaccagcactgtggctcccatgaaggaaattgagtctcagccatgaggggtagggccagggaccaacccaggactaatgacgccacattgttgaggactggagcctggggtc

SEQ ID NO: 544106 - DNA, 120 bp, Artificial Sequence
  ENSG00000167632_70 (sequence is synthesized)
agaggctggccctgccactcccagcatccagaaggggagactgtgtgacctgagggccatgtactaatctgtgcagctggtgtgacggaacctgctgcagaccattgctgtcaggatgag

SEQ ID NO: 544107 - DNA, 120 bp, Artificial Sequence
  ENSG00000167632_71 (sequence is synthesized)
agtacctacccctttcaaaacataagtaaattttggaagttcaataactcaccagagattgtgcaactagaggcatagtcaggatcccaaaacttgttattttcctgttgactgcttcaa

SEQ ID NO: 544108 - DNA, 120 bp, Artificial Sequence
  ENSG00000167632_72 (sequence is synthesized)
ctgagatcacatctgcaaggtgcagacatagcttctggccctggaaggtgtcagcaaaggtgaatgccccttgcccgtttcctgctggaagacctcatgccacgctgctacctgacctca

SEQ ID NO: 544109 - DNA, 120 bp, Artificial Sequence
  ENSG00000167632_73 (sequence is synthesized)
aggctgggtctgccaagcaagctgtcgccctgcttcctctttgacggtgctgttatcctctggacgctgccatcagtggctgctttacctctcagaaatcctcagaaagaatattccagg

SEQ ID NO: 544110 - DNA, 120 bp, Artificial Sequence
  ENSG00000167632_74 (sequence is synthesized)
aaagatctgctgctccctttgattgcaggtgaccatttgatctccgggagccctggctccctcgcttggaacaggagccacagctgccgcgtgggatgatgatgtgctggtggacggaca

SEQ ID NO: 544111 - DNA, 120 bp, Artificial Sequence
  ENSG00000167632_75 (sequence is synthesized)
gagtcccaacgcctctgtatcctgcactcgaggcctttgatgccttccccttggaccatcatttcatcggttctctgtctcattgctgccttgcgacccccgtctgcccttggaggccag

SEQ ID NO: 544112 - DNA, 120 bp, Artificial Sequence
  ENSG00000167633_0 (sequence is synthesized)
ggggcgcagccgcctgtctgcaccggcagcaccatgtcgctcatggtcgtcagcatggcgtgtgttgggttgttcttggtccagagggccggtccacacatgggtggtcaggacaaaccc

SEQ ID NO: 544113 - DNA, 120 bp, Artificial Sequence
  ENSG00000167633_1 (sequence is synthesized)
ttcctgtctgcctggcccagcgctgtggtgcctcgaggaggacacgtgactcttcggtgtcactatcgtcataggtttaacaatttcatgctatacaaagaagacagaatccacattccc

SEQ ID NO: 544114 - DNA, 120 bp, Artificial Sequence
  ENSG00000167633_2 (sequence is synthesized)
atcttccatggcagaatattccaggagagcttcaacatgagccctgtgaccacagcacatgcagggaactacacatgtcggggttcacacccacactcccccactgggtggtcggcaccc

SEQ ID NO: 544115 - DNA, 120 bp, Artificial Sequence
  ENSG00000167633_3 (sequence is synthesized)
agcaaccccgtggtgatcatggtcacaggaaaccacagaaaaccttccctcctggcccacccaggtcccctggtgaaatcaggagagagagtcatcctgcaatgttggtcagatatcatg

SEQ ID NO: 544116 - DNA, 120 bp, Artificial Sequence
  ENSG00000167633_4 (sequence is synthesized)
tttgagcacttctttctgcacaaagaggggatctctaaggacccctcacgcctcgttggacagatccatgatggggtctccaaggccaatttctccatcggtcccatgatgcttgccctt

SEQ ID NO: 544117 - DNA, 120 bp, Artificial Sequence
  ENSG00000167633_5 (sequence is synthesized)
gcagggacctacagatgctacggttctgttactcacaccccctatcagttgtcagctcccagtgatcccctggacatcgtggtcacaggtccatatgagaaaccttctctctcagcccag

SEQ ID NO: 544118 - DNA, 120 bp, Artificial Sequence
  ENSG00000167633_6 (sequence is synthesized)
ccgggccccaaggttcaggcaggagagagcgtgaccttgtcctgtagctcccggagctcctatgacatgtaccatctatccagggaggggggagcccatgaacgtaggctccctgcagtg

SEQ ID NO: 544119 - DNA, 120 bp, Artificial Sequence
  ENSG00000167633_7 (sequence is synthesized)
cttcggctctttccgtcactctccctacgagtggtcagacccgagtgacccactgcttgtttctgtcacaggaaacccttcaagtagttggccttcacccacagaaccaagctccaaatc

SEQ ID NO: 544120 - DNA, 120 bp, Artificial Sequence
  ENSG00000167633_8 (sequence is synthesized)
tggtaaccccagacacctgcacattctgattgggacctcagtggtcatcatcctcttcatcctcctcctcttctttctccttcatctctggtgctccaacaaaaaaaatgctgctgtaat

SEQ ID NO: 544121 - DNA, 120 bp, Artificial Sequence
  ENSG00000167633_9 (sequence is synthesized)
ggaccaagagcctgcagggaacagaacagccaacagcgaggactctgatgaacaagaccctgaggaggtgacatacgcacagttggatcactgcgttttcacacagagaaaaatcactcg

SEQ ID NO: 544122 - DNA, 120 bp, Artificial Sequence
  ENSG00000167633_10 (sequence is synthesized)
cccttctcagaggcccaagacaccccctacagataccatcttgtacacggaacttccaaatgctaagcccagatccaaagttgtctcctgcccatgagcaccacagtcaggccttgagga

SEQ ID NO: 544123 - DNA, 120 bp, Artificial Sequence
  ENSG00000167633_11 (sequence is synthesized)
cgtcttctagggagacaacagccctgtctcaaaaccgagttgccagctcccatgtaccagcagctggaatctgaaggcgtgagtcttcatcttagggcatcgctcctcctcacgccacaa

SEQ ID NO: 544124 - DNA, 120 bp, Artificial Sequence
  ENSG00000167633_12 (sequence is synthesized)
atctggtgcctctctcttgcttacaaatgtctaggtccccactgcctgctggaaagaaaacacactcctttgcttagcccacagttctccatttcacttgacccctgcccacctctccaa

SEQ ID NO: 544125 - DNA, 120 bp, Artificial Sequence
  ENSG00000167633_13 (sequence is synthesized)
cctaactggcttacttcctagtctacttgaggctgcaatcacactgaggaactcacaattccaaacatacaagaggctccctcttgacgtggcacttacccacgtgctgttccaccttcc

SEQ ID NO: 544126 - DNA, 120 bp, Artificial Sequence
  ENSG00000167633_14 (sequence is synthesized)
ctcatgctgtttcacctttcttcggactattttccagccttctgtcagcagtgaaacttataaaattttttgtgatttcaatgtagctgtctcctcttcaaataaacatgtctgccctca

SEQ ID NO: 544127 - DNA, 120 bp, Artificial Sequence
  ENSG00000167634_0 (sequence is synthesized)
ttcttcagccttaacctaaggtctcatactcggagcactatgacatcgccccagctagagtggactctgcagacccttctggagcagctgaacgaggatgaattaaagagtttcaaatcc

SEQ ID NO: 544128 - DNA, 120 bp, Artificial Sequence
  ENSG00000167634_1 (sequence is synthesized)
cttttatgggcttttcccctcgaagacgtgctacagaagaccccatggtctgaggtggaagaggctgatggcaagaaactggcagaaattctggtcaacacctcctcagaaaattggata

SEQ ID NO: 544129 - DNA, 120 bp, Artificial Sequence
  ENSG00000167634_2 (sequence is synthesized)
aggaatgcgactgtgaacatcttggaagagatgaatctcacggaattgtgtaagatggcaaaggctgagatgatggaggacggacaggtgcaagaaatagataatcctgagctgggagat

SEQ ID NO: 544130 - DNA, 120 bp, Artificial Sequence
  ENSG00000167634_3 (sequence is synthesized)
gcagaagaagactcggagttagcaaagccaggtgaaaaggaaggatggagaaattcaatggagaaacagtctttggtctggaagaacaccttttggcaaggagacattgacaatttccat

SEQ ID NO: 544131 - DNA, 120 bp, Artificial Sequence
  ENSG00000167634_4 (sequence is synthesized)
gacgacgtcactctgagaaaccaacggttcattccattcttgaatcccagaacacccaggaagctaacaccttacacggtggtgctgcacggccccgcaggcgtggggaaaaccacgctg

SEQ ID NO: 544132 - DNA, 120 bp, Artificial Sequence
  ENSG00000167634_5 (sequence is synthesized)
gccaaaaagtgtatgctggactggacagactgcaacctcagcccgacgctcagatacgcgttctacctcagctgcaaggagctcagccgcatgggcccctgcagttttgcagagctgatc

SEQ ID NO: 544133 - DNA, 120 bp, Artificial Sequence
  ENSG00000167634_6 (sequence is synthesized)
tccaaagactggcctgaattgcaggatgacattccaagcatcctagcccaagcacagagaatcctgttcgtggtcgatggccttgatgagctgaaagtcccacctggggcgctgatccag

SEQ ID NO: 544134 - DNA, 120 bp, Artificial Sequence
  ENSG00000167634_7 (sequence is synthesized)
gacatctgcggggactgggagaagaagaagccggtgcccgtcctcctggggagtttgctgaagaggaagatgttacccagggcagccttgctggtcaccacgcggcccagggcactgagg

SEQ ID NO: 544135 - DNA, 120 bp, Artificial Sequence
  ENSG00000167634_8 (sequence is synthesized)
gacctccagctcctggcgcagcagccgatctacgtaagggtggagggcttcctggaggaggacaggagggcctatttcctgagacactttggagacgaggaccaagccatgcgtgccttt

SEQ ID NO: 544136 - DNA, 120 bp, Artificial Sequence
  ENSG00000167634_9 (sequence is synthesized)
gagctaatgaggagcaacgcggccctgttccagctgggctcggcccccgcggtgtgctggattgtgtgcacgactctgaagctgcagatggagaagggggaggacccggtccccacctgc

SEQ ID NO: 544137 - DNA, 120 bp, Artificial Sequence
  ENSG00000167634_10 (sequence is synthesized)
ctcacccgcacggggctgttcctgcgtttcctctgcagccggttcccgcagggcgcacagctgcggggcgcgctgcggacgctgagcctcctggccgcgcagggcctgtgggcgcagatg

SEQ ID NO: 544138 - DNA, 120 bp, Artificial Sequence
  ENSG00000167634_11 (sequence is synthesized)
tccgtgttccaccgagaggacctggaaaggctcggggtgcaggagtccgacctccgtctgttcctggacggagacatcctccgccaggacagagtctccaaaggctgctactccttcatc

SEQ ID NO: 544139 - DNA, 120 bp, Artificial Sequence
  ENSG00000167634_12 (sequence is synthesized)
cacctcagcttccagcagtttctcactgccctgttctacgccctggagaaggaggagggggaggacagggacggccacgcctgggacatcggggacgtacagaagctgctttccggagaa

SEQ ID NO: 544140 - DNA, 120 bp, Artificial Sequence
  ENSG00000167634_13 (sequence is synthesized)
cgagaagagagccaaggagttggaggccacttttggctgccggatgtcaccggacatcaaacaggaattgctgcaatgcaaagcacatcttcatgcaaataagcccttatccgtgaccga

SEQ ID NO: 544141 - DNA, 120 bp, Artificial Sequence
  ENSG00000167634_14 (sequence is synthesized)
cctgaaggaggtcttgggctgcctgtatgagtctcaggaggaggagctggcgaaggtggtggtggccccgttcaaggaaatttctattcacctgacaaatacttctgaagtgatgcattg

SEQ ID NO: 544142 - DNA, 120 bp, Artificial Sequence
  ENSG00000167634_15 (sequence is synthesized)
ttccttcagcctgaagcattgtcaagacttgcagaaactctcactgcaggtagcaaagggggtgttcctggagaattacatggattttgaactggacattgaatttgaaagctcaaacag

SEQ ID NO: 544143 - DNA, 120 bp, Artificial Sequence
  ENSG00000167634_16 (sequence is synthesized)
caacctcaagtttctggaagtgaaacaaagcttcctgagtgactcttctgtgcggattctttgtgaccacgtaacccgtagcacctgtcatctgcagaaagtggagattaaaaacgtcac

SEQ ID NO: 544144 - DNA, 120 bp, Artificial Sequence
  ENSG00000167634_17 (sequence is synthesized)
ccctgacaccgcgtaccgggacttctgtcttgctttcattgggaagaagaccctcacgcacctgaccctggcagggcacatcgagtgggaacgcacgatgatgctgatgctgtgtgacct

SEQ ID NO: 544145 - DNA, 120 bp, Artificial Sequence
  ENSG00000167634_18 (sequence is synthesized)
gctcagaaatcataaatgcaacctgcagtacctgaggttgggaggtcactgtgccaccccggagcagtgggctgaattcttctatgtcctcaaagccaaccagtccctgaagcacctgcg

SEQ ID NO: 544146 - DNA, 120 bp, Artificial Sequence
  ENSG00000167634_19 (sequence is synthesized)
tctctcagccaatgtgctcctggatgagggtgccatgttgctgtacaagaccatgacacgcccaaaacacttcctgcagatgttgtcgttggaaaactgtcgtcttacagaagccagttg

SEQ ID NO: 544147 - DNA, 120 bp, Artificial Sequence
  ENSG00000167634_20 (sequence is synthesized)
caaggaccttgctgctgtcttggttgtcagcaagaagctgacacacctgtgcttggccaagaaccccattggggatacaggggtgaagtttctgtgtgagggcttgagttaccctgattg

SEQ ID NO: 544148 - DNA, 120 bp, Artificial Sequence
  ENSG00000167634_21 (sequence is synthesized)
taaactgcagaccttggtgttacagcaatgcagcataaccaagcttggctgtagatatctctcagaggcgctccaagaagcctgcagcctcacaaacctggacttgagtatcaaccagat

SEQ ID NO: 544149 - DNA, 120 bp, Artificial Sequence
  ENSG00000167634_22 (sequence is synthesized)
agctcgtggattgtggattctctgtcaggcattagagaatccaaactgtaacctaaaacacctacgcctctggagctgctccctcatgcctttctattgtcagcatcttggatctgctct

SEQ ID NO: 544150 - DNA, 120 bp, Artificial Sequence
  ENSG00000167634_23 (sequence is synthesized)
cctcagcaatcagaagcttgaaactctggacctgggccagaatcatttgtggaagagtggcataattaagctctttggggttctaagacaaagaactggatccttgaagatactcaggtt

SEQ ID NO: 544151 - DNA, 120 bp, Artificial Sequence
  ENSG00000167634_24 (sequence is synthesized)
gaagacctatgaaactaatttggaaatcaagaagctgttggaggaagtgaaagaaaagaatcccaagctgactattgattgcaatgcttccggggcaacggcacctccgtgctgtgactt

SEQ ID NO: 544152 - DNA, 120 bp, Artificial Sequence
  ENSG00000167634_25 (sequence is synthesized)
tttttgctgagcagcctgggatcgctctacgaattacacaggaagcgggattcgggtctctaagatgtcttatgaatgcaggtcagagggtcacatgttaacactagagtctgtcgagag

SEQ ID NO: 544153 - DNA, 120 bp, Artificial Sequence
  ENSG00000167634_26 (sequence is synthesized)
gtaggatttgacactggttttctcactatttttgggagattctgcacgagtcacgcacccccttcacatgacgctatgtactttctcacagggataataaagttagagcactctcgttgc

SEQ ID NO: 544154 - DNA, 120 bp, Artificial Sequence
  ENSG00000167634_27 (sequence is synthesized)
atcttgactgcctgttaaacttacctatgtggagcctcatttcaaagcacgaacgcctagagattctgcttgattggttacactgggactgcccagaccctggagttctttcgagagtcc

SEQ ID NO: 544155 - DNA, 120 bp, Artificial Sequence
  ENSG00000167634_28 (sequence is synthesized)
cagataactgtgattgcggccgaggctgagaatcaccgcttagaagcctcagctgtgattggctaccttctcccatcaccccagagtttttaaagctgggagccaggtaccctgcaaaac

SEQ ID NO: 544156 - DNA, 120 bp, Artificial Sequence
  ENSG00000167634_29 (sequence is synthesized)
ccaaaatgtgtatttcctgttctgtcgcctatcacacctggcccgggtggtctaggaagggaattgcacattaatctcacctggggagattcagcaagccgtaattctccaaagcccact

SEQ ID NO: 544157 - DNA, 120 bp, Artificial Sequence
  ENSG00000167635_0 (sequence is synthesized)
gacattttggtctttgtccgcgggtcagtacggcccctgggtccacgtggcgcgaaagtaggaggaagacataggccaaggagccagacttcctgtgttaactccttcctctgccacttt

SEQ ID NO: 544158 - DNA, 120 bp, Artificial Sequence
  ENSG00000167635_1 (sequence is synthesized)
ttaccttggggacctcagttaatatgatcctctgttgaagcaagaagacaaactgtatggtggagaaagaagtgggaaggatctgcgcggaagaagcctgagaagatgatgcacagatag

SEQ ID NO: 544159 - DNA, 120 bp, Artificial Sequence
  ENSG00000167635_2 (sequence is synthesized)
agaggcaccaggacttgagaggcaccaggacttgggaggcatgttgatccatctccaggaaagactgagaaaaagagcgttgaatataagaaaaaatacttcctctgttctcagatcgta

SEQ ID NO: 544160 - DNA, 120 bp, Artificial Sequence
  ENSG00000167635_3 (sequence is synthesized)
tttgttttaaggccacacctttttgaagttttcagtttgaaacacaacctggactgaaatcatgagggaggttgtgtaggaaagaatcatcaagggacttagttgggagcttctctacca

SEQ ID NO: 544161 - DNA, 120 bp, Artificial Sequence
  ENSG00000167635_4 (sequence is synthesized)
cagcttactccttatggtattaaccccctttaagtgtaaatgtctttggtttaaaacgtttgtacctcatctgttaccagagtgttcatactggagagaaaccctatgaatttactgaat

SEQ ID NO: 544162 - DNA, 120 bp, Artificial Sequence
  ENSG00000167635_5 (sequence is synthesized)
gtgggggaactgttactcatatgttgcatttcgtcgaacgtgcaagtcatgctgaagagaaaccctgtgcttctaaggagtattgacaagcccttagctagatgacaatctcattgagaa

SEQ ID NO: 544163 - DNA, 120 bp, Artificial Sequence
  ENSG00000167635_6 (sequence is synthesized)
gcagaaaattcatgctggagagaaactagtgaaggtagcaatacttcattgaatattagaaaatttttctagagagaaagcattgaatatactgagtatgataacatttcctctcaaacc

SEQ ID NO: 544164 - DNA, 120 bp, Artificial Sequence
  ENSG00000167635_7 (sequence is synthesized)
ttatcccttactctgcatttgggagatcatacacagagaagccttataaatgtaagagatgtggaaatatcttcagccaaaagtaaatcctcactcatcaagaaatttttactggagaga

SEQ ID NO: 544165 - DNA, 120 bp, Artificial Sequence
  ENSG00000167635_8 (sequence is synthesized)
aaccttgtgaatgtgggaaagcttccattcagatgtcacacctcagccagcagagaatttacagtggggaaaacccctttgcctgtaaggtatgtggaaaagtcttcagccacaaatcaa

SEQ ID NO: 544166 - DNA, 120 bp, Artificial Sequence
  ENSG00000167635_9 (sequence is synthesized)
acctcactgagcatgagcattttcacacgagagagaaaccttttgaatgtaacgagtgtggaaaagcctttagccaaaagcagtatgtcattaaacatcagaacacccatactggcgaga

SEQ ID NO: 544167 - DNA, 120 bp, Artificial Sequence
  ENSG00000167635_10 (sequence is synthesized)
agcttttcgaatgtaatgaatgtggaaaatcatttagccagaaggaaaacctccttacgcaccagaaaattcacactggagaaaaaccttttgagtgtaaagattgcgggaaagctttca

SEQ ID NO: 544168 - DNA, 120 bp, Artificial Sequence
  ENSG00000167635_11 (sequence is synthesized)
ttcagaagtcaaacctcatcagacaccagagaactcacacaggagagaagccctttgtatgtaaggagtgtggaaaaaccttcagtggcaaatccaaccttactgagcatgagaaaatcc

SEQ ID NO: 544169 - DNA, 120 bp, Artificial Sequence
  ENSG00000167635_12 (sequence is synthesized)
atgagaaaatccatattggagagaagccttttaaatgtagtgaatgtggaacagcctttggccagaagaagtacctcataaaacatcagaacattcacactggagagaaaccctatgaat

SEQ ID NO: 544170 - DNA, 120 bp, Artificial Sequence
  ENSG00000167635_13 (sequence is synthesized)
aaagccttctctcagagctcatctctcactgtgcatgtgagaagccatacaggggagaagccctatggttgtaatgaatgtgggaaagctttctctcagttctcaacccttgctctgcat

SEQ ID NO: 544171 - DNA, 120 bp, Artificial Sequence
  ENSG00000167635_14 (sequence is synthesized)
ttgagaatacacacaggtaagaagccttatcagtgcagtgaatgtgggaaagctttcagccagaagtcacaccacattagacaccagaaaattcatactcactaaaaaccccatgaaagc

SEQ ID NO: 544172 - DNA, 120 bp, Artificial Sequence
  ENSG00000167635_15 (sequence is synthesized)
cttgaaagtgggaaagctttcattagaaatttgcacctcatcatgccccagaaataatccttctgaagcaaagcaccacgaatgaggttaactttaacaagtactaaaaacttaagggac

SEQ ID NO: 544173 - DNA, 120 bp, Artificial Sequence
  ENSG00000167635_16 (sequence is synthesized)
accagaaaatttgtactgaagagaaagacatgcatatgattaaaaccctgtgtccaacagagaaacctgcagcagagataatggtgaaagtttaggcacattttcactaaaagtgggaac

SEQ ID NO: 544174 - DNA, 120 bp, Artificial Sequence
  ENSG00000167635_17 (sequence is synthesized)
agaaaatggaggcctgttttttattgctaccaccatagatctggagatcttcgccagtaacaagaaaaattaagttgtaaatattggaaaggaacagacaaaaatagatgacatggtcat

SEQ ID NO: 544175 - DNA, 120 bp, Artificial Sequence
  ENSG00000167635_18 (sequence is synthesized)
ctacaactaatattaagactcctgtggtattgattgagcagagcagaagagatttcaaaaaaagacctatgcatttattagaatttggaatatgatacaagtggcatcaggaaatgagga

SEQ ID NO: 544176 - DNA, 120 bp, Artificial Sequence
  ENSG00000167635_19 (sequence is synthesized)
aataatggaactattttttttaagtggaggtagtttgttctccaagggggaaaaatagaccatgaactatacacaaaagtgaatccagagattaaaaacagaaatatggaaaagctatgt

SEQ ID NO: 544177 - DNA, 120 bp, Artificial Sequence
  ENSG00000167635_20 (sequence is synthesized)
actaaaatgcatatgaccttgggaatagggaaacattccttggaacaatttgagaaatacttagcggttctacttatgagtatgaatgctcaggaaatacgcactaggatatttactgtg

SEQ ID NO: 544178 - DNA, 120 bp, Artificial Sequence
  ENSG00000167635_21 (sequence is synthesized)
gcttgatttgtagtagccaaaaattagaaacaactgagaaagcccatcacgaacaatatgggaaattcttatgtaatactatatatctgtaaaatgcaacaaatgaaatccacatgtatt

SEQ ID NO: 544179 - DNA, 120 bp, Artificial Sequence
  ENSG00000167635_22 (sequence is synthesized)
aacagaaagatcccagaattgttgaggggggatcaagttgcagaatgatacagatagtacaatgacttttttgtaaatttgaattaaaagtttcctcataaaactcagtactatctattg

SEQ ID NO: 544180 - DNA, 120 bp, Artificial Sequence
  ENSG00000167635_23 (sequence is synthesized)
gtaatggatgcatatatgtatgtacatgtttttgaaacggattggaaggatacagaccaaactcttgatagtggtcacctgtgaagagtggagaagggaaaataatgagtgtgggaggtg

SEQ ID NO: 544181 - DNA, 120 bp, Artificial Sequence
  ENSG00000167635_24 (sequence is synthesized)
ggatgggtattggttaaaggggacttcagctttttatataaacatccacttctctttcaaaagacttcaagtaaatataagaagatactgattgattctggattgtggtatagggatatc

SEQ ID NO: 544182 - DNA, 120 bp, Artificial Sequence
  ENSG00000167635_25 (sequence is synthesized)
ttgtcttattttttgtacttttctgtatttttaaaatttctcaaaataggaatgggagtgaggatgggaatgctgtatctgtggaagtcatgttatactggattcatttccaattaaata

SEQ ID NO: 544183 - DNA, 120 bp, Artificial Sequence
  ENSG00000167635_26 (sequence is synthesized)
ctaaacattttatagaaaatatttctaaaattttatcacggatgaatggatggacttgctctctatgtaatatgaaattaatctattttattaaaatttaaaaggacagcacaatccaaa

SEQ ID NO: 544184 - DNA, 120 bp, Artificial Sequence
  ENSG00000167635_27 (sequence is synthesized)
aggactcccagacccctcaccttctgcctcccctggtcgcgtccgggtccttgcggagctaactagctcgccacgacgtcaagaacgacgtaacgtcaggccgctgtgggctctgggaat

SEQ ID NO: 544185 - DNA, 120 bp, Artificial Sequence
  ENSG00000167635_28 (sequence is synthesized)
tgtagtccagagctagatcggccacggacagaatggcgttctcttatctctgagtcggggcctggctcgttttgacatttttgcgcccacgagtcttcggagagggcgtcgccactccag

SEQ ID NO: 544186 - DNA, 120 bp, Artificial Sequence
  ENSG00000167635_29 (sequence is synthesized)
accttccagcaagcttgaagtcatctgacgctaaaggactacttacctcaagagctccatcgtcacagaaggaggcggccaagttcgcggggggaggggaggagacagagagtcgaccag

SEQ ID NO: 544187 - DNA, 120 bp, Artificial Sequence
  ENSG00000167635_30 (sequence is synthesized)
taaagcctcaagggaaatgtagtccaaggcctgagaagcgacgttgctggtaatagaaggtaattcagtaccagcctgggcctggccgcggtgaccgaggcgggccgcgtcgcggagact

SEQ ID NO: 544188 - DNA, 120 bp, Artificial Sequence
  ENSG00000167635_31 (sequence is synthesized)
tctgggagtgcttcctcgctctccgagtgcgcaagcgcagcgcaccgagtggacattttggtctttgtccgcgggtcagtacggcccctgggtccacgtggcgcgaaagtaggagttaat

SEQ ID NO: 544189 - DNA, 120 bp, Artificial Sequence
  ENSG00000167635_32 (sequence is synthesized)
tctgaaaggtaattctccctttctcccatttctggatgtgtgtagactttaaatggtttaatgagcatggctttgaagtttaggattctaatggccctagtccctttgcccacatgattg

SEQ ID NO: 544190 - DNA, 120 bp, Artificial Sequence
  ENSG00000167635_33 (sequence is synthesized)
tgtgtgctttagtcactaaggcagaaggtcattactttgttctgtgcatctttggaagttgcaccctcattcttcagaaggccaggagaccccagggctcagcctgagttctaggatggt

SEQ ID NO: 544191 - DNA, 120 bp, Artificial Sequence
  ENSG00000167637_0 (sequence is synthesized)
agttctggcttttctggattctgtgcttcaccaatagaggaatcccatggagcattaattagttcttgcaattccagaaccatgactgatgggttggtgacattcagggatgtggccatc

SEQ ID NO: 544192 - DNA, 120 bp, Artificial Sequence
  ENSG00000167637_1 (sequence is synthesized)
gacttctctcaggaggagtgggaatgcctggaccctgctcagagggacttgtacgtggatgtaatgttggagaactatagtaacttggtgtcactggatttggagtcaaaaacgtatgag

SEQ ID NO: 544193 - DNA, 120 bp, Artificial Sequence
  ENSG00000167637_2 (sequence is synthesized)
accaaaaaaatattttcagaaaatgatatttttgaaataaatttttcccagtgggagatgaaggacaaaagtaaaacccttggccttgaggcatccatcttcagaaataattggaagtgc

SEQ ID NO: 544194 - DNA, 120 bp, Artificial Sequence
  ENSG00000167637_3 (sequence is synthesized)
aaaagcatattcgagggactaaaaggacatcaagagggatacttcagtcaaatgataatcagctatgaaaaaataccttcttacagaaaaagtaaatctcttactccacatcaaagaatt

SEQ ID NO: 544195 - DNA, 120 bp, Artificial Sequence
  ENSG00000167637_4 (sequence is synthesized)
cataatacagagaaatcctatgtttgtaaggaatgtgggaaggcttgcagtcatggctcaaaacttgttcaacatgagagaactcatacagctgaaaaacactttgaatgtaaagaatgt

SEQ ID NO: 544196 - DNA, 120 bp, Artificial Sequence
  ENSG00000167637_5 (sequence is synthesized)
gggaagaattatttaagtgcctatcaactcaatgtgcatcagagatttcatactggtgagaaaccctatgagtgtaaggaatgtgggaagacctttagctggggatcaagccttgttaaa

SEQ ID NO: 544197 - DNA, 120 bp, Artificial Sequence
  ENSG00000167637_6 (sequence is synthesized)
catgagagaattcacactggtgagaaaccctatgaatgtaaagaatgtgggaaggcctttagtcgtggctatcaccttacccaacatcagaaaattcatactggtgtgaaatcttataaa

SEQ ID NO: 544198 - DNA, 120 bp, Artificial Sequence
  ENSG00000167637_7 (sequence is synthesized)
tgtaaggaatgtgggaaggcctttttttggggctcaagccttgctaaacatgagataattcatacaggtgagaaaccttataaatgtaaagaatgtgggaaggccttcagtcgtggctat

SEQ ID NO: 544199 - DNA, 120 bp, Artificial Sequence
  ENSG00000167637_8 (sequence is synthesized)
gaaaatccatactggtaagaaaccttatgaatgtaaaatatgtggaaaggctttttgttggggctatcaacttactcgacatcagatatttcatactggtgagaaaccctatgaatgcaa

SEQ ID NO: 544200 - DNA, 120 bp, Artificial Sequence
  ENSG00000167637_9 (sequence is synthesized)
ggaatgtgggaaggcttttaattgcggatcaagtcttattcaacatgaaagaattcatactggtgagaaaccttatgaatgtaaagaatgtggaaaggcctttagtcgtggctatcacct

SEQ ID NO: 544201 - DNA, 120 bp, Artificial Sequence
  ENSG00000167637_10 (sequence is synthesized)
ttctcaacatcagaaaatccatactggtgagaaaccttttgaatgtaaggaatgtgggaaggcctttagttggggttcaagccttgttaaacatgagagagttcatactggtgagaaatc

SEQ ID NO: 544202 - DNA, 120 bp, Artificial Sequence
  ENSG00000167637_11 (sequence is synthesized)
gagagttcatactggtgagaaatcccatgaatgtaaagaatgcggaaagaccttttgtagtgggtatcaacttactcgacatcaggtatttcacactggtgagaaaccctatgaatgtaa

SEQ ID NO: 544203 - DNA, 120 bp, Artificial Sequence
  ENSG00000167637_12 (sequence is synthesized)
tggatcaagccttgttcaacatgaaagaatccatacaggggagaaaccctatgaatgtaaagaatgtgggaaggcttttagtcgtggctatcaccttactcaacatcagaaaattcatac

SEQ ID NO: 544204 - DNA, 120 bp, Artificial Sequence
  ENSG00000167637_13 (sequence is synthesized)
cggtgagaaacctttcaaatgtaaggaatgtgggaaggccttcagttggggttcaagcctagttaagcatgagagagtccatactaatgagaagtcttatgaatgtaaagactgtgggaa

SEQ ID NO: 544205 - DNA, 120 bp, Artificial Sequence
  ENSG00000167637_14 (sequence is synthesized)
ggcctttggtagtggctatcaacttagtgttcatcagagatttcatactggtgagaagctttatcaacgtaaggaattcgggaagacctttacttgtggctcaaaacttgttcatgagag

SEQ ID NO: 544206 - DNA, 120 bp, Artificial Sequence
  ENSG00000167637_15 (sequence is synthesized)
aactcatagtaatgataaaccctacaaatataacgaatgtggggaagcctttctgtggacaacttactcaaatgagaaaattgatactgatgaaaccttatgattgaaagttgtaaaaga

SEQ ID NO: 544207 - DNA, 120 bp, Artificial Sequence
  ENSG00000167637_16 (sequence is synthesized)
atattttgtgtgtgtgtatagacaacttatcataataagaactcttactcttgagaaaccttgtgaatgtaagggttgtgcaaaagccattcatttctgtttatgggcaattatcttgct

SEQ ID NO: 544208 - DNA, 120 bp, Artificial Sequence
  ENSG00000167637_17 (sequence is synthesized)
atccagcaattcatactagtgagaaatattttgaatataattaatatgaaaaggcctttagacttctgtacagtcttattggatatcaatttatactgatgtaaaatcatttaaatgtaa

SEQ ID NO: 544209 - DNA, 120 bp, Artificial Sequence
  ENSG00000167637_18 (sequence is synthesized)
agaagctcctctcccagcctgcgagcatttccaggctcttgtttcccatcagcctctgggtccaaactaaccacaggtctctgggtccttttccggtgtccttaaggttcttggactctg

SEQ ID NO: 544210 - DNA, 120 bp, Artificial Sequence
  ENSG00000167637_19 (sequence is synthesized)
catgtgctgccaggttgccagatttctaagaaggagtttgaagaggagaaaaggatttttgcatgtttagaaatcaaggttcaggagaatcttgacagtgaatgtgtctcattacattga

SEQ ID NO: 544211 - DNA, 65 bp, Artificial Sequence
  ENSG00000167637_20 (sequence is synthesized)
tcaggagaatcttgacagtgaatgtgtctcattacattgaataacagctacaggatgttcgagag

SEQ ID NO: 544212 - DNA, 120 bp, Artificial Sequence
  ENSG00000167637_21 (sequence is synthesized)
taaataggaggaatgtgggaaggacctaaacttaattcagttcttgctgcacatcagagaattcatactgctgtgtaatcctatgcacataaggaatttgggaaggcttatagacacagt

SEQ ID NO: 544213 - DNA, 120 bp, Artificial Sequence
  ENSG00000167637_22 (sequence is synthesized)
atttgaattagaattataggaaggcctttagacaaatgctacccaaattattatccagagactggtgcagtcataaaattgtcatctgtcaattgtgagataaacgtggaaagtgagtaa

SEQ ID NO: 544214 - DNA, 120 bp, Artificial Sequence
  ENSG00000167637_23 (sequence is synthesized)
atatttggaacttttatagcaatttgacatttccataacattctgttttacaaaattatcagtccataaatgattgagaattgaaaacaaagtttgttctttcccagaaataatttgaga

SEQ ID NO: 544215 - DNA, 120 bp, Artificial Sequence
  ENSG00000167637_24 (sequence is synthesized)
caagactcacacttttcaagacatgagacaagtgacaatttaaataagaaattcttcacttgcacctctctgattagaatagcagaatattcatactatagcaagatttggcaaatgagg

SEQ ID NO: 544216 - DNA, 120 bp, Artificial Sequence
  ENSG00000167637_25 (sequence is synthesized)
gaatcaaaattttctaatgcctgtaacagcataagataatttataccagatatgttaaatgtgcagaagccttccaacactattcagtctttgttaaacttcagtaagttcatcctagag

SEQ ID NO: 544217 - DNA, 120 bp, Artificial Sequence
  ENSG00000167637_26 (sequence is synthesized)
agtaactctgttaatgtaacaaatgtaggaaaacccttatccatggcaaataccatactgtcatcaccatttcacctccatactacctgtaggatggtgagcaaaatgcttatctcttct

SEQ ID NO: 544218 - DNA, 120 bp, Artificial Sequence
  ENSG00000167637_27 (sequence is synthesized)
ggacatgatgtttcaaatgctgatggtaactaataatgctgttacagagattagatggatttagtatgcatcatatccttggaagagtatctggtatgtagcctatgcttaatacatatt

SEQ ID NO: 544219 - DNA, 120 bp, Artificial Sequence
  ENSG00000167637_28 (sequence is synthesized)
agctattgttcatattgtctttattattagtattactactggtgaattcttaggagaggcacaaccgttttgaggaatgaattcagaaaagcttcccataaccactcatccatttgaatt

SEQ ID NO: 544220 - DNA, 120 bp, Artificial Sequence
  ENSG00000167637_29 (sequence is synthesized)
tcagatagttcattctggataagatctagtacagtataaagaatttgaggggattttaattcagagtttatcccttaagctgagctaaaaaaatgagacttgaaaaaatccagacttttg

SEQ ID NO: 544221 - DNA, 120 bp, Artificial Sequence
  ENSG00000167637_30 (sequence is synthesized)
aagagtttaggaaagctgttttatagaatgtcacacattagtttcattcctcatggtgaaatttgatatgggcctctccttcacatttctcgtaacatgaagttggaaatagaggcttaa

SEQ ID NO: 544222 - DNA, 120 bp, Artificial Sequence
  ENSG00000167637_31 (sequence is synthesized)
acattttttaccagaacacttcatagatggtgatgtgtacttcatcttgcaatacctcagaagcagatagtatccatttcccccagtatcaccagtgccaagtttgatcacttatggtaa

SEQ ID NO: 544223 - DNA, 120 bp, Artificial Sequence
  ENSG00000167637_32 (sequence is synthesized)
ctactggagttgtctgttataaagatccattatatacctaataggattggtcagccttgatcaatgatctttggaaatgtgtgatcatatggtatgtattttacttttttttttttttgg

SEQ ID NO: 544224 - DNA, 69 bp, Artificial Sequence
  ENSG00000167637_33 (sequence is synthesized)
gtgatcatatggtatgtattttacttttttttttttttgggacaggatctctcttgcacctctcgggtt

SEQ ID NO: 544225 - DNA, 73 bp, Artificial Sequence
  ENSG00000167637_34 (sequence is synthesized)
gtgcctcagcctcccaagtagctggatacacaggtgtgcaccaccatactgcaggctgatcttgaactcctgc

SEQ ID NO: 544226 - DNA, 120 bp, Artificial Sequence
  ENSG00000167637_35 (sequence is synthesized)
attacaggtgtgagacactgcgcctggctatattttactatttggaaatcacaatgcatcttaaaattgatggcttcttgcaaccactttcaaccaggtgcctgtcatgatttagtgcta

SEQ ID NO: 544227 - DNA, 120 bp, Artificial Sequence
  ENSG00000167637_36 (sequence is synthesized)
gcatcaaggcaggttagttatgaagaaatagagtgtgtgtttatatactcacacagttagaaatcgacccttttaaaaattatttctttttgaaaataatgtcagttccatcagaactaa

SEQ ID NO: 544228 - DNA, 120 bp, Artificial Sequence
  ENSG00000167637_37 (sequence is synthesized)
tgcattgataactaaatgtctgtggttccttgtcataggtctacacctgacctctctattttgtgcacataggggattcgtaatatcactgttcagtcagtcattcaccatctagtgatc

SEQ ID NO: 544229 - DNA, 120 bp, Artificial Sequence
  ENSG00000167637_38 (sequence is synthesized)
atcattctacatgattgcactttttcaaaggcataaaaagccaacagttgcactcttaataatcaactgtaacacaaagcagagtactttgggagttttaacaggatatattattggtaa

SEQ ID NO: 544230 - DNA, 120 bp, Artificial Sequence
  ENSG00000167637_39 (sequence is synthesized)
ctggctattatgccactccctctgggtgccacatttgcctgttaaccaagaaatgtagacatggtgccttatcccaacatttctgaaattatatctcaaggaatcaccagtgcttactag

SEQ ID NO: 544231 - DNA, 120 bp, Artificial Sequence
  ENSG00000167637_40 (sequence is synthesized)
tacttgacaatgaaggaggattttacagttaaagaagcttataaagtagcatctactaaatcccctcctaaggaacaagcaaaagcacctcaccagcttatcaaaagactaaagagaagt

SEQ ID NO: 544232 - DNA, 66 bp, Artificial Sequence
  ENSG00000167637_41 (sequence is synthesized)
aaaagcacctcaccagcttatcaaaagactaaagagaagtgaaaaaaaaaaaaagagggcggatca

SEQ ID NO: 544233 - DNA, 80 bp, Artificial Sequence
  ENSG00000167637_42 (sequence is synthesized)
gactaaggagtattctagtgaagaaaatggttgaactttgtttaaactggtgtatggcaaacttcactgttgaaatactt

SEQ ID NO: 544234 - DNA, 120 bp, Artificial Sequence
  ENSG00000167637_43 (sequence is synthesized)
tttaaactggtgtatggcaaacttcactgttgaaatacttattcccatgacctattatctttgtaggtgggtgaaattgcattgggaactgctgctataaccaaaagagaatttcagtca

SEQ ID NO: 544235 - DNA, 120 bp, Artificial Sequence
  ENSG00000167637_44 (sequence is synthesized)
ccatgtctggttgttagctatgatggaatggcagcatcatggtctcagttatgagtgaaaatctttgttgtagctaagtagtggtgcctcctgagttttattaaatgccgtttcactatc

SEQ ID NO: 544236 - DNA, 120 bp, Artificial Sequence
  ENSG00000167637_45 (sequence is synthesized)
gggtccaaactaaccacaggtctctgggtccttttccggtgtccttaaggttcttggactctgcatggttccctttagcctgtcttcgggcctgccacaattaaatgaccgcaagaaaga

SEQ ID NO: 544237 - DNA, 72 bp, Artificial Sequence
  ENSG00000167637_46 (sequence is synthesized)
cttctttacctatttcttaaggatacatttctagaagtgaagttttgggtaaagaatttgccccaaatgcct

SEQ ID NO: 544238 - DNA, 120 bp, Artificial Sequence
  ENSG00000167637_47 (sequence is synthesized)
taaggtcatctgcctgaaataatttagagtctcctctttgcatcatcagttttctgcactggaaattacagggctatctttgaagaaaccaggtgaatttcttctcccccttcccaaggg

SEQ ID NO: 544239 - DNA, 120 bp, Artificial Sequence
  ENSG00000167637_48 (sequence is synthesized)
catgcttttatacttgctgggttagaaatgggtttgttaaacacgttgatcttccccatccctcagtgagctttacaccattctcgggccctccctgcaatcacctctctcctttaatgg

SEQ ID NO: 544240 - DNA, 120 bp, Artificial Sequence
  ENSG00000167637_49 (sequence is synthesized)
tttcataaattctgcaaatattatattgaatatctactcctggccagccttgtgctgagcactgtcaattgaatcatgaacaagctttgataacttgcccattttcgtgcagtttacttt

SEQ ID NO: 544241 - DNA, 120 bp, Artificial Sequence
  ENSG00000167637_50 (sequence is synthesized)
gtagtaaagcagaaacatcaaataagtaaatttataaatagataaatagtatgtaatgaagcaaattctttggaaaaggtaaacagcataagggaatagaaaatgatgaggactgacagg

SEQ ID NO: 544242 - DNA, 120 bp, Artificial Sequence
  ENSG00000167637_51 (sequence is synthesized)
gctaatttaggtaagacagtcggggaacgctttcttgaacagagatgtggagcctgggatctctatgtgaatatctggcggaggaacagatcagtcacagtgaacagcaaatgcaaagac

SEQ ID NO: 544243 - DNA, 120 bp, Artificial Sequence
  ENSG00000167637_52 (sequence is synthesized)
cctgttgttggaaaggaactttaccagaactctagagtagagttattaaaggaacatgtactaagaaattaggccagggagataggaaggggccagataatacattgttttgttgttctt

SEQ ID NO: 544244 - DNA, 120 bp, Artificial Sequence
  ENSG00000167637_53 (sequence is synthesized)
gtttgtggaatttggattgtttagtctctttcagtctgaaacagttcacatgtctttccttgacttgcgtatatgtctgtgatgcttttgaagattacaggccagctattttgtatagtg

SEQ ID NO: 544245 - DNA, 87 bp, Artificial Sequence
  ENSG00000167637_54 (sequence is synthesized)
cttctctcaggaggagtgggaatgcctggaccctgctcagagggacttttttctgcactggaaattacagggctatctttgaagaaa

SEQ ID NO: 544246 - DNA, 120 bp, Artificial Sequence
  ENSG00000167641_0 (sequence is synthesized)
gcacagcgcggggccaggctgggtccagcagcgcgatggcagctcagcggctgggcaagcgcgtgctgagcaagctgcagtctccatcgcgggcccgcgggccagggggcagtcccgggg

SEQ ID NO: 544247 - DNA, 120 bp, Artificial Sequence
  ENSG00000167641_1 (sequence is synthesized)
ggctgcagaagcggcacgcgcgcgtcaccgtcaagtatgaccggcgggagctgcagcggcggctggacgtggagaagtggatcgacgggcgcctggaggagctgtaccgcggcatggagg

SEQ ID NO: 544248 - DNA, 120 bp, Artificial Sequence
  ENSG00000167641_2 (sequence is synthesized)
ctcctgaagtcatgtgggaaacctgtcgaggacttcatccaggagctgctggcaaagcttcaaggcctccacaggcagcccggcctccgccagccaagcccctcccacgacggcagcctc

SEQ ID NO: 544249 - DNA, 120 bp, Artificial Sequence
  ENSG00000167641_3 (sequence is synthesized)
agccccctccaggaccgggcccggactgctcacccctgaccctcttgcactctccctgccccccggacgccgcccagcttgcttgtgtataagttgtatttaatggttctgtaacaataa

SEQ ID NO: 544250 - DNA, 120 bp, Artificial Sequence
  ENSG00000167641_4 (sequence is synthesized)
gcctcaagccgacgcagcggcctactctcgcactgcagacggggaaactgaggcctgaggcggccggggtggggcagacctcccggcgagcccgagcccccgcccccggctagccccgcc

SEQ ID NO: 544251 - DNA, 120 bp, Artificial Sequence
  ENSG00000167641_5 (sequence is synthesized)
atccagggactcctgaagtcatgtgggaaacctgtcgaggtgagttttctctccctcattctctccctgttctggccccaagtactctgatgggggagggggaagaagctggcagaaggg

SEQ ID NO: 544252 - DNA, 120 bp, Artificial Sequence
  ENSG00000167641_6 (sequence is synthesized)
tctctggggaacaccacccggccccaccacccccggccccaacctgccctccgcagctctttctggtctccaggggtgtcttttgtcctcctacttgtctctctccctctctcccccatc

SEQ ID NO: 544253 - DNA, 120 bp, Artificial Sequence
  ENSG00000167641_7 (sequence is synthesized)
tgctgagggggctccattctgtcctcccccatctgccctgtttttgcctctcctgtgcctgtcctttggccaccagccttcgggctcagtctccctctgtcctcccctgtcactgcctcc

SEQ ID NO: 544254 - DNA, 120 bp, Artificial Sequence
  ENSG00000167641_8 (sequence is synthesized)
gccaccccgggctcccttccccacctctgggggccctccatcctcccaggccctgaagctgagcggcccaacccctcccacttccttccctgctttaaaagggaaaactattcatgtttc

SEQ ID NO: 544255 - DNA, 120 bp, Artificial Sequence
  ENSG00000167641_9 (sequence is synthesized)
ctagagccaaggcgagagacccgtgccagccccgaggctcccggggcccatgggcccaggcatcgggctggtacagggccccggggctctctcagcccatctgtcacccctcccccccaa

SEQ ID NO: 544256 - DNA, 120 bp, Artificial Sequence
  ENSG00000167641_10 (sequence is synthesized)
cacccagatgtcccgtcttggcagtgctgtcccggactgccacattaatgctccagaacccgccagctgggccctggggccggtggggctcctgcagagccctggacaaaggcgagggag

SEQ ID NO: 544257 - DNA, 120 bp, Artificial Sequence
  ENSG00000167642_0 (sequence is synthesized)
gccattggctctggcgacctccgcgcgttgggaggtgtagcgcggctctgaacgcgctgagggccgttgagtgtcgcaggcggcgagggcgcgagtgaggagcagacccaggcatcgcgc

SEQ ID NO: 544258 - DNA, 120 bp, Artificial Sequence
  ENSG00000167642_1 (sequence is synthesized)
gccgagaaggccgggcgtccccacactgaaggtccggaaaggcgacttccgggggctttggcacctggcggaccctcccggagcgtcggcacctgaacgcgaggcgctccattgcgcgtg

SEQ ID NO: 544259 - DNA, 120 bp, Artificial Sequence
  ENSG00000167642_2 (sequence is synthesized)
cgcgttgaggggcttcccgcacctgatcgcgagaccccaacggctggtggcgtcgcctgcgcgtctcggctgagctggccatggcgcagctgtgcgggctgaggcggagccgggcgtttc

SEQ ID NO: 544260 - DNA, 120 bp, Artificial Sequence
  ENSG00000167642_3 (sequence is synthesized)
tcgccctgctgggatcgctgctcctctctggggtcctggcggccgaccgagaacgcagcatccacgacttctgcctggtgtcgaaggtggtgggcagatgccgggcctccatgcctaggt

SEQ ID NO: 544261 - DNA, 120 bp, Artificial Sequence
  ENSG00000167642_4 (sequence is synthesized)
ggtggtacaatgtcactgacggatcctgccagctgtttgtgtatgggggctgtgacggaaacagcaataattacctgaccaaggaggagtgcctcaagaaatgtgccactgtcacagaga

SEQ ID NO: 544262 - DNA, 120 bp, Artificial Sequence
  ENSG00000167642_5 (sequence is synthesized)
atgccacgggtgacctggccaccagcaggaatgcagcggattcctctgtcccaagtgctcccagaaggcaggattctgaagaccactccagcgatatgttcaactatgaagaatactgca

SEQ ID NO: 544263 - DNA, 120 bp, Artificial Sequence
  ENSG00000167642_6 (sequence is synthesized)
ccgccaacgcagtcactgggccttgccgtgcatccttcccacgctggtactttgacgtggagaggaactcctgcaataacttcatctatggaggctgccggggcaataagaacagctacc

SEQ ID NO: 544264 - DNA, 120 bp, Artificial Sequence
  ENSG00000167642_7 (sequence is synthesized)
gaggcctgcatgctccgctgcttccgccagcaggagaatcctcccctgccccttggctcaaaggtggtggttctggcggggctgttcgtgatggtgttgatcctcttcctgggagcctcc

SEQ ID NO: 544265 - DNA, 120 bp, Artificial Sequence
  ENSG00000167642_8 (sequence is synthesized)
atggtctacctgatccgggtggcacggaggaaccaggagcgtgccctgcgcaccgtctggagctccggagatgacaaggagcagctggtgaagaacacatatgtcctgtgaccgccctgt

SEQ ID NO: 544266 - DNA, 120 bp, Artificial Sequence
  ENSG00000167642_9 (sequence is synthesized)
cgccaagaggactggggaagggaggggagactatgtgtgagctttttttaaatagagggattgactcggatttgagtgatcattagggctgaggtctgtttctctgggaggtaggacggc

SEQ ID NO: 544267 - DNA, 120 bp, Artificial Sequence
  ENSG00000167642_10 (sequence is synthesized)
tgcttcctggtctggcagggatgggtttgctttggaaatcctctaggaggctcctcctcgcatggcctgcagtctggcagcagccccgagttgtttcctcgctgatcgatttctttcctc

SEQ ID NO: 544268 - DNA, 120 bp, Artificial Sequence
  ENSG00000167642_11 (sequence is synthesized)
caggtagagttttctttgcttatgttgaattccattgcctcttttctcatcacagaagtgatgttggaatcgtttcttttgtttgtctgatttatggtttttttaagtataaacaaaagt

SEQ ID NO: 544269 - DNA, 120 bp, Artificial Sequence
  ENSG00000167642_12 (sequence is synthesized)
tttttattagcattctgaaagaaggaaagtaaaatgtacaagtttaataaaaaggggccttcccctttagaataaatttcagcatgtgctttctttatgggagtcctaatttcaacccta

SEQ ID NO: 544270 - DNA, 120 bp, Artificial Sequence
  ENSG00000167642_13 (sequence is synthesized)
ccaaaatgatcacaagacactatctgaggtgtcccattctagaaatagacccctcaaaatagcgtctttcagatctttttgaatgaatccacaagatgaaataaatgtcctattactgag

SEQ ID NO: 544271 - DNA, 120 bp, Artificial Sequence
  ENSG00000167642_14 (sequence is synthesized)
caagatgtgtgttagcttgctttgtagtgctggcggctgctgccccattcctcctttatggtttaaggactctgcatcgggcgcctggggtgagtggtcccgatgcactaccaggtagca

SEQ ID NO: 544272 - DNA, 120 bp, Artificial Sequence
  ENSG00000167642_15 (sequence is synthesized)
aatgcaccctcggggcagacctcaggccatggactctgggaggctgctgtggagggggtactgcaccgcacccctgctggaggatgggactcccccggcagctgctacccaccgagtgca

SEQ ID NO: 544273 - DNA, 120 bp, Artificial Sequence
  ENSG00000167642_16 (sequence is synthesized)
ctgtagctcagcagctgttgggccggctggcttgcagagtgctggggcgttagggtggtcactttccagctttgctaggcctggagtcctgtgcctgtcctggctttgctctgcctggct

SEQ ID NO: 544274 - DNA, 120 bp, Artificial Sequence
  ENSG00000167642_17 (sequence is synthesized)
ccctgtttatcctctgctagcccccccacacaccagctctggtttccatcttgttggagaggaacatgtccccctcactgtattagaaagtgtgaacaagaccgtgttccctataatatt

SEQ ID NO: 544275 - DNA, 120 bp, Artificial Sequence
  ENSG00000167642_18 (sequence is synthesized)
aggagctgtggcaggcttggtttctataggaaccctgaggtggcggcagggccaccacatccagcactctcagtgtgtgcgtagagcccattagggctggggtgacgtggcagagccggc

SEQ ID NO: 544276 - DNA, 120 bp, Artificial Sequence
  ENSG00000167642_19 (sequence is synthesized)
catggaaggggctacacaccccttcttaaaggcgtgtccacactcctcagtgggcccttccagacccagacccagctaggcctgtgtcctgtgtccggcccagcctccctaacacagatg

SEQ ID NO: 544277 - DNA, 120 bp, Artificial Sequence
  ENSG00000167642_20 (sequence is synthesized)
ctccctaacacagatgtttgtgtttcagctcccagaaggcaggattctgaagaccactccagcgatatgttcaactatgaaggtaaaactccaaagaggccaggtgcggtggctcacacc

SEQ ID NO: 544278 - DNA, 63 bp, Artificial Sequence
  ENSG00000167642_21 (sequence is synthesized)
aaaaattagctggaccaaagcctgggaggcggagggtgcaatgagccaagattgcgccactgc

SEQ ID NO: 544279 - DNA, 120 bp, Artificial Sequence
  ENSG00000167642_22 (sequence is synthesized)
aaaaaaaaaaaaaaaaaaaactccgaagaaacttatatatggggcaaaacatgtattcttagttgggtattgagagacacttgcggattttcactgaggaagttgtagagcagggctctc

SEQ ID NO: 544280 - DNA, 120 bp, Artificial Sequence
  ENSG00000167642_23 (sequence is synthesized)
gggctctcccctccccaggtggtggcagccccctgaggttggggtcaaggtgacaggccccacgtggatgccgccagcagtgggaaggaggctgcgcctgtggagatgtgcgttagaggc

SEQ ID NO: 544281 - DNA, 120 bp, Artificial Sequence
  ENSG00000167642_24 (sequence is synthesized)
gtagcctggcacgtggctctgcaatttacattgtccctgaacctctcgccagcggcttggctgtgggcaagtgactgttgccccgcctcagagttcccatgtataaaatgaagggtccca

SEQ ID NO: 544282 - DNA, 120 bp, Artificial Sequence
  ENSG00000167642_25 (sequence is synthesized)
gataggtctcatagagactcagccactgcatgtaaaaggcctagaacagggcttggcagagagcagccttcaaagctccgaagccgtcacctggacccaaggagcagcgcgtcagagccg

SEQ ID NO: 544283 - DNA, 120 bp, Artificial Sequence
  ENSG00000167642_26 (sequence is synthesized)
ctgcactggtcttgggtgtaatttacaggcttctttaccagagagatgtttctccgtctgctggagccgcaagcctcctcaggcactttctggcttgcttcccctccttgcgggccctac

SEQ ID NO: 544284 - DNA, 120 bp, Artificial Sequence
  ENSG00000167642_27 (sequence is synthesized)
atcctcccctgccccttggctcaaagggtaagtggccccttaccctcctcctgccatcagcctgcctcctcccttccttgactgagctcagccctgcccagctgtggtttacattatcct

SEQ ID NO: 544285 - DNA, 120 bp, Artificial Sequence
  ENSG00000167642_28 (sequence is synthesized)
tcactgtgaacatcatcttggcagaaagtcatgtttctgcgtgagaatggcgaggtggtggtttgtcccaccgttcagtgtacacagttggggctggagtgagtcagtcacaaggcaggc

SEQ ID NO: 544286 - DNA, 120 bp, Artificial Sequence
  ENSG00000167642_29 (sequence is synthesized)
cctgcccaggcggcgtgggtgactggggatgaggtcttcctgttgagcatttgaggactgctgcacacgggcctgaggctggcctgaggtgtggagggagcgctgctatgtggggcataa

SEQ ID NO: 544287 - DNA, 120 bp, Artificial Sequence
  ENSG00000167642_30 (sequence is synthesized)
gagttggtcacgggtgacaggacggaggaccacgggccagggtgtttcccaacacagtctggtctgagcgggaggccaggcctctggcctgtgtttctgagcttgagttgcaggtgataa

SEQ ID NO: 544288 - DNA, 120 bp, Artificial Sequence
  ENSG00000167642_31 (sequence is synthesized)
tgttggcacaaaagacctgccatgccagtctggcctctttctccacctgtttcccggtgaaggagccaggacctggcctgcgagtctgtcctgttctagcagtgaagcctggtttgccag

SEQ ID NO: 544289 - DNA, 120 bp, Artificial Sequence
  ENSG00000167642_32 (sequence is synthesized)
gcacggggctgggaagcaagcagtctgggtctggagggtggccccaaaaaggccaactctgcagctccacagccacatgggggaggctgccacaggtcacactccttagccggatcccct

SEQ ID NO: 544290 - DNA, 120 bp, Artificial Sequence
  ENSG00000167642_33 (sequence is synthesized)
cctgaagaaaagcatctgagctgaccagcgagactgcagtggggcagacactattaaatttgctggcacagctctgagtaccccctcgcttccaccctgacttcatcccgcagtagctct

SEQ ID NO: 544291 - DNA, 120 bp, Artificial Sequence
  ENSG00000167642_34 (sequence is synthesized)
cagccctcccagcccctgcagggccacgtctttctctattgccggtcagcgtgtgtgtgcacaaagcccctaaggtttcatgtgtacacaccggtgctaagtgttttttacacccttgtg

SEQ ID NO: 544292 - DNA, 120 bp, Artificial Sequence
  ENSG00000167642_35 (sequence is synthesized)
catctctcggcctggggctcctgtgcaggttgccctgagagttgggtttttagttcaaaaagaaggaacacagatgactactctgctggcgacacggccactctgctggcacgcacatag

SEQ ID NO: 544293 - DNA, 120 bp, Artificial Sequence
  ENSG00000167642_36 (sequence is synthesized)
catggcgcctccttttttgggggactctccttggtggcatctctggcaggctgtgtcctctccagctgcagttctggaccctgtctgggttggggaggggcatttggtcctcaggctgag

SEQ ID NO: 544294 - DNA, 120 bp, Artificial Sequence
  ENSG00000167642_37 (sequence is synthesized)
cccacctggattccccaggcccttggtgagcgccactctggctgcaactccccttgcctggcccgtcctgaggcccctctctcgtcctcagtggtggttctggcggggctgttcgtgatg

SEQ ID NO: 544295 - DNA, 120 bp, Artificial Sequence
  ENSG00000167642_38 (sequence is synthesized)
gagaggaactcctgcaataacttcatctatggaggctgccggggcaataagaacagctaccgctctgaggaggcctgcatgctccgctgcttccgctgtgtgttctcttccaggccagca

SEQ ID NO: 544296 - DNA, 120 bp, Artificial Sequence
  ENSG00000167642_39 (sequence is synthesized)
ggtgcttggagacaacgtggccacctgggagtacggttcttgggcaagcgcctactgtgcgcccggcgccgttctacacaggaacacagcgcttttcaagacttctgcctggtgtcgaag

SEQ ID NO: 544297 - DNA, 120 bp, Artificial Sequence
  ENSG00000167642_40 (sequence is synthesized)
agttccatggccaaagctcagggagaggccaggcctgtgagatggtgggggttgggttgggtgacctggtggccgttttagactcggaagaagcccatctcacccctgcctctttggaga

SEQ ID NO: 544298 - DNA, 120 bp, Artificial Sequence
  ENSG00000167642_41 (sequence is synthesized)
ttggacaagagcctcccctgaagtttttgtagttgagttgcagtaaagtaggtgcccgagaaggagggagcaagaaaggaaacaagctttggggaagaggaagctctgctaaggctcgag

SEQ ID NO: 544299 - DNA, 120 bp, Artificial Sequence
  ENSG00000167644_0 (sequence is synthesized)
ctcttaccgccatggagttcgacctgggagcagccctggagcccacctcccagaagcccggtgtgggggcgggccacgggggagatcccaagctcagtccccacaaagttcagggccggt

SEQ ID NO: 544300 - DNA, 120 bp, Artificial Sequence
  ENSG00000167644_1 (sequence is synthesized)
ggtccgggtccaaagcaaggacaccacagctcttccgactccagcagcagctccagcgattcggacacggatgtgaagtcccacgctgctggctccaagcagcacgagagcatcccgggc

SEQ ID NO: 544301 - DNA, 120 bp, Artificial Sequence
  ENSG00000167644_2 (sequence is synthesized)
aaggccaagaagcccaaagtgaagaagaaggagaagggcaagaaggagaagggcaagaagaaggaggctccccactgaagggccctggacagggctcattaaaccttcctctctgccttc

SEQ ID NO: 544302 - DNA, 120 bp, Artificial Sequence
  ENSG00000167644_3 (sequence is synthesized)
ctcttaccgccatggagttcgacctgggagcaggtgagctcctggggagtgtggactggaggtgcagggggccggactcaagcccagaagctgcctgcaccaaccacccaacttctctcc

SEQ ID NO: 544303 - DNA, 120 bp, Artificial Sequence
  ENSG00000167645_0 (sequence is synthesized)
gaaccgcggcttaggtggcggcggcgaaggatgcacccggcaggcttggcggcggcggctgcggggacgccccggctgcgtaagtggccctcgaagcggaggatccctgtgtcccagccg

SEQ ID NO: 544304 - DNA, 120 bp, Artificial Sequence
  ENSG00000167645_1 (sequence is synthesized)
ggcatggccgacccccaccagcttttcgatgacacaagttcagcccagagccggggctatggggcccagcgggcacctggtggcctgagttatcctgcagcctctcccacgccccatgca

SEQ ID NO: 544305 - DNA, 120 bp, Artificial Sequence
  ENSG00000167645_2 (sequence is synthesized)
gccttcctggctgacccggtgtccaacatggccatggcctatgggagcagcctggccgcgcagggcaaggagctggtggataagaacatcgaccgcttcatccccatcaccaagctcaag

SEQ ID NO: 544306 - DNA, 120 bp, Artificial Sequence
  ENSG00000167645_3 (sequence is synthesized)
tattactttgctgtggacaccatgtatgtgggcagaaagctgggcctgctgttcttcccctacctacaccaggactgggaagtgcagtaccaacaggacaccccggtggccccccgcttt

SEQ ID NO: 544307 - DNA, 120 bp, Artificial Sequence
  ENSG00000167645_4 (sequence is synthesized)
gacgtcaatgccccggacctctacattccagcaatggctttcatcacctacgttttggtggctggtcttgcgctggggacccaggataggttctccccagacctcctggggctgcaagcg

SEQ ID NO: 544308 - DNA, 120 bp, Artificial Sequence
  ENSG00000167645_5 (sequence is synthesized)
agctcagccctggcctggctgaccctggaggtgctggccatcctgctcagcctctatctggtcactgtcaacaccgacctcaccaccatcgacctggtggccttcttgggctacaaatat

SEQ ID NO: 544309 - DNA, 120 bp, Artificial Sequence
  ENSG00000167645_6 (sequence is synthesized)
gtcgggatgattggcggggtcctcatgggcctgctcttcgggaagattggctactacctggtgctgggctggtgctgcgtagccatctttgtgttcatgatccggacgctgcggctgaag

SEQ ID NO: 544310 - DNA, 120 bp, Artificial Sequence
  ENSG00000167645_7 (sequence is synthesized)
atcttggcagacgcagcagctgagggggtcccggtgcgtggggcccggaaccagctgcgcatgtacctgaccatggcggtggcggcggcgcagcctatgctcatgtactggctcaccttc

SEQ ID NO: 544311 - DNA, 120 bp, Artificial Sequence
  ENSG00000167645_8 (sequence is synthesized)
cacctggtgcggtgagcgcgcccgctgaacctcccgctgctgctgctgctgctgggggccactgtggccgccgaactcatctcctgcctgcaggccccaaggtccaccctgtctggccac

SEQ ID NO: 544312 - DNA, 120 bp, Artificial Sequence
  ENSG00000167645_9 (sequence is synthesized)
aggcaccgcctccatcccatgtcccgcccagccccgcccccaacccaaggtgctgagagatctccagctgcacaggccaccgccccagggcgtggccgctgttacagaaacaataaaccc

SEQ ID NO: 544313 - DNA, 120 bp, Artificial Sequence
  ENSG00000167645_10 (sequence is synthesized)
tgatgggcatggcgtggacagcctctccttggcctcgcgcacgaatgggcgggcccagcgctgggcagggggcagggagctggggacgggccagagtaggcaccacgctgaccagtcgca

SEQ ID NO: 544314 - DNA, 120 bp, Artificial Sequence
  ENSG00000167645_11 (sequence is synthesized)
gaggaaggtttaatgagccctgtccagggcccttcagtggggagcctccttcttcttgcccttctccttcttgcccttctccttcttcttcactttgggcttcttggccttgcccgggat

SEQ ID NO: 544315 - DNA, 120 bp, Artificial Sequence
  ENSG00000167645_12 (sequence is synthesized)
gctctcgtgctgcttggagccagcagcgtgggactgtggggccgagggcagggatgggagagaagagatggttctgggctggaagcgagacagggggaccactccccgcaccctccccgc

SEQ ID NO: 544316 - DNA, 120 bp, Artificial Sequence
  ENSG00000167645_13 (sequence is synthesized)
cagccccagtgcggggacgcctctctggggtgcagggcacgtgcttggggacgctggcgagagccccttaccttcacatccgtgtccgaatcgctggagctgctgctggagtcggaagag

SEQ ID NO: 544317 - DNA, 120 bp, Artificial Sequence
  ENSG00000167645_14 (sequence is synthesized)
ctgtggtgtccttgctggatggaggtgcggcagtgaggcggcgccccttacccagccccctgaagttggaggcctaaggcaggaccctggggtcaggggcaaccccagccttcccgcccc

SEQ ID NO: 544318 - DNA, 120 bp, Artificial Sequence
  ENSG00000167645_15 (sequence is synthesized)
tccgcagccggtgatgaggcgacttacctttggacccggacctgcccctgcctccgaccggccctgaactttgtggggactgagcttgggatctcccccgtggcccgcccccacaccggg

SEQ ID NO: 544319 - DNA, 120 bp, Artificial Sequence
  ENSG00000167645_16 (sequence is synthesized)
cttctgggaggtgggctccagggctgtggagagaagttgggtggttggtgcaggcagcttctgggcttgagtccggccccctgcacctccagtccacactccccaggagctcacctgctc

SEQ ID NO: 544320 - DNA, 120 bp, Artificial Sequence
  ENSG00000167645_17 (sequence is synthesized)
ccaggtcgaactccatggcggtaagagaagttgggtcctaaggccaagggcgcctgggccctgcagaggagcggagcagggggaggagcgctgagacctgcccgttggaggaatgctgag

SEQ ID NO: 544321 - DNA, 120 bp, Artificial Sequence
  ENSG00000167645_18 (sequence is synthesized)
acgccccacccaacctctgtcctggtcctcagccctgactcattgcccggcaccacccaggatttcctctgtgagaagtgggggagatggacaggtgactgcttccgccagccttggtgc

SEQ ID NO: 544322 - DNA, 120 bp, Artificial Sequence
  ENSG00000167645_19 (sequence is synthesized)
ctcaggggaggccgactgaggggggctctgtggatggcattcggggagctacaggtttcccccaaaagctcagatgctcgttcttgaagagggaggtgctgcccctgccttcctgcgtac

SEQ ID NO: 544323 - DNA, 120 bp, Artificial Sequence
  ENSG00000167645_20 (sequence is synthesized)
cgcgacaatacagcttcctccgcggcgctttaacacgcagggcgctgctgccaggggcgtcccgtgttctaactcgctcccacagcccctccggcttggtgagcagcgtctgaggggtga

SEQ ID NO: 544324 - DNA, 120 bp, Artificial Sequence
  ENSG00000167645_21 (sequence is synthesized)
ggggcatagacttggagccagcctgctgcactagatgccagctgtgtcacttagcagcaaggtgacctcagcaaagttgttttacctctgtgcctcagtttcctcatctgtaaataacag

SEQ ID NO: 544325 - DNA, 120 bp, Artificial Sequence
  ENSG00000167645_22 (sequence is synthesized)
ctacccatgggattgatgtgaaagtcagaggagttaatttcctagaatggtgtctggcatgaagtactgataatgtgttggttttttaaaaaataaaaggtaggtgttttaggccagtca

SEQ ID NO: 544326 - DNA, 120 bp, Artificial Sequence
  ENSG00000167645_23 (sequence is synthesized)
cctacctacaccaggtcagcacccccaggggaatgtgggtctgcagtgggcctgtggggggctcaggggtgggggcaggtgcatggtggagccgggagattcgcctcgagggaggagggc

SEQ ID NO: 544327 - DNA, 120 bp, Artificial Sequence
  ENSG00000167645_24 (sequence is synthesized)
ccggacctctacattccaggtttcaccctccccctaccctgcaccctcctctctcttccgggcctatatggagcgggtgtgtgggtgcctggaggcccagggcagttcttcctctggtga

SEQ ID NO: 544328 - DNA, 120 bp, Artificial Sequence
  ENSG00000167645_25 (sequence is synthesized)
agaggatgtcaggtgtggggttcagaccagagacacattgctgaactgaggagccctggagtggctgcccggcctggggggtcaggagggcttcctggaagagggggtatcctgagccct

SEQ ID NO: 544329 - DNA, 120 bp, Artificial Sequence
  ENSG00000167645_26 (sequence is synthesized)
ggaagaggagacaccagccaggctgctagaggctggggatccccagcacacaggctccaggctgggctctcactctcattccactctccttacatgggagccttcctgccagaatttccc

SEQ ID NO: 544330 - DNA, 120 bp, Artificial Sequence
  ENSG00000167645_27 (sequence is synthesized)
tggaaggagattctctagagcccttcccactggagtcaggggtgctggtgaagagcactggggtctgcaggctgggtggaccccaagcttagttggatcctgggcaaatcacttcctttc

SEQ ID NO: 544331 - DNA, 61 bp, Artificial Sequence
  ENSG00000167645_28 (sequence is synthesized)
ccccaagcttagttggatcctgggcaaatcacttcctttctttaaattcagtttccccttt

SEQ ID NO: 544332 - DNA, 120 bp, Artificial Sequence
  ENSG00000167645_29 (sequence is synthesized)
cgctgggatgccaggttcgggtaggaggccccttggggggcgattctttaggaaattcctttagaagaaaacaacttgggactggatagcgtgcgatatgcagagaaatgcaactttcat

SEQ ID NO: 544333 - DNA, 120 bp, Artificial Sequence
  ENSG00000167645_30 (sequence is synthesized)
tcatttgcagttagcgatccgcccttccctgctccccacccttccgtggctccccagtacccgcctgctgtcgcccacacccttaggacagcttcgtggccccccgggagcgcagagggc

SEQ ID NO: 544334 - DNA, 120 bp, Artificial Sequence
  ENSG00000167645_31 (sequence is synthesized)
cttccaccactatgttttcctgagataagtcggggagtctgagagggagagaaggggggagactgagagtcagagagaggagagactaaggacgctaggtgggcagggctcttcacttgc

SEQ ID NO: 544335 - DNA, 120 bp, Artificial Sequence
  ENSG00000167645_32 (sequence is synthesized)
ggtcttgcgctggggacccaggataggatgattggcggggtcctcatgggcctgctcttcgggaagattggctactacctggtgctgggctggtgctgcgtagccatctttgtgttcatg

SEQ ID NO: 544336 - DNA, 120 bp, Artificial Sequence
  ENSG00000167645_33 (sequence is synthesized)
gtgggagggtgggtagatggataggtggatggatgggtgggtagatgaatggatgcatagatgaatgtatcagtggatggatagttggctagatgggtgggttggtggatgaatggcaga

SEQ ID NO: 544337 - DNA, 120 bp, Artificial Sequence
  ENSG00000167645_34 (sequence is synthesized)
gcttgcacctgccagtccatctgacatcaaagccagtgtctctaatggtgacaccaccctcctctgcagcaggaggcagagctgtgggatgaatgaggttcgccaggtctcccttaccta

SEQ ID NO: 544338 - DNA, 120 bp, Artificial Sequence
  ENSG00000167646_0 (sequence is synthesized)
cacatgcttccattgcttgattcctcgaaaagggcggggactctgggcagcggttgtggagtgccgcgggtccacagtgctgcactgagcagagaggaaggggcgtcccgggatatttgg

SEQ ID NO: 544339 - DNA, 120 bp, Artificial Sequence
  ENSG00000167646_1 (sequence is synthesized)
aggataaaggtgtgggcaagggtgatgaccacacctgccggctccggcagcggcttcggctccgtgtcctggtggggcctgtccccggcgctggacctgcaggctgaaagtcctcctgtg

SEQ ID NO: 544340 - DNA, 120 bp, Artificial Sequence
  ENSG00000167646_2 (sequence is synthesized)
gacccagactcccaggccgatacagtgcacagcaaccccgagctagatgtgctgcttctgggctctgtggatggacggcacctgctgcggaccctgtcccgagcgaagttctggcctcgc

SEQ ID NO: 544341 - DNA, 120 bp, Artificial Sequence
  ENSG00000167646_3 (sequence is synthesized)
aggaggttcaacttctttgtgctggagaataatctggaagctgtggcccgacacatgctgatcttcagcctagccctggaggaaccggagaagatggggctgcaagagcgaagcgagacc

SEQ ID NO: 544342 - DNA, 120 bp, Artificial Sequence
  ENSG00000167646_4 (sequence is synthesized)
ttcctggaagtgtgggggaacgcgctgctgcgcccgccagtggccgccttcgtgcgtgcccaggccgacctgctggcgcacctggtccccgagcccgaccgcctggaggaacagctgccc

SEQ ID NO: 544343 - DNA, 120 bp, Artificial Sequence
  ENSG00000167646_5 (sequence is synthesized)
tggctcagcctccgcgccctcaagttccgcgagcgggatgccctggaggccgtattccgcttctgggctggcggcgagaaagggccccaggcgttccccatgagccgcctctgggactcg

SEQ ID NO: 544344 - DNA, 120 bp, Artificial Sequence
  ENSG00000167646_6 (sequence is synthesized)
cgcctgcgccactacctgggctcccgctacgacgcccggcgcggtgtcagcgactgggacctgcgcatgaagctgcatgaccgcggggctcaagtcattcacccccaggagttccgacgc

SEQ ID NO: 544345 - DNA, 120 bp, Artificial Sequence
  ENSG00000167646_7 (sequence is synthesized)
tggcgggacacaggcgtcgcctttgaactcagggactccagcgcctatcatgtgcccaaccggaccctggcgtccggtcgcctcctgagctaccgtggggagcgcgtggcagcgcgcggg

SEQ ID NO: 544346 - DNA, 120 bp, Artificial Sequence
  ENSG00000167646_8 (sequence is synthesized)
tactggggggacatcgccacggggcccttcgtggccttcggcatcgaagcggacgacgagagcctcctgcggacgagcaacggccagccagtcaagacggccggggagatcactcaacac

SEQ ID NO: 544347 - DNA, 120 bp, Artificial Sequence
  ENSG00000167646_9 (sequence is synthesized)
gagctgctccgcgacgtggccgcctgggggcgcgcgagagccaccgggggggacctggaggagcagcagcacgcggagggaagcccggagccagggactccagcagccccgaccccggaa

SEQ ID NO: 544348 - DNA, 120 bp, Artificial Sequence
  ENSG00000167646_10 (sequence is synthesized)
tctttcaccgtccacttcctgccgctcaattctgctcagactctccaccacaagagctgctacaacggccgattccagctcctctatgtggcctgtggtatggtccatcttctcatccct

SEQ ID NO: 544349 - DNA, 120 bp, Artificial Sequence
  ENSG00000167646_11 (sequence is synthesized)
gagcttggggcctgtgtggcacccggagggaacttgattgtggaattagcccggtacctggtggacgtgcggcaggagcagctgcagggattcaacacccgggtcagggagctagctcag

SEQ ID NO: 544350 - DNA, 120 bp, Artificial Sequence
  ENSG00000167646_12 (sequence is synthesized)
gcagctggatttgctccacagaccggggccaggccttcagagaccttcgcacgtttctgcaagtcccaggaatcagctctgggcaacactgtcccagctgtggaacccggaactccgccc

SEQ ID NO: 544351 - DNA, 120 bp, Artificial Sequence
  ENSG00000167646_13 (sequence is synthesized)
cttgacatcctggcccagcctcttgaagccagcaacccagcccttgagggcctgacccagcctctgcagggtgggaccccacactgtgagccctgccagctgccctctgagtctccaggt

SEQ ID NO: 544352 - DNA, 120 bp, Artificial Sequence
  ENSG00000167646_14 (sequence is synthesized)
tcactctcagaggttctggctcagcctcagggggccttggctccgcccaactgtgagtcagactccaaaactggagtctgacccaacccctagacaccccttatctccaacttccaaagt

SEQ ID NO: 544353 - DNA, 120 bp, Artificial Sequence
  ENSG00000167646_15 (sequence is synthesized)
caggttgtaggatgagaacccgctgataccattctaagtccgctgctagagtcctcaattttattctaatcattcccactcagtacccgccacccccaccccgggagtgttggtagactt

SEQ ID NO: 544354 - DNA, 120 bp, Artificial Sequence
  ENSG00000167646_16 (sequence is synthesized)
tcaaattccatttctgagattctatggtctattcctagaattctagattgttctctcagaattccaaattccacttctgaggctctaagcccagcctaggatctgacactgagtctcagg

SEQ ID NO: 544355 - DNA, 120 bp, Artificial Sequence
  ENSG00000167646_17 (sequence is synthesized)
cccttgactttggcccccttgttcccaggcaccctgtggctgactaggggctggggtgtctcctcaccagggcctggtcagcacccagatggttcaagtaaagcaagttgtgtccaccct

SEQ ID NO: 544356 - DNA, 120 bp, Artificial Sequence
  ENSG00000167646_18 (sequence is synthesized)
attgcttgattcctcgaaaagggcggggactctgggcagcggttgtggagtgccgcgggtccacagtgctgcactgagcagagaggaaggggcgtcccgggatatttggaggataaaggg

SEQ ID NO: 544357 - DNA, 120 bp, Artificial Sequence
  ENSG00000167646_19 (sequence is synthesized)
gctaacgttctccaacgctccagcggcagagggcgcgctcccaggggcagccccgaggtcctgtctgcggactgcgaatcccagaatactcagaggaaacacctccccttagaacctagg

SEQ ID NO: 544358 - DNA, 120 bp, Artificial Sequence
  ENSG00000167646_20 (sequence is synthesized)
ccacgggcggaacgcctactgggatttgtagtccattttttataggggatgctacggtggacgctctgccaaccaccatggtgccccagccagctgtcatcttgccaggtcctcctgtgg

SEQ ID NO: 544359 - DNA, 120 bp, Artificial Sequence
  ENSG00000167646_21 (sequence is synthesized)
aggacgtgcgttgatggagcaggcggcgggctagggggttcgaatcccagttccccgactcccactgtgggatttggcctgggggcaggaggtggcttctgctttcggagcctcagtttt

SEQ ID NO: 544360 - DNA, 120 bp, Artificial Sequence
  ENSG00000167646_22 (sequence is synthesized)
tccatccgagaaacgggggaatcgttcccctgttctgggatggaagagagggtcaattagaatccgctctccctgcatccctctctgccttcctctgtcccaccgcgtgcctggccccgc

SEQ ID NO: 544361 - DNA, 120 bp, Artificial Sequence
  ENSG00000167646_23 (sequence is synthesized)
ctatgtggcctgtgggacccagactccagttttgccacccctcctccctcattgtctgggatcccagagccccatcctccctccggatttggagctgaatctcagcctgtcctccgtcct

SEQ ID NO: 544362 - DNA, 120 bp, Artificial Sequence
  ENSG00000167646_24 (sequence is synthesized)
acttacaaatagcctgtacacatggtcccatacaccgcaaatcatctctagattacctataatatgtaatacaatgtaaatgcttacaccatattttacaatttgtattattttttactg

SEQ ID NO: 544363 - DNA, 120 bp, Artificial Sequence
  ENSG00000167653_0 (sequence is synthesized)
acagcccaccagtgaccacgaaggctgtgctgcttgccctgttgatggcaggcttggccctgcagccaggcactgccctgctgtgctactcctgcaaagcccaggtgagcaacgaggact

SEQ ID NO: 544364 - DNA, 120 bp, Artificial Sequence
  ENSG00000167653_1 (sequence is synthesized)
gcctgcaggtggagaactgcacccagctgggggagcagtgctggaccgcgcgcatccgcgcagttggcctcctgaccgtcatcagcaaaggctgcagcttgaactgcgtggatgactcac

SEQ ID NO: 544365 - DNA, 120 bp, Artificial Sequence
  ENSG00000167653_2 (sequence is synthesized)
aggactactacgtgggcaagaagaacatcacgtgctgtgacaccgacttgtgcaacgccagcggggcccatgccctgcagccggctgctgccatccttgcgctgctccctgcactcggcc

SEQ ID NO: 544366 - DNA, 120 bp, Artificial Sequence
  ENSG00000167653_3 (sequence is synthesized)
tgctgctctggggacccggccagctctaggctctggggggccccgctgcagcccacactgggtgtggtgccccaggcctctgtgccactcctcacacacccggcccagtgggagcctgtc

SEQ ID NO: 544367 - DNA, 120 bp, Artificial Sequence
  ENSG00000167653_4 (sequence is synthesized)
acgcaagtctgaccatgtatgtctgcgcccctgtcccccaccctgaccctcccatggccctctccaggactcccacccggcagatcggctctattgacacagatccgcctgcagatggcc

SEQ ID NO: 544368 - DNA, 120 bp, Artificial Sequence
  ENSG00000167653_5 (sequence is synthesized)
cctccaaccctctctgctgctgtttccatggcccagcattctccacccttaaccctgtgctcaggcacctcttcccccaggaagccttccctgcccaccccatctatgacttgagccagg

SEQ ID NO: 544369 - DNA, 120 bp, Artificial Sequence
  ENSG00000167653_6 (sequence is synthesized)
tctggtccgtggtgtcccccgcacccagcaggggacaggcactcaggagggcccggtaaaggctgagatgaagtggactgagtagaactggaggacaggagtcgacgtgagttcctggga

SEQ ID NO: 544370 - DNA, 120 bp, Artificial Sequence
  ENSG00000167653_7 (sequence is synthesized)
gtctccagagatggggcctggaggcctggaggaaggggccaggcctcacattcgtggggctccctgaatggcagcctcagcacagcgtaggcccttaataaacacctgttggataagcca

SEQ ID NO: 544371 - DNA, 120 bp, Artificial Sequence
  ENSG00000167653_8 (sequence is synthesized)
cacctgtccccgacccgtcccgcacctgcacccccaacaatcacccagcatctgtccctccagccatcctcctccatctgccactcctccactcatctgtccctccccatcctccatctt

SEQ ID NO: 544372 - DNA, 120 bp, Artificial Sequence
  ENSG00000167653_9 (sequence is synthesized)
ccactcctccacccatctgtccctccccatccctgagctcacttactcactcaccccatttctgacgctcagcgggtggtccatctgcctcggacatctggatagggctgagaccagggc

SEQ ID NO: 544373 - DNA, 120 bp, Artificial Sequence
  ENSG00000167653_10 (sequence is synthesized)
gcgctgaaggcgttggggctcctgcagttctggggcagccacaggcgcccagggtttcgtgccgatcagcccaggacggtcttcccggtgcagtttctgatgcggggagggcagtgctgc

SEQ ID NO: 544374 - DNA, 120 bp, Artificial Sequence
  ENSG00000167653_11 (sequence is synthesized)
cttccggtcaccaggaccagtgctcagcccgcctgcttgacccccttacttagctggggtccaatccatacccaatttagatgattcagacgatgggatttgaaacttttgaactgggtg

SEQ ID NO: 544375 - DNA, 120 bp, Artificial Sequence
  ENSG00000167653_12 (sequence is synthesized)
aatcctgaggccagcccagggggactctagagcattaggcagggtgggacaggaggaggcctggggcaggtcaggcaggtgagcacacagggcagccccatccccggatcccgctgctcc

SEQ ID NO: 544376 - DNA, 120 bp, Artificial Sequence
  ENSG00000167654_0 (sequence is synthesized)
ctctgccagccctgagctgggaagaagcagctacctcggaggcagggcgcgcaggcgggcggcgatgagagggggcgcagccgcagccccgcgctggggagcccaccgctaaccctgcac

SEQ ID NO: 544377 - DNA, 120 bp, Artificial Sequence
  ENSG00000167654_1 (sequence is synthesized)
cccacccacccctgcacaaaagagctggcgggcgctggccacgtcgccctgggtgaccttcctcggatgcagaatccgcccctgcgagcatcctcttcctcctaggctctgaaggcccgg

SEQ ID NO: 544378 - DNA, 120 bp, Artificial Sequence
  ENSG00000167654_2 (sequence is synthesized)
ggagcgtgagcgatgcccagctgcacccgggcagggctcgcctttgtttgccagtaaggaggagaggctgtctcagctgcagaggggtcatccctgcttcaagccagtgcctcttcccag

SEQ ID NO: 544379 - DNA, 120 bp, Artificial Sequence
  ENSG00000167654_3 (sequence is synthesized)
ctcccatggggaccaccgaagccacgctccggatggaaaacgtggacgtgaaggaggaatggcaggacgaagatcttcccaggccactcccagaagagacgggggtggaactgcttggca

SEQ ID NO: 544380 - DNA, 120 bp, Artificial Sequence
  ENSG00000167654_4 (sequence is synthesized)
gcccggtggaagacacatcctctcctcccaacacgctaaatttcaacggagcgcatcgtaagaggaagacgctggtggccccagagatcaacatttctctggatcagagtgaggggtccc

SEQ ID NO: 544381 - DNA, 120 bp, Artificial Sequence
  ENSG00000167654_5 (sequence is synthesized)
tgctgtccgatgacttcttggatacccctgatgacctggatattaacgtggatgacatcgagacccccgatgagaccgactcgctggagttcctggggaatggcaacgaactggagtggg

SEQ ID NO: 544382 - DNA, 120 bp, Artificial Sequence
  ENSG00000167654_6 (sequence is synthesized)
aagacgacacccccgtggccaccgccaagaacatgcccggggacagcgcggatctatttggggacggcacgacggaggacggcagcgccgccaacgggcgcctgtggcggacagtgatca

SEQ ID NO: 544383 - DNA, 120 bp, Artificial Sequence
  ENSG00000167654_7 (sequence is synthesized)
tcggggagcaagagcaccgtatagacctgcacatgatccggccttacatgaaagtggtcacccacggagggtactacggcgaaggcctcaacgccatcatcgtcttcgcagcctgcttcc

SEQ ID NO: 544384 - DNA, 120 bp, Artificial Sequence
  ENSG00000167654_8 (sequence is synthesized)
ttccagacagcagcctccccgactaccactacatcatggagaacctcttcctgtacgtcatcagcagcttagagctcctggtggctgaggactacatgatcgtgtacctgaacggtgcca

SEQ ID NO: 544385 - DNA, 120 bp, Artificial Sequence
  ENSG00000167654_9 (sequence is synthesized)
cgccccggcggaggatgcctggaatcggctggctgaagaagtgctaccagatgatcgaccggaggttgcggaaaaacctgaagtccttgatcatcgtccacccctcgtggttcattcgga

SEQ ID NO: 544386 - DNA, 120 bp, Artificial Sequence
  ENSG00000167654_10 (sequence is synthesized)
ctgtgctggccatctctcgccctttcatcagcgtcaagttcatcaacaagatccagtacgtgcacagcttggaagacctggagcaactcatccctatggaacacgtccagatcccagact

SEQ ID NO: 544387 - DNA, 120 bp, Artificial Sequence
  ENSG00000167654_11 (sequence is synthesized)
gcgtcctgcaatacgaagaggaaagactgaaggccaggagggagagcgcgaggccccagccggagtttgtgctgcccaggtctgaagagaagccagaggtggcaccagtggaaaacaggt

SEQ ID NO: 544388 - DNA, 120 bp, Artificial Sequence
  ENSG00000167654_12 (sequence is synthesized)
ctgctctggtctcagaagatcaggaaacaagcatgtcctgaggcgacgtgagcataacaaaggacatggaagaagattccagatgccagaaaacctctgtcagacgcccactggccccag

SEQ ID NO: 544389 - DNA, 120 bp, Artificial Sequence
  ENSG00000167654_13 (sequence is synthesized)
atctcatcctgcctcatcctgagtcccaatcttccaagggtgccagcccctccgttcatctctgaaacccagcatccttttcagctgcttgaaaacattgtattttttttttttaacgat

SEQ ID NO: 544390 - DNA, 120 bp, Artificial Sequence
  ENSG00000167654_14 (sequence is synthesized)
gcagtatttgtgcgttccagaaaagggcccagctctgagcccctcacccttccacactcacgaactctcagccgaggaaggcaagaagcgcagggggtggcccgcgtggcgtcggtggcc

SEQ ID NO: 544391 - DNA, 120 bp, Artificial Sequence
  ENSG00000167654_15 (sequence is synthesized)
tccgctcctgctcgcagcctctgtggtcagagctggatacaagattcaagacccttctcttgcttgtcacccgctccaggttggagccacagacacccaccgccaccccggctgggtctg

SEQ ID NO: 544392 - DNA, 120 bp, Artificial Sequence
  ENSG00000167654_16 (sequence is synthesized)
cgtcctttcctgtgcctttccctccagaatgcggcctcagacctagaagctcaacccccctatgagggccacgtcctggggtagctcctgacctccgaccttatgtccaaatttcacacc

SEQ ID NO: 544393 - DNA, 120 bp, Artificial Sequence
  ENSG00000167654_17 (sequence is synthesized)
catggtttttcatttgacccgcccccttctcgctcataatgacacccagctcctttgagaggatcagagcccattgcacaagaagagccgctgccaaccatccttgtcctccgattgcaa

SEQ ID NO: 544394 - DNA, 120 bp, Artificial Sequence
  ENSG00000167654_18 (sequence is synthesized)
aatgacaccccagtaatctagaacattctcaagcccctttaactcagatgtcaagccaccgggcaaaccccgtcaatacctcccaccaaggaatgagatatgtggacctcactgctcccc

SEQ ID NO: 544395 - DNA, 120 bp, Artificial Sequence
  ENSG00000167654_19 (sequence is synthesized)
caacccagcgtcaggctgggacacgccaacgctgttccgggttggaacagcagaggctcagaaactggctctgaaataggcagacctagcaagaggaagatacagggtatcgggcgtttg

SEQ ID NO: 544396 - DNA, 120 bp, Artificial Sequence
  ENSG00000167654_20 (sequence is synthesized)
acctgcattcaaagcttggaccagcgggttcttgttcgggaggcaaatttccctaggaaaaagaagacagacttttctaatgtggtccaaatgcggatcactggtcagatggactctaga

SEQ ID NO: 544397 - DNA, 85 bp, Artificial Sequence
  ENSG00000167654_21 (sequence is synthesized)
tgtggtccaaatgcggatcactggtcagatggactctagaagcactgagctccctgtctctggaagtatttaagaaaaggctact

SEQ ID NO: 544398 - DNA, 120 bp, Artificial Sequence
  ENSG00000167654_22 (sequence is synthesized)
caagagcaaaactccgtctcaaaataaaaagaaaagaaaagaatggacagtgtttgcagagagttgctcacgagtttccctctaatcctaaatgtcttcatgtctatcagtctgagcaga

SEQ ID NO: 544399 - DNA, 120 bp, Artificial Sequence
  ENSG00000167654_23 (sequence is synthesized)
cagacggtgagtagggcgggcacattctccaggcccttcttcctagctctgtggttgacctctcagcaagtgctatccaggctgggccaaccagacccacaattaactgagcctcagtga

SEQ ID NO: 544400 - DNA, 120 bp, Artificial Sequence
  ENSG00000167654_24 (sequence is synthesized)
aagcgtccagtgcatcttgacctgagacagcaaggaattgcatttggggttattccaacgatgatggcagggaactggtggtatttagtgctgaggggcagtgatacagaaagatttgcc

SEQ ID NO: 544401 - DNA, 120 bp, Artificial Sequence
  ENSG00000167654_25 (sequence is synthesized)
ctgtgggacagggtcctgcgcgagtcccatccccaaaagccagcagctcctgccatgaggaagacggggtttctgagcaggcttatgcctgcaggttcctgtggagccaccggctgtgac

SEQ ID NO: 544402 - DNA, 120 bp, Artificial Sequence
  ENSG00000167654_26 (sequence is synthesized)
gggacacctctgggtctcagcattgccctggggaggctgggacatttagggacatggtagggttttaacatttgtttcccaaatgtcaaatcccgggcacaggggcaagaccctgtcccg

SEQ ID NO: 544403 - DNA, 120 bp, Artificial Sequence
  ENSG00000167654_27 (sequence is synthesized)
gtcaaatcccgggcacaggggcaagaccctgtcccgaattcccaccccagtgaatggtgtcgctgccaaagccaacacaagatgacaaaagtggctgggtacggtggctcacgcctataa

SEQ ID NO: 544404 - DNA, 68 bp, Artificial Sequence
  ENSG00000167654_28 (sequence is synthesized)
actcaaaagaaaaaaaatgacagaagcctgattatcagactgcccggaggagacaggctccagcagat

SEQ ID NO: 544405 - DNA, 120 bp, Artificial Sequence
  ENSG00000167654_29 (sequence is synthesized)
tgattatcagactgcccggaggagacaggctccagcagatagatgccagccaggcccagctgccacgatttgtcccaggtgaccaaaggcacgcagctccagcatgaatcgttctaaccc

SEQ ID NO: 544406 - DNA, 120 bp, Artificial Sequence
  ENSG00000167654_30 (sequence is synthesized)
aacagtgacaagaactgctgggccttaaccgtcatggaagactggggccgcttccaagtcacagacaggagacggggacaggaaagaactcattccacccaatcggacacctaataattg

SEQ ID NO: 544407 - DNA, 120 bp, Artificial Sequence
  ENSG00000167654_31 (sequence is synthesized)
agtgtctacagcagcaatcaagtgacaagtgaggccctacctgacccagaaggtgcctgccggctaaacattctgcccccaccagaaactccagggggtccgcccgttatgccgtggccc

SEQ ID NO: 544408 - DNA, 120 bp, Artificial Sequence
  ENSG00000167654_32 (sequence is synthesized)
acccacgcccctttggatcaccagcagtcacagacaacaggcaggcgaaactgaagaccccaactcagccccagcggaccctccagagcaaaagaggcccccggcgaggccacctgtcgg

SEQ ID NO: 544409 - DNA, 120 bp, Artificial Sequence
  ENSG00000167654_33 (sequence is synthesized)
caggcatgccgaggtcaaacagccggggccaccgttcccagctgggccacgacctgcaccgtccacagatgggctttgagatggatttgtatcagggtggggggtgtggtttggccaaaa

SEQ ID NO: 544410 - DNA, 120 bp, Artificial Sequence
  ENSG00000167654_34 (sequence is synthesized)
tgcaatggaccccgacccctcctcgtaaaaggatgttgggtttccctctggtgacacatgggatgcgtcataaaccctcccccaaagtcctggtcagcagcccatccttccaacgatgag

SEQ ID NO: 544411 - DNA, 120 bp, Artificial Sequence
  ENSG00000167654_35 (sequence is synthesized)
ttttgcggtttttcagaacagaaatgatcactacgattgacgacggtcgtgatgttaagacgtcgtctccatgagctttggggggacttttatgtggaataaagaaactatcactgagaa

SEQ ID NO: 544412 - DNA, 120 bp, Artificial Sequence
  ENSG00000167654_36 (sequence is synthesized)
gaagatcttcccagggccacggaggggatctccaagtctggagagtctgcggttctcctggagcttgcggaagtaacaggatctcacctgaccttggaaactgcagctccatgaacaggc

SEQ ID NO: 544413 - DNA, 120 bp, Artificial Sequence
  ENSG00000167654_37 (sequence is synthesized)
ctggtctcagaagatcaggaaacaagcctccagcccctgcacagatcaagctgatgccacgtggcccaagttccaaccctaagtcacgttcatgtcctgaggcgacgtgagcataacaaa

SEQ ID NO: 544414 - DNA, 120 bp, Artificial Sequence
  ENSG00000167656_0 (sequence is synthesized)
actgctcccagacgacatcagagatgaggacagcattgctgctccttgcagccctggctgtggctacagggccagcccttaccctgcgctgccacgtgtgcaccagctccagcaactgca

SEQ ID NO: 544415 - DNA, 120 bp, Artificial Sequence
  ENSG00000167656_1 (sequence is synthesized)
agcattctgtggtctgcccggccagctctcgcttctgcaagaccacgaacacagtggagcctctgagggggaatctggtgaagaaggactgtgcggagtcgtgcacacccagctacaccc

SEQ ID NO: 544416 - DNA, 120 bp, Artificial Sequence
  ENSG00000167656_2 (sequence is synthesized)
tgcaaggccaggtcagcagcggcaccagctccacccagtgctgccaggaggacctgtgcaatgagaagctgcacaacgctgcacccacccgcaccgccctcgcccacagtgccctcagcc

SEQ ID NO: 544417 - DNA, 120 bp, Artificial Sequence
  ENSG00000167656_3 (sequence is synthesized)
atcttagcccccagcctgtgaccttccccccagggaaggcccctcatgcctttccttccctttctctggggattccacacctctcttccccagccgcaacgggggtgccaggagccccag

SEQ ID NO: 544418 - DNA, 120 bp, Artificial Sequence
  ENSG00000167656_4 (sequence is synthesized)
gctgagggcttccccgaaagtctgggaccaggtccaggtgggcatggaatgctgatgacttggagcaggccccacagaccccacagaggatgaagccaccccacagaggatgcagccccc

SEQ ID NO: 544419 - DNA, 120 bp, Artificial Sequence
  ENSG00000167656_5 (sequence is synthesized)
agctgcatggaaggtggaggacagaagccctgtggatccccggatttcacactccttctgttttgttgccgtttatttttgtactcaaatctctacatggagataaatgatttaaaccag

SEQ ID NO: 544420 - DNA, 120 bp, Artificial Sequence
  ENSG00000167656_6 (sequence is synthesized)
gacgacatcagagatgaggacagcattgctgctccttgcagccctggctgtggctacagggccaggtgggggagcaggccctgctgagtcaccaggaggcctctgttgggcccgctgagc

SEQ ID NO: 544421 - DNA, 120 bp, Artificial Sequence
  ENSG00000167656_7 (sequence is synthesized)
aacacaccctagacaggggcagggcaggacacctcttccaagccggcccaggctggaatacatgtcccctgaggctgcactcagggcacatgccctgccaggacccagagcccgggtttg

SEQ ID NO: 544422 - DNA, 120 bp, Artificial Sequence
  ENSG00000167656_8 (sequence is synthesized)
cgagtgtcagatttacaatgtttcagaatctgaggatcttagaactgactcctggagtcacggaccctgagagagtggagcagggggttgtcttgagatgcttctcactgggagagcggc

SEQ ID NO: 544423 - DNA, 120 bp, Artificial Sequence
  ENSG00000167656_9 (sequence is synthesized)
catctagtccctgccaccagcccctcccggtccccaggtctcccccagcacagcccaggacagcccaaaggccaccaagcccttcctgtcataggctcagagcagccaagctggctgccc

SEQ ID NO: 544424 - DNA, 120 bp, Artificial Sequence
  ENSG00000167656_10 (sequence is synthesized)
ccggggccttagctccgtcaggccctcagaaacatagccatctcctccagggacatcccctggggtggggacaagagccagtgtcctcttggcagtcgcagagctccctgagaccttgga

SEQ ID NO: 544425 - DNA, 120 bp, Artificial Sequence
  ENSG00000167656_11 (sequence is synthesized)
accacgaacacaggtgggtagcatctgtccaggtgtccctggggctgggggacatccctggctgttgtgggtgttggctggaaggttgtggggaggtggggggcagaggtggctgcctgg

SEQ ID NO: 544426 - DNA, 120 bp, Artificial Sequence
  ENSG00000167657_0 (sequence is synthesized)
gttgccattaggggactcctgaggtcctatctccaggctgcggtgactgcactttccctggagtggaagctgctggaaggcggaccggccgccatgtccacgttcaggcaggaggacgtg

SEQ ID NO: 544427 - DNA, 120 bp, Artificial Sequence
  ENSG00000167657_1 (sequence is synthesized)
gaggaccattatgagatgggggaggagctgggcagcggccagtttgcgatcgtgcggaagtgccggcagaagggcacgggcaaggagtacgcagccaagttcatcaagaagcgccgcctg

SEQ ID NO: 544428 - DNA, 120 bp, Artificial Sequence
  ENSG00000167657_2 (sequence is synthesized)
tcatccagccggcgtggggtgagccgggaggagatcgagcgggaggtgaacatcctgcgggagatccggcaccccaacatcatcaccctgcacgacatcttcgagaacaagacggacgtg

SEQ ID NO: 544429 - DNA, 120 bp, Artificial Sequence
  ENSG00000167657_3 (sequence is synthesized)
gtcctcatcctggagctggtctctggcggggagctctttgacttcctggcggagaaggagtcgctgacggaggacgaggccacccagttcctcaagcagatcctggacggcgttcactac

SEQ ID NO: 544430 - DNA, 120 bp, Artificial Sequence
  ENSG00000167657_4 (sequence is synthesized)
ctgcactctaagcgcatcgcacactttgacctgaagccggaaaacatcatgctgctggacaagaacgtgcccaacccacgaatcaagctcatcgacttcggcatcgcgcacaagatcgag

SEQ ID NO: 544431 - DNA, 120 bp, Artificial Sequence
  ENSG00000167657_5 (sequence is synthesized)
gcggggaacgagttcaagaacatcttcggcaccccggagtttgtggccccagagattgtgaactatgagccgctgggcctggaggcggacatgtggagcatcggtgtcatcacctatatc

SEQ ID NO: 544432 - DNA, 120 bp, Artificial Sequence
  ENSG00000167657_6 (sequence is synthesized)
ctcctgagcggtgcatccccgttcctgggcgagaccaagcaggagacgctcaccaacatctcagccgtgaactacgacttcgacgaggagtacttcagcaacaccagcgagctggccaag

SEQ ID NO: 544433 - DNA, 120 bp, Artificial Sequence
  ENSG00000167657_7 (sequence is synthesized)
gacttcattcgccggctgctcgtcaaagatcccaagcggagaatgaccattgcccagagcctggaacattcctggattaaggcgatccggcggcggaacgtgcgtggtgaggacagcggc

SEQ ID NO: 544434 - DNA, 120 bp, Artificial Sequence
  ENSG00000167657_8 (sequence is synthesized)
cagcttgccgcccaacaacagctacgccgacttcgagcgcttctccaaggtgctggaggaggcggcggccgccgaggagggcctgcgcgagctgcagcgcagccggcggctctgccacga

SEQ ID NO: 544435 - DNA, 120 bp, Artificial Sequence
  ENSG00000167657_9 (sequence is synthesized)
ggacgtggaggcgctggccgccatctacgaggagaaggaggcctggtaccgcgaggagagcgacagcctgggccaggacctgcggaggctacggcaggagctgctcaagaccgaggcgct

SEQ ID NO: 544436 - DNA, 120 bp, Artificial Sequence
  ENSG00000167657_10 (sequence is synthesized)
caagcggcaggcgcaggaggaggccaagggcgcgctgctggggaccagcggcctcaagcgccgcttcagccgcctggagaaccgctacgaggcgctggccaagcaagtagcctccgagat

SEQ ID NO: 544437 - DNA, 120 bp, Artificial Sequence
  ENSG00000167657_11 (sequence is synthesized)
gcgcttcgtgcaggacctcgtgcgcgccctggagcaggagaagctgcagggcgtggagtgcgggctgcgctaggcgcagtggggtgggccaggccccaggacagccggagctcggcctgc

SEQ ID NO: 544438 - DNA, 120 bp, Artificial Sequence
  ENSG00000167657_12 (sequence is synthesized)
ggtgggggcgcttcctgtggacgctgcgcctcccatcgcccgggtgcctgtccttgcccagcgccaccaggctggaggcggagtgggaggagctggagccaggcccgtaagttcgcaggc

SEQ ID NO: 544439 - DNA, 120 bp, Artificial Sequence
  ENSG00000167657_13 (sequence is synthesized)
aggggtgggtgtgggacggggctgcttctctacacagcctccacgctggccttcaccttcacccctgcatcgtcggtgaccctgggaccctccaggcagcgtggcctgtggcaccgtgag

SEQ ID NO: 544440 - DNA, 120 bp, Artificial Sequence
  ENSG00000167657_14 (sequence is synthesized)
ggttgggacccaccgaggcgcagaggcggcccgaatgcagccctggttcaggcccggaggagggtttgcgggtagttgcacggacaattcggcggggtgctgcctgttgctgccattagc

SEQ ID NO: 544441 - DNA, 120 bp, Artificial Sequence
  ENSG00000167657_15 (sequence is synthesized)
ccaggaggaggtcgtgggacggggagggtgggatggacggcggacaggcagtccccacgctgctgggtggcgccgggcttggtggggtcttccactgtgtgcccttctcgccgaggccgg

SEQ ID NO: 544442 - DNA, 120 bp, Artificial Sequence
  ENSG00000167657_16 (sequence is synthesized)
tcccccgggtgtggggtgccctgctgcggactcctccgcgagccccatcgtcgcgcctgtggacgcctaggcaagagcggccctctgcagccaagagaaataaaatactggcttccagat

SEQ ID NO: 544443 - DNA, 120 bp, Artificial Sequence
  ENSG00000167657_17 (sequence is synthesized)
ttctggaggcggcggcggtggccagcgcggcggcgccggccgtattctccgggctgcggagggtaaagagcgggctcgggccgaggctggagggctgggtggggccagagcggcgcttcg

SEQ ID NO: 544444 - DNA, 120 bp, Artificial Sequence
  ENSG00000167657_18 (sequence is synthesized)
cggggggccttcagcatttaaggcttgtggatgtgacaacccccagtggctggggagggtccccagaggagtgagcctgtgtggcgggggttgggtcctgggcgtgggatgtccagcacc

SEQ ID NO: 544445 - DNA, 120 bp, Artificial Sequence
  ENSG00000167657_19 (sequence is synthesized)
cgacagacctggtggcatccttggctggtgtgtgtccaacggggctgactcctggggccagggccgcagcgtttttctcgagagagcactctcggctttgcgtcgggctgggcagtctcc

SEQ ID NO: 544446 - DNA, 120 bp, Artificial Sequence
  ENSG00000167657_20 (sequence is synthesized)
gtcacgaggcgttgactctgctgccggatgagcccctgaacctcagttcacactggcaggtgggggctggcggggctgggtggcatcgcggggaccccgctcaggcttccctccttccta

SEQ ID NO: 544447 - DNA, 120 bp, Artificial Sequence
  ENSG00000167657_21 (sequence is synthesized)
tagacacccccgttttccactcctgtcctctctgaggtccccacacggcatttagccattcagctccttcgccgcctccagtctgaggctgttcctctgtctggctttcatgaccttgac

SEQ ID NO: 544448 - DNA, 120 bp, Artificial Sequence
  ENSG00000167657_22 (sequence is synthesized)
cctgacttgtgctcacgggtcaggtgttttgcagaaggcgtctgagtccacgtttagtctcgtgcgctgtcacgatcagacgatcagacggggcttcagtgtctctgctcaaaaccccag

SEQ ID NO: 544449 - DNA, 120 bp, Artificial Sequence
  ENSG00000167657_23 (sequence is synthesized)
ggatgatgctgtgtcaccctcccagcgtcaggctgggaggcagacgctgttggggcctctcactgccgggctgttgaccttgatcctttggctaaggtgttggctcgggctccccactgc

SEQ ID NO: 544450 - DNA, 120 bp, Artificial Sequence
  ENSG00000167657_24 (sequence is synthesized)
agttaccctcccctcggcgttactgagcactgggggctttcgggctctgcgtctgcacagatacttcgagtctccaaggagacttctgcctgttcatttctgctgctgtcagtggcgggg

SEQ ID NO: 544451 - DNA, 120 bp, Artificial Sequence
  ENSG00000167657_25 (sequence is synthesized)
tgggggggtggattttgaatgcctcttgggtggtgtctgggatcgttgcaggaaggttctaagggctcaggagtgtgagtggcccaggcacctgccgtcagcctgtcttctgtgctccgc

SEQ ID NO: 544452 - DNA, 120 bp, Artificial Sequence
  ENSG00000167658_0 (sequence is synthesized)
ctcttccgccgtcgtcgccgccatcctcggcgcgactcgcttctttcggttctacctgggagaatccaccgccatccgccaccatggtgaacttcacggtagaccagatccgcgccatca

SEQ ID NO: 544453 - DNA, 120 bp, Artificial Sequence
  ENSG00000167658_1 (sequence is synthesized)
tggacaagaaggccaacatccgcaacatgtctgtcatcgcccacgtggaccatggcaagtccacgctgacagactccctggtgtgcaaggcgggcatcatcgcctcggcccgggccgggg

SEQ ID NO: 544454 - DNA, 120 bp, Artificial Sequence
  ENSG00000167658_2 (sequence is synthesized)
agacacgcttcactgatacccggaaggacgagcaggagcgttgcatcaccatcaagtcaactgccatctccctcttctacgagctctcggagaatgacttgaacttcatcaagcagagca

SEQ ID NO: 544455 - DNA, 120 bp, Artificial Sequence
  ENSG00000167658_3 (sequence is synthesized)
aggacggtgccggcttcctcatcaacctcattgactcccccgggcatgtcgacttctcctcggaggtgactgctgccctccgagtcaccgatggcgcattggtggtggtggactgcgtgt

SEQ ID NO: 544456 - DNA, 120 bp, Artificial Sequence
  ENSG00000167658_4 (sequence is synthesized)
caggcgtgtgcgtgcagacggagacagtgctgcggcaggccattgccgagcgcatcaagcctgtgctgatgatgaacaagatggaccgcgccctgctggagctgcagctggagcccgagg

SEQ ID NO: 544457 - DNA, 120 bp, Artificial Sequence
  ENSG00000167658_5 (sequence is synthesized)
agctctaccagactttccagcgcatcgtggagaacgtgaacgtcatcatctccacctacggcgagggcgagagcggccccatgggcaacatcatgatcgatcctgtcctcggtaccgtgg

SEQ ID NO: 544458 - DNA, 120 bp, Artificial Sequence
  ENSG00000167658_6 (sequence is synthesized)
gctttgggtctggcctccacgggtgggccttcaccctgaagcagtttgccgagatgtatgtggccaagttcgccgccaagggggagggccagttggggcctgccgagcgggccaagaaag

SEQ ID NO: 544459 - DNA, 120 bp, Artificial Sequence
  ENSG00000167658_7 (sequence is synthesized)
tagaggacatgatgaagaagctgtggggtgacaggtactttgacccagccaacggcaagttcagcaagtcagccaccagccccgaagggaagaagctgccacgcaccttctgccagctga

SEQ ID NO: 544460 - DNA, 120 bp, Artificial Sequence
  ENSG00000167658_8 (sequence is synthesized)
tcctggaccccatcttcaaggtgtttgatgcgatcatgaatttcaagaaagaggagacagcaaaactgatagagaaactggacatcaaactggacagcgaggacaaggacaaagaaggca

SEQ ID NO: 544461 - DNA, 120 bp, Artificial Sequence
  ENSG00000167658_9 (sequence is synthesized)
aacccctgctgaaggctgtgatgcgccgctggctgcctgccggagacgccttgttgcagatgatcaccatccacctgccctcccctgtgacggcccagaagtaccgctgcgagctcctgt

SEQ ID NO: 544462 - DNA, 120 bp, Artificial Sequence
  ENSG00000167658_10 (sequence is synthesized)
acgaggggcccccggacgacgaggctgccatgggcattaaaagctgtgaccccaaaggccctcttatgatgtatatttccaaaatggtgccaacctccgacaaaggtcggttctacgcct

SEQ ID NO: 544463 - DNA, 120 bp, Artificial Sequence
  ENSG00000167658_11 (sequence is synthesized)
ttggacgagtcttctcggggctggtctccactggcctgaaggtcaggatcatggggcccaactatacccctgggaagaaggaggacctctacctgaagccaatccagagaacaatcttga

SEQ ID NO: 544464 - DNA, 120 bp, Artificial Sequence
  ENSG00000167658_12 (sequence is synthesized)
tgatgggccgctacgtggagcccatcgaggatgtgccttgtgggaacattgtgggcctcgtgggcgtggaccagttcctggtgaagacgggcaccatcaccaccttcgagcacgcgcaca

SEQ ID NO: 544465 - DNA, 120 bp, Artificial Sequence
  ENSG00000167658_13 (sequence is synthesized)
agagtggccgtggaggccaagaacccggctgacctgcccaagctggtggaggggctgaagcggctggccaagtccgaccccatggtgcagtgcatcatcgaggagtcgggagagcatatc

SEQ ID NO: 544466 - DNA, 120 bp, Artificial Sequence
  ENSG00000167658_14 (sequence is synthesized)
atcgcgggcgccggcgagctgcacctggagatctgcctgaaggacctggaggaggaccacgcctgcatccccatcaagaaatctgacccggtcgtctcgtaccgcgagacggtcagtgaa

SEQ ID NO: 544467 - DNA, 120 bp, Artificial Sequence
  ENSG00000167658_15 (sequence is synthesized)
gagtcgaacgtgctctgcctctccaagtcccccaacaagcacaaccggctgtacatgaaggcgcggcccttccccgacggcctggccgaggacatcgataaaggcgaggtgtccgcccgt

SEQ ID NO: 544468 - DNA, 120 bp, Artificial Sequence
  ENSG00000167658_16 (sequence is synthesized)
caggagctcaagcagcgggcgcgctacctggccgagaagtacgagtgggacgtggctgaggcccgcaagatctggtgctttgggcccgacggcaccggccccaacatcctcaccgacatc

SEQ ID NO: 544469 - DNA, 120 bp, Artificial Sequence
  ENSG00000167658_17 (sequence is synthesized)
accaagggtgtgcagtacctcaacgagatcaaggacagtgtggtggccggcttccagtgggccaccaaggagggcgcactgtgtgaggagaacatgcggggtgtgcgcttcgacgtccac

SEQ ID NO: 544470 - DNA, 120 bp, Artificial Sequence
  ENSG00000167658_18 (sequence is synthesized)
gacgtcaccctgcacgccgacgccatccaccgcggagggggccagatcatccccacagcacggcgctgcctctatgccagtgtgctgaccgcccagccacgcctcatggagcccatctac

SEQ ID NO: 544471 - DNA, 120 bp, Artificial Sequence
  ENSG00000167658_19 (sequence is synthesized)
cttgtggagatccagtgtccagagcaggtggtcggtggcatctacggggttttgaacaggaagcggggccacgtgttcgaggagtcccaggtggccggcacccccatgtttgtggtcaag

SEQ ID NO: 544472 - DNA, 120 bp, Artificial Sequence
  ENSG00000167658_20 (sequence is synthesized)
gcctatctgcccgtcaacgagtcctttggcttcaccgctgacctgaggtccaacacgggcggccaggcgttcccccagtgtgtgtttgaccactggcagatcctgcccggagaccccttc

SEQ ID NO: 544473 - DNA, 120 bp, Artificial Sequence
  ENSG00000167658_21 (sequence is synthesized)
gacaacagcagccgccccagccaggtggtggcggagacccgcaagcgcaagggcctgaaagaaggcatccctgccctggacaacttcctggacaaattgtaggcggcccttcctgcagcg

SEQ ID NO: 544474 - DNA, 120 bp, Artificial Sequence
  ENSG00000167658_22 (sequence is synthesized)
cctgccgccccggggactcgcagcacccacagcaccacgtcctcgaattctcagacgacacctggagactgtcccgacacagcgacgctcccctgagaggtttctggggcccgctgcgtg

SEQ ID NO: 544475 - DNA, 120 bp, Artificial Sequence
  ENSG00000167658_23 (sequence is synthesized)
ccatcactcaaccataacacttgatgccgtttctttcaatatttatttccagagtccggaggcagcagacacgccctcttagtagggacttaatgggccggtcggggagggggaggcggg

SEQ ID NO: 544476 - DNA, 120 bp, Artificial Sequence
  ENSG00000167658_24 (sequence is synthesized)
atgggacacccaacactttttccatttcttcagagggaaactcagatgtccaaactaattttaacaaacgcattaagaggtttatttgggtacatggcccgcagtggcttttgccccaga

SEQ ID NO: 544477 - DNA, 120 bp, Artificial Sequence
  ENSG00000167658_25 (sequence is synthesized)
aaggggaaaggaacacgcgggtagatgatttctagcaggcaggaagtcctgtgcggtgtcaccatgagcacctccagctgtactagtgccattggaataataaatttgataaggtggtga

SEQ ID NO: 544478 - DNA, 120 bp, Artificial Sequence
  ENSG00000167658_26 (sequence is synthesized)
gtctactgaagaaagcctgcgtctgaggcccatgcccaaggcgcccagcccgtagcttcaggctctgcgcaggggccctcacggctgcttctcgtttctcacacttccagatcgatcctg

SEQ ID NO: 544479 - DNA, 120 bp, Artificial Sequence
  ENSG00000167658_27 (sequence is synthesized)
gatgatgtggcaggcgtagtaatggcgggcaccgcggtggaagcggggagacagggaggcgccttatgtaacccgcgggccgcgagtttgagatcgattttctgccgggggactaggggc

SEQ ID NO: 544480 - DNA, 120 bp, Artificial Sequence
  ENSG00000167658_28 (sequence is synthesized)
ggcagggaatggcagaacgagcaaagcgacacctgaaaggctccccttttccttccaaataccttctcctgatgctgttaatcgtcgaccttaggcacttgtccttcctatgactcccag

SEQ ID NO: 544481 - DNA, 120 bp, Artificial Sequence
  ENSG00000167658_29 (sequence is synthesized)
ctggcctggcagctggaggccactgggccagggtgcgcggggagagacttggcaacgtctctttcccctggtttcttaattcatgggagaatgagtgaggttcagtccagcgagacagga

SEQ ID NO: 544482 - DNA, 120 bp, Artificial Sequence
  ENSG00000167658_30 (sequence is synthesized)
tggagaggcacagggattcggggtactgcgagctggaaggttttcttgaggagggggcttaactccgtggttctccctccctgggggacttgcccccactcctacaatatctggagaggt

SEQ ID NO: 544483 - DNA, 120 bp, Artificial Sequence
  ENSG00000167658_31 (sequence is synthesized)
gccggatgacttcctgttgcccaaggttgtgggttgcagggttccagaaggctgagctgcactggaataaagcttgcgggttttctctgtccctcaggcattaaaagctgtgaccccaaa

SEQ ID NO: 544484 - DNA, 120 bp, Artificial Sequence
  ENSG00000167664_0 (sequence is synthesized)
ggaagtctgtcaactgggagggggagaggggggtgatgggccaggaatggggtccccgggcatggtgctgggcctcctggtgcagatctgggccctgcaagaagcctcaagcctgagcgt

SEQ ID NO: 544485 - DNA, 120 bp, Artificial Sequence
  ENSG00000167664_1 (sequence is synthesized)
gcagcaggggcccaacttgctgcaggtgaggcagggcagtcaggcgaccctggtctgccaggtggaccaggccacagcctgggaacggctccgtgttaagtggacaaaggatggggccat

SEQ ID NO: 544486 - DNA, 120 bp, Artificial Sequence
  ENSG00000167664_2 (sequence is synthesized)
cctgtgtcaaccgtacatcaccaacggcagcctcagcctgggggtctgcgggccccagggacggctctcctggcaggcacccagccatctcaccctgcagctggaccctgtgagcctcaa

SEQ ID NO: 544487 - DNA, 120 bp, Artificial Sequence
  ENSG00000167664_3 (sequence is synthesized)
ccacagcggggcgtacgtgtgctgggcggccgtagagattcctgagttggaggaggctgagggcaacataacaaggctctttgtggacccagatgaccccacacagaacagaaaccggat

SEQ ID NO: 544488 - DNA, 120 bp, Artificial Sequence
  ENSG00000167664_4 (sequence is synthesized)
cgcaagcttcccaggattcctcttcgtgctgctgggggtgggaagcatgggtgtggctgcgatcgtgtggggtgcctggttctggggccgccgcagctgccagcaaagggactcaggtaa

SEQ ID NO: 544489 - DNA, 120 bp, Artificial Sequence
  ENSG00000167664_5 (sequence is synthesized)
gtgaggactgctctggagaggggaaggaccagaggggccagagcatttattcaacctccttcccgcaaccggccccccgccagccgcacctggcgtcaagaccctgccccagcccgagac

SEQ ID NO: 544490 - DNA, 120 bp, Artificial Sequence
  ENSG00000167664_6 (sequence is synthesized)
cctgccccagccccaggcccggccaccccgtctctatggtcagggtctctcctagaccaagccccacccagcagccgaggccaaaagggttccccaaagtgggagaggagtgagagatcc

SEQ ID NO: 544491 - DNA, 120 bp, Artificial Sequence
  ENSG00000167664_7 (sequence is synthesized)
aagggttccccaaagtgggagaggagtgagagatcccaggagacctcaacaggaccccacccataggtacacacaaaaaaggggggatcgaggccagacacggtggctcacgcctgtaat

SEQ ID NO: 544492 - DNA, 120 bp, Artificial Sequence
  ENSG00000167664_8 (sequence is synthesized)
caaaaagcaggaggattgggagcctgtcagccccatcctgagaccccgtcctcatttctgtaatgatggatctcgctcccactttcccccaagaacctaataaaggcttgtgaagaaaaa

SEQ ID NO: 544493 - DNA, 120 bp, Artificial Sequence
  ENSG00000167670_0 (sequence is synthesized)
cggcagcagcggcgcgggcgggagggcgaagagcagcggccgcctgaggggagcccgcgcctccgccgcctgagaggaggtcgagctgccgccggggcgatgctggaggagctggagtgc

SEQ ID NO: 544494 - DNA, 120 bp, Artificial Sequence
  ENSG00000167670_1 (sequence is synthesized)
gcgatgctggaggagctggagtgcggggcgcccggcgccaggggagccgccacagccatggattgcaaagatagaccagcttttccagttaagaagttaatacaagcccgtctgccgttt

SEQ ID NO: 544495 - DNA, 120 bp, Artificial Sequence
  ENSG00000167670_2 (sequence is synthesized)
aagcgcctgaatcttgtcccaaaggggaaagccgatgacatgtcagacgatcagggtacttctgtgcaaagtaaaagccccgatttagaggcctctttggacaccttggaaaacaactgt

SEQ ID NO: 544496 - DNA, 120 bp, Artificial Sequence
  ENSG00000167670_3 (sequence is synthesized)
catgtgggttctgacatagactttagaccgaaacttgtcaacgggaagggtcccttagataactttttaagaaatagaatcgaaaccagtattggccagagcacagtcatcattgatttg

SEQ ID NO: 544497 - DNA, 120 bp, Artificial Sequence
  ENSG00000167670_4 (sequence is synthesized)
acagaggactcgaatgagcagccagacagtcttgtggaccacaataaactaaattctgaagcctctccctccagggaggcaataaatggccagcgagaagacactggggatcagcagggg

SEQ ID NO: 544498 - DNA, 120 bp, Artificial Sequence
  ENSG00000167670_5 (sequence is synthesized)
ttgttgaaggccattcagaacgacaagttggcatttcctggagagaccctttcagacattccttgcaaaacagaggaggagggtgttggctgtggaggtgcagggaggagaggcgactcc

SEQ ID NO: 544499 - DNA, 120 bp, Artificial Sequence
  ENSG00000167670_6 (sequence is synthesized)
caggaatgttcgccacggagctgcccggagctgacgagtggcccgagaatgtgccccagaaaggagcaggacagttggagtgaagctgggggcatcctgttcaaagggaaggtgcctatg

SEQ ID NO: 544500 - DNA, 120 bp, Artificial Sequence
  ENSG00000167670_7 (sequence is synthesized)
gtggtcttgcaggacatcttggctgtgagaccaccgcaaatcaagtcccttccagccacaccccaaggcaagaacatgacccctgagagtgaggtgctggaatctttccccgaagaagac

SEQ ID NO: 544501 - DNA, 120 bp, Artificial Sequence
  ENSG00000167670_8 (sequence is synthesized)
tctgtactcagccattcgtccctgagctctccctcttccaccagctcgcccgaggggccgcctgctcccccaaagcagcacagcagtaccagtcccttccccacctccacgcccctccgc

SEQ ID NO: 544502 - DNA, 120 bp, Artificial Sequence
  ENSG00000167670_9 (sequence is synthesized)
agaataactaagaaattcgtcaaaggctctacagagaagaacaagctcagactgcaaagagatcaggagcgtctgggcaagcagctcaagttacgtgcagaaagggaagaaaaggagaag

SEQ ID NO: 544503 - DNA, 120 bp, Artificial Sequence
  ENSG00000167670_10 (sequence is synthesized)
ctgaaagaggaggccaagcgggccaaggaggaggccaagaagaagaaggaggaagagaaggagcttaaggaaaaggagaggcgggagaagcgggagaaggatgagaaggagaaggcggag

SEQ ID NO: 544504 - DNA, 120 bp, Artificial Sequence
  ENSG00000167670_11 (sequence is synthesized)
aagcagcggctcaaggaggagcggcgcaaggagagacaggaagccctggaggctaaacttgaggaaaaaaggaaaaaggaagaagagaaacggttaagagaagaagagaagcgcattaaa

SEQ ID NO: 544505 - DNA, 120 bp, Artificial Sequence
  ENSG00000167670_12 (sequence is synthesized)
gcagagaaggccgaaatcacgaggttcttccagaaaccaaagactccacaggcccccaagaccctggccggctcctgtgggaagtttgccccctttgaaattaaagagcacatggtcctg

SEQ ID NO: 544506 - DNA, 120 bp, Artificial Sequence
  ENSG00000167670_13 (sequence is synthesized)
gcccctcggcgtcggaccgctttccatccagacctctgcagtcagctggaccagctcctccagcagcagagcggcgagttctccttcttgaaagacctcaaaggccggcagcccctgagg

SEQ ID NO: 544507 - DNA, 120 bp, Artificial Sequence
  ENSG00000167670_14 (sequence is synthesized)
cccacgcacgtttccacccggaatgcagatatttttaacagtgatgtcgtcatcgtggagcgtgggaagggcgacggtgttcccgagaggaggaagtttggcaggatgaagctcctgcag

SEQ ID NO: 544508 - DNA, 120 bp, Artificial Sequence
  ENSG00000167670_15 (sequence is synthesized)
ttctgtgagaaccaccggcctgcctactggggtacctggaataagaagacggcactcatccgcgcgcgagacccctgggcccaggacacgaagctcctggactatgaggtggacagtgat

SEQ ID NO: 544509 - DNA, 120 bp, Artificial Sequence
  ENSG00000167670_16 (sequence is synthesized)
gaggagtgggaagaagaggagcctggggagtccctgtcccacagtgagggggatgatgatgacgacatgggagaggatgaagatgaggacgatggtttctttgtgccccatgggtacctg

SEQ ID NO: 544510 - DNA, 120 bp, Artificial Sequence
  ENSG00000167670_17 (sequence is synthesized)
tctgaggacgaaggtgtgacagaggagtgtgccgaccctgagaaccataaggtccgccagaaactgaaggccaaggagtgggacgagttcctggctaaggggaagcgctttcgcgtcctg

SEQ ID NO: 544511 - DNA, 120 bp, Artificial Sequence
  ENSG00000167670_18 (sequence is synthesized)
caacctgtgaagatcggctgcgtgtgggcggctgacagagactgcgcaggcgatgacctgaaggtactgcagcagttcgcagcctgcttcctggagaccctgccggcccaggaggagcag

SEQ ID NO: 544512 - DNA, 120 bp, Artificial Sequence
  ENSG00000167670_19 (sequence is synthesized)
acgcccaaggcctccaagcgggagaggagagacgagcagatcctggcccagctgctgccgctcctgcacggcaatgtgaacgggagcaaggtcatcatccgggagttccaggagcactgc

SEQ ID NO: 544513 - DNA, 120 bp, Artificial Sequence
  ENSG00000167670_20 (sequence is synthesized)
cgccggggactgctcagcaaccacaccggcagcccgcggagcccctccaccacctacctgcacacccccacccccagcgaggatgccgccatcccctctaagtcccggctcaagcggctc

SEQ ID NO: 544514 - DNA, 120 bp, Artificial Sequence
  ENSG00000167670_21 (sequence is synthesized)
atttccgagaactcagtgtatgagaagcggcctgacttcaggatgtgctggtacgtgcacccgcaggtgctacagagcttccagcaggagcacctgcccgtgccgtgccagtggagctat

SEQ ID NO: 544515 - DNA, 120 bp, Artificial Sequence
  ENSG00000167670_22 (sequence is synthesized)
gtgacatcggtgccctcggcccccaaagaggacagtggcagcgtcccctccacggggcccagccagggcactcccatctcgctgaagaggaagtcagcgggcagcatgtgcatcacccaa

SEQ ID NO: 544516 - DNA, 120 bp, Artificial Sequence
  ENSG00000167670_23 (sequence is synthesized)
ttcatgaagaagcgcaggcacgacggccagattggtgctgaagacatggacggcttccaggcagacacggaggaggaggaagaggaggagggcgactgtatgatcgtggatgtcccggat

SEQ ID NO: 544517 - DNA, 120 bp, Artificial Sequence
  ENSG00000167670_24 (sequence is synthesized)
gctgcggaggtccaagccccgtgtggagccgcttccggagctgggggtggtgtgggggtggacaccggcaaggccaccctgaccgcgagcccactgggtgcatcctgagagcaggggtga

SEQ ID NO: 544518 - DNA, 120 bp, Artificial Sequence
  ENSG00000167670_25 (sequence is synthesized)
cgtatgtagaatgcttagggtgtcctccccacagagcagatacttgaaccgactcaattcctgtgtaaagagcactttgtcctgcttcacggacctccccaaagtgtgcagagttctata

SEQ ID NO: 544519 - DNA, 120 bp, Artificial Sequence
  ENSG00000167670_26 (sequence is synthesized)
taggatgctggattagttcctttgatatttgtaaaaattcccccaagagccgcatatgaatctgccctttaataaagcattattgagattgctggcctattggggaagcctgcgggcaca

SEQ ID NO: 544520 - DNA, 120 bp, Artificial Sequence
  ENSG00000167670_27 (sequence is synthesized)
ggagcaggcgtggaatccaatacttgtaaatgaattgaagcgtcaggaccacccgcctggccacgtgcgcgggcccctggacctaacgaggcagtgtataaacttattctctagccctga

SEQ ID NO: 544521 - DNA, 120 bp, Artificial Sequence
  ENSG00000167670_28 (sequence is synthesized)
ggcctctctccacctggccttcctgtaagctcctgaagtcttcctctccctgtcttcccagctcctcgtggaggaatcttatttccctgctggtctccagtgaaggataccccccaacac

SEQ ID NO: 544522 - DNA, 120 bp, Artificial Sequence
  ENSG00000167670_29 (sequence is synthesized)
ctcgctcttgcaaatctcattccacagaacctcccttgctaaaaatgctctggggctgcacctgggcagctgtcctccctctcaccctgcaggctgcaccctcctccatctgtcccttca

SEQ ID NO: 544523 - DNA, 120 bp, Artificial Sequence
  ENSG00000167670_30 (sequence is synthesized)
gtccatgttcctgacctttctttggggacaggcagtgctgctttttaacaaatgcccatctttctagaattgttaggccagcttcacagggaggttcctgggaggtttgtgagcaggtct

SEQ ID NO: 544524 - DNA, 120 bp, Artificial Sequence
  ENSG00000167670_31 (sequence is synthesized)
gtaaggcagcgtgatcctgagcctggggttttccttctcagtgatgtcgtcatcgtggagcgtgggaagggcgacggtgttcccgagaggaggaagtttggcaggatgaagctcctgcag

SEQ ID NO: 544525 - DNA, 120 bp, Artificial Sequence
  ENSG00000167670_32 (sequence is synthesized)
gaagacatggacggcttccaggcagacacggaggaggaggaagaggaggagggcgactgtatgatcgtggatgtcccggatgctgcggccatgcgcagcctcttccagtctctctctgat

SEQ ID NO: 544526 - DNA, 120 bp, Artificial Sequence
  ENSG00000167670_33 (sequence is synthesized)
tcaccctcctgccacctcttgtgaggacactgggtcccggaccacccaggatcatctcccagctcaagacctttcatcatacccaagcccctcttgccaggtgaagttgcgcatctgcag

SEQ ID NO: 544527 - DNA, 120 bp, Artificial Sequence
  ENSG00000167670_34 (sequence is synthesized)
ccctgcagggactgggcctttgtgggcacagcacagcctcccctagcgcacgggacttcctccccaggtgggtggctcatcgggcacttgtggccaggtgctggcctgagaacaggtatc

SEQ ID NO: 544528 - DNA, 120 bp, Artificial Sequence
  ENSG00000167670_35 (sequence is synthesized)
cacatggtcccaccttgacagggagccacacccagcccccaagccatccgctcttcagcaggtgggcctgccctgtgtcccacggtttcaacggagaaccaagaaactatattcaaacaa

SEQ ID NO: 544529 - DNA, 120 bp, Artificial Sequence
  ENSG00000167671_0 (sequence is synthesized)
attttcttccggtggctggtctccggcggccccgtccccgactgggccccgtgcccccccgcccccgcggccccccgccgccgggccagccgccaccatgaagaaattctttcaggagtt

SEQ ID NO: 544530 - DNA, 120 bp, Artificial Sequence
  ENSG00000167671_1 (sequence is synthesized)
caaggccgacatcaagttcaagagcgcgggacccggtcagaagctcaaagagtccgtgggggaaaaggcccacaaagagaagcccaaccagccagcccccaggccgccccgccagggacc

SEQ ID NO: 544531 - DNA, 120 bp, Artificial Sequence
  ENSG00000167671_2 (sequence is synthesized)
caccaatgaggcacagatggcagccgctgccgccctagcccggctggagcagaagcagtcccgggcctggggccccacatcgcaggacaccatccgaaaccaggtgagaaaggaacttca

SEQ ID NO: 544532 - DNA, 120 bp, Artificial Sequence
  ENSG00000167671_3 (sequence is synthesized)
agccgaagccaccgtcagcgggagccccgaggccccagggaccaacgtggtatctgagcccagagaggaaggctctgcccacctggctgtgcctggcgtgtacttcacctgtccgctcac

SEQ ID NO: 544533 - DNA, 120 bp, Artificial Sequence
  ENSG00000167671_4 (sequence is synthesized)
tggggccaccctgaggaaggaccagcgggacgcctgcatcaaggaggccattctcttgcacttctccaccgacccagtggccgcctccatcatgaagatctacacgttcaacaaagacca

SEQ ID NO: 544534 - DNA, 120 bp, Artificial Sequence
  ENSG00000167671_5 (sequence is synthesized)
ggaccgggtgaagctgggtgtggacaccattgccaagtacctggacaacatccacctgcaccccgaggaggagaagtaccggaagatcaagctgcagaacaaggtgtttcaggagcgcat

SEQ ID NO: 544535 - DNA, 120 bp, Artificial Sequence
  ENSG00000167671_6 (sequence is synthesized)
taactgcctggaagggacccacgagttttttgaggccattgggttccagaaggtgttgcttcccgcccaggatcaggaggaccccgaggagttctacgtgctgagcgagaccaccttggc

SEQ ID NO: 544536 - DNA, 120 bp, Artificial Sequence
  ENSG00000167671_7 (sequence is synthesized)
gaactgcctggggacttcttcaacctcacagcagaggagatcaagcgggagcagaggctcaggtccgaggcggtggagcggctgagcgtgctgcggaccaaggccatgcgggagaaggag

SEQ ID NO: 544537 - DNA, 120 bp, Artificial Sequence
  ENSG00000167671_8 (sequence is synthesized)
gagcagcgggggctgcgcaagtacaactacacgctgctgcgcgtgcgcctccccgatggctgcctcctgcagggcactttctacgctcgggagcggctgggggcggtgtacgggttcgtc

SEQ ID NO: 544538 - DNA, 120 bp, Artificial Sequence
  ENSG00000167671_9 (sequence is synthesized)
cgggaggccctgcagagcgactggctgccttttgagctgctggcctcgggagggcagaagctgtccgaggacgagaacctggccttgaacgagtgcgggctggtgccctctgccctcctg

SEQ ID NO: 544539 - DNA, 120 bp, Artificial Sequence
  ENSG00000167671_10 (sequence is synthesized)
accttctcgtgggacatggctgtgctggaggacatcaaggccgcgggggccgagccggactccatcctgaaacccgagctcctgtcagccatcgagaagctcttgtgaaataaaagcagg

SEQ ID NO: 544540 - DNA, 120 bp, Artificial Sequence
  ENSG00000167671_11 (sequence is synthesized)
gttggcctcagccctgtgggtctgtctcatgctctccctgttcctctccccgccaccccagggcctccaagccacctctggaaatacttggctctgccccatgggcacgggaggggcgcc

SEQ ID NO: 544541 - DNA, 120 bp, Artificial Sequence
  ENSG00000167671_12 (sequence is synthesized)
agccgtggagctgtggaattgggccccgtggcagagcccccatcccttgggggctgtggggatgcgcccaagcccccgagggagaggcctggggacaccaacaaatctaagccctcccta

SEQ ID NO: 544542 - DNA, 120 bp, Artificial Sequence
  ENSG00000167671_13 (sequence is synthesized)
gctgcttggtaactgtgtcatgaagctgccggacagacacacgtggcatctccctgggcaggagagcaggcctgcagcatgggtcctgttcccgtgtgccgtgggtggcagtggctgcac

SEQ ID NO: 544543 - DNA, 120 bp, Artificial Sequence
  ENSG00000167671_14 (sequence is synthesized)
ctggcactagggctgctctgtggatgtgggtgacaacggcaggaggggatgctggccttcctgcacatagacctgcagttagtaaatcataagcccaaataaacaggttgtttgaatata

SEQ ID NO: 544544 - DNA, 120 bp, Artificial Sequence
  ENSG00000167671_15 (sequence is synthesized)
ggagtatagggcttgaactgagagcctggcctcccagaaggttttaatagacctacggcacagaaattgacacagcccggaaaaggcccacaaagagaagcccaaccagccagcccccag

SEQ ID NO: 544545 - DNA, 120 bp, Artificial Sequence
  ENSG00000167671_16 (sequence is synthesized)
cggtctctttgtaaacatgaggcccgggagtggttccagaacgtccatcatggggctgcgagagcaggagggatggggcgtccatggtggcgggaggttctgtaagtggcggtggccttg

SEQ ID NO: 544546 - DNA, 120 bp, Artificial Sequence
  ENSG00000167671_17 (sequence is synthesized)
atggatctcagcactgaggtcgagttctaaagccagagtgtgaggcacagttctgtcgcgtcacactggcttccaagtcccatggatctagccttgagaaggcggaaggggagacttgag

SEQ ID NO: 544547 - DNA, 120 bp, Artificial Sequence
  ENSG00000167671_18 (sequence is synthesized)
gccctggggcgtgggcagggctgcggtcttggagggtctctcttttcctttctgtgatgagcgcacagctggggccgctccaagccgctgttctgccttccttttcctgcccctgttacc

SEQ ID NO: 544548 - DNA, 120 bp, Artificial Sequence
  ENSG00000167671_19 (sequence is synthesized)
tgggcagcggagggccgtgcggcccgggctctcagtgagtggctttccctgcttccctcctcccagcacttctccaccgacccagtggccgcctccatcatgaagatctacacgttcaac

SEQ ID NO: 544549 - DNA, 120 bp, Artificial Sequence
  ENSG00000167671_20 (sequence is synthesized)
cacgcttcccttggctggtgtgctgtcccgggcgctctgatcccaaggaagctgttgtcttggggacatgcccatctggcagctctgcctctctgcatccacgtgctctgtcccgctccc

SEQ ID NO: 544550 - DNA, 120 bp, Artificial Sequence
  ENSG00000167671_21 (sequence is synthesized)
cacatcatctcagcaactaaaccggcagactgggccgggtcccaattttcagttggcatgagccccggctcagtgtgtaggtcattggtccgtgtgacgcagggggctgctgagggaccc

SEQ ID NO: 544551 - DNA, 120 bp, Artificial Sequence
  ENSG00000167671_22 (sequence is synthesized)
tgctgtgcagttgagggtggggggtggtgggtggagctctgggctgcctgggcaggtggcccgaatcctgacacatggccctgggctgcccttctgttcacccgccctcgtctgggcagc

SEQ ID NO: 544552 - DNA, 120 bp, Artificial Sequence
  ENSG00000167671_23 (sequence is synthesized)
ccagggaggtgcgggtggcagccctgcttcccaggccatgggtggctctctgggtgtggccgtgtgtgatggctgtgccgagcgtggatttgtgccccaatcttttccaggtcttagggt

SEQ ID NO: 544553 - DNA, 120 bp, Artificial Sequence
  ENSG00000167671_24 (sequence is synthesized)
acgtactgttctcagcctctccatgctgggacgctgttcgcagtcagcagggctggttctgggaaacccccagagttccagctatgacttctcccctcccccggtaacataggtggatag

SEQ ID NO: 544554 - DNA, 120 bp, Artificial Sequence
  ENSG00000167671_25 (sequence is synthesized)
gtgggacctcggggaggggcaggggctgggggtatccgtcttccagctattgagtttcagacattgagggttgcagactcatttgtgtcctctctgccacctgccatccctgtgaccctg

SEQ ID NO: 544555 - DNA, 120 bp, Artificial Sequence
  ENSG00000167671_26 (sequence is synthesized)
ctccagctcatcccagcacccctcccactggggctgtcaccccctctggccccctcattacctgctgaggtgggttgggaaggagcataggccgagagtgaggcagctccacccagaggc

SEQ ID NO: 544556 - DNA, 120 bp, Artificial Sequence
  ENSG00000167671_27 (sequence is synthesized)
ctcaggcaaagggctgggcctccttgggcctcagtttacccgtgtgcaaaatgaaggtgttgaaggaatcaggggtttcccaccctggcttccttggggaacatgtggaggaggcagggt

SEQ ID NO: 544557 - DNA, 120 bp, Artificial Sequence
  ENSG00000167671_28 (sequence is synthesized)
cccaccccactccccgggtctcaggatcgggggcaggcctggaggtccacgctgcccgccaacgccgagggagcaccccgcaggagccccctgctggcactgcggcccttcagctctggc

SEQ ID NO: 544558 - DNA, 120 bp, Artificial Sequence
  ENSG00000167671_29 (sequence is synthesized)
tctccactcttccggcactgtggcttccccaccgctgtggttaattgtgcccttccagggctggtgggacggtgaggggttccgtggggctcctgctggcaccaggggtgggctccatgg

SEQ ID NO: 544559 - DNA, 120 bp, Artificial Sequence
  ENSG00000167671_30 (sequence is synthesized)
ggtgtccgaggtgtgccttccacccggagatggtctgctgccctcgcgtcactgggccgcttcttccctctgactagaggccaagtgtggctgagctgctgttacctggagcaggaggca

SEQ ID NO: 544560 - DNA, 120 bp, Artificial Sequence
  ENSG00000167671_31 (sequence is synthesized)
aacaaggtgtttcaggtgggcgtgccttctggcccccggggcccaggctgggggtgggggcagctggcctgcaggagccggtggtggcccacaccaggcggtgggctccctggaggagct

SEQ ID NO: 544561 - DNA, 120 bp, Artificial Sequence
  ENSG00000167671_32 (sequence is synthesized)
agcgagagttgagccacaagcagtgaagggttcggccagtagaaggtagcaggacaagatggagagcaagacttttatgcaccggtcaccccaaatcaacaaattctgcctctcctcacc

SEQ ID NO: 544562 - DNA, 120 bp, Artificial Sequence
  ENSG00000167671_33 (sequence is synthesized)
aacatgtcgactctggggaggtttctcatgcaaaccagatgtctggttcttctgggggaaagggcagggactggggtcctgggcggtgttagcctcgcatcaggccccagcagtgtctgg

SEQ ID NO: 544563 - DNA, 120 bp, Artificial Sequence
  ENSG00000167671_34 (sequence is synthesized)
ctcctcagcctcactcttcgtgcctggttgtgactctttcctctgtgcagagctgttggagactccacagcccccaccgtagaaaagcaggtttgcatccagcactgaggcacccccagg

SEQ ID NO: 544564 - DNA, 120 bp, Artificial Sequence
  ENSG00000167671_35 (sequence is synthesized)
gctgggccccatccaggggtcgacagctgctcccaatagcgagagccgggcccctggactgggtggggtgtggccaggccatggaggaagccaggggcccccagtgacgcccatctccac

SEQ ID NO: 544565 - DNA, 120 bp, Artificial Sequence
  ENSG00000167671_36 (sequence is synthesized)
aatggggacgaggggcctcggggcaggagggcccggcttgggggtctctccattgcacagtgacacccatgtcctgccacgctgtagaggaccccgaggagttctacgtgctgagcgaga

SEQ ID NO: 544566 - DNA, 120 bp, Artificial Sequence
  ENSG00000167671_37 (sequence is synthesized)
cacgctgctgcgcgtgcgcctccccgatggctgcctcctgcagggtgggcaccaacgatgcccgtggagggcggctcgggttggtagggggccctgggccccacccgctctgactccccc

SEQ ID NO: 544567 - DNA, 120 bp, Artificial Sequence
  ENSG00000167671_38 (sequence is synthesized)
agcctccttgttctcagagcagggggcctgggcaggtccctgggtttgaatcctgctttcccacttactggcagcagggcctcgagcaagttcataactactccacgcctcagtttcccc

SEQ ID NO: 544568 - DNA, 120 bp, Artificial Sequence
  ENSG00000167671_39 (sequence is synthesized)
atcaaatgggagcggtgacgtgcgttagctagtgcagtaggtttaggcttaggtcctggagtcccggagggagagggcaggaggcctgggtgcgagccacagcctccaccagctgagatg

SEQ ID NO: 544569 - DNA, 120 bp, Artificial Sequence
  ENSG00000167671_40 (sequence is synthesized)
gcttccaggccggggcatccccgcgcccaggttgcccgctgagttccctgccgcggcaagggccgactctcggtctcagagtgacggcctacccctaccgcaggtgccctctgccctcct

SEQ ID NO: 544570 - DNA, 120 bp, Artificial Sequence
  ENSG00000167674_0 (sequence is synthesized)
agccgctaccgccgctgcagccgctttccgcggcctgggcctctcgccgtcagcatgccacacgccttcaagcccggggacttggtgttcgctaagatgaagggctaccctcactggcct

SEQ ID NO: 544571 - DNA, 120 bp, Artificial Sequence
  ENSG00000167674_1 (sequence is synthesized)
gccaggatcgacgacatcgcggatggcgccgtgaagcccccacccaacaagtaccccatctttttctttggcacacacgaaacagccttcctgggacccaaggacctgttcccctacgac

SEQ ID NO: 544572 - DNA, 120 bp, Artificial Sequence
  ENSG00000167674_2 (sequence is synthesized)
aaatgtaaagacaagtacgggaagcccaacaagaggaaaggcttcaatgaagggctgtgggagatccagaacaacccccacgccagctacagcgcccctccgccagtgagctcctccgac

SEQ ID NO: 544573 - DNA, 120 bp, Artificial Sequence
  ENSG00000167674_3 (sequence is synthesized)
agcgaggcccccgaggccaaccccgccgacggcagtgacgctgacgaggacgatgaggaccggggggtcatggccgtcacagcggtaaccgccacagctgccagcgacaggatggagagc

SEQ ID NO: 544574 - DNA, 120 bp, Artificial Sequence
  ENSG00000167674_4 (sequence is synthesized)
gactcagactcagacaagagtagcgacaacagtggcctgaagaggaagacgcctgcgctaaagatgtcggtctcgaaacgagcccgaaaggcctccagcgacctggatcaggccagcgtg

SEQ ID NO: 544575 - DNA, 120 bp, Artificial Sequence
  ENSG00000167674_5 (sequence is synthesized)
tccccatccgaagaggagaactcggaaagctcatctgagtcggagaagaccagcgaccaggacttcacacctgagaagaaagcagcggtccgggcgccacggaggggccctctgggggga

SEQ ID NO: 544576 - DNA, 120 bp, Artificial Sequence
  ENSG00000167674_6 (sequence is synthesized)
cggaaaaaaaagaaggcgccatcagcctccgactccgactccaaggccgattcggacggggccaagcctgagccggtggccatggcgcggtcggcgtcctcctcctcctcttcctcctcc

SEQ ID NO: 544577 - DNA, 120 bp, Artificial Sequence
  ENSG00000167674_7 (sequence is synthesized)
tcctccgactccgatgtgtctgtgaagaagcctccgaggggcaggaagccagcggagaagcctctcccgaagccgcgagggcggaaaccgaagcctgaacggcctccgtccagctccagc

SEQ ID NO: 544578 - DNA, 120 bp, Artificial Sequence
  ENSG00000167674_8 (sequence is synthesized)
agtgacagtgacagcgacgaggtggaccgcatcagtgagtggaagcggcgggacgaggcgcggaggcgcgagctggaggcccggcggcggcgagagcaggaggaggagctgcggcgcctg

SEQ ID NO: 544579 - DNA, 120 bp, Artificial Sequence
  ENSG00000167674_9 (sequence is synthesized)
tgagcccgtcaagaagcggggacgcaagggccggggccggggtcccccgtcctcctctgactccgagcccgaggccgagctggagagagaggccaagaaatcagcgaagaagccgcagtc

SEQ ID NO: 544580 - DNA, 120 bp, Artificial Sequence
  ENSG00000167674_10 (sequence is synthesized)
ctcaagcacagagcccgccaggaaacctggccagaaggagaagagagtgcggcccgaggagaagcaacaagccaagcccgtgaaggtggagcggacccggaagcggtccgagggcttctc

SEQ ID NO: 544581 - DNA, 120 bp, Artificial Sequence
  ENSG00000167674_11 (sequence is synthesized)
gatggacaggaaggtagagaagaagaaagagccctccgtggaggagaagctgcagaagctgcacagtgagatcaagtttgccctaaaggtcgacagcccggacgtgaagaggtgcctgaa

SEQ ID NO: 544582 - DNA, 120 bp, Artificial Sequence
  ENSG00000167674_12 (sequence is synthesized)
tgccctagaggagctgggaaccctgcaggtgacctctcagatcctccagaagaacacagacgtggtggccaccttgaagaagattcgccgttacaaagcgaacaaggacgtaatggagaa

SEQ ID NO: 544583 - DNA, 120 bp, Artificial Sequence
  ENSG00000167674_13 (sequence is synthesized)
ggcagcagaagtctatacccggctcaagtcgcgggtcctcggcccaaagatcgaggcggtgcagaaagtgaacaaggctgggatggagaaggagaaggccgaggagaagctggccgggga

SEQ ID NO: 544584 - DNA, 120 bp, Artificial Sequence
  ENSG00000167674_14 (sequence is synthesized)
ggagctggccggggaggaggccccccaggagaaggcggaggacaagcccagcaccgatctctcagccccagtgaatggcgaggccacatcacagaagggggagagcgcagaggacaagga

SEQ ID NO: 544585 - DNA, 120 bp, Artificial Sequence
  ENSG00000167674_15 (sequence is synthesized)
gcacgaggagggtcgggactcggaggaggggccaaggtgtggctcctctgaagacctgcacgacagcgtacgggagggtcccgacctggacaggcctgggagcgaccggcaggagcgcga

SEQ ID NO: 544586 - DNA, 120 bp, Artificial Sequence
  ENSG00000167674_16 (sequence is synthesized)
gagggcacggggggactcggaggccctggacgaggagagctgagccgcgggcagccaggcccagcccccgcccgagctcaggctgcccctctccttccccggctcgcaggagagcagagc

SEQ ID NO: 544587 - DNA, 120 bp, Artificial Sequence
  ENSG00000167674_17 (sequence is synthesized)
agagaactgtggggaacgctgtgctgtttgtatttgttcccttgggtttttttttcctgcctaatttctgtgatttccaaccaacatgaaatgactataaatggttttttaatgaaaaaa

SEQ ID NO: 544588 - DNA, 120 bp, Artificial Sequence
  ENSG00000167674_18 (sequence is synthesized)
accgcccgtgagcccctctttgcgggaggggtccccaggaaaggtcctgggagtccatagacgctgagcttggccccaccccctggttgcttcagagggccggatctggctttgctcagg

SEQ ID NO: 544589 - DNA, 120 bp, Artificial Sequence
  ENSG00000167674_19 (sequence is synthesized)
tggagcacctgccctggggccagctccgtccctggggtagggggagagctctctgggtggggcacagctttgcagtgaagggtacacagaagaatgcagcttcccatcgggaaggggctg

SEQ ID NO: 544590 - DNA, 120 bp, Artificial Sequence
  ENSG00000167674_20 (sequence is synthesized)
ctgcttcctgggttgaaggctcccctcctcccagcgtgatttgccccaagtaacttggctgatttctcggtgatttcctgggtcagtgggtaaagccaccccctcactggcctctcactg

SEQ ID NO: 544591 - DNA, 64 bp, Artificial Sequence
  ENSG00000167674_21 (sequence is synthesized)
gttcaagcgattctcctgcctcagtgctttagtagacacggggtttcatcatgttggccaggct

SEQ ID NO: 544592 - DNA, 62 bp, Artificial Sequence
  ENSG00000167674_22 (sequence is synthesized)
tcccccagcccactttctaaatggccttgagtgggcaaacctgcccatgagaattcggcagg

SEQ ID NO: 544593 - DNA, 120 bp, Artificial Sequence
  ENSG00000167674_23 (sequence is synthesized)
ggccttgagtgggcaaacctgcccatgagaattcggcaggccggtatggcagtggcggggtacagagcagcacatggcaccgagcctcagcaatgggcctctctcctgcacgcgtgtcac

SEQ ID NO: 544594 - DNA, 120 bp, Artificial Sequence
  ENSG00000167674_24 (sequence is synthesized)
ccttgagggccttttcctagctcgctgactctggtagacaaagccagcccttggccatgtgaacgaggaaaagaatcctgggatttcatgagaactcgggaaaaggcttgtatctttggg

SEQ ID NO: 544595 - DNA, 120 bp, Artificial Sequence
  ENSG00000167674_25 (sequence is synthesized)
cagctcgagcctgtggctgccctggtctgccctaggcctaggctgtggcagggcctccccgcctcccgtttcccggcttagctcccagggcctcccaaaggtttcctttgcagtgggttt

SEQ ID NO: 544596 - DNA, 120 bp, Artificial Sequence
  ENSG00000167674_26 (sequence is synthesized)
gggtccaccccttcaggcgccagcccctcagtggcagagtgccggtgacggggcccgactgaggggagcacttctccacaggcccgtgaaggtggagcggacccggaagcggtccgaggg

SEQ ID NO: 544597 - DNA, 120 bp, Artificial Sequence
  ENSG00000167674_27 (sequence is synthesized)
tttggactcctgagcggcagcggtgtgacgcgcaccctgggtccgagccgctcctcctgtgccagtccctctgggatgggtcccagggatgtcgtccttactcgggcctcccaccttcac

SEQ ID NO: 544598 - DNA, 120 bp, Artificial Sequence
  ENSG00000167674_28 (sequence is synthesized)
cttccggcggcccctacagagaggcagctccagggctttgagctgcctgcccctggcctcctgggaaggtggcttcttgccgagcctccagggtggcccaggtaggtaggccccgagcac

SEQ ID NO: 544599 - DNA, 120 bp, Artificial Sequence
  ENSG00000167674_29 (sequence is synthesized)
gggcacccggctatctgacggtgcctgtgcccatcactgtgggctgctgtctggtacaaggctcagtggagtcactcacttacccagcagctgccttgtgctatgcctggctggcgccag

SEQ ID NO: 544600 - DNA, 120 bp, Artificial Sequence
  ENSG00000167674_30 (sequence is synthesized)
cgtggggaccctggagatggttgtggtctctagtggcagaagacaggcagataggagggcggcactcgagcctcaggtgccacaacgggggtacactcctcggtgcccatcccacccaac

SEQ ID NO: 544601 - DNA, 120 bp, Artificial Sequence
  ENSG00000167674_31 (sequence is synthesized)
ccagctgcatcctctgggggaccgcccgtgagcccctctttgcgggaggggtccccaggaaaggtcctgggagtccatagacgctgagcttggccccaccccctggttgcttcagagggc

SEQ ID NO: 544602 - DNA, 120 bp, Artificial Sequence
  ENSG00000167674_32 (sequence is synthesized)
cgactgaccccagggccccgctggctggcacttccggcggcccctacagagaggcagctccagggctttgagctgcctgcccctggcctcctgggaaggtggcttcttgccgagcctcca

SEQ ID NO: 544603 - DNA, 120 bp, Artificial Sequence
  ENSG00000167676_0 (sequence is synthesized)
atgcagaccctgggcagcttctttgggtccctgcctggcttcagctctgcccggaacctggtggccaacgcacatagctcggcgagagcccggccggccgctgaccccacaggagcgcct

SEQ ID NO: 544604 - DNA, 120 bp, Artificial Sequence
  ENSG00000167676_1 (sequence is synthesized)
gctgccgaggctgcccaaccacaggctcaggtggctgcccacccagagcagacggccccatggacggagaaggagctgcaaccttcggaaaagcagatggtgtccggggccaaagacctg

SEQ ID NO: 544605 - DNA, 120 bp, Artificial Sequence
  ENSG00000167676_2 (sequence is synthesized)
gtgtgttccaagatgtccagggccaaggatgccgtgtcctccggggtggccagcgtggtggacgtggctaagggagtggtccagggaggcctggacaccactcggtctgcacttacgggc

SEQ ID NO: 544606 - DNA, 120 bp, Artificial Sequence
  ENSG00000167676_3 (sequence is synthesized)
accaaggaggtggtgtccagcggggtcacaggggccatggacatggctaagggggccgtccaagggggtctggacacctcgaaggctgtcctcaccggcaccaaggacacggtgtccact

SEQ ID NO: 544607 - DNA, 120 bp, Artificial Sequence
  ENSG00000167676_4 (sequence is synthesized)
gggctcacgggggcagtgaatgtggccaaagggaccgtacaggccggtgtggacaccaccaagactgtgctgaccggcaccaaagacacagtgactactggggtcatgggggcagtgaac

SEQ ID NO: 544608 - DNA, 120 bp, Artificial Sequence
  ENSG00000167676_5 (sequence is synthesized)
ttggccaaagggactgtccagactggcgtggaaacctccaaggctgtgctgaccggcaccaaagatgctgtgtccactgggctcacaggggcagtgaatgtggccagaggaagcattcag

SEQ ID NO: 544609 - DNA, 120 bp, Artificial Sequence
  ENSG00000167676_6 (sequence is synthesized)
accggtgtggacaccagtaagactgtcctaacaggtaccaaggacaccgtctgtagtggggtgactggtgccatgaatgtggccaaaggaaccatccagaccggcgtggacaccagtaag

SEQ ID NO: 544610 - DNA, 120 bp, Artificial Sequence
  ENSG00000167676_7 (sequence is synthesized)
actgtcctaacaggtaccaaggacaccgtctgtagtggggtgactggtgccatgaatgtggccaaaggaaccatccagaccggcgtggacaccagtaagactgtcctaacaggtaccaag

SEQ ID NO: 544611 - DNA, 120 bp, Artificial Sequence
  ENSG00000167676_8 (sequence is synthesized)
gacaccgtctgtagtggggtgactggtgccatgaatgtggccaaaggaaccatccagaccggcgtggacaccaccaagactgtcctaactggcaccaagaacactgtctgcagtggggtg

SEQ ID NO: 544612 - DNA, 120 bp, Artificial Sequence
  ENSG00000167676_9 (sequence is synthesized)
accggtgccgtgaacttggccaaagaggccatccaggggggcctggataccaccaagtctatggtcatgggtacgaaagacacgatgtccactgggctcacaggggcagcgaatgtggcc

SEQ ID NO: 544613 - DNA, 120 bp, Artificial Sequence
  ENSG00000167676_10 (sequence is synthesized)
aagggggccatgcaaactgggctgaacacaacccaaaatatcgcaacaggtacaaaggacaccgtctgcagtggggtgactggtgccatgaatttggccagaggaaccatccagacaggc

SEQ ID NO: 544614 - DNA, 120 bp, Artificial Sequence
  ENSG00000167676_11 (sequence is synthesized)
gtggacaccaccaagatcgttctaactggtaccaaggacactgtctgcagtggggtcaccggtgctgcgaatgtggccaaaggggccgtccagggcggcctggacactacaaagtctgtc

SEQ ID NO: 544615 - DNA, 120 bp, Artificial Sequence
  ENSG00000167676_12 (sequence is synthesized)
ctgactggcactaaagatgctgtgtccactgggctcacaggggctgtgaacgtggccaaagggaccgtccagaccggcgtagacaccaccaagactgtcctaaccggcaccaaggacacc

SEQ ID NO: 544616 - DNA, 120 bp, Artificial Sequence
  ENSG00000167676_13 (sequence is synthesized)
gtctgcagtggggtgaccagtgctgtgaacgtggccaaaggggccgtccaggggggcctggacaccaccaagtctgtggtcataggtacaaaagacacgatgtccactgggctcacgggg

SEQ ID NO: 544617 - DNA, 120 bp, Artificial Sequence
  ENSG00000167676_14 (sequence is synthesized)
gcagcgaatgtggccaagggggctgtccagacaggtgtagacacagccaagaccgtgctgaccggcaccaaggacacagtgactactgggctcgtgggggcagtgaatgtcgccaaaggg

SEQ ID NO: 544618 - DNA, 120 bp, Artificial Sequence
  ENSG00000167676_15 (sequence is synthesized)
accgtccagacaggcatggacaccaccaaaactgtcctaaccggtaccaaggacaccatctacagtggggtcaccagtgccgtgaacgtggccaagggggctgtgcaaactgggctgaaa

SEQ ID NO: 544619 - DNA, 120 bp, Artificial Sequence
  ENSG00000167676_16 (sequence is synthesized)
acgacccaaaatatcgcgacaggtacaaagaacacctttggcagtggggtgaccagtgctgtgaatgtggccaaaggggctgcccagacaggtgtagacacggccaagaccgtgctgacc

SEQ ID NO: 544620 - DNA, 120 bp, Artificial Sequence
  ENSG00000167676_17 (sequence is synthesized)
ggcaccaaggacacagtcactactgggctcatgggggcagtgaatgtcgccaaagggactgtccagaccagtgtggacaccaccaagactgtcctaactggtaccaaggacaccgtctgc

SEQ ID NO: 544621 - DNA, 120 bp, Artificial Sequence
  ENSG00000167676_18 (sequence is synthesized)
agtggggtgaccggtgctgcgaatgtggccaaaggggccatccaagggggcctggacactacaaagtctgtcctgactggcactaaagatgctgtgtccactgggctcacaggggctgtg

SEQ ID NO: 544622 - DNA, 120 bp, Artificial Sequence
  ENSG00000167676_19 (sequence is synthesized)
aagttggccaaagggactgtccagaccggcatggacaccaccaagactgtgttaactggtaccaaggatgctgtgtgcagtggggtgaccggtgctgcgaatgtggccaagggggccgtc

SEQ ID NO: 544623 - DNA, 120 bp, Artificial Sequence
  ENSG00000167676_20 (sequence is synthesized)
cagatgggtgtagacacggccaagaccgtgctgaccggtaccaaggacactgtctgcagtggggtcaccggtgctgcgaacgtggccaagggtgctgtgcaaactgggctgaaaacgacc

SEQ ID NO: 544624 - DNA, 120 bp, Artificial Sequence
  ENSG00000167676_21 (sequence is synthesized)
caaaatatcgcaacaggtacaaagaacacccttggcagtggggtgaccggtgctgcgaaagtggccaaaggggccgtccaggggggcctggacactacaaagtctgtcctgactggcact

SEQ ID NO: 544625 - DNA, 120 bp, Artificial Sequence
  ENSG00000167676_22 (sequence is synthesized)
aaagatgccgtgtccactgggctcacaggggctgtgaacttggccaaagggactgtccagaccggcgtggacaccagcaagactgtcctgaccggtaccaaggacaccgtctgcagtgga

SEQ ID NO: 544626 - DNA, 120 bp, Artificial Sequence
  ENSG00000167676_23 (sequence is synthesized)
gtcactggtgccgtaaatgtggccaaagggaccgtccagacaggtgtggacacagccaagacggtgctgagtggcgctaaggatgcagtgactactggagtcacgggggcagtgaatgtg

SEQ ID NO: 544627 - DNA, 120 bp, Artificial Sequence
  ENSG00000167676_24 (sequence is synthesized)
gccaaaggaaccgtgcagaccggcgtggacgcctccaaggctgtgcttatgggtaccaaggacactgtcttcagtggggttaccggtgccatgagcatggccaaaggggccgtccagggg

SEQ ID NO: 544628 - DNA, 120 bp, Artificial Sequence
  ENSG00000167676_25 (sequence is synthesized)
ggcctggacaccaccaagacagtgctgaccggaaccaaagacgcagtgtccgctgggctcatggggtcagggaacgtggcgacaggggccacccacactggcctcagcaccttccagaac

SEQ ID NO: 544629 - DNA, 120 bp, Artificial Sequence
  ENSG00000167676_26 (sequence is synthesized)
ctccacgcccccggatgtgctcagtgtaggcccggagcctgcctgggaagccgcagccactaccaagggccttgcgactgacgtggcgacgttcacccaaggggccgccccaggcaggga

SEQ ID NO: 544630 - DNA, 120 bp, Artificial Sequence
  ENSG00000167676_27 (sequence is synthesized)
ggacacggggcttttggccaccacacacggccccgaagaagccccacgcttggcaatgctgcagaatgagttggaggggctgggggacatcttccaccccatgaatgcggaggagcaagc

SEQ ID NO: 544631 - DNA, 120 bp, Artificial Sequence
  ENSG00000167676_28 (sequence is synthesized)
tcagctggctgcctcccagcctgggccaaaggtgctgtcggcggaacaggggagctacttcgttcgtttaggtgacctgggtcccagcttccgccagcgggcatttgaacacgcggtgag

SEQ ID NO: 544632 - DNA, 120 bp, Artificial Sequence
  ENSG00000167676_29 (sequence is synthesized)
ccacctgcagcacggccagttccaagccagggacactctggcccagctccaggactgcttcaggctgattgaaaaggcccagcaggctccagaagggcagccacgtctggaccagggctc

SEQ ID NO: 544633 - DNA, 120 bp, Artificial Sequence
  ENSG00000167676_30 (sequence is synthesized)
aggtgccagtgcggaggacgctgctgtccaggaggagcgggatgccggggttctgtccagggtctgcggccttctccggcagctgcacacggcctacagtggcctggtctccagcctcca

SEQ ID NO: 544634 - DNA, 120 bp, Artificial Sequence
  ENSG00000167676_31 (sequence is synthesized)
gggcctgcccgccgagctccagcagccagtggggcgggcgcggcacagcctctgtgagctctatggcatcgtggcctcagctggctctgtagaggagctgcccgcagagcggctggtgca

SEQ ID NO: 544635 - DNA, 120 bp, Artificial Sequence
  ENSG00000167676_32 (sequence is synthesized)
gagccgcgagggtgtgcaccaggcttggcaggggttagagcagctgctggagggcctacagcacaatcccccgctcagctggctggtagggcccttcgccttgcccgctggcgggcagta

SEQ ID NO: 544636 - DNA, 120 bp, Artificial Sequence
  ENSG00000167676_33 (sequence is synthesized)
gctgtaggagcctgcaggcccggcgcggggtcgccctgctctgtccagggaggagctgcctcagaactttctccccgcccccaaacctggatcggttccctaaagccctagacctttggg

SEQ ID NO: 544637 - DNA, 120 bp, Artificial Sequence
  ENSG00000167676_34 (sequence is synthesized)
gctgcagctggctgagcgccgaggggctgcggaggcagtgaccttcttaactgagccaccccacgccctgctccgggcctgcctgcatctcccacctcctccccagcgctgcctgcccct

SEQ ID NO: 544638 - DNA, 120 bp, Artificial Sequence
  ENSG00000167676_35 (sequence is synthesized)
ctcggagcctggggtcactcagaccaccagccaagagccttcccttgaagtccccaagcaagcactgcaattaggaaagagaaaaagcagcgtgcccagcctggaagggcatctgtttgc

SEQ ID NO: 544639 - DNA, 120 bp, Artificial Sequence
  ENSG00000167676_36 (sequence is synthesized)
cccgctagcaacccttttatatctagcagggctcttccagtcctgcagcacgggcccccagctatcagcggtgcaggcagtgctgtggcatcccaggctccgggcagctccgttctcatg

SEQ ID NO: 544640 - DNA, 120 bp, Artificial Sequence
  ENSG00000167676_37 (sequence is synthesized)
ctgaaagtgggtctccggccttagcacacacaccttgagggtcttaagaaccacattccctcatagtagaaagtactagaaaaagcgacactgccatcatcatcccaaggcaggctgcta

SEQ ID NO: 544641 - DNA, 120 bp, Artificial Sequence
  ENSG00000167676_38 (sequence is synthesized)
ctgcctttgctgacccccggggtggcctcacggtggggacaaagctgccaggagccacagcagccacagctggggctttgcaccagcctggcttgagactgagcagtttgcagggggtgg

SEQ ID NO: 544642 - DNA, 120 bp, Artificial Sequence
  ENSG00000167676_39 (sequence is synthesized)
ggggtgcaaaaaacaagcaaacaggctgctgctgcctccagctgcccaccacaggcctgccccaggcacctggggctctgaggcccctggggaggctgggcccagcagctgcccctggag

SEQ ID NO: 544643 - DNA, 120 bp, Artificial Sequence
  ENSG00000167676_40 (sequence is synthesized)
aacacagacaaaggacttccccgcagggaactgtgccctatggagggatcagacagggctgggaacagccacagaggctgcgtgcctatggcacagcccttcctccgccgcacactcccc

SEQ ID NO: 544644 - DNA, 120 bp, Artificial Sequence
  ENSG00000167676_41 (sequence is synthesized)
ctgggtcctcaggcccacccaagcgccgggctgcagaggaagcggggctggggaggctgcaggcatcagagacactggtggtggcggacccggccgccgggccccgtgctctcaggctag

SEQ ID NO: 544645 - DNA, 120 bp, Artificial Sequence
  ENSG00000167676_42 (sequence is synthesized)
cccaggtcgtggaggctggcaggctcaggtcgggtgtgagacgtgccgtggctgcgctcagtccagcggggaggagccgttcagcccggcctccccaggaagccatatccccactcaccc

SEQ ID NO: 544646 - DNA, 120 bp, Artificial Sequence
  ENSG00000167676_43 (sequence is synthesized)
ggtaagagaaccttgtcgtcccctttccatgctctcctaggacacgagcccaggaaccccagacccagggggaggaagggtggaggggccccaggggtcaccgtgtgcaccaggggccgt

SEQ ID NO: 544647 - DNA, 120 bp, Artificial Sequence
  ENSG00000167676_44 (sequence is synthesized)
gaggggccggggcattcagctcagctctgaaccggggaagctggcacggcaaggactgcctcaggtgacgggccgtgagaggggacgggtcaggagccttcccaagccttctcctcagcc

SEQ ID NO: 544648 - DNA, 120 bp, Artificial Sequence
  ENSG00000167676_45 (sequence is synthesized)
cgacacccatggccatcggaggctaggatgccagacacagccatttgcagaaatcaggcacagtgactgcagctcacgtccagccaaccaagcatggggccgcagctcaggaagtccctt

SEQ ID NO: 544649 - DNA, 120 bp, Artificial Sequence
  ENSG00000167676_46 (sequence is synthesized)
cccgccacaccacagcctaattcttactgggacggaggcaactcggctacgctgggcaggacgacaaacacgagacgccactgtggaatgagcaacttcggagcacggggtgacttgctt

SEQ ID NO: 544650 - DNA, 120 bp, Artificial Sequence
  ENSG00000167676_47 (sequence is synthesized)
gggaccgtgcccacgtgacagccccttatgcagaggaggaaagagaagccccgagtgggaggggaacctgtccaaagtcacacggtgtgtgggtgacacagctggggtgagtcgaggctg

SEQ ID NO: 544651 - DNA, 120 bp, Artificial Sequence
  ENSG00000167676_48 (sequence is synthesized)
gcccctgaggcccatgctccctgaacgctggagaccactgtcggctagcagcggctctcagggaaggcctggtctccaccctcccagcctagcctcgcggaccctcgtcctccccacatc

SEQ ID NO: 544652 - DNA, 120 bp, Artificial Sequence
  ENSG00000167676_49 (sequence is synthesized)
ggacctgctcacctgcctggaccctgggctgccagatgcaggaagcatcaaaccccccagcctcgtgggtgcggggcagggcgcaggcagcacagcttagatgccctggtttgtccctct

SEQ ID NO: 544653 - DNA, 120 bp, Artificial Sequence
  ENSG00000167676_50 (sequence is synthesized)
tgtctcctgggaagagcttgctcccgcccagctctcctgccactggcctttcagggttgggctgggcccagagtgccttttagtcgcttctcacggtggcctgatggctcaacccagtcc

SEQ ID NO: 544654 - DNA, 120 bp, Artificial Sequence
  ENSG00000167676_51 (sequence is synthesized)
caaacgggcccagtgacactgccgcctgcgccccagctcaggcccccactgcaccagcaatgctagaaaaccaagccaataaaagtgatttcttttttcattaaaaaaccatttatagtc

SEQ ID NO: 544655 - DNA, 120 bp, Artificial Sequence
  ENSG00000167676_52 (sequence is synthesized)
gtcctccaggggaccccgcgcagtccaggtgagcggggccgcgtctgcttcggtgacaccagggtgaggccaggcctgcagcttctcacgttctcactatgtctgctccagacgaaggga

SEQ ID NO: 544656 - DNA, 120 bp, Artificial Sequence
  ENSG00000167680_0 (sequence is synthesized)
agaatccctgagccagaaggccagggcagggctgggggatacccctgctgctcagacaggaaaatgggctcggagcttgcccaatacttcccagaaggacgaggctgctgaacttctcat

SEQ ID NO: 544657 - DNA, 120 bp, Artificial Sequence
  ENSG00000167680_1 (sequence is synthesized)
tcggggctccgggacctggactgtacccctttctggcgtcacctcctcctgtcgcctggccctcgccatgcagaccccgcgagcgtcccctccccgcccggccctgctgcttctgctgct

SEQ ID NO: 544658 - DNA, 120 bp, Artificial Sequence
  ENSG00000167680_2 (sequence is synthesized)
gctactggggggcgcccacggcctctttcctgaggagccgccgccgcttagcgtggcccccagggactacctgaaccactatcccgtgtttgtgggcagcgggcccggacgcctgacccc

SEQ ID NO: 544659 - DNA, 120 bp, Artificial Sequence
  ENSG00000167680_3 (sequence is synthesized)
cgcagaaggtgctgacgacctcaacatccagcgagtcctgcgggtcaacaggacgctgttcattggggacagggacaacctctaccgcgtagagctggagccccccacgtccacggagct

SEQ ID NO: 544660 - DNA, 120 bp, Artificial Sequence
  ENSG00000167680_4 (sequence is synthesized)
gcggtaccagaggaagctgacctggagatctaaccccagcgacataaacgtgtgtcggatgaagggcaaacaggagggcgagtgtcgaaacttcgtaaaggtgctgctccttcgggacga

SEQ ID NO: 544661 - DNA, 120 bp, Artificial Sequence
  ENSG00000167680_5 (sequence is synthesized)
gtccacgctctttgtgtgcggttccaacgccttcaacccggtgtgcgccaactacagcatagacaccctgcagcccgtcggagacaacatcagcggtatggcccgctgcccgtacgaccc

SEQ ID NO: 544662 - DNA, 120 bp, Artificial Sequence
  ENSG00000167680_6 (sequence is synthesized)
caagcacgccaatgttgccctcttctctgacgggatgctcttcacagctactgttaccgacttcctagccattgatgctgtcatctaccgcagcctcggggacaggcccaccctgcgcac

SEQ ID NO: 544663 - DNA, 120 bp, Artificial Sequence
  ENSG00000167680_7 (sequence is synthesized)
cgtgaaacatgactccaagtggttcaaagagccttactttgtccatgcggtggagtggggcagccatgtctacttcttcttccgggagattgcgatggagtttaactacctggagaaggt

SEQ ID NO: 544664 - DNA, 120 bp, Artificial Sequence
  ENSG00000167680_8 (sequence is synthesized)
ggtggtgtcccgcgtggcccgagtgtgcaagaacgacgtgggaggctccccccgcgtgctggagaagcagtggacgtccttcctgaaggcgcggctcaactgctctgtacccggagactc

SEQ ID NO: 544665 - DNA, 120 bp, Artificial Sequence
  ENSG00000167680_9 (sequence is synthesized)
ccatttctacttcaacgtgctgcaggctgtcacgggcgtggtcagcctcgggggccggcccgtggtcctggccgttttttccacgcccagcaacagcatccctggctcggctgtctgcgc

SEQ ID NO: 544666 - DNA, 120 bp, Artificial Sequence
  ENSG00000167680_10 (sequence is synthesized)
ctttgacctgacacaggtggcagctgtgtttgaaggccgcttccgagagcagaagtcccccgagtccatctggacgccggtgccggaggatcaggtgcctcgaccccggcccgggtgctg

SEQ ID NO: 544667 - DNA, 120 bp, Artificial Sequence
  ENSG00000167680_11 (sequence is synthesized)
cgcagcccccgggatgcagtacaatgcctccagcgccttgccggatgacatcctcaactttgtcaagacccaccctctgatggacgaggcggtgccctcgctgggccatgcgccctggat

SEQ ID NO: 544668 - DNA, 120 bp, Artificial Sequence
  ENSG00000167680_12 (sequence is synthesized)
cctgcggaccctgatgaggcaccagctgactcgagtggctgtggacgtgggagccggcccctggggcaaccagaccgttgtcttcctgggttctgaggcggggacggtcctcaagttcct

SEQ ID NO: 544669 - DNA, 120 bp, Artificial Sequence
  ENSG00000167680_13 (sequence is synthesized)
cgtccggcccaatgccagcacctcagggacgtctgggctcagtgtcttcctggaggagtttgagacctaccggccggacaggtgtggacggcccggcggtggcgagacagggcagcggct

SEQ ID NO: 544670 - DNA, 120 bp, Artificial Sequence
  ENSG00000167680_14 (sequence is synthesized)
gctgagcttggagctggacgcagcttcggggggcctgctggctgccttcccccgctgcgtggtccgagtgcctgtggctcgctgccagcagtactcggggtgtatgaagaactgtatcgg

SEQ ID NO: 544671 - DNA, 120 bp, Artificial Sequence
  ENSG00000167680_15 (sequence is synthesized)
cagtcaggacccctactgcgggtgggcccccgacggctcctgcatcttcctcagcccgggcaccagagccgcctttgagcaggacgtgtccggggccagcacctcaggcttaggggactg

SEQ ID NO: 544672 - DNA, 120 bp, Artificial Sequence
  ENSG00000167680_16 (sequence is synthesized)
ctctccgaggaccgcgcggggctggtgtcggtgaacctgctggtaacgtcgtcggtggcggccttcgtggtgggagccgtggtgtccggcttcagcgtgggctggttcgtgggcctccgt

SEQ ID NO: 544673 - DNA, 120 bp, Artificial Sequence
  ENSG00000167680_17 (sequence is synthesized)
gttcgtgggcctccgtgagcggcgggagctggcccggcgcaaggacaaggaggccatcctggcgcacggggcgggcgaggcggtgctgagcgtcagccgcctgggcgagcgcagggcgca

SEQ ID NO: 544674 - DNA, 120 bp, Artificial Sequence
  ENSG00000167680_18 (sequence is synthesized)
ggggttcccccggaggccctgctggcgcccctgatgcagaacggctgggccaaggccacgctgctgcagggcgggccccacgacctggactcggggctgctgcccacgcccgagcagacg

SEQ ID NO: 544675 - DNA, 80 bp, Artificial Sequence
  ENSG00000167680_19 (sequence is synthesized)
ctgctgcccacgcccgagcagacgccgctgccgcagaagcgcctgcccactccgcacccgcacccccacgccctgggccc

SEQ ID NO: 544676 - DNA, 80 bp, Artificial Sequence
  ENSG00000167680_20 (sequence is synthesized)
gcttcatcctccctcctgctgctggcgcccgcccgggcccccgagcagccccccgcgcctggggagccgacccccgacgg

SEQ ID NO: 544677 - DNA, 80 bp, Artificial Sequence
  ENSG00000167680_21 (sequence is synthesized)
gacttcccgctcaccccccacgccagcccggaccgccggcgggtggtgtccgcgcccacgggccccttggacccagcctc

SEQ ID NO: 544678 - DNA, 120 bp, Artificial Sequence
  ENSG00000167680_22 (sequence is synthesized)
cctccggccgccaccctgcgccgcacccacacgttcaacagcggcgaggcccggcctggggaccgccaccgcggctgccacgcccggccgggcacagacttggcccacctcctcccctat

SEQ ID NO: 544679 - DNA, 120 bp, Artificial Sequence
  ENSG00000167680_23 (sequence is synthesized)
cggccgggcacagacttggcccacctcctcccctatgggggggcggacaggactgcgccccccgtgccctaggccgggggccccccgatgccttggcagtgccagccacgggaaccagga

SEQ ID NO: 544680 - DNA, 120 bp, Artificial Sequence
  ENSG00000167680_24 (sequence is synthesized)
gcgagagacggtgccagaacgccggggcccggggcaactccgagtgggtgctcaagtcccccccgcgacccacccgcggagtggggggccccctccgccacaaggaagcacaaccagctc

SEQ ID NO: 544681 - DNA, 120 bp, Artificial Sequence
  ENSG00000167680_25 (sequence is synthesized)
gccctccccctacccggggccgcaggacgctgagacggtttgggggtgggtgggcgggaggactttgctatggatttgaggttgaccttatgcgcgtaggttttggttttttttgcagtt

SEQ ID NO: 544682 - DNA, 120 bp, Artificial Sequence
  ENSG00000167680_26 (sequence is synthesized)
ttggtttcttttgcggttttctaaccaattgcacaactccgttctcggggtggcggcaggcaggggaggcttggacgccggtggggaatggggggccacagctgcagacctaagccctcc

SEQ ID NO: 544683 - DNA, 120 bp, Artificial Sequence
  ENSG00000167680_27 (sequence is synthesized)
cccacccctggaaaggtccctccccaacccaggcccctggcgtgtgtgggtgtgcgtgcgtgtgcgtgccgtgttcgtgtgcaaggggccggggaggtgggcgtgtgtgtgcgtgccagc

SEQ ID NO: 544684 - DNA, 120 bp, Artificial Sequence
  ENSG00000167680_28 (sequence is synthesized)
gaaggctgctgtgggcgtgtgtgtcaagtgggccacgcgtgcagggtgtgtgtccacgagcgacgatcgtggtggccccagcggcctgggcgttggctgagccgacgctggggcttccag

SEQ ID NO: 544685 - DNA, 120 bp, Artificial Sequence
  ENSG00000167680_29 (sequence is synthesized)
aaggcccgggggtctccgaggtgccggttaggagtttgaaccccccccactctgcagagggaagcggggacaatgccggggtttcaggcaggagacacgaggagggcctgcccggaagtc

SEQ ID NO: 544686 - DNA, 120 bp, Artificial Sequence
  ENSG00000167680_30 (sequence is synthesized)
acatcggcagcagctgtctaaagggcttgggggcctggggggcggcgaaggtgggtggggcccctctgtaaatacggccccagggtggtgagagagtcccatgccacccgtccccttgtg

SEQ ID NO: 544687 - DNA, 120 bp, Artificial Sequence
  ENSG00000167680_31 (sequence is synthesized)
acctcccccctctgacctccagctgaccatgcatgccacgtggctggctgggtcctctgccctctctggagtttgcctcccccagccccctccccatcaataaaactctgtttacaacca

SEQ ID NO: 544688 - DNA, 120 bp, Artificial Sequence
  ENSG00000167685_0 (sequence is synthesized)
agtcccggcgagctttgtgcgcatgtgcggggaggtgagggggcttggggggcctcgcctgagagagtgaggacaggctgcgggaggagctgcaggactgaggtacagaggccaggggcc

SEQ ID NO: 544689 - DNA, 120 bp, Artificial Sequence
  ENSG00000167685_1 (sequence is synthesized)
cagggcaggacccagcctggacttgactccctgggatcccaggaagggcacaccctttcctcaccacccgagtgagcgctgccccctcacagagacctctttgccccctgggccaggcag

SEQ ID NO: 544690 - DNA, 120 bp, Artificial Sequence
  ENSG00000167685_2 (sequence is synthesized)
agcaggcgctgcggtccgggaggccccatggaggtggcggtgcccgtgaagcaggaggccgagggcctggcgctggactccccgtggcaccgcttccgccgcttccacctgggcgacgcg

SEQ ID NO: 544691 - DNA, 120 bp, Artificial Sequence
  ENSG00000167685_3 (sequence is synthesized)
ccgggcccgcgggaggcgctggggctgctccgcgccctgtgccgggactggctgcggcccgaggtgcacaccaaggagcagatgttggagctgctggtgctggaacagttcctgagcgcg

SEQ ID NO: 544692 - DNA, 120 bp, Artificial Sequence
  ENSG00000167685_4 (sequence is synthesized)
ctgcccgccgacacgcaggcctgggtgtgcagccggcagccgcagagcggggaggaggcggtggccctgctggaggagctctgggggccagcagcctcccccgatgggtcgtcagcaacg

SEQ ID NO: 544693 - DNA, 120 bp, Artificial Sequence
  ENSG00000167685_5 (sequence is synthesized)
agggtgcctcaggatgtgacgcagggccctggggccacaggtggaaaggaggacagtgggatgattcccttagcaggcaccgcccctggggctgaggggccggcgcctggggactcccag

SEQ ID NO: 544694 - DNA, 120 bp, Artificial Sequence
  ENSG00000167685_6 (sequence is synthesized)
gctgtgcgcccctacaagcaggagcccagcagccccccgctggcgcctggcctgcccgccttcctagcggccccgggcaccacgtcctgccccgagtgcggcaaaacgtccctgaaacca

SEQ ID NO: 544695 - DNA, 120 bp, Artificial Sequence
  ENSG00000167685_7 (sequence is synthesized)
gctcacctgctgcgccaccggcagagccactcgggcgagaagccgcacgcctgccctgagtgcgggaaggcctttcggcgcaaggagcacctgcggcgccaccgcgacacgcaccccggc

SEQ ID NO: 544696 - DNA, 120 bp, Artificial Sequence
  ENSG00000167685_8 (sequence is synthesized)
gctgcgccctctgcccgcccgtgagaagccccacgcgtgctgcgagtgtggcaagaccttctactggcgcgagcacctggtgcgccaccgcaagacgcactcgggagcgcggccctttgc

SEQ ID NO: 544697 - DNA, 120 bp, Artificial Sequence
  ENSG00000167685_9 (sequence is synthesized)
ctgctgggagtgtggcaagggcttcgggcgccgcgagcacgtgctgcgccaccagcgcatccacggccgggcagcggccagcgcgcagggggcggtagctccgggcccggatggtggagg

SEQ ID NO: 544698 - DNA, 120 bp, Artificial Sequence
  ENSG00000167685_10 (sequence is synthesized)
ccccttcccgccctggcccttgggttagccgcctcccggccagcgccatctcccgcccttggtgctgcccccgggcggtacctgctctctcccagcgccacttggcctcttcctctcctc

SEQ ID NO: 544699 - DNA, 120 bp, Artificial Sequence
  ENSG00000167685_11 (sequence is synthesized)
cttccctcccatcgtcctcctccacctgcgcctcccttgtctgaacttcccaacgccttcctattcctttccaactccttttcccccaaatttcactttccttctcaggtctcacctcag

SEQ ID NO: 544700 - DNA, 120 bp, Artificial Sequence
  ENSG00000167685_12 (sequence is synthesized)
ccccccccttctccctgatttctcggcctctctctctgtgtgaaggggcctctccctaatgtctcctccttcccccctcttctctctcctgcggcccagcctccctctccctcctccatt

SEQ ID NO: 544701 - DNA, 120 bp, Artificial Sequence
  ENSG00000167685_13 (sequence is synthesized)
cctctctccctgcccttttcctgcctgaagagcagaggtgaggacctgggacccctgaggggcaggccaggaggagctcgggcgcaggccaggcccccttggtgaagcagaggctgaagg

SEQ ID NO: 544702 - DNA, 120 bp, Artificial Sequence
  ENSG00000167685_14 (sequence is synthesized)
aaaggggtctgggtcttgtccctaggaattctcctccctcaggagattgggggttgggggaggcagcgggtgatggctctgaagctgaacccagggcctggctgtggtcttcttggtctt

SEQ ID NO: 544703 - DNA, 120 bp, Artificial Sequence
  ENSG00000167685_15 (sequence is synthesized)
gctgccccctgtgacccaaaggcatgggatggacagagatgcctgcccccgtgaagctggttggggagggcagttcaccagcatccatagagtaataaagtcactgtgtgtagacccgga

SEQ ID NO: 544704 - DNA, 120 bp, Artificial Sequence
  ENSG00000167685_16 (sequence is synthesized)
gaacacagggaaggtgttcctcagctcactggcaaggctgccacccccacccccacccccaaccacctaacaggacaaggacagcacaggaaaagaaggttgcagccagtctcatgggac

SEQ ID NO: 544705 - DNA, 120 bp, Artificial Sequence
  ENSG00000167685_17 (sequence is synthesized)
cctcaacagaacatcggcagcttgattccgcagtgggtggacagacctatgtgctggggcaggtggagcttagcccagatacacgaggatgcttcatccttaggggatcctcagcagaac

SEQ ID NO: 544706 - DNA, 120 bp, Artificial Sequence
  ENSG00000167685_18 (sequence is synthesized)
atcagcagcttgatcccacagtgggtggacaggcctatgcactggggcaggtggagcttagcccagatacacgaggatgctgcatccttaggaagtctctcagttagtacacagacttca

SEQ ID NO: 544707 - DNA, 120 bp, Artificial Sequence
  ENSG00000167685_19 (sequence is synthesized)
aagccgaccagagtctctcagttaaagtacacagacttcaaagctggatatgagtcctgcctccaccttttccaagctgggtgaccttggacgcatgtctgggactctcagagccttggc

SEQ ID NO: 544708 - DNA, 120 bp, Artificial Sequence
  ENSG00000167685_20 (sequence is synthesized)
ttcctcagctgcaattttggaatctcgattcctgagccctccagggatgggtgtaaggagggctccatcaggcagtgtgttcctggctgtgccaaattggctcagtcagtcacacacagg

SEQ ID NO: 544709 - DNA, 120 bp, Artificial Sequence
  ENSG00000167685_21 (sequence is synthesized)
gtcacagcttattacagagaaaggacacagatgacaaccagccaagggaagagatgagtggaatgggtggaggaaggctctgtgctcggagctcccaactgtcctcctgccgtggagtgt

SEQ ID NO: 544710 - DNA, 120 bp, Artificial Sequence
  ENSG00000167685_22 (sequence is synthesized)
ggacggcgctaactcctcccggcaacaacgtgtgacaacctgcagggggtgctgctggccaggaacgcttccccgagctcggcactcggtctctgttggggttgtgtgtagatatgctga

SEQ ID NO: 544711 - DNA, 120 bp, Artificial Sequence
  ENSG00000167685_23 (sequence is synthesized)
ccttcacctccatccctggcagaggccgagctgatgcacatggcccagacccccaaccctgagtcacgctgtgggctcagcccacccgggtggcccagggccccaggtgagcagaccctg

SEQ ID NO: 544712 - DNA, 120 bp, Artificial Sequence
  ENSG00000167685_24 (sequence is synthesized)
ccatcaggcagtgtgttctgggggcatagaggtgaccctccctggagccaagggcagaggccagacctctctggacagggctgagcctcactgcacagcagcagcatctcgtcagtctcc

SEQ ID NO: 544713 - DNA, 120 bp, Artificial Sequence
  ENSG00000167685_25 (sequence is synthesized)
acgcagcctgcagggtccgtcctgggtactggtgtcatctcagggaaggaaagcagcttgcccgaggtgacacagctggttcaggggcagggggggatctgtggaaaaaacgtactcaaa

SEQ ID NO: 544714 - DNA, 120 bp, Artificial Sequence
  ENSG00000167685_26 (sequence is synthesized)
gtatctttttctattctcagcatcagtgaccacagaagacgtctgtgaccaaatgttggagggggtgtcccctcacataccgaacaagcaatcaactctgcagcagacacaagctgggtg

SEQ ID NO: 544715 - DNA, 120 bp, Artificial Sequence
  ENSG00000167685_27 (sequence is synthesized)
tcctctaatgcatttccaacatggtctccctggagacagtgccagatcccacaggttgagggctcacatcccaagactgaccccccatttctgatgccagtcacaagccccaggttattt

SEQ ID NO: 544716 - DNA, 120 bp, Artificial Sequence
  ENSG00000167685_28 (sequence is synthesized)
catctgtgcttccaactgacaggctgtacatcgggctcccacagcccttcctctggttccgttaatttgctagtgtgctcacagaaccagggaaacatgtttaccgatttattgtaaagg

SEQ ID NO: 544717 - DNA, 120 bp, Artificial Sequence
  ENSG00000167685_29 (sequence is synthesized)
agattttaaaggataccagtgaacagccagatggagagccacgtatggtgaggtctggaagggttccgagcgcaggggcctctgtccctgtggacttgggatgcaccatcctcctggcat

SEQ ID NO: 544718 - DNA, 120 bp, Artificial Sequence
  ENSG00000167685_30 (sequence is synthesized)
gtgggtgaggtctagtttaccttgctgtccacctccacgagttcagctctctggaagctccctgaaccctgtccttttggccttttatggagacttggttgagaggcataactgaagcat

SEQ ID NO: 544719 - DNA, 120 bp, Artificial Sequence
  ENSG00000167685_31 (sequence is synthesized)
ggacagccatgtagaaatgtgattagataaaacgggtgtgatcgaatccgagtagaccgagcggggaaacctcgcaaggcctgtgtgttcagacccttcttggcctcctttggctttctt

SEQ ID NO: 544720 - DNA, 120 bp, Artificial Sequence
  ENSG00000167685_32 (sequence is synthesized)
tcctccagggtaggggcaggaccccttctgaaggggggtgttatggcccacaatcagacaaattaggtcagaaaaattttttatggccagaggtgggggaagatttaaggatatttttag

SEQ ID NO: 544721 - DNA, 120 bp, Artificial Sequence
  ENSG00000167685_33 (sequence is synthesized)
tttttaaggcctgccttgtggagaaagaagagcaggtgaaagtagggcagaaggtcagggagagactctttttctgaggcctaaagcttcccatcgttagaacaagaccgtaacaagggc

SEQ ID NO: 544722 - DNA, 120 bp, Artificial Sequence
  ENSG00000167685_34 (sequence is synthesized)
tgtgggagtcatgagccaggagccgtggacagagcccaatgtatacgtatcataaaatcacagggagggttaggaccccggggctgctccatgctccccccttctgtgtgcctggcccca

SEQ ID NO: 544723 - DNA, 120 bp, Artificial Sequence
  ENSG00000167685_35 (sequence is synthesized)
caaggcgcgcctgtccccgcatgggtgtgccctggatgtctcttcctgtggacaatgcctggccagcgtcccctgtctctggggcctcaaaccaggaagttccccgaggaatgggtggat

SEQ ID NO: 544724 - DNA, 120 bp, Artificial Sequence
  ENSG00000167685_36 (sequence is synthesized)
ctcaggcttttctgtgcccaagatctctgggagaaccgtctgctggcacggcttcccaggctccactctcaggtgtgtcaaccccggtgcccttgagctgaggccaggacagcacccctg

SEQ ID NO: 544725 - DNA, 120 bp, Artificial Sequence
  ENSG00000167685_37 (sequence is synthesized)
cccgccaagggccaaggagctggagggtggtccagggtggtgctctgggcccgagtgagactgtgctcttctgactctctccgatgggccccagagcccatcacggtcccacagccaggt

SEQ ID NO: 544726 - DNA, 120 bp, Artificial Sequence
  ENSG00000167685_38 (sequence is synthesized)
tgcgaggcacctaggatctagtcagcgttgtgccaagcccccatcctcatgcctcagctgcctgagtcactgggattacagtcatgagccaccaggcccacgctcttgtattttgacccc

SEQ ID NO: 544727 - DNA, 120 bp, Artificial Sequence
  ENSG00000167685_39 (sequence is synthesized)
caggcccacgctcttgtattttgacccccttatttaggaaacgttttcttgtctgtcagagtgagggcaggtggtttgcccctgccgctttgcttttttttttggagacagagtctcact

SEQ ID NO: 544728 - DNA, 120 bp, Artificial Sequence
  ENSG00000167685_40 (sequence is synthesized)
ggttcaagtgattctcctgcctcggcgtcccgagtagctttgattacaggtacgtggcaccacgcccagctaatttgttgtatctttagtagagttaggatttcaccatgttggccaagc

SEQ ID NO: 544729 - DNA, 120 bp, Artificial Sequence
  ENSG00000167685_41 (sequence is synthesized)
gcattgctaattttcacaccagtgattgctttgtgatccacgtactcctctggccaaaaatatttgaaacggggaaaaggtgtggtgcgtgacttagctgtcataggcaccagaagaatt

SEQ ID NO: 544730 - DNA, 120 bp, Artificial Sequence
  ENSG00000167685_42 (sequence is synthesized)
ctcatccctttcccttggggacgtggttttgaggaattatgtagtagggcgaagaaaccacaacgagttggactgaaactttttaaatttttggtcttcctggttggtgccgtcctgctt

SEQ ID NO: 544731 - DNA, 120 bp, Artificial Sequence
  ENSG00000167685_43 (sequence is synthesized)
ggcagctgttctgctgtttcacaccaagaaaagttgtttctgaacttagtttacttttttcccaagttaaaagtagcttatatattctgcattttgttaaggagcttgcactttatccaa

SEQ ID NO: 544732 - DNA, 120 bp, Artificial Sequence
  ENSG00000167685_44 (sequence is synthesized)
agggcaggacgaagctgatctgagacaggtgtattagttatttcttgcttcctgacaagtcaccccacactcaggggtgtaaacagtaacatctgtcagctcagaaagcctctgtgggtc

SEQ ID NO: 544733 - DNA, 120 bp, Artificial Sequence
  ENSG00000167685_45 (sequence is synthesized)
cggagtctgtgagtggcttgggcacgcggacctggcccagggtctcctgtgaggtcacagtgcagtgttggccaggctgtcatctgaaggttggtggcttcaagatggctccctggcagg

SEQ ID NO: 544734 - DNA, 120 bp, Artificial Sequence
  ENSG00000167685_46 (sequence is synthesized)
gggttggcaggaggccttggttcctcacctgggggcctctctgtggggcagcttcagtgtcgcccagcatgactgtggcttcctcccagcagggatgggattgcacagctggtcgacggt

SEQ ID NO: 544735 - DNA, 120 bp, Artificial Sequence
  ENSG00000167685_47 (sequence is synthesized)
gtgcattctgggaaatgtagtccaaagcctgtcgcgctcagacagcccgcgacatttgcgccgtcaaggccaaataggctgcagacgacgctttcgcgtatcttgggaaatgtagttcca

SEQ ID NO: 544736 - DNA, 120 bp, Artificial Sequence
  ENSG00000167685_48 (sequence is synthesized)
gtgttggcgaagacgccacgcggtgacaaacaggagtaaggcggtccccaggcgagggccaattggcagccgcctttgccgcgatgcttcctgggagttgtagttcggggacaggctgcg

SEQ ID NO: 544737 - DNA, 120 bp, Artificial Sequence
  ENSG00000167685_49 (sequence is synthesized)
gtgcgcatgtgcggggaggtgagggggcttggggggcctcgcctgagagagtgagtcaacgaaatggagatacagggtattacaaaaggtgccttgtacctcgtccaaggacacagagct

SEQ ID NO: 544738 - DNA, 120 bp, Artificial Sequence
  ENSG00000167685_50 (sequence is synthesized)
agcagttagttggggtggcttctgagtaggctgcaaagtgtctgctcccagggtgtggggtgcacggccccacaagtccagtgagggtggtgctgatggtgacctgctgctgccaggcct

SEQ ID NO: 544739 - DNA, 120 bp, Artificial Sequence
  ENSG00000167685_51 (sequence is synthesized)
gaaatgcagcttcaatctccaaccggagagatttctctccagagagtaaagggctggaagtgggggcgagacggaagccacagtatcaacctctgagaagccgcgttcattcctgccaga

SEQ ID NO: 544740 - DNA, 120 bp, Artificial Sequence
  ENSG00000167685_52 (sequence is synthesized)
agcttgatggcctgtggcattgctctctggcggaaattcctccttagtcccagagggatcttttttatagcagagcaggcatctgtgtggcttttgagacttggatctggcctgggtctt

SEQ ID NO: 544741 - DNA, 120 bp, Artificial Sequence
  ENSG00000167685_53 (sequence is synthesized)
ccgataagtctttctgcctgctcccaggttcatcagcccttaaactgatggatgggtggggtgggaggtgatgctgtggcctggctgtggatgtgcaagtccaggctctgccacgtgtta

SEQ ID NO: 544742 - DNA, 120 bp, Artificial Sequence
  ENSG00000167693_0 (sequence is synthesized)
ccgacgccgccgcctcctcccgccgcgcggaccgtggagcggggtcgcagccgcctgcccgccctgcggtgggccaggatgtcgggcttcctggaggagctgctcggcgagaagctggtg

SEQ ID NO: 544743 - DNA, 120 bp, Artificial Sequence
  ENSG00000167693_1 (sequence is synthesized)
tgctcggcgagaagctggtgacgggcggcggcgaggaggtggacgtgcactcgctgggcgcccgcggcatctcgctgctgggtctctacttcggctgcagcctcagcgccccctgcgcgc

SEQ ID NO: 544744 - DNA, 80 bp, Artificial Sequence
  ENSG00000167693_2 (sequence is synthesized)
cggggccgggagcgggggccggggcggcggcggagcccgagccgcggcggcgcctggagatcgtcttcgtgtcctcggac

SEQ ID NO: 544745 - DNA, 120 bp, Artificial Sequence
  ENSG00000167693_3 (sequence is synthesized)
tcgtcttcgtgtcctcggaccaggaccagcggcagtggcaggacttcgtgcgggacatgccgtggctggcgctgccctacaaggagaagcacaggaagctcaaactttggaacaaatacc

SEQ ID NO: 544746 - DNA, 120 bp, Artificial Sequence
  ENSG00000167693_4 (sequence is synthesized)
gaatttccaacattccatcactaatattcctcgacgccaccactgggaaggttgtgtgcaggaacgggctgctggtgatccgagatgacccagaaggtctggagttcccctggggaccga

SEQ ID NO: 544747 - DNA, 120 bp, Artificial Sequence
  ENSG00000167693_5 (sequence is synthesized)
aacccttcagggaagtcattgcagggcccttgcttagaaacaatgggcagtctctggagagcagcagcctggaggggtctcacgtgggcgtctatttctccgcacattggtgtccgccct

SEQ ID NO: 544748 - DNA, 120 bp, Artificial Sequence
  ENSG00000167693_6 (sequence is synthesized)
gccgaagcctcacccgggtcctggtggaatcctaccggaagatcaaggaggcaggccagaacttcgagatcatcttcgttagtgcagacaggtcggaggagtccttcaaacagtacttca

SEQ ID NO: 544749 - DNA, 120 bp, Artificial Sequence
  ENSG00000167693_7 (sequence is synthesized)
gtgagatgccctggctcgccgtcccctacacggatgaggcccggcggtcgcgcctcaaccggctgtacggaatccaaggcatccccacgctcatcatgctggacccgcagggcgaggtga

SEQ ID NO: 544750 - DNA, 120 bp, Artificial Sequence
  ENSG00000167693_8 (sequence is synthesized)
tcacgcggcaggggcgggtggaggtgctgaacgacgaggactgccgggagttcccctggcaccccaagcccgtgctggagctctccgactccaacgccgcgcagcttaacgagggcccct

SEQ ID NO: 544751 - DNA, 120 bp, Artificial Sequence
  ENSG00000167693_9 (sequence is synthesized)
gcctcgtcctttttgtagattctgaggatgacggagagtccgaggcggccaagcagctgattcagccgatagctgagaaaatcattgccaagtacaaagccaaagaggaggaggcacccc

SEQ ID NO: 544752 - DNA, 120 bp, Artificial Sequence
  ENSG00000167693_10 (sequence is synthesized)
ttctgttcttcgtagccggggaggatgacatgactgactccctgcgagattacaccaacctgcctgaggctgcccctttgctcaccatcctggacatgtcagcccgggccaagtacgtga

SEQ ID NO: 544753 - DNA, 120 bp, Artificial Sequence
  ENSG00000167693_11 (sequence is synthesized)
tggacgtggaggagatcacccccgccatcgtggaggcctttgtgaatgacttcctagcagagaagctcaaaccggagcccatctagcgtggctccggcctcctgagacgttatttaaaac

SEQ ID NO: 544754 - DNA, 120 bp, Artificial Sequence
  ENSG00000167693_12 (sequence is synthesized)
cccagcgtgccccgaatcccaccacccaagtgtccagcctctctgtggtgccttgtttctgcagtaaactcctcagccagcaccctggggtgtggaatcagcagcggcagagtccaccgt

SEQ ID NO: 544755 - DNA, 120 bp, Artificial Sequence
  ENSG00000167693_13 (sequence is synthesized)
gtttggagactctgtttgggagcacgggatggccgggggcccggccagagcggggctgcatggctttcgcaaagtcactagcttttggtgaaggatctgccagggtgtcctgggcagagt

SEQ ID NO: 544756 - DNA, 120 bp, Artificial Sequence
  ENSG00000167693_14 (sequence is synthesized)
gagcgtggagggccggtgggtcccgctcgggctctgactctgacgtcggcacacacggccccggacggccagaggggaaccgccgggtgacacctgcgtggaggctgagctgagaaaggg

SEQ ID NO: 544757 - DNA, 120 bp, Artificial Sequence
  ENSG00000167693_15 (sequence is synthesized)
cctccgcttagagctgcgggtgaggacgtccttttctaagcaacacagtcttcctcggtctgagagaaaagcagcccactcttgtgttctcaggcaggggatctccaaatgcaaaaggaa

SEQ ID NO: 544758 - DNA, 120 bp, Artificial Sequence
  ENSG00000167693_16 (sequence is synthesized)
gcttgtagaggttttttgggtgagaagaaaaatgtagctaaggtaatggttcatatcatacaaacagctcccacgatcctgaaattctgttaacgaatccttctctttggacatcttccc

SEQ ID NO: 544759 - DNA, 120 bp, Artificial Sequence
  ENSG00000167693_17 (sequence is synthesized)
aagaaacttagccctgagtcctaggaggagcacctctgcaccagcacggacctctcgctccacccagctctgtgcccaaggcccctgatctctgctgaggtgcccacacccacgttcgat

SEQ ID NO: 544760 - DNA, 60 bp, Artificial Sequence
  ENSG00000167693_18 (sequence is synthesized)
gcccctgatctctgctgaggtgcccacacccacgttcgatcacccctgccattccctttt

SEQ ID NO: 544761 - DNA, 84 bp, Artificial Sequence
  ENSG00000167693_19 (sequence is synthesized)
cccttttcttttcaaagcagaactacaaagatgagaaattaccagaagcctcgccttttcctaagcaccagcggaaggagctgt

SEQ ID NO: 544762 - DNA, 120 bp, Artificial Sequence
  ENSG00000167693_20 (sequence is synthesized)
gaagcctcgccttttcctaagcaccagcggaaggagctgtgccccgggatggagtgagggtggagggcgcgtcagccacgggtgggccttgtgtcgccttgtatcggcccaggtaggttg

SEQ ID NO: 544763 - DNA, 120 bp, Artificial Sequence
  ENSG00000167693_21 (sequence is synthesized)
ttggcctcttacttgggctgacctgacccccgaaagagaaacagacaactctgttctcaggattggggatggacggcttcggccaagcgttttagcctcattcactcaggccccactcag

SEQ ID NO: 544764 - DNA, 120 bp, Artificial Sequence
  ENSG00000167693_22 (sequence is synthesized)
cactctgccagccaagaccattgatttggaaaatccggtccccacccgctaatgagctgttgacactgttgttccttgctgaattggattgttgacttgtagttcagaggcgtacaacta

SEQ ID NO: 544765 - DNA, 120 bp, Artificial Sequence
  ENSG00000167693_23 (sequence is synthesized)
gttggcgattagacttgttatgtgatgttaccagcctgaaatgcgatcaccccgtaggaaataaagcaggcatctctggacctcatccaccctgggcctctgctgtccttgatcacaaaa

SEQ ID NO: 544766 - DNA, 71 bp, Artificial Sequence
  ENSG00000167693_24 (sequence is synthesized)
aaagcttttctgtccctgtcgcgatgtgtgcccggagtctctcccgctcctgtctcgagtgctttctctac

SEQ ID NO: 544767 - DNA, 120 bp, Artificial Sequence
  ENSG00000167693_25 (sequence is synthesized)
atctcaactcactggcaacctccgccacccggcttcaagtgattcttctgcctgagtctgctgagtagctgagatgacagatatccgccatcacactggctaatttttgtatttttagta

SEQ ID NO: 544768 - DNA, 120 bp, Artificial Sequence
  ENSG00000167693_26 (sequence is synthesized)
aggtgtgagccactgcacccagcctgagtcccctttttaacttggagagtcccctttcctgggagttaccagtcctcctccattccagacacaggtggttctctgggtcggctacacagc

SEQ ID NO: 544769 - DNA, 120 bp, Artificial Sequence
  ENSG00000167693_27 (sequence is synthesized)
ctctgggtcggctacacagctgtcattctggaactttcttcggtactttcctgagttggattttattctaacccccgtcattgattgattccaaagttttttttttttttctgtagttca

SEQ ID NO: 544770 - DNA, 120 bp, Artificial Sequence
  ENSG00000167693_28 (sequence is synthesized)
gtattccctaggacatggttttaagattttcacagggatcagaatgtccctcctaggggctttaattcatgggccaaaagagatggactctgccgtaagaagctccgcttggagggccgc

SEQ ID NO: 544771 - DNA, 120 bp, Artificial Sequence
  ENSG00000167693_29 (sequence is synthesized)
agaggctgtgggaaagcggagagctcagaccccggcctctagtgctgcatccgtggcggctgcccccttcacagttagaggcaggctgagtggggtttttcctctttaaaacattacata

SEQ ID NO: 544772 - DNA, 120 bp, Artificial Sequence
  ENSG00000167693_30 (sequence is synthesized)
accggaaccgagcaacggtaactgtgccccttcaccggaaccgagcaatggcagacgtgtcccttcaccggaacccagcaacggtaactgtgtcctttcaccgaaactgagcaatggtta

SEQ ID NO: 544773 - DNA, 120 bp, Artificial Sequence
  ENSG00000167693_31 (sequence is synthesized)
gcagagctcagctgcgtggtggcccctgtggtcccggggtcttcgagttaagggctgagctgaccccatcgatgcacattgactggaagaaggaggatttggggaaatggatactttgct

SEQ ID NO: 544774 - DNA, 120 bp, Artificial Sequence
  ENSG00000167693_32 (sequence is synthesized)
gtcaacttctcgtgtctcccagtttgctgccgagttgagtttgggtttctgagtgtgtcccttgggtgaggatgtctgtctctgtgataataaagcacatccaggacattttgtaatgaa

SEQ ID NO: 544775 - DNA, 120 bp, Artificial Sequence
  ENSG00000167693_33 (sequence is synthesized)
gaacagaccacaggtgtctctagagagggagacttgggggtactctgggaggttgaactgagacctcccaggttcagggacggagcgctgctgagcccattacatgagttggcagcgagc

SEQ ID NO: 544776 - DNA, 120 bp, Artificial Sequence
  ENSG00000167693_34 (sequence is synthesized)
ctgggccaccgaatgtccactttggcagttcaagcatgaagccaacaaagatagatgcaactggtttcgagaggacagaacccacctcccttgttttctgccatccattatattttgtgg

SEQ ID NO: 544777 - DNA, 120 bp, Artificial Sequence
  ENSG00000167693_35 (sequence is synthesized)
atccgacatctgaaaaaaggaccaatctgtggacagggtcttgctgtgtcgcccagctggtctcgaactcttgggctcaagcagtctgcctgcttcggcattctaaaatactgggattac

SEQ ID NO: 544778 - DNA, 120 bp, Artificial Sequence
  ENSG00000167693_36 (sequence is synthesized)
gtgcacacacacccatgcatgcggggagcaagacctgcatccaaggggaagttcatttccgttcaggggccgctcaggcgggcgtttctgcagctcaggccccctcggcgggtgccgctc

SEQ ID NO: 544779 - DNA, 120 bp, Artificial Sequence
  ENSG00000167693_37 (sequence is synthesized)
attacggagtccgtgtatctgccgcggggactttcctaggagaggcgtcactgcaacaggcctaggaggggactggcttgggaaaaaaagaagaatattgtgtgtgatatgcaggaactg

SEQ ID NO: 544780 - DNA, 120 bp, Artificial Sequence
  ENSG00000167693_38 (sequence is synthesized)
gcggtcgcgcctcaaccggctgtacggaatccaaggtaggcgctccaggccccggctccgtgtggctcctggaaacctgctcacctgagctcaccgtgtctttggctttcctttaagaag

SEQ ID NO: 544781 - DNA, 120 bp, Artificial Sequence
  ENSG00000167693_39 (sequence is synthesized)
aagagcatcattatttccatgaatattcatgtgcctttcatgtttctcagcagtgtagaattttcatggtgtgaattctaagccatttttaaaaaataagtattgtcaggccgggcatgg

SEQ ID NO: 544782 - DNA, 120 bp, Artificial Sequence
  ENSG00000167693_40 (sequence is synthesized)
attctggaactttcttcggtactttcctgagttggattttattctaacccccgtcattgattgattccaaagttttttttttttttctgtagttcagataccagttagatgtgttaccaa

SEQ ID NO: 544783 - DNA, 120 bp, Artificial Sequence
  ENSG00000167693_41 (sequence is synthesized)
ggagatcttaaagagcaaactgcattttcgagagcagagctttaaaatttagtatgtgagttcaacaggttacgtgtaaatgggaatcagctgtctttggattaaacactactacacagt

SEQ ID NO: 544784 - DNA, 120 bp, Artificial Sequence
  ENSG00000167695_0 (sequence is synthesized)
gagccgaacccagccacgcggcgccagcgaggcggccggacccgcagccccgatgctgctgacgctggccgggggcgcgctcttcttcccggggctcttcgcgctctgcacctgggcgct

SEQ ID NO: 544785 - DNA, 120 bp, Artificial Sequence
  ENSG00000167695_1 (sequence is synthesized)
gcgccgctcccagcccggatggagccgcaccgactgcgtgatgatcagcaccaggctggtttcctcggtgcacgccgtgctggccaccggctcggggatcgtcatcattcgctcctgcga

SEQ ID NO: 544786 - DNA, 120 bp, Artificial Sequence
  ENSG00000167695_2 (sequence is synthesized)
cgacgtgatcaccggcaggcactggcttgcccgggaatatgtgtggtttctgattccatacatgatctatgactcgtacgccatgtacctctgtgaatggtgccgaaccagagaccagaa

SEQ ID NO: 544787 - DNA, 120 bp, Artificial Sequence
  ENSG00000167695_3 (sequence is synthesized)
ccgtgcgccctccctcactcttcgaaacttcctaagtcgaaaccgcctcatgatcacacatcatgcggtcattctctttgtccttgtgccagtcgcacagaggctccggggagaccttgg

SEQ ID NO: 544788 - DNA, 120 bp, Artificial Sequence
  ENSG00000167695_4 (sequence is synthesized)
ggacttctttgtcggctgcatcttcacggcagaactgagcactccgtttgtgtcgctgggcagggttctgattcagctaaagcagcagcacacccttctgtacaaggtgaatggaatcct

SEQ ID NO: 544789 - DNA, 120 bp, Artificial Sequence
  ENSG00000167695_5 (sequence is synthesized)
cacgctggccaccttcctttcctgccggatccttctcttccccttcatgtactggtcctatggccgccagcagggactaagcctgctccaagtacccttcagcatcccattctactgcaa

SEQ ID NO: 544790 - DNA, 120 bp, Artificial Sequence
  ENSG00000167695_6 (sequence is synthesized)
cgtggccaatgccttcctcgtagctcctcagatctactggttctgtctgctgtgcaggaaggcagtccggctctttgacactccccaagccaaaaaggatggctaaatgctcctgggagt

SEQ ID NO: 544791 - DNA, 120 bp, Artificial Sequence
  ENSG00000167695_7 (sequence is synthesized)
caggcgcagcctcacaccagctgcctcctccactcagcattccatggaccaaattgtgccctgggtagcctcagactttgggtattgataagccgatggatttgagtttttctaaagaat

SEQ ID NO: 544792 - DNA, 120 bp, Artificial Sequence
  ENSG00000167695_8 (sequence is synthesized)
attcatattacctccttcttctaacttgccctatttgcaaaagcacttttgtagtaacaactattgggtcctgtcagacctccacggacagcaaagtggttttaatgcaagcccaaggat

SEQ ID NO: 544793 - DNA, 120 bp, Artificial Sequence
  ENSG00000167695_9 (sequence is synthesized)
gggtggtaagtgtctgcacatctgcctgtccctgtatcagcggctacccaccttccaaaccactcaggacagtacccgtggcactgggcccgcagaagcaagggatgacttggttcttgg

SEQ ID NO: 544794 - DNA, 120 bp, Artificial Sequence
  ENSG00000167695_10 (sequence is synthesized)
aagtaatgtcgtcttgtgacattggcctgggacaatcattgtgggtaggtagttattgatcgtttactagataacccattggttctttgcctcatcctctcatccatgggtcagagttga

SEQ ID NO: 544795 - DNA, 120 bp, Artificial Sequence
  ENSG00000167695_11 (sequence is synthesized)
attcttatgtctatagacttccaatcagaagtctcactggtggggctgggggtgggggcaggcaggaggcatggatgggaacctgagtaggtagtgtggccaagagatcagcacaacctt

SEQ ID NO: 544796 - DNA, 120 bp, Artificial Sequence
  ENSG00000167695_12 (sequence is synthesized)
tgcaggctgacttgctaagtctgacagtgacaaacttgtgagcttactgcagtcagtcacagaggctgttctttttcacacaccccttcatgcccggctttccccatatccacatgcaga

SEQ ID NO: 544797 - DNA, 120 bp, Artificial Sequence
  ENSG00000167695_13 (sequence is synthesized)
gggcgagctcataaaactacagggaagcgtgaaatgatggctttggtagctgtttactgggtaaccccactgtgacactgtccttttcatgtgatgtggaaacctacttctgtcctccaa

SEQ ID NO: 544798 - DNA, 120 bp, Artificial Sequence
  ENSG00000167695_14 (sequence is synthesized)
accatgaaatgtgtcatctagactgcagagtacttgagtgctttgcctcccgatatgccagagcttgtggtccaaagcccattcctgtgtgtccgtcctgccatttagccacagaaggct

SEQ ID NO: 544799 - DNA, 120 bp, Artificial Sequence
  ENSG00000167695_15 (sequence is synthesized)
gcggagtgaggcggcagctagcctggccagtggctgtcccgtggaccgacacctgcgcccccttctgcaagcaggattttctggtgccaacactcattcatcattcccgatcaactagga

SEQ ID NO: 544800 - DNA, 120 bp, Artificial Sequence
  ENSG00000167695_16 (sequence is synthesized)
tgaatttaagactgtgctaccatgtgttctcaagtggtagtttaaaaagtggatttttaaagtgcctttcaattgtctgtgaacgtctaaaggactgatttgtctcattttgactgttga

SEQ ID NO: 544801 - DNA, 120 bp, Artificial Sequence
  ENSG00000167695_17 (sequence is synthesized)
gtctttaatgggtgccatttaaaaaacaaaatgctattttttaattgtcttttttttttaactatcagtgtatctttaaaagtcacccttacggtgattaaattgcactaacattcccaa

SEQ ID NO: 544802 - DNA, 80 bp, Artificial Sequence
  ENSG00000167695_18 (sequence is synthesized)
cgagagaccccgccccgccctatcgcagccgccgggcctggtcacgcgcagagccgcgccgcgggatcggggccagcgcc

SEQ ID NO: 544803 - DNA, 80 bp, Artificial Sequence
  ENSG00000167695_19 (sequence is synthesized)
cgcggggcccagggcggaaaaggggggcggcaggaagcccgggggctgctccctccgcgtcccggcggcccgagtttccg

SEQ ID NO: 544804 - DNA, 120 bp, Artificial Sequence
  ENSG00000167695_20 (sequence is synthesized)
agtttccgaagcccctccgcgtcctcccctggcgggagcggggccggggcgggcgggaatggccgatgagcctccggagcccgctccccacatctgcctgcggctggggagagtcaggcc

SEQ ID NO: 544805 - DNA, 120 bp, Artificial Sequence
  ENSG00000167695_21 (sequence is synthesized)
gaagggccgggccgggctccctgcggtcctcggaccggactgagcgcgcgcgctgttctctccgcccgcgctaggctggtttcctcggtgcacgccgtgctggccaccggctcggggatc

SEQ ID NO: 544806 - DNA, 120 bp, Artificial Sequence
  ENSG00000167699_0 (sequence is synthesized)
gtcggcggctagtgacgtcacggcccgtggcgcccttcgtggactgggctgtacggtgcgcgtgacggctgcgtgcggcgggaatcatggctgctcgcagagctctgcacttcgtattca

SEQ ID NO: 544807 - DNA, 120 bp, Artificial Sequence
  ENSG00000167699_1 (sequence is synthesized)
aagtgggaaaccgcttccagacggcgcgtttctatcgggacgtcctggggatgaaggttctgcggcatgaggaatttgaagaaggctgcaaagctgcctgtaatgggccttatgatggga

SEQ ID NO: 544808 - DNA, 120 bp, Artificial Sequence
  ENSG00000167699_2 (sequence is synthesized)
aatggagtaaaacaatggtgggatttgggcctgaggatgatcattttgtcgcagaactgacttacaattatggcgtcggagactacaagcttggcaatgactttatgggaatcacgctcg

SEQ ID NO: 544809 - DNA, 120 bp, Artificial Sequence
  ENSG00000167699_3 (sequence is synthesized)
cttctagccaggctgtcagcaacgccaggaagctggagtggccactgacggaagttgcagaaggtgtttttgaaaccgaggccccgggaggatataagttctatttgcagaatcgcagtc

SEQ ID NO: 544810 - DNA, 120 bp, Artificial Sequence
  ENSG00000167699_4 (sequence is synthesized)
tgcctcagtcagatcctgtattaaaagtaactctagcagtgtctgatcttcaaaagtccttgaactactggtgtaatctactgggaatgaaaatttatgaaaaagatgaagaaaagcaaa

SEQ ID NO: 544811 - DNA, 120 bp, Artificial Sequence
  ENSG00000167699_5 (sequence is synthesized)
gggctttgctgggctatgctgataaccagtgtaagctggagctacagggcgtcaagggtggggtggaccatgcagcagcttttggaagaattgccttctcttgcccccagaaagagttgc

SEQ ID NO: 544812 - DNA, 120 bp, Artificial Sequence
  ENSG00000167699_6 (sequence is synthesized)
cagacttagaagacttgatgaaaagggagaaccagaagattctgactcccctggtgagcctggacaccccagggaaagcaacagtacaggtggtcattctggccgaccctgacggacatg

SEQ ID NO: 544813 - DNA, 120 bp, Artificial Sequence
  ENSG00000167699_7 (sequence is synthesized)
aaatttgctttgtcggggatgaagcatttcgagaactttctaagatggatccagagggaagcaaattgttggatgatgcaatggcagcagataaaagtgacgagtggtttgccaaacaca

SEQ ID NO: 544814 - DNA, 120 bp, Artificial Sequence
  ENSG00000167699_8 (sequence is synthesized)
ttaacggaagacatgatgcagagcaagcctctgtgattcctgcccagcacctgtgaggcctgacgtgtcagttcccaataaatgctcttctgatttgtttcccgtacaggcaaggaggct

SEQ ID NO: 544815 - DNA, 120 bp, Artificial Sequence
  ENSG00000167699_9 (sequence is synthesized)
tgggtagtgcagatttgtgtatttcaatctttgaaagctctgatgtaatttagaaatgaaatccaatcatgagtccaggtagagaacgcctgctgtaatctacactgttgctgggactgc

SEQ ID NO: 544816 - DNA, 120 bp, Artificial Sequence
  ENSG00000167699_10 (sequence is synthesized)
gcattctgtatataactgtgttggatgagtgacagatgattgtccagactaggacagcggcatgaacatgactttggttgggattgcggatagttagggttacctctgaatcgtgtagct

SEQ ID NO: 544817 - DNA, 120 bp, Artificial Sequence
  ENSG00000167699_11 (sequence is synthesized)
tttatgagagcagctgtgcaagtgaatccacattaatgccttgtcgtggtgccattcccagcgcctgacgatacgctcttctattgtcttattctggcaggttttgacgttttaaatttt

SEQ ID NO: 544818 - DNA, 120 bp, Artificial Sequence
  ENSG00000167699_12 (sequence is synthesized)
ttaaagaaattttattccttggaccaaaaggtttggttaaccacccccctcttacttgctttcacattttgagtgtccagaggaaacagaaaggaatgagtgtgtgacgttgctgcacgc

SEQ ID NO: 544819 - DNA, 120 bp, Artificial Sequence
  ENSG00000167699_13 (sequence is synthesized)
ctgactctgtgcgagcttctttctgtgtatatattttgttttatttttttccgtgtatatttttaatcccgacagaacatcatgtgagatttctttaaaatggattaaacgatttcttca

SEQ ID NO: 544820 - DNA, 120 bp, Artificial Sequence
  ENSG00000167699_14 (sequence is synthesized)
gcctgaaaaaaaaggttttgaaaatgttttcttgtagttttgtttggttctaaacaacaaataggttttaatcactcgaaatggaattatattgtgtattcattgaataaattttttttg

SEQ ID NO: 544821 - DNA, 120 bp, Artificial Sequence
  ENSG00000167699_15 (sequence is synthesized)
aaagtaagcttctgaaatcaagctgtgataccagtctctaagtctcatcatgtaaagtggtggccaggttcagatttttaaaaataaacttaggagattggaagggattgactcagagga

SEQ ID NO: 544822 - DNA, 120 bp, Artificial Sequence
  ENSG00000167699_16 (sequence is synthesized)
tcctggttcccaaagaacacatagagaattacttgtaaatcgtaacctctgctttcctcccttactggcagggcgtagggcatcgaaattttggttgtatttgagcttatcttcttatag

SEQ ID NO: 544823 - DNA, 90 bp, Artificial Sequence
  ENSG00000167699_17 (sequence is synthesized)
atggctgctcgcagagctctgcacttcgtattcaaagtgggaaaccgcttccagacggcgcgtttctatcgggacgtcctggggatgaag

SEQ ID NO: 544824 - DNA, 120 bp, Artificial Sequence
  ENSG00000167699_18 (sequence is synthesized)
cactccagcctgggtgacagaacaagacaaaaaaaaaaaaagatacactgggtaatcactaacccattattccttgtggcgttacgaggtcggaccaatccttgatatcctcaaatttca

SEQ ID NO: 544825 - DNA, 120 bp, Artificial Sequence
  ENSG00000167699_19 (sequence is synthesized)
ccttaatgaggctgacacctttcagcttatcgactggcaactcctttaggtattctagacggctaaagaagaacatttttggcacagctccagccttgagagcgtctgaaatgagcctgc

SEQ ID NO: 544826 - DNA, 120 bp, Artificial Sequence
  ENSG00000167699_20 (sequence is synthesized)
gaccttccagcaggatcttcccttgtttttcccgaaatggcctggactttactattgtcattacactgcctcctgtccccgggataagctttatcgtagcgaagcccagactcttcccag

SEQ ID NO: 544827 - DNA, 120 bp, Artificial Sequence
  ENSG00000167699_21 (sequence is synthesized)
gtgctgggagcgcgggatgcggactcctcgagcggttgtttctctcgttgctcctgggcactggcctcagatggtgcttgcggggctgcttcccaggagcgcgcttctgttccaccacct

SEQ ID NO: 544828 - DNA, 120 bp, Artificial Sequence
  ENSG00000167699_22 (sequence is synthesized)
ctccggaaggaaacaccactttcactgggctccgccgcagcgcccggacccagcgcctcgcgcaaggtcccaagcctggaccacctgcagcaacggtcgcacgacaaacctcgcgggtct

SEQ ID NO: 544829 - DNA, 120 bp, Artificial Sequence
  ENSG00000167699_23 (sequence is synthesized)
caccagcgccgccatgttccctgagacccgggctgcgtcacgaaagcgcgccgtcggcggctagtgacgtcacggcccgtggcgcccttcgtggactgggctgtacggtgcgcgtgacgg

SEQ ID NO: 544830 - DNA, 120 bp, Artificial Sequence
  ENSG00000167699_24 (sequence is synthesized)
gtgacggctgcgtgcggcgggaatcatggctgctcgcagagctctgcacttcgtattcaaagtgggaaaccgcttccagacggcgcgtttctatcgggacgtcctggggatgaagtctgt

SEQ ID NO: 544831 - DNA, 120 bp, Artificial Sequence
  ENSG00000167699_25 (sequence is synthesized)
ttctctgcactctcatgagtataaagcagtggaattaattaagaaggcagtaaattagggaggcaacttcaggagcgtcgggaacacatttctctgcactctcatacaacacctgtggga

SEQ ID NO: 544832 - DNA, 120 bp, Artificial Sequence
  ENSG00000167699_26 (sequence is synthesized)
cacaaagggattctccagctctctaacaccagccggctgtcctgttatttaattgattctgactctacctggagttaatgtcagatcctgcaagttaagggctcagtcccagaagatttt

SEQ ID NO: 544833 - DNA, 120 bp, Artificial Sequence
  ENSG00000167699_27 (sequence is synthesized)
gcggcgggaatcatggctgctcgcagagctctgcacttcgtattcaaagtgggaaaccgcttccagacggcgcgtttctatcgggacgtcctggggatgaaggccctgcgcggtgttcag

SEQ ID NO: 544834 - DNA, 120 bp, Artificial Sequence
  ENSG00000167699_28 (sequence is synthesized)
cttcaggagcgtggcgagttgccgttggggatcataggccttggagaagggcctaacacgattagtccccgcggtgtgcccacgcacgtcctttcatttaagccactcgtaaacgtttat

SEQ ID NO: 544835 - DNA, 120 bp, Artificial Sequence
  ENSG00000167699_29 (sequence is synthesized)
tgagccccgcccttgtggagcttaccgtctaccggaaaagacggttctgcggcatgaggaatttgaagaaggctgcaaagctgcctgtaatgggtatgataccttgtttcttaaaatctc

SEQ ID NO: 544836 - DNA, 120 bp, Artificial Sequence
  ENSG00000167699_30 (sequence is synthesized)
cggctgcgtgcggcgggaatcatggctgctcgcagagctctgcacttcgtattcaaagtgggaaaccgcttccagacggcgcgtttctatcgggacgtcctggggatgaaggctctgact

SEQ ID NO: 544837 - DNA, 120 bp, Artificial Sequence
  ENSG00000167699_31 (sequence is synthesized)
tttctatcgggacgtcctggggatgaaggtgcaggccggggccgacaggggctggcgcgcgaggctggaaccggcgcccgagccggccctggcggagggaggggaaaatgggtgtgtcgt

SEQ ID NO: 544838 - DNA, 120 bp, Artificial Sequence
  ENSG00000167699_32 (sequence is synthesized)
gaataacctgttactttgaatttggcttgtaaacgaagcttataaatggcttataacctttataaatgaagttaacatgaaggttgttcccatagtttcttcacagtgattcaatattta

SEQ ID NO: 544839 - DNA, 120 bp, Artificial Sequence
  ENSG00000167699_33 (sequence is synthesized)
tatagataaacagaagaaaataagtgataaccttaccacccagatattaccttgtttatatttggggatatatctcttcagaagtggaattgcttaatccaagagattgaatggatttaa

SEQ ID NO: 544840 - DNA, 120 bp, Artificial Sequence
  ENSG00000167699_34 (sequence is synthesized)
tgcaagatctttttcatcttctttttctaataacccagcgtttgagcacgatttagtccttgcactttgaccctgcaattctactcctaggaattattttacagatgtgctcaacataca

SEQ ID NO: 544841 - DNA, 120 bp, Artificial Sequence
  ENSG00000167699_35 (sequence is synthesized)
tcggcacaaagaagtgtgtgcaaggttatctgctgcagcattgtctgtaatcacaatgtgtaagaatttcagtgtcctatagattagagacatatttcagtaatttacggctcattcatg

SEQ ID NO: 544842 - DNA, 120 bp, Artificial Sequence
  ENSG00000167699_36 (sequence is synthesized)
gaatggattactatgtcgctagcaaaaagattgaggcaaatctttatgtattgacatggtaacattaagtggagaaaaacaaggaacagaataatttgtaaattataccaccatttgtgt

SEQ ID NO: 544843 - DNA, 120 bp, Artificial Sequence
  ENSG00000167699_37 (sequence is synthesized)
aaaaaaaaaaacatagatgcgtgcagtgcttctagaaggatacacaggaaagtgtggactagttgtctctggggtgagagtaggatagagactcagtttttactttattcctttagtata

SEQ ID NO: 544844 - DNA, 120 bp, Artificial Sequence
  ENSG00000167699_38 (sequence is synthesized)
ggcgtcaagggtggggtggaccatgcagcagcttttggaagaattgccttctcttgcccccagaaagaggtaacgcttgataccagatcgtttgagctttctgactagctagttcaaccc

SEQ ID NO: 544845 - DNA, 120 bp, Artificial Sequence
  ENSG00000167699_39 (sequence is synthesized)
agctaagaactttgtccttcccttcttgaggtcctttttgattgtggctttagtatcaagttcagcagttgtttcaagagcagctgagataataaattcaaacaaatggcgccttggttc

SEQ ID NO: 544846 - DNA, 120 bp, Artificial Sequence
  ENSG00000167699_40 (sequence is synthesized)
atgcagagcaagcctctgtgattcctgcccagcacctgtgaggcctgacgtggtggagtgcagtggggcaccatcgtggctttctgcagccttgacctctggggctcaagagatcctccc

SEQ ID NO: 544847 - DNA, 120 bp, Artificial Sequence
  ENSG00000167699_41 (sequence is synthesized)
tgccaccacacccagccaacgttttgatcttttgtagcgaccgtctcactgcgttgttcaggctgcaagctgttgtttcaaacagatgaagttggaaagttcttcagcttctccagagtt

SEQ ID NO: 544848 - DNA, 120 bp, Artificial Sequence
  ENSG00000167699_42 (sequence is synthesized)
ggctctgactacacccggataacagaagacagtttctcaaagtgagtataaagcagtggaattaattaaggaggcagtaaattagggaggcaacttcaggagcgtcgggaacacatactg

SEQ ID NO: 544849 - DNA, 120 bp, Artificial Sequence
  ENSG00000167699_43 (sequence is synthesized)
taagtacatgctctagatgaagcagcggctttccagtatctttttttttttgagacagaatctcactttgtcacccaggtgggagtgcggggtcattatcctggctcactgcaacctctg

SEQ ID NO: 544850 - DNA, 90 bp, Artificial Sequence
  ENSG00000167699_44 (sequence is synthesized)
gggagtgcggggtcattatcctggctcactgcaacctctgtcttctgatagtacgtgggactatgggcatgtgccaccatgcccagctaa

SEQ ID NO: 544851 - DNA, 70 bp, Artificial Sequence
  ENSG00000167699_45 (sequence is synthesized)
tccatctcttaagcttagtaccgtgacaagttggaacagtccaaggcctattaggaatttcatgcttgtt

SEQ ID NO: 544852 - DNA, 120 bp, Artificial Sequence
  ENSG00000167699_46 (sequence is synthesized)
ttggaacagtccaaggcctattaggaatttcatgcttgttgattgatagtcaaggaaataacaggtcagttggagaactgtctttaggattctgttccttgctttacagaaaaggtgaac

SEQ ID NO: 544853 - DNA, 120 bp, Artificial Sequence
  ENSG00000167699_47 (sequence is synthesized)
aaatctttccttcaggtagatgctggatagtctttggagcttgtagtagggtcccatgagcactgcccacagctgctttctgtaccatctgaggtcatctcatccttaagagaactttta

SEQ ID NO: 544854 - DNA, 120 bp, Artificial Sequence
  ENSG00000167700_0 (sequence is synthesized)
gcagagcatgccgggagccgccggccgccggtgtccggaccgctcgcccccgtttggacccgacttcggttcttctggggtgttgatgctcctaaagcccgagagcacgtgtccagaccc

SEQ ID NO: 544855 - DNA, 120 bp, Artificial Sequence
  ENSG00000167700_1 (sequence is synthesized)
tagcctgtacgacgctgactctgcccggtcccagaaccaaagccatgccggggtgtggcctctgaccccacgcggaggggacctcgccttgcgggaccccacctggaacccgacctccca

SEQ ID NO: 544856 - DNA, 120 bp, Artificial Sequence
  ENSG00000167700_2 (sequence is synthesized)
gcctcgcagccggcctgagccgccatgcgcgggaagttgctgccgctggccggcctctacctggtgcagggcctgccctacgggctccagtccggcctcctgccagtgctgctgcgtgcc

SEQ ID NO: 544857 - DNA, 120 bp, Artificial Sequence
  ENSG00000167700_3 (sequence is synthesized)
ggcggcctctcgctgacgcgcgtggggctggccaaggttctgtacgctccgtggctgctcaagctggcttgggccccgctggtggacgcgcagggctcggcgagggcctgggtgacgcgc

SEQ ID NO: 544858 - DNA, 120 bp, Artificial Sequence
  ENSG00000167700_4 (sequence is synthesized)
agcacggcgggcctgggcctggtgtgtgggctgcttgccgggctgccccctcctggagctggccaggccgggctgcccgccgctgtggcggggttgctgctgttgttgaacctgggtgcc

SEQ ID NO: 544859 - DNA, 120 bp, Artificial Sequence
  ENSG00000167700_5 (sequence is synthesized)
gccatgcaggatgtggccctggacgcgctggctgtgcagctgctggagccggccgaactggggccgggcaataccgtgcaggtggtcgcgtacaagctgggggccgcgctagctgggggc

SEQ ID NO: 544860 - DNA, 120 bp, Artificial Sequence
  ENSG00000167700_6 (sequence is synthesized)
tcccacagcagcccccttccgagcagcgtccccacaccgcgcaccttctgcgggacgtgctagccgtgccggggaccgtgtggacggcaggctttgtgctcacctacaagctgggtgagc

SEQ ID NO: 544861 - DNA, 120 bp, Artificial Sequence
  ENSG00000167700_7 (sequence is synthesized)
agggtgccagcagcctgtttcctcttctcctgctggaccacggcgtttctgctcccgagttgggactgtggaatggtgtgggtgctgtggtctgctccatcgctggctcctccctgggtg

SEQ ID NO: 544862 - DNA, 120 bp, Artificial Sequence
  ENSG00000167700_8 (sequence is synthesized)
ggaccttgctggccaagcactggaaactgctgcctctgttgaggtcggtgctgcgcttccgcctcgggggcctagcctgtcagactgccttggtcttccacctggacaccctgggggcca

SEQ ID NO: 544863 - DNA, 120 bp, Artificial Sequence
  ENSG00000167700_9 (sequence is synthesized)
gcatggacgctggcacaatcttgagagggtcagccttgctgagcctatgtctgcagcacttcttgggaggcctggtcaccacagtcaccttcactgggatgatgcgctgcagccagctgg

SEQ ID NO: 544864 - DNA, 120 bp, Artificial Sequence
  ENSG00000167700_10 (sequence is synthesized)
cccccagggccctgcaggccacacactacagccttctggccacgctggagctgctggggaagctgctgctgggcactctggccggaggcctggctgatgggttggggccacatccctgct

SEQ ID NO: 544865 - DNA, 120 bp, Artificial Sequence
  ENSG00000167700_11 (sequence is synthesized)
tcttgctcctgctcatcctctctgcctttcccgttctgtacctggacctagcacccagcacctttctctgagctgagtggctggagtggtcaataaagccacatgtgcctgtggcccaga

SEQ ID NO: 544866 - DNA, 120 bp, Artificial Sequence
  ENSG00000167700_12 (sequence is synthesized)
ctgcagctctggaacactgaggagagcagggcaggactgagggcccaggtggggagaagggaggtgggggcagatatggaacctcccgtgctcatgccccccccaccacccaaggtgagc

SEQ ID NO: 544867 - DNA, 120 bp, Artificial Sequence
  ENSG00000167700_13 (sequence is synthesized)
ggaccttgctggccaagcactggtgagccctccccagtgtaccctgcccacccacttgtacctgagctgcccccaatccactatactgacccatttcccacccccatcccaggaaactgc

SEQ ID NO: 544868 - DNA, 120 bp, Artificial Sequence
  ENSG00000167701_0 (sequence is synthesized)
agtgaggccagctgcggtgaagagggtgctctcttgcctggagttccctctgctacggctgccccctcccagccctggcccactaagccagacccagctgtcgccattcccacttctggt

SEQ ID NO: 544869 - DNA, 120 bp, Artificial Sequence
  ENSG00000167701_1 (sequence is synthesized)
cctgccacctcctgagctgccttcccgcctggtctgggtagagtcatggcctcgagcacaggtgaccggagccaggcggtgaggcatggactgagggcgaaggtgctgacgctggacggc

SEQ ID NO: 544870 - DNA, 120 bp, Artificial Sequence
  ENSG00000167701_2 (sequence is synthesized)
atgaacccgcgtgtgcggagagtggagtacgcagtgcgtggccccatagtgcagcgagccttggagctggagcaggagctgcgccagggtgtgaagaagcctttcaccgaggtcatccgt

SEQ ID NO: 544871 - DNA, 120 bp, Artificial Sequence
  ENSG00000167701_3 (sequence is synthesized)
gccaacatcggggacgcacaggctatggggcagaggcccatcaccttcctgcgccaggtcttggccctctgtgttaaccctgatcttctgagcagccccaacttccctgacgatgccaag

SEQ ID NO: 544872 - DNA, 120 bp, Artificial Sequence
  ENSG00000167701_4 (sequence is synthesized)
aaaagggcggagcgcatcttgcaggcgtgtgggggccacagtctgggggcctacagcgtcagctccggcatccagctgatccgggaggacgtggcgcggtacattgagaggcgtgacgga

SEQ ID NO: 544873 - DNA, 120 bp, Artificial Sequence
  ENSG00000167701_5 (sequence is synthesized)
ggcatccctgcggaccccaacaacgtcttcctgtccacaggggccagcgatgccatcgtgacggtgctgaagctgctggtggccggcgagggccacacacgcacgggtgtgctcatcccc

SEQ ID NO: 544874 - DNA, 120 bp, Artificial Sequence
  ENSG00000167701_6 (sequence is synthesized)
atcccccagtacccactctactcggccacgctggcagagctgggcgcagtgcaggtggattactacctggacgaggagcgtgcctgggcgctggacgtggccgagcttcaccgtgcactg

SEQ ID NO: 544875 - DNA, 120 bp, Artificial Sequence
  ENSG00000167701_7 (sequence is synthesized)
gtgcgctctgtgtcatcaaccctggcaaccccaccgggcaggtgcagacccgcgagtgcatcgaggccgtgatccgcttcgccttcgaagagcggctctttctgctggcggacgaggtgt

SEQ ID NO: 544876 - DNA, 120 bp, Artificial Sequence
  ENSG00000167701_8 (sequence is synthesized)
accaggacaacgtgtacgccgcgggttcgcagttccactcattcaagaaggtgctcatggagatggggccgccctacgccgggcagcaggagcttgcctccttccactccacctccaagg

SEQ ID NO: 544877 - DNA, 120 bp, Artificial Sequence
  ENSG00000167701_9 (sequence is synthesized)
gctacatgggcgagtgcgggttccgcggcggctatgtggaggtggtgaacatggacgctgcagtgcagcagcagatgctgaagctgatgagtgtgcggctgtgcccgccggtgccaggac

SEQ ID NO: 544878 - DNA, 120 bp, Artificial Sequence
  ENSG00000167701_10 (sequence is synthesized)
aggccctgctggacctggtggtcagcccgcccgcgcccaccgacccctcctttgcgcagttccaggctgagaagcaggcagtgctggcagagctggcggccaaggccaagctcaccgagc

SEQ ID NO: 544879 - DNA, 120 bp, Artificial Sequence
  ENSG00000167701_11 (sequence is synthesized)
aggtcttcaatgaggctcctggcatcagctgcaacccagtgcagggcgccatgtactccttcccgcgcgtgcagctgcccccgcgggcggtggagcgcgctcaggagctgggcctggccc

SEQ ID NO: 544880 - DNA, 120 bp, Artificial Sequence
  ENSG00000167701_12 (sequence is synthesized)
ccgatatgttcttctgcctgcgcctcctggaggagaccggcatctgcgtggtgccagggagcggctttgggcagcgggaaggcacctaccacttccggatgaccattctgccccccttgg

SEQ ID NO: 544881 - DNA, 120 bp, Artificial Sequence
  ENSG00000167701_13 (sequence is synthesized)
agaaactgcggctgctgctggagaagctgagcaggttccatgccaagttcaccctcgagtactcctgagcaccccagctggggccaggctgggtcgccctggactgtgtgctcaggagcc

SEQ ID NO: 544882 - DNA, 120 bp, Artificial Sequence
  ENSG00000167701_14 (sequence is synthesized)
ctgggaggctctggagcccactgtacttgctcttgatgcctggcggggtggggtggggggggtgctgggcccctgcctctctgcaggtccctaataaagctgtgtggcagtctgactcca

SEQ ID NO: 544883 - DNA, 120 bp, Artificial Sequence
  ENSG00000167701_15 (sequence is synthesized)
agggctgccacttggactcccttgccagggggcgggcaggggctggctctgcctggggccaggcccatgttaacctgtgccccggcctgggggccagaggggcaggcctgcgcacgggga

SEQ ID NO: 544884 - DNA, 120 bp, Artificial Sequence
  ENSG00000167701_16 (sequence is synthesized)
gcacccccccacccccagcccatgtgccctggcctcagcactccgtcttcccaggtcttggccctctgtgttaaccctgatcttctgagcagccccaacttccctgacgatgccaagaaa

SEQ ID NO: 544885 - DNA, 120 bp, Artificial Sequence
  ENSG00000167701_17 (sequence is synthesized)
aagatgcgggtgccacgagggccaggcctcggccaagccctgctggggtaaatcccagcagcccaggctccagtctcgcctcgggggtccctccttgccagctctgccagcccctcaggg

SEQ ID NO: 544886 - DNA, 120 bp, Artificial Sequence
  ENSG00000167701_18 (sequence is synthesized)
ctgctgggcaccccttcacctcctgagcaccccaggtgctcagccctctccccctccccccatgtctagtccctcagagctgtccggactgacgtctgtacctaccccccatgtgggtct

SEQ ID NO: 544887 - DNA, 120 bp, Artificial Sequence
  ENSG00000167701_19 (sequence is synthesized)
cctgctctcccttcgtggggacactaggcaggcactgggccttgccccaagccccgcctgccacctcacccactgcctctgcctccctggggcagagctgttcccagacgggtggggcgg

SEQ ID NO: 544888 - DNA, 120 bp, Artificial Sequence
  ENSG00000167701_20 (sequence is synthesized)
aaaagggcggagcgcatcttgcaggcgtgtgggggccacagtctgggtgagagccagggccaggaggaagcagagggccgccctgccactggaggagggaagtcccttgggagggctgag

SEQ ID NO: 544889 - DNA, 120 bp, Artificial Sequence
  ENSG00000167702_0 (sequence is synthesized)
cgccgagtctgggcgcggggacgcggggcggcgcgaagcggggccctctgccgccccgcgctcccatgtacgccttttactcgttgctcatctacatcttctacagcctcttccgcaggg

SEQ ID NO: 544890 - DNA, 120 bp, Artificial Sequence
  ENSG00000167702_1 (sequence is synthesized)
cggggaccccgcccagagagcccgcaagccccggggtcgccggcgcccagacctgcccgcgccagagctgtggaccgagctgaccggcctggccgccagctccgagcctgaggatgggtc

SEQ ID NO: 544891 - DNA, 120 bp, Artificial Sequence
  ENSG00000167702_2 (sequence is synthesized)
ccgccagctccgagcctgaggatgggtcggaaggcgcagccgagggccgcgcggccgcggtgtccctggaagaggccctactgcgcctcgccgagttcctctccgtccagctgggggcgg

SEQ ID NO: 544892 - DNA, 120 bp, Artificial Sequence
  ENSG00000167702_3 (sequence is synthesized)
aagagagctgcgggggcccggcggacctgggccagtctggcgaggtcccctcactgttgacagtgaccagtcagctcttggcccttctggcatggcttcgaagccccagggggaggcagg

SEQ ID NO: 544893 - DNA, 120 bp, Artificial Sequence
  ENSG00000167702_4 (sequence is synthesized)
ccctgctccaggggactcagccagcccctcgggtccggcccccctctccagatggatccacatcccaagaagaaagcccttcccacttcaccgcagtcccaggcgagccactgggggatg

SEQ ID NO: 544894 - DNA, 120 bp, Artificial Sequence
  ENSG00000167702_5 (sequence is synthesized)
agacccagggacagcagcccctccagttggaggaggatcagagggcgtggcagcggctggagcagctcatcctgggacagctggaggagctgaagcagcagctggaacagcaggaggagg

SEQ ID NO: 544895 - DNA, 120 bp, Artificial Sequence
  ENSG00000167702_6 (sequence is synthesized)
agttgggtcgactgcgcctgggcgtgggggcgacggactcagagaaaagggttcagcatctgactctggagaacgaggccctgaagcagagcctgagtctcatgcgggacctcctgctgc

SEQ ID NO: 544896 - DNA, 120 bp, Artificial Sequence
  ENSG00000167702_7 (sequence is synthesized)
actggggccccgggccccccatcagggctccgcaggaggaggcagaggcattgctagagctccagggccggcttcaggaggcccaagacaccacagaagccctccgagcccagctggggg

SEQ ID NO: 544897 - DNA, 120 bp, Artificial Sequence
  ENSG00000167702_8 (sequence is synthesized)
tgcaggaggtgcagctgcagggccttcaaggggccctccagcagctccagcaggagacggagcagaactgcaggcgtgagctacagcagatgcatgggcagctggcaggacttcgggcac

SEQ ID NO: 544898 - DNA, 120 bp, Artificial Sequence
  ENSG00000167702_9 (sequence is synthesized)
ggatggccagcctgcgtcagggctgcggggacctccgaggtttggtcagcacctttacccagagctgtcagggttcgctgagtgaggcccggggccaggtgtcctgggccttgggggcac

SEQ ID NO: 544899 - DNA, 120 bp, Artificial Sequence
  ENSG00000167702_10 (sequence is synthesized)
tgtcatctggagggcctggcactcagctccctgaggggcagcaagggcccccagccggatgcccagggcggctgccagaactcaagggaaatatccgtgtgctgtgtcggctgaggccag

SEQ ID NO: 544900 - DNA, 120 bp, Artificial Sequence
  ENSG00000167702_11 (sequence is synthesized)
ggacatcttctagccttgtgagtgtggagcctggcccagggggcaccgtcaccacctgctaccgggggcgccatcgtcgattccgcctagactgggtcttccctccagacgccagccagg

SEQ ID NO: 544901 - DNA, 120 bp, Artificial Sequence
  ENSG00000167702_12 (sequence is synthesized)
aggaggtcttcagagagctggaacctgcggtgctgtcctgcctccgaggctacagcgtctgcatcttcacctatggccagacaggcaccgggaagacctacagcatggagggccctcctg

SEQ ID NO: 544902 - DNA, 120 bp, Artificial Sequence
  ENSG00000167702_13 (sequence is synthesized)
cggcatagttcctagggcgctgcagtcgctgttccgggagatgggggccggccggcagcaccgggtgacactcagcatggtggagatctacaatgaggctgtcagggacctccttgctcc

SEQ ID NO: 544903 - DNA, 120 bp, Artificial Sequence
  ENSG00000167702_14 (sequence is synthesized)
agggcctcccgagcgcctggccgtgaggcagggcccagaaggccagggcgggatccaggtggctggcctcacccactgggacgtgcccaacctggagacattgcaccagatgctgaaact

SEQ ID NO: 544904 - DNA, 120 bp, Artificial Sequence
  ENSG00000167702_15 (sequence is synthesized)
ggggaggagcaaccgggccaccgccgccaccgccatgaaccagcgcagctcccgctcgcatgccctggtcacgctgacgctgcgcgcggcgtctccaccgcgcgctccaggcaccgcagg

SEQ ID NO: 544905 - DNA, 120 bp, Artificial Sequence
  ENSG00000167702_16 (sequence is synthesized)
cacgctgcacctggtggacctggcgggatccgaacgcgcacggaaggcaggggcggccggcccgccgcggggagacccagacggcgcccggcgcctgcgggaggcccagaccataaaccg

SEQ ID NO: 544906 - DNA, 120 bp, Artificial Sequence
  ENSG00000167702_17 (sequence is synthesized)
ctcgctgctggcgctaggaggcgtgatggccgcactgcgggcccaccggccgcacgtgcccttccgcgactcgcagctcacgcgactgctgcagccggcgctgggcccaggcaccaccgc

SEQ ID NO: 544907 - DNA, 120 bp, Artificial Sequence
  ENSG00000167702_18 (sequence is synthesized)
cggggcggggcaggtgtgtgcgtgccggtcgccgcccacccgggcccgcccacccgcgcctcttgcccgcagatctccacgcggccggaggatctcggggagacagtctgctccctcaag

SEQ ID NO: 544908 - DNA, 120 bp, Artificial Sequence
  ENSG00000167702_19 (sequence is synthesized)
ggggagacagtctgctccctcaagttcgccgaccgagtgggtcaagtggagctggggccagcccggcgccgcagggtcccgcgctcctccgggacgccttcttccctcagcaccgacact

SEQ ID NO: 544909 - DNA, 120 bp, Artificial Sequence
  ENSG00000167702_20 (sequence is synthesized)
ccgctcaccgggaccccctgcacccctacgccgtcccctggcagtcctccatgccccagtcccgacaacggctcgggctcggctctcgcgcccgcagagggcctgcccctctagtcctgg

SEQ ID NO: 544910 - DNA, 120 bp, Artificial Sequence
  ENSG00000167702_21 (sequence is synthesized)
gtcgcggccctgcccatggggtctcaggccaggtctctgctggcagaggcggtagtaaagtccctgtaccccgtctcccagggcacaagctccctagcctctttggatccattgcccctg

SEQ ID NO: 544911 - DNA, 120 bp, Artificial Sequence
  ENSG00000167702_22 (sequence is synthesized)
agctcccagagtcacccctccacctccgcagccagtgaagtgtgttgtgcctgctgaagtgatcaccccccgcccccagccctgcatcaggccacaggtcttggctttctccttatcacc

SEQ ID NO: 544912 - DNA, 120 bp, Artificial Sequence
  ENSG00000167702_23 (sequence is synthesized)
atttgctgttatcacggcacacagcagggaatcccaggcccccccgccaagtggttacccaagtcaccactcctgacccaaaaatcaggcatggcattaaaacgttgcaaattcctttac

SEQ ID NO: 544913 - DNA, 120 bp, Artificial Sequence
  ENSG00000167702_24 (sequence is synthesized)
tgttatcccccccaccaccaggaccatgtagggtgcagtctttactccctaacccgtttcccgaaaaaggtgctacctcctttccagacagatgagagagggcaggacttcaggctggat

SEQ ID NO: 544914 - DNA, 120 bp, Artificial Sequence
  ENSG00000167702_25 (sequence is synthesized)
ccaccactgggctctccctcccccagcctggagcacgggaggggaggtgacggctggtgactgatggatgggtagtgggctgagaagaggggactaggaagggctattccaggctcagcc

SEQ ID NO: 544915 - DNA, 120 bp, Artificial Sequence
  ENSG00000167702_26 (sequence is synthesized)
ctgctcctgcagctttgccgctgagtgtaggaaaaacaggcatgacagaccagggtgagggttgtgcccagctgggccacggccatgcgtggggtggcccaataaacaccgtggactccc

SEQ ID NO: 544916 - DNA, 120 bp, Artificial Sequence
  ENSG00000167702_27 (sequence is synthesized)
ggggctgtagggagaggaaggagaaccccggcgtgttgaaggctccgcgaaaccggagcggtgggggactacgcggagggtgggagggattccgagaggagggtcgcgggagccgtgggc

SEQ ID NO: 544917 - DNA, 120 bp, Artificial Sequence
  ENSG00000167702_28 (sequence is synthesized)
gctctcagcccggtgtccgcggtgtaggggttggggcgcgccgggcggcgccgtgagaaacggcgggtctccaggtgcggccgcgggcacctgtttctagtacccccgtccccgcgctcg

SEQ ID NO: 544918 - DNA, 120 bp, Artificial Sequence
  ENSG00000167702_29 (sequence is synthesized)
tcctcaggacctcccgggatggtctgtgtagggcagccccatcagggaggctgatgccaatgggaagacccccctctccgtggcccctctgagtggctgaccccaggagagcagagggac

SEQ ID NO: 544919 - DNA, 120 bp, Artificial Sequence
  ENSG00000167702_30 (sequence is synthesized)
tgtgggaaggaggtctgcgtggagctgggaggcatgggttcacagccagctctgcccacctcttgacttgactttcccatctgtgaaatggtaccacagaccgtccctctctgagtccct

SEQ ID NO: 544920 - DNA, 120 bp, Artificial Sequence
  ENSG00000167702_31 (sequence is synthesized)
cctggcccccaccctcccgcaggaggaggcagaggcattgctagagctccagggccggcttcaggaggcccaagacaccacagaagccctccgagcccaggtgggcatggggcccaggga

SEQ ID NO: 544921 - DNA, 120 bp, Artificial Sequence
  ENSG00000167702_32 (sequence is synthesized)
aacagcaggaggaggagttgggtcgactgcgcctgggcgtggtgaggctgcagggagacctggcagggccgggcatggagggggtgcttcaggtgagtgccgaggtttcctctccaccag

SEQ ID NO: 544922 - DNA, 80 bp, Artificial Sequence
  ENSG00000167703_0 (sequence is synthesized)
agaaaaggcgccgggcgggcccgacacacgccggaggagccgggtggtgcagagccggagccggagccggagccgcgccg

SEQ ID NO: 544923 - DNA, 120 bp, Artificial Sequence
  ENSG00000167703_1 (sequence is synthesized)
gccgctggtggatggcctgcacggccgtgctggagaacctcctcttctcggcagtcctcctgggctggggctcgctgctcatcatgctcaagtcagagggcttttactcctacctgtgta

SEQ ID NO: 544924 - DNA, 120 bp, Artificial Sequence
  ENSG00000167703_2 (sequence is synthesized)
ccgagccagagaatgtcaccaatggcacagtgggcggcacagcagagccggggcacgaggaggtgagctggatgaacggctggctcagctgccaggcccaggacgagatgctaaatttgg

SEQ ID NO: 544925 - DNA, 120 bp, Artificial Sequence
  ENSG00000167703_3 (sequence is synthesized)
ccttcactgtgggctcctttctgctcagtgccatcaccctgcccctgggtatcgtcatggacaagtatggcccgaggaagctcaggctgctgggcagcgcctgcttcgcggtttcctgct

SEQ ID NO: 544926 - DNA, 120 bp, Artificial Sequence
  ENSG00000167703_4 (sequence is synthesized)
tgctgattgcgtacggagcaagtaaaccaaacgctctctccgtgctcatcttcatcgccctggctctgaatggctttggtgggatgtgtatgaccttcacctcattaacactgcccaaca

SEQ ID NO: 544927 - DNA, 120 bp, Artificial Sequence
  ENSG00000167703_5 (sequence is synthesized)
tgttcggcgaccttcggtccacgtttattgccttgatgattgggtcctacgcctcctcggcagtcacctttccaggaatcaagctcatctatgatgctggtgtctccttcatcgtcgtcc

SEQ ID NO: 544928 - DNA, 120 bp, Artificial Sequence
  ENSG00000167703_6 (sequence is synthesized)
tcgtggtctgggccggctgctccgggctggttttcctcaactgcttctttaactggccccttgagcccttcccggggccggaggacatggactactcggtgaagatcaagttcagctggc

SEQ ID NO: 544929 - DNA, 120 bp, Artificial Sequence
  ENSG00000167703_7 (sequence is synthesized)
tgggctttgaccacaagatcacagggaagcagttctacaagcaggtgaccacggtgggccggcgcctgagtgtgggcagctccatgaggagtgccaaggagcaggtggcgctgcaggagg

SEQ ID NO: 544930 - DNA, 120 bp, Artificial Sequence
  ENSG00000167703_8 (sequence is synthesized)
gccacaagctgtgcctgtccaccgtcgacctggaggtgaagtgccagccggatgccgcagtggccccctccttcatgcacagcgtgttcagccccatcctgctgctcagcctggtcacca

SEQ ID NO: 544931 - DNA, 120 bp, Artificial Sequence
  ENSG00000167703_9 (sequence is synthesized)
tgtgcgtcacgcagctgcggctcatcttctacatgggggctatgaacaacatcctcaagttcctggtcagcggcgaccagaagacagttggcctctacacctccatcttcggcgtgctcc

SEQ ID NO: 544932 - DNA, 120 bp, Artificial Sequence
  ENSG00000167703_10 (sequence is synthesized)
agctgctgtgcctgctgacggcccccgtcattggctacatcatggactggaggctgaaggagtgtgaagacgcctccgaggagcccgaggagaaagacgccaaccaaggcgagaagaaaa

SEQ ID NO: 544933 - DNA, 120 bp, Artificial Sequence
  ENSG00000167703_11 (sequence is synthesized)
agaagaagcgggaccggcagatccagaagatcactaatgccatgcgggccttcgccttcaccaacctgctgctcgtgggctttggggtgacctgcctcattcccaacctgcctctccaga

SEQ ID NO: 544934 - DNA, 120 bp, Artificial Sequence
  ENSG00000167703_12 (sequence is synthesized)
tcctctccttcatcctgcacacaatcgtgcgaggattcatccactccgctgtcgggggcctgtacgctgccgtgtacccctccacccagttcggcagcctcacgggactgcagtctctga

SEQ ID NO: 544935 - DNA, 120 bp, Artificial Sequence
  ENSG00000167703_13 (sequence is synthesized)
tcagcgcgctcttcgcccttctgcagcagccgctgtttctggccatgatgggtcctctccagggagaccctctgtgggtgaacgtggggctgctccttctcagcctgctgggcttctgcc

SEQ ID NO: 544936 - DNA, 120 bp, Artificial Sequence
  ENSG00000167703_14 (sequence is synthesized)
tcccgctctacctgatctgctaccggcgccagctggagcggcagctgcagcagaggcaggaggatgacaaactcttcctcaaaatcaacggctcgtccaaccaggaggccttcgtgtagt

SEQ ID NO: 544937 - DNA, 120 bp, Artificial Sequence
  ENSG00000167703_15 (sequence is synthesized)
ggctgccgcctcggaactgcggtctcctgcctgtgcttcagtgactgacccctgtcctgcccctccagagtaccccacgcacccccaggaccttcgccgtctccgtgccagcgttcacgc

SEQ ID NO: 544938 - DNA, 120 bp, Artificial Sequence
  ENSG00000167703_16 (sequence is synthesized)
tccctcccggggccctgcctcggagctctgtggtggaaggacgggagagggccccggacacgcgcgttttctcctgccgaacgcaggggctgccctgactttgctctgccgccccccggg

SEQ ID NO: 544939 - DNA, 120 bp, Artificial Sequence
  ENSG00000167703_17 (sequence is synthesized)
gacccggggcctggggtctctgtggtgcctgcagcaggagccaggaacgcccggcaggcaggcgctctcccgccagtgtctggattctgcctcttgccaaagcagagggggctgccatcc

SEQ ID NO: 544940 - DNA, 120 bp, Artificial Sequence
  ENSG00000167703_18 (sequence is synthesized)
cctgcctgccacctgcccctcggctgcatgcccacagccgtacctgcctgaggacaaaggcttgcactgtctcgcccgcgcctggcccccaccccctccccggccagcctgaggctgcct

SEQ ID NO: 544941 - DNA, 120 bp, Artificial Sequence
  ENSG00000167703_19 (sequence is synthesized)
gaggaaggaaggacccgcttcctgttgtcggtgctaattcctttgtaattccagccccctgtcgcctgtccagggcctgcccacccgttggaggccggtggagaagccccacctggctta

SEQ ID NO: 544942 - DNA, 120 bp, Artificial Sequence
  ENSG00000167703_20 (sequence is synthesized)
tgccctggagagggtttagcgggctgggtggacccctcgcctcctccccgagggccaatgccgcggacacgttttcactgtcaccctcgttctgtctgccacctgaagggaatttgagga

SEQ ID NO: 544943 - DNA, 120 bp, Artificial Sequence
  ENSG00000167703_21 (sequence is synthesized)
ccgccgccagggcaccccgtacatacacacagctgcttttgtggaggtggacgaaaggctgtggccggcagacgtggaggtccaggccggggtggggacgtgggtgggtccgaggtgtgt

SEQ ID NO: 544944 - DNA, 120 bp, Artificial Sequence
  ENSG00000167703_22 (sequence is synthesized)
gtggggtcggggtgggctctaggagttagcccttatccccactgaccaggcgggagccgccaggcctgcagctgggccagtgcccaggagccatcctggcgtggggccaggagcttgtcc

SEQ ID NO: 544945 - DNA, 120 bp, Artificial Sequence
  ENSG00000167703_23 (sequence is synthesized)
aaggccacaggcccacagcaccccctgccggcgggctccgtggggccctggagctgatgacgggggaggcccgtccgcctggcccaccaacccgcccaccttgactgcccccagaagtgt

SEQ ID NO: 544946 - DNA, 120 bp, Artificial Sequence
  ENSG00000167703_24 (sequence is synthesized)
gtcttgagacctcctgggcgtgcttagaggggtgagttgtgtttggatttttagttattttctcttcagttttattagacttcttttttataaagcaataaatccattttcctccgggta

SEQ ID NO: 544947 - DNA, 120 bp, Artificial Sequence
  ENSG00000167703_25 (sequence is synthesized)
agggatgccccttctggcatatcagttaatagctgcatgtgcctattttgagcttgagaagaaaaggcaggacaagattctctgccaccgaccagctccagccgtgcccagctgctcttc

SEQ ID NO: 544948 - DNA, 120 bp, Artificial Sequence
  ENSG00000167703_26 (sequence is synthesized)
gtctctctgggggactgctgactcgggagggacagtgggccaggaaaagaccttcctccccaacccccaaacaaactgggcttgtgcagacatcttagaagtgtgagccaccctcctcta

SEQ ID NO: 544949 - DNA, 120 bp, Artificial Sequence
  ENSG00000167703_27 (sequence is synthesized)
ccgattttcccagccaaacaggcgaatcctggtccctttccatccctacacccttccacaaccctgaagattcccgctgggttcttctgcaggctcagagcagttcaggatgtgggcggc

SEQ ID NO: 544950 - DNA, 120 bp, Artificial Sequence
  ENSG00000167703_28 (sequence is synthesized)
agggagggggatgaaaggagaagaggaaagggcaggtccaggccacattcaagctccacattaacagcttgggcgcctggaacacatatctcctaggctttatttcactcaaatatttaa

SEQ ID NO: 544951 - DNA, 61 bp, Artificial Sequence
  ENSG00000167703_29 (sequence is synthesized)
aacacatatctcctaggctttatttcactcaaatatttaaaaaaagtcacctgaggtcagg

SEQ ID NO: 544952 - DNA, 120 bp, Artificial Sequence
  ENSG00000167703_30 (sequence is synthesized)
aacagagcgaggctccgtctcaaaaagaaaaaaaaaaagagaacgagataaacatgcccactcctgagaacactcgttttgtgatgttagtggttattctgattttcaagaaagtattat

SEQ ID NO: 544953 - DNA, 120 bp, Artificial Sequence
  ENSG00000167703_31 (sequence is synthesized)
ttctgattttcaagaaagtattatagtcaagtttgggaaaggctgagttaaaagtcaagcctgtttccttacagccagcactgacagcactttgccaacgctcatgagctccgtggctcc

SEQ ID NO: 544954 - DNA, 120 bp, Artificial Sequence
  ENSG00000167703_32 (sequence is synthesized)
ccgggtgctggttccaaatggagactccaggtcttgccgctgaccggtgactctgctgccagcatttgagacccgccatcacacaggagttgcagattcggagaaaccctaactagccag

SEQ ID NO: 544955 - DNA, 120 bp, Artificial Sequence
  ENSG00000167703_33 (sequence is synthesized)
ttttttttttttttttttttttgagttggggtcttgctctgccatccaggctggagtgcagtggtgcaactgatagctcaccacggcctccaactcatgggctcaagggatcctcccacc

SEQ ID NO: 544956 - DNA, 120 bp, Artificial Sequence
  ENSG00000167703_34 (sequence is synthesized)
ggagtgcagtggtgcaactgatagctcaccacggcctccaactcatgggctcaagggatcctcccacctcggcctcctaagtatctgggactataagtgtgtgccaccatgcctggctaa

SEQ ID NO: 544957 - DNA, 75 bp, Artificial Sequence
  ENSG00000167703_35 (sequence is synthesized)
aatgcctagccaaaaagccagtcttgagatggggaagacgtggcccgtgctgtccccagcagtgcccagtcccag

SEQ ID NO: 544958 - DNA, 120 bp, Artificial Sequence
  ENSG00000167703_36 (sequence is synthesized)
agacgtggcccgtgctgtccccagcagtgcccagtcccagccaaagtgggcagtgctgcctcactctcccacccaccctcagggtgtggcacttactgggaagaagcaggcattgagaaa

SEQ ID NO: 544959 - DNA, 120 bp, Artificial Sequence
  ENSG00000167703_37 (sequence is synthesized)
cagaattgagggggggaaacagtccagggccaacagtgcttggggattgaggcctgaaaatgcgagcagggtacagaggctgtggctggccagatgggtcgggtgccccctgcactccca

SEQ ID NO: 544960 - DNA, 120 bp, Artificial Sequence
  ENSG00000167703_38 (sequence is synthesized)
ccccctagtcaggggtcacccatcctactttgccttgtgtggagctgacaggtgacatgttttcctattgttgtccttgacttgataacaatctgggagttaaacacatatgatcatccc

SEQ ID NO: 544961 - DNA, 120 bp, Artificial Sequence
  ENSG00000167703_39 (sequence is synthesized)
tgctttacaactgaaaaacgaggcctagagatactatcatcatatacacctgaaaaacgaggcctggagcgatggaggagcttgttcaaggtcagagccagcactcatatatgggtctta

SEQ ID NO: 544962 - DNA, 120 bp, Artificial Sequence
  ENSG00000167703_40 (sequence is synthesized)
agacactggagcagccaagggcctctagaccaggacattccactcggagcagcagctcaggggccaccaggcctctgtggcagggggacctctgtggcaggggggacctctgtggcgggg

SEQ ID NO: 544963 - DNA, 120 bp, Artificial Sequence
  ENSG00000167703_41 (sequence is synthesized)
ggggggcctctgtggcaggggggtcacagcccaaggaaggggagcaggcccaggcatggtttccgtttctgggagccaagagccttctcagaagagggggagagagctactgcatggaat

SEQ ID NO: 544964 - DNA, 120 bp, Artificial Sequence
  ENSG00000167703_42 (sequence is synthesized)
catttgggccctggaggctgatgggtacttgggggagcaatccctggtgaccccaaccagcaagacaagtgccctgtgaaggggaagggactacagctgatcaaaggagcaggcaccagt

SEQ ID NO: 544965 - DNA, 120 bp, Artificial Sequence
  ENSG00000167703_43 (sequence is synthesized)
ggccgggcctcccgtctgcccctcatcctccaggctctggcgggaaggagcaggaagggctccctgcccttggggttttgatcagtgaggaggggggcttgggtctgagtctgggtctgg

SEQ ID NO: 544966 - DNA, 120 bp, Artificial Sequence
  ENSG00000167703_44 (sequence is synthesized)
gtctgctgccgaaacactgcccccagtccctctcctcactagactctggggtctaggcgtgtctttgtggtcggccttctccaaaccctctaggcctctgtctgcagctgctgctgcctg

SEQ ID NO: 544967 - DNA, 120 bp, Artificial Sequence
  ENSG00000167703_45 (sequence is synthesized)
gacctatacacaaggtcccacccctcaccggggccaaagacgtggttgcaggccctggtggatcctttctgttttgctccatccccgtcccctcttgcacccagcatcgtcctggtcaga

SEQ ID NO: 544968 - DNA, 120 bp, Artificial Sequence
  ENSG00000167703_46 (sequence is synthesized)
acttccgtttaaaccttccttgcctgccgtgcactccgaggggggcgtcactttgccataggccccagggctgaaaatggcgggacatccagtattgggctcacgtgcataagactgtcc

SEQ ID NO: 544969 - DNA, 120 bp, Artificial Sequence
  ENSG00000167703_47 (sequence is synthesized)
cagacagcagcacaatcacgttcagccaagtggagtttccgacgcacttgtgtggcagccgcgtgaatgtgagccgatatgcagctgggaggggttgtgggcctcctgcggtgaggggct

SEQ ID NO: 544970 - DNA, 120 bp, Artificial Sequence
  ENSG00000167703_48 (sequence is synthesized)
cctgccaggagctctgagaagcctccacagaatcagccgtcgggctccttcagcagcagctccccttatctgtgccaacgactgggggcctaactcaagggtgccagcccgtcttccgcc

SEQ ID NO: 544971 - DNA, 120 bp, Artificial Sequence
  ENSG00000167703_49 (sequence is synthesized)
aatacagactgtgggattctgagagttaggagcctggggtcccctggggtggggtggtcagggtgagcaggtgggctctgtgagcctgtttccccatgccctgactcaccccaatccctg

SEQ ID NO: 544972 - DNA, 120 bp, Artificial Sequence
  ENSG00000167703_50 (sequence is synthesized)
ggtgaggacagagctcctgaaggccactgaaggaggtgcagcacactccacctgggtggccttccgcagctcagccctcttcctgccagcaggaagcctctgcctgtgctccttaagtta

SEQ ID NO: 544973 - DNA, 120 bp, Artificial Sequence
  ENSG00000167703_51 (sequence is synthesized)
gccatcctcaccccctccgggcagctctgagactgagccagggccactagcagcacccagacctcgacccttctcagaccgaggcgccaccaccccaggccgaggaggcaaggagggaag

SEQ ID NO: 544974 - DNA, 120 bp, Artificial Sequence
  ENSG00000167703_52 (sequence is synthesized)
accaaagtctagaggactgtcttggtggccctgggcgagtcttgaactttggtgccatcatctgcaaaagggaggaaagaatgcctgcgtggtgcagctacgtggatacgcagtgaagac

SEQ ID NO: 544975 - DNA, 75 bp, Artificial Sequence
  ENSG00000167703_53 (sequence is synthesized)
atgcctgcgtggtgcagctacgtggatacgcagtgaagacccgcatggtgggacgcctggcacttaacaatggta

SEQ ID NO: 544976 - DNA, 120 bp, Artificial Sequence
  ENSG00000167703_54 (sequence is synthesized)
tgcccaggaagaaggcagctgggacagggaaagggccaccacaccacacccaagcccatacaacaggagagccactttcagcagctctgagcaggacagacttgtggccaagtcaagaaa

SEQ ID NO: 544977 - DNA, 120 bp, Artificial Sequence
  ENSG00000167703_55 (sequence is synthesized)
cagacttgtggccaagtcaagaaagtaaggtctggtcccagcgaggtggctcatccctgtaatcccagtgctttgggaggccgaagcgggggcggggtggatcacttgaggtcaggggtt

SEQ ID NO: 544978 - DNA, 120 bp, Artificial Sequence
  ENSG00000167703_56 (sequence is synthesized)
tgctgaccccacccttctccgaagccctctccgagcaaagccttaagaaactcttctctcgttcacttttcttttgtggctttcacgttttggtaagacttggccaaatagctgctcgag

SEQ ID NO: 544979 - DNA, 120 bp, Artificial Sequence
  ENSG00000167703_57 (sequence is synthesized)
ataatcaatcactggtggacaagtttctgctgagtgaggtttctgctgagtggggcgactcaaggcacggtcacgtaggcagcacctgtacaccgcatcctcatacagctgcgggaccgt

SEQ ID NO: 544980 - DNA, 120 bp, Artificial Sequence
  ENSG00000167703_58 (sequence is synthesized)
gcctctgactgtgtgcgtgtgtgtttatctaagtgtgagatgcatccgggcatgtcagggtgtgtacatgttgggaagactgtgtagatttcttgtgtgccgctctctgaatggaggaga

SEQ ID NO: 544981 - DNA, 120 bp, Artificial Sequence
  ENSG00000167703_59 (sequence is synthesized)
ggggaagcgtcttacctcgctgaatccctttccattgctggaaagaacacctgggcaggagcggccccaagaccccgcccaggccctcggaagggagcctgaagggttaatccgtaccct

SEQ ID NO: 544982 - DNA, 120 bp, Artificial Sequence
  ENSG00000167703_60 (sequence is synthesized)
gtattaaccagggtcaacccagcggctgacccgcctcttccctgctcctttgccgtttctagcacctggcttacttcctggcacacagtgagcactcaataaatgtatgctgagaatgac

SEQ ID NO: 544983 - DNA, 120 bp, Artificial Sequence
  ENSG00000167703_61 (sequence is synthesized)
gtcagggtccctgggagaggcagccctcggatctgcccctgcccacctcacgctgcgttccatgctggccccaggcgatgtcagtcctgctgcaggccaggactagttccacggccctga

SEQ ID NO: 544984 - DNA, 120 bp, Artificial Sequence
  ENSG00000167703_62 (sequence is synthesized)
gcatgcgttagccccttcttgcctccatgcctcagtttacctcggagtgagctgcgggagacgtctccctgcctggccggggcggctctgtcgtagcggagggcagcggtacgagccggc

SEQ ID NO: 544985 - DNA, 120 bp, Artificial Sequence
  ENSG00000167703_63 (sequence is synthesized)
acctgtgagtgtggtggtgagtcaggaaacagctccggcttcctgcttggcagcaaagctggtccttcccctcctggggtccttcccctccgccagccctcgaggcccgcgctagggcgc

SEQ ID NO: 544986 - DNA, 120 bp, Artificial Sequence
  ENSG00000167703_64 (sequence is synthesized)
tctgctcagcgctcagccctcactccggcaccgcggcttcgaacagccattatgcgcagctgagaccggtggaggcagggaagctggggacggagtgagcgagagggggaatgtggggag

SEQ ID NO: 544987 - DNA, 120 bp, Artificial Sequence
  ENSG00000167703_65 (sequence is synthesized)
ctacgggagtccacaggcaaatgcaagcccatccgatgctgtggcgctggaccatggggaggtcagccgaaggcaacagcaggagagctgtggttcctgccagaggacacttccctcgtt

SEQ ID NO: 544988 - DNA, 90 bp, Artificial Sequence
  ENSG00000167703_66 (sequence is synthesized)
aaacaaaactgactgtgttaacgactggcttgcaaaatttctgaaaattcacaattggctccggaggatggggttgatccaactccaggc

SEQ ID NO: 544989 - DNA, 120 bp, Artificial Sequence
  ENSG00000167703_67 (sequence is synthesized)
tggtcgtacctgatatcaggtgtactgtggagctccctgaaggccctccagaatggagttcctaccccgtccgccaccgaatcagcaggtactgtggtcctcgccgtgctccagtaccga

SEQ ID NO: 544990 - DNA, 120 bp, Artificial Sequence
  ENSG00000167703_68 (sequence is synthesized)
aagatttgggtgaacttgaagccagtggtgaagtgaggctttgccatgtgccagctcaggcacacgctgctacttctctccccgtcgtcttagctcagccttcacagagcactgcagcat

SEQ ID NO: 544991 - DNA, 120 bp, Artificial Sequence
  ENSG00000167703_69 (sequence is synthesized)
atggatggccatcttcttgtacccgagaccccctccgagagtcacactcagcttgccactgagaagggccggggagtgtccgtagtgctggtccagccccgacacagtccctaaaacgtg

SEQ ID NO: 544992 - DNA, 120 bp, Artificial Sequence
  ENSG00000167703_70 (sequence is synthesized)
cacagggtgggtgggacagagggagagagcaatgcactccagctgctcccggagcccttagagagactcactcattcagctcagcatgcgtttcaactgctcccctctttatggaaattg

SEQ ID NO: 544993 - DNA, 70 bp, Artificial Sequence
  ENSG00000167703_71 (sequence is synthesized)
tcagcatgcgtttcaactgctcccctctttatggaaattgtttggaatgcaatggaaatgctaaagtttg

SEQ ID NO: 544994 - DNA, 120 bp, Artificial Sequence
  ENSG00000167703_72 (sequence is synthesized)
ctgggaaacatggccagcccccactccccgtctctacaaaaaatttaaaaattggccagggagggtggttcatgcctataataccaacactttggaaggttgaggtgagtgaattgcttg

SEQ ID NO: 544995 - DNA, 76 bp, Artificial Sequence
  ENSG00000167703_73 (sequence is synthesized)
ataccaacactttggaaggttgaggtgagtgaattgcttgagcccaggagttagtgaccagcctggccaatgtggt

SEQ ID NO: 544996 - DNA, 120 bp, Artificial Sequence
  ENSG00000167705_0 (sequence is synthesized)
gcttttccccgtcccagtggagggtggggtgggggggtcgcagccctaagcctctgggagacatggagcccaggagggcggcgcccggggtgcctggctgggggtctcgggaggccgcgg

SEQ ID NO: 544997 - DNA, 120 bp, Artificial Sequence
  ENSG00000167705_1 (sequence is synthesized)
ggtcggcatcggccgcggagcttgtgtaccatctagccggggccctgggcactgagctgcaggatctggcgcgccgtttcgggccggaggcggcggccgggctggtgccgctagtggtgc

SEQ ID NO: 544998 - DNA, 120 bp, Artificial Sequence
  ENSG00000167705_2 (sequence is synthesized)
gggcgctggagctcttggaacaggctgccgtggggcccgccccggactcgctgcaggtgtcggcgcagccggcggagcaggagctgcggcggctgcgggaggagaacgagcgcctccgca

SEQ ID NO: 544999 - DNA, 120 bp, Artificial Sequence
  ENSG00000167705_3 (sequence is synthesized)
gggagctgcgcgcggggccacaggaggagcgcgcgctgctgcggcagctcaaggaggtcacggaccgacagcgggacgaactccgggcgcacaaccgcgacctgcggcagcgcggccagg

SEQ ID NO: 545000 - DNA, 120 bp, Artificial Sequence
  ENSG00000167705_4 (sequence is synthesized)
agaccgaggcgttgcaggagcagctgcagcgcctcctgctggtgaacgctgagctgcggcacaagctggcggccatgcagacccagctgcgcgccgcgcaggaccgcgagagggagcgcc

SEQ ID NO: 545001 - DNA, 120 bp, Artificial Sequence
  ENSG00000167705_5 (sequence is synthesized)
ggagcgccagcagcctggcgaagccgcgactccgcaggctaaagagcgagcgcgggggcaggccgggcggcccgggcaccagcacggacaggagcccgaatgggcgaccgccggcgcagg

SEQ ID NO: 545002 - DNA, 120 bp, Artificial Sequence
  ENSG00000167705_6 (sequence is synthesized)
ggaaccctgaggacccggcggaggccgcgcagcagctcgggcgcccctcggaggcagggcagtgccgcttcagtcgggaggagtttgagcagatccttcaggagcggaatgaactcaaag

SEQ ID NO: 545003 - DNA, 120 bp, Artificial Sequence
  ENSG00000167705_7 (sequence is synthesized)
ccaaagtgttcctgctcaaggaggaactggcctacttccagcgggagctgctcacagaccaccgggtccccggccttctgctcgaggccatgaaggtggctgtccggaagcagcggaaga

SEQ ID NO: 545004 - DNA, 120 bp, Artificial Sequence
  ENSG00000167705_8 (sequence is synthesized)
agatcaaggccaagatgttagggacaccagaggaagcagagagcagtgaggatgaggctggcccatggatcctgctctccgatgacaagggagaccatcccccacccccggagtccaaaa

SEQ ID NO: 545005 - DNA, 120 bp, Artificial Sequence
  ENSG00000167705_9 (sequence is synthesized)
tacagagtttctttggcctatggtatcggggtaaagctgaatcctctgaggatgagaccagcagccctgcacccagcaagctagggggagaagaggaggcccaaccacagtctccagctc

SEQ ID NO: 545006 - DNA, 120 bp, Artificial Sequence
  ENSG00000167705_10 (sequence is synthesized)
ctgatccgccctgttctgccctccacgaacacctttgtctgggggcctcagccgccccagaggcctgacttaggggtctggctgtggaaggatgtgtggcctcaaatgaggacagggctc

SEQ ID NO: 545007 - DNA, 120 bp, Artificial Sequence
  ENSG00000167705_11 (sequence is synthesized)
ccgccttcacagccctcgccaggggtctgccccaatcctggcctgcatcagggcaggacggggtctcagcccgcctccctctctacgtctctgtaccgagcctctggggccagatataag

SEQ ID NO: 545008 - DNA, 120 bp, Artificial Sequence
  ENSG00000167705_12 (sequence is synthesized)
agtgcctctctgagtctcagtttccccatccatgaaatgagagctgactgcctagctcccagggctttgtgcagacggcctgagctcatgtaataaagaactgcccgtaatacacagaaa

SEQ ID NO: 545009 - DNA, 120 bp, Artificial Sequence
  ENSG00000167705_13 (sequence is synthesized)
gaatgggcgaccgccggcgcaggcgccccagggaaccctgaggacccggtgagtgccgtatgagggcaaggacccagcccaggacgcagcgtccagccctcggtgggcactcaagcaagg

SEQ ID NO: 545010 - DNA, 120 bp, Artificial Sequence
  ENSG00000167705_14 (sequence is synthesized)
tttgcatgctgcacagcaggtcggccaggaagcggggaggtggcagacagatctgcgcccccggccggcctcggcccccgctctcagctggagcactgctctgttatctgttagggcacc

SEQ ID NO: 545011 - DNA, 120 bp, Artificial Sequence
  ENSG00000167705_15 (sequence is synthesized)
cttgtcccccaagtctcccggcccgtcacttcctctagcattcccatgatggccctggggcgggggaacgccagccgaggcgaccctctgactgtgcctgtccttccaaaggcggaggcc

SEQ ID NO: 545012 - DNA, 120 bp, Artificial Sequence
  ENSG00000167711_0 (sequence is synthesized)
cctgggcagagagtgaggagcacccaagtggggccagaggaacgttgtgtgtggcagcaaggagcccgcagaggaacatggcgctgctctgggggctcctggtgctcagctggtcctgcc

SEQ ID NO: 545013 - DNA, 120 bp, Artificial Sequence
  ENSG00000167711_1 (sequence is synthesized)
tgcaaggcccctgctccgtgttctcccctgtgagcgccatggagcccttgggccggcagctaactagcgggccgaaccaggagcaggtgtccccacttaccctcctcaagttgggcaacc

SEQ ID NO: 545014 - DNA, 120 bp, Artificial Sequence
  ENSG00000167711_2 (sequence is synthesized)
aggagcctggtggccagactgccctgaagagtcccccaggagtctgcagcagagaccccaccccagagcagacccacaggctggcccgggccatgatggccttcactgccgacctgttct

SEQ ID NO: 545015 - DNA, 120 bp, Artificial Sequence
  ENSG00000167711_3 (sequence is synthesized)
ccctggtggctcaaacgtccacctgccccaacctcatcctgtcacccctgagtgtggccctggcgctgtctcacctggcactaggtgctcagaaccacacgttgcagaggctgcaacagg

SEQ ID NO: 545016 - DNA, 120 bp, Artificial Sequence
  ENSG00000167711_4 (sequence is synthesized)
tgctgcacgcaggctcagggccctgcctcccccatctgctgagccgcctctgccaggacctgggccccggcgcgttccgactggctgccaggatgtacctgcagaaaggatttcccatca

SEQ ID NO: 545017 - DNA, 120 bp, Artificial Sequence
  ENSG00000167711_5 (sequence is synthesized)
aagaagatttcctggaacaatccgaacagctatttggggcaaagcccgtgagcctgacgggaaagcaggaagatgacctggcaaacatcaaccaatgggtgaaggaggccacggagggga

SEQ ID NO: 545018 - DNA, 120 bp, Artificial Sequence
  ENSG00000167711_6 (sequence is synthesized)
agattcaggaattcctctctgggctgccggaagacaccgtgttgcttctcctcaacgccatccacttccagggtttctggaggaacaagtttgacccgagccttacccagagagactcct

SEQ ID NO: 545019 - DNA, 120 bp, Artificial Sequence
  ENSG00000167711_7 (sequence is synthesized)
tccacctggacgagcagttcacggtgcccgtggaaatgatgcaggcccgcacgtacccgctgcgctggttcttgctggagcagcctgagatccaggtggctcatttcccctttaagaaca

SEQ ID NO: 545020 - DNA, 120 bp, Artificial Sequence
  ENSG00000167711_8 (sequence is synthesized)
acatgagctttgtggtccttgtacccacccactttgaatggaacgtgtcccaggtactggccaacctgagttgggacaccctgcacccacctctggtgtgggagaggcccaccaaggtcc

SEQ ID NO: 545021 - DNA, 120 bp, Artificial Sequence
  ENSG00000167711_9 (sequence is synthesized)
gcctaagctgtatctgaaacaccaaatggacctggtggccaccctcagccagctgggcctgcaggagttgttccaggccccagacctgcgtgggatctccgagcagagcctggtggtgtc

SEQ ID NO: 545022 - DNA, 120 bp, Artificial Sequence
  ENSG00000167711_10 (sequence is synthesized)
cggcgtgcagcatcagtccaccctggagctcagcgaggtcggcgtggaggcggcggcggccaccagcattgccatgtcccgcatgtccctgtcctccttcagcgtgaaccgccccttcct

SEQ ID NO: 545023 - DNA, 120 bp, Artificial Sequence
  ENSG00000167711_11 (sequence is synthesized)
cttcttcatcttcgaggacaccacaggccttcccctcttcgtgggcagcgtgaggaaccccaaccccagtgcaccgcgggagctcaaggaacagcaggattccccgggcaacaaggactt

SEQ ID NO: 545024 - DNA, 120 bp, Artificial Sequence
  ENSG00000167711_12 (sequence is synthesized)
cctccagagcctgaaaggcttcccccgcggagacaagcttttcggccctgacttaaaacttgtgccccccatggaggaggattacccccagtttggcagccccaagtgaggggccgtggc

SEQ ID NO: 545025 - DNA, 120 bp, Artificial Sequence
  ENSG00000167711_13 (sequence is synthesized)
tgtggcatccagagtccctgcctggaccagcctctccactcatgtgactctttccaaccggctttgtggcactggggcaggggccgggggcagtctgagagaggccattctttcccaaca

SEQ ID NO: 545026 - DNA, 120 bp, Artificial Sequence
  ENSG00000167711_14 (sequence is synthesized)
cctcttggggagtttagggtggggggggggcgcggctgggaggagggcaggcatcggggagccgggagcctgaccctcatctttcttccaaacaggctcagagggtgtcctgcaccgggg

SEQ ID NO: 545027 - DNA, 120 bp, Artificial Sequence
  ENSG00000167711_15 (sequence is synthesized)
cctgggcaggagggaggtgcttctagttctgccaggagacaggttagctgctccccacgtcagctgggacaccccgacttttgtttaccagagaaaaagggagggggagagggctgcctt

SEQ ID NO: 545028 - DNA, 120 bp, Artificial Sequence
  ENSG00000167711_16 (sequence is synthesized)
tggacttgtcccgggacacctaggctagggtggggagagacgggccctggtggtggctcgggaggcgaagcgttgtcctcagccccgcgtggaactcgtgtctggcacagcctggctgtg

SEQ ID NO: 545029 - DNA, 120 bp, Artificial Sequence
  ENSG00000167711_17 (sequence is synthesized)
gcctaacctgccgagagtccatcagcctccatcctaccccctgtgccttgtcacgccagacttcccacggctcctcgagatcccaacactgccagcatttcccttccttcctctcctgtc

SEQ ID NO: 545030 - DNA, 120 bp, Artificial Sequence
  ENSG00000167711_18 (sequence is synthesized)
tccctcctctgcccgggagctcaggaaccgaggcagggaaggatcccatgagctccttaaggctcttttgtaaggtttttgtagtgatttttatgccacctgaataaagaatgaatgggc

SEQ ID NO: 545031 - DNA, 120 bp, Artificial Sequence
  ENSG00000167716_0 (sequence is synthesized)
atggcccagggcagcggggggcgggaaggcgctctcagaaccccggccgggggctggcattccccgccaagcccagacatgcaggagctgctccggagcgtggagagggacctgagcatc

SEQ ID NO: 545032 - DNA, 120 bp, Artificial Sequence
  ENSG00000167716_1 (sequence is synthesized)
gatcccaggcagctggctccggccccggggggcacccacgtggtggccctagtgcctgcgcgctggctggccagcctccgcgatcgccggctgcccctgggaccctgtccccgcgcagag

SEQ ID NO: 545033 - DNA, 120 bp, Artificial Sequence
  ENSG00000167716_2 (sequence is synthesized)
ggcctgggagaagcggaagtcaggactctcctgcagcgctctgtgcaaaggctgcctgccggctggacgcgcgtggaggtgcatgggctgcggaagcggagactgtcctaccctctgggc

SEQ ID NO: 545034 - DNA, 120 bp, Artificial Sequence
  ENSG00000167716_3 (sequence is synthesized)
gggggcctgccctttgaggacgggtcctgcggccctgagaccctcactcgcttcatgcaggaggttgccgcccagaattatcgcaacctgtggcgccatgcataccacacttacggccag

SEQ ID NO: 545035 - DNA, 120 bp, Artificial Sequence
  ENSG00000167716_4 (sequence is synthesized)
ccgtacagtcacagccctgccccctcagctgtccctgccttggactcagtacggcaggctctgcagagggtctatggttgctccttcctgccagtgggtgaaactacccaatgcccttca

SEQ ID NO: 545036 - DNA, 120 bp, Artificial Sequence
  ENSG00000167716_5 (sequence is synthesized)
tatgccagagaaggcccctgcccccctcggggcagccctgcttgccctagtcttttacgggctgaggccttgctggagtcgccggagatgctgtatgtggtacacccttacgtacagttc

SEQ ID NO: 545037 - DNA, 120 bp, Artificial Sequence
  ENSG00000167716_6 (sequence is synthesized)
tccctacatgacgtggtcaccttcagccctgccaagctgaccaacagccaggccaaggtgctgttcattctcttccgcgtgctgagggctatggacgcctgtcaccgccaggggctggcg

SEQ ID NO: 545038 - DNA, 120 bp, Artificial Sequence
  ENSG00000167716_7 (sequence is synthesized)
tgtggggccctgtctttgtatcacatcgcagtggatgagaagctttgcagcgagctgcgactggacctgagtgcttatgagaggcccgaggaggacgagaatgaggaggcccctgtggca

SEQ ID NO: 545039 - DNA, 120 bp, Artificial Sequence
  ENSG00000167716_8 (sequence is synthesized)
agggatgaggcgggcattgtgtctcaagaggagcagggagggcaacctgggcaacccactggccaggaggaacttcggagcctcgtgctagattgggtccacggccgcatcagcaacttc

SEQ ID NO: 545040 - DNA, 120 bp, Artificial Sequence
  ENSG00000167716_9 (sequence is synthesized)
cactacctcatgcagctgaatcggttggcaggtcggcggcagggggaccccaactaccaccccgtgctgccctgggtggtggacttcactacgccccatgggcgcttccgagacctgcgc

SEQ ID NO: 545041 - DNA, 120 bp, Artificial Sequence
  ENSG00000167716_10 (sequence is synthesized)
aagtccaagttccgcctcaacaagggggataagcaactggacttcacgtatgagatgacacggcaggcattcgtagcaggcggggcgggcggcggggaaccccctcatgttccccaccac

SEQ ID NO: 545042 - DNA, 120 bp, Artificial Sequence
  ENSG00000167716_11 (sequence is synthesized)
atctcagacgtgctctccgacatcacgtactatgtgtacaaggctcggcgcacgcctcggtcggtgctctgcggacacgtccgcgcgcagtgggagccccatgagtatccggccagcatg

SEQ ID NO: 545043 - DNA, 120 bp, Artificial Sequence
  ENSG00000167716_12 (sequence is synthesized)
gagcggatgcagaactggaccccggatgagtgcattccggagttctacaccgatccctctatcttccgctccatccaccccgacatgcctgacctggatgtgccagcctggtgcagctcc

SEQ ID NO: 545044 - DNA, 120 bp, Artificial Sequence
  ENSG00000167716_13 (sequence is synthesized)
agccaggagttcgtagctgcccaccgagccctgctggagagccgcgaggtatcccgggacctgcaccattggatcgacctcacgtttggctataaactccagggtaaggaggctgtcaag

SEQ ID NO: 545045 - DNA, 120 bp, Artificial Sequence
  ENSG00000167716_14 (sequence is synthesized)
gaaaagaatgtgtgtctgcacctggtggacgcccacactcacctggccagctacggggtggtgcagctcttcgatcagccacacccccagcgcctggctggggctcctgcccttgccccc

SEQ ID NO: 545046 - DNA, 120 bp, Artificial Sequence
  ENSG00000167716_15 (sequence is synthesized)
gagcctcccctcatccccaagctgttggtccagaccatccaggagaccacaggccgggaggacttcacggaaaacccgggacagcttccaaatggagtgggccggccagttttagaggcc

SEQ ID NO: 545047 - DNA, 120 bp, Artificial Sequence
  ENSG00000167716_16 (sequence is synthesized)
actccctgtgaggctagctggaccagagacaggccggtggcaggagaagacgacttggaacaggccacagaagctctggattccatttcccttgctgggaaagcaggtgaccagctgggc

SEQ ID NO: 545048 - DNA, 120 bp, Artificial Sequence
  ENSG00000167716_17 (sequence is synthesized)
tcctccagtcaagcgtcccctggacttctctctttctcagtggcctcagcctcccgtccaggccgcaggaataaagctgctggggcagaccctggggagggtgaggaggggaggattctt

SEQ ID NO: 545049 - DNA, 120 bp, Artificial Sequence
  ENSG00000167716_18 (sequence is synthesized)
cttcccgagggcttcaatcccatgcaggccctggaggagctggagaaaacgggcaacttcttggccaaaggcctagggggcctgttggaggtgcctgagcagccccgggtccagccggct

SEQ ID NO: 545050 - DNA, 120 bp, Artificial Sequence
  ENSG00000167716_19 (sequence is synthesized)
gtgccactgcagtgcctactccacagggacatgcaggcgctgggtgtcctattggcagagatggtgtttgccaccagggtgcggacgctgcagcccgatgcacctttgtgggtacgcttc

SEQ ID NO: 545051 - DNA, 120 bp, Artificial Sequence
  ENSG00000167716_20 (sequence is synthesized)
caggctgtccgagggctctgcacgcgccaccccaaggaggtccctgtgtctttgcagcccgtgctggacacactcctgcagatgagtggccccgaagtccccatgggagcagagaggggc

SEQ ID NO: 545052 - DNA, 120 bp, Artificial Sequence
  ENSG00000167716_21 (sequence is synthesized)
aagctggaccaactgtttgagtacaggcctgtctcccagggcctgcccccaccctgcccaagccagcttctcagccccttcagctccgtggttcccttcccaccctacttcccggcactg

SEQ ID NO: 545053 - DNA, 120 bp, Artificial Sequence
  ENSG00000167716_22 (sequence is synthesized)
cacagattcatcctcctgtaccaggcaaggcgtgtggaggacgaggcccaggggcgcgagctggtgtttgctctgtggcagcagctgggcgcggtgctgaaggacatcacccctgagggc

SEQ ID NO: 545054 - DNA, 120 bp, Artificial Sequence
  ENSG00000167716_23 (sequence is synthesized)
ctggagatcctgctgcccttcgtgctctcactcatgtccgaggagcacacagctgtgtacacggcctggtatctgtttgagcctgttgccaaggcactgggccccaaaaatgccaataag

SEQ ID NO: 545055 - DNA, 120 bp, Artificial Sequence
  ENSG00000167716_24 (sequence is synthesized)
tacctcctgaagccgctcattggtgcctacgagagcccctgccagctacacggccgcttctacctgtacacggactgctttgtggcccagctgatggtgcggctgggcctgcaggcattt

SEQ ID NO: 545056 - DNA, 120 bp, Artificial Sequence
  ENSG00000167716_25 (sequence is synthesized)
ctcactcacctgctgccccatgtcctgcaggtgctggcgggcgcagaggcctcccaggaggagagcaaggacctggcaggggctgctgaggaggaggagagcgggctgcccggggccggg

SEQ ID NO: 545057 - DNA, 120 bp, Artificial Sequence
  ENSG00000167716_26 (sequence is synthesized)
cctggctcctgtgcttttggggaggagattcccatggatggggagcctcctgcctcctcgggcctggggctcccagactacacgtctggcgtcagcttccacgaccaggctgacctccct

SEQ ID NO: 545058 - DNA, 120 bp, Artificial Sequence
  ENSG00000167716_27 (sequence is synthesized)
gagacagaggacttccaagccgggctctatgtgactgagtctccccagccccaggaggctgaggctgtgagcctgggccggctgagtgacaagagcagcaccagcgagacctccctgggt

SEQ ID NO: 545059 - DNA, 120 bp, Artificial Sequence
  ENSG00000167716_28 (sequence is synthesized)
cagacgaggggggtgcccccgtggacaagagcagccttcgatcaggtgacagcagccaggacttgaagcaaagcgagggctccgaggaggaagaggaggaggaggacagctgcgtggtgc

SEQ ID NO: 545060 - DNA, 120 bp, Artificial Sequence
  ENSG00000167716_29 (sequence is synthesized)
tagaggaggaggagggggagcaggaggaggtcaccggggcatctgagctcactctgtctgacacggtgctgtccatggagacggttgtggccggcggcagtgggggagatggagaagaag

SEQ ID NO: 545061 - DNA, 120 bp, Artificial Sequence
  ENSG00000167716_30 (sequence is synthesized)
aggaggaggcactgcctgagcagtcagaaggcaaagaacagaagatcctccttgatacagcctgcaagatggtccgctggctgtctgccaagctcggccccacagtggcctctcgccacg

SEQ ID NO: 545062 - DNA, 120 bp, Artificial Sequence
  ENSG00000167716_31 (sequence is synthesized)
tggcccggaacctgctccgcctgctgacgtcttgttatgttggacccactcggcagcagttcacagtgagcagtggcgagagcccaccgctgagcgccggcaacatctaccagaagaggc

SEQ ID NO: 545063 - DNA, 120 bp, Artificial Sequence
  ENSG00000167716_32 (sequence is synthesized)
cggtcctgggcgacatcgtgtcagggcctgtgctcagctgcctcctccacatcgcccgcctgtatggggagcctgtcctcacctaccagtacctgccctacatcagctacctggtggccc

SEQ ID NO: 545064 - DNA, 120 bp, Artificial Sequence
  ENSG00000167716_33 (sequence is synthesized)
cagggagtgcctcaggccccagccgactgaacagccgtaaggaggcggggctgctggccgcggtgacgctgactcagaagatcatcgtgtacctctcagacaccacactcatggacatcc

SEQ ID NO: 545065 - DNA, 120 bp, Artificial Sequence
  ENSG00000167716_34 (sequence is synthesized)
tgccccggatcagccatgaggtcctgctgcccgtgctcagcttcctcacctccctcgtcacggggttcccaagtggggcccaggctcggaccatcctgtgtgtgaaaaccatcagcctca

SEQ ID NO: 545066 - DNA, 120 bp, Artificial Sequence
  ENSG00000167716_35 (sequence is synthesized)
tcgccctcatctgcctgcgcattggacaggagatggtccagcagcacctgagcgagcccgtggccacctttttccaggtcttctctcagctgcatgagcttcggcaacaggatctgaagc

SEQ ID NO: 545067 - DNA, 120 bp, Artificial Sequence
  ENSG00000167716_36 (sequence is synthesized)
tggaccctgcgggccgtggtgagggccagctgccacaggtggtcttctctgatgggcagcagcggcccgtggaccccgccctgctggacgagctgcagaaggtgttcaccctggagatgg

SEQ ID NO: 545068 - DNA, 120 bp, Artificial Sequence
  ENSG00000167716_37 (sequence is synthesized)
catacacaatctacgtgcccttctcctgcctgttgggtgacatcatccggaaaatcatccccaaccacgagctggttggggagctggcggcgctgtacttggagagcatcagccccagca

SEQ ID NO: 545069 - DNA, 120 bp, Artificial Sequence
  ENSG00000167716_38 (sequence is synthesized)
gtcgcaaccctgccagcgtggagcccaccatgcccggcaccgggcccgagtgggacccccatggtgggggctgccctcaggatgacggccactcagggacctttgggagcgtcctggtgg

SEQ ID NO: 545070 - DNA, 120 bp, Artificial Sequence
  ENSG00000167716_39 (sequence is synthesized)
ggaaccgcattcagatccccaatgactctcggcctgagaaccccggaccactgggccccatctcgggggtgggtggcgggggcctgggcagcgggagcgacgacaacgccctgaagcagg

SEQ ID NO: 545071 - DNA, 120 bp, Artificial Sequence
  ENSG00000167716_40 (sequence is synthesized)
agctgccgcggagcgtgcacgggctgagcggaaactggctggcgtactggcagtacgagatcggcgtgagccagcaggatgcccactttcacttccaccagatccgcctgcagagcttcc

SEQ ID NO: 545072 - DNA, 120 bp, Artificial Sequence
  ENSG00000167716_41 (sequence is synthesized)
cgggccactcgggggccgtcaagtgcgtggcacccctaagcagcgaggacttcttcctgagcggcagcaaggatcgtaccgtgcgcctctggccgctgtacaactacggcgacgggacca

SEQ ID NO: 545073 - DNA, 120 bp, Artificial Sequence
  ENSG00000167716_42 (sequence is synthesized)
gcgagacggccccacgcctcgtctacacccagcaccgcaagagcgtcttcttcgtgggccagcttgaggccccgcagcacgtggtgagctgtgacggggctgtgcacgtctgggacccct

SEQ ID NO: 545074 - DNA, 120 bp, Artificial Sequence
  ENSG00000167716_43 (sequence is synthesized)
tcacagggaagacccttcgcacagtggagccgctggacagccgggtgcccctgactgcggtggctgtcatgcccgccccccacaccagcatcaccatggccagctctgactctaccctgc

SEQ ID NO: 545075 - DNA, 120 bp, Artificial Sequence
  ENSG00000167716_44 (sequence is synthesized)
gctttgtggactgcaggaagcctggtctgcagcacgagttccgactgggcggtgggctgaaccctgggcttgtccgtgccctggccatcagccccagtggccgtagtgtcgtggccggct

SEQ ID NO: 545076 - DNA, 120 bp, Artificial Sequence
  ENSG00000167716_45 (sequence is synthesized)
tctcctcaggcttcatggtgctcctggacacccgcacaggcctggttctgcgaggctggccagcccacgagggggacattctgcagatcaaggcggtggagggcagcgtcctggtcagct

SEQ ID NO: 545077 - DNA, 120 bp, Artificial Sequence
  ENSG00000167716_46 (sequence is synthesized)
cctcctctgaccattccttgaccgtctggaaggagctggagcagaagcccacccatcactacaagtcagcatccgaccccatccacacctttgacctgtacggcagcgaggtggtcactg

SEQ ID NO: 545078 - DNA, 120 bp, Artificial Sequence
  ENSG00000167716_47 (sequence is synthesized)
gcaccgtgtccaacaagattggcgtctgctccctgcttgagccaccctcgcaggccaccacgaagctcagctctgagaacttccgcggcacgctcaccagcctggccttgctgcccacta

SEQ ID NO: 545079 - DNA, 120 bp, Artificial Sequence
  ENSG00000167716_48 (sequence is synthesized)
aacgccacctcctgctgggctcagacaacggggttatccgcctcctggcatagactgaggcaggagctggccgggcaagggtgggaagacatctgcgggcgcgtgtccactcaccctgtt

SEQ ID NO: 545080 - DNA, 120 bp, Artificial Sequence
  ENSG00000167716_49 (sequence is synthesized)
ccctgagcagcagctccctccagggaggccctgggtcccacgccctgggtgcccacatggcctgccaactagggcctgcaaatggagtgggggagtcctggcccctgaatcaccagagcc

SEQ ID NO: 545081 - DNA, 120 bp, Artificial Sequence
  ENSG00000167716_50 (sequence is synthesized)
accaagcctgccagaggggtctcattcatggcttggggacacagggctcctagcaagcaggaagttaagagcaggaggaagcgttgctaccttcacttctccccagctctgccctctggg

SEQ ID NO: 545082 - DNA, 120 bp, Artificial Sequence
  ENSG00000167716_51 (sequence is synthesized)
tccacatgaggacagggaagctcgggaaggggaagggagactggccctgcccagccggtctctagcccctcagcccccgctgggcactctctgtcccatccctctaggacagggaagctg

SEQ ID NO: 545083 - DNA, 120 bp, Artificial Sequence
  ENSG00000167716_52 (sequence is synthesized)
gcctggtccagggcactgatggtgcttggattccagcctaaggaaggctggccgtggtccaggagttaagggcttgggtctggggtttaagtggccacccatccaggccctggccagtgt

SEQ ID NO: 545084 - DNA, 120 bp, Artificial Sequence
  ENSG00000167716_53 (sequence is synthesized)
gggaccgggacgggaaggaagaaggaggctaggagcagggggaaaaggtgcacttggccagtggcgcctgccaggagtgagtccatgcgttgtctgcccacccctaccacagtgtttgtg

SEQ ID NO: 545085 - DNA, 120 bp, Artificial Sequence
  ENSG00000167716_54 (sequence is synthesized)
ccttcagctgagggggcagcctctgggccctgaacccctgctggggctccacgaccctgagagaaggggtgagaagaatcatctctgcacctcgggtctctgccagaggaagacttaagc

SEQ ID NO: 545086 - DNA, 120 bp, Artificial Sequence
  ENSG00000167716_55 (sequence is synthesized)
atccctgcgacctcacattctagacagagatgaggtccaggggttggcccctgctgccttctcacaatttgcaatagatgtaaataggaccaataaatcctttggaagagccatggggtg

SEQ ID NO: 545087 - DNA, 120 bp, Artificial Sequence
  ENSG00000167716_56 (sequence is synthesized)
acgtgacccgcgtcagctgacccgtcacggtggagcccggtgctcgcgcccggcagcctctgccccgccgcgcccggagcgcaggacccgcggaggggttcccaagtggggcccaggctc

SEQ ID NO: 545088 - DNA, 120 bp, Artificial Sequence
  ENSG00000167716_57 (sequence is synthesized)
tggagaccctttcagccccgggaggaagcggagcccagaccgagccagagcggagcagcgggagggagggcggggaggccgccgggcaggaagcggggtcccgcccgggcctctggagcc

SEQ ID NO: 545089 - DNA, 120 bp, Artificial Sequence
  ENSG00000167716_58 (sequence is synthesized)
acgtgcgcttgtttccgtgctggggcgatcacgtgacccgcgtcagctgacccgtcacggtggagcccggtgctcgcgcccggcagcctctgccccgccgcgcccggagcgcaggacccg

SEQ ID NO: 545090 - DNA, 120 bp, Artificial Sequence
  ENSG00000167716_59 (sequence is synthesized)
gacgtcttgttatgttggtaaggaggcctgcggtcagtgctggagatgaggctttctcccaggccctctgcctagcttcagcgctctccggcggggatccttcccacccctccctcaaac

SEQ ID NO: 545091 - DNA, 120 bp, Artificial Sequence
  ENSG00000167716_60 (sequence is synthesized)
caccccccggccaggtgctgggtcccagtctaagtgccagccttgggtagggccaggctgggcccccagctagagtgagctcaagcggccagcacagccctgcagggccaggctaccccc

SEQ ID NO: 545092 - DNA, 120 bp, Artificial Sequence
  ENSG00000167716_61 (sequence is synthesized)
gaaagccacggcgtctgcgtttgcaatgcatgctggtccgtgtagttctcagcctgacaccgtcgttcccagaacccagcgcgctctatacagcctgcaagatggtccgctggctgtctg

SEQ ID NO: 545093 - DNA, 120 bp, Artificial Sequence
  ENSG00000167716_62 (sequence is synthesized)
cagtcttcgtggctgtctcctcccttgggaggccccattctctgcccttgccccagagtcagcagtgggttctaagagccagcaggatgggtgagagcaaagggatttggcctcagaccc

SEQ ID NO: 545094 - DNA, 120 bp, Artificial Sequence
  ENSG00000167716_63 (sequence is synthesized)
aaacgagagtcctaaagagcaggcgaaagccacggcgtctgcgtttgcaatgcatgctggtccgtgtagttctcagcctgacaccgtcgttcccagaacccagcgcgctctgttcccaag

SEQ ID NO: 545095 - DNA, 120 bp, Artificial Sequence
  ENSG00000167716_64 (sequence is synthesized)
ggggacctggcaaggaggagagactccccaaaaacagaaagccaggatgttgttctggggccctagttagtttctctttggtgctagatcacccacagccacacatcctgcggggcagga

SEQ ID NO: 545096 - DNA, 120 bp, Artificial Sequence
  ENSG00000167716_65 (sequence is synthesized)
ctctggcctgtgatgggggtggggttctgggcttttcatgccccctgatgagggtcagaggctcaggccttcctgctgtgtgggcttgggtggtgggcagggccttggggagtgtgagat

SEQ ID NO: 545097 - DNA, 120 bp, Artificial Sequence
  ENSG00000167716_66 (sequence is synthesized)
tgacaccgtcgttcccagaacccagcgcgctctgtgagttggcatttttaaactgagctcggaatccagcccggggaagtccttaaagggcgacagcccctccttgttggagtcgaccca

SEQ ID NO: 545098 - DNA, 120 bp, Artificial Sequence
  ENSG00000167716_67 (sequence is synthesized)
aaagagcaggcgaaagccacggcgtctgcgtttgcaatgcatgctggtccgtgtagttctcagcctgacaccgtcgttcccagaacccagcgcgctctgtgctggcgggcgcagaggcct

SEQ ID NO: 545099 - DNA, 120 bp, Artificial Sequence
  ENSG00000167720_0 (sequence is synthesized)
gtgcgcagaggtgcggccggggaggcgcgcggaggctggagctggaggcgcggcgccggtgagctgagaaccatgtgtgctcagtattgcatctcctttgctgatgttgaaaaagctcat

SEQ ID NO: 545100 - DNA, 120 bp, Artificial Sequence
  ENSG00000167720_1 (sequence is synthesized)
atcaacattcgagattctatccacctcacaccagtgctaacaagctccattttgaatcaactaacagggcgcaatcttttcttcaaatgtgaactcttccagaaaacaggatcttttaag

SEQ ID NO: 545101 - DNA, 120 bp, Artificial Sequence
  ENSG00000167720_2 (sequence is synthesized)
attcgtggtgctctcaatgccgtcagaagcttggttcctgatgctttagaaaggaagccgaaagctgttgttactcacagcagtggaaaccatggccaggctctcacctatgctgccaaa

SEQ ID NO: 545102 - DNA, 120 bp, Artificial Sequence
  ENSG00000167720_3 (sequence is synthesized)
ttggaaggaattcctgcttatattgtggtgccccagacagctccagactgtaaaaaacttgcaatacaagcctacggagcgtcaattgtatactgtgaacctagtgatgagtccagagaa

SEQ ID NO: 545103 - DNA, 120 bp, Artificial Sequence
  ENSG00000167720_4 (sequence is synthesized)
aatgttgcaaaaagagttacagaagaaacagaaggcatcatggtacatcccaaccaggagcctgcagtgatagctggacaagggacaattgccctggaagtgctgaaccaggttcctttg

SEQ ID NO: 545104 - DNA, 120 bp, Artificial Sequence
  ENSG00000167720_5 (sequence is synthesized)
gtggatgcactggtggtacctgtaggtggaggaggaatgcttgctggaatagcaattacagttaaggctctgaaacctagtgtgaaggtatatgctgctgaaccctcaaatgcagatgac

SEQ ID NO: 545105 - DNA, 120 bp, Artificial Sequence
  ENSG00000167720_6 (sequence is synthesized)
tgctaccagtccaagctgaaggggaaactgatgcccaatctttatcctccagaaaccatagcagatggtgtcaaatccagcattggcttgaacacctggcctattatcagggaccttgtg

SEQ ID NO: 545106 - DNA, 120 bp, Artificial Sequence
  ENSG00000167720_7 (sequence is synthesized)
gatgatatcttcactgtcacagaggatgaaattaagtgtgcaacccagctggtgtgggagaggatgaaactactcattgaacctacagctggtgttggagtggctgctgtgctgtctcaa

SEQ ID NO: 545107 - DNA, 120 bp, Artificial Sequence
  ENSG00000167720_8 (sequence is synthesized)
cattttcaaactgtttccccagaagtaaagaacatttgtattgtgctcagtggtggaaatgtagacttaacctcctccataacttgggtgaagcaggctgaaaggccagcttcttatcag

SEQ ID NO: 545108 - DNA, 120 bp, Artificial Sequence
  ENSG00000167720_9 (sequence is synthesized)
tctgtttctgtttaatttacagaaaaggaaatggtgggaattcagtgtctttagatactgaagacattttgtttcctagtattgtcaactcttagttatcagattcttaatggagagtgg

SEQ ID NO: 545109 - DNA, 120 bp, Artificial Sequence
  ENSG00000167720_10 (sequence is synthesized)
taaaaaaaagtcttgcaaaatggggcagtggactgacaggctgacatagaaaataaactttgcccaatcacaacttgtgcctcccatccctggagtactgactggcaccggtaagacaga

SEQ ID NO: 545110 - DNA, 120 bp, Artificial Sequence
  ENSG00000167720_11 (sequence is synthesized)
atctctttgaatccattactccatgcccccttgaggcactgttgaagaaatctcacttttcagccagggtactggttctggtacatatggatcataagtccatttggggaagactcgttt

SEQ ID NO: 545111 - DNA, 120 bp, Artificial Sequence
  ENSG00000167720_12 (sequence is synthesized)
atacaggttcatcagtactgtgtcttgagattttagcttcccatcaaagctgcatttcatgtggccatgggtacctagaaagacatcagaacaagtcggtcaaattaaaagtagaaaatt

SEQ ID NO: 545112 - DNA, 120 bp, Artificial Sequence
  ENSG00000167720_13 (sequence is synthesized)
ttaaagcaatgacttccaacccaacagtcatttagcaacactgcagaaatgcagacatggtctcaaatcccgtgtttccttacctaaaggttccttgatatgtcctctccggccccactt

SEQ ID NO: 545113 - DNA, 120 bp, Artificial Sequence
  ENSG00000167720_14 (sequence is synthesized)
cgttctcagttccactggtttaaaccacagcacatcctcttagaatcaaacacattaaagaccaagatgaaacatttacccacaaaatgtaaacccaacctttataccacaaaggcaatc

SEQ ID NO: 545114 - DNA, 120 bp, Artificial Sequence
  ENSG00000167720_15 (sequence is synthesized)
agatcccatcctcctccttcatacccacctctgttgaagaacatgtaacgtactactgccatcttagtaaaaattttgaaaggatgaccactcagaacaactctcttgatgaccattctg

SEQ ID NO: 545115 - DNA, 120 bp, Artificial Sequence
  ENSG00000167720_16 (sequence is synthesized)
tctggatctactgacataagatggcctgtagcaatgaggctgtgcattcctaaaggacaaaagcaaagaagctatttaggaatttacaggccaaagtcttcatttattgcccagtccatt

SEQ ID NO: 545116 - DNA, 120 bp, Artificial Sequence
  ENSG00000167720_17 (sequence is synthesized)
taaagacccatgcaagagcctggtttgtcatccctgccctagcccaatctgaggctaagattggtaaactgtaagcccacacttaaccttgtcaataggttcttgaaaacttgtacttca

SEQ ID NO: 545117 - DNA, 120 bp, Artificial Sequence
  ENSG00000167720_18 (sequence is synthesized)
agagaaatgatgtataacaaaaccatactttttctcatcagttgttacaaggaaaggatgttgaacaaaaggcagttatttgaggactggctatacactgtttcacgtaaaagttggagt

SEQ ID NO: 545118 - DNA, 120 bp, Artificial Sequence
  ENSG00000167720_19 (sequence is synthesized)
tttcattgttctattaacaatgttaaatgaagacttactgtattttgaaaaccatcattaccttctccataccatttggctcccaaatttaaataaacaagagaaaacggtgttcatcta

SEQ ID NO: 545119 - DNA, 120 bp, Artificial Sequence
  ENSG00000167720_20 (sequence is synthesized)
ggcgagaaagagggtggaggcaggaattcgggccaggctctcccggagctggccaggactggccgagcccgaccccgcactaacccgcgagagagaaccatgtgtgctcagtattgcatc

SEQ ID NO: 545120 - DNA, 120 bp, Artificial Sequence
  ENSG00000167720_21 (sequence is synthesized)
gtgcgcagaggtgcggccggggaggcgcgcggaggctggagctggaggcgcggcgccggtgagctgaggctctgaaacctagtgtgaaggtatatgctgctgaaccctcaaatgcagatg

SEQ ID NO: 545121 - DNA, 120 bp, Artificial Sequence
  ENSG00000167720_22 (sequence is synthesized)
gtgcgcagaggtgcggccggggaggcgcgcggaggctggagctggaggcgcggcgccggtgagctgagtgacctcataccctggccactggtcctgggccaagatgggccagagtcctta

SEQ ID NO: 545122 - DNA, 120 bp, Artificial Sequence
  ENSG00000167720_23 (sequence is synthesized)
cccagaatttttttaactgaaactgagaaagaaaattccccttcagtgtggaagccataaaatgtaaaacatacgagctgtcagcagccacgtgtcagttggttccatatggaaccaact

SEQ ID NO: 545123 - DNA, 120 bp, Artificial Sequence
  ENSG00000167720_24 (sequence is synthesized)
aacttcgttcagcttttaagtcaactctcttttagggaaattctgacactccaataatggagaatttccacatgacaccacaggccccaggtctattctgttacgtattttcaaaatctc

SEQ ID NO: 545124 - DNA, 120 bp, Artificial Sequence
  ENSG00000167720_25 (sequence is synthesized)
gaagattctcaaagaccagatgcccacttaactatggaaaagatatttgttggtggcattaacgaagacactgaagaatatcacctaagtgattattttgaacagtatggaaaaactgaa

SEQ ID NO: 545125 - DNA, 76 bp, Artificial Sequence
  ENSG00000167720_26 (sequence is synthesized)
tcacctaagtgattattttgaacagtatggaaaaactgaagtgattgaaatcatgactgaccgatcatgactccgt

SEQ ID NO: 545126 - DNA, 120 bp, Artificial Sequence
  ENSG00000167721_0 (sequence is synthesized)
cttcccacagccggaggggggttgcgcacagcgacgggggatcggggcggggagaggccgtgcgcgcctaggggcggcagacccgggcgcgcgccacgggggtcgctgtcatggcaacgc

SEQ ID NO: 545127 - DNA, 120 bp, Artificial Sequence
  ENSG00000167721_1 (sequence is synthesized)
gcgcgccacgggggtcgctgtcatggcaacgcacccgctcccgcatggagggcgcgaagccgcattgtgagcgctggccctggagcccgcggccccgcggctgagagcgagcctcggtcc

SEQ ID NO: 545128 - DNA, 120 bp, Artificial Sequence
  ENSG00000167721_2 (sequence is synthesized)
cgctgaagctcccctgacttctgcctgctccctctcccgacgggacggaaagggccggggctcgggcatggggtcccctgcggtccgagcctgcccacggcgaagccggtgcagcctggc

SEQ ID NO: 545129 - DNA, 120 bp, Artificial Sequence
  ENSG00000167721_3 (sequence is synthesized)
cccgtgacccctctgaatccccgtccggccgtcgccgtgcagttgtcaagtttctgggaagattagtgggagcgcagccgcccgagcccgacggccggagggtcgcggccagtccccctt

SEQ ID NO: 545130 - DNA, 120 bp, Artificial Sequence
  ENSG00000167721_4 (sequence is synthesized)
gccgggtcgccacgtcccacaaggtccttcccggccgctccgtgggaggcggggcgcaggttggagtaacagggacgggcttgagctggtacggaaccgggcaaggtgagagaagtgtct

SEQ ID NO: 545131 - DNA, 120 bp, Artificial Sequence
  ENSG00000167721_5 (sequence is synthesized)
tccacgcgattcccaagcctcgctagggaatcgagggagaagaaaggttgctcagagtgataaagaacatgccgttgcaaacggaagagcaacgtgcccgaatctaggtgacaggaaggg

SEQ ID NO: 545132 - DNA, 120 bp, Artificial Sequence
  ENSG00000167721_6 (sequence is synthesized)
cttaggccttttcggcacgaatggagccttccagtcaacatgcttctacgtgatgcagctttatagcgcaaaaaaatgacaatgcaaggggtacaaacagccctgctagaccaacagccc

SEQ ID NO: 545133 - DNA, 120 bp, Artificial Sequence
  ENSG00000167721_7 (sequence is synthesized)
gagcctcgacagtctacatccggcgccttcaagcccccaaccacacactgcgaagtgggaaaagttcccagcgcggcttggcgaacccgctaacacggcgctctcacgagctgctggaaa

SEQ ID NO: 545134 - DNA, 120 bp, Artificial Sequence
  ENSG00000167721_8 (sequence is synthesized)
agaccttcgcgagagggcgcagggagtcccgctccctggagggcccgcccccttggaggggaccggaagcgcttgtcctggcccggaagcagtgctgactccgtacacgcgcgctgcggc

SEQ ID NO: 545135 - DNA, 120 bp, Artificial Sequence
  ENSG00000167721_9 (sequence is synthesized)
atggcggcccaccgccccggcccgctcaagcagcagaataaagctcataaaggcggacggcatcggggtcggggatctgcacagcgggacggcaagggccgtctggcactgaaaacccta

SEQ ID NO: 545136 - DNA, 120 bp, Artificial Sequence
  ENSG00000167721_10 (sequence is synthesized)
agcaagaaggtgagaaaagaactcagcagagtcgaccagaggcatcgcgccagccagctccgaaagcagaagaaggaggcggttctggcagagaagagacagctgggtggcaaggatggc

SEQ ID NO: 545137 - DNA, 120 bp, Artificial Sequence
  ENSG00000167721_11 (sequence is synthesized)
cctcctcatcaggtactggtggtgcccctgcacagcagaatttccctgccagaggccatgcagctgcttcaagatagggacactggaacagtacacttgaatgaattgggaaacacccag

SEQ ID NO: 545138 - DNA, 120 bp, Artificial Sequence
  ENSG00000167721_12 (sequence is synthesized)
aactttatgctgctgtgcccccgcttgaaacatcggtggtttttcacctcagcaaggccaggggatctgcacgttgtgttagacatggctaaagtagctgataccatcctgttcctcctt

SEQ ID NO: 545139 - DNA, 120 bp, Artificial Sequence
  ENSG00000167721_13 (sequence is synthesized)
gatccactagaaggctgggacagcaccggtgattactgtctttcctgcctctttgctcagggccttccgacctatacactagctgtccaggggatttctggcctcccactgaagaaacaa

SEQ ID NO: 545140 - DNA, 120 bp, Artificial Sequence
  ENSG00000167721_14 (sequence is synthesized)
atagataccaggaagaagctaagtaaagcagtggagaagcgctttccgcatgacaaactcctcttgttagacactcaacaggaggcagggatgctgcttaggcagttggctaaccagaag

SEQ ID NO: 545141 - DNA, 120 bp, Artificial Sequence
  ENSG00000167721_15 (sequence is synthesized)
caacagcatcttgcttttcgagatcggcgggcctacctatttgcccatgctgttgattttgttcctagtgaagagaataacttggtgggcaccttgaaaatttcaggctatgttcgaggg

SEQ ID NO: 545142 - DNA, 120 bp, Artificial Sequence
  ENSG00000167721_16 (sequence is synthesized)
cagactctgaatgtcaataggttgctgcatatcgttggatatggtgatttccagatgaaacagatagatgcccccggagaccctttccctttaaatcctagaggaattaaaccccaaaag

SEQ ID NO: 545143 - DNA, 120 bp, Artificial Sequence
  ENSG00000167721_17 (sequence is synthesized)
gacccagacatggcaatggagatttgtgctacggatgctgtagatgatatggaagaaggtcttaaagtcctaatgaaggcagaccctggtagacaggaatccttgcaagcagaggttatc

SEQ ID NO: 545144 - DNA, 120 bp, Artificial Sequence
  ENSG00000167721_18 (sequence is synthesized)
ccagatccaatggagggagagcaaacctggcccactgaggaggagctgagcgaggcaaaggatttcttgaaggaaagttctaaggtggtaaagaaggtccccaaaggaacatccagttac

SEQ ID NO: 545145 - DNA, 120 bp, Artificial Sequence
  ENSG00000167721_19 (sequence is synthesized)
caagctgaatggattttggatggtggcagccaaagtggtggggaaggagatgaatatgaatatgatgatatggaacatgaggattttatggaggaggaatctcaggatgagagtagtgaa

SEQ ID NO: 545146 - DNA, 120 bp, Artificial Sequence
  ENSG00000167721_20 (sequence is synthesized)
gaagaggaagaatatgaaactatgactattggggagtctgtgcatgatgatctgtatgataagaaagtagatgaagaagctgaggcaaaaatgttggagaaatataaacaagaaagactg

SEQ ID NO: 545147 - DNA, 120 bp, Artificial Sequence
  ENSG00000167721_21 (sequence is synthesized)
cgccccgtgatgtggctgctcgaattcgatttcagaaatacagaggccttaagagcttccggacatctccatgggatcctaaggaaaaccttcctcaagattatgctcgaatatttcagt

SEQ ID NO: 545148 - DNA, 120 bp, Artificial Sequence
  ENSG00000167721_22 (sequence is synthesized)
ttcagaactttactaacactaggaaaagcatctttaaagaggttgaagaaaaagaggttgaaggagctgaggttggctggtatgtcacacttcatgtctctgaagtccccgtctcagtgg

SEQ ID NO: 545149 - DNA, 120 bp, Artificial Sequence
  ENSG00000167721_23 (sequence is synthesized)
tcgagtgcttcaggcaaggaacacccttgattgcattttctttactacctcatgaacagaagatgtcagtattgaatatggtggtgaggcgtgaccctggcaacactgaacctgtgaaag

SEQ ID NO: 545150 - DNA, 120 bp, Artificial Sequence
  ENSG00000167721_24 (sequence is synthesized)
ccaaggaagagctcatatttcactgtggattcaggcgcttccgagcctcacctttattctctcagcacactgcagcggacaaacataaattgcagagattcctgactgctgacatggccc

SEQ ID NO: 545151 - DNA, 120 bp, Artificial Sequence
  ENSG00000167721_25 (sequence is synthesized)
tggtggcgacagtctatgcgccaatcacttttcctcctgcatctgtgctgcttttcaagcaaaaaagcaatggaatgcacagcctcattgctacaggccatcttatgtcagtagatccag

SEQ ID NO: 545152 - DNA, 120 bp, Artificial Sequence
  ENSG00000167721_26 (sequence is synthesized)
acagaatggtcatcaagagagttgttctgagtggtcatcctttcaaaatttttactaagatggcagtagtacgttacatgttcttcaacagagaggatgtgctgtggtttaaaccagtgg

SEQ ID NO: 545153 - DNA, 120 bp, Artificial Sequence
  ENSG00000167721_27 (sequence is synthesized)
aactgagaacgaagtggggccggagaggacatatcaaggaacctttaggtacccatggccacatgaaatgcagctttgatgggaagctaaaatctcaagacacagtactgatgaacctgt

SEQ ID NO: 545154 - DNA, 120 bp, Artificial Sequence
  ENSG00000167721_28 (sequence is synthesized)
ataaacgagtcttccccaaatggacttatgatccatatgtaccagaaccagtaccctggctgaaaagtgagatttcttcaacagtgcctcaagggggcatggagtaatggattcaaagag

SEQ ID NO: 545155 - DNA, 120 bp, Artificial Sequence
  ENSG00000167721_29 (sequence is synthesized)
attctgtcttaccggtgccagtcagtactccagggatgggaggcacaagttgtgattgggcaaagtttattttctatgtcagcctgtcagtccactgccccattttgcaagacttttttt

SEQ ID NO: 545156 - DNA, 120 bp, Artificial Sequence
  ENSG00000167721_30 (sequence is synthesized)
tagccttgacaaaatgtctcagttaagtataaaagtttttccactacttagtccaaaaaaaactattaaatcttaatgaaatagccactctccattaagaatctgataactaagagttga

SEQ ID NO: 545157 - DNA, 120 bp, Artificial Sequence
  ENSG00000167721_31 (sequence is synthesized)
caatactaggaaacaaaatgtcttcagtatctaaagacactgaattcccaccatttccttttctgtaaattaaacagaaacagactgataagaagctggcctttcagcctgcttcaccca

SEQ ID NO: 545158 - DNA, 120 bp, Artificial Sequence
  ENSG00000167721_32 (sequence is synthesized)
agttatggaggaggttaagtctacatttccaccactgagcacaatacaaatgttctttacttctggggaaacagtttgaaaatgttgagacagcacagcagccactccaacaccagctgt

SEQ ID NO: 545159 - DNA, 120 bp, Artificial Sequence
  ENSG00000167721_33 (sequence is synthesized)
aggttcaatgagtagtttcatcctctcccacaccagctgggttgcacactgttgatatggaagggagtaggaattagtgaaaggggagtctagttggtttacctataaagttcagatgag

SEQ ID NO: 545160 - DNA, 120 bp, Artificial Sequence
  ENSG00000167721_34 (sequence is synthesized)
aatacgtgtccagtttgaattttcttatcactgtgtacacacgcttcccaaagcttttctttaattctgactctgcttctgtcaagagggttgtcattaatacatctagggtaccctccc

SEQ ID NO: 545161 - DNA, 120 bp, Artificial Sequence
  ENSG00000167721_35 (sequence is synthesized)
atgtcatgaagttacctagtcaggttcccgtgggtcacttgctactcctaagggaagtttcttctgcctaagaagttacaccatgctttgctatttcttttcttgctggagcctcacctt

SEQ ID NO: 545162 - DNA, 120 bp, Artificial Sequence
  ENSG00000167721_36 (sequence is synthesized)
aatttcatcctctgtgacagtgaagatatcatccacaaggtccctgataataggccaggtgttcaagccaatgctggatttgacaccatctgctatggtttctggaggataaagattggg

SEQ ID NO: 545163 - DNA, 120 bp, Artificial Sequence
  ENSG00000167721_37 (sequence is synthesized)
catcagtttccccttcagcttggactggtagcagtcatctgcatttgagggttcagcagcatataccttcacactaggtttcagagcctgggaagaggaatattaagacatcttaacaac

SEQ ID NO: 545164 - DNA, 78 bp, Artificial Sequence
  ENSG00000167721_38 (sequence is synthesized)
tcagagcctgggaagaggaatattaagacatcttaacaacaaaccacaacattgcctgcatgtctaaaagaaaatatg

SEQ ID NO: 545165 - DNA, 77 bp, Artificial Sequence
  ENSG00000167721_39 (sequence is synthesized)
tcaagaccagcctggccaacctggtgaaatgcagtgtcaactaaaaataggaaaatcagccaggcgtggtggcagac

SEQ ID NO: 545166 - DNA, 70 bp, Artificial Sequence
  ENSG00000167721_40 (sequence is synthesized)
aggctgaggtaggagaatcacttgaacttgggaggggtaggttgcagtgagctgagatcacaccaaaatg

SEQ ID NO: 545167 - DNA, 120 bp, Artificial Sequence
  ENSG00000167721_41 (sequence is synthesized)
acacgcgcgctgcggcatggcggcccaccgccccggcccgctcaagcagcagaataaagctcataaaggcggacggcatcggggtcggggatctgcacagcgggacggcaagggtaagga

SEQ ID NO: 545168 - DNA, 120 bp, Artificial Sequence
  ENSG00000167721_42 (sequence is synthesized)
gataacgtagaaggaataagggctatttggccgttattaactctttttcctcatgcccagactgagcttctgtctcccgtctgggctccacgcgaaaggccctttctaaggtgggcggag

SEQ ID NO: 545169 - DNA, 120 bp, Artificial Sequence
  ENSG00000167721_43 (sequence is synthesized)
gattttctgtagctgttccaagtgagggccctataggatagagtggggtgggggtatagttgaaagtctctcctcaccctcaaatgctgtatgttttcaataaacaaacattatacacag

SEQ ID NO: 545170 - DNA, 120 bp, Artificial Sequence
  ENSG00000167723_0 (sequence is synthesized)
ccacaacttcgatcttggcacctgcggcctcccctgccttttctccggtggggatgaggctgctgtgtgggtgtgggggtgactcacacgggccacgtgggtgggcgggtgctgcagctg

SEQ ID NO: 545171 - DNA, 120 bp, Artificial Sequence
  ENSG00000167723_1 (sequence is synthesized)
tggctggtgggcgtggcctgcctggcgccgagggcaggtggctcagccagttctgcctctgacgcctcattccagccatccctctgcctgcaatgagagcttcccgccgcctcagccaca

SEQ ID NO: 545172 - DNA, 120 bp, Artificial Sequence
  ENSG00000167723_2 (sequence is synthesized)
gtcccacccgggggccttgggccccagacatgcggtgatctcagggcaagggttgccacgaccacccagaacctcaccagccatgaaagcccaccccaaggagatggtgcctctcatggg

SEQ ID NO: 545173 - DNA, 120 bp, Artificial Sequence
  ENSG00000167723_3 (sequence is synthesized)
caagagagttgctgcccccagtgggaaccctgccatcctgccagagaagaggccggcggagatcacccccacaaagaagagtgcacacttcttcctggagatagaagggtttgaacccaa

SEQ ID NO: 545174 - DNA, 120 bp, Artificial Sequence
  ENSG00000167723_4 (sequence is synthesized)
ccccacagttgccaagacctctcctcctgtcttctccaagcccatggattccaacatccggcagtgcatctctggtaactgtgatgacatggactccccccagtctcctcaggatgatgt

SEQ ID NO: 545175 - DNA, 120 bp, Artificial Sequence
  ENSG00000167723_5 (sequence is synthesized)
gacagagaccccatccaatcccaacagccccagtgcacagctggccaaggaagagcagaggaggaaaaagaggcggctgaagaagcgcatctttgcagccgtgtctgagggctgcgtgga

SEQ ID NO: 545176 - DNA, 120 bp, Artificial Sequence
  ENSG00000167723_6 (sequence is synthesized)
ggagttggtagagttgctggtggagctgcaggagctttgcaggcggcgccatgatgaggatgtgcctgacttcctcatgcacaagctgacggcctccgacacggggaagacctgcctgat

SEQ ID NO: 545177 - DNA, 120 bp, Artificial Sequence
  ENSG00000167723_7 (sequence is synthesized)
gaaggccttgttaaacatcaaccccaacaccaaggagatagtgcggatcctgcttgcctttgctgaagagaacgacatcctgggcaggttcatcaacgccgagtacacagaggaggccta

SEQ ID NO: 545178 - DNA, 120 bp, Artificial Sequence
  ENSG00000167723_8 (sequence is synthesized)
tgaagggcagacggcgctgaacatcgccatcgagcggcggcagggggacatcgcagccctgctcatcgccgccggcgccgacgtcaacgcgcacgccaagggggccttcttcaaccccaa

SEQ ID NO: 545179 - DNA, 120 bp, Artificial Sequence
  ENSG00000167723_9 (sequence is synthesized)
gtaccaacacgaaggcttctacttcggtgagacgcccctggccctggcagcatgcaccaaccagcccgagattgtgcagctgctgatggagcacgagcagacggacatcacctcgcggga

SEQ ID NO: 545180 - DNA, 120 bp, Artificial Sequence
  ENSG00000167723_10 (sequence is synthesized)
ctcacgaggcaacaacatccttcacgccctggtgaccgtggccgaggacttcaagacgcagaatgactttgtgaagcgcatgtacgacatgatcctactgcggagtggcaactgggagct

SEQ ID NO: 545181 - DNA, 120 bp, Artificial Sequence
  ENSG00000167723_11 (sequence is synthesized)
cactcgcaacaacgatggcctcacgccgctgcagctggccgccaagatgggcaaggcggagatcctgaagtacatcctcagtcgtgagatcaaggagaagcggctccggagcctgtccag

SEQ ID NO: 545182 - DNA, 120 bp, Artificial Sequence
  ENSG00000167723_12 (sequence is synthesized)
gaagttcaccgactgggcgtacggacccgtgtcatcctccctctacgacctcaccaacgtggacaccaccacggacaactcagtgctggaaatcactgtctacaacaccaacatcgacaa

SEQ ID NO: 545183 - DNA, 120 bp, Artificial Sequence
  ENSG00000167723_13 (sequence is synthesized)
ccggcatgagatgctgaccctggagccgctgcacacgctgctgcatatgaagtggaagaagtttgccaagcacatgttctttctgtccttctgcttttatttcttctacaacatcaccct

SEQ ID NO: 545184 - DNA, 120 bp, Artificial Sequence
  ENSG00000167723_14 (sequence is synthesized)
gaccctcgtctcgtactaccgcccccgggaggaggaggccatcccgcaccccttggccctgacgcacaagatggggtggctgcagctcctagggaggatgtttgtgctcatctgggccat

SEQ ID NO: 545185 - DNA, 120 bp, Artificial Sequence
  ENSG00000167723_15 (sequence is synthesized)
gtgcatctctgtgaaagagggcattgccatcttcctgctgagaccctcggatctgcagtccatcctctcggatgcctggttccactttgtcttttttatccaagctgtgcttgtgatact

SEQ ID NO: 545186 - DNA, 120 bp, Artificial Sequence
  ENSG00000167723_16 (sequence is synthesized)
gtctgtcttcttgtacttgtttgcctacaaagagtacctcgcctgcctcgtgctggccatggccctgggctgggcgaacatgctctactatacgcggggtttccagtccatgggcatgta

SEQ ID NO: 545187 - DNA, 120 bp, Artificial Sequence
  ENSG00000167723_17 (sequence is synthesized)
cagcgtcatgatccagaaggtcattttgcatgatgttctgaagttcttgtttgtatatatcgtgtttttgcttggatttggagtagccttggcctcgctgatcgagaagtgtcccaaaga

SEQ ID NO: 545188 - DNA, 120 bp, Artificial Sequence
  ENSG00000167723_18 (sequence is synthesized)
caacaaggactgcagctcctacggcagcttcagcgacgcagtgctggaactcttcaagctcaccataggcctgggtgacctgaacatccagcagaactccaagtatcccattctctttct

SEQ ID NO: 545189 - DNA, 120 bp, Artificial Sequence
  ENSG00000167723_19 (sequence is synthesized)
gttcctgctcatcacctatgtcatcctcacctttgttctcctcctcaacatgctcattgctctgatgggcgagactgtggagaacgtctccaaggagagcgaacgcatctggcgcctgca

SEQ ID NO: 545190 - DNA, 120 bp, Artificial Sequence
  ENSG00000167723_20 (sequence is synthesized)
gagagccaggaccatcttggagtttgagaaaatgttaccagaatggctgaggagcagattccggatgggagagctgtgcaaagtggccgaggatgatttccgactgtgtttgcggatcaa

SEQ ID NO: 545191 - DNA, 120 bp, Artificial Sequence
  ENSG00000167723_21 (sequence is synthesized)
tgaggtgaagtggactgaatggaagacgcacgtctccttccttaacgaagacccggggcctgtaagacgaacagatttcaacaaaatccaagattcttccaggaacaacagcaaaaccac

SEQ ID NO: 545192 - DNA, 120 bp, Artificial Sequence
  ENSG00000167723_22 (sequence is synthesized)
tctcaatgcatttgaagaagtcgaggaattcccggaaacctcggtgtagaagcggaacccagagctggtgtgcgcgtgcgctgtctggcgctgcaggcggagtcaccgactctgtgcaga

SEQ ID NO: 545193 - DNA, 120 bp, Artificial Sequence
  ENSG00000167723_23 (sequence is synthesized)
tcgtgctcagtgctcagtgggtgtctgaactgaggggcagttgtcaatttgtctgagtgggaaacatcctggattttgttacttggcaaacagctggtgtaaacctacagccagcagcag

SEQ ID NO: 545194 - DNA, 120 bp, Artificial Sequence
  ENSG00000167723_24 (sequence is synthesized)
tctggagcctgggagcctcctgaagtcccgggtgaagcctctggttttaccaattgcaggtcggcttggctgggagagatggatggcgggaaaggggcagcagtcttgaggagcagggag

SEQ ID NO: 545195 - DNA, 120 bp, Artificial Sequence
  ENSG00000167723_25 (sequence is synthesized)
aggagtctttcctcctgccagcttcccccgtcagccccaaccccagcccacacattgtaccatctcttctgctgtgactgggttgcctgaatttgtgggagacccgtgatcccatcccag

SEQ ID NO: 545196 - DNA, 120 bp, Artificial Sequence
  ENSG00000167723_26 (sequence is synthesized)
agtgtgcgggggacggaggtaagctggatatcctgggggaggaggggaatgcgctctggaaacacccttccggaacccttcggggaaaaggagaccatccttggagtgaacgtcccctga

SEQ ID NO: 545197 - DNA, 120 bp, Artificial Sequence
  ENSG00000167723_27 (sequence is synthesized)
caccccaaggttcaaactgtctcaagctgagagatgtttttagtagcagaattaacacagggttttaacttgcaatacggaaaagacatttcagttgagaatgaaaattactacaatgaa

SEQ ID NO: 545198 - DNA, 83 bp, Artificial Sequence
  ENSG00000167723_28 (sequence is synthesized)
ccagagggcccagctttgaatctggactttgctacctatctgctgcgtgaccttggtgcacacttcttcctggagatagaagg

SEQ ID NO: 545199 - DNA, 120 bp, Artificial Sequence
  ENSG00000167723_29 (sequence is synthesized)
ggggctggatgtaagtattatatatttggcctcagggtgcccagagcaagacaaaaagcttttcttcacacacacaaaagtctgcatgagacactccgggcaagtcctgctgggccgccg

SEQ ID NO: 545200 - DNA, 120 bp, Artificial Sequence
  ENSG00000167723_30 (sequence is synthesized)
gaaaggtcctggctcttttcctcgtcctgacctcacagtagcgcgtgcctgtgtgctgggatcgtggctttcgctgaagcagaaatagcagctgctcgatcgatatcatcttggaactca

SEQ ID NO: 545201 - DNA, 120 bp, Artificial Sequence
  ENSG00000167723_31 (sequence is synthesized)
gcagttagtcgcatacctcagtatgtctcagtgggggaatttaacaaaatgcctcaactgctttggtacgaagtattttttttttaattttaactgtgaattttgaagctgaaggggaag

SEQ ID NO: 545202 - DNA, 120 bp, Artificial Sequence
  ENSG00000167723_32 (sequence is synthesized)
cttgtgagagaaaagcatttgccaagactttgagcttatttttaggtcctcgtcctctgatgttctctttctgaaatgacacggagtcagtctggggggcagaggtgaagtggagacgga

SEQ ID NO: 545203 - DNA, 120 bp, Artificial Sequence
  ENSG00000167723_33 (sequence is synthesized)
aggattttccaggtgactggggccgaaaccaccagaaaatccactctgccgccgttatctggtgaaaggattcatgtaaaaatgttcgaggtggaattataaaaatagtaaccataaatg

SEQ ID NO: 545204 - DNA, 120 bp, Artificial Sequence
  ENSG00000167723_34 (sequence is synthesized)
ttaatcttaaatggcagaaatagaaatttggccttcagataacatggcgatagataagttcatctggcttgaggcaaactgaagagtcggggcctagcagtgcactctgggccagtttct

SEQ ID NO: 545205 - DNA, 120 bp, Artificial Sequence
  ENSG00000167723_35 (sequence is synthesized)
ctgccctgggccactctgtgtgccagactagctggacagatagagactttgtgcccctgatggggccgattggggagaggtgggctggggtgtgtgaggcttcacaatccacagcagccc

SEQ ID NO: 545206 - DNA, 120 bp, Artificial Sequence
  ENSG00000167723_36 (sequence is synthesized)
ctgccctcccagctgacccagggagtaatcgcgtgctctaagccacagtggtcggggctgggcatgggcctctggagaagagaagatttgaggagaactgtcctagaggcaggaggagca

SEQ ID NO: 545207 - DNA, 120 bp, Artificial Sequence
  ENSG00000167723_37 (sequence is synthesized)
gatgtgtttcagaatgggcagaattaggaaattgagaaagattttggctcaacagaatccagcaactgctccagatgttggagatgtttaagcagaagctggttgcgcacttaatgagga

SEQ ID NO: 545208 - DNA, 120 bp, Artificial Sequence
  ENSG00000167723_38 (sequence is synthesized)
atgttgttgaaaatggtcattggaagaagtttaaggtcccttttagcctggagattgtacaaatcagcattccacatctggagttagctacccgcattaagcctgaacagacatcttggt

SEQ ID NO: 545209 - DNA, 120 bp, Artificial Sequence
  ENSG00000167723_39 (sequence is synthesized)
ctgaaaggaagtggtttggattcatgatgccaagctccacactatggagctgggaattccagaattgctttgactcagatattaatggagaaagtcatatccattaatggataaagccgt

SEQ ID NO: 545210 - DNA, 120 bp, Artificial Sequence
  ENSG00000167723_40 (sequence is synthesized)
atctgttatggataaagccgtatccagagttgctttgactcggatgttaatggataaagccaattattgatttctatttgcctaacctgccagcttttgtccaagtggggaatggagagc

SEQ ID NO: 545211 - DNA, 120 bp, Artificial Sequence
  ENSG00000167723_41 (sequence is synthesized)
catagggatgtttgtcatctcacatgttttggtgatctgctgtctgtgggtctggatggaatttgttggcaagaccattttctgtattggatattcttcccaacagtgtccaccccaaaa

SEQ ID NO: 545212 - DNA, 120 bp, Artificial Sequence
  ENSG00000167723_42 (sequence is synthesized)
ggctttcagccaaaacgtctgagcctaggtaggtttaccaagggaagccataagtcaagaagcatcagagtgaaaaggagcacttccttcattttacgcccagaggctaatgctccgaga

SEQ ID NO: 545213 - DNA, 120 bp, Artificial Sequence
  ENSG00000167723_43 (sequence is synthesized)
ggaatgtgtacttgggcaaagtcatgcaggaaggtcatatcagagctgtggaggctggagtgtcctgattcttggaccacagatgtctccctgagccattatttatttatttttaaaaag

SEQ ID NO: 545214 - DNA, 120 bp, Artificial Sequence
  ENSG00000167723_44 (sequence is synthesized)
cacagttattccatcattttgagtctttgtatttcgcttatattggggggcaggactattttctcaggtgtctcatttggcagtcaacattgtcccctatgttccctatgactagttgaa

SEQ ID NO: 545215 - DNA, 120 bp, Artificial Sequence
  ENSG00000167723_45 (sequence is synthesized)
aattcaagtgtgcccacaggggtgcacaaaaccacacccatgcacacacacaccctcagcccccacacacaccccgttgaacccgtgggtctatcaggacatcctaaaactccgtgattg

SEQ ID NO: 545216 - DNA, 120 bp, Artificial Sequence
  ENSG00000167723_46 (sequence is synthesized)
acatttcagtaatttcaggggaaggtgttttccagggatggggtctcccaggttcagatagtgcctttggctgcaaatgctcctttagctaaacttttcctcaggaagaattcattattc

SEQ ID NO: 545217 - DNA, 120 bp, Artificial Sequence
  ENSG00000167723_47 (sequence is synthesized)
tagacattatgtgatatatctgttaggaataaaaggtgcttaaccttcctccctgggatgtgggagaaggtgctggaggttgtactgtgaagtcttcaggctcttagaaggctccagcct

SEQ ID NO: 545218 - DNA, 120 bp, Artificial Sequence
  ENSG00000167723_48 (sequence is synthesized)
gagagagccctttattattgacattcctgtccttcctcaaggcctggtgacctgtgacctttcgctctgggcagggcccaggtagatgggccgtcatccgggcctgtaagccgtacttga

SEQ ID NO: 545219 - DNA, 120 bp, Artificial Sequence
  ENSG00000167723_49 (sequence is synthesized)
tttctgcattgatttacatattttttactgtgatcttggttccaaacacagaatcgtcaccccattctcccttgaatgtgccggatccttgtaaattctcatttacctacttgttcttag

SEQ ID NO: 545220 - DNA, 120 bp, Artificial Sequence
  ENSG00000167723_50 (sequence is synthesized)
tgtgtatgtgtgtgcgaaactctatgttcaagaaagaaatcatacaaagagtaagaacatgtttgtgccattgaagaaatggttttttgatttctaataaatatttgttttgcctcgtta

SEQ ID NO: 545221 - DNA, 120 bp, Artificial Sequence
  ENSG00000167723_51 (sequence is synthesized)
ggggttctggggaggcgtttccttcccaagccttacctttctgagttataacatgggaaaaaatggataaggctggcctatcctacctacttcatccatctacttctctatccatctgcc

SEQ ID NO: 545222 - DNA, 120 bp, Artificial Sequence
  ENSG00000167723_52 (sequence is synthesized)
caactatccgccatttatctaccttcccagccactcagtgtcccttgtcctcttccacccccatccacccatccgatcacctgccctctttcatggacccagccactcattcatccattc

SEQ ID NO: 545223 - DNA, 120 bp, Artificial Sequence
  ENSG00000167723_53 (sequence is synthesized)
tgtaaccttgggcagatcaagtctaagggtcctgactttccccatctgtcaaatgggagggttgaatggaaatgcttcttaggtctcttccagctctgacttttagaaccctagttggca

SEQ ID NO: 545224 - DNA, 86 bp, Artificial Sequence
  ENSG00000167723_54 (sequence is synthesized)
aggtctcttccagctctgacttttagaaccctagttggcacaacttttaaaatggcgtagccctaagccatagaaacacatcatgc

SEQ ID NO: 545225 - DNA, 120 bp, Artificial Sequence
  ENSG00000167723_55 (sequence is synthesized)
cacaaagaagaggtgggtttggagagctcgggacacggactgcggcactgtgaggggcacgagtgggggcctggcacccccccagggagcccttgccttggggagacctgagactctcag

SEQ ID NO: 545226 - DNA, 120 bp, Artificial Sequence
  ENSG00000167723_56 (sequence is synthesized)
tctcgcccggggtggcccggtgcccggcgaggtatgactaggggatggtgcggtggggagcacagcacactcagggggctgagctggggtagtcagtgtgactggcacaattagggaagc

SEQ ID NO: 545227 - DNA, 120 bp, Artificial Sequence
  ENSG00000167723_57 (sequence is synthesized)
ctccttggagggatcgggggtgctgaggcaggagcagtcaggagggctcctgagggaggtgagggatggctggagccacccttgagacgaggagcaaaatgctggctggaagttccaggt

SEQ ID NO: 545228 - DNA, 120 bp, Artificial Sequence
  ENSG00000167723_58 (sequence is synthesized)
gacccggagcctctgttgggcacgttttccacacacacacccatggctttccatccactctgcacccagccgggttattcaagctcttgaactccacctttggaatggggacaccggcaa

SEQ ID NO: 545229 - DNA, 120 bp, Artificial Sequence
  ENSG00000167723_59 (sequence is synthesized)
tggcaccaactataggatgatggttaattgggatcaagtcaacaaagtgctcagtgcagcgcctggcacgcggtcagcgctcagcatgtgttggcattgagagtgtttctgtgaccttca

SEQ ID NO: 545230 - DNA, 120 bp, Artificial Sequence
  ENSG00000167723_60 (sequence is synthesized)
ccatcatcattgtcctcatcactccacggagcccctgggaactgggcagggctgggatgatcagctttacttcttcgctggggacgtggaggagacctggagcagagaaaggacctctct

SEQ ID NO: 545231 - DNA, 120 bp, Artificial Sequence
  ENSG00000167723_61 (sequence is synthesized)
agggtcacccatcccgcccctccgctgcctccattatagattctgcacccccagctcattgggtgcctctcacgctgtcccccagcccacttcacctgtgcgtcccttgaacccggggtg

SEQ ID NO: 545232 - DNA, 120 bp, Artificial Sequence
  ENSG00000167723_62 (sequence is synthesized)
gccctgcctcctctgcctgtatcccaggccccctttgggccagggctgagcttggtgcttcccctctgttagttggagctataatcattgaggtgtcctgtgtaccagccccagggttgg

SEQ ID NO: 545233 - DNA, 120 bp, Artificial Sequence
  ENSG00000167723_63 (sequence is synthesized)
gctcaggataaggagtttgggacatggagagaaaaatgcccacgtctgctcacagtctggtgaaaggggagtcgaggagagagtgggaagtgaccacagagaggtgaactagccccgtgg

SEQ ID NO: 545234 - DNA, 120 bp, Artificial Sequence
  ENSG00000167723_64 (sequence is synthesized)
gcaggttattctgatcctgtaggcagtctcaggggacttcctggaggaggtggtgctagagaggatgtggagaggaaggaaaaagtgcatctgggcagagggacatgagagccatggctc

SEQ ID NO: 545235 - DNA, 120 bp, Artificial Sequence
  ENSG00000167723_65 (sequence is synthesized)
agagtggggccactgaggtgaggagtctggtgtagctgaagtaccggccagtagaggagtctttggggaggcgagtcccactggagctgagtcctgggggtcagtcaaggaacttggata

SEQ ID NO: 545236 - DNA, 120 bp, Artificial Sequence
  ENSG00000167723_66 (sequence is synthesized)
atcctcagggcagtggggagccatggagggattttttgtgggagggagggcatggtgagatgtgccttctggagaggtgactctgggggatctgcgtggatgacggattagaggagaggc

SEQ ID NO: 545237 - DNA, 120 bp, Artificial Sequence
  ENSG00000167723_67 (sequence is synthesized)
tgacagcagggagaccatgaggaggcctttgggaagcccaggtgataggtggtgatgtctgagcctgggtggtcacggataaagaggagggggcagcacagacaggtgccagtatcatgg

SEQ ID NO: 545238 - DNA, 120 bp, Artificial Sequence
  ENSG00000167723_68 (sequence is synthesized)
ggtctgcaggaccagccacgggaggtaaaggagaaggaggagtcccggtgggagggcctggagggatggcggggccatctgacatggcgcatcagaggagaagatccaggtcaggaggaa

SEQ ID NO: 545239 - DNA, 120 bp, Artificial Sequence
  ENSG00000167723_69 (sequence is synthesized)
tgagccaaattcagttgtgaaatgttgggtgggaggtgcctgagagacacccaggtggaggctccatcttggaaggcaaaagggaaaactggtggagaaggagccagacaggtgtcgtgt

SEQ ID NO: 545240 - DNA, 120 bp, Artificial Sequence
  ENSG00000167723_70 (sequence is synthesized)
ggggtcatgggggcagcctgggtctgggtgggcttgtccaggaaagggcagagacatccctgagctaagctggcaaggaccacctccctggctctcctgccccttcccatccgctctcac

SEQ ID NO: 545241 - DNA, 120 bp, Artificial Sequence
  ENSG00000167723_71 (sequence is synthesized)
ttgtccaggggaggtttggacctccggaaaaaaatgaggatagagttttgggaaaatcccacgtcctttcctcagcaggaaccgtcaggctgccttctctgagcccatcccccccattca

SEQ ID NO: 545242 - DNA, 120 bp, Artificial Sequence
  ENSG00000167723_72 (sequence is synthesized)
cagatttagctccaggctcagctctgcaaagcctcctccgcccagccaagggctgagcttggcatgtctcctaaattgctgtccacttctctgccccaaaggccctctgaggaccctcat

SEQ ID NO: 545243 - DNA, 120 bp, Artificial Sequence
  ENSG00000167723_73 (sequence is synthesized)
ggccctctgaggaccctcatgtgaaggtttgggcacccccctcagagctgagtcggggacttgggcccagagagaaacagaaaagaataaattaaaaggccgggcgcggtggctcacgcc

SEQ ID NO: 545244 - DNA, 120 bp, Artificial Sequence
  ENSG00000167733_0 (sequence is synthesized)
gctccggcgctgggtccccgaggcccggcccctccccgggaggaggtgggcttcgagtcacgtgacccgtgccctacgggagggggtgcggtcggggacccggcaggaggcggccgagaa

SEQ ID NO: 545245 - DNA, 120 bp, Artificial Sequence
  ENSG00000167733_1 (sequence is synthesized)
agaagagaggaccgtgggggcgttcgcgtggctcccagcccgggaccccacccccgctggacagtgggggaaactgaggcctgagcgggcccacacaggaccatgaaggtgcttctcctc

SEQ ID NO: 545246 - DNA, 120 bp, Artificial Sequence
  ENSG00000167733_2 (sequence is synthesized)
acagggctgggggccctgttcttcgcctattattgggatgacaacttcgacccagccagcctccagggagcgcgagtgctgctgacaggggccaacgctggtgttggtgaggagctggcc

SEQ ID NO: 545247 - DNA, 120 bp, Artificial Sequence
  ENSG00000167733_3 (sequence is synthesized)
tatcactacgcgcgtctgggctcccacctggtgctcactgcccacactgaggctctcctgcagaaggtggtagggaactgccggaagctgggcgcccccaaggtcttctacatcgcggcg

SEQ ID NO: 545248 - DNA, 120 bp, Artificial Sequence
  ENSG00000167733_4 (sequence is synthesized)
gacatggcctcccctgaggcgcccgagagcgtggtgcagtttgcgctggacaagctgggcgggctggactacctcgtgctgaaccacatcggcggcgccccggccggcacgcgagcccgc

SEQ ID NO: 545249 - DNA, 120 bp, Artificial Sequence
  ENSG00000167733_5 (sequence is synthesized)
agcccccaggcaactcgctggctcatgcaggtaaactttgtgagctacgtgcaactgacgtcgcgggcgctgcccagcctgacggacagcaagggctccctggtggtggtgtcctcgctg

SEQ ID NO: 545250 - DNA, 120 bp, Artificial Sequence
  ENSG00000167733_6 (sequence is synthesized)
acgtgaacgtggccatcaccatgtgcgtcctgggcctccgagatcgcgcctccgccgccgaggcagtcaggggagtcacgagggtcaaggcggccccggggcccaaggcagccctggccg

SEQ ID NO: 545251 - DNA, 120 bp, Artificial Sequence
  ENSG00000167733_7 (sequence is synthesized)
tgatccgcggcggcgccacgcgcgcggccggcgtcttctacccgtggcgtttccgcctgctgtgcttgctccggcgctggctaccgcgcccgcgggcctggtttatccgccaggagctca

SEQ ID NO: 545252 - DNA, 120 bp, Artificial Sequence
  ENSG00000167733_8 (sequence is synthesized)
acgtcacggccgcggcagcctgagcaccggggggtgcccctccagtcccagacggcaatgttcctccctccaactgtccctggagccagaacactcacagagacacccctgagagggtgg

SEQ ID NO: 545253 - DNA, 120 bp, Artificial Sequence
  ENSG00000167733_9 (sequence is synthesized)
ccacagcccaagatgaagtcatcaagacagaaaagcaaaaccgagaaaaacgacgggcacctggaaccagtcacggcttgggaggtgcaggtgccccgtgttaggcgcctttgtcgggga

SEQ ID NO: 545254 - DNA, 120 bp, Artificial Sequence
  ENSG00000167733_10 (sequence is synthesized)
cttgcaaggcctcacctgtttggccatgattgatgacgtgactgcttccattttgcagatgaggaaactaaggctcagagaggccacgccacccttgagccacccatggacccctctcca

SEQ ID NO: 545255 - DNA, 120 bp, Artificial Sequence
  ENSG00000167733_11 (sequence is synthesized)
tctcctgcctgcgcctttaagtccctgatttattctttccattcattccatctgggaggaacccccccaactcctgccagcttcccctagctggggtctctggtactcttcacacctgca

SEQ ID NO: 545256 - DNA, 120 bp, Artificial Sequence
  ENSG00000167733_12 (sequence is synthesized)
ggggcgtctacactgttcgtctacctggtggcagggtctgagcgggaggaggagggaaagagtgtgttctgagctggacccagcctcttgttcgagaataaaaactcttcttctcttgca

SEQ ID NO: 545257 - DNA, 62 bp, Artificial Sequence
  ENSG00000167733_13 (sequence is synthesized)
agtgcaatggcaaatctcggctctggattacaggcatagatggggtttcaccatgttggcca

SEQ ID NO: 545258 - DNA, 120 bp, Artificial Sequence
  ENSG00000167733_14 (sequence is synthesized)
ctgggattccaggcatgagccaccacatccagctgaaggaggtcacttttgcactgagacttgaaagaagcccacacaggaccatgaaggtgcttctcctcacagggctgggggccctgt

SEQ ID NO: 545259 - DNA, 120 bp, Artificial Sequence
  ENSG00000167733_15 (sequence is synthesized)
gtggtgtcttgcggctctgagactccagagaagggctgcggtctcgcagcggagggccgctgggaaatggacgctttaaggcccgggccgccgcaaggctgtctgggaaatgtagtcagc

SEQ ID NO: 545260 - DNA, 120 bp, Artificial Sequence
  ENSG00000167733_16 (sequence is synthesized)
acggcgctgtttgcacctggccgcggagcctcctgggaaatgtagttcggcccggccctggcaccgtgaggggaaagaggcgtcaggtgcctggctgaagcctgaaggtgacccgaaaac

SEQ ID NO: 545261 - DNA, 120 bp, Artificial Sequence
  ENSG00000167733_17 (sequence is synthesized)
aagtcagagcccgagagatccacccgcgcccgcgcgggggaccaagggcccggatttaagaagagtgtgcctacaaggcggttgtcacggcaacgagagggcgggattgttcgagcgctg

SEQ ID NO: 545262 - DNA, 120 bp, Artificial Sequence
  ENSG00000167733_18 (sequence is synthesized)
cctccgccgccgaggcagtcaggtgaggcccggacaagctgggggctgggctgggggccatggcccagccccagccgcagtccccaccgtgccctcctgtccccaggggagtcacgaggg

SEQ ID NO: 545263 - DNA, 120 bp, Artificial Sequence
  ENSG00000167733_19 (sequence is synthesized)
ctcgctgctcggtgcgtgcacccggccccggctctgcgggacggggagtggggagctcgatgcgggtgagcctggagggtctgggcaggcttcccggacgagggggagccactcagccgc

SEQ ID NO: 545264 - DNA, 120 bp, Artificial Sequence
  ENSG00000167740_0 (sequence is synthesized)
agcctggacaacaagagctaaaactctgtctcagaaaaaaaaaaaaaaagtacctggaaaaagtcgcagacagcgagcttttcgccagtgccaggaatacagataaaacgagagagacta

SEQ ID NO: 545265 - DNA, 120 bp, Artificial Sequence
  ENSG00000167740_1 (sequence is synthesized)
agggagggagcgcgagcactagcgcgcgagagagagagcgagagcgcgcgcgccgatgacgtcacgctcggcgtctcggccatcttagctgtagatagaggcggcaacctcggaagtgcg

SEQ ID NO: 545266 - DNA, 120 bp, Artificial Sequence
  ENSG00000167740_2 (sequence is synthesized)
gagcgggtgggcctatatagatgttgaggtgcggaggccgtgggcttttgttgggcctggctgtagccgcagcagcggtaatggcagcacggcttatgggctggtggggtccccgcgctg

SEQ ID NO: 545267 - DNA, 120 bp, Artificial Sequence
  ENSG00000167740_3 (sequence is synthesized)
gctttcgccttttcataccggaggagctgtctcgctaccgcggcggcccaggggacccgggcctgtacttggcgttgctcggccgtgtctacgatgtgtcctccggccggaggcactacg

SEQ ID NO: 545268 - DNA, 120 bp, Artificial Sequence
  ENSG00000167740_4 (sequence is synthesized)
agcctgggtcccactatagcggcttcgcaggccgagacgcatccagagctttcgtgaccggggactgttctgaagcaggcctcgtggatgacgtatccgacctgtcagccgctgagatgc

SEQ ID NO: 545269 - DNA, 120 bp, Artificial Sequence
  ENSG00000167740_5 (sequence is synthesized)
gtagaagctgcgatcaccagaggcttggaggccaacaaactacagctgcaagagaagcagacattcccgccgtgcaacgcggagtggagctcagccaggggcagccggctctggtgctcc

SEQ ID NO: 545270 - DNA, 120 bp, Artificial Sequence
  ENSG00000167740_6 (sequence is synthesized)
cagaagagtggaggtgtgagcagagactggattggcgtccccaggaagctgtataagccaggtgctaaggagccccgctgcgtgtgtgtgagaaccaccggcccccctagtggccagatg

SEQ ID NO: 545271 - DNA, 120 bp, Artificial Sequence
  ENSG00000167740_7 (sequence is synthesized)
ccggacaaccctccacacagaaatcgtggggacctggaccacccaaacttggcagagtacacaggctgcccaccgctagccatcacatgctcctttccactctaagccgtagcctcttct

SEQ ID NO: 545272 - DNA, 120 bp, Artificial Sequence
  ENSG00000167740_8 (sequence is synthesized)
gttaataacacacagagagctctgccaagcacctgagtaggcccttgacacttgtgtgccctgggatgcctcctggcgcgaatcaggagggtctggaaggactctggctatattctgcaa

SEQ ID NO: 545273 - DNA, 120 bp, Artificial Sequence
  ENSG00000167740_9 (sequence is synthesized)
atgtggctcatgccccttaccgtggctcggcgttgtggtgcctgagggacagccggccacctgcccagtactggtcagcttttcaacactattccctttgacctactggccatcttcctc

SEQ ID NO: 545274 - DNA, 120 bp, Artificial Sequence
  ENSG00000167740_10 (sequence is synthesized)
acagccctcagatatcaacgggcacaaataagaccaactcaatttccacttgaatttacaaccaaaagcctgctgagttgattacagctgggccaatacagtacgaggcaataacaaatt

SEQ ID NO: 545275 - DNA, 120 bp, Artificial Sequence
  ENSG00000167740_11 (sequence is synthesized)
agtgtgggttgattctggaattggaaaagcttttgcttgtatggatacagcaaatccagatgtctctgaacaaagcaacaatttaaagcaacgacattttctgtcctttaagcacttaaa

SEQ ID NO: 545276 - DNA, 120 bp, Artificial Sequence
  ENSG00000167740_12 (sequence is synthesized)
atcaggtgtggtgtgttttcaaaggcagaagtctgcattttgagcaaaaggtggcttcccagctctaacaaggtaactggttagcatgacattaaagcttgggcaaggcttcaaacttaa

SEQ ID NO: 545277 - DNA, 120 bp, Artificial Sequence
  ENSG00000167740_13 (sequence is synthesized)
agaagaattatgtgtgtgttgcccccacgtctcactggagtcctacttggacatgactgacttcctgaggaacaccagtatcacttcaccatcgaaacagggagggtgacaggacggttc

SEQ ID NO: 545278 - DNA, 73 bp, Artificial Sequence
  ENSG00000167740_14 (sequence is synthesized)
atctacgtcattccgtagcctccgctgccgccatctttgttggggctgacaacctgcaagccaagaagtacga

SEQ ID NO: 545279 - DNA, 120 bp, Artificial Sequence
  ENSG00000167741_0 (sequence is synthesized)
agtatcaaggttgtggcattaaggctgaactccttctcgacctcactgagctgtggccccttacaggcagtcaccccgggaaccctgtcgcgagagctcctcgggccttgtgtcctaatg

SEQ ID NO: 545280 - DNA, 120 bp, Artificial Sequence
  ENSG00000167741_1 (sequence is synthesized)
gggcaggctcacatgcagcctccttggccccgtgccctgcccagacctgttctggattccacccccacccttccccaaggtcgctgccacctcccacctgccaggcttgggcagggcctc

SEQ ID NO: 545281 - DNA, 120 bp, Artificial Sequence
  ENSG00000167741_2 (sequence is synthesized)
tgagacacagccggaaaggctggcaggcaggagggctggggcgagcactggggggccatggagcgggcagaagagcccgtggtctatcagaagctgctgccctgggagccaagcttggag

SEQ ID NO: 545282 - DNA, 120 bp, Artificial Sequence
  ENSG00000167741_3 (sequence is synthesized)
tcggaggaggaagtggaggaggaggagacatcagaggcgctggttctaaacccccggaggcaccaggactcttccaggaacaaggctggcgggctgcccggaacctgggcccgtgtagtg

SEQ ID NO: 545283 - DNA, 120 bp, Artificial Sequence
  ENSG00000167741_4 (sequence is synthesized)
gcagccctgctgctgctggctgttggctgctccctggctgtgaggcagctccagaatcagggcaggtcgacaggaagcttgggctctgtggcccctccacccggcggacactcccacggc

SEQ ID NO: 545284 - DNA, 120 bp, Artificial Sequence
  ENSG00000167741_5 (sequence is synthesized)
cctggcgtataccaccacggtgccatcatcagccctgcaggccgagagctgcttgttgccgggggcaacgtcgtggatgctggagttggagctgcattgtgcctggcagtggtgcatcct

SEQ ID NO: 545285 - DNA, 120 bp, Artificial Sequence
  ENSG00000167741_6 (sequence is synthesized)
catgccacggggctaggtgccatgttttggggcctcttccacgatagctcctcaggcaattccacggccctgacatcaggcccagcacagaccctggcccccggcctggggctgcccgcg

SEQ ID NO: 545286 - DNA, 120 bp, Artificial Sequence
  ENSG00000167741_7 (sequence is synthesized)
gctctgcccaccctgcacctgctgcatgcacgcttcggccgcctgccctggccacgcctgctagtgggccccaccacgctggctcaggagggcttcctggtggacacacccctggcaagg

SEQ ID NO: 545287 - DNA, 120 bp, Artificial Sequence
  ENSG00000167741_8 (sequence is synthesized)
gctctggtggctcggggcacagaaggcctctgtccactactttgccatgctgatgggacacccctgggcgctggggcccgagccaccaacccacaactggcagctgtgcttcgcagcgca

SEQ ID NO: 545288 - DNA, 120 bp, Artificial Sequence
  ENSG00000167741_9 (sequence is synthesized)
gccctcgctcccacctcagaccttgctggggatgctctactgagtctactggcgggagacctgggggtggaggtgccctcggctgtgcccaggcccactttggaaccagcagagcagcta

SEQ ID NO: 545289 - DNA, 120 bp, Artificial Sequence
  ENSG00000167741_10 (sequence is synthesized)
gctccggggcgcccatccctgacccctgcccaccgttcctgcagactgctgtgagccccgagagcagtgccctggccgccgtggacagcagcggctctgtgctccttctcacctcctcgc

SEQ ID NO: 545290 - DNA, 120 bp, Artificial Sequence
  ENSG00000167741_11 (sequence is synthesized)
tcaactgctcctttggctctgcacacctgtccccaagcactggggttctgctcagcaacctggtggccaagtctaccactagtgcctgggcctgccccctcatcctccgtggcagcctgg

SEQ ID NO: 545291 - DNA, 120 bp, Artificial Sequence
  ENSG00000167741_12 (sequence is synthesized)
atgacacagaggctgatgtgttggggcttgtggcttcagggacccctgatgtggccagggccatgactcacaccctactcaggcatctggcagcaaggccccctacccaggcccagcacc

SEQ ID NO: 545292 - DNA, 120 bp, Artificial Sequence
  ENSG00000167741_13 (sequence is synthesized)
agcatcagggtcagcaagaaccaacagagcatcccagcacttgtggccaagggaccctgctccaggtggcagcccacacagagcacgcccatgtctccagtgtcccccatgcctgctgcc

SEQ ID NO: 545293 - DNA, 120 bp, Artificial Sequence
  ENSG00000167741_14 (sequence is synthesized)
ccttccaggggttctaacaggatgggggtgggtctggcagaaggcagagttatctgaagcatgggggcaggagcagagcagacacagcagcaatggagtgtgcacccgcagggtgtggtg

SEQ ID NO: 545294 - DNA, 120 bp, Artificial Sequence
  ENSG00000167741_15 (sequence is synthesized)
cctcacacctgtaatctcagcactttgggtggtcaaggcaggaagatacctcgaggccaggagtttgaaactagcctagacaacaaagcaagatctcatctgtactaaaaatttaaaaat

SEQ ID NO: 545295 - DNA, 90 bp, Artificial Sequence
  ENSG00000167741_16 (sequence is synthesized)
caacaaagcaagatctcatctgtactaaaaatttaaaaatttgccaggggcggtggcacatgcctgttagctcgcttgagctcaggagtt

SEQ ID NO: 545296 - DNA, 73 bp, Artificial Sequence
  ENSG00000167741_17 (sequence is synthesized)
gctgcagaacctgtctttaaaataataataataataataaaaaaatagctgggtgcggtggctcatgcctgta

SEQ ID NO: 545297 - DNA, 120 bp, Artificial Sequence
  ENSG00000167741_18 (sequence is synthesized)
gcccagcctagcccccctccttgctgcatgacagtgccttccttgctgcagccacatgctcccacctaggccgagagctgcttgttgccgggggcaacgtcgtggatgctggagttggag

SEQ ID NO: 545298 - DNA, 120 bp, Artificial Sequence
  ENSG00000167741_19 (sequence is synthesized)
tttcccatccccatgtctgcccaagatgcacccgctgccaagaagccctttctccttggctgacttgtgctcctcttgctaaatcaaaccttttgggaaatattccctggggtctcttgg

SEQ ID NO: 545299 - DNA, 120 bp, Artificial Sequence
  ENSG00000167741_20 (sequence is synthesized)
gaggttgcagtgaaccaagatcgcaccattgcaaccccacctgggcaacaagagggaaaccctgtctaaaaaaaaaaaaaaaaaaaaggatttattatgtgctcactgctggctcaggcc

SEQ ID NO: 545300 - DNA, 120 bp, Artificial Sequence
  ENSG00000167741_21 (sequence is synthesized)
ctcaggccccaacctctggccttttaagttacctagacttgagttctggcatccagagctaacaatcattcttcagatcacccacaccggatggaatctctagctattttatcagctaag

SEQ ID NO: 545301 - DNA, 120 bp, Artificial Sequence
  ENSG00000167741_22 (sequence is synthesized)
aaaatcagggtaataacgaaaaagcagtagggcctggggctagcactgagttcagatccagctttcaggaggacagtggaaagagtgcagagcctctgcctaggccctgggccccacgaa

SEQ ID NO: 545302 - DNA, 120 bp, Artificial Sequence
  ENSG00000167741_23 (sequence is synthesized)
gcaggacaggcagagcccagggtactgttggcatctctgtccttcccttcaggacaccccttacctatctgcctcaaccagactgggtacaaaataaagatcaagtctcccggaaaccaa

SEQ ID NO: 545303 - DNA, 120 bp, Artificial Sequence
  ENSG00000167747_0 (sequence is synthesized)
aaatggggtttcccaaacaggcgtgtgtattggacgcctcgggcggagcgcgggctggcgccgaggaccggccttgcgagcggcgcgcactataaaatggcgcgtgctgcaacccgcgcc

SEQ ID NO: 545304 - DNA, 120 bp, Artificial Sequence
  ENSG00000167747_1 (sequence is synthesized)
cgcttcggagagagaaatgctggggtgcagcttcaagcttaggaccacccaccatgcctatccaggtgctgaagggcctgaccatcactcattaagaacagaggaggctgcctgttactc

SEQ ID NO: 545305 - DNA, 120 bp, Artificial Sequence
  ENSG00000167747_2 (sequence is synthesized)
ctggtgttgcatccctccagacactctgctgtttcctgcctaggcgtggctgcagccatggctaggaaagcgctgccacccacccacctgggccagagctggttctgctcctgctgcagg

SEQ ID NO: 545306 - DNA, 120 bp, Artificial Sequence
  ENSG00000167747_3 (sequence is synthesized)
gacactgagctggctatctcggcgcttcgggcaagaactgcaacaggctctcctgggtcctgcaggtgtacagccgggcccctgccttgtgcctcagctctcgagagctgctgctgccgg

SEQ ID NO: 545307 - DNA, 120 bp, Artificial Sequence
  ENSG00000167747_4 (sequence is synthesized)
gtgacctgatccaacctgataaggtgccatcttcagctaccactgcaaggccctgagggcaacagcagcacggcactgcccacccggctgctgatggcctggtgccagctgggagtcctc

SEQ ID NO: 545308 - DNA, 120 bp, Artificial Sequence
  ENSG00000167747_5 (sequence is synthesized)
ccggcacttcgaggccactgagccacccttccagccccagcccaccatggacaggggtatccagcttcctcctcaacctcgtcctctgcccctgagccagtgacgcccaaggacatgcct

SEQ ID NO: 545309 - DNA, 120 bp, Artificial Sequence
  ENSG00000167747_6 (sequence is synthesized)
gagatccaggccatcactggcagcaggctgctctccatggtgccagggcccgccaggccaccaggctcatgctgggacccaacccagtgcacaaggacttggctgctgagccacacaccc

SEQ ID NO: 545310 - DNA, 120 bp, Artificial Sequence
  ENSG00000167747_7 (sequence is synthesized)
aggagaaggtggataagtgggctaccaagggcttcctgcaggctaggggaggagccacccccgcttccctattgtgaccaggcctatggggaggagctgtccatacgccaccgtgagacc

SEQ ID NO: 545311 - DNA, 120 bp, Artificial Sequence
  ENSG00000167747_8 (sequence is synthesized)
tgggcctggctctcaaggacagacaccgcctggcctggtgctccaggggtgaagcaggccagaatcctgggggagctgctcctggtttgagctgcattcaggaagtgcgggacatggtag

SEQ ID NO: 545312 - DNA, 120 bp, Artificial Sequence
  ENSG00000167747_9 (sequence is synthesized)
gggaggcaaaaagccttgggcactaccctccctgtggagctgttcggtgtccgtcgagctagccacaccctgacaccatgttcaagggtaccggaagagaagggtgtctgcccccaacct

SEQ ID NO: 545313 - DNA, 120 bp, Artificial Sequence
  ENSG00000167747_10 (sequence is synthesized)
cccctgtgggtgtcactggccagatgtcatgagggaagcaggccttgtgagtggacactgaccatgagtccctggggggagtgatcccccaggcatcgtgtgccatgttgcacttctgcc

SEQ ID NO: 545314 - DNA, 120 bp, Artificial Sequence
  ENSG00000167747_11 (sequence is synthesized)
caggcagcagggtgggtgggtaccatgggtgcccacccctccaccacatggggccccaaagcactgcaggccaagcagggcaaccccacacccttgacataaaagcatcttgaagctttt

SEQ ID NO: 545315 - DNA, 120 bp, Artificial Sequence
  ENSG00000167747_12 (sequence is synthesized)
ggtcctttaaggtcttgaacatcggtttcctgacttgagcggggcccatgcccctgccgaggaggctcagcctggaagcagctagcccatttcctatctcccccaccacgaccccagcaa

SEQ ID NO: 545316 - DNA, 120 bp, Artificial Sequence
  ENSG00000167747_13 (sequence is synthesized)
ggatctctacttgacttacctccttcaggcaaccacctagaaaatcgttgagtttgttcatgtcacaagtgaaagtattttttcatgcattcatcgttggcacgtcgtcctttggcaata

SEQ ID NO: 545317 - DNA, 120 bp, Artificial Sequence
  ENSG00000167747_14 (sequence is synthesized)
cctttggcaatattaaaatctaccaacaaatgggaaaagttaacatttgcaccatcttgccatattcaaaaaccttgtgcttaagtgttttgaaaagacagggtttcaccatattggcca

SEQ ID NO: 545318 - DNA, 120 bp, Artificial Sequence
  ENSG00000167747_15 (sequence is synthesized)
cccacctcggcttcccaaagtgctgaggttgcaggcgtgagccaccgtgcccggccgcgtttcctactctttaagctctgttagcttggcctctgtccctgaaggtgcagcttcaagctt

SEQ ID NO: 545319 - DNA, 120 bp, Artificial Sequence
  ENSG00000167747_16 (sequence is synthesized)
gtgcagcttcaagcttaggaccacccaccatgcctatccaggtgctgaagggcctgaccatcactcattaagaacagaggaggctgcctgttactcctggtgttggcgtggctgcagcca

SEQ ID NO: 545320 - DNA, 120 bp, Artificial Sequence
  ENSG00000167747_17 (sequence is synthesized)
tcccagcggattctctctcgtgtcgggccgccctcggggtcctttctcttcacggcccatctttgatgctgtcttcagaattgccggacgcaggggacaagacaatcgtttccatcatat

SEQ ID NO: 545321 - DNA, 120 bp, Artificial Sequence
  ENSG00000167747_18 (sequence is synthesized)
cttctgaaggtggggcttgaataagaagaggaatgcgtggactggagggaacaagcatttgcgtttcaggggaaagaactaatcaaacatgtcaaaactcagcagtggaaaagagacagt

SEQ ID NO: 545322 - DNA, 120 bp, Artificial Sequence
  ENSG00000167747_19 (sequence is synthesized)
gcttcggagagagaaatgctggggtgcagcttcaagcttaggaccacccaccatgcctatccaggtaagaacccttgctcctgctccttcactcacctgggtttaaaatatctcactgtc

SEQ ID NO: 545323 - DNA, 81 bp, Artificial Sequence
  ENSG00000167747_20 (sequence is synthesized)
ataccgtacctctagaaactgattgatgtgccaatgattgtactcagtgtttacatacaaaaaccatctcaggctgggcgc

SEQ ID NO: 545324 - DNA, 120 bp, Artificial Sequence
  ENSG00000167747_21 (sequence is synthesized)
gtagacaggtgcccagcaagtgctgagccaggcgctgccctaagcactgggctcattaaccttagtaaccctgttggggggcggaggtgggatgggggctggggctgggttgcagtgaga

SEQ ID NO: 545325 - DNA, 120 bp, Artificial Sequence
  ENSG00000167747_22 (sequence is synthesized)
tgtccagtgtccagggttcttgaaagggctgcacttggggaccccgtgatgtccagcactgggctctgactgcccctgaggacacggtgcaccccgggacctttgacatccggggttctg

SEQ ID NO: 545326 - DNA, 120 bp, Artificial Sequence
  ENSG00000167747_23 (sequence is synthesized)
atgatgtccagcactgggctctgatcacccctgaggacacagtgcaccccaggacctttgacacctgggggtctgaggggccccagttttaatggcttgtggacttgcagactgtttcct

SEQ ID NO: 545327 - DNA, 120 bp, Artificial Sequence
  ENSG00000167748_0 (sequence is synthesized)
agttcctccacctgctggcccctggacacctctgtcaccatgtggttcctggttctgtgcctcgccctgtccctgggggggactggtgctgcgcccccgattcagtcccggattgtggga

SEQ ID NO: 545328 - DNA, 120 bp, Artificial Sequence
  ENSG00000167748_1 (sequence is synthesized)
ggctgggagtgtgagcagcattcccagccctggcaggcggctctgtaccatttcagcactttccagtgtgggggcatcctggtgcaccgccagtgggtgctcacagctgctcattgcatc

SEQ ID NO: 545329 - DNA, 120 bp, Artificial Sequence
  ENSG00000167748_2 (sequence is synthesized)
agcgacaattaccagctctggctgggtcgccacaacttgtttgacgacgaaaacacagcccagtttgttcatgtcagtgagagcttcccacaccctggcttcaacatgagcctcctggag

SEQ ID NO: 545330 - DNA, 120 bp, Artificial Sequence
  ENSG00000167748_3 (sequence is synthesized)
gacctcatgctgctccgcctgacagagcctgctgataccatcacagatgctgtgaaggtcgtggagttgcccaccgaggaacccgaagtggggagcacctgtttggcttccggctggggc

SEQ ID NO: 545331 - DNA, 120 bp, Artificial Sequence
  ENSG00000167748_4 (sequence is synthesized)
agcatcgaaccagagaatttctcatttccagatgatctccagtgtgtggacctcaaaatcctgcctaatgatgagtgcaaaaaagcccacgtccagaaggtgacagacttcatgctgtgt

SEQ ID NO: 545332 - DNA, 120 bp, Artificial Sequence
  ENSG00000167748_5 (sequence is synthesized)
gtcggacacctggaaggtggcaaagacacctgtgtgggtgattcagggggcccgctgatgtgtgatggtgtgctccaaggtgtcacatcatggggctacgtcccttgtggcacccccaat

SEQ ID NO: 545333 - DNA, 120 bp, Artificial Sequence
  ENSG00000167748_6 (sequence is synthesized)
aagccttctgtcgccgtcagagtgctgtcttatgtgaagtggatcgaggacaccatagcggagaactcctgaacgcccagccctgtcccctacccccagtaaaatcaaatgtgcatccaa

SEQ ID NO: 545334 - DNA, 120 bp, Artificial Sequence
  ENSG00000167748_7 (sequence is synthesized)
agttcctccacctgctggcccctggacacctctgtcaccatgtggttcctggttctgtgcctcgccctgtccctgggggggactgctctggttttctggaaccccaccccaaggatcctg

SEQ ID NO: 545335 - DNA, 120 bp, Artificial Sequence
  ENSG00000167748_8 (sequence is synthesized)
aatgccttctcagccagcgcttctgccctggcctcccccaagattgcctccaagaggaccccatatccttccagtaccctcagaccatgaaccccatccccatgagaaacgaagatccca

SEQ ID NO: 545336 - DNA, 120 bp, Artificial Sequence
  ENSG00000167748_9 (sequence is synthesized)
tccttcaccctgtccgagaaggactgccactcacgcctccctcctcctgagccccgtcccagtcctgaccgcaactgtgttctcagggccccaacctcccctcagattgccattcctggt

SEQ ID NO: 545337 - DNA, 120 bp, Artificial Sequence
  ENSG00000167748_10 (sequence is synthesized)
tcacaggaaggaccccaaaacctctcggaagcccacctctagccttaaccatagccctttcttttaccctttaaccaggaagccctgaaatctaactgtcccagccaagctggccccttc

SEQ ID NO: 545338 - DNA, 120 bp, Artificial Sequence
  ENSG00000167748_11 (sequence is synthesized)
caaccccaatgtagggaccccaagtcacccccaaactcttcagtccagatgctcttctttacctctcagacctggttccctaaagctgcatcctttcctgaacctcaaaagcccaaccca

SEQ ID NO: 545339 - DNA, 120 bp, Artificial Sequence
  ENSG00000167748_12 (sequence is synthesized)
ggtcctgtttccctagcctaggagccccttagccctccagattcttcctcagtgagcctctgatcctgtcccacccttggcgccttgatccctggtttccagaatccctttccactcccc

SEQ ID NO: 545340 - DNA, 120 bp, Artificial Sequence
  ENSG00000167748_13 (sequence is synthesized)
taacccaccacctcccatcccccagccccagaccccaaatgacctgacgcccagatgcagtgtctgctccagacactgtctcctgtctcctaccctgatccctggaggctgctctactgt

SEQ ID NO: 545341 - DNA, 120 bp, Artificial Sequence
  ENSG00000167748_14 (sequence is synthesized)
cagtccagagtcccaccccttcccaacaccccttgcccatgtccccaacctccagccctggtcctctacccgcaatgtcccttcagacccacagcccagctccctctcctagccttgtcc

SEQ ID NO: 545342 - DNA, 120 bp, Artificial Sequence
  ENSG00000167748_15 (sequence is synthesized)
gcgtcctttttcatttgtctgcttctcgctcccttccgtgttctgttccctcttcctccctcttccctgggcctgtttctcgctgtccctgtcttttatccttctcatctgcctcttttt

SEQ ID NO: 545343 - DNA, 120 bp, Artificial Sequence
  ENSG00000167748_16 (sequence is synthesized)
tgctcaccctgtttctcactgccctcccctccgcctttttcacccctctgtccttttgagctcttttttgctctgtctcttcatttgccttttgcactctcaaaatctttcatcttccca

SEQ ID NO: 545344 - DNA, 120 bp, Artificial Sequence
  ENSG00000167748_17 (sequence is synthesized)
ttcgctgtctgtatttctccataactatatctttcttcctctgtctccgcccacccacatttttctctttccctttctctctttggggaccctcccccatgctcccctgccccatcccct

SEQ ID NO: 545345 - DNA, 120 bp, Artificial Sequence
  ENSG00000167749_0 (sequence is synthesized)
atggccacagcaggaaatccctggggctggttcctggggtacctcatccttggtgtcgcaggatcgctcgtctctggtagctgcagccaaatcataaacggcgaggactgcagcccgcac

SEQ ID NO: 545346 - DNA, 120 bp, Artificial Sequence
  ENSG00000167749_1 (sequence is synthesized)
tcgcagccctggcaggcggcactggtcatggaaaacgaattgttctgctcgggcgtcctggtgcatccgcagtgggtgctgtcagccgcacactgtttccagaactcctacaccatcggg

SEQ ID NO: 545347 - DNA, 120 bp, Artificial Sequence
  ENSG00000167749_2 (sequence is synthesized)
ctgggcctgcacagtcttgaggccgaccaagagccagggagccagatggtggaggccagcctctccgtacggcacccagagtacaacagacccttgctcgctaacgacctcatgctcatc

SEQ ID NO: 545348 - DNA, 120 bp, Artificial Sequence
  ENSG00000167749_3 (sequence is synthesized)
aagttggacgaatccgtgtccgagtctgacaccatccggagcatcagcattgcttcgcagtgccctaccgcggggaactcttgcctcgtttctggctggggtctgctggcgaacggcaga

SEQ ID NO: 545349 - DNA, 120 bp, Artificial Sequence
  ENSG00000167749_4 (sequence is synthesized)
atgcctaccgtgctgcagtgcgtgaacgtgtcggtggtgtctgaggaggtctgcagtaagctctatgacccgctgtaccaccccagcatgttctgcgccggcggagggcaagaccagaag

SEQ ID NO: 545350 - DNA, 120 bp, Artificial Sequence
  ENSG00000167749_5 (sequence is synthesized)
cccctgatctgcaacgggtacttgcagggccttgtgtctttcggaaaagccccgtgtggccaagttggcgtgccaggtgtctacaccaacctctgcaaattcactgagtggatagagaaa

SEQ ID NO: 545351 - DNA, 120 bp, Artificial Sequence
  ENSG00000167749_6 (sequence is synthesized)
accgtccaggccagttaactctggggactgggaacccatgaaattgacccccaaatacatcctgcggaaggaattcaggaatatctgttcccagcccctcctccctcaggcccaggagtc

SEQ ID NO: 545352 - DNA, 120 bp, Artificial Sequence
  ENSG00000167749_7 (sequence is synthesized)
gggtccaggcccccaacccctcctccctcagactcagaggtccaggcccccaacccctccttccccagacccagaggtccaggtcccagcccctcctccctcagacccagcggtccaatg

SEQ ID NO: 545353 - DNA, 120 bp, Artificial Sequence
  ENSG00000167749_8 (sequence is synthesized)
ccacctagactctccctgtacacagtgcccccttgtggcacgttgacccaaccttaccagttggtttttcattttttgtccctttcccctagatccagaaataaagtctaagagaagcgc

SEQ ID NO: 545354 - DNA, 120 bp, Artificial Sequence
  ENSG00000167749_9 (sequence is synthesized)
ggaatgagcctggatccggggagccccagagggaagggctgggaggcgggaatcttgcttcggaaggactcagagagtcctgacttgaaatctcagcccagtgctgagtctctagtgaac

SEQ ID NO: 545355 - DNA, 120 bp, Artificial Sequence
  ENSG00000167749_10 (sequence is synthesized)
gggaaaggggagggcaggcgactcagggaagggtggagaagggggagacagagacacacagggccgcatggcgagatgcagagatggagagacacacagggagacagtgacaactagaga

SEQ ID NO: 545356 - DNA, 120 bp, Artificial Sequence
  ENSG00000167749_11 (sequence is synthesized)
gagaaactgagagaaacagagaaataaacacaggaataaagagaagcaaaggaagagagaaacagaaacagacatggggaggcagaaacacacacacatagaaatgcagttgaccttcca

SEQ ID NO: 545357 - DNA, 120 bp, Artificial Sequence
  ENSG00000167749_12 (sequence is synthesized)
acagcatggggcctgagggcggtgacctccacccaacagaaaatcctcttataacttttgactccccaaaaacctgactagaaatagcctactgttgacggggagccttaccaataacat

SEQ ID NO: 545358 - DNA, 120 bp, Artificial Sequence
  ENSG00000167751_0 (sequence is synthesized)
aaactcaccacctggccgtggacacctgtgtcagcatgtgggacctggttctctccatcgccttgtctgtggggtgcactggtgccgtgcccctcatccagtctcggattgtgggaggct

SEQ ID NO: 545359 - DNA, 120 bp, Artificial Sequence
  ENSG00000167751_1 (sequence is synthesized)
gggagtgtgagaagcattcccaaccctggcaggtggctgtgtacagtcatggatgggcacactgtgggggtgtcctggtgcacccccagtgggtgctcacagctgcccattgcctaaaga

SEQ ID NO: 545360 - DNA, 120 bp, Artificial Sequence
  ENSG00000167751_2 (sequence is synthesized)
agaatagccaggtctggctgggtcggcacaacctgtttgagcctgaagacacaggccagagggtccctgtcagccacagcttcccacacccgctctacaatatgagccttctgaagcatc

SEQ ID NO: 545361 - DNA, 120 bp, Artificial Sequence
  ENSG00000167751_3 (sequence is synthesized)
aaagccttagaccagatgaagactccagccatgacctcatgctgctccgcctgtcagagcctgccaagatcacagatgttgtgaaggtcctgggcctgcccacccaggagccagcactgg

SEQ ID NO: 545362 - DNA, 120 bp, Artificial Sequence
  ENSG00000167751_4 (sequence is synthesized)
ggaccacctgctacgcctcaggctggggcagcatcgaaccagaggagttcttgcgccccaggagtcttcagtgtgtgagcctccatctcctgtccaatgacatgtgtgctagagcttact

SEQ ID NO: 545363 - DNA, 120 bp, Artificial Sequence
  ENSG00000167751_5 (sequence is synthesized)
ctgagaaggtgacagagttcatgttgtgtgctgggctctggacaggtggtaaagacacttgtgggggtgattctgggggtccacttgtctgtaatggtgtgcttcaaggtatcacatcat

SEQ ID NO: 545364 - DNA, 120 bp, Artificial Sequence
  ENSG00000167751_6 (sequence is synthesized)
ggggccctgagccatgtgccctgcctgaaaagcctgctgtgtacaccaaggtggtgcattaccggaagtggatcaaggacaccatcgcagccaacccctgagtgcccctgtcccacccct

SEQ ID NO: 545365 - DNA, 120 bp, Artificial Sequence
  ENSG00000167751_7 (sequence is synthesized)
acctctagtaaatttaagtccacctcacgttctggcatcacttggcctttctggatgctggacacctgaagcttggaactcacctggccgaagctcgagcctcctgagtcctactgacct

SEQ ID NO: 545366 - DNA, 120 bp, Artificial Sequence
  ENSG00000167751_8 (sequence is synthesized)
gtgctttctggtgtggagtccagggctgctaggaaaaggaatgggcagacacaggtgtatgccaatgtttctgaaatgggtataatttcgtcctctccttcggaacactggctgtctctg

SEQ ID NO: 545367 - DNA, 120 bp, Artificial Sequence
  ENSG00000167751_9 (sequence is synthesized)
aagacttctcgctcagtttcagtgaggacacacacaaagacgtgggtgaccatgttgtttgtggggtgcagagatgggaggggtggggcccaccctggaagagtggacagtgacacaagg

SEQ ID NO: 545368 - DNA, 120 bp, Artificial Sequence
  ENSG00000167751_10 (sequence is synthesized)
tggacactctctacagatcactgaggataagctggagccacaatgcatgaggcacacacacagcaaggatgacgctgtaaacatagcccacgctgtcctgggggcactgggaagcctaga

SEQ ID NO: 545369 - DNA, 120 bp, Artificial Sequence
  ENSG00000167751_11 (sequence is synthesized)
gaaagctgattaattacaggaggtttgttcaggtcccccaaaccaccgtcagatttgatgatttcctagcaggacttacagaaataaagagctatcatgctgtggtttattatggtttgt

SEQ ID NO: 545370 - DNA, 120 bp, Artificial Sequence
  ENSG00000167751_12 (sequence is synthesized)
tacattgataggatacatactgaaatcagcaaacaaaacagatgtatagattagagtgtggagaaaacagaggaaaacttgcagttacgaagactggcaacttggctttactaagttttc

SEQ ID NO: 545371 - DNA, 120 bp, Artificial Sequence
  ENSG00000167751_13 (sequence is synthesized)
agactggcaggaagtcaaacctattaggctgaggaccttgtggagtgtagctgatccagctgatagaggaactagccaggtgggggcctttccctttggatggggggcatatctgacagt

SEQ ID NO: 545372 - DNA, 120 bp, Artificial Sequence
  ENSG00000167751_14 (sequence is synthesized)
tattctctccaagtggagacttacggacagcatataattctccctgcaaggatgtatgataatatgtacaaagtaattccaactgaggaagctcacctgatccttagtgtccagggtttt

SEQ ID NO: 545373 - DNA, 120 bp, Artificial Sequence
  ENSG00000167751_15 (sequence is synthesized)
tactgggggtctgtaggacgagtatggagtacttgaataattgacctgaagtcctcagacctgaggttccctagagttcaaacagatacagcatggtccagagtcccagatgtacaaaaa

SEQ ID NO: 545374 - DNA, 120 bp, Artificial Sequence
  ENSG00000167751_16 (sequence is synthesized)
cagggattcatcacaaatcccatctttagcatgaagggtctggcatggcccaaggccccaagtatatcaaggcacttgggcagaacatgccaaggaatcaaatgtcatctcccaggagtt

SEQ ID NO: 545375 - DNA, 120 bp, Artificial Sequence
  ENSG00000167751_17 (sequence is synthesized)
attcaagggtgagccctttacttgggatgtacaggctttgagcagtgcagggctgctgagtcaaccttttattgtacaggggatgagggaaagggagaggatgaggaagcccccctgggg

SEQ ID NO: 545376 - DNA, 120 bp, Artificial Sequence
  ENSG00000167751_18 (sequence is synthesized)
atttggtttggtcttgtgatcaggtggtctatggggctatccctacaaagaagaatccagaaataggggcacattgaggaatgatactgagcccaaagagcattcaatcattgttttatt

SEQ ID NO: 545377 - DNA, 120 bp, Artificial Sequence
  ENSG00000167751_19 (sequence is synthesized)
tgccttcttttcacaccattggtgagggagggattaccaccctggggttatgaagatggttgaacaccccacacatagcaccggagatatgagatcaacagtttcttagccatagagatt

SEQ ID NO: 545378 - DNA, 120 bp, Artificial Sequence
  ENSG00000167751_20 (sequence is synthesized)
cacagcccagagcaggaggacgctgcacaccatgcaggatgacatgggggatgcgctcgggattggtgtgaagaagcaaggactgttagaggcaggctttatagtaacaagacggtgggg

SEQ ID NO: 545379 - DNA, 120 bp, Artificial Sequence
  ENSG00000167751_21 (sequence is synthesized)
caaactctgatttccgtgggggaatgtcatggtcttgctttactaagttttgagactggcaggtagtgaaactcattaggctgagaaccttgtggaatgcagctgacccagctgatagag

SEQ ID NO: 545380 - DNA, 120 bp, Artificial Sequence
  ENSG00000167751_22 (sequence is synthesized)
gaagtagccaggtgggagcctttcccagtgggtgtgggacatatctggcaagattttgtggcactcctggttacagatactggggcagcaaataaaactgaatcttgttttcagacctta

SEQ ID NO: 545381 - DNA, 120 bp, Artificial Sequence
  ENSG00000167751_23 (sequence is synthesized)
agcgcgcctctcccgtcacgtcccaaccatggagctgtggacgtgcgtcccctggtggatgtggcctgcgtggtgccaggccggggcctggtgtccgataaagatcctagaaccacagga

SEQ ID NO: 545382 - DNA, 120 bp, Artificial Sequence
  ENSG00000167751_24 (sequence is synthesized)
aaccaggactgaaaggtgctagagaatggccatatgtcgctgtccatgaaatctcaaggacttctgggtggagggcacaggagcctgaacttacgggtttgccccactccactgtcctcc

SEQ ID NO: 545383 - DNA, 120 bp, Artificial Sequence
  ENSG00000167751_25 (sequence is synthesized)
tggacaggtggtaaagacacttgtggggtgagtcatccctactcccaacatctggaggggaaaggtgagtgaagaccctaattctgggctgcaatctgaaagctaaccagacatctgcct

SEQ ID NO: 545384 - DNA, 120 bp, Artificial Sequence
  ENSG00000167751_26 (sequence is synthesized)
cccctgctccccagctatagccacgccccctccccatgcctcatctgccgccctccttcccccttccctgactccctcaacacaagaggtgattctcacagcataattcacccattcctg

SEQ ID NO: 545385 - DNA, 120 bp, Artificial Sequence
  ENSG00000167751_27 (sequence is synthesized)
gtgtacgcctgggccagatggtgtagctgggagcccagatgcctgggtctgagggaagtggggccaaagaaccaggtggggtccggccacagcccagtttttctctgacccatagtcttg

SEQ ID NO: 545386 - DNA, 120 bp, Artificial Sequence
  ENSG00000167751_28 (sequence is synthesized)
acagagcaagactccatctcagaaaaaacaaacaaacaaacaaacaacaaaaaaaatcgaaaggaggggaagggagctggagagagaaagggggacgtggccctgagctgtgggccgggc

SEQ ID NO: 545387 - DNA, 120 bp, Artificial Sequence
  ENSG00000167751_29 (sequence is synthesized)
atgtgggacctggttctctccatcgccttgtctgtggggtgcactggtgagattggggggataaaggaaggggggcgggttctgactcttatgctgaagcccttttcctcccacccagtg

SEQ ID NO: 545388 - DNA, 120 bp, Artificial Sequence
  ENSG00000167751_30 (sequence is synthesized)
ccccagcctcgtcccttcagcccacagttcagcccagacaatgtgcccctgactcttccacattgcaatagtcctcatgcccacactaggtccccgctccctcccacttacctcagacct

SEQ ID NO: 545389 - DNA, 120 bp, Artificial Sequence
  ENSG00000167751_31 (sequence is synthesized)
ttctctccattgcccagccaaatccctgctcccagctgctttactaaagagcaagttcctgggcatctctgtgtttctctttatggggttcaaaacctttcaaggacctctctccatgcc

SEQ ID NO: 545390 - DNA, 120 bp, Artificial Sequence
  ENSG00000167751_32 (sequence is synthesized)
actggttccttggaccctatcactgggctgcctcctgagcccctcagtcctaccacagtctactgacttttcctattcagctgtgagcattcaaccctgtcccctggaccttgacacctg

SEQ ID NO: 545391 - DNA, 120 bp, Artificial Sequence
  ENSG00000167751_33 (sequence is synthesized)
gctccccaaccctgtcccaggaaacccagattccaccagacacttccttcttccccccgaggctatctggcctgagacaacaaatgctgcctcccaccctgagtctggcactgggacttt

SEQ ID NO: 545392 - DNA, 120 bp, Artificial Sequence
  ENSG00000167751_34 (sequence is synthesized)
ttccctaaatccgcacccttttcaaaacctcaaaaacaaaacaaaacaaaacaaagcaagaaacaactcaggcagaactgtttgcttaaccttggacatggtaaaccatccaaaaccttc

SEQ ID NO: 545393 - DNA, 120 bp, Artificial Sequence
  ENSG00000167751_35 (sequence is synthesized)
ctctcccagcaactaaacctctccactgggcacttatccttggtttctggaacctcttattctcttagaacccacagctgccaccacagtgtcccttctcccagtgtaagaccccaaatc

SEQ ID NO: 545394 - DNA, 120 bp, Artificial Sequence
  ENSG00000167751_36 (sequence is synthesized)
actccaaatgacccaacccccaacccgatgcctgcttcagatgtttcccatgtcccctactctgatctctggggtcagctccgttctcagagcatgaagcctcccgacctggtccagcca

SEQ ID NO: 545395 - DNA, 120 bp, Artificial Sequence
  ENSG00000167751_37 (sequence is synthesized)
ccaacccgctaacgcagggaatagctacagaattgccagccctcccaggaccccttgcttgtgtcctggactcccagtcctggtcctctgcccccatgtctcttcaaacccacagctcag

SEQ ID NO: 545396 - DNA, 120 bp, Artificial Sequence
  ENSG00000167751_38 (sequence is synthesized)
ctccctcccctatccaattcttttgggtctgatccccctgacccagcaccccctccgcaggtgccgtgcccctcatccagtctcggattgtgggaggctgggagtgtgagaagcattccc

SEQ ID NO: 545397 - DNA, 120 bp, Artificial Sequence
  ENSG00000167751_39 (sequence is synthesized)
tatcacccctggcttcctctctgctgtttctccttctctctctgacttcccgcatccttttctcatttgtctatttctcactcccttcctggttctgttctttctcccttcctcttcccc

SEQ ID NO: 545398 - DNA, 120 bp, Artificial Sequence
  ENSG00000167751_40 (sequence is synthesized)
atgtctatttcttgctgtctctgtctcttctttgctcatcctaattctcactgttctcccttctgtttttgtcattcctctgccattttatgctctctcttttccacttcgtttctttca

SEQ ID NO: 545399 - DNA, 120 bp, Artificial Sequence
  ENSG00000167751_41 (sequence is synthesized)
gtttctgtctctgcctctcacatgatcacactcctgttttctaactcactgtctgtatttcaccacgactatatctccccgacccctgtgcttttctcactgtttctttttcttcccttt

SEQ ID NO: 545400 - DNA, 120 bp, Artificial Sequence
  ENSG00000167751_42 (sequence is synthesized)
acaggtagagagcagcctctccctcctgcagcccccatgctggtgaggggcactggcaggaacagtggacccaacatggaaatgctggagggtgtcaggaagtgatcgggctctggggca

SEQ ID NO: 545401 - DNA, 120 bp, Artificial Sequence
  ENSG00000167751_43 (sequence is synthesized)
aacagcgggatgcttcccccagggtcacttctcaggtgaggcttcagactaaaggagagagggaaggtcctggcccaggtcgcacccggaggcagagctggggctggaccactctcccca

SEQ ID NO: 545402 - DNA, 120 bp, Artificial Sequence
  ENSG00000167751_44 (sequence is synthesized)
ctgagaaggtgacagagttcatgttgtgtgctgggctctggacaggtggtaaagacacttgtgggcataattcacccattcctgtgttgagcacatgcttactgggcacctgctacgtga

SEQ ID NO: 545403 - DNA, 120 bp, Artificial Sequence
  ENSG00000167751_45 (sequence is synthesized)
agtttctcagccacagagattcacagcctagggcaggaggacactgtacaccaggcagaatgacatgggaattgcgctcacgattggcttgaagaagcaaggactgtgggagatcacatc

SEQ ID NO: 545404 - DNA, 120 bp, Artificial Sequence
  ENSG00000167751_46 (sequence is synthesized)
agctctgggtgtgggagggggttgtccagcctccagcagcatggggagggccttggtcagcatctaggtgccaacagggcaagggcggggtcctggagaatgaaggctttatagggctcc

SEQ ID NO: 545405 - DNA, 120 bp, Artificial Sequence
  ENSG00000167751_47 (sequence is synthesized)
ggacatcctgcagaaggtaggagtgagcaaacacccgctgcaggggaggggagagccctgcggcacctgggggagcagagggagcagcacctgcccaggcctgggaggaggggccgggag

SEQ ID NO: 545406 - DNA, 120 bp, Artificial Sequence
  ENSG00000167751_48 (sequence is synthesized)
ggcgtgaggaggagcgagggggctgcatggctggagtgagggatcaggggcagggcgcgagatggcctcacacagggaagagagggcccctcctgcagggcctcacctgggccacaggag

SEQ ID NO: 545407 - DNA, 120 bp, Artificial Sequence
  ENSG00000167751_49 (sequence is synthesized)
gacactgcttttcctctgaggagtcaggagctgtggatggtgctggacagaagaaggacagggcctggctcagggtgattctgggggtccacttgtctgtaatggtgtgcttcaaggtat

SEQ ID NO: 545408 - DNA, 120 bp, Artificial Sequence
  ENSG00000167754_0 (sequence is synthesized)
aggaggaggcagtggccaggaaggcacaggcctgagaagtctgcggctgagctgggagcaaatcccccaccccctacctgggggacagggcaagtgagacctggtgagggtggctcagca

SEQ ID NO: 545409 - DNA, 120 bp, Artificial Sequence
  ENSG00000167754_1 (sequence is synthesized)
ggcagggaaggagaggtgtctgtgcgtcctgcacccacatctttctctgtcccctccttgccctgtctggaggctgctagactcctatcttctgaattctatagtgcctgggtctcagcg

SEQ ID NO: 545410 - DNA, 120 bp, Artificial Sequence
  ENSG00000167754_2 (sequence is synthesized)
cagtgccgatggtggcccgtccttgtggttcctctctacctggggaaataaggtgcagcggccatggctacagcaagacccccctggatgtgggtgctctgtgctctgatcacagccttg

SEQ ID NO: 545411 - DNA, 120 bp, Artificial Sequence
  ENSG00000167754_3 (sequence is synthesized)
cttctgggggtcacagagcatgttctcgccaacaatgatgtttcctgtgaccacccctctaacaccgtgccctctgggagcaaccaggacctgggagctggggccggggaagacgcccgg

SEQ ID NO: 545412 - DNA, 120 bp, Artificial Sequence
  ENSG00000167754_4 (sequence is synthesized)
tcggatgacagcagcagccgcatcatcaatggatccgactgcgatatgcacacccagccgtggcaggccgcgctgttgctaaggcccaaccagctctactgcggggcggtgttggtgcat

SEQ ID NO: 545413 - DNA, 120 bp, Artificial Sequence
  ENSG00000167754_5 (sequence is synthesized)
ccacagtggctgctcacggccgcccactgcaggaagaaagttttcagagtccgtctcggccactactccctgtcaccagtttatgaatctgggcagcagatgttccagggggtcaaatcc

SEQ ID NO: 545414 - DNA, 120 bp, Artificial Sequence
  ENSG00000167754_6 (sequence is synthesized)
gtcccactaaagatgtcagacccatcaacgtctcctctcattgtccctctgctgggacaaagtgcttggtgtctggctgggggacaaccaagagcccccaagtgcacttccctaaggtcc

SEQ ID NO: 545415 - DNA, 120 bp, Artificial Sequence
  ENSG00000167754_7 (sequence is synthesized)
tccagtgcttgaatatcagcgtgctaagtcagaaaaggtgcgaggatgcttacccgagacagatagatgacaccatgttctgcgccggtgacaaagcaggtagagactcctgccagggtg

SEQ ID NO: 545416 - DNA, 120 bp, Artificial Sequence
  ENSG00000167754_8 (sequence is synthesized)
attctggggggcctgtggtctgcaatggctccctgcagggactcgtgtcctggggagattacccttgtgcccggcccaacagaccgggtgtctacacgaacctctgcaagttcaccaagt

SEQ ID NO: 545417 - DNA, 120 bp, Artificial Sequence
  ENSG00000167754_9 (sequence is synthesized)
ggatccaggaaaccatccaggccaactcctgagtcatcccaggactcagcacaccggcatccccacctgctgcagggacagccctgacactcctttcagaccctcattccttcccagaga

SEQ ID NO: 545418 - DNA, 120 bp, Artificial Sequence
  ENSG00000167754_10 (sequence is synthesized)
tgttgagaatgttcatctctccagcccctgaccccatgtctcctggactcagggtctgcttcccccacattgggctgaccgtgtctctctagttgaaccctgggaacaatttccaaaact

SEQ ID NO: 545419 - DNA, 120 bp, Artificial Sequence
  ENSG00000167754_11 (sequence is synthesized)
gtccagggcgggggttgcgtctcaatctccctggggcactttcatcctcaagctcagggcccatcccttctctgcagctctgacccaaatttagtcccagaaataaactgagaagtggaa

SEQ ID NO: 545420 - DNA, 120 bp, Artificial Sequence
  ENSG00000167754_12 (sequence is synthesized)
ataactcaggcccggtgcccagagcccaggaggaggcagtggccaggaaggcacaggcctgagaagtctgcggctgagctgggagcaaatcccccaccccctacctgggggacaggtgcc

SEQ ID NO: 545421 - DNA, 120 bp, Artificial Sequence
  ENSG00000167754_13 (sequence is synthesized)
aatgtgccccagggagcagtgggtggttataactcaggcccggtgcccagagcccaggaggaggcagtggccaggaaggcacaggcctgagaagtctgcggctgagctgggagcaaatcc

SEQ ID NO: 545422 - DNA, 120 bp, Artificial Sequence
  ENSG00000167755_0 (sequence is synthesized)
agtgtggtgacacacgctgtagctgtctccccggctggctggctcgctctctcctggggacacagaggtcggcaggcagcacacagagggacctacgggcagctgttccttcccccgact

SEQ ID NO: 545423 - DNA, 120 bp, Artificial Sequence
  ENSG00000167755_1 (sequence is synthesized)
caagaatccccggagcccggaggcctgcagcaggagcggccatgaagaagctgatggtggtgctgagtctgattgctgcagcctgggcagaggagcagaataagttggtgcatggcggac

SEQ ID NO: 545424 - DNA, 120 bp, Artificial Sequence
  ENSG00000167755_2 (sequence is synthesized)
cctgcgacaagacatctcacccctaccaagctgccctctacacctcgggccacttgctctgtggtggggtccttatccatccactgtgggtcctcacagctgcccactgcaaaaaaccga

SEQ ID NO: 545425 - DNA, 120 bp, Artificial Sequence
  ENSG00000167755_3 (sequence is synthesized)
atcttcaggtcttcctggggaagcataaccttcggcaaagggagagttcccaggagcagagttctgttgtccgggctgtgatccaccctgactatgatgccgccagccatgaccaggaca

SEQ ID NO: 545426 - DNA, 120 bp, Artificial Sequence
  ENSG00000167755_4 (sequence is synthesized)
tcatgctgttgcgcctggcacgcccagccaaactctctgaactcatccagccccttcccctggagagggactgctcagccaacaccaccagctgccacatcctgggctggggcaagacag

SEQ ID NO: 545427 - DNA, 120 bp, Artificial Sequence
  ENSG00000167755_5 (sequence is synthesized)
tggggatgagaagtacgggaaggattcctgccagggtgattctgggggtccgctggtatgtggagaccacctccgaggccttgtgtcatggggtaacatcccctgtggatcaaaggagaa

SEQ ID NO: 545428 - DNA, 120 bp, Artificial Sequence
  ENSG00000167755_6 (sequence is synthesized)
gccaggagtctacaccaacgtctgcagatacacgaactggatccaaaaaaccattcaggccaagtgaccctgacatgtgacatctacctcccgacctaccaccccactggctggttccag

SEQ ID NO: 545429 - DNA, 120 bp, Artificial Sequence
  ENSG00000167755_7 (sequence is synthesized)
aacgtctctcacctagaccttgcctcccctcctctcctgcccagctctgaccctgatgcttaataaacgcagcgacgtgagggtcctgattctccctggttttaccccagctccatcctt

SEQ ID NO: 545430 - DNA, 120 bp, Artificial Sequence
  ENSG00000167755_8 (sequence is synthesized)
gcatcactggggaggacgtgatgagtgaggacttgggtcctcggtcttacccccaccactaagagaatacaggaaaatcccttctaggcatctcctctccccaacccttccacacgtttg

SEQ ID NO: 545431 - DNA, 120 bp, Artificial Sequence
  ENSG00000167755_9 (sequence is synthesized)
atttcttcctgcagaggcccagccacgtgtctggaatcccagctccgctgcttactgtcggtgtccccttgggatgtacctttcttcactgcagatttctcacctgtaagatgaagataa

SEQ ID NO: 545432 - DNA, 120 bp, Artificial Sequence
  ENSG00000167755_10 (sequence is synthesized)
ggatgatacagtctccataaggcagtggctgttggaaagatttaaggtttcacacctatgacatacatggaatagcacctgggccaccatgcactcaataaagaatgaattttattatga

SEQ ID NO: 545433 - DNA, 120 bp, Artificial Sequence
  ENSG00000167755_11 (sequence is synthesized)
agacccaggagtccaggccctcactgcactcagggaccagtgctcccttccctggaggcctggtcaggggtcaccaagagcagagcgtgggggcgggaggaatgtgtgtgggaggcctgg

SEQ ID NO: 545434 - DNA, 120 bp, Artificial Sequence
  ENSG00000167755_12 (sequence is synthesized)
gtaaggaggaaaagggtgtagccagtctcctggctcagggacctgagagacaggggttaaaaggacgttccagaagcatctggggacagaaccagcctcttccagggaggcctgggagct

SEQ ID NO: 545435 - DNA, 120 bp, Artificial Sequence
  ENSG00000167755_13 (sequence is synthesized)
gggggtgtgtgtctggcagtccctgcagccctgggctctgcggcccctgcgtcctccgcttggctctgccactgcatctgagtgtcttctctcctcacggctccccgcatttctaactct

SEQ ID NO: 545436 - DNA, 120 bp, Artificial Sequence
  ENSG00000167757_0 (sequence is synthesized)
agggtggagtgcaggcttggaaagcaggagagctcagcctacgtctttaatcctcctgcccaccccttggattctgtctccactgggactcaagagaggaacctggggcccgctcctccc

SEQ ID NO: 545437 - DNA, 120 bp, Artificial Sequence
  ENSG00000167757_1 (sequence is synthesized)
ccctccaggccatgaggattctgcagttaatcctgcttgctctggcaacagggcttgtagggggagagaccaggatcatcaaggggttcgagtgcaagcctcactcccagccctggcagg

SEQ ID NO: 545438 - DNA, 120 bp, Artificial Sequence
  ENSG00000167757_2 (sequence is synthesized)
cagccctgttcgagaagacgcggctactctgtggggcgacgctcatcgcccccagatggctcctgacagcagcccactgcctcaagccccgctacatagttcacctggggcagcacaacc

SEQ ID NO: 545439 - DNA, 120 bp, Artificial Sequence
  ENSG00000167757_3 (sequence is synthesized)
tccagaaggaggagggctgtgagcagacccggacagccactgagtccttcccccaccccggcttcaacaacagcctccccaacaaagaccaccgcaatgacatcatgctggtgaagatgg

SEQ ID NO: 545440 - DNA, 120 bp, Artificial Sequence
  ENSG00000167757_4 (sequence is synthesized)
cctgcctcacaccttgcgatgcgccaacatcaccatcattgagcaccagaagtgtgagaacgcctaccccggcaacatcacagacaccatggtgtgtgccagcgtgcaggaagggggcaa

SEQ ID NO: 545441 - DNA, 120 bp, Artificial Sequence
  ENSG00000167757_5 (sequence is synthesized)
ggactcctgccagggtgactccgggggccctctggtctgtaaccagtctcttcaaggcattatctcctggggccaggatccgtgtgcgatcacccgaaagcctggtgtctacacgaaagt

SEQ ID NO: 545442 - DNA, 120 bp, Artificial Sequence
  ENSG00000167757_6 (sequence is synthesized)
ctgcaaatatgtggactggatccaggagacgatgaagaacaattagactggacccacccaccacagcccatcaccctccatttccacttggtgtttggttcctgttcactctgttaataa

SEQ ID NO: 545443 - DNA, 120 bp, Artificial Sequence
  ENSG00000167757_7 (sequence is synthesized)
gaaaccctaagccaagaccctctacgaacattctttgggcctcctggactacaggagatgctgtcacttaataatcaacctggggttcgaaatcagtgagacctggattcaaattctgcc

SEQ ID NO: 545444 - DNA, 120 bp, Artificial Sequence
  ENSG00000167757_8 (sequence is synthesized)
ttgaaatattgtgactctgggaatgacaacacctggtttgttctctgttgtatccccagccccaaagacagctcctggccatatatcaaggtttcaataaatatttgctaaatgagtgaa

SEQ ID NO: 545445 - DNA, 120 bp, Artificial Sequence
  ENSG00000167757_9 (sequence is synthesized)
agtcatagtagtaggaagaggaagcacctaggtttgaggccagggctggctgctgtcagaacctaggccctcccctgccttgctccacacctggtcaggggagagaggggaggaaagcca

SEQ ID NO: 545446 - DNA, 120 bp, Artificial Sequence
  ENSG00000167757_10 (sequence is synthesized)
agggaagggacctaactgaaaacaaacaagctgggagaagcaggaatctgcgctcgggttccgcagatgcagaggttgaggtggctgcgggactggaagtcatcgggcagaggtctcaca

SEQ ID NO: 545447 - DNA, 120 bp, Artificial Sequence
  ENSG00000167757_11 (sequence is synthesized)
ggagcggcctaggggaggccaggggcccacctgggctggggctgtggagagggagtggctgggacgggaggaaaaagagagacggagattagatggaagaagagggatttcaagacaaat

SEQ ID NO: 545448 - DNA, 120 bp, Artificial Sequence
  ENSG00000167757_12 (sequence is synthesized)
tgccagagatgcagtcagagagactgactgagagacacaaagatagaaggaattagagaaagggccacacagagccagacagagagagaagagtggagatggagacagggacgaggacag

SEQ ID NO: 545449 - DNA, 120 bp, Artificial Sequence
  ENSG00000167757_13 (sequence is synthesized)
agaaaggcagacagacacatagggacagaaagagaaaaatcacacaaagtcagaattactgaatgacagggaatgacacatagaacgagacacagattcagagactcagggcagggaaag

SEQ ID NO: 545450 - DNA, 120 bp, Artificial Sequence
  ENSG00000167757_14 (sequence is synthesized)
gaaggctgcagacagacagacagacagagggaggctgagacacagggagaagaggggcttggagaggtggcacaggcaggcagccagtgcctcagaggcctccggggagggccctcacac

SEQ ID NO: 545451 - DNA, 120 bp, Artificial Sequence
  ENSG00000167757_15 (sequence is synthesized)
gaggccagtcatcctgggcccgcccagggccgcccccctgccagcccgcctgcctggtgcctggcacctggcgctccaacccagcctacctgctgtagctgccgccactgccgtctccgc

SEQ ID NO: 545452 - DNA, 120 bp, Artificial Sequence
  ENSG00000167757_16 (sequence is synthesized)
catcacctgggctgtgcgacccctcaccctctcctcacgctgtgtcactgctggcaccagctgcctcatttccggctggggcagcacgtccagcccccagtgtaggagcaccagagggga

SEQ ID NO: 545453 - DNA, 120 bp, Artificial Sequence
  ENSG00000167757_17 (sequence is synthesized)
acctggcagggggtggtgaggagggagtggtcaggattgtggaagggttcagggcatcagagatgcggttcacagtgacgatgtgggataagttgagaggatgtgtggaaaacgtcagga

SEQ ID NO: 545454 - DNA, 120 bp, Artificial Sequence
  ENSG00000167757_18 (sequence is synthesized)
cacctctctgaatcttgattttcttctctataaaatgagaatgattatacccacctgtcaggattggattagagataatgtatatcaagcaactgacataaatcatttattggatagcag

SEQ ID NO: 545455 - DNA, 67 bp, Artificial Sequence
  ENSG00000167757_19 (sequence is synthesized)
cgtggtgaaatcccatctctactaaaaatgtgaaaattagttgggcgtggtaaacttgggagacgga

SEQ ID NO: 545456 - DNA, 120 bp, Artificial Sequence
  ENSG00000167757_20 (sequence is synthesized)
ctctgtctcgaaaaaaaaaaaaaaaaagctggatagcattgctgttgctattgttacaagaagagaggtgagttggctgcgtctaaggacagggattcccccaggggcgggatcacagca

SEQ ID NO: 545457 - DNA, 120 bp, Artificial Sequence
  ENSG00000167757_21 (sequence is synthesized)
aacccagcctacctgctgtagctgccgccactgccgtctccgccgccactgggcccccagagccccagccccagagccttgatgcggccccatgtccctccttgttcccagaggaacctg

SEQ ID NO: 545458 - DNA, 120 bp, Artificial Sequence
  ENSG00000167759_0 (sequence is synthesized)
gccctcccctcccgatcccggagccatgtggcccctggccctagtgatcgcctccctgaccttggccttgtcaggaggtgtctcccaggagtcttccaaggttctcaacaccaatgggac

SEQ ID NO: 545459 - DNA, 120 bp, Artificial Sequence
  ENSG00000167759_1 (sequence is synthesized)
cagtgggtttctcccaggtggctacacctgcttcccccactctcagccctggcaggctgccctactagtgcaagggcggctactctgtgggggagtcctggtccaccccaaatgggtcct

SEQ ID NO: 545460 - DNA, 120 bp, Artificial Sequence
  ENSG00000167759_2 (sequence is synthesized)
cactgccgcacactgtctaaaggaggggctcaaagtttacctaggcaagcacgccctagggcgtgtggaagctggtgagcaggtgagggaagttgtccactctatcccccaccctgaata

SEQ ID NO: 545461 - DNA, 120 bp, Artificial Sequence
  ENSG00000167759_3 (sequence is synthesized)
ccggagaagccccacccacctgaaccacgaccatgacatcatgcttctggagctgcagtccccggtccagctcacaggctacatccaaaccctgcccctttcccacaacaaccgcctaac

SEQ ID NO: 545462 - DNA, 120 bp, Artificial Sequence
  ENSG00000167759_4 (sequence is synthesized)
ccctggcaccacctgtcgggtgtctggctggggcaccaccaccagcccccaggtgaattaccccaaaactctacaatgtgccaacatccaacttcgctcagatgaggagtgtcgtcaagt

SEQ ID NO: 545463 - DNA, 120 bp, Artificial Sequence
  ENSG00000167759_5 (sequence is synthesized)
ctacccaggaaagatcactgacaacatgttgtgtgccggcacaaaagagggtggcaaagactcctgtgagggtgactctgggggccccctggtctgtaacagaacactgtatggcatcgt

SEQ ID NO: 545464 - DNA, 120 bp, Artificial Sequence
  ENSG00000167759_6 (sequence is synthesized)
ctcctggggagacttcccatgtgggcaacctgaccggcctggtgtctacacccgtgtctcaagatacgtcctgtggatccgtgaaacaatccgaaaatatgaaacccagcagcaaaaatg

SEQ ID NO: 545465 - DNA, 120 bp, Artificial Sequence
  ENSG00000167759_7 (sequence is synthesized)
agttgagaaatgtaccggcttccatcctgtcaccatgacttcctcacatggtctgcttagcccttctctgctccttattcccagtgttccatttgaaccagtgatccatgtcctgaaaaa

SEQ ID NO: 545466 - DNA, 120 bp, Artificial Sequence
  ENSG00000167759_8 (sequence is synthesized)
tgctcaatctcagctaacattccatgtttcagaagcattcaggcactgccaggcttgcagtctcccagatgttgcatccctgaaacatctcaacaacctgaatgtcccaacccagacaat

SEQ ID NO: 545467 - DNA, 120 bp, Artificial Sequence
  ENSG00000167759_9 (sequence is synthesized)
ggcccaggtctctcaacttcatcagtgtggcttctatgagcccagatcaccacctgaacgttctgtctgtggcacattcttaaatatttccatcagcccatctcaacaatatatgtccta

SEQ ID NO: 545468 - DNA, 120 bp, Artificial Sequence
  ENSG00000167759_10 (sequence is synthesized)
taaatggaccatccttgacaacatcctctaactcttcaagtatttattcaatgccagtatcctagaccttctattttttgcactcaagaaggctctagactcccatgatagttcatcctg

SEQ ID NO: 545469 - DNA, 120 bp, Artificial Sequence
  ENSG00000167759_11 (sequence is synthesized)
aaaatattctcttatgcccacaatcttctgccctgacaacattctgtgtacctctgtgactcaccacagctaacattggatcctcagaatatttcattctcacactgttatgggtgtctc

SEQ ID NO: 545470 - DNA, 120 bp, Artificial Sequence
  ENSG00000167759_12 (sequence is synthesized)
agaagtcccaacccaacctacatcccacattcttccaataccccacctctgccaacattccctctctgaatcaatggcaccctagtctctagagttatagggttcagtataccaaagggt

SEQ ID NO: 545471 - DNA, 120 bp, Artificial Sequence
  ENSG00000167759_13 (sequence is synthesized)
cttcttgcctgaactttattgtctaccaaatattccgtcttgtatcccctccatgaacatccttggtcagtgtcccttgctgttacatctttgtgcatgaccctaaaatgtagtgcaaat

SEQ ID NO: 545472 - DNA, 120 bp, Artificial Sequence
  ENSG00000167759_14 (sequence is synthesized)
ccttgctttggacaagttataaaactcacagtctctgtgctttctcatctgtaaaatgggttcataattttttttaattgtaacattattacaagaataaatgtcaagcatttatcacta

SEQ ID NO: 545473 - DNA, 120 bp, Artificial Sequence
  ENSG00000167759_15 (sequence is synthesized)
ggcagagatgggagggaaggtctgaggtaggttcctttatatataaaaatataaataagtaaataaatatatatatttaaagttagctgtatcctttatataaatataaattcatgaata

SEQ ID NO: 545474 - DNA, 120 bp, Artificial Sequence
  ENSG00000167759_16 (sequence is synthesized)
cagctcagagctcttcctgcttgtccctgggtgacctggtttcccggctgaggttggccctccgaccccagacccttcacctcccaaaataccctcgcagcagcccctcccgcgttcaag

SEQ ID NO: 545475 - DNA, 120 bp, Artificial Sequence
  ENSG00000167759_17 (sequence is synthesized)
gcttcctgtcctctctggaaagctgaaagacatgggttcgcgtcctgacgctgccgctttgagccagtagcctagcagctgctttgtgcctaaattgttttcatctggaaaatgggctta

SEQ ID NO: 545476 - DNA, 120 bp, Artificial Sequence
  ENSG00000167759_18 (sequence is synthesized)
tcaggccccgcccgccctgccctcccctcccgatcccggagccatgtggcccctggccctagtgatcgcctccctgaccttggccttgtcaggaggtgaagacttcaaggagccaagcca

SEQ ID NO: 545477 - DNA, 120 bp, Artificial Sequence
  ENSG00000167759_19 (sequence is synthesized)
ggggcctagagatgtaatggcggcttcccgaccagaggccttcccaaagggcttgacccttgagccaagacctgaaaaaggagggatctgtgggtgcctggcacctggcaccatccttgg

SEQ ID NO: 545478 - DNA, 120 bp, Artificial Sequence
  ENSG00000167759_20 (sequence is synthesized)
cctgaaggtggggtggcttttctcctctggcgacactccctggattcatgcccgtgccactcctgagtgccacaccctaggctaggagacccacacgctacgccttgtggagtcctcaac

SEQ ID NO: 545479 - DNA, 120 bp, Artificial Sequence
  ENSG00000167766_0 (sequence is synthesized)
agacctggcttctgtactgcgcgcgcacatgcgcgcaaacccggaagcggattatgtggagtgaaagttacaccgtggcggattgacttctaaggactcttggtacatgaggaagaaacc

SEQ ID NO: 545480 - DNA, 120 bp, Artificial Sequence
  ENSG00000167766_1 (sequence is synthesized)
cggaaggggaagaggaaagcaaaggcgtcaggaatggttcttcctcaggtattttttctaaatgtgagatcaaggaattaccaccaaaaaaggagagtaatacaggagaaatattccaga

SEQ ID NO: 545481 - DNA, 120 bp, Artificial Sequence
  ENSG00000167766_2 (sequence is synthesized)
cagtaatgttggaaagacatgaaagccacgacatacaagatttttgcttcagagaaacccagaaaaatgtacatgactctcagtgtctgtggaaacatgattgaagacattataagcgag

SEQ ID NO: 545482 - DNA, 120 bp, Artificial Sequence
  ENSG00000167766_3 (sequence is synthesized)
tgcgtgtgacctataaggaaagtctcattggtagaagagacatgcatgggagaaaggatgatgcacaaaagcagcctgttaaaaatcagcttggattaaacccgcagtcacatctaccag

SEQ ID NO: 545483 - DNA, 120 bp, Artificial Sequence
  ENSG00000167766_4 (sequence is synthesized)
aactgcagctatttcaagctgaagggaaaatatataaatatgatcacatggaaaaatctgtcaacagtagttccttagtttccccaccccaacgtatttcttctactgtcaaaacccaca

SEQ ID NO: 545484 - DNA, 120 bp, Artificial Sequence
  ENSG00000167766_5 (sequence is synthesized)
tttctcatacatatgaatgtaattttgtggattcattattcacacaaaaagagaaagcaaatattgggacagaacactacaaatgtagtgagcgtggcaaggcctttcatcaaggcttac

SEQ ID NO: 545485 - DNA, 120 bp, Artificial Sequence
  ENSG00000167766_6 (sequence is synthesized)
attttactatacatcaaataatccatactaaagagacgcaatttaaatgtgatatatgtggcaagatcttcaataaaaaatcaaaccttgcaagtcatcaaagaattcatactggagaga

SEQ ID NO: 545486 - DNA, 120 bp, Artificial Sequence
  ENSG00000167766_7 (sequence is synthesized)
agccatataaatgtaatgaatgtggcaaggtcttccataatatgtcacaccttgcacagcatcgcaggattcatactggagagaaaccatataaatgtaatgaatgtggcaaggtcttta

SEQ ID NO: 545487 - DNA, 120 bp, Artificial Sequence
  ENSG00000167766_8 (sequence is synthesized)
atcaaatttcacaccttgcacaacatcaaagaattcataccggagagaaaccttataaatgtaatgaatgtggaaaggtcttccatcaaatttcacaccttgcacaacatcggacaattc

SEQ ID NO: 545488 - DNA, 120 bp, Artificial Sequence
  ENSG00000167766_9 (sequence is synthesized)
atactggagaaaaaccttacgaatgtaacaaatgtggcaaggtgttcagtcgcaattcctaccttgtacaacatctgatcattcatactggagagaaaccttacagatgtaatgtatgtg

SEQ ID NO: 545489 - DNA, 69 bp, Artificial Sequence
  ENSG00000167766_10 (sequence is synthesized)
cacttcttcagtcacaagtcatccctagtaaatcactggagaatccacactggagagaaaccttacaaa

SEQ ID NO: 545490 - DNA, 120 bp, Artificial Sequence
  ENSG00000167766_11 (sequence is synthesized)
caaatgtaatgaatgtggcaaggtcttcagtcgcaattcataccttgcccaacatctgataattcatgccggtgagaaaccttataagtgtgatgaatgtgacaaagcattcagtcaaaa

SEQ ID NO: 545491 - DNA, 120 bp, Artificial Sequence
  ENSG00000167766_12 (sequence is synthesized)
taagtgtgatgaatgtgacaaagcattcagtcaaaattcacatcttgtacaacatcacagaatccatactggagagaaaccttacaaatgtgatgaatgtggcaaagtcttcagtcaaaa

SEQ ID NO: 545492 - DNA, 120 bp, Artificial Sequence
  ENSG00000167766_13 (sequence is synthesized)
ttcataccttgcatatcattggagaattcatactggagaaaaagcttataaatgtaatgaatgtgggaaggtcttcggtctaaactcatccctagcacatcatcggaaaattcacactgg

SEQ ID NO: 545493 - DNA, 120 bp, Artificial Sequence
  ENSG00000167766_14 (sequence is synthesized)
agagaaacctttcaaatgtaatgaatgtggcaaagcttttagtatgcgttcaagcctcactaatcatcatgcgatccacactggagagaaacatttcaaatgtaatgaatgtggcaaact

SEQ ID NO: 545494 - DNA, 120 bp, Artificial Sequence
  ENSG00000167766_15 (sequence is synthesized)
cttccgcgacaattcatatcttgtacgtcatcagagatttcatgccggaaagaaatctaacacatgtaattaatgtggcagagtgttcagttagcattaaagccttgtaagacatacaat

SEQ ID NO: 545495 - DNA, 120 bp, Artificial Sequence
  ENSG00000167766_16 (sequence is synthesized)
aatttatactggagaaaaactttgcaagtataatgaatgtagcagagcctttagtttttgttcaaggcttaataaccgttagctagaccatagaggacagaaactttactaatgtactga

SEQ ID NO: 545496 - DNA, 120 bp, Artificial Sequence
  ENSG00000167766_17 (sequence is synthesized)
atgtggcaaggtcttaaggtaaaatctgagaccaggattcttcaaagaattcttgctggtgagaaacctaacaaatgtaatgaatgtggcaaggtcttctggcacaattctcacattgta

SEQ ID NO: 545497 - DNA, 120 bp, Artificial Sequence
  ENSG00000167766_18 (sequence is synthesized)
caatattgcaaaaattcatgcttgagagaaacaaaaacactgagagtgggaaaccattatgacttcaaacattcatcaacatcagagaatccatactaaagagcatttataataattata

SEQ ID NO: 545498 - DNA, 120 bp, Artificial Sequence
  ENSG00000167766_19 (sequence is synthesized)
tgtgatagagattttccgcaggccaaagtctcactaggcatcaaaaacttttttgatgaaaccatacaaatgtaacgtgcatgcttaagcttttacccaggcatcaaaaccggaacatca

SEQ ID NO: 545499 - DNA, 120 bp, Artificial Sequence
  ENSG00000167766_20 (sequence is synthesized)
cagggtttatactggagagtaactacacaaagataatgtaataagcctttcagtgtaatattcatgattttgtcgtgagagatccactcaataaaaaccaggcaaatgtagtgaatctgg

SEQ ID NO: 545500 - DNA, 83 bp, Artificial Sequence
  ENSG00000167766_21 (sequence is synthesized)
gattgacttctaaggactcttggtacatgaggaagaaacccggaaggggaagaggaaagcaaaggcgtcaggaatggttcttc

SEQ ID NO: 545501 - DNA, 120 bp, Artificial Sequence
  ENSG00000167766_22 (sequence is synthesized)
gtgcttttgattcagtagttctgggaagagagctcagtgtccacatattacagtgctctttaaagattcagaaggaggcagtcagtggaggaatttgtgagatattttcctaagtccatc

SEQ ID NO: 545502 - DNA, 120 bp, Artificial Sequence
  ENSG00000167766_23 (sequence is synthesized)
tgtaatgtcttctttcctacagaaacatagggctggggatctagaaaacttccaacatgtcatgtttcctactttttataagcaggagtctctttctaacctgttggagcaaggcaaaga

SEQ ID NO: 545503 - DNA, 79 bp, Artificial Sequence
  ENSG00000167766_24 (sequence is synthesized)
agcaggagtctctttctaacctgttggagcaaggcaaagagccctggactgtgtagcatgaagtgaaaataagatgggt

SEQ ID NO: 545504 - DNA, 120 bp, Artificial Sequence
  ENSG00000167766_25 (sequence is synthesized)
cttcttaacatattaatctttgtatttctgaccacctcaatatccacagtactcagtccccatgctactctcaccatgtaaggaaagacacttgcttatctgtaggacggctttctcaga

SEQ ID NO: 545505 - DNA, 120 bp, Artificial Sequence
  ENSG00000167766_26 (sequence is synthesized)
acacagcctaaaccgatgtctgctctgtacgatggtggacataccgctgtctaggaaggattaccaagtgacatggtcagcaacacaaccccgttcttgtagctcccttgaaatgattcc

SEQ ID NO: 545506 - DNA, 120 bp, Artificial Sequence
  ENSG00000167766_27 (sequence is synthesized)
ccccgttcttgtagctcccttgaaatgattcctttctatgcatctatttgccatgtcgtgtcgtgttgtgcaggtttgtcgtgtgggtatatgtgtgccgtggtggtttgctgcacccat

SEQ ID NO: 545507 - DNA, 120 bp, Artificial Sequence
  ENSG00000167766_28 (sequence is synthesized)
cattaggtatctttcccaatgttctccctccccttgccccctaccccctgataggccctgctctatgttgcttccctccctgtgaccatgtgttctaatcgttcaactcccacttatgag

SEQ ID NO: 545508 - DNA, 75 bp, Artificial Sequence
  ENSG00000167766_29 (sequence is synthesized)
cacaatctcggctcaccaagaagttgctggaattacaggtattttttctaaatgtgagatcaaggaattaccacc

SEQ ID NO: 545509 - DNA, 120 bp, Artificial Sequence
  ENSG00000167766_30 (sequence is synthesized)
ggcttctgtactgcgcgcgcacatgcgcgcaaacccggaagcggattatgtggagtgaaagttacaccgtggcggaatggggtgtattgattctgagcaataaacaacatatttttaaca

SEQ ID NO: 545510 - DNA, 120 bp, Artificial Sequence
  ENSG00000167766_31 (sequence is synthesized)
aggagaggggtacaaaatgaggagcagaatgccaggtaaaaagaaaagaaaacaagagctagagagagaaggggagaatgagagatatgtacacaattagggagggaagcacagtaatga

SEQ ID NO: 545511 - DNA, 90 bp, Artificial Sequence
  ENSG00000167766_32 (sequence is synthesized)
cgcctgtaatcccagcactttaggagactgaggcaagaagattgcttgagtacaggagttcgagtctagctcaaaaaaaaaaaaaaacaa

SEQ ID NO: 545512 - DNA, 120 bp, Artificial Sequence
  ENSG00000167766_33 (sequence is synthesized)
catctctaccaaaaaaaaaaaaaaacaaccgggcatgatagtgtgcacctgtaatcccagctactctgaaggccgaggcagaaggatcacttgaacccaggaggtccaggctgcagtgag

SEQ ID NO: 545513 - DNA, 120 bp, Artificial Sequence
  ENSG00000167766_34 (sequence is synthesized)
gcctggtcaacagagcaagaccctgtctcaaaagaaaaaaaggggcggaggactttgggtttagatgagtgggtgagttcattggatacgattagttgtgacatttgacttctttgtata

SEQ ID NO: 545514 - DNA, 120 bp, Artificial Sequence
  ENSG00000167766_35 (sequence is synthesized)
tgtgacatttgacttctttgtatataatctagtaacttaaaactgcttaaattatacagatgagattgagaattttaagaatcctatctataagacatgtacattctatgaatgttggcc

SEQ ID NO: 545515 - DNA, 120 bp, Artificial Sequence
  ENSG00000167766_36 (sequence is synthesized)
tcagaggttagcttccacttggaatccctattcagctacagtggagtgacttattcacttgtgagtcactctgttcccttttcccagagtggggtagggagtggggcagtgaagtgagaa

SEQ ID NO: 545516 - DNA, 120 bp, Artificial Sequence
  ENSG00000167766_37 (sequence is synthesized)
aaaaatccctttctgttaacacataatttttaacttaattaattaactaacattaagagacagggtctggccaattgcctaggctggaatgcagtggcatgatctttaactgcagcctgg

SEQ ID NO: 545517 - DNA, 120 bp, Artificial Sequence
  ENSG00000167766_38 (sequence is synthesized)
actgcagcctggtcctcctgggctcaagtaatcctcctacgtcagcttcctaagtagctgggaccacagtgatgagccaccaagaagcccggctagttttctttttctttcttttttttt

SEQ ID NO: 545518 - DNA, 120 bp, Artificial Sequence
  ENSG00000167766_39 (sequence is synthesized)
cgaggtttcactgtgtttcccaggctagtctcaaaatcctgggctcaaagtatcctcctgccttggccgcccagagtactgagattacaggaaagagccaccgcacgtggtctacatagt

SEQ ID NO: 545519 - DNA, 87 bp, Artificial Sequence
  ENSG00000167766_40 (sequence is synthesized)
cacaatctcagcttcccagattcatgcgattctcttgcttcagcctcccaactagctgggattacagacgcccaccaagcccagcta

SEQ ID NO: 545520 - DNA, 82 bp, Artificial Sequence
  ENSG00000167766_41 (sequence is synthesized)
agcccaggctactctcgaactcctgacgtcaaacaatctgcccaccttggcctttcagagtgctagtattacaggcatgagc

SEQ ID NO: 545521 - DNA, 120 bp, Artificial Sequence
  ENSG00000167766_42 (sequence is synthesized)
caccttggcctttcagagtgctagtattacaggcatgagccactgtggccagcccaatttttgtatttctagtagagggtttcaacatgttggcaggctggtctctaattcctgagctta

SEQ ID NO: 545522 - DNA, 120 bp, Artificial Sequence
  ENSG00000167766_43 (sequence is synthesized)
agcgattctgtctcctcagcttcctaagtagctgggaacatagacacacagacgtgtaccttcatgcctggctatgtttttgtatttttggcaaagatggggtttcaccatgttgcccag

SEQ ID NO: 545523 - DNA, 85 bp, Artificial Sequence
  ENSG00000167766_44 (sequence is synthesized)
cagcctcccaggtttctgcatggggtttggtcagggctgggtctgcgccctgaagaggagctcattccagcccagctccccactg

SEQ ID NO: 545524 - DNA, 120 bp, Artificial Sequence
  ENSG00000167766_45 (sequence is synthesized)
cgccctgaagaggagctcattccagcccagctccccactgctgcagcgtgtgtggactcctccagaagggtgtggtgtgggcttctccagaagggtgcgggagttttcctgtaggagttt

SEQ ID NO: 545525 - DNA, 120 bp, Artificial Sequence
  ENSG00000167766_46 (sequence is synthesized)
atcgtctctggtgcagtgggcagcagaggggaccatatttcctcagggtgaggtctcctttgtatgtgttgttatgttacaggaatggggtgtattgattctgagcaataaacaacatat

SEQ ID NO: 545526 - DNA, 120 bp, Artificial Sequence
  ENSG00000167766_47 (sequence is synthesized)
agattctcgcaaatctggaagcggatcgcgtggagtgacggtcacaccgcggcgaattaatttccaaagactcatgttacatgagaaagccaccaagaagaccaaagaaaaggagacaag

SEQ ID NO: 545527 - DNA, 120 bp, Artificial Sequence
  ENSG00000167766_48 (sequence is synthesized)
gatggctcttcctcagggatgcttgactttcagggatgtggctatagaattctctttggaggagtggaaatgcctgaaccctgcacagagggctttatacagggccgtgatgttggagaa

SEQ ID NO: 545528 - DNA, 120 bp, Artificial Sequence
  ENSG00000167766_49 (sequence is synthesized)
gtcatcacattggagatttttgcttcccagaaatcaagaaagatattcatgactttgagtttcagtggcaagaaattaaaagaaatggccatgaagcacccatgacaaaaatcaaaaagt

SEQ ID NO: 545529 - DNA, 120 bp, Artificial Sequence
  ENSG00000167766_50 (sequence is synthesized)
tgactggtagtacagaccgacgtgatcaaaggcatgctggaaacaagcctattaaagatcagcttggatcaagcttttattcacatctgcctgaactgcacgaatttcagactgaaggga

SEQ ID NO: 545530 - DNA, 120 bp, Artificial Sequence
  ENSG00000167766_51 (sequence is synthesized)
aacctggtctccctgggtgaggataacttccctccagaagtggggatgttcccttgtgtatctttgcattttctcttgtttctcttgggagttgcatccttgcttgactaaaatggaagc

SEQ ID NO: 545531 - DNA, 120 bp, Artificial Sequence
  ENSG00000167766_52 (sequence is synthesized)
cgtattgattttgaaatgaaaagcttcatgatgtagcatctggactttcactgtccccttttttagatgttctgcgttcttcatgatagctcagtgggggttccagaagtaaagaaggct

SEQ ID NO: 545532 - DNA, 120 bp, Artificial Sequence
  ENSG00000167766_53 (sequence is synthesized)
aaatctggaagcggatcgcgtggagtgacggtcacaccgcggcgggtttctatgatgacaggatggtcctaagtcttcacacatcagggccacagccccaacctcacaggaaacagaatt

SEQ ID NO: 545533 - DNA, 120 bp, Artificial Sequence
  ENSG00000167766_54 (sequence is synthesized)
taggaacctggtctccctggtactcagtccccatgctactctcaccatgtaaggaaagacacttgcttatctgtaggacggctttctcagaacacagcctaaaccgatgtctgctctgta

SEQ ID NO: 545534 - DNA, 72 bp, Artificial Sequence
  ENSG00000167766_55 (sequence is synthesized)
tttgggaggccaaagcttgtggatcacttcaggtcaggagttcgatactagcctcaccaacatggcgaaacg

SEQ ID NO: 545535 - DNA, 120 bp, Artificial Sequence
  ENSG00000167766_56 (sequence is synthesized)
ggtgaggaaaatgtccctcctgatgtgaggaatctgcccttgtctatcttggctcttcctggttttgtattctcttttgtgattttgccgcatacatgcttttgatgtacatgtcattgt

SEQ ID NO: 545536 - DNA, 120 bp, Artificial Sequence
  ENSG00000167766_57 (sequence is synthesized)
tgactaatagaattgaacgtcatcctgctctaagcagagatgcccctggtagccctgagcagaattgtcagggtggcccaggagatgagctagaaagcatgacagtgactgacaagtgtt

SEQ ID NO: 545537 - DNA, 87 bp, Artificial Sequence
  ENSG00000167766_58 (sequence is synthesized)
ttgttttgttttttgagacagagtctccctctcttgctcaggctggagtgcactgttcattcaagcaattctcatacctcagcctcc

SEQ ID NO: 545538 - DNA, 78 bp, Artificial Sequence
  ENSG00000167766_59 (sequence is synthesized)
agcaattctcatacctcagcctcccaacctaactggaattacagatgcaagtaatcaccatgttggccaggctggtct

SEQ ID NO: 545539 - DNA, 120 bp, Artificial Sequence
  ENSG00000167766_60 (sequence is synthesized)
caaactccttgtctcaagcaatctgcccacctcagcctctagccaagtgttgggattacaaacctgagccaccacccttggccttttgttctggtttttaaggagcatcacagaagcatc

SEQ ID NO: 545540 - DNA, 120 bp, Artificial Sequence
  ENSG00000167767_0 (sequence is synthesized)
agtccccagcccgccccagctgtgaccagagcaaccagagcctgccacccgacgcaaccccaggctcactcgctcacccccctgggccctcctgcttccggccgggggcaccatggcctg

SEQ ID NO: 545541 - DNA, 120 bp, Artificial Sequence
  ENSG00000167767_1 (sequence is synthesized)
ccgctcctgcgtggttggcttcagcagcctcagcagctgtgaggtgaccccggtgggcagcccccggcctggaacctcaggatgggacagctgcagggcccccgggccgggcttcagctc

SEQ ID NO: 545542 - DNA, 120 bp, Artificial Sequence
  ENSG00000167767_2 (sequence is synthesized)
ccgcagcctcacaggctgctggtcggctggcactatctccaaggtgactgtgaaccccggcctgctggtgcccctggatgtcaagttggaccccgctgttcagcagctgaagaaccagga

SEQ ID NO: 545543 - DNA, 120 bp, Artificial Sequence
  ENSG00000167767_3 (sequence is synthesized)
gaaggaggagatgaaggccctcaatgataaatttgcctccctaattggcaaggtgcaagccctggaacagcgcaaccagctgctggagacacgctggagcttcctgcagggccaggactc

SEQ ID NO: 545544 - DNA, 120 bp, Artificial Sequence
  ENSG00000167767_4 (sequence is synthesized)
agccatcttcgacctcgggcatctctatgaggaatatcagggccggctgcaggaggaactgcgcaaagtgagccaggagcgggggcagctggaggccaacctgctgcaggtgctggagaa

SEQ ID NO: 545545 - DNA, 120 bp, Artificial Sequence
  ENSG00000167767_5 (sequence is synthesized)
ggttgaggagtttcgaatcaggtatgaggatgagatctccaagcgcacagacatggagttcacctttgttcagctgaagaaggacctggatgcagagtgtcttcatcggactgaactgga

SEQ ID NO: 545546 - DNA, 120 bp, Artificial Sequence
  ENSG00000167767_6 (sequence is synthesized)
aaccaagttaaaaagcctggagagcttcgtggagttgatgaaaaccatctatgagcaggagctgaaggacctggcagcacaggtgaaggatgtgtcggtgaccgtcggcatggacagccg

SEQ ID NO: 545547 - DNA, 120 bp, Artificial Sequence
  ENSG00000167767_7 (sequence is synthesized)
ctgccacatcgacctgagcggcatcgtggaggaggtgaaggcccagtatgacgccgtcgcggctcgcagcctggaggaggccgaggcatactctcggagccagctggaggagcaggccgc

SEQ ID NO: 545548 - DNA, 120 bp, Artificial Sequence
  ENSG00000167767_8 (sequence is synthesized)
ccgctcggccgagtatgggagcagcctccagagcagccgcagcgagatcgcggatctcaatgtgcgcatccagaagctgcggtcccagatcctctctgtcaagagccattgcctgaaact

SEQ ID NO: 545549 - DNA, 120 bp, Artificial Sequence
  ENSG00000167767_9 (sequence is synthesized)
ggaggagaacatcaagacagctgaggagcagggtgagctggccttccaggatgccaagaccaagctggcccagctggaggccgccctgcagcaggccaagcaggacatggcgcggcagct

SEQ ID NO: 545550 - DNA, 120 bp, Artificial Sequence
  ENSG00000167767_10 (sequence is synthesized)
gcgcaagtaccaggagctgatgaacgtcaagctggccctggacatcgagatcgccacctacaggaagctggtggagggcgaggagggcaggatggactcgccctcagccactgtggtcag

SEQ ID NO: 545551 - DNA, 120 bp, Artificial Sequence
  ENSG00000167767_11 (sequence is synthesized)
cgctgtgcagtccaggtgcaaaaccgctgcctccagatcaggcctctccaaggccccctcccgaaagaagaagggcagcaaaggccccgtgatcaaaatcaccgaaatgtcagagaagta

SEQ ID NO: 545552 - DNA, 120 bp, Artificial Sequence
  ENSG00000167767_12 (sequence is synthesized)
cttctcgcaggagtcggaggtctcagagtaaggcggctggaccccaggaaccccagggcactccactgcagcaggagggacttaagctagactcaagaaagcagcttggagcctctaggt

SEQ ID NO: 545553 - DNA, 120 bp, Artificial Sequence
  ENSG00000167767_13 (sequence is synthesized)
tgagaagagaggcaaaacctgatattgaactgagagaggggttcaaaactgactgtgttttgtgggctgccagggtgggagaggagcatcaccagctcctcagagccactccgctccata

SEQ ID NO: 545554 - DNA, 120 bp, Artificial Sequence
  ENSG00000167767_14 (sequence is synthesized)
tcagtatctcacagtcccatccttccaaccttctggccagaggttttcctgatgggtgagtcggaattaggggtcagttttgtctccacctcctcgctcctctgaggctcctcctccagc

SEQ ID NO: 545555 - DNA, 120 bp, Artificial Sequence
  ENSG00000167767_15 (sequence is synthesized)
atcaggctctgccaaggcccctctgactcttgcccaatccttgaccttgactcctatctcaagccttgccttgtctctgcctcggaactgggactgggactggctcatccacctatgtgc

SEQ ID NO: 545556 - DNA, 120 bp, Artificial Sequence
  ENSG00000167767_16 (sequence is synthesized)
gtatctggaattcctgggaaggctggctgctgaagaccctcttggctttcccgtgctctttgggctccccagagacctgacagtattagggagtgaagggaggaggggccctggctattt

SEQ ID NO: 545557 - DNA, 120 bp, Artificial Sequence
  ENSG00000167767_17 (sequence is synthesized)
gggacctaagcctaggccccagagatcagcccgaacacccgcatcccttcctcctcccatgggtccctcccagtaggcagtagtcagaactggatgggctgcccccagccagctcccagc

SEQ ID NO: 545558 - DNA, 120 bp, Artificial Sequence
  ENSG00000167767_18 (sequence is synthesized)
agcttctccggaagctgctcttgccataatcaactccctgggagtggaagccagatggcagcttgagattgggcaggagcattcgatcttcctttcacctccctgccatgctggggtcct

SEQ ID NO: 545559 - DNA, 120 bp, Artificial Sequence
  ENSG00000167767_19 (sequence is synthesized)
acccagcctggatctgagctctgtgcccccagccgggttgttcccagcctgagcaccgggctttggtgcaccaggccttggagacccctggtcccacccctgccgtgaagccccaggccc

SEQ ID NO: 545560 - DNA, 120 bp, Artificial Sequence
  ENSG00000167767_20 (sequence is synthesized)
acttcccaagaatctcacttctcagggcctctgttctcctctccactgggccaaatagcctggccctcccctccttggcattcatgggggagcccaggaaccccccacacctatggggtt

SEQ ID NO: 545561 - DNA, 120 bp, Artificial Sequence
  ENSG00000167767_21 (sequence is synthesized)
agagctcctcctttcttctcactccttccccttcctccctccatgcccactccccctgcctccagcaggccaggaagaaggcacagtccaggcaagtctgggagcttccaagcccttgag

SEQ ID NO: 545562 - DNA, 120 bp, Artificial Sequence
  ENSG00000167767_22 (sequence is synthesized)
gtccagctgtggggcccaaatgacagccttacaagggttctaccagagaggaaaattccacatcccaccagaagacaggggtgttggcaggcatactcctatctcctcctcttggctctc

SEQ ID NO: 545563 - DNA, 120 bp, Artificial Sequence
  ENSG00000167767_23 (sequence is synthesized)
aatgctgaggcttgcagaggcatcccagcggcaccagcctcccactgcacagcttccttccctccttcactctcctctcccctccctgccccttgcctcacctcctcttctagactgcat

SEQ ID NO: 545564 - DNA, 120 bp, Artificial Sequence
  ENSG00000167767_24 (sequence is synthesized)
tagattcattcatctcatttgccaggacatgttggccagaggtctgggcccatcccaggcctcaaggccctccaggcctgtggggagcactggagggttactgactctctggccatggga

SEQ ID NO: 545565 - DNA, 120 bp, Artificial Sequence
  ENSG00000167767_25 (sequence is synthesized)
actcagagattctcatccccaaagtcccaaaagagggtgctgattggtgcttttcctcaggctcttcattggtttccaagggagcaaatcctcagtggggatacaagacatataaagtat

SEQ ID NO: 545566 - DNA, 120 bp, Artificial Sequence
  ENSG00000167767_26 (sequence is synthesized)
atattattttttcataacttatgtggcttttaacttattgcttcccttcctgtttctgcatgatcagtctgtatgtactatctggaaagataacacatactccagccacctcacctgatt

SEQ ID NO: 545567 - DNA, 120 bp, Artificial Sequence
  ENSG00000167767_27 (sequence is synthesized)
ggctatcttggggccatgtccccttcttgctgccacaggatgaataaagtgttgagatttgtctatggagaaagctgtgtgtctgtttttatctcccctctcaggaccagtcagccactg

SEQ ID NO: 545568 - DNA, 120 bp, Artificial Sequence
  ENSG00000167767_28 (sequence is synthesized)
gtcaatcaggctgatcatggaacattaggaattctccaattaagggagaaaaagtccagggacttagttatatcttcagaccagtgcagctggtacacacaaagttctcctgtctcacca

SEQ ID NO: 545569 - DNA, 120 bp, Artificial Sequence
  ENSG00000167767_29 (sequence is synthesized)
ccctccaaatctcatgttgaaatgtaattcccagtgttggaagtggagcctggtgggaagtatttggatcatgagagaggatccttcatgaatggctcagcaccatctccttggtgatga

SEQ ID NO: 545570 - DNA, 120 bp, Artificial Sequence
  ENSG00000167767_30 (sequence is synthesized)
tcagcaccatctccttggtgatgagtgagttctcactcaattcacatagatatggttgtttaaaagagtctgagacctctcccctctttctcgccatgtgatatgcctgctcccccttca

SEQ ID NO: 545571 - DNA, 90 bp, Artificial Sequence
  ENSG00000167767_31 (sequence is synthesized)
ccttccgcctttactgagcaaatgttggtgccatgccagtacagcctgcagaattgtgagccaaaataaatgtcttttctttataaatta

SEQ ID NO: 545572 - DNA, 120 bp, Artificial Sequence
  ENSG00000167767_32 (sequence is synthesized)
agtcattggaggtgctttctgctgagtgagcgccctgggtggtgtgcataaatgagctgccacttcccagggagccctccgtgggctcttgctggtcagcccggggcctcagcccccgac

SEQ ID NO: 545573 - DNA, 120 bp, Artificial Sequence
  ENSG00000167767_33 (sequence is synthesized)
ccctctttccctccagatatcctactctcctttatgcccaatcaaagccctcagaggcttaagtcccaggaccaacagacagacagggagatacccccatccccatccagctcctttttc

SEQ ID NO: 545574 - DNA, 120 bp, Artificial Sequence
  ENSG00000167767_34 (sequence is synthesized)
gaggctctgagccagatctcctctggaatcacccccactctcacccaggaggcagccccccagcccactcctgccctgggaccctccattccctctcccaccactcaccactgctgccaa

SEQ ID NO: 545575 - DNA, 120 bp, Artificial Sequence
  ENSG00000167768_0 (sequence is synthesized)
agaggagtgtttagctccttcccttactctaccttgctcctacttttctctaagtcaacatgagtcgacagtttagttccaggtctgggtaccgaagtggagggggcttcagctctggct

SEQ ID NO: 545576 - DNA, 120 bp, Artificial Sequence
  ENSG00000167768_1 (sequence is synthesized)
ctgctgggatcatcaactaccagcgcaggaccaccagcagctccacacgccgcagtggaggaggtggtgggagattttcaagctgtggtggtggtggtggtagctttggtgctggtggtg

SEQ ID NO: 545577 - DNA, 120 bp, Artificial Sequence
  ENSG00000167768_2 (sequence is synthesized)
gatttggaagtcggagtcttgttaaccttggtggcagtaaaagcatctccataagtgtggctagaggaggtggacgtggtagtggctttggtggtggttatggtggtggtggctttggtg

SEQ ID NO: 545578 - DNA, 120 bp, Artificial Sequence
  ENSG00000167768_3 (sequence is synthesized)
gtggtggctttggtggtggtggctttggtggaggtggcattgggggtggtggctttggtggttttggcagtggtggtggtggttttggtggaggtggctttgggggtggtggatatgggg

SEQ ID NO: 545579 - DNA, 120 bp, Artificial Sequence
  ENSG00000167768_4 (sequence is synthesized)
gtggttatggtcctgtctgccctcctggtggcatacaagaagtcactatcaaccagagccttcttcagcccctcaatgtggagattgaccctgagatccaaaaggtgaagtctcgagaaa

SEQ ID NO: 545580 - DNA, 120 bp, Artificial Sequence
  ENSG00000167768_5 (sequence is synthesized)
gggagcaaatcaagtcactcaacaaccaatttgcctccttcattgacaaggtgaggttcctggagcagcagaaccaggtactgcaaacaaaatgggagctgctgcagcaggtagatacct

SEQ ID NO: 545581 - DNA, 120 bp, Artificial Sequence
  ENSG00000167768_6 (sequence is synthesized)
ccactagaacccataatttagagccctactttgagtcattcatcaacaatctccgaaggagagtggaccaactgaagagtgatcaatctcggttggattcggaactgaagaacatgcagg

SEQ ID NO: 545582 - DNA, 120 bp, Artificial Sequence
  ENSG00000167768_7 (sequence is synthesized)
acatggtggaggattaccggaacaagtatgaggatgaaatcaacaagcggacaaatgcagagaatgaatttgtgaccatcaagaaggatgtggatggtgcttatatgaccaaggtggacc

SEQ ID NO: 545583 - DNA, 120 bp, Artificial Sequence
  ENSG00000167768_8 (sequence is synthesized)
ttcaggccaaacttgacaacttgcagcaggaaattgatttccttacagcactctaccaagcagagttgtctcagatgcagactcaaatcagtgaaactaatgtcatcctctctatggaca

SEQ ID NO: 545584 - DNA, 120 bp, Artificial Sequence
  ENSG00000167768_9 (sequence is synthesized)
acaaccgcagtctcgacctggacagcatcattgctgaggtcaaggcccagtacgaggatatagcccagaagagcaaagctgaggccgagtccttgtaccagagcaagtatgaagagctgc

SEQ ID NO: 545585 - DNA, 120 bp, Artificial Sequence
  ENSG00000167768_10 (sequence is synthesized)
tttctgagctgaatcgtgtgatccagagacttagatctgaaatcgacaatgtcaagaagcagatctccaacttgcagcagtccatcagtgatgcagagcagcgtggcgagaatgccctca

SEQ ID NO: 545586 - DNA, 120 bp, Artificial Sequence
  ENSG00000167768_11 (sequence is synthesized)
aggatgccaagaacaagctgaatgacctggaggatgccctgcagcaggccaaggaagacctggcccgcctgctgcgcgactaccaggagctgatgaacacaaagctggccctggatctgg

SEQ ID NO: 545587 - DNA, 120 bp, Artificial Sequence
  ENSG00000167768_12 (sequence is synthesized)
agattgccacctacaggaccctcctggagggagaagaaagcaggatgtctggagaatgtgccccgaacgtgagtgtgtctgtgagcacaagccacaccaccatcagtggaggtggcagcc

SEQ ID NO: 545588 - DNA, 120 bp, Artificial Sequence
  ENSG00000167768_13 (sequence is synthesized)
gaggaggtggcggcggtggctacggctctggaggtagcagctatggctccggaggtggtagctatggttctggaggtggcggcggcggcggccgtggcagctatggctccggaggtagca

SEQ ID NO: 545589 - DNA, 120 bp, Artificial Sequence
  ENSG00000167768_14 (sequence is synthesized)
gctacggctccggaggtggcagctatggctctggaggtggcggcggcggccatggcagctacggctccggaagcagcagtgggggctacagaggtggctctggaggcggcggcggcggca

SEQ ID NO: 545590 - DNA, 120 bp, Artificial Sequence
  ENSG00000167768_15 (sequence is synthesized)
gctctggcggccggggctctggcggcgggagctctggaggctccataggaggccggggatccagctctgggggtgtcaagtcctctggtggcagttccagcgtgaagtttgtttctacca

SEQ ID NO: 545591 - DNA, 120 bp, Artificial Sequence
  ENSG00000167768_16 (sequence is synthesized)
cttattccggagtaaccagataaagagatgccctctgtttcattagctctagttctcccccagcatcactaacaaatatgcttggcaagaccgaggtcgatttgtcccagccttaccgga

SEQ ID NO: 545592 - DNA, 120 bp, Artificial Sequence
  ENSG00000167768_17 (sequence is synthesized)
gaaaagagctatggttagttacactagctcatcctattcccccagctctttcttttctgctgtttcccaatgaagttttcagatcagtggcaatctcagtcccctggctatgaccctgct

SEQ ID NO: 545593 - DNA, 120 bp, Artificial Sequence
  ENSG00000167768_18 (sequence is synthesized)
ttgttctttccctgagaaacagttcagcagtgaccaccacccacatgacatttcaaagcacctccttaagccagccagagtaggaccagttagacccagggtgtggacagctccttagca

SEQ ID NO: 545594 - DNA, 120 bp, Artificial Sequence
  ENSG00000167768_19 (sequence is synthesized)
tcttatctctgtgctgttttggttttgtacataaggtgtaagcaagttgtttttcttttgtggagaggtcttaaactccccatttccttgttttgctgcaataaactgcatttgaaattc

SEQ ID NO: 545595 - DNA, 120 bp, Artificial Sequence
  ENSG00000167769_0 (sequence is synthesized)
cttcccaagctcgccttctctctgccgggcgcagccggctggtggtggccactgagacaagatgcctagcatcttcgcctatcagagctccgaggtggactggtgtgagagcaacttcca

SEQ ID NO: 545596 - DNA, 120 bp, Artificial Sequence
  ENSG00000167769_1 (sequence is synthesized)
gtactcggagctggtggccgagttctacaacacgttctccaatatccccttcttcatcttcgggccactgatgatgctcctgatgcacccgtatgcccagaagcgctcccgctacattta

SEQ ID NO: 545597 - DNA, 120 bp, Artificial Sequence
  ENSG00000167769_2 (sequence is synthesized)
cgttgtctgggtcctcttcatgatcataggcctgttctccatgtatttccacatgacgctcagcttcctgggccagctgctggacgagatcgccatcctgtggctcctgggcagtggcta

SEQ ID NO: 545598 - DNA, 120 bp, Artificial Sequence
  ENSG00000167769_3 (sequence is synthesized)
tagcatatggatgccccgctgctatttcccctccttccttggggggaacaggtcccagttcatccgcctggtcttcatcaccactgtggtcagcacccttctgtccttcctgcggcccac

SEQ ID NO: 545599 - DNA, 120 bp, Artificial Sequence
  ENSG00000167769_4 (sequence is synthesized)
ggtcaacgcctacgccctcaacagcattgccctgcacattctctacatcgtgtgccaggagtacaggaagaccagcaataaggagcttcggcacctgattgaggtctccgtggttttatg

SEQ ID NO: 545600 - DNA, 120 bp, Artificial Sequence
  ENSG00000167769_5 (sequence is synthesized)
cttcccttatggcatggtcaccatggccttggtggatgccaactatgagatgccaggtgaaaccctcaaagtccgctactggcctcgggacagttggcccgtggggctgccctacgtgga

SEQ ID NO: 545601 - DNA, 120 bp, Artificial Sequence
  ENSG00000167769_6 (sequence is synthesized)
aatccggggtgatgacaaggactgctgagacctgccagcctcttgactatccaaccacccaacaacttgcctgtgtcttgagaagatagccccggtcaggacttgcacctgcgggacact

SEQ ID NO: 545602 - DNA, 120 bp, Artificial Sequence
  ENSG00000167769_7 (sequence is synthesized)
cgtggttccttcctctgtttccccttccgtgtcctccttgtcctgcgctgccctgccttgaggcagatgatggactttgtgacatctctgagcagcagcctggtgactgtggggggctgt

SEQ ID NO: 545603 - DNA, 120 bp, Artificial Sequence
  ENSG00000167769_8 (sequence is synthesized)
ctcgtgcatctcccctccatgaccccccccatcctctttcatttcctcctctgtgtccacagcctcccagtgaccattgtcacatgagctggtgggactgtgtcaccaggtactggggtg

SEQ ID NO: 545604 - DNA, 82 bp, Artificial Sequence
  ENSG00000167769_9 (sequence is synthesized)
cacatgagctggtgggactgtgtcaccaggtactggggtgactgaaggatgtggcatctaaatattagcttctaggctggga

SEQ ID NO: 545605 - DNA, 120 bp, Artificial Sequence
  ENSG00000167770_0 (sequence is synthesized)
gctgctccgcactgcagctatggtcgcatgcagtgcctgccgaagcccgcagcaggaatgctgccttcggtgattttaatttcacttttctacttctctcaataacaaaatccgcgtttc

SEQ ID NO: 545606 - DNA, 120 bp, Artificial Sequence
  ENSG00000167770_1 (sequence is synthesized)
aaactccagggaaaagaaaacggaattggctccaggaggatctgcaatcaccaccgggaactttgggaggctgggaagatggagccaaaccaatgtgtggggtggagggctgttgccaag

SEQ ID NO: 545607 - DNA, 120 bp, Artificial Sequence
  ENSG00000167770_2 (sequence is synthesized)
gcggggcaacgaggaggggctcgcttccgggaggacggcaattggcaacccggaagcggtcggtagtgcggcgctgtttaaagatggcggcggaggaacctcagcagcagaagcaggagc

SEQ ID NO: 545608 - DNA, 120 bp, Artificial Sequence
  ENSG00000167770_3 (sequence is synthesized)
cgctgggcagcgactccgaaggtgttaactgtctggcctatgatgaagccatcatggctcagcaggaccgaattcagcaagagattgctgtgcagaaccctctggtgtcagagcggctgg

SEQ ID NO: 545609 - DNA, 120 bp, Artificial Sequence
  ENSG00000167770_4 (sequence is synthesized)
agctctcggtcctatacaaggagtatgctgaagatgacaacatctatcaacagaagatcaaggacctccacaaaaagtactcgtacatccgcaagaccaggcctgacggcaactgtttct

SEQ ID NO: 545610 - DNA, 120 bp, Artificial Sequence
  ENSG00000167770_5 (sequence is synthesized)
tggtgtcccagggcttcactgaattcacaattgaggatttccacaacacgttcatggacctgattgagcaggtggagaagcagacctctgtcgccgacctgctggcctccttcaatgacc

SEQ ID NO: 545611 - DNA, 120 bp, Artificial Sequence
  ENSG00000167770_6 (sequence is synthesized)
agagcacctccgactaccttgtggtctacctgcggctgctcacctcgggctacctgcagcgcgagagcaagttcttcgagcacttcatcgagggtggacggactgtcaaggagttctgcc

SEQ ID NO: 545612 - DNA, 120 bp, Artificial Sequence
  ENSG00000167770_7 (sequence is synthesized)
agcaggaggtggagcccatgtgcaaggagagcgaccacatccacatcattgcgctggcccaggccctcagcgtgtccatccaggtggagtacatggaccgcggcgagggcggcaccacca

SEQ ID NO: 545613 - DNA, 120 bp, Artificial Sequence
  ENSG00000167770_8 (sequence is synthesized)
atccgcacatcttccctgagggctccgagcccaaggtctaccttctctaccggcctggacactacgatatcctctacaaatagggctggctccagcccgctgctgccctgctgcccccct

SEQ ID NO: 545614 - DNA, 120 bp, Artificial Sequence
  ENSG00000167770_9 (sequence is synthesized)
ctgccaggcgctagacatgtacagaggtttttctgtggttgtaaatggtcctatttcacccccttcttcctgtcacatgacccccccccatgttttattaaagggggtgctggtggtgag

SEQ ID NO: 545615 - DNA, 120 bp, Artificial Sequence
  ENSG00000167770_10 (sequence is synthesized)
ggagcaggtttgaggggccaggcctcttggaggcccctcctgcttcgttgggttctgcttccttcccttcttagctggctcaggggcttctatgggatcctggaagttccttagggactt

SEQ ID NO: 545616 - DNA, 120 bp, Artificial Sequence
  ENSG00000167770_11 (sequence is synthesized)
gcccagggtcccagggccacccacacttcatctgctccctcataggccccacctccacgtcccggctgggccccagaccccagcttcctgccctccaccgggagtctgcatggttgggag

SEQ ID NO: 545617 - DNA, 120 bp, Artificial Sequence
  ENSG00000167770_12 (sequence is synthesized)
tcctgggtggaggggcctttgtgaggctggacccggctcagggcaggtggaggagctgggcctcccacagggtgcccgggcagtgccatcctggtgggggagggcagccttcaaacgtgt

SEQ ID NO: 545618 - DNA, 120 bp, Artificial Sequence
  ENSG00000167770_13 (sequence is synthesized)
ggggtctacagtcctcaggtctaggcagggctgccggttctccacctccccatccgccccaggccccctgcctgtgcctgccttgcaccccctctgcttgggccacggtgtctctgcatt

SEQ ID NO: 545619 - DNA, 120 bp, Artificial Sequence
  ENSG00000167770_14 (sequence is synthesized)
gcctgcctttttgccttcacctcttttcttccccgccccctgcacattcggggtctcagcccccaggctgtgagctccttgggggcaggccctcaataaatgtgaactgctgctgccgcc

SEQ ID NO: 545620 - DNA, 120 bp, Artificial Sequence
  ENSG00000167770_15 (sequence is synthesized)
agttaggtcatgaggctttggccttgacaccaagggatgctgtctccttgccggaagcagctcaccaaagccggcagagaacccaggttccgtggggccacgatgtggggctccgcgggc

SEQ ID NO: 545621 - DNA, 120 bp, Artificial Sequence
  ENSG00000167770_16 (sequence is synthesized)
gggcaccgaggcaggtgggtgtctacctcctccccgggcgagtaggatgtgtctcgagtagggtgtctccctccttcccgggcgatgggctggactctggccttgccaggcggggcagtg

SEQ ID NO: 545622 - DNA, 120 bp, Artificial Sequence
  ENSG00000167770_17 (sequence is synthesized)
agcaagaggtgaggggctgcagtgggcgagggaggcagtggccagcagccccattgtggaaatgcataggctgggcatgaggcctattgtctgtctctactttggaagctccctcctccc

SEQ ID NO: 545623 - DNA, 120 bp, Artificial Sequence
  ENSG00000167770_18 (sequence is synthesized)
taggctatgctaggtactggtgcttttctgggggtcgctgtgccaccgggtgaccagcccagctcttttgtagttattctgtctgttaggcatgggtcactccatctccctgctaggaca

SEQ ID NO: 545624 - DNA, 120 bp, Artificial Sequence
  ENSG00000167770_19 (sequence is synthesized)
aggtgggagcctggccagagcgggtgggaagcaccctgggggtggggcaggagggtgcctgcttcagacttgcttcctgctgggtctgtcacctgagggagtagggtgttggaggacact

SEQ ID NO: 545625 - DNA, 120 bp, Artificial Sequence
  ENSG00000167770_20 (sequence is synthesized)
cacttttcgttgctggttcttgaagtgcgtaggctgaggcctcaaaaacacattgattcaatgcttgaacctgggaggtggaggttgtagggagccaagatcacaccattgcactccagc

SEQ ID NO: 545626 - DNA, 71 bp, Artificial Sequence
  ENSG00000167770_21 (sequence is synthesized)
tcacaccattgcactccagcctgggtgataagagcaaaacttcatctcagaaaaaaaaaaaaaaaggtggg

SEQ ID NO: 545627 - DNA, 120 bp, Artificial Sequence
  ENSG00000167770_22 (sequence is synthesized)
ccaagattgcagcactgcactccagccagggcaacagaagactgtctcacaaaaaaaaaaaaaagacattgattcaaatctagactctgctactcagcagctgtatccttggcaagtcct

SEQ ID NO: 545628 - DNA, 120 bp, Artificial Sequence
  ENSG00000167770_23 (sequence is synthesized)
ctagactctgctactcagcagctgtatccttggcaagtcctttagtgtctctaaaatgggtgttctcatctataaatagggacaataaaagcatcttctggccgggcacggtggctcacg

SEQ ID NO: 545629 - DNA, 66 bp, Artificial Sequence
  ENSG00000167770_24 (sequence is synthesized)
gcgtgtagttccagctattgggaaggctgaggcaggagaattgcttgcatctgggaggcggaggtt

SEQ ID NO: 545630 - DNA, 120 bp, Artificial Sequence
  ENSG00000167770_25 (sequence is synthesized)
tgggaaggctgaggcaggagaattgcttgcatctgggaggcggaggttgcagtgaggcaagatcccgcactgtactctagcctgagcgacggagtaagactccgtctcaaaaaaaaaaaa

SEQ ID NO: 545631 - DNA, 120 bp, Artificial Sequence
  ENSG00000167770_26 (sequence is synthesized)
gagactccgtctcaaaaaaaaaaaaaaagcatcttcccatagggcgattgtgagattgagggaggtgcaggctgggcaggagctgatgatctcggtgcccatacgggggctgaccaggct

SEQ ID NO: 545632 - DNA, 120 bp, Artificial Sequence
  ENSG00000167770_27 (sequence is synthesized)
gggggctgaccaggctggtgctcagtggggtaggagggttgccagagggctgtttcccacagcttgcctcctggatctttgtggagaggcaggcagcagtggggtcaaggggccacagat

SEQ ID NO: 545633 - DNA, 120 bp, Artificial Sequence
  ENSG00000167770_28 (sequence is synthesized)
ttcctcaaagggccctgctgcatcactcaaacggaggcaaacttcaccacccactttctaggtctgtgagctgggaggatgacatgtgaaatggggccaggcatggtggctcaagcctgg

SEQ ID NO: 545634 - DNA, 120 bp, Artificial Sequence
  ENSG00000167770_29 (sequence is synthesized)
gcttgagcccaggagttcaagaccaacccaggcaacatagtgagaccttgtctctccaaatcaaaaaattactgggtgtggtagcacatgtctatagtcccagctactcaagaggctgcg

SEQ ID NO: 545635 - DNA, 120 bp, Artificial Sequence
  ENSG00000167770_30 (sequence is synthesized)
caaatcaaaaaattactgggtgtggtagcacatgtctatagtcccagctactcaagaggctgcggttggaggatcacttgagcccaagaagttgagccatgattgtaccactgcactcca

SEQ ID NO: 545636 - DNA, 120 bp, Artificial Sequence
  ENSG00000167770_31 (sequence is synthesized)
ccttgcagtcaggcagagaggcctacgccagggccgagccccccggcctgctccagcggcggcccgcgccgtgagggcctcgagtttcgctgggctacggagcacaaaggtccgggcggg

SEQ ID NO: 545637 - DNA, 120 bp, Artificial Sequence
  ENSG00000167770_32 (sequence is synthesized)
atctggggcggccggcctctcctacaggtctcaggtccgcaggcctggcgtgccagcacctgccacgggactggaagcccattccttgacaacgcctaaggggatcccgttgctagggct

SEQ ID NO: 545638 - DNA, 120 bp, Artificial Sequence
  ENSG00000167770_33 (sequence is synthesized)
gtgctggtggtgagccgtgtgtgcgtgtccctgctctgctgcccgcctggctgctctgtctgctgccccctccccccagatggacaaaccaaggccaccttctccttcatcacctcagtc

SEQ ID NO: 545639 - DNA, 120 bp, Artificial Sequence
  ENSG00000167770_34 (sequence is synthesized)
tcggcacagttccagggatgccagggagaaaggcagctgtagcccagggcgaggctgagatggagcaagaaggcagggcccagagcgggcgtccaggctggagctcccagtgctgggaag

SEQ ID NO: 545640 - DNA, 120 bp, Artificial Sequence
  ENSG00000167770_35 (sequence is synthesized)
acaaccggggcgcagcgggaggcatggaggaaacgctccagcagcccaacctcgccagggcaccgcgcaggagaggcgcggcctcaggcaggcctgggtccagcccgggctcacccctca

SEQ ID NO: 545641 - DNA, 120 bp, Artificial Sequence
  ENSG00000167770_36 (sequence is synthesized)
ggccgggaggacagggcccatctttggcagctctgatcgcccacgccaggagctcctcaggcaccagctgcctggtgctcacaggcgggcatcaagagaggaccatcattccccatttta

SEQ ID NO: 545642 - DNA, 120 bp, Artificial Sequence
  ENSG00000167770_37 (sequence is synthesized)
ttgcagtcaggcagagaggcctacgccagggccgagccccccggcctgctccagcggcggcccgcgccgtgagggcctcgagtttcgctgggctacggagcacaaaggtgttaactgtct

SEQ ID NO: 545643 - DNA, 80 bp, Artificial Sequence
  ENSG00000167771_0 (sequence is synthesized)
attgtgtgcgcgaggagcgagcggcggcggagagcgggcgagcaagcggcatcccgagcgcggcggggagagcgagcgcg

SEQ ID NO: 545644 - DNA, 80 bp, Artificial Sequence
  ENSG00000167771_1 (sequence is synthesized)
cgccggtgccccggccggctgccgtcgcgggcaggggtctgcttaggacacgggtccccgcccggggactggggcatccc

SEQ ID NO: 545645 - DNA, 120 bp, Artificial Sequence
  ENSG00000167771_2 (sequence is synthesized)
gcttaggacacgggtccccgcccggggactggggcatccccggcgcagctgagaggcgcagagcccggggggcgcagattgcgctccagcgcccagccgctgaacggcgtgggcaggtgg

SEQ ID NO: 545646 - DNA, 120 bp, Artificial Sequence
  ENSG00000167771_3 (sequence is synthesized)
gttccagggcgccccgaggacagggggccccgacttcaggggaaccccaaccctgaggggcgtacatagtaatcacgccccagccgcaccggaccttgcgctcatcccttgcgtccccca

SEQ ID NO: 545647 - DNA, 120 bp, Artificial Sequence
  ENSG00000167771_4 (sequence is synthesized)
cttctgcacaaacttttctgacgccctggctcgtgggggtcgtggagagcgctggggctaccaggtgggctcccaccccgccggaccctagccacgctgacctcctgcctctcctaacct

SEQ ID NO: 545648 - DNA, 120 bp, Artificial Sequence
  ENSG00000167771_5 (sequence is synthesized)
cagtggcgacctctccaggccgggccgggctcggcactcggagcgagtgcggcaaccactgtcgctctccgaaggctcctgcgccccccggggcagctgggcggggtaatgccctcagtg

SEQ ID NO: 545649 - DNA, 120 bp, Artificial Sequence
  ENSG00000167771_6 (sequence is synthesized)
atggagaagccgagcgcgggctctgggatcctgtcccgtagccgggccaagacggtgcccaacggcggacagccccactcggaggatgacagcagcgaggaggagcactcgcacgacagc

SEQ ID NO: 545650 - DNA, 120 bp, Artificial Sequence
  ENSG00000167771_7 (sequence is synthesized)
atgatccgcgttggaaccaattaccaggccgtaattccggagtgcaagcctgagagccccgcacgctacagcaacaaggagctgaaggggatgctggtgtggtcacccaaccactgtgtg

SEQ ID NO: 545651 - DNA, 120 bp, Artificial Sequence
  ENSG00000167771_8 (sequence is synthesized)
tcagatgccaagcttgacaagtacattgcgatggccaaggagaagcatggctacaacattgagcaggcgctgggcatgcttctgtggcataagcacgatgtggagaagtcgctggccgac

SEQ ID NO: 545652 - DNA, 120 bp, Artificial Sequence
  ENSG00000167771_9 (sequence is synthesized)
ctggccaacttcaccccattccctgacgagtggacagtagaggacaaggtgctgtttgaacaggcctttggcttccatggcaaatgcttccagcggatccagcagatgctgcctgacaag

SEQ ID NO: 545653 - DNA, 120 bp, Artificial Sequence
  ENSG00000167771_10 (sequence is synthesized)
ttgattcccagcctggtgaaatactactactcttggaagaagacccgcagccgaactagtgtgatggacagacaggcccggcggctggggggccgcaaggacaaagaagacagtgatgag

SEQ ID NO: 545654 - DNA, 120 bp, Artificial Sequence
  ENSG00000167771_11 (sequence is synthesized)
ctcgaagagggtcgaggaggcgtgagtgagggagagcccgatcctgcagatcccaagagagagcctctaccctctcggcccctgaatgcacgcccaggccctgggaaaaaggaggtccag

SEQ ID NO: 545655 - DNA, 120 bp, Artificial Sequence
  ENSG00000167771_12 (sequence is synthesized)
gcgtcgcccacccaagggcatgtacctgagccctgaaggcctcacggcagtgtcaggaagcccggaccttgccaacctcacgctccgaggtcttgactctcagctcatctccctcaagcg

SEQ ID NO: 545656 - DNA, 120 bp, Artificial Sequence
  ENSG00000167771_13 (sequence is synthesized)
ccaggtacagagcatgaagcagacgaacagcagcctgcgccaagccctggagggcggtattgatccactacgccccccggaggccaacaccaagttcaactcccgctggaccacagatga

SEQ ID NO: 545657 - DNA, 120 bp, Artificial Sequence
  ENSG00000167771_14 (sequence is synthesized)
gcagcttttggctgttcaagccatccgtaggtatggcaaagactttggggctattgcagaggtgattgggaacaagactctgacccaggtgaagactttctttgtgagctaccggcgccg

SEQ ID NO: 545658 - DNA, 120 bp, Artificial Sequence
  ENSG00000167771_15 (sequence is synthesized)
cttcaatctggaggaggtgctgcaggaatgggaggctgagcaggatggggcccctggagccccagtccccatggaggaggctaggagaggggctccattgccagccccagccctagagga

SEQ ID NO: 545659 - DNA, 120 bp, Artificial Sequence
  ENSG00000167771_16 (sequence is synthesized)
agatgatgaggtccagattacatcggtctccacgtccgtgccccgatcagtgccccctgcgccaccaccccctccacctcccacctcgctgtcccagccacccccgctgctgaggccacc

SEQ ID NO: 545660 - DNA, 120 bp, Artificial Sequence
  ENSG00000167771_17 (sequence is synthesized)
tttgcccacggctcccactctgctccgacagccacccccactgcagcagggccgcttcctccagccccggctggcccccaaccagcccccaccgcctctcatccgccccgctctggctgc

SEQ ID NO: 545661 - DNA, 120 bp, Artificial Sequence
  ENSG00000167771_18 (sequence is synthesized)
cccccgccacagcgcccgccctggccctcagcccccacccaccctgattggaacccctctggagcccccagcaccctcactctgagccctgacgtcctccaccaaccacgggctccagga

SEQ ID NO: 545662 - DNA, 120 bp, Artificial Sequence
  ENSG00000167771_19 (sequence is synthesized)
cccctttgctggccatccccaggcatctctggtgtcactgaggacagaagggactagggctctggcggggtctttgtaagaccagagtttcggacagcccagccccgccctttgggttct

SEQ ID NO: 545663 - DNA, 120 bp, Artificial Sequence
  ENSG00000167771_20 (sequence is synthesized)
gcatgtgttcctggcagctgggcctgtctcctggggccatggccgggctcaggggcctttgagctggcctgagggcactttcgcttcctggccggtactggaatggctgtgtcctagtct

SEQ ID NO: 545664 - DNA, 120 bp, Artificial Sequence
  ENSG00000167771_21 (sequence is synthesized)
gctggggcttggcctctgggtcctgccctttgtgtgtccggggtagtgaccttagcgtggagtggggagagggcagttgggtgtgctggctgttctcattcctctttcccttcttttagc

SEQ ID NO: 545665 - DNA, 120 bp, Artificial Sequence
  ENSG00000167771_22 (sequence is synthesized)
aataagtctggggtgaggtggggagggaggctgcagggggggaggtgggcagaggggccttacagcagcagaggctggaagagaagctctgtcttcaggggccagctgggaaatgctaag

SEQ ID NO: 545666 - DNA, 120 bp, Artificial Sequence
  ENSG00000167771_23 (sequence is synthesized)
gagctgagggtgcccaccaagcccaccttccagaaacttggagaaatgggggttgggaacttatgcagacatggatttatttttcaacattttttaaaaattaaaaaaaataaaatctaa

SEQ ID NO: 545667 - DNA, 120 bp, Artificial Sequence
  ENSG00000167772_0 (sequence is synthesized)
agaagccgagctgagcggatcctcacacgactgtgatccgattctttccagcggcttctgcaaccaagcgggtcttacccccggtcctccgcgtctccagtcctcgcacctggaacccca

SEQ ID NO: 545668 - DNA, 120 bp, Artificial Sequence
  ENSG00000167772_1 (sequence is synthesized)
acgtccccgagagtccccgaatccccgctcccaggctacctaagaggatgagcggtgctccgacggccggggcagccctgatgctctgcgccgccaccgccgtgctactgagcgctcagg

SEQ ID NO: 545669 - DNA, 120 bp, Artificial Sequence
  ENSG00000167772_2 (sequence is synthesized)
gcggacccgtgcagtccaagtcgccgcgctttgcgtcctgggacgagatgaatgtcctggcgcacggactcctgcagctcggccaggggctgcgcgaacacgcggagcgcacccgcagtc

SEQ ID NO: 545670 - DNA, 120 bp, Artificial Sequence
  ENSG00000167772_3 (sequence is synthesized)
agctgagcgcgctggagcggcgcctgagcgcgtgcgggtccgcctgtcagggaaccgaggggtccaccgacctcccgttagcccctgagagccgggtggaccctgaggtccttcacagcc

SEQ ID NO: 545671 - DNA, 120 bp, Artificial Sequence
  ENSG00000167772_4 (sequence is synthesized)
tgcagacacaactcaaggctcagaacagcaggatccagcaactcttccacaaggtggcccagcagcagcggcacctggagaagcagcacctgcgaattcagcatctgcaaagccagtttg

SEQ ID NO: 545672 - DNA, 120 bp, Artificial Sequence
  ENSG00000167772_5 (sequence is synthesized)
gcctcctggaccacaagcacctagaccatgaggtggccaagcctgcccgaagaaagaggctgcccgagatggcccagccagttgacccggctcacaatgtcagccgcctgcaccggctgc

SEQ ID NO: 545673 - DNA, 120 bp, Artificial Sequence
  ENSG00000167772_6 (sequence is synthesized)
ccagggattgccaggagctgttccaggttggggagaggcagagtggactatttgaaatccagcctcaggggtctccgccatttttggtgaactgcaagatgacctcagatggaggctgga

SEQ ID NO: 545674 - DNA, 120 bp, Artificial Sequence
  ENSG00000167772_7 (sequence is synthesized)
gggatccccacggcgagttctggctgggtctggagaaggtgcatagcatcacgggggaccgcaacagccgcctggccgtgcagctgcgggactgggatggcaacgccgagttgctgcagt

SEQ ID NO: 545675 - DNA, 120 bp, Artificial Sequence
  ENSG00000167772_8 (sequence is synthesized)
tctccgtgcacctgggtggcgaggacacggcctatagcctgcagctcactgcacccgtggccggccagctgggcgccaccaccgtcccacccagcggcctctccgtacccttctccactt

SEQ ID NO: 545676 - DNA, 120 bp, Artificial Sequence
  ENSG00000167772_9 (sequence is synthesized)
gggaccaggatcacgacctccgcagggacaagaactgcgccaagagcctctctggaggctggtggtttggcacctgcagccattccaacctcaacggccagtacttccgctccatcccac

SEQ ID NO: 545677 - DNA, 120 bp, Artificial Sequence
  ENSG00000167772_10 (sequence is synthesized)
agcagcggcagaagcttaagaagggaatcttctggaagacctggcggggccgctactacccgctgcaggccaccaccatgttgatccagcccatggcagcagaggcagcctcctagcgtc

SEQ ID NO: 545678 - DNA, 120 bp, Artificial Sequence
  ENSG00000167772_11 (sequence is synthesized)
ctggctgggcctggtcccaggcccacgaaagacggtgactcttggctctgcccgaggatgtggccgttccctgcctgggcaggggctccaaggaggggccatctggaaacttgtggacag

SEQ ID NO: 545679 - DNA, 120 bp, Artificial Sequence
  ENSG00000167772_12 (sequence is synthesized)
agaagaagaccacgactggagaagccccctttctgagtgcaggggggctgcatgcgttgcctcctgagatcgaggctgcaggatatgctcagactctagaggcgtggaccaaggggcatg

SEQ ID NO: 545680 - DNA, 120 bp, Artificial Sequence
  ENSG00000167772_13 (sequence is synthesized)
gagcttcactccttgctggccagggagttggggactcagagggaccacttggggccagccagactggcctcaatggcggactcagtcacattgactgacggggaccagggcttgtgtggg

SEQ ID NO: 545681 - DNA, 120 bp, Artificial Sequence
  ENSG00000167772_14 (sequence is synthesized)
tcgagagcgccctcatggtgctggtgctgttgtgtgtaggtcccctggggacacaagcaggcgccaatggtatctgggcggagctcacagagttcttggaataaaagcaacctcagaaca

SEQ ID NO: 545682 - DNA, 120 bp, Artificial Sequence
  ENSG00000167772_15 (sequence is synthesized)
atgcgagcccagaaaagtctctcctggtcttgggatggaggtcacacgaagcctccgcaaggcaaggacttttgagactgggtttcacgatgttggccgggctggtctggaagtcttgac

SEQ ID NO: 545683 - DNA, 120 bp, Artificial Sequence
  ENSG00000167772_16 (sequence is synthesized)
gccctgggaagcctacaaggcggggtttggggatccccacggtaggtgtttctagtggggacagaggcaggggaggaagagggaccctcagaagtggccctgcctcatggagtggcctct

SEQ ID NO: 545684 - DNA, 120 bp, Artificial Sequence
  ENSG00000167772_17 (sequence is synthesized)
tctttccttcttcctttctttccctccttccttccttcctctttctctctttcctttctctctctcttttctctctctctctccttcttccctccctccctacctctctctcttttcttt

SEQ ID NO: 545685 - DNA, 120 bp, Artificial Sequence
  ENSG00000167772_18 (sequence is synthesized)
ttccgtccttccttccttctttccttctttctctctcttttctttcttttcttttcttttctcttctttcattttgagacgtactctggctctgtcgcccaggctggagcgcaatggcgc

SEQ ID NO: 545686 - DNA, 120 bp, Artificial Sequence
  ENSG00000167772_19 (sequence is synthesized)
agaaaagtctctcctggtcttgggatggaggtcacacgaagcctccgcaaggcaaggacttttgtagagactgggtttcacgatgttggccgggctggtctggaagtcttgacctcaagc

SEQ ID NO: 545687 - DNA, 120 bp, Artificial Sequence
  ENSG00000167775_0 (sequence is synthesized)
gcgtgcgcgtgcgcagggataagagagcggtctggacagcgcgtggccggcgccgctgtggggacagcatgagcggcggttggatggcgcaggttggagcgtggcgaacaggggctctgg

SEQ ID NO: 545688 - DNA, 120 bp, Artificial Sequence
  ENSG00000167775_1 (sequence is synthesized)
gcctggcgctgctgctgctgctcggcctcggactaggcctggaggccgccgcgagcccgctttccaccccgacctctgcccaggccgcaggccccagctcaggctcgtgcccacccacca

SEQ ID NO: 545689 - DNA, 120 bp, Artificial Sequence
  ENSG00000167775_2 (sequence is synthesized)
agttccagtgccgcaccagtggcttatgcgtgcccctcacctggcgctgcgacagggacttggactgcagcgatggcagcgatgaggaggagtgcaggattgagccatgtacccagaaag

SEQ ID NO: 545690 - DNA, 120 bp, Artificial Sequence
  ENSG00000167775_3 (sequence is synthesized)
ggcaatgcccaccgccccctggcctcccctgcccctgcaccggcgtcagtgactgctctgggggaactgacaagaaactgcgcaactgcagccgcctggcctgcctagcaggcgagctcc

SEQ ID NO: 545691 - DNA, 120 bp, Artificial Sequence
  ENSG00000167775_4 (sequence is synthesized)
gttgcacgctgagcgatgactgcattccactcacgtggcgctgcgacggccacccagactgtcccgactccagcgacgagctcggctgtggaaccaatgagatcctcccggaaggggatg

SEQ ID NO: 545692 - DNA, 120 bp, Artificial Sequence
  ENSG00000167775_5 (sequence is synthesized)
gccacaaccatggggccccctgtgaccctggagagtgtcccctctgtcgggaatgccacatcctcctctgccggagaccagtctggaagcccaactgcctatggggttattgcagctgct

SEQ ID NO: 545693 - DNA, 120 bp, Artificial Sequence
  ENSG00000167775_6 (sequence is synthesized)
gcggtgctcagtgcaagcctggtcaccgccaccctcctccttttgtcctggctccgagcccaggagcgcctccgcccactggggttactggtggccatgaaggagtccctgctgctgtca

SEQ ID NO: 545694 - DNA, 120 bp, Artificial Sequence
  ENSG00000167775_7 (sequence is synthesized)
gaacagaagacctcgctgccctgaggacaagcacttgccaccaccgtcactcagccctgggcgtagccggacaggaggagagcagtgatgcggatgggtacccgggcacaccagccctca

SEQ ID NO: 545695 - DNA, 120 bp, Artificial Sequence
  ENSG00000167775_8 (sequence is synthesized)
gagacctgagctcttctggccacgtggaacctcgaacccgagctcctgcagaagtggccctggagattgagggtccctggacactccctatggagatccggggagctaggatggggaacc

SEQ ID NO: 545696 - DNA, 120 bp, Artificial Sequence
  ENSG00000167775_9 (sequence is synthesized)
tgccacagccagaactgaggggctggccccaggcagctcccagggggtagaacggccctgtgcttaagacactcctgctgccccgtctgagggtggcaattaaagttgcttcacatcctc

SEQ ID NO: 545697 - DNA, 120 bp, Artificial Sequence
  ENSG00000167775_10 (sequence is synthesized)
ggcttacagggggcggggcctgagggtggtttgtcaggggccaggcacgcggaggtggagcttgtgggaaaggcagggccgcagggatgggtgcgacttgggtctgtgggtcataagaag

SEQ ID NO: 545698 - DNA, 71 bp, Artificial Sequence
  ENSG00000167775_11 (sequence is synthesized)
gcagggatgggtgcgacttgggtctgtgggtcataagaagcggggtctaagatgggcttagggtgggagga

SEQ ID NO: 545699 - DNA, 83 bp, Artificial Sequence
  ENSG00000167775_12 (sequence is synthesized)
ttcttttttgtggtcagtatgatttcggttcattgcaacctccatctcccaggtttaagcgattctcatgcttcagcctcccg

SEQ ID NO: 545700 - DNA, 120 bp, Artificial Sequence
  ENSG00000167775_13 (sequence is synthesized)
aggcgtgagccactgcacccagcctctgccaccagctgtatggcctcctcttggttcctttctctgtaacctggggagtgcagtagcacctgcccagtggggctcttgagcccaggaact

SEQ ID NO: 545701 - DNA, 120 bp, Artificial Sequence
  ENSG00000167775_14 (sequence is synthesized)
cccagtggggctcttgagcccaggaactgctacactctgaaccccactcgtactaggggctcagtaacaagcagccgccagtgtggttcctatatcccgggacttcgcctgtctcctgcg

SEQ ID NO: 545702 - DNA, 120 bp, Artificial Sequence
  ENSG00000167775_15 (sequence is synthesized)
cagggcatgtggaaaaatggcccgtccctcagtctctttaaccactgagtttggaggtctccctggcagatcatctcgctatgaggagcctggtgaagactctgggatcagcgagacctg

SEQ ID NO: 545703 - DNA, 120 bp, Artificial Sequence
  ENSG00000167778_0 (sequence is synthesized)
ggatgtgtgtggtggcggcggccgaagagcttgtgtgcggagctgagaggcctatggatgaggaggacgcggcggccccggtttgttctcatgaacaagatggatgacctcaacctgcac

SEQ ID NO: 545704 - DNA, 120 bp, Artificial Sequence
  ENSG00000167778_1 (sequence is synthesized)
taccggtttctgaattggcgccggcggatccgggagattcgagaggtccgagctttccgatatcaggagaggttcaaacatatccttgtagatggagatactttaagttatcatggaaac

SEQ ID NO: 545705 - DNA, 120 bp, Artificial Sequence
  ENSG00000167778_2 (sequence is synthesized)
tctggtgaagttggctgctacgtggcttctcgacccctgaccaaggacagcaattattttgaggtgtctattgtggacagtggagtccggggcaccattgctgtggggctggtccctcag

SEQ ID NO: 545706 - DNA, 120 bp, Artificial Sequence
  ENSG00000167778_3 (sequence is synthesized)
tactacagcttggatcaccagcctggctggttgcctgactctgtagcctaccatgctgatgatggcaagctgtacaatggccgagccaagggccgccagtttgggtcaaagtgcaactcc

SEQ ID NO: 545707 - DNA, 120 bp, Artificial Sequence
  ENSG00000167778_4 (sequence is synthesized)
ggggaccggattggctgtggcattgagcctgtgtcctttgatgtgcagaccgcccagatcttcttcaccaaaaatgggaagcgggtgggctctaccatcatgcccatgtccccagatgga

SEQ ID NO: 545708 - DNA, 120 bp, Artificial Sequence
  ENSG00000167778_5 (sequence is synthesized)
ctgttcccagcagtgggcatgcactccctgggtgaggaggtgcggctgcacctcaacgctgagctgggccgtgaggacgacagcgtcatgatggtggacagttacgaggatgaatggggc

SEQ ID NO: 545709 - DNA, 120 bp, Artificial Sequence
  ENSG00000167778_6 (sequence is synthesized)
cggctacatgatgtcagagtctgtgggactctgctggagtacttagggaagggcaaaagcatcgtggatgtggggctggcccaggcccggcacccactcagcacccgcagccactacttc

SEQ ID NO: 545710 - DNA, 120 bp, Artificial Sequence
  ENSG00000167778_7 (sequence is synthesized)
gaggtggagatcgtggaccctggagagaaatgctacatcgccctggggctggcacggaaggactatcccaagaacaggcaccctggctggagcagagggtctgtggcttatcatgcagac

SEQ ID NO: 545711 - DNA, 120 bp, Artificial Sequence
  ENSG00000167778_8 (sequence is synthesized)
gatgggaagatcttccatggcagtggtgtgggggacccctttgggccacgctgttacaaaggggacatcatgggctgtggaatcatgttcccccgggactacattttggacagtgagggg

SEQ ID NO: 545712 - DNA, 120 bp, Artificial Sequence
  ENSG00000167778_9 (sequence is synthesized)
gacagtgatgacagttgtgacacagtgatcctgtctccgactgcccgggccgtccggaacgtgcggaatgtcatgtacctgcaccaggaaggggaagaggaagaggaggaagaggaagag

SEQ ID NO: 545713 - DNA, 120 bp, Artificial Sequence
  ENSG00000167778_10 (sequence is synthesized)
gaagaggatggggaagagatagagccggagcatgagggcaggaaggtggtggttttcttcactcggaatggcaagatcattgggaagaaggatgctgttgttccttctggaggcttcttc

SEQ ID NO: 545714 - DNA, 120 bp, Artificial Sequence
  ENSG00000167778_11 (sequence is synthesized)
cccaccattggaatgctgagctgcggggagaaagtcaaagtagatctgcaccccttgagtggctagggcctcccctccagacctgctccttctccctgctcaccctctgctgggccaggc

SEQ ID NO: 545715 - DNA, 120 bp, Artificial Sequence
  ENSG00000167778_12 (sequence is synthesized)
ggcttcgtttacccagcaggcccctggaggtgtgtagtcactctgcccccactggctcaggcccctgtcacgcttctctgtgcccacgtttctgacctggtgctgccactgttgtcagtc

SEQ ID NO: 545716 - DNA, 120 bp, Artificial Sequence
  ENSG00000167778_13 (sequence is synthesized)
cctgggcctgagtccctggttggacaggaatggacccaaagaatggtgttggtatgtgggtggtcccactcgctttggtcagtgggcttctgggtccccctttccctcaccggccctgtg

SEQ ID NO: 545717 - DNA, 120 bp, Artificial Sequence
  ENSG00000167778_14 (sequence is synthesized)
tgggtggagaggcgtgagcaccctatctcagctgctattcgggcatgatgctttgtagagggtagagtagacagccccctcccctactcaccatggtatttctccttgaattcctctttc

SEQ ID NO: 545718 - DNA, 120 bp, Artificial Sequence
  ENSG00000167778_15 (sequence is synthesized)
ttgttttctttcctggttgtgtgaaccagttgctgctgtcatacccctggcagggccaggggacctctctttggtcatctctgtcctttcactggctgctgccccaggaagactcctcta

SEQ ID NO: 545719 - DNA, 120 bp, Artificial Sequence
  ENSG00000167778_16 (sequence is synthesized)
ggctctccatctttcccttgagagctggctccccaccccaacctgctcaggcaccacagaggatctaggtctctggctccccatacctggacccacatgggtgggtgcctgttgcatgtt

SEQ ID NO: 545720 - DNA, 120 bp, Artificial Sequence
  ENSG00000167778_17 (sequence is synthesized)
taagagagaggggctgtgaggtgacagggcactagggccttcactcctttctccccttccatcctttctttaccagtgccacccatgtccctagctcccgggtattggggctgaggctct

SEQ ID NO: 545721 - DNA, 120 bp, Artificial Sequence
  ENSG00000167778_18 (sequence is synthesized)
ggggcctgtctccctgccagcgtgagggcaagaccccagagccttagctgagcaagcccagaggggcagcgtggcccctccctccccttttcctgccccgtcccatgcctcagcttgctg

SEQ ID NO: 545722 - DNA, 120 bp, Artificial Sequence
  ENSG00000167778_19 (sequence is synthesized)
cttgtgccagttgcctgtttcgcttcagtgtttgattctagcacttacatgtgtcctccccaccaagccctctatctccttctaatccttcaacccctggccccctccccgtaacagtga

SEQ ID NO: 545723 - DNA, 120 bp, Artificial Sequence
  ENSG00000167778_20 (sequence is synthesized)
cttttccagggaggaagaggcagcaggagctgttggccttggtttgcacagagcgggtagggctgtagggaaagcgggtgagctgttgtgctgctgggcctccctttggccctcgcttcc

SEQ ID NO: 545724 - DNA, 120 bp, Artificial Sequence
  ENSG00000167778_21 (sequence is synthesized)
caccctacgatgtatgaaatgtatgtacagaccagagatgtttatacagccgataaagatggagtttccgtatttatcagtatggccggaaccaggagcctttctagtccactgggctag

SEQ ID NO: 545725 - DNA, 120 bp, Artificial Sequence
  ENSG00000167778_22 (sequence is synthesized)
gaacaggactgctggatgggggcagccgaaggcagcttgctcatggggagatgtggaccaatgttgggccagggatgggaatcatatgttccatgggcctggctacaggcctgagcacag

SEQ ID NO: 545726 - DNA, 120 bp, Artificial Sequence
  ENSG00000167778_23 (sequence is synthesized)
atacgtcccctgggagatgaggctttgaccttcctgtgaataagtgttgactccaatttcggctaaagtttatagaaattctttattattagacaaaaatagactctcttttttccccta

SEQ ID NO: 545727 - DNA, 120 bp, Artificial Sequence
  ENSG00000167778_24 (sequence is synthesized)
ggtgatgctcacgccaggacgtaagtgggtaccatcacagaatgaccaggagcagcaagatgaggatgaggcctctgctgtcagtgctggggagaagttgggaggccaggctcgggtcct

SEQ ID NO: 545728 - DNA, 120 bp, Artificial Sequence
  ENSG00000167778_25 (sequence is synthesized)
ggcggcggccgaagagcttgtgtgcggagctgagaggcctatggatgaggaggacgcggcggccccgggtcttgctctgtcagccaggctggaatgtagtggcacaatcagaactgactg

SEQ ID NO: 545729 - DNA, 120 bp, Artificial Sequence
  ENSG00000167778_26 (sequence is synthesized)
agcgggtgggagggtgggaggggctgggtcggaggaggctgggcagaacacctgtgggcacatggtcatgtctgaattgctgggaatggggagtcgggacagtgtccgtgtggggtttgg

SEQ ID NO: 545730 - DNA, 120 bp, Artificial Sequence
  ENSG00000167779_0 (sequence is synthesized)
agctgcgctgcgactgctctggaaggagaggacggggcacaaaccctgaccatgaccccccacaggctgctgccaccgctgctgctgctgctagctctgctgctcgctgccagcccagga

SEQ ID NO: 545731 - DNA, 120 bp, Artificial Sequence
  ENSG00000167779_1 (sequence is synthesized)
ggcgccttggcgcggtgcccaggctgcgggcaaggggtgcaggcgggttgtccagggggctgcgtggaggaggaggatggggggtcgccagccgagggctgcgcggaagctgagggctgt

SEQ ID NO: 545732 - DNA, 120 bp, Artificial Sequence
  ENSG00000167779_2 (sequence is synthesized)
ctcaggagggaggggcaggagtgcggggtctacacccctaactgcgccccaggactgcagtgccatccgcccaaggacgacgaggcgcctttgcgggcgctgctgctcggccgaggccgc

SEQ ID NO: 545733 - DNA, 120 bp, Artificial Sequence
  ENSG00000167779_3 (sequence is synthesized)
gaatccaggcacctctaccacgccctcccagcccaattctgcgggtgtccaagacactgagatgggcccatgccgtagacatctggactcagtgctgcagcaactccagactgaggtcta

SEQ ID NO: 545734 - DNA, 120 bp, Artificial Sequence
  ENSG00000167779_4 (sequence is synthesized)
ccgaggggctcaaacactctacgtgcccaattgtgaccatcgaggcttctaccggaagcggcagtgccgctcctcccaggggcagcgccgaggtccctgctggtgtgtggatcggatggg

SEQ ID NO: 545735 - DNA, 120 bp, Artificial Sequence
  ENSG00000167779_5 (sequence is synthesized)
caagtccctgccagggtctccagatggcaatggaagctcctcctgccccactgggagtagcggctaaagctgggggatagaggggctgcagggccactggaaggaacatggagctgtcat

SEQ ID NO: 545736 - DNA, 120 bp, Artificial Sequence
  ENSG00000167779_6 (sequence is synthesized)
cactcaacaaaaaaccgaggccctcaatccaccttcaggccccgccccatgggcccctcaccgctggttggaaagagtgttggtgttggctggggtgtcaataaagctgtgcttggggtc

SEQ ID NO: 545737 - DNA, 120 bp, Artificial Sequence
  ENSG00000167779_7 (sequence is synthesized)
gagattcccgggaacaaagcaagaaaaatcagagcaatttgggaagtaaacagaaactggaaagggagagggaaagaagagtggggaggacccaggttgggggggccctctccagtccca

SEQ ID NO: 545738 - DNA, 120 bp, Artificial Sequence
  ENSG00000167779_8 (sequence is synthesized)
agaggctctgggttccttccacgggaggggatggagaattcacttggagtttctttcagttccaaatgcccgagtgcaggcttctgggcgtcctcctaaaagtcctgagctctccccgga

SEQ ID NO: 545739 - DNA, 120 bp, Artificial Sequence
  ENSG00000167779_9 (sequence is synthesized)
ccctccggaaactttctccagagccaggagcaacctgcagttgcagaggagaatcctaaggagagtaaaccccaagcaggcactgcccgcccacaggatgtgaaccgcagagaccaacag

SEQ ID NO: 545740 - DNA, 120 bp, Artificial Sequence
  ENSG00000167780_0 (sequence is synthesized)
gagtgggacaagagctctacagggcaggccacactgcgaaggaaggaggcaacacgggcaagggctgcctgctgcccgctggagaccgcaccatggagccaggcggggcccgtctgcgtc

SEQ ID NO: 545741 - DNA, 120 bp, Artificial Sequence
  ENSG00000167780_1 (sequence is synthesized)
tgcagaggacagaagggctgggaggggagcgggagcgccaaccctgtggagatggaaacactgagacgcacagagccccggacttggtacaatggacccgacacatggaggctgtgaagg

SEQ ID NO: 545742 - DNA, 120 bp, Artificial Sequence
  ENSG00000167780_2 (sequence is synthesized)
cacaattgctggagcaagcgcagggacaactgagggagctgctggatcgggccatgcgggaggctatacaatcctacccatcacaagacaaacctctgcccccacctcccccaggttcct

SEQ ID NO: 545743 - DNA, 120 bp, Artificial Sequence
  ENSG00000167780_3 (sequence is synthesized)
tgagcaggacccaggagccatccctggggaaacagaaagttttcatcatccgcaagtccctgcttgatgagctgatggaggtgcagcatttccgcaccatctaccacatgttcatcgctg

SEQ ID NO: 545744 - DNA, 120 bp, Artificial Sequence
  ENSG00000167780_4 (sequence is synthesized)
gcctgtgtgtcttcatcatcagcaccctggccatcgacttcattgatgagggcaggctgctgctggagtttgacctactgatcttcagcttcggacagctgccattggcgctggtgacct

SEQ ID NO: 545745 - DNA, 120 bp, Artificial Sequence
  ENSG00000167780_5 (sequence is synthesized)
gggtgcccatgtttctgtccaccctgttggcgccgtaccaggccctacggctgtgggccaggggcacctggacgcaggcgacgggcctgggctgtgcgctgctagccgcccacgccgtgg

SEQ ID NO: 545746 - DNA, 120 bp, Artificial Sequence
  ENSG00000167780_6 (sequence is synthesized)
tgctctgcgcgctgccggtccacgtggccgtggagcatcagctcccgccggcctcccgttgtgtcctggtcttcgagcaggttaggttcctgatgaaaagctactccttcctgagagagg

SEQ ID NO: 545747 - DNA, 120 bp, Artificial Sequence
  ENSG00000167780_7 (sequence is synthesized)
ctgtgcctgggacccttcgtgccagacgaggtgaggggatccaggcccccagtttctccagctacctctacttcctcttctgcccaacactcatctacagggagacttaccctaggacgc

SEQ ID NO: 545748 - DNA, 120 bp, Artificial Sequence
  ENSG00000167780_8 (sequence is synthesized)
ttgcccaggccctgggatgtgtgctctatgcctgcttcatcctgggccgcctctgtgttcctgtctttgccaacatgagccgagagcccttcagcacccgtgccctggtgctctctatcc

SEQ ID NO: 545749 - DNA, 120 bp, Artificial Sequence
  ENSG00000167780_9 (sequence is synthesized)
tgcatgccacgttgccaggcatcttcatgctgctgctcatcttctttgccttcctccattgctggctcaacgcctttgccgagatgctacgatttggagacaggatgttctaccgggact

SEQ ID NO: 545750 - DNA, 120 bp, Artificial Sequence
  ENSG00000167780_10 (sequence is synthesized)
ggtggaactcaacgtccttctccaactactaccgcacttggaacgtggtggtccatgactggctgtacagctacgtgtatcaggatgggctgcggctccttggtgcccgggcccgagggg

SEQ ID NO: 545751 - DNA, 120 bp, Artificial Sequence
  ENSG00000167780_11 (sequence is synthesized)
tagccatgctgggtgtgttcctggtctccgcagtggcccatgagtatatcttctgcttcgtcctggggttcttctatcccgtcatgctgatactcttccttgtcattggaggaatgttga

SEQ ID NO: 545752 - DNA, 120 bp, Artificial Sequence
  ENSG00000167780_12 (sequence is synthesized)
acttcatgatgcatgaccagcgcaccggcccggcatggaacgtgctgatgtggaccatgctgtttctaggccagggaatccaggtcagcctgtactgccaggagtggtacgcacggcggc

SEQ ID NO: 545753 - DNA, 120 bp, Artificial Sequence
  ENSG00000167780_13 (sequence is synthesized)
actgccccttaccccaggcaactttctgggggctggtgacacctcgatcttggtcctgccatacctagaggtcgggacagacgacgctacctgcccagacaccaccaagttctctgcctg

SEQ ID NO: 545754 - DNA, 120 bp, Artificial Sequence
  ENSG00000167780_14 (sequence is synthesized)
caaaacctgggaccaggactcctgtctgcattcccaaatttggctctgagtcgaggcaacctgcacacaagaccccaccaaggaatgtgcaaggactgagatctgcagacttgtgggtaa

SEQ ID NO: 545755 - DNA, 120 bp, Artificial Sequence
  ENSG00000167780_15 (sequence is synthesized)
ctgatcacagacctcagcatgggggtgaccagggtgactcttcaatccctatccccatgggctgggtacaggatatcctcctaccccatgactgtcttagggagacttggggtaccttat

SEQ ID NO: 545756 - DNA, 120 bp, Artificial Sequence
  ENSG00000167780_16 (sequence is synthesized)
ggatttgatgaatgtgggggaactcagaggaactggggccaccaaggttggaaaagggtttggttcttgactttgtattccttccaatacagcaataaactttgtctccctttttattca

SEQ ID NO: 545757 - DNA, 120 bp, Artificial Sequence
  ENSG00000167785_0 (sequence is synthesized)
caggtggccctgaattcattgcctgctcagcaaaataaaggcccagtgtggaagccggaacttgcatttgaagaaggatgggaaggatgggttgaggagggcccatccccagcagcccga

SEQ ID NO: 545758 - DNA, 120 bp, Artificial Sequence
  ENSG00000167785_1 (sequence is synthesized)
gagggaggaggccacggagacttggagcattcccgtttcttccagagcgctgcgggataaaggaggagcgtcctgcttcccggctgccctgttgctgtcggagtcacaggatggcggctg

SEQ ID NO: 545759 - DNA, 120 bp, Artificial Sequence
  ENSG00000167785_2 (sequence is synthesized)
tcatcctgccctcgactgctgctccgtcttccctgttcccagcctctcagcaaaaaggacacacacagggcggagagctggttaatgagctcctgacaagctggctacggggcttggtaa

SEQ ID NO: 545760 - DNA, 120 bp, Artificial Sequence
  ENSG00000167785_3 (sequence is synthesized)
ccttcgaggatgtggccgtggagttcacccaggaggagtgggcgttgctggaccctgcccaaaggacactgtacagggatgtgatgctggagaactgcaggaacctggcctcactagggt

SEQ ID NO: 545761 - DNA, 120 bp, Artificial Sequence
  ENSG00000167785_4 (sequence is synthesized)
gtcgtgttaataaacccagtctgatatcccagttggaacaagacaagaaggtggtgacagaggaaagaggaattctaccaagcacctgtccagatttggagactctacttaaagccaaat

SEQ ID NO: 545762 - DNA, 120 bp, Artificial Sequence
  ENSG00000167785_5 (sequence is synthesized)
ggttaactcctaagaagaatgttttcagaaaagaacagtctaaaggtgtaaaaacggaaagaagtcatcgtggagtgaaactcaatgaatgtaatcagtgttttaaagtcttcagcacga

SEQ ID NO: 545763 - DNA, 120 bp, Artificial Sequence
  ENSG00000167785_6 (sequence is synthesized)
aatctaacctaactcagcacaagagaattcatactggagaaaaaccctatgactgtagtcaatgtgggaagtccttcagtagcagatcttaccttactattcataagagaatccataatg

SEQ ID NO: 545764 - DNA, 120 bp, Artificial Sequence
  ENSG00000167785_7 (sequence is synthesized)
gggagaaaccctatgaatgcaatcactgtgggaaagcatttagtgatccctcatcccttagactgcatttgagaattcacactggagaaaaaccctatgaatgtaaccagtgttttcacg

SEQ ID NO: 545765 - DNA, 120 bp, Artificial Sequence
  ENSG00000167785_8 (sequence is synthesized)
ttttccgcaccagttgtaacctcaaaagccacaagaggattcacacgggggagaatcaccatgaatgtaatcagtgtggaaaagctttcagcacaaggtcctctctcactgggcacaata

SEQ ID NO: 545766 - DNA, 120 bp, Artificial Sequence
  ENSG00000167785_9 (sequence is synthesized)
gcattcatacaggggagaaaccttatgaatgtcacgattgtgggaaaaccttcaggaagagctcctatctgacacagcacgtaagaactcatactggagaaaaaccctatgaatgtaacg

SEQ ID NO: 545767 - DNA, 120 bp, Artificial Sequence
  ENSG00000167785_10 (sequence is synthesized)
agtgtgggaaatccttcagcagtagcttttctcttactgtgcacaagagaatacataccggagagaaaccctacgagtgcagtgactgtggaaaagcctttaataatctctcagctgtga

SEQ ID NO: 545768 - DNA, 120 bp, Artificial Sequence
  ENSG00000167785_11 (sequence is synthesized)
agaaacacttaagaactcacactggagaaaaaccctatgaatgtaatcattgtgggaaatccttcacaagtaactcctatctttctgtgcacaagagaatacataatagatggatatgaa

SEQ ID NO: 545769 - DNA, 120 bp, Artificial Sequence
  ENSG00000167785_12 (sequence is synthesized)
tctggaggaaagcactcattgatctttcatccctaagatagtttgagagagctcacactggatatataagttatttgttgcagcataacaaatgatccccgcaaattttgtggcttcaaa

SEQ ID NO: 545770 - DNA, 120 bp, Artificial Sequence
  ENSG00000167785_13 (sequence is synthesized)
cacgaaatgtttattctctaacaatttctacagatcaggaattcaagaacagcttatctctgtagttacactgcaggatctctcatgcctttacttacaatcaagatgtcagccaaagct

SEQ ID NO: 545771 - DNA, 120 bp, Artificial Sequence
  ENSG00000167785_14 (sequence is synthesized)
atagtcatctaacatctttactgatgaacagtccacttccaagatgacttattcacatgcctggaaagttgatgttggttgttgtcaggggaccttcagtcattaccatgtaggcctctt

SEQ ID NO: 545772 - DNA, 120 bp, Artificial Sequence
  ENSG00000167785_15 (sequence is synthesized)
tacaaggcccagctccttgacaatttggcaataagttctcgccaaggttagtgatccaagagaggaccaatacagaggccaaaatggcttttatgacctatcctcaggaggactgctaag

SEQ ID NO: 545773 - DNA, 120 bp, Artificial Sequence
  ENSG00000167785_16 (sequence is synthesized)
ctttcacttatttcctattgtgttggtctcacaacacaccaatcctgatacaatgtgagagactgcagaaggtatgaataccaggaaacagataactcagaagcatctgggaaatttgcc

SEQ ID NO: 545774 - DNA, 120 bp, Artificial Sequence
  ENSG00000167785_17 (sequence is synthesized)
atggaattaatgaagaaaagccctcagcacatcatccttctactctaatcaatatgaaatagcattcagtaactcctattaattcactctgaagagaaaccttttgaggacaatctgtat

SEQ ID NO: 545775 - DNA, 120 bp, Artificial Sequence
  ENSG00000167785_18 (sequence is synthesized)
ggtaaagctctcagctcgaattctcaccttcatgggcccagaagattatgtactgagagaatcctgaagaatggaacagctgtagaaagccttcagtgctatcagcagggattcatgtga

SEQ ID NO: 545776 - DNA, 120 bp, Artificial Sequence
  ENSG00000167785_19 (sequence is synthesized)
cagctcacactaagggagaaaacctgtgaaggtctcagaaggcttcagtgacagtcatcccttaagacgcactggaaatcacacaatggaacaacactcagaaatgcggaataccctaca

SEQ ID NO: 545777 - DNA, 120 bp, Artificial Sequence
  ENSG00000167785_20 (sequence is synthesized)
gcaaaagtgttcacattactgagcaaactatagtgtggtattctgcagtgactatgggaaagccttgaatgttctatcggtttttaagggacttgagaattaattctggagagaatgccc

SEQ ID NO: 545778 - DNA, 120 bp, Artificial Sequence
  ENSG00000167785_21 (sequence is synthesized)
cattgaacatcatcaatattggagagctttctgtttttctacatttgttaggaaacttgtgagcattcacactacagagaaacttgaaatataaagaagaagagaaagccttcagtgatg

SEQ ID NO: 545779 - DNA, 120 bp, Artificial Sequence
  ENSG00000167785_22 (sequence is synthesized)
cctctgtgttagggaaaatatggaacttctccctggatgcaaaacctatgagtatattaatattggaaaatttttcagtgattcttctctttcttgtatatgagagaacttatatggaga

SEQ ID NO: 545780 - DNA, 120 bp, Artificial Sequence
  ENSG00000167785_23 (sequence is synthesized)
aacccctaggaatgtaatcagtgttaggatgcctcagcctgaactcttcactgagtggccacaattttcactgggaacaaaaagtataatcactgttttgagtgtgggatatcctttatc

SEQ ID NO: 545781 - DNA, 120 bp, Artificial Sequence
  ENSG00000167785_24 (sequence is synthesized)
agtgtctcatctgtagattggactgctggctcattaatttttttagtctttttttcttttaatataaacatttgtgtatagctgttccctaaaataaacattaacatatttcataatttt

SEQ ID NO: 545782 - DNA, 120 bp, Artificial Sequence
  ENSG00000167785_25 (sequence is synthesized)
ggtaccgtgggaggggccgcgcgtggggcagcggggagcgagtccctccgtccccgcgagtcggcgcttttggccccgcgggaggggccgggctcgatgagaaaagcatcattcaagctc

SEQ ID NO: 545783 - DNA, 120 bp, Artificial Sequence
  ENSG00000167785_26 (sequence is synthesized)
agattcgtgttgaagcctgccacaaggtccacctgttgttgtgggtttttgggtgaccaggggttacccccagcagtgtgtgagaatgaagagtgtgggccactgtgtctctgttgacct

SEQ ID NO: 545784 - DNA, 120 bp, Artificial Sequence
  ENSG00000167785_27 (sequence is synthesized)
gccagataggaaatagcgccagagttgctgcaatccacgtctccctggaattcaggagcagcttggctggaaggctctggctggaaacttgcagaaggctgtcagctgggtctgcatcat

SEQ ID NO: 545785 - DNA, 120 bp, Artificial Sequence
  ENSG00000167785_28 (sequence is synthesized)
ctgaaggctcaacgggtaccgggggccactccatggcctgcgagtcagagctggccgtcggtgggaggcctcagttcctctccacataggcctctccacagggccacttgagcgtcttcc

SEQ ID NO: 545786 - DNA, 120 bp, Artificial Sequence
  ENSG00000167785_29 (sequence is synthesized)
caccatggcaactggtgtcctctagagcaacatccaggagaccaaggcggaagcagctgtagtgccttccaagacctggtcctgaaagtcacccctgcacccacccccgctgtctcctca

SEQ ID NO: 545787 - DNA, 120 bp, Artificial Sequence
  ENSG00000167785_30 (sequence is synthesized)
attcaaaaagttatttccaaataccttctgagtgattcagtttatcataatggaaattagtatttataaacacatttttctaatgtagtggtatttttggcagagtacatgagctttatg

SEQ ID NO: 545788 - DNA, 120 bp, Artificial Sequence
  ENSG00000167785_31 (sequence is synthesized)
atactgattattttctctctatcttggtatgccaaatactgttggtttctttcccagtgtccgttctcttcagtttattcgtttaaagaaacaaacatgttgttcaagttgtctgtgaac

SEQ ID NO: 545789 - DNA, 120 bp, Artificial Sequence
  ENSG00000167785_32 (sequence is synthesized)
aatatcgaaagttctcaatcttatagtttttcctgaagcccaggcgggttttttcgcactcccctggcaatgagaagtaagtcgaagtcactgtgtggaacatctcctggcttgttctcc

SEQ ID NO: 545790 - DNA, 120 bp, Artificial Sequence
  ENSG00000167785_33 (sequence is synthesized)
tcacatattttccattcacctcacccattctgtctcttggaaagtggcctcaaggtctagagtttgaagagcttctttttgaccacaatgacagaaaccaaagtgcagccaaaaatcaca

SEQ ID NO: 545791 - DNA, 120 bp, Artificial Sequence
  ENSG00000167785_34 (sequence is synthesized)
atgctttgggctctccaggagcctccgattggctgcatctgctctggactccttattcttatacttcttatgtgactaaaagaaacccctaggctgggtgtggtggctcacgcctttaat

SEQ ID NO: 545792 - DNA, 82 bp, Artificial Sequence
  ENSG00000167785_35 (sequence is synthesized)
tagctgggtgtggtggtgcacacctgtattcccagctactcgggaaactgagacaggagaattgcccgccagtgcactccag

SEQ ID NO: 545793 - DNA, 120 bp, Artificial Sequence
  ENSG00000167785_36 (sequence is synthesized)
gactccatctcaaaataaacaaataaatatttttaaaaaaagaaacccctaactgattgaagccaacatgatctgttgtttgtttttgaggtggtgttctgttaacttccagcaggatgc

SEQ ID NO: 545794 - DNA, 120 bp, Artificial Sequence
  ENSG00000167785_37 (sequence is synthesized)
agaatctaactggtaaacctataaattggtcaagttttacccatgttgtttctttgaaaacaatgtatattctctaatatttggatatagggtatatgaacattaatgcaacttaattgt

SEQ ID NO: 545795 - DNA, 120 bp, Artificial Sequence
  ENSG00000167785_38 (sequence is synthesized)
atttccaagtacagtacgtatgttcagatttctttttctaaccttatttagtgatagaggtgtggtaaactcttccattatgtttatgtattaacactgtaattttgtcatttttatata

SEQ ID NO: 545796 - DNA, 120 bp, Artificial Sequence
  ENSG00000167785_39 (sequence is synthesized)
ttttgacattatgtaactagatgcatacaggattaggtattctgtattcctttttatgtggagatgatatttttacatagcaaagtattgtaatgcattaataataaatggtcaaacatt

SEQ ID NO: 545797 - DNA, 81 bp, Artificial Sequence
  ENSG00000167785_40 (sequence is synthesized)
atgcattaataataaatggtcaaacatttatttatttatttatttattttagatggagtttcactcttgtcatcaaggggc

SEQ ID NO: 545798 - DNA, 120 bp, Artificial Sequence
  ENSG00000167785_41 (sequence is synthesized)
cagacatttatattgcacttcccatagatcaggcccccttctaaatgacatataagtattaactcagtatgcattataaacttaagtatgtaatgttattatccccagtttacagatgag

SEQ ID NO: 545799 - DNA, 120 bp, Artificial Sequence
  ENSG00000167785_42 (sequence is synthesized)
aaaactggtatgatacacttaagttacttgcctgcattcactgactggtaaatggtagagccaagatctgaacccagacagtccatgcacttaaccactaccctattaacggagtatgtt

SEQ ID NO: 545800 - DNA, 120 bp, Artificial Sequence
  ENSG00000167785_43 (sequence is synthesized)
ctgtgtgccaggcaaagttttgccattgaaatacttcacctaatggaggaggaacagattatagaaaaatcaagaaaatatggtattatagagttataggaaaaaaaagcattttaggag

SEQ ID NO: 545801 - DNA, 120 bp, Artificial Sequence
  ENSG00000167785_44 (sequence is synthesized)
agttaaggggggttgggaataataattttatataactaggaaaagaaagcctcttggtaaggagcatttgagcggagatctcaacaagttgggacagtgagtcatatgaatttgtcttgc

SEQ ID NO: 545802 - DNA, 120 bp, Artificial Sequence
  ENSG00000167785_45 (sequence is synthesized)
aagagtagtgttggcatgcaaaggcccacaacaaggaggccaatacagctggagtggaacaaaggggtgatgagggagcagtaaaagatgatgtggtcagagacatggtagatcctgatc

SEQ ID NO: 545803 - DNA, 120 bp, Artificial Sequence
  ENSG00000167785_46 (sequence is synthesized)
ttgttgggttttctgagacattgttaggacttttccttatttcagtgagttggcacatcagtcagggtcccagcaggaactcaggttgacacccacagactaggacaattcaagtagagt

SEQ ID NO: 545804 - DNA, 120 bp, Artificial Sequence
  ENSG00000167785_47 (sequence is synthesized)
tttcataaagggtctactcagtcctgtggacaggatccagggaaaccacaaaaagttgtaaagcacccagcagcttagcagggcagagctctaacacctcacagcctgaagggacgaagg

SEQ ID NO: 545805 - DNA, 120 bp, Artificial Sequence
  ENSG00000167785_48 (sequence is synthesized)
gagggagcaactgaatctggagacgagaggagagggctgcattccaggagctgagagaggtcagtcagcgatagcatccagccccaggtcctcctgcaggaaatagccagggtcagacct

SEQ ID NO: 545806 - DNA, 120 bp, Artificial Sequence
  ENSG00000167785_49 (sequence is synthesized)
cactctccttcatccattgagacaggaaaatatccccatttatgaatatataaatcaatagcagatccagagacaatttgggtattggagttagcagacaaagactttaaaataaccaag

SEQ ID NO: 545807 - DNA, 120 bp, Artificial Sequence
  ENSG00000167785_50 (sequence is synthesized)
aataatatgttaagggaaatggaggaaacatggacaaaccatagaaaatgagagacaaactgcaaatctaccaaacaaccaaagaagaaggacacattgctttcaaagcagcatcagtaa

SEQ ID NO: 545808 - DNA, 120 bp, Artificial Sequence
  ENSG00000167785_51 (sequence is synthesized)
gactaatgatgacttttcaaaagaaactatggaagcaagaagacaatgaatgacatctgacatataaagggttaaatgggttggaggagggggaaattgtcaatcaaaagttctgtaacc

SEQ ID NO: 545809 - DNA, 120 bp, Artificial Sequence
  ENSG00000167785_52 (sequence is synthesized)
ttggaggagggggaaattgtcaatcaaaagttctgtaacctaagaaaatattcttcaaaactgaaggcaacaatgttttccaatgggagggaatatttttttttttttttttgagatgga

SEQ ID NO: 545810 - DNA, 120 bp, Artificial Sequence
  ENSG00000167785_53 (sequence is synthesized)
gatttttttaagctgagagaattaacagcataaccgtattttcagaaacactgaagagatttcttcaggcttcaggaaaatgattccatagagacatacataattccaggaattaagatc

SEQ ID NO: 545811 - DNA, 120 bp, Artificial Sequence
  ENSG00000167785_54 (sequence is synthesized)
aacaggaaacataagatgcaagtaaatataaatcagtactgactgtataaaacaaccctgtatagttttacaacttttatgtatatctaaactttccaaaataaaatgcttttaaaaaca

SEQ ID NO: 545812 - DNA, 120 bp, Artificial Sequence
  ENSG00000167785_55 (sequence is synthesized)
gtggggcagcggggagcgagtccctccgtccccgcgagtcggcgcttttggccccgcgggaggggccgggctcggtgagcgactggcgggggctcgggtccgagtccagggggcgacgtg

SEQ ID NO: 545813 - DNA, 120 bp, Artificial Sequence
  ENSG00000167785_56 (sequence is synthesized)
ggggctcgggtccgagtccagggggcgacgtgggccgcggacaccgccagccacgggccctgcgtccctccagggagccgtgtttcggttcatgaggcctcgggctgtgagcttagatga

SEQ ID NO: 545814 - DNA, 120 bp, Artificial Sequence
  ENSG00000167785_57 (sequence is synthesized)
ggcgcttttggccccgcgggaggggccgggctcgatgagaaaagcatcattcaagctcagattcgtgttgaagcctgccacaaggtccacctgttgttgtgggtttttgggtgaccaggt

SEQ ID NO: 545815 - DNA, 120 bp, Artificial Sequence
  ENSG00000167785_58 (sequence is synthesized)
gaactcctcgtgggcttttcctgtgctggggttgtaaccacattgaagtcactaagagtgaaggtatcttaaggaaagttcaaggtaaaaagacagaggtgtttatggttacatgtgtgt

SEQ ID NO: 545816 - DNA, 120 bp, Artificial Sequence
  ENSG00000167785_59 (sequence is synthesized)
cattcaagctcagattcgtgttgaagcctgccacaaggtccacctgttgttgtgggtttttgggtgaccagaccaagtctcactctgttggccaggttggagtgcagtggcgcgatcttg

SEQ ID NO: 545817 - DNA, 120 bp, Artificial Sequence
  ENSG00000167785_60 (sequence is synthesized)
caggcatcccaggatttccaggcatcagatggagggtgagggctgcccagaaaatgtcagtgtgtgtcaacatttactgcaggttcagagctccctccagggtccctgagtacatcatgt

SEQ ID NO: 545818 - DNA, 120 bp, Artificial Sequence
  ENSG00000167785_61 (sequence is synthesized)
gctcctgagagttttaagggaaagccaagtaaagacgtgatgatgttctaaacccaagcaattaataaacgccacggaaatcagtcattcacttaccaagtatttctctgctttctgcca

SEQ ID NO: 545819 - DNA, 120 bp, Artificial Sequence
  ENSG00000167785_62 (sequence is synthesized)
tgtcacgggcccatgatcccctggagattgagggaaataagatcacaggagctcccagtctgagtgagaaaaggcagctgctctgtggtactgtgcactggacctgggaatggcctaagg

SEQ ID NO: 545820 - DNA, 120 bp, Artificial Sequence
  ENSG00000167791_0 (sequence is synthesized)
agtactcccaggctctcatcgggagcagctgggggctggcaggagtcctcaggcagcagcatccgccgaggcccacccgggccacccccggggttccaggcctggcatggttcagggccc

SEQ ID NO: 545821 - DNA, 120 bp, Artificial Sequence
  ENSG00000167791_1 (sequence is synthesized)
atggggaactgtgccaagcggccctggcgccggggccctaaggaccccttgcagtggctcggctccccaccaaggggctcctgccccagccccagctccagccccaaggagcagggggac

SEQ ID NO: 545822 - DNA, 120 bp, Artificial Sequence
  ENSG00000167791_2 (sequence is synthesized)
cccgcgccaggcgtccagggctactcggtgctcaacagcctggtggggcctgcctgcatcttcctgcggcccagcattgccgccacccaactcgaccgggagctgcggcccgaggagatt

SEQ ID NO: 545823 - DNA, 120 bp, Artificial Sequence
  ENSG00000167791_3 (sequence is synthesized)
gaagagctgcaggtcgccttccaggagtttgaccgagaccgggacggctacattggctgccgggagctgggtgcctgcatgcggaccctgggctacatgcccaccgagatggagctcatc

SEQ ID NO: 545824 - DNA, 120 bp, Artificial Sequence
  ENSG00000167791_4 (sequence is synthesized)
ggagctgatgggccccaagctgctggcagagacggcagacatgatcggtgtccgggagctacgggacgccttccgggagttcgacaccaatggggacggccgcatcagcgtgggcgagct

SEQ ID NO: 545825 - DNA, 120 bp, Artificial Sequence
  ENSG00000167791_5 (sequence is synthesized)
ccgggcggccctcaaggccctgctgggggagcgcctcagccagcgggaggtggacgagatcctccaggacgtggacctcaatggggacggtctggtcgacttcgaagagtttgtgcgaat

SEQ ID NO: 545826 - DNA, 120 bp, Artificial Sequence
  ENSG00000167791_6 (sequence is synthesized)
gatgtctcggtgagcctgtacagaagctggaggcagcataaaggactcaaggaccacagcctctgcccaccagcatgttccttgaagcccatcgcctctagcggggaccctcctttcctc

SEQ ID NO: 545827 - DNA, 120 bp, Artificial Sequence
  ENSG00000167791_7 (sequence is synthesized)
cccatcccacctgtgtgcagtgcccttgcctgccttcacccccaccaccacttctccaataaagccgcctggccttgtctctgtctctctgacaataaaatatctccaagcctggggaga

SEQ ID NO: 545828 - DNA, 120 bp, Artificial Sequence
  ENSG00000167791_8 (sequence is synthesized)
aggcagcagcatccgccgaggcccacccgggccacccccggggttccaggcctggcatggttcagggcccatggggaactgtgccaagcggccctggcgccggggccctaaggaccggga

SEQ ID NO: 545829 - DNA, 120 bp, Artificial Sequence
  ENSG00000167791_9 (sequence is synthesized)
atggaggaagggacagaaagaagagtagcagggacccaggccacacctgtggctgcccacaagaccactctcccgcaggactggggaggccggacggagcagcgtccctcagccaggagg

SEQ ID NO: 545830 - DNA, 120 bp, Artificial Sequence
  ENSG00000167791_10 (sequence is synthesized)
aggtaccaagccctcatctccatggcccagccccagggcccagcagagggcagcctcccaacgggggaccccagcccctctgagggcactccaggaaccagccaggcccctggcagccca

SEQ ID NO: 545831 - DNA, 120 bp, Artificial Sequence
  ENSG00000167791_11 (sequence is synthesized)
agtctggggaggctgtgctctccagggggccttgggcccaagtggctcccctcagcagcggagacgctcaaagataatcccggattaggacccaagccccaggcccaagtcccccgcctg

SEQ ID NO: 545832 - DNA, 120 bp, Artificial Sequence
  ENSG00000167792_0 (sequence is synthesized)
atcgcgccagttcctcagcctcagtgctatgaaggtgacagcgtgaggtgacccatctggcccgccgcgatgctggcaacacggcggctgctcggctggtcgcttcccgcgcgggtatct

SEQ ID NO: 545833 - DNA, 120 bp, Artificial Sequence
  ENSG00000167792_1 (sequence is synthesized)
gtgcgtttcagcggcgacacgacagcacccaagaaaacctcatttggctcgctgaaggatgaagaccggattttcaccaacctgtacggccgccatgactggaggctgaaaggttccctg

SEQ ID NO: 545834 - DNA, 120 bp, Artificial Sequence
  ENSG00000167792_2 (sequence is synthesized)
agtcgaggtgactggtacaagacaaaggagatcctgctgaaggggcccgactggatcctgggcgagatcaagacatcgggtttgaggggccgtggaggcgctggcttccccactggcctc

SEQ ID NO: 545835 - DNA, 120 bp, Artificial Sequence
  ENSG00000167792_3 (sequence is synthesized)
aagtggagcttcatgaataagccctcagatggcaggcccaagtatctggtggtgaacgcagacgagggggagccgggcacctgcaaggaccgggagatcttacgccatgatcctcacaag

SEQ ID NO: 545836 - DNA, 120 bp, Artificial Sequence
  ENSG00000167792_4 (sequence is synthesized)
ctgctggaaggctgcctggtggggggccgggccatgggcgcccgcgctgcctatatctacatccgaggggaattctacaatgaggcctccaatctgcaggtggccatccgagaggcctat

SEQ ID NO: 545837 - DNA, 120 bp, Artificial Sequence
  ENSG00000167792_5 (sequence is synthesized)
gaggcaggtctgattggcaagaatgcttgtggctctggctatgattttgacgtgtttgtggtgcgcggggctggggcctacatctgtggagaggagacagcgctcatcgagtccattgag

SEQ ID NO: 545838 - DNA, 120 bp, Artificial Sequence
  ENSG00000167792_6 (sequence is synthesized)
ggcaagcagggcaagccccgcctgaagccccccttccccgcagacgtgggagtgtttggctgccccacaactgtggccaacgtggagacagtggcagtgtcccccacaatctgccgccgt

SEQ ID NO: 545839 - DNA, 120 bp, Artificial Sequence
  ENSG00000167792_7 (sequence is synthesized)
ggaggtacctggtttgctggctttggcagagaacgcaactcaggcaccaaactattcaacatctctggccatgtcaaccacccttgcactgtggaggaggagatgtctgtgcccttgaaa

SEQ ID NO: 545840 - DNA, 120 bp, Artificial Sequence
  ENSG00000167792_8 (sequence is synthesized)
gaactgattgagaagcatgctgggggtgtcacgggcggctgggacaacctccttgctgtgatccctggcggctcgtctaccccactgatccccaagtctgtgtgtgagacggtgctgatg

SEQ ID NO: 545841 - DNA, 120 bp, Artificial Sequence
  ENSG00000167792_9 (sequence is synthesized)
gacttcgatgcgctggtgcaggcacagacaggcctgggcacagctgcggtgatcgtcatggaccgctcgacggacatcgtgaaagccatcgcccgcctcattgagttctataagcacgag

SEQ ID NO: 545842 - DNA, 120 bp, Artificial Sequence
  ENSG00000167792_10 (sequence is synthesized)
agctgtggccagtgtaccccatgccgtgagggtgtggactggatgaacaaggtgatggcacgtttcgtgaggggggatgcccggccggccgagatcgactccctgtgggagatcagcaag

SEQ ID NO: 545843 - DNA, 120 bp, Artificial Sequence
  ENSG00000167792_11 (sequence is synthesized)
cagatagaaggccatacgatttgtgctctgggtgacggggccgcctggcctgtgcagggtctgatccgccactttcggccggagctcgaggagcggatgcagcggtttgcccagcagcat

SEQ ID NO: 545844 - DNA, 120 bp, Artificial Sequence
  ENSG00000167792_12 (sequence is synthesized)
caggcccggcaggctgcctcttagcccaccaccctggcctgctgtcctgcgtctatccatgtggaatgctggacaataaagcgagtgctgcccaccctccagctgccgctgctgtgactg

SEQ ID NO: 545845 - DNA, 120 bp, Artificial Sequence
  ENSG00000167792_13 (sequence is synthesized)
tggaaaggaagaaaggcctagattccagtccagctccaccactcagcagcttcatgcccacagacaaaggacaaaatccccctgagcctcagttttttcgtggacaaaatggagtgaaca

SEQ ID NO: 545846 - DNA, 120 bp, Artificial Sequence
  ENSG00000167792_14 (sequence is synthesized)
ccttgtggggctgctgtggggtatgtgagaaaatagctgcaaaggagttttgtaaacagcacgttttagagagatcaggaaggatgattacagcacaaaagaacagagatggttcctcac

SEQ ID NO: 545847 - DNA, 120 bp, Artificial Sequence
  ENSG00000167792_15 (sequence is synthesized)
catgaggactggaaaagagctggggagagcaggccaaaaaggtcactcttatcacgaggaccacagcagagggttccaggaaactgaaaaagacgagttcatcaggcttccaagacctcc

SEQ ID NO: 545848 - DNA, 120 bp, Artificial Sequence
  ENSG00000167792_16 (sequence is synthesized)
tgggaaggcaaaggacagagggacctcctcagcctaggattccgtgacaggccctctgggaagaactccgcgaacaaccccctgccttggagtctgcaatccttcctcgagcacacggac

SEQ ID NO: 545849 - DNA, 120 bp, Artificial Sequence
  ENSG00000167792_17 (sequence is synthesized)
gcccggggtggggaagcccacagtctggcagggctcgcactgggcagaataattgcaacgtagtcatgaggatcgggctatgacctgcctgacttttcactcctcccatgatacaccgat

SEQ ID NO: 545850 - DNA, 120 bp, Artificial Sequence
  ENSG00000167792_18 (sequence is synthesized)
gcataccgcaggtgcacactaaacgccgaatctatagaaagtggaacacaccaggacccagcagaaggcgacatgcgaggtttgtttacttgtggcatcaaaggctgggagccggcgagc

SEQ ID NO: 545851 - DNA, 120 bp, Artificial Sequence
  ENSG00000167792_19 (sequence is synthesized)
taaggagggagcgaaagagcgagcggtggggacagccaccgctaaatgccagcccggtggagggaggaaggcggaccccaggccggtgggaccacatctcccagaagccccggcgccaag

SEQ ID NO: 545852 - DNA, 120 bp, Artificial Sequence
  ENSG00000167792_20 (sequence is synthesized)
gcactggcctctcagtcctcccccgaggaggcggggccgctggcgaagttgaaggggcgcagcgataccggtgcgcggcgctggcgtcgggcgcgtgacgtctttcctgcgcgccaccta

SEQ ID NO: 545853 - DNA, 120 bp, Artificial Sequence
  ENSG00000167792_21 (sequence is synthesized)
tgaggcccagcctggctggggccacgggtgtttggggccgggtgtcgcggccgcgcccgtgcacgagcagtccctggggtctgtagtggcctctggagagcccttctccccaggccaggc

SEQ ID NO: 545854 - DNA, 120 bp, Artificial Sequence
  ENSG00000167792_22 (sequence is synthesized)
gggaaggcccccgctccggcctggttgaagtaggggaacgggtcccaacgcggggccgactcccttgaccctctgacttgctggcttcccttgttttacagtcctcggcctggcggaagt

SEQ ID NO: 545855 - DNA, 120 bp, Artificial Sequence
  ENSG00000167792_23 (sequence is synthesized)
cacccgggatctggctaggctccctttggattgttcttagggatttctgagtggcttcccggctggggccagatagagagtaggctggcaacaacacacaggctcccccagggccgcctg

SEQ ID NO: 545856 - DNA, 120 bp, Artificial Sequence
  ENSG00000167792_24 (sequence is synthesized)
ctgtccctcctcctgcctcggtcccctccgcaccagtgctgctctgtggctccaccttcacagtgcctgttctgaggctaagggcatggggtgaacaaggcaatgggcatctctggagtt

SEQ ID NO: 545857 - DNA, 120 bp, Artificial Sequence
  ENSG00000167792_25 (sequence is synthesized)
ctgggacacacctccctgccaggaaacttgccccaccccctagcagccaccagttctcttcccatttccctgaaggagtgtttggctgccccacaactgtggccaacgtggagacagtgg

SEQ ID NO: 545858 - DNA, 120 bp, Artificial Sequence
  ENSG00000167792_26 (sequence is synthesized)
cgccagttcctcagcctcagtgctatgaaggtgacagcgtgaggtgacccatctggcccgccgcgatgctggcaacacggcggctgctcggctggtcgcttcccgcgcggacagcaccca

SEQ ID NO: 545859 - DNA, 120 bp, Artificial Sequence
  ENSG00000167792_27 (sequence is synthesized)
cgtggggctcctcatttcatcctaagtgagcccctccatcacctgtgtgttaaggaggcatttctttcccatcagtaaacacatttcgcctcttcggccgagacagcacccaagaaaacc

SEQ ID NO: 545860 - DNA, 120 bp, Artificial Sequence
  ENSG00000167792_28 (sequence is synthesized)
agttcctcagcctcagtgctatgaaggtgacagcgtgaggtgacccatctggcccgccgcgatgctggcaacacggcggctgctcggctggtcgcttcccgcgcggcacccaagaaaacc

SEQ ID NO: 545861 - DNA, 120 bp, Artificial Sequence
  ENSG00000167792_29 (sequence is synthesized)
tcgtcatggaccgctcggtaagggttcacacaccagccctggtccctgccctcctggttgctgtctccctccctgggcctcccagaaaaccctcttgccagcactcaggtctcagttcct

SEQ ID NO: 545862 - DNA, 120 bp, Artificial Sequence
  ENSG00000167792_30 (sequence is synthesized)
gcagcctgagataaagcaaggtggaagaggagggaggaaggctgctctgaggagaataccccggagtctgggcagcacagggggcccagggaggctggaggaggccagaacgctgggtgg

SEQ ID NO: 545863 - DNA, 120 bp, Artificial Sequence
  ENSG00000167792_31 (sequence is synthesized)
gctgggaagagcttctggaactgggggaggggctgctgctagggggctgaggcccaggcttctgtctggccgtgggtgcctgctaattgcccctcgtcacccagacggacatcgtgaaag

SEQ ID NO: 545864 - DNA, 120 bp, Artificial Sequence
  ENSG00000167792_32 (sequence is synthesized)
aaaaaaaaaaaaatgcttactaagtggcagtggtatctatgatgctatagatgcttccctagccctagcccagcccctcctaaatagggagacccaagattctgtagcttctggcccaat

SEQ ID NO: 545865 - DNA, 120 bp, Artificial Sequence
  ENSG00000167792_33 (sequence is synthesized)
ccctcatggccccagagcactctgggcctcctgaccctttgtctccctagacagcacccaagaaaacctcatttggctcgctgaaggatgaagaccggattttcaccaacctgtacggcc

SEQ ID NO: 545866 - DNA, 120 bp, Artificial Sequence
  ENSG00000167792_34 (sequence is synthesized)
tgtcagtggttgaactgggggagtggtggccagtcctgcatgcatcccaaatgggacttggctcccaaagcctccttccagggctcctaatgctgctggtgtaaattttttttttttgct

SEQ ID NO: 545867 - DNA, 120 bp, Artificial Sequence
  ENSG00000167792_35 (sequence is synthesized)
cagcggcgacacgccttgtagggcgtgaaggggtcattgccccatttagggatgcgcacctcctgatttcccgtccactgctctgcgccctgaagtggctgaaaagtgctcttaaaagga

SEQ ID NO: 545868 - DNA, 120 bp, Artificial Sequence
  ENSG00000167792_36 (sequence is synthesized)
actatgtgtttagcaagagagcggaataattatgaatataaacaattcctatttggagaaaatacattatgttcattgcttggaactatgaataatacttatatctgtaggaaatataga

SEQ ID NO: 545869 - DNA, 120 bp, Artificial Sequence
  ENSG00000167792_37 (sequence is synthesized)
aaaataaaataggttaaggcaataaggatataggcaattacatttttattttaattttataaggacttttatttttcctttacagactagggtagttaggagacctgatagtagctactt

SEQ ID NO: 545870 - DNA, 120 bp, Artificial Sequence
  ENSG00000167792_38 (sequence is synthesized)
cgtttttattttcctggcagcaaagcagcttacttatgtgttccttcttgcttatctgttccagatcatagtcaagttttccaattcgttttactaagctagcaaaattttttataccag

SEQ ID NO: 545871 - DNA, 120 bp, Artificial Sequence
  ENSG00000167792_39 (sequence is synthesized)
cttgcactgtggaggaggagatgtctgtgcccttgaaagaactgattgagaagcatgctggtaaggcctggggccagccaggtggtgggggggtgcgcagtgggggcaggtgtccacaaa

SEQ ID NO: 545872 - DNA, 120 bp, Artificial Sequence
  ENSG00000167792_40 (sequence is synthesized)
gagagcctgggcgggagggctcaggagacggggctgggtctaggggctgactaagggcctgggctcaggactaggcaggtgtgccggccccagccctgaccatgcatccctttggggacc

SEQ ID NO: 545873 - DNA, 120 bp, Artificial Sequence
  ENSG00000167792_41 (sequence is synthesized)
agttcctcagcctcagtgctatgaaggtgacagcgtgaggtgacccatctggcccgccgcgatgctggcaacacggcggctgctcggctggtcgcttcccgcgcgggtatctacagcacc

SEQ ID NO: 545874 - DNA, 120 bp, Artificial Sequence
  ENSG00000167797_0 (sequence is synthesized)
gcgcgcaaggcaccggtggcagcggcgacggcagctgcgacagcaacccctgctgggccgaaactgggcagagcggagcagacgtctgaagcagcgcgagtgaggcgcgagggtagcgcc

SEQ ID NO: 545875 - DNA, 120 bp, Artificial Sequence
  ENSG00000167797_1 (sequence is synthesized)
cgcgcccgggaagacccctcggcgcgaaccggcagcccagccccgggtcccggttcccaaggccccgcctctagggcctggggactaatcggattgagagcgcgccggcccgggccgcga

SEQ ID NO: 545876 - DNA, 120 bp, Artificial Sequence
  ENSG00000167797_2 (sequence is synthesized)
actcgccaattgcggagggcggtggccaccgcccaatccggagcagacaggtgcgaggtccggaaggcggaggccaatcggcggcggttgcgacctgctggggcaggtctcggccaataa

SEQ ID NO: 545877 - DNA, 120 bp, Artificial Sequence
  ENSG00000167797_3 (sequence is synthesized)
ggaggctcgagtgacatcttcgcgcaccaatcgggagtgagggagcattcgtgcccgctcgcccttccggccagacctctatttaccaggggcgtgcagcccgcttgccaatcagagcgc

SEQ ID NO: 545878 - DNA, 120 bp, Artificial Sequence
  ENSG00000167797_4 (sequence is synthesized)
ggctgagcggccccgcagccaacccccgaggagcggccggctggcgtccgccgcgcccaggagttggggatgtcctacaaacccatcgcccctgctcccagcagcacccctggctccagc

SEQ ID NO: 545879 - DNA, 120 bp, Artificial Sequence
  ENSG00000167797_5 (sequence is synthesized)
tgccaggagccggcgctcctttcagaccgctgtttaacgactttggaccgccttccatgggctacgtgcaggcgatgaagccacccggcgcccagggctcccagagcacctacacggacc

SEQ ID NO: 545880 - DNA, 120 bp, Artificial Sequence
  ENSG00000167797_6 (sequence is synthesized)
tgctgtcagtcatagaggagatgggcaaagagatccggcctacctatgctggcagcaagagcgccatggagcgcctgaagagaggtatcatccatgcccgggccctagtcagagagtgcc

SEQ ID NO: 545881 - DNA, 120 bp, Artificial Sequence
  ENSG00000167797_7 (sequence is synthesized)
tggcagagacagagcggaacgcccgcacgtaacaggaagcgcctcggcctcagcgtctggacctatccggccactgcagagcacccgcttctccctggccttcatcccgagttgcactaa

SEQ ID NO: 545882 - DNA, 120 bp, Artificial Sequence
  ENSG00000167797_8 (sequence is synthesized)
ccatcctgggcttcctgtcctgtgtcccttggtgggtcccctccaggaaccaaggagtggccctccaggtggcagcactaaggacacccccccacaacaagagttagcagcgaggtcccc

SEQ ID NO: 545883 - DNA, 120 bp, Artificial Sequence
  ENSG00000167797_9 (sequence is synthesized)
atgagtcccacccatgacctgccgacagtgttgcccaccggaacttttgtggcccctaccgctcagcccttcccagcacttctcccactttgtcccgagcctccttctcccccagcaggg

SEQ ID NO: 545884 - DNA, 120 bp, Artificial Sequence
  ENSG00000167797_10 (sequence is synthesized)
gcacaggcctggcacctccctgccttgtgtcctgagccatagtgactcttttatctgtgtgtcttttgctaaatatgccctttttatattaataaaagatgatttggagttgtgctctca

SEQ ID NO: 545885 - DNA, 120 bp, Artificial Sequence
  ENSG00000167797_11 (sequence is synthesized)
tggaggccacctgagccaagcctagaggatgtccagtattactaccagagaggtgttttgaatcgaattgaaattgagtccatttccagggaagagcatgggaatttgtatttcaacagg

SEQ ID NO: 545886 - DNA, 120 bp, Artificial Sequence
  ENSG00000167797_12 (sequence is synthesized)
gcaaccttgaggattaaccaaacctctaatttcatctagccgtcattagatttgaatttcttttgccgaaagtggaaagggagtggggaggcaggggtcctcctctggagggcagtgggt

SEQ ID NO: 545887 - DNA, 120 bp, Artificial Sequence
  ENSG00000167797_13 (sequence is synthesized)
tgcaatactgggcctgccgcctaccctcgctgagcctcagtttgctggcctgtgaagtgggcgtggtcacgtaagggcttgtaggtggagcgcagtgggagggatttgtccctgaagttg

SEQ ID NO: 545888 - DNA, 120 bp, Artificial Sequence
  ENSG00000167797_14 (sequence is synthesized)
tgaagcatcctttggagggaatcgggcgaacccggtcctgggcttggaaaagctgggaggcggcgtccctgccccgcgctgacctcttactcgcgcctgttgctgcaggaagcgtcccgt

SEQ ID NO: 545889 - DNA, 80 bp, Artificial Sequence
  ENSG00000167799_0 (sequence is synthesized)
cggccgcgcaggacttgacatgctgcccgactgcctgtcggccgagggcgagctgcgctgccgccggctgctggcagggg

SEQ ID NO: 545890 - DNA, 120 bp, Artificial Sequence
  ENSG00000167799_1 (sequence is synthesized)
gctcgtgccgctctgctcagtgcgtggggtcccggcgctgctgtacacgctgcggtccagccgcctgaccgggaggcacaagggcgacgtcagtttcccaggcggcaagtgcgacccggc

SEQ ID NO: 545891 - DNA, 120 bp, Artificial Sequence
  ENSG00000167799_2 (sequence is synthesized)
tgaccaagatgtggtgcacacggccctgcgggaaacccgggaggagctgggcctggcagtgcccgaggagcacgtgtggggcctgctgcggcctgtgtatgatccgcaaaaggccaccgt

SEQ ID NO: 545892 - DNA, 120 bp, Artificial Sequence
  ENSG00000167799_3 (sequence is synthesized)
gggctgttccagtcctctgtctaccctctctgcctcctgcctgcaggtagatgaggtgtttgcactgccgctggcccacctgctgcagacgcagaatcagggctatacccacttctgccg

SEQ ID NO: 545893 - DNA, 120 bp, Artificial Sequence
  ENSG00000167799_4 (sequence is synthesized)
gggtggccacttccgctacacactacccgtcttcctgcatggaccacaccgggtctggggcctcacagctgtcatcactgagtttgccctgcagctgctggcacctggtacctaccagcc

SEQ ID NO: 545894 - DNA, 120 bp, Artificial Sequence
  ENSG00000167799_5 (sequence is synthesized)
ccgcctggccggcctgacctgctcaggggctgagggtctggcccgccctaagcagcccctggcttcaccctgtcaggccagctccactccaggactgaataaaggtctttgacagctcta

SEQ ID NO: 545895 - DNA, 120 bp, Artificial Sequence
  ENSG00000167799_6 (sequence is synthesized)
gctacaggagcccggggctggcagggacctctggcagggcacttagccccttcgagcctcggtttccgcctccgtaaaatgggtctggggagagtccctccgcccaagggctgcagcgag

SEQ ID NO: 545896 - DNA, 120 bp, Artificial Sequence
  ENSG00000167799_7 (sequence is synthesized)
aggtcagcgatccgtgtccgtcggccccggtgcacctgccggggcgccacgtcctcgccgcgtgggcccctcgtacgcgtccttgcgcgcacgcctgggccgggacacccctttgagctg

SEQ ID NO: 545897 - DNA, 120 bp, Artificial Sequence
  ENSG00000167799_8 (sequence is synthesized)
tttcccgcttagagggcggacgccgccccctgccggcgactacggagaggttcgggccccgcccggcgggaattaagaacatcctgaggacaatgtcagtgttgctggggccaccatagg

SEQ ID NO: 545898 - DNA, 120 bp, Artificial Sequence
  ENSG00000167799_9 (sequence is synthesized)
ccgaatttgggtatctgagccccaggatcttcttgcccctgctgcagaccctcttatcctgcgctgtcccgggcctctcttccttatccccattgctcagggaggtaaactggcctccag

SEQ ID NO: 545899 - DNA, 120 bp, Artificial Sequence
  ENSG00000167799_10 (sequence is synthesized)
cccagtaaactaggggcagaggcaggcgacacttcggtgggccagtggccccccccgcactgccgataccccgacctctccgtggccccaagagtccaaggaccagactccttgtgtctg

SEQ ID NO: 545900 - DNA, 120 bp, Artificial Sequence
  ENSG00000167800_0 (sequence is synthesized)
acgagtggtgaccaccccttccagcaggcaggttcccagccccagccaagcagtgtttctccaggagccggacagcctctctgtctccatggcagccttcctatctgctggcctcggcat

SEQ ID NO: 545901 - DNA, 120 bp, Artificial Sequence
  ENSG00000167800_1 (sequence is synthesized)
acttgcaccctcagagacctaccccctacctacaaccagctctggctgggagccccggctggggtcaccattcccatcaggcccttgcaccagctctactggggcccaagctgtggccga

SEQ ID NO: 545902 - DNA, 120 bp, Artificial Sequence
  ENSG00000167800_2 (sequence is synthesized)
gcccactgggcagggccccaagaacccacgtgtgtccagagtgacagttcagctggagatgaagcctctgtgggaggaattcaaccagctgggcactgagatgatcgtcaccaaggcagg

SEQ ID NO: 545903 - DNA, 120 bp, Artificial Sequence
  ENSG00000167800_3 (sequence is synthesized)
caggaggatgttcccccccttccaggtgaagatcctgggcatggactccctggccgactacgccctgctcatggacttcatccccctggacgacaagagatacaggtatgccttccacag

SEQ ID NO: 545904 - DNA, 120 bp, Artificial Sequence
  ENSG00000167800_4 (sequence is synthesized)
ctcggcctggctggtggcgggcaaggcagacccagccacacctggccgcgtgcacttccaccccgactcgccagccaagggtgcccagtggatgcgccagattgtgtcctttgacaagct

SEQ ID NO: 545905 - DNA, 120 bp, Artificial Sequence
  ENSG00000167800_5 (sequence is synthesized)
caagctgaccaacaacctgctggatgacaatggccacatcattctcaactctatgcaccgctaccagccccgtttccacgtggtcttcgtggacccacgcaaggacagtgagcgctatgc

SEQ ID NO: 545906 - DNA, 120 bp, Artificial Sequence
  ENSG00000167800_6 (sequence is synthesized)
caaaggctttagagagagtgacctggactcctggcctgtggccccacggcccctgctcagtgtcccagcccggagtcacagcagcctcagtccctgtgtgctgaagggtgccacagacag

SEQ ID NO: 545907 - DNA, 120 bp, Artificial Sequence
  ENSG00000167800_7 (sequence is synthesized)
ggagaaagaccccaacaaagcttcagcttccacctccaagacccctgcttggctccatcatcagctgctgcccccacctgaggtcctgctggccccggccacctacaggcctgtcacgta

SEQ ID NO: 545908 - DNA, 120 bp, Artificial Sequence
  ENSG00000167800_8 (sequence is synthesized)
tcagagcctgtactctggagccccgagccacctagggatcccaaggacccgaccagcaccataccccctccccaacatccgggctgatagggatcaaggaggcctgcctctcccagctgg

SEQ ID NO: 545909 - DNA, 120 bp, Artificial Sequence
  ENSG00000167800_9 (sequence is synthesized)
gctggggctcctgtcccccactgtggtgtgcctggggcctggccaggactcccagtgatgccagaagccctggggggaagccctgctaccctggaccttacaccgggtgtgggaatcagc

SEQ ID NO: 545910 - DNA, 120 bp, Artificial Sequence
  ENSG00000167800_10 (sequence is synthesized)
ctctgccccgccccctccagccccatctctgtctcaaggagagcagggtaggtgaaagtctagagaaagaggctacctgcccagggtcacagcaaggctgggaccatggcaagcttggaa

SEQ ID NO: 545911 - DNA, 120 bp, Artificial Sequence
  ENSG00000167800_11 (sequence is synthesized)
ccaggacttctatctcccaaccccagcagcctgaatactgtgccctcttgctttgggggtaactcccgaaaaccctgccttacctctcccttccccctaacattaaactatttggcatga

SEQ ID NO: 545912 - DNA, 120 bp, Artificial Sequence
  ENSG00000167815_0 (sequence is synthesized)
ggcgctgagaacgcgggtccacgcgtgtgatcgtccgtgcgtctagcctttgcccacgcagctttcagtcatggcctccggtaacgcgcgcatcggaaagccagcccctgacttcaaggc

SEQ ID NO: 545913 - DNA, 120 bp, Artificial Sequence
  ENSG00000167815_1 (sequence is synthesized)
cacagcggtggttgatggcgccttcaaagaggtgaagctgtcggactacaaagggaagtacgtggtcctctttttctaccctctggacttcacttttgtgtgccccaccgagatcatcgc

SEQ ID NO: 545914 - DNA, 120 bp, Artificial Sequence
  ENSG00000167815_2 (sequence is synthesized)
gttcagcaaccgtgcagaggacttccgcaagctgggctgtgaagtgctgggcgtctcggtggactctcagttcacccacctggcttggatcaacaccccccggaaagagggaggcttggg

SEQ ID NO: 545915 - DNA, 120 bp, Artificial Sequence
  ENSG00000167815_3 (sequence is synthesized)
tacaggggcctctttatcatcgatggcaagggtgtccttcgccagatcactgttaatgatttgcctgtgggacgctccgtggatgaggctctgcggctggtccaggccttccagtacaca

SEQ ID NO: 545916 - DNA, 120 bp, Artificial Sequence
  ENSG00000167815_4 (sequence is synthesized)
gacgagcatggggaagtttgtcccgctggctggaagcctggcagtgacacgattaagcccaacgtggatgacagcaaggaatatttctccaaacacaattaggctggctaacggatagtg

SEQ ID NO: 545917 - DNA, 120 bp, Artificial Sequence
  ENSG00000167815_5 (sequence is synthesized)
agcttgtgcccctgcctaggtgcctgtgctgggtgtccacctgtgcccccacctgggtgccctatgctgacccaggaaaggccagacctgcccctccaaactccacagtatgggaccctg

SEQ ID NO: 545918 - DNA, 120 bp, Artificial Sequence
  ENSG00000167815_6 (sequence is synthesized)
gagggctaggccaaggccttctcatgcctccacctagaagctgaatagtgacgccctcccccaagcccacccagccgcacacaggcctagaggtaaccaataaagtattagggaaaggtg

SEQ ID NO: 545919 - DNA, 120 bp, Artificial Sequence
  ENSG00000167815_7 (sequence is synthesized)
cctcaggtcctagcagtgtggcttcgtggccattgctcaacctctggaacctgcgtttccccatcgtgaaaataatggaaacattgccgcccaagtctttaaggatgatgacagtaatta

SEQ ID NO: 545920 - DNA, 120 bp, Artificial Sequence
  ENSG00000167815_8 (sequence is synthesized)
gcatttgacaactagttgcctggtatatagagttgcagatgcaactcagatgcaactctatctactctatgtacttagttcccaggagggaggctgtgctgccctatttcatgaagatgg

SEQ ID NO: 545921 - DNA, 120 bp, Artificial Sequence
  ENSG00000167815_9 (sequence is synthesized)
aaactccagttcaccgaagtgaagggctgtaccccatgacacagctagaggaggatggggactcttaacacaggctctctgctgggtgatgctgcaagttacaagtacatgtgaagccac

SEQ ID NO: 545922 - DNA, 120 bp, Artificial Sequence
  ENSG00000167815_10 (sequence is synthesized)
ttagctggagctgtgcctctcaaactcagtcttcccagccatggggatacagtccttgcacccaacccagggtggggtgggtgaggctcccagcggcctactctaaagccccttatctcc

SEQ ID NO: 545923 - DNA, 120 bp, Artificial Sequence
  ENSG00000167815_11 (sequence is synthesized)
ggaccctgctgtgccaggcatcctgaggccccaactctgtctcccctactcccaggatcaacaccccccggaaagagggaggcttgggccccctgaacatccccctgcttgctgacgtga

SEQ ID NO: 545924 - DNA, 120 bp, Artificial Sequence
  ENSG00000167815_12 (sequence is synthesized)
ccagacgcttgtctgaggattacggcgtgctgaaaacagatgagggcattgcctacaggtactgtgggaccctcagcccggctcagggagcgccctgccccccattcctgtgatgctggg

SEQ ID NO: 545925 - DNA, 120 bp, Artificial Sequence
  ENSG00000167815_13 (sequence is synthesized)
accactcctgtacaatgtcttctctgcccccagccctgtggctagcagcgggtggttggtagtcccttccttgtctctggcagtgggagctatcagctcctcactgggaaccctgatgtc

SEQ ID NO: 545926 - DNA, 120 bp, Artificial Sequence
  ENSG00000167815_14 (sequence is synthesized)
tcactgcctgtcctcttacctgtccagatgggtgttagggccccaaagaagattcagctcagggctttgtctgcaggatgtttctaatgtggtaggagacaaataacgcctgacattcaa

SEQ ID NO: 545927 - DNA, 120 bp, Artificial Sequence
  ENSG00000167815_15 (sequence is synthesized)
gtggtaggagacaaataacgcctgacattcaaccaaggtggacaaaggggccgggctcagtggctcacggttgtattgccagcactttgggaagctgtggcaggtggatcacctgaggtc

SEQ ID NO: 545928 - DNA, 120 bp, Artificial Sequence
  ENSG00000167822_0 (sequence is synthesized)
atggctcctgaaaatttcaccagggtcactgagtttattctcacaggtgtctctagctgtccagagctccagattcccctcttcctggtcttcctagtgctctatgtgctgaccatggca

SEQ ID NO: 545929 - DNA, 120 bp, Artificial Sequence
  ENSG00000167822_1 (sequence is synthesized)
gggaacctgggcatcatcaccctcaccagtgttgactctcgacttcaaaaccccatgtactttttcctgagacatctagctatcatcaatcttggcaactctactgtcattgcccctaaa

SEQ ID NO: 545930 - DNA, 120 bp, Artificial Sequence
  ENSG00000167822_2 (sequence is synthesized)
atgctgatgaactttttagtaaagaagaaaactacctcattctatgaatgtgccacccaactgggagggttcttgttctttattgtatcggaggtaatgatgctggctgtgatggcctat

SEQ ID NO: 545931 - DNA, 120 bp, Artificial Sequence
  ENSG00000167822_3 (sequence is synthesized)
attgtggtttcaccttgtatattctctgtgtcttattgctcttctaatataatcaatcatttttactgtgatattgcacctctgttagcattatcttgctctgatacttacataccagaa

SEQ ID NO: 545932 - DNA, 120 bp, Artificial Sequence
  ENSG00000167822_4 (sequence is synthesized)
acaatagtctttatatctgcagcaacaaatttggttttttccatgattacagttctagtatcttatttcaatattgttttgtccattctaaggatacgttcaccagaaggaaggaaaaaa

SEQ ID NO: 545933 - DNA, 120 bp, Artificial Sequence
  ENSG00000167822_5 (sequence is synthesized)
gccttttccacctgcgcttcgcatatgatagcagtcacggttttctatgggacaatgctatttatgtatttgcagccccaaaccaaccactcactggatactgataagatggcttctgtg

SEQ ID NO: 545934 - DNA, 120 bp, Artificial Sequence
  ENSG00000167822_6 (sequence is synthesized)
ttttacacattggtgattcctatgctgaatcccttgatctacagcctgaggaataatgatgtaaatgttgccttaaagaaattcatggaaaatccatgttactcctttaaatcaatgtaa

SEQ ID NO: 545935 - DNA, 120 bp, Artificial Sequence
  ENSG00000167822_7 (sequence is synthesized)
tcctaagaattaccaagaggtaagatttaaagatcattgaattaaaaaaaatacatggaaacattttgagttatgagagtaatacaaaacaaaaatattatttattaactttgcccagaa

SEQ ID NO: 545936 - DNA, 120 bp, Artificial Sequence
  ENSG00000167822_8 (sequence is synthesized)
ataatcaggtaaccagtttgaataaaatattttcaggagtaaggagcatatcagtttttaaaaggttaagttttaacagagcaacaaaataggaacaagagaattaaagtgaatattttt

SEQ ID NO: 545937 - DNA, 120 bp, Artificial Sequence
  ENSG00000167822_9 (sequence is synthesized)
cattctgtggactcctttttttctttctgggtatgattggtagagtggatgcctgcatcttgaaaaactgtaactacagatgactaaaatcatttttacaacaaagttaacaaatttgaa

SEQ ID NO: 545938 - DNA, 120 bp, Artificial Sequence
  ENSG00000167822_10 (sequence is synthesized)
acatattttaaatcctcattatataattgaaaatattttattccaactaatatattttctgcaatttttaaataaaatgctcagactactatcactgaatatgcttttatactgggtttg

SEQ ID NO: 545939 - DNA, 120 bp, Artificial Sequence
  ENSG00000167822_11 (sequence is synthesized)
ctatcactgaatatgcttttatactgggtttgctttgtaaacatcagattttataaaaatttccttttctccttcctctaaatatcattcatccttcataggtaaaacaaatgttctatt

SEQ ID NO: 545940 - DNA, 120 bp, Artificial Sequence
  ENSG00000167822_12 (sequence is synthesized)
tttgtatattaataaactttaaaaaaacttgttcatgggagtttcttacatcatcagaaatattttttgaatttttgttctttttttctgatagtttttgatcagtaagtgtacacttac

SEQ ID NO: 545941 - DNA, 120 bp, Artificial Sequence
  ENSG00000167822_13 (sequence is synthesized)
acctattgtacaacttataatatataggagtaatcagacttataggatatatcccagacttatcaaataaaaatcataaggcaaaagtcaaaaaactcatattaaaagtgccaatgggga

SEQ ID NO: 545942 - DNA, 120 bp, Artificial Sequence
  ENSG00000167822_14 (sequence is synthesized)
ttctggcattgaaacttaggaatatatcctacaaataaagaactagactgaaagatacatatggaagattatgttgacattctgtgtgtgtgttcagtttacttgtaagtaggttcttgt

SEQ ID NO: 545943 - DNA, 120 bp, Artificial Sequence
  ENSG00000167822_15 (sequence is synthesized)
gttaaagagttccttcaggactaaaggaccaaagaaactaaatcttcagtcatgaataattatgaataattatgatatggtatgaataattatgatatgaataattatgaatgatatgaa

SEQ ID NO: 545944 - DNA, 120 bp, Artificial Sequence
  ENSG00000167822_16 (sequence is synthesized)
taattataatattaaaaaggaaacaaaacacaactctacagtacaaaattagactcaagtaactggaaaagtagtgattggatatcttttaatttgccttggtgttgagatattcagtct

SEQ ID NO: 545945 - DNA, 120 bp, Artificial Sequence
  ENSG00000167822_17 (sequence is synthesized)
acttttcacgccaatctttcttccacttagtgaaagaatgaaaaggcaggaaaaagctatcttgtttgcataagatgagatttttgaggtaacataatcacttttccacagtcccaaatt

SEQ ID NO: 545946 - DNA, 120 bp, Artificial Sequence
  ENSG00000167822_18 (sequence is synthesized)
cattcccatttttactgtgcattacatttccatcataatttttttttttataaaaggtcatctttggattccactgaatacgttttctagttaggccttctattgaacaatggaataata

SEQ ID NO: 545947 - DNA, 120 bp, Artificial Sequence
  ENSG00000167822_19 (sequence is synthesized)
taaccacatgtttaataacaaaatttgttccaccaaactcagtttttataaactattaacaaggtcctcaaatgacaatttttagatttaggaagaaatgctagaagaccataaaattgt

SEQ ID NO: 545948 - DNA, 120 bp, Artificial Sequence
  ENSG00000167822_20 (sequence is synthesized)
ttgtagccaaatatgacaaatgaaatataatgaattttaccagatctatatatattgatgtcgggtttttaattaaattttcaaccctaaatattataatgcaatgaaagtttatcagtt

SEQ ID NO: 545949 - DNA, 120 bp, Artificial Sequence
  ENSG00000167822_21 (sequence is synthesized)
gaaaaatcattggtttacctagtgcgataataaatgaatggagtactatttatgtgtatgcatgtaataatctgggaattcctaatgaagaagaattatccttcttcgaaattaatttgc

SEQ ID NO: 545950 - DNA, 120 bp, Artificial Sequence
  ENSG00000167822_22 (sequence is synthesized)
cagaaatgtttgggcatctatactagcctggtattgtgaagagtattccagaaaatatgactttattttgatgctaaagtagggaaaaatattaaaacactgagcgcttaatgataaagt

SEQ ID NO: 545951 - DNA, 120 bp, Artificial Sequence
  ENSG00000167822_23 (sequence is synthesized)
tttgagccaccacgcctgcacaaaattttactgatattatttatggaaacctaagaagagaaacagctacctgaaaaatagatctgaagagatttatccatgtatttttgtttgagttaa

SEQ ID NO: 545952 - DNA, 120 bp, Artificial Sequence
  ENSG00000167822_24 (sequence is synthesized)
taaaatggaaagagaaaaagtagtaaacaaacatgcatgttgtaatttgcaagctcaatatagatctaatacatgttataaaaggatataattcttaaaatgaagagtatagtacctagt

SEQ ID NO: 545953 - DNA, 120 bp, Artificial Sequence
  ENSG00000167822_25 (sequence is synthesized)
cttgaggcaaaggaagaattatcagattaggaaattgcaagtagccattggattatttggcgatatacaatttcttaagcctttctcatgatcagtgcaaaaatcatcagatacatccca

SEQ ID NO: 545954 - DNA, 120 bp, Artificial Sequence
  ENSG00000167822_26 (sequence is synthesized)
gcttcaaatgtttgtaagctaagaacatattcttaattcaattacactgcaaggcagtaaaccctcaaagtgttgcaggatgctgaaacaactatttactttgccatactaaatttacca

SEQ ID NO: 545955 - DNA, 120 bp, Artificial Sequence
  ENSG00000167822_27 (sequence is synthesized)
tacttgctttactctctcccaagtgattgcaaagctgatttattagactgagaatactgagtttaataactgaattagattaatacatgacaagaagatcacacccaggaattgtccttg

SEQ ID NO: 545956 - DNA, 120 bp, Artificial Sequence
  ENSG00000167825_0 (sequence is synthesized)
atggaatttacagatagaaactacacgttggtcactgagtttattctattaggttttccaactcgccctgaactgcagattgtcctgttcctcatgtttctgacattgtatgctataatt

SEQ ID NO: 545957 - DNA, 120 bp, Artificial Sequence
  ENSG00000167825_1 (sequence is synthesized)
ctgatagggaacattggattgatgctgttgatcaggattgatcctcaccttcaaacccccatgtattttttccttagcaacctatcatttgtagacctttgctatttctcagacattgtt

SEQ ID NO: 545958 - DNA, 120 bp, Artificial Sequence
  ENSG00000167825_2 (sequence is synthesized)
cccaaaatgctggtcaatttcctctcggagaacaaatctatttcctattatgggtgtgccctgcagttttattttttctgtacttttgcagatacagaatccttcatcctggccgccatg

SEQ ID NO: 545959 - DNA, 120 bp, Artificial Sequence
  ENSG00000167825_3 (sequence is synthesized)
atgagttccctggttcacacatcctttgcctttattctgaaatattgtgacaaaaatgttattaatcattttttctgtgacctccctcccctgcttaaactatcctgcactgacacaaca

SEQ ID NO: 545960 - DNA, 120 bp, Artificial Sequence
  ENSG00000167825_4 (sequence is synthesized)
attaatgagtggctcctctccacatacggcagctcagtggaaatcatttgttttatcatcatcatcatctcctactttttcattcttctctcagtcttaaagatccgctctttcagtggg

SEQ ID NO: 545961 - DNA, 120 bp, Artificial Sequence
  ENSG00000167825_5 (sequence is synthesized)
aggaagaagaccttttctacatgcgcctctcacctgacttcagtgacgatctaccaagggactctcctctttatttactcacggcccagctacctgtattctccaaacactgataaaatt

SEQ ID NO: 545962 - DNA, 120 bp, Artificial Sequence
  ENSG00000167825_6 (sequence is synthesized)
atctcagtgttctacaccattttcattccagtgctgaatccgttgatttatagtttgagaaataaagatgtaaaggatgcagctgagaaagttctaagatcaaaggtagattcttcatga

SEQ ID NO: 545963 - DNA, 120 bp, Artificial Sequence
  ENSG00000167840_0 (sequence is synthesized)
cgacgacaaggatggggcccatctcttcggagcctaaggatccagcccaggtccagccctgcgcagccgcccaccaagctgccagaagacgagccggacgcccaaggctacgagaggacg

SEQ ID NO: 545964 - DNA, 120 bp, Artificial Sequence
  ENSG00000167840_1 (sequence is synthesized)
attgcagaattgtacaggctagtggttggggaatattttttcgtggaagggaccgtcttccttagctgtggccctctcatcaggtctgggaagaggtaattggaaaatagaactcatgga

SEQ ID NO: 545965 - DNA, 120 bp, Artificial Sequence
  ENSG00000167840_2 (sequence is synthesized)
gaagtgttaccacaggccatggacaaggccagaatttccctgacatctgtccgccagcaccgcccttcaggtacaattccacaagagaccccccaaacttgatgaagtcacccgcttaca

SEQ ID NO: 545966 - DNA, 120 bp, Artificial Sequence
  ENSG00000167840_3 (sequence is synthesized)
agggctcactctccacctgcgcaaggactgcaattcccaggggcctccagggcacccggccgctccagtccagtcgtgcaggcggcgcgctctttctcgctccgctcaagtccaggaacc

SEQ ID NO: 545967 - DNA, 120 bp, Artificial Sequence
  ENSG00000167840_4 (sequence is synthesized)
ggttcccgggctcccagcctctcggcagcgcccacgcgcctgggccaaagtccgcgaacggaagccggcggcgaggaggattctgggagttggaggccgaggctgcgacctgcgcaggcg

SEQ ID NO: 545968 - DNA, 120 bp, Artificial Sequence
  ENSG00000167840_5 (sequence is synthesized)
caaacctgcccctggggtgagggctgtaagtggcgcgattcgcggcagcgccccgatggaacctcctggtcctgtgagggggcccttgcaagattccagctggtatgagccttctgcaga

SEQ ID NO: 545969 - DNA, 120 bp, Artificial Sequence
  ENSG00000167840_6 (sequence is synthesized)
gctagtgcagactaggatggctgtatcactaacagcagctgaaactctggcccttcagggtacacagggacaagagaagatgatgatgatgggaccaaaggaagaggaacagtcttgtga

SEQ ID NO: 545970 - DNA, 120 bp, Artificial Sequence
  ENSG00000167840_7 (sequence is synthesized)
gtatgagaccaggctacctgggaaccactctaccagtcaagagatcttccgccaacgcttcaggcatctccgctaccaggagactcctggtccccgggaggccttgagccaactacgagt

SEQ ID NO: 545971 - DNA, 120 bp, Artificial Sequence
  ENSG00000167840_8 (sequence is synthesized)
actctgctgtgagtggctgaggccagagaaacacacgaaggagcagatcctggagttcctggtgctggaacaattcttgaccatcctgcctgaggagctccaatcctgggtgcggggaca

SEQ ID NO: 545972 - DNA, 120 bp, Artificial Sequence
  ENSG00000167840_9 (sequence is synthesized)
gaggctgtgactgtgctggaggatttagagaaaggacttgaaccagagccgcaggtcccaggccctgcacatggacctgcacaggaagagccatgggagaagaaggaatctctgggagca

SEQ ID NO: 545973 - DNA, 120 bp, Artificial Sequence
  ENSG00000167840_10 (sequence is synthesized)
gcccaggaagcactgagcatccagctccagcctaaggagacccagcctttcccaaagagtgaacaggtatatttacattttctgtcagttgttacagaagatggcccagagcccaaggac

SEQ ID NO: 545974 - DNA, 120 bp, Artificial Sequence
  ENSG00000167840_11 (sequence is synthesized)
aaaggatcattgccacaaccacccattactgaagtggaatcacaggtgttctcagaaaaacttgctactgacacctctacatttgaagctacctctgagggtaccttagaactgcagcag

SEQ ID NO: 545975 - DNA, 120 bp, Artificial Sequence
  ENSG00000167840_12 (sequence is synthesized)
agaaatcccaaagcggagagactgaggtggtcccctgcccaggaggaaagtttcaggcagatggttgtcatccataaggaaattcccacagggaagaaagaccatgaatgtagtgaatgt

SEQ ID NO: 545976 - DNA, 120 bp, Artificial Sequence
  ENSG00000167840_13 (sequence is synthesized)
ggtaaaaccttcatttataactcacatcttgttgtccaccagagagttcattctggagagaaaccctataagtgtagtgactgtgggaaaactttcaaacagagctcaaacctcggtcag

SEQ ID NO: 545977 - DNA, 120 bp, Artificial Sequence
  ENSG00000167840_14 (sequence is synthesized)
catcagagaattcatacaggagagaaacccttcgaatgtaatgaatgtgggaaggccttcagatggggtgctcatcttgttcagcatcagaggattcactcaggagagaagccctatgag

SEQ ID NO: 545978 - DNA, 120 bp, Artificial Sequence
  ENSG00000167840_15 (sequence is synthesized)
tgtaatgagtgtgggaaggcctttagtcaaagctcatatctaagtcagcatcggagaattcacagtggagagaaaccttttatatgtaaagaatgtgggaaagcttatggatggtgctca

SEQ ID NO: 545979 - DNA, 120 bp, Artificial Sequence
  ENSG00000167840_16 (sequence is synthesized)
gagctcattagacatcggagagttcatgccagaaaagagccttcccattgaattgaaggggagaacgtctccagacagaattctacatcggtctaatctactttaggactggatcccata

SEQ ID NO: 545980 - DNA, 120 bp, Artificial Sequence
  ENSG00000167840_17 (sequence is synthesized)
aaagttataagttccttaagatttttcctgtgtctttcttgattttggaaaaactgtttacttagttctgcctgtagatcatcccttcatgtcctctgatgaagatactgatattaatta

SEQ ID NO: 545981 - DNA, 120 bp, Artificial Sequence
  ENSG00000167840_18 (sequence is synthesized)
gctggaggatttagagaaaggacttgaaccagagccgcaggtgggaagggggatttggtctgttatgggagccagattgatgaccttcaggctggaccgaggggcagctgtagggggagg

SEQ ID NO: 545982 - DNA, 120 bp, Artificial Sequence
  ENSG00000167840_19 (sequence is synthesized)
tgccaagttcaaacctctcttgggccaggtagagcagttagtatgtgtttctgtgtctgtcttttctgccctcgagccctgaatgagaaagagactctagctcctcttcttcccttgtgc

SEQ ID NO: 545983 - DNA, 120 bp, Artificial Sequence
  ENSG00000167840_20 (sequence is synthesized)
caggtggcctccctcaccctggcaatggaaacgaacagccgagcttcaccggacaagactagaaatcgttcctccacccacccagagacaaagcatatttgacttcttcctctactgggg

SEQ ID NO: 545984 - DNA, 120 bp, Artificial Sequence
  ENSG00000167840_21 (sequence is synthesized)
aagctttggtccaaggagggtcacatctgcaagtgtccaggcaggggacagaaaccacactagtaatttgaagaaaatttaaactgagtggtgcctgatcacctccaggtcccaggccct

SEQ ID NO: 545985 - DNA, 120 bp, Artificial Sequence
  ENSG00000167842_0 (sequence is synthesized)
ctcgccgagatgacctgggcacctctgcgttgaatcggcaaatactgatcaagccgcatttattctgctctcaggaactctaagtctagcagagaagatgaggcggtagaagttcatcaa

SEQ ID NO: 545986 - DNA, 120 bp, Artificial Sequence
  ENSG00000167842_1 (sequence is synthesized)
tggcttggctggaggacaagcaaattgaggacattggcaacggagtgatcaaaatgatagatcatgaggcctaaaatgaataaggaaagaagagaagtggcagaggctgagaacagaaag

SEQ ID NO: 545987 - DNA, 120 bp, Artificial Sequence
  ENSG00000167842_2 (sequence is synthesized)
agagggtggaggggctgtaaatcttgaagattagggtataatatgagtatatgggtaagaattggaagaattgtgtaggaggcagtagtcaaaaagtagaagcagtttggaagagtagtt

SEQ ID NO: 545988 - DNA, 120 bp, Artificial Sequence
  ENSG00000167842_3 (sequence is synthesized)
acaaatatcaagagccaggtggctaaaaggtggagctataggtcattgaagctcaagaaactgagtctctagggcattggttaagtcatctgtctagacttcaaagttgtctaggatgat

SEQ ID NO: 545989 - DNA, 120 bp, Artificial Sequence
  ENSG00000167842_4 (sequence is synthesized)
aattcagaagactgatctgtgccaaagtcacaggtttttcacgactgaaaacaacatagcaaaataagccaagatgtctgtggatccaatgacctacgaggcccagttctttggcttcac

SEQ ID NO: 545990 - DNA, 120 bp, Artificial Sequence
  ENSG00000167842_5 (sequence is synthesized)
gccacaaacgtgcatgcttcggatctacattgcatttcaagactacctatttgaagtgatgcaggccgttgaacaggttattctgaagaagctggatggcatcccagactgtgacattag

SEQ ID NO: 545991 - DNA, 120 bp, Artificial Sequence
  ENSG00000167842_6 (sequence is synthesized)
cccagtgcagattcgcaaatgcacagagaagtttctttgcttcatgaaaggacattttgataacctttttagcaaaatggagcaactgtttttgcagctgattttacgtattccctcaaa

SEQ ID NO: 545992 - DNA, 120 bp, Artificial Sequence
  ENSG00000167842_7 (sequence is synthesized)
catcttgcttcctgaagataaatgtaaggagacaccttatagtgaggaagattttcagcatctccagaaagaaattgaacagttacaggagaagtacaagactgaattatgtactaagca

SEQ ID NO: 545993 - DNA, 120 bp, Artificial Sequence
  ENSG00000167842_8 (sequence is synthesized)
ggcccttcttgcagaattagaagagcaaaaaattgttcaggccaaactcaaacagacgttgactttctttgatgagcttcataatgttggcagagatcatgggactagtgattttaggga

SEQ ID NO: 545994 - DNA, 120 bp, Artificial Sequence
  ENSG00000167842_9 (sequence is synthesized)
gagtttagtatccctggttcagaactccagaaaactacagaacattagagacaatgtggaaaaggaatcgaaacgactgaaaatatcttaattgctcagtagtcaaaaggaggagcctgt

SEQ ID NO: 545995 - DNA, 120 bp, Artificial Sequence
  ENSG00000167842_10 (sequence is synthesized)
ctttcttgtattctgtgttttcctcttttttggtccactttgctgaggtatgaagtgtactactttgaactaggctgaagcatctgagtcttctaataagtgggaagggatccaacaaag

SEQ ID NO: 545996 - DNA, 120 bp, Artificial Sequence
  ENSG00000167842_11 (sequence is synthesized)
aagccatgaccagttaaagatatttgcagagttacaccttggtcataagtcctttgtgaccttgattattttggcttactctttggatgagaccagacaagaaaaggattaaacgggtgg

SEQ ID NO: 545997 - DNA, 120 bp, Artificial Sequence
  ENSG00000167842_12 (sequence is synthesized)
acaagaaaaggattaaacgggtggctcctttaatattattattattgtttttgagacaaggtccctttctgtcacccaggttagagtagatttcagtggcacaatcttggctcactgcaa

SEQ ID NO: 545998 - DNA, 120 bp, Artificial Sequence
  ENSG00000167842_13 (sequence is synthesized)
agcctcccaagtagctaggaccacaggtgcgtgtcaccatgcttggctaatttttttgcagaaacgaggcctcactatattgtccaggctgagtggctcttttattaaccagtcattaca

SEQ ID NO: 545999 - DNA, 120 bp, Artificial Sequence
  ENSG00000167842_14 (sequence is synthesized)
ccagtcattacactgcggaacagccaacatagagtacttgctctcgtcctgtgaattttctttcatgagggagtcaatatgtagtggaaagaagcatgtagcaaaaaagacaaccttgat

SEQ ID NO: 546000 - DNA, 120 bp, Artificial Sequence
  ENSG00000167842_15 (sequence is synthesized)
ctttaataaaaaagaagttggtttatttccaaaataaatcccctgacaaaaaacctggtgatgttaagcaattgactgtcttagagtccagcagaagaccttagacaaaaaaagcagaac

SEQ ID NO: 546001 - DNA, 120 bp, Artificial Sequence
  ENSG00000167842_16 (sequence is synthesized)
ccactggagtagaaaaggaagcatgtagcatatactcagtagtgaaatttaattttactgactgttaggtatctatgccaatttgttttcatacttcagttggttttggaatctgcctta

SEQ ID NO: 546002 - DNA, 120 bp, Artificial Sequence
  ENSG00000167842_17 (sequence is synthesized)
tacctaatatttatttattcacactcataagcatcaaatatttaatgccctcagtgggaaatttgtgtttaaactcaatggaatctaatatttctttatgtcgttagtccctgtaaaatg

SEQ ID NO: 546003 - DNA, 120 bp, Artificial Sequence
  ENSG00000167842_18 (sequence is synthesized)
ttaggtcacccaaggaaaggggagaaatagcaatggttgttcctaaggtattgcttgccctccatgtcttcctaaagagcagaacttggagtttctcctttatgtagagaagaagtaact

SEQ ID NO: 546004 - DNA, 120 bp, Artificial Sequence
  ENSG00000167842_19 (sequence is synthesized)
tagggtgtatttgcaatgaaatattcatagatattgaaagcttgtgtttacatgaaatatgtttattatcaagaagtcctttttccaattctgtacattaaatatatgtgttttaaaggg

SEQ ID NO: 546005 - DNA, 120 bp, Artificial Sequence
  ENSG00000167842_20 (sequence is synthesized)
accagccaacgtccgggaaaaacgagtaagtacaggttccttctgccaatccccgccggccacagctaactttcccgcccggcccctttctgtcataattgaggtgtccacaaccagcca

SEQ ID NO: 546006 - DNA, 120 bp, Artificial Sequence
  ENSG00000167842_21 (sequence is synthesized)
atcaggaacgcgagagtatcccgcgtttgctttcgctcgccgaggcgcgtatcagtcggaattttggggagccaaccgcgccgtctgtccctggcaagccagcggcggtttaaaggaggt

SEQ ID NO: 546007 - DNA, 120 bp, Artificial Sequence
  ENSG00000167842_22 (sequence is synthesized)
aacgccaagcaaccgcaatccgtagagacctaaggaacgcacatccgccaatcacgagttgcgtcgccaccgcccccccccagcgccccatctccccaccctctcttctccaccagccaa

SEQ ID NO: 546008 - DNA, 120 bp, Artificial Sequence
  ENSG00000167842_23 (sequence is synthesized)
ttttggggagccaaccgcgccgtctgtccctggcaagccagcggcggtttaaaggaggtggcgggaagcctgtgtgtgcttcaaatcgtcaccctcatggtcgctccggaactctaagtc

SEQ ID NO: 546009 - DNA, 120 bp, Artificial Sequence
  ENSG00000167842_24 (sequence is synthesized)
tcatcagtcagtgcccgaagagaggtcctaatgggaattcgaagaaaggagttaatcaaggaagtgtatttttttgttgttgtttgagatggcgcccacctgtaatcccagctacttggg

SEQ ID NO: 546010 - DNA, 120 bp, Artificial Sequence
  ENSG00000167850_0 (sequence is synthesized)
gcagtgtgagtaacacactgaagccagaagctgtgggctgtggggaagtggctgcatcgccacccaagggaccctggactttgccagacgtcagggttgagaggagccactagcaccatc

SEQ ID NO: 546011 - DNA, 120 bp, Artificial Sequence
  ENSG00000167850_1 (sequence is synthesized)
ccagagctgtcagcaccggcctcagcccaggcggctctctccctgagcttcctgtaccctgaccctctccagcctcagacctgagacagggctggacaaggaagcagagagcagaagaaa

SEQ ID NO: 546012 - DNA, 120 bp, Artificial Sequence
  ENSG00000167850_2 (sequence is synthesized)
agcagaagcgaagctcagatctgctgggaggagattacattttgtcccctcctggggtcttgcacagtggcaggtgacattcgtgttacaggaatgactgccagggcctgggcctcgtgg

SEQ ID NO: 546013 - DNA, 120 bp, Artificial Sequence
  ENSG00000167850_3 (sequence is synthesized)
cggtcttcagctctgctcctcctgcttgtcccaggctattttcctctgagccaccccatgaccgtggcgggccccgtggggggatccctgagtgtgcagtgtcgctatgagaaggaacac

SEQ ID NO: 546014 - DNA, 120 bp, Artificial Sequence
  ENSG00000167850_4 (sequence is synthesized)
aggaccctcaacaaattctggtgcagaccaccacagattctccgatgtgacaagattgtggagaccaaagggtcagcagggaaaaggaatggccgagtgtccatcagggacagtcctgca

SEQ ID NO: 546015 - DNA, 120 bp, Artificial Sequence
  ENSG00000167850_5 (sequence is synthesized)
aacctcagcttcacagtgaccctggagaatctcacagaggaggacgcaggcacctactggtgtggggtggatacaccgtggctccgagactttcatgatcccattgtcgaggttgaggtg

SEQ ID NO: 546016 - DNA, 120 bp, Artificial Sequence
  ENSG00000167850_6 (sequence is synthesized)
cacacctggcccagcgtgaccagaaaggacagccccgaacccagcccacaccctggctccctgttcagcaatgtccgcttcctgctcctggtcctcttggagctgcccctgctcctgagc

SEQ ID NO: 546017 - DNA, 120 bp, Artificial Sequence
  ENSG00000167850_7 (sequence is synthesized)
atgctgggtgccgtcctctgggtgaacagacctcagagaagctctagaagcaggcagaattggcccaagggtgagaaccagtagcatctgctgtccatcaaggccctgtgctgcaacaga

SEQ ID NO: 546018 - DNA, 120 bp, Artificial Sequence
  ENSG00000167850_8 (sequence is synthesized)
gcccctctgggggactggaatgacctcctgaccactccctcccgggctgctctctccacatctcctggaatcctttgtgagcctccttcagccttttccctgtgcccgatcctcatgtgt

SEQ ID NO: 546019 - DNA, 120 bp, Artificial Sequence
  ENSG00000167850_9 (sequence is synthesized)
cacatgtgaacctgacggacatggacgccctgagctgtgagtccacgtctcatgtgcacgccccggccagctaagcctcgggccgtcagcaatacctctgagtgcccggatgccctccct

SEQ ID NO: 546020 - DNA, 120 bp, Artificial Sequence
  ENSG00000167850_10 (sequence is synthesized)
gcacccttccatttctccaggagcctggcactgcttcctccaccgttttcacagggagaagcaggtctaggactcccctgcacctttgccaccataatggcccacactccctgggtccag

SEQ ID NO: 546021 - DNA, 120 bp, Artificial Sequence
  ENSG00000167850_11 (sequence is synthesized)
gagtgtagaatatgcggctgcttccatttgctgagtgtgtcgattcaatgatgctttcaaactttaataaatgacaatgtgtaggtttgggatgtatcaggcccactcagtcagacctga

SEQ ID NO: 546022 - DNA, 120 bp, Artificial Sequence
  ENSG00000167851_0 (sequence is synthesized)
gtgactttcccctcgggtccaggtagggcctggagctgctgcaagtgccgcctgtgctggggaagggaccatgtggctgccttgggctctgttgcttctctgggtcccaggatgttttgc

SEQ ID NO: 546023 - DNA, 120 bp, Artificial Sequence
  ENSG00000167851_1 (sequence is synthesized)
tctgagcaaatgcaggaccgtggcgggccccgtggggggatccctgagtgtgcagtgtccctatgagaaggaacacaggaccctcaacaaatactggtgcagaccaccacagattttcct

SEQ ID NO: 546024 - DNA, 120 bp, Artificial Sequence
  ENSG00000167851_2 (sequence is synthesized)
atgtgacaagattgtggagaccaaagggtcagcaggaaaaaggaacggccgagtgtccatcagggacagtcctgcaaacctcagcttcacagtgaccctggagaatctcacagaggagga

SEQ ID NO: 546025 - DNA, 120 bp, Artificial Sequence
  ENSG00000167851_3 (sequence is synthesized)
tgcaggcacctactggtgtggggtggatacaccatggctccgagactttcatgatcccgttgtcgaggttgaggtgtccgtgttcccggcatcaacgtcaatgacacctgcaagtatcac

SEQ ID NO: 546026 - DNA, 120 bp, Artificial Sequence
  ENSG00000167851_4 (sequence is synthesized)
tgcggccaagacctcaacaatcacaactgcatttccacctgtatcatccactaccctgtttgcagtgggtgccacccacagtgccagcatccaggaggaaactgaggaggtggtgaactc

SEQ ID NO: 546027 - DNA, 120 bp, Artificial Sequence
  ENSG00000167851_5 (sequence is synthesized)
acagctcccgctgctcctctccctgctggcattgttgctgcttctgttggtgggggcctccctgctagcctggaggatgtttcagaaatggatcaaagctggtgaccattcagagctgtc

SEQ ID NO: 546028 - DNA, 120 bp, Artificial Sequence
  ENSG00000167851_6 (sequence is synthesized)
aaagccagcaccaccaagggaggtggaggtggaatacagcactgtggcctcccccagggaagaacttcactatgcctcggtggtgtttgattctaacaccaacaggatagctgctcagag

SEQ ID NO: 546029 - DNA, 120 bp, Artificial Sequence
  ENSG00000167851_7 (sequence is synthesized)
gcctcgggaggaggaaccagattcagattacagtgtgataaggaagacataggcttttgtcctgcctcgccatcggagctctcatgggccccaggaagtccagggacagctcccttatac

SEQ ID NO: 546030 - DNA, 120 bp, Artificial Sequence
  ENSG00000167851_8 (sequence is synthesized)
ctggcccacgtccttctcagcctgccctcgacaacagtgaccaacagacaggcagctgggtttcccaggccatccctctgttgccatcagcttgattggcttccccgagggccagcaggg

SEQ ID NO: 546031 - DNA, 120 bp, Artificial Sequence
  ENSG00000167851_9 (sequence is synthesized)
ctgggggctccggagagcagcaggaagcactcccagccaccagtgcctgtcacctctttcccctttgcccctgcttcatcccagctctgtgtgtggaggacaaagcttcttcctgcgtgg

SEQ ID NO: 546032 - DNA, 120 bp, Artificial Sequence
  ENSG00000167851_10 (sequence is synthesized)
ctccaggaaaagatgtggctcacgtaggtggcacctgccaatagctttgtcaatcacagccccataggaacgtctggaattgcttgggagttggggagaactgtcaagaagagtgaagag

SEQ ID NO: 546033 - DNA, 120 bp, Artificial Sequence
  ENSG00000167851_11 (sequence is synthesized)
agtgccaaagcggagatctgttcacctgggggccatggaggggggacccactaaagatcaagatcaaagattctccccatctcacagacaaggaaactgaggccagagggaggagagaat

SEQ ID NO: 546034 - DNA, 120 bp, Artificial Sequence
  ENSG00000167851_12 (sequence is synthesized)
tgctcatggctccagaactggtggcaagtttctctggactcttaggtttatttttaatatgaaatataaaaacagtttcaaatatcttattgagggagaagtaaaaacttatttaaacaa

SEQ ID NO: 546035 - DNA, 120 bp, Artificial Sequence
  ENSG00000167851_13 (sequence is synthesized)
ccatcggccaacggaggttggatggagcggggagctcacccagagcaggacgaatgatgctgggagatgtggtcactaggtcttgttctgagtcctggccagcctgtcccctccccacca

SEQ ID NO: 546036 - DNA, 120 bp, Artificial Sequence
  ENSG00000167851_14 (sequence is synthesized)
aggcaaatggaatgaagggaggccctcccagccaagctgacctggggaacattaaactactggacggagtggggtggaggcaggaaggggaaggtgggggctgaggtgctcagagcatag

SEQ ID NO: 546037 - DNA, 120 bp, Artificial Sequence
  ENSG00000167851_15 (sequence is synthesized)
aggaaggggagacacatgcagagacgcagggacagaggctgcagggctccgtggacacccacctgggacctcctgcccacccaggctgccacgcagagtgagctgcactacgcaaatctg

SEQ ID NO: 546038 - DNA, 120 bp, Artificial Sequence
  ENSG00000167851_16 (sequence is synthesized)
gcggtgcgctctgtctaccacataagatggacagatgaaggtccacacccctgggagaggaaggagccagggcctctcccggctctgcacccacgtaccttggctgaaccacagcggggc

SEQ ID NO: 546039 - DNA, 120 bp, Artificial Sequence
  ENSG00000167851_17 (sequence is synthesized)
aagtgataagggttcgtgaaagatgacctggttctttctgtgttgtgtgtgggtgtgtgtgttcctcttctgacctcttgagttggacaattcagtcatttacctgagagttaatgggtc

SEQ ID NO: 546040 - DNA, 120 bp, Artificial Sequence
  ENSG00000167851_18 (sequence is synthesized)
aagattctgtgatcttcaaggaaaacgttaagacgacagaggaatatcctggtagaggaccctggccccaaggtggtccccagtctcctgtttatgattagaggggtttggggtggtgat

SEQ ID NO: 546041 - DNA, 120 bp, Artificial Sequence
  ENSG00000167851_19 (sequence is synthesized)
caagtgccgcctgtgctggggaagggaccatgtggctgccttgggctctgttgcttctctgggtcccagctggtgaccattcagagctgtcccagaaccccaagcaggctgccacgcaga

SEQ ID NO: 546042 - DNA, 120 bp, Artificial Sequence
  ENSG00000167851_20 (sequence is synthesized)
ggggatcagtcctgcaagctacggagtcactacagggagaggtctcatcactagaaatagccgaagaacctgcagcctcaaccagcgttaaggaggacgtgccgtttctagggagtctta

SEQ ID NO: 546043 - DNA, 120 bp, Artificial Sequence
  ENSG00000167851_21 (sequence is synthesized)
gtcggggctcaccagcttcctgcattttctgaccggctccaggaatagaaccaaaagaagctgaacaaggaagcagcgcggcaccaagaaaagcagaagtcggggccttggaggcgtgac

SEQ ID NO: 546044 - DNA, 120 bp, Artificial Sequence
  ENSG00000167858_0 (sequence is synthesized)
gttctgcaagagctggaagctccagttggggtaaggaggctcccatcccgagcttgcgtagtggttctgtgtggcgctgaggaatttggaaacctcaaatggctaaactattacaacctc

SEQ ID NO: 546045 - DNA, 120 bp, Artificial Sequence
  ENSG00000167858_1 (sequence is synthesized)
cacccaagttcctgccctcagagtggcacattgctaacaagaaccagtaccacagagcagacgctcaaaggtcccgatcagaacgcctggtcgcagaaagccagaggcttgtggatgaaa

SEQ ID NO: 546046 - DNA, 120 bp, Artificial Sequence
  ENSG00000167858_2 (sequence is synthesized)
ttgaaaagaccacaagaaaatctcaaagcgatgtgaacaagaaactagaacagagactcgaggaagtccagttctggaagaaggagttagatgacaaacttgagcagcttgtgaatgtaa

SEQ ID NO: 546047 - DNA, 120 bp, Artificial Sequence
  ENSG00000167858_3 (sequence is synthesized)
ctgatgatctactcatatataagatcagattggaaaaagccctggagaccttgaaagagcccttgcacatcactgagacatgcctggcatacagggagaagcgcattggcattgacctgg

SEQ ID NO: 546048 - DNA, 120 bp, Artificial Sequence
  ENSG00000167858_4 (sequence is synthesized)
tgcacgacacagtggagcatgagctgataaaggaggctgagatcatccagggcattatggctctgctgacccgtaccttggaggaggcttccgagcagattcggatgaaccgctctgcca

SEQ ID NO: 546049 - DNA, 120 bp, Artificial Sequence
  ENSG00000167858_5 (sequence is synthesized)
agtacaatcttgagaaggatttgaaggacaagtttgtggccctgaccatagatgatatctgcttctcgctcaacaacaactcaccaaacatcagatattctgagaacgccgtgaggattg

SEQ ID NO: 546050 - DNA, 120 bp, Artificial Sequence
  ENSG00000167858_6 (sequence is synthesized)
agccaaactccgtgagtctggaagactggttggacttctccagcaccaatgtggagaaggctgacaagcagcggaacaactccctgatgctgaaagccctggtggatcgaatcctgtccc

SEQ ID NO: 546051 - DNA, 120 bp, Artificial Sequence
  ENSG00000167858_7 (sequence is synthesized)
agacagccaatgatctgcgcaagcagtgtgatgtggtggacacggcattcaagaatgggctgaaggatacaaaggatgccagggacaagctggctgatcatctggccaaggtcatggaag

SEQ ID NO: 546052 - DNA, 120 bp, Artificial Sequence
  ENSG00000167858_8 (sequence is synthesized)
agattgcttcccaggagaaaaatattacagctcttgaaaaggccatccttgaccaagaagggccagccaaggtggctcatacgcgcttggagaccaggacacaccggccgaacgtggagc

SEQ ID NO: 546053 - DNA, 120 bp, Artificial Sequence
  ENSG00000167858_9 (sequence is synthesized)
tgtgtcgtgatgtcgcacaatataggctaatgaaggaggttcaagagatcacccacaatgtcgcaagattgaaggaaactttagcccaagctcaggcagagctgaaagggctgcatcgca

SEQ ID NO: 546054 - DNA, 120 bp, Artificial Sequence
  ENSG00000167858_10 (sequence is synthesized)
gacagcttgccctgcaggaggagatccaggtcaaagagaacaccatttatatcgacgaagtgctgtgtatgcagatgaggaaatccatcccacttcgggatggggaagaccatggggtct

SEQ ID NO: 546055 - DNA, 120 bp, Artificial Sequence
  ENSG00000167858_11 (sequence is synthesized)
gggctgggggcctccgccctgatgctgtctgctaatagtagggctagttccaattctcattaaaccacattgtaaacagtagttacagtagtacagagctctcatttcaggctggcgggg

SEQ ID NO: 546056 - DNA, 120 bp, Artificial Sequence
  ENSG00000167858_12 (sequence is synthesized)
cctctagccagcctgctgcaacctcttggctggcattccaagcctgctcagggggctgattttggggcgagtttcttctcttatgctggtgtggtgtttgcctaacaattcaactccata

SEQ ID NO: 546057 - DNA, 120 bp, Artificial Sequence
  ENSG00000167858_13 (sequence is synthesized)
ttttagcacaggccactcttacaatatcacaggacttggggccccaggacagggtttcaagacatttcagttcagattcaattcaataaagtagttgggctggatcacctgtgtagacca

SEQ ID NO: 546058 - DNA, 120 bp, Artificial Sequence
  ENSG00000167858_14 (sequence is synthesized)
aacctttctcttggctctcaaaatttcttttctctagaaaataatgtgttttttttctcttaaatactcaaataacataaagaaaaagaacaaaattccattcattcaagtcaatgggtt

SEQ ID NO: 546059 - DNA, 120 bp, Artificial Sequence
  ENSG00000167858_15 (sequence is synthesized)
caagtcaatggttaagactgtaggttccggagtctgccatctgagtataggacctccaatagtccccactcacagggctataggggcgttgaatgagatcacctccgtaaagggcttcat

SEQ ID NO: 546060 - DNA, 120 bp, Artificial Sequence
  ENSG00000167858_16 (sequence is synthesized)
actgagcctgtatcatggggcagtgagtgtttaatgaatgtgagccattgtgagcagtcccaccctataccaacataatttctgcacaattgtactcatggcataaactcaatttcagga

SEQ ID NO: 546061 - DNA, 120 bp, Artificial Sequence
  ENSG00000167858_17 (sequence is synthesized)
ttatttttttccttcactgctaattattgcaagcctttgttcatgttgctaaattgtctttataattattttaatggttacgtacctctttacaagttttcagcaagactgttttatata

SEQ ID NO: 546062 - DNA, 120 bp, Artificial Sequence
  ENSG00000167858_18 (sequence is synthesized)
cttactgtttcttttccaaaaagagttcaacttgtgggaggctgccttccgctgagctgcagcaggtcagagatctatgtgggtgactgtcaaaggaagacatttgctgtgggaaactgc

SEQ ID NO: 546063 - DNA, 120 bp, Artificial Sequence
  ENSG00000167858_19 (sequence is synthesized)
tcatttgttccttattccgctaacattgaaggaacactttccatggacgaggcttaccatctcagcaccctcccatgtgtgaagctgctgctacactctgctaacatttggttccccggt

SEQ ID NO: 546064 - DNA, 120 bp, Artificial Sequence
  ENSG00000167858_20 (sequence is synthesized)
gctcatggacagctgacggtgtggggctcaggagacctagcttctagttgcaacactgccaggaaagtttctctccttctttaggaccacctgtaaagtaaggaaaggactatatcgtct

SEQ ID NO: 546065 - DNA, 120 bp, Artificial Sequence
  ENSG00000167858_21 (sequence is synthesized)
ggaactcttcctgtccttgctgttccctgaatctggctgtctagctgcacatacggtgtcatagggcacaatgataatgcagagtgtgggcctaattcctgggagctttgcaatctaggt

SEQ ID NO: 546066 - DNA, 120 bp, Artificial Sequence
  ENSG00000167858_22 (sequence is synthesized)
gctccttggtccagagactctttgccatcagaaagggatgttcccaatctgggatggagaaaccccctttgaggccaaaagcactggcttaattctgttaattctgatctatgccacccc

SEQ ID NO: 546067 - DNA, 120 bp, Artificial Sequence
  ENSG00000167858_23 (sequence is synthesized)
agtgctgaacgtctcctctcagagtgctcagcaaatacacagcccttcccatgcctcaatcaaggagggaggcccctctctgctcactgggaagcctctgggtgcttttctgctctggct

SEQ ID NO: 546068 - DNA, 120 bp, Artificial Sequence
  ENSG00000167858_24 (sequence is synthesized)
cggaagagtccaaataagccttcccagctcactgggcagacctcagagtttctgctaacttagcagggttttgaggtctgtcccagaggatgtggctggcagggtgtgaagacactgggc

SEQ ID NO: 546069 - DNA, 120 bp, Artificial Sequence
  ENSG00000167858_25 (sequence is synthesized)
aaaatccttccttgtgaatacagctctcagaggcagccagcctcagtggtggattcagatcccaggctctgcagggagatgtgattcagatcagctggtggatcagctccacgctctacc

SEQ ID NO: 546070 - DNA, 120 bp, Artificial Sequence
  ENSG00000167858_26 (sequence is synthesized)
tgtgatgtgatccccgccaagttactcaacttccccgagcttcagttgcctaatctgtaaataagactaataaagcctagattggcgagataacgtgtggaagactctcaacacagtgtc

SEQ ID NO: 546071 - DNA, 120 bp, Artificial Sequence
  ENSG00000167858_27 (sequence is synthesized)
tggaacatgctgcttttaagggaaatgtgattttgattatggttgaggccatttctcaacatgtagacataaaatgcggaaacatctaagatttcaataaagcaatgttttgttagtaaa

SEQ ID NO: 546072 - DNA, 120 bp, Artificial Sequence
  ENSG00000167858_28 (sequence is synthesized)
cttggggcaaaggcagcattgaatggtgaccttgacattgggcccagaggctcctgattctccaggttaggctcactaactaagaaagtctgacataaaacctttaaacctttaaagaat

SEQ ID NO: 546073 - DNA, 120 bp, Artificial Sequence
  ENSG00000167858_29 (sequence is synthesized)
cacctggctccaaaagccaggtttggggccatcaaacttggccattcacatctatgttcaacatcacagacccggtctcagcatatttgtggaaaaataaaggagacacaggaaaaacgg

SEQ ID NO: 546074 - DNA, 120 bp, Artificial Sequence
  ENSG00000167861_0 (sequence is synthesized)
gtctcctgcgagagccgcgggggccgcggagctggagccggagctgaagccggagccgggttggagtctgggcgggggccgggccggagcgggctccagagacatggggtcgaccgactc

SEQ ID NO: 546075 - DNA, 120 bp, Artificial Sequence
  ENSG00000167861_1 (sequence is synthesized)
caagctgaacttccggaaggcggtgatccagctcaccaccaagacgcagcccgtggaagccaccgatgatgccttttgggaccagttctgggcagacacagccacctcggtgcaggatgt

SEQ ID NO: 546076 - DNA, 120 bp, Artificial Sequence
  ENSG00000167861_2 (sequence is synthesized)
gtttgcactggtgccggcagcagagatccgggccgtgcgggaagagtcaccctccaacttggccaccctgtgctacaaggccgttgagaagctggtgcagggagctgagagtggctgcca

SEQ ID NO: 546077 - DNA, 120 bp, Artificial Sequence
  ENSG00000167861_3 (sequence is synthesized)
ctcggagaaggagaagcagatcgtcctgaactgcagccggctgctcacccgcgtgctgccctacatctttgaggaccccgactggaggggcttcttctggtccacagtgcccggggcagg

SEQ ID NO: 546078 - DNA, 120 bp, Artificial Sequence
  ENSG00000167861_4 (sequence is synthesized)
gcgaggagggcagggagaagaggatgatgagcatgccaggcccctggccgagtccctgctcctggccattgctgacctgctcttctgcccggacttcacggttcagagccaccggaggag

SEQ ID NO: 546079 - DNA, 120 bp, Artificial Sequence
  ENSG00000167861_5 (sequence is synthesized)
cactgtggactcggcagaggacgtccactccctggacagctgtgaatacatctgggaggctggtgtgggcttcgctcactccccccagcctaactacatccacgatatgaaccggatgga

SEQ ID NO: 546080 - DNA, 120 bp, Artificial Sequence
  ENSG00000167861_6 (sequence is synthesized)
gctgctgaaactgctgctgacatgcttctccgaggccatgtacctgcccccagctccggaaagtggcagcaccaacccatgggttcagttcttttgttccacggagaacagacatgccct

SEQ ID NO: 546081 - DNA, 120 bp, Artificial Sequence
  ENSG00000167861_7 (sequence is synthesized)
gcccctcttcacctccctcctcaacaccgtgtgtgcctatgaccctgtgggctacgggatcccctacaaccacctgctcttctctgactaccgggaacccctggtggaggaggctgccca

SEQ ID NO: 546082 - DNA, 120 bp, Artificial Sequence
  ENSG00000167861_8 (sequence is synthesized)
ggtgctcattgtcactttggaccacgacagtgccagcagtgccagccccactgtggacggcaccaccactggcaccgccatggatgatgccgatcctccaggccctgagaacctgtttgt

SEQ ID NO: 546083 - DNA, 120 bp, Artificial Sequence
  ENSG00000167861_9 (sequence is synthesized)
gaactacctgtcccgcatccatcgtgaggaggacttccagttcatcctcaagggtatagcccggctgctgtccaaccccctgctccagacctacctgcctaactccaccaagaagatcca

SEQ ID NO: 546084 - DNA, 120 bp, Artificial Sequence
  ENSG00000167861_10 (sequence is synthesized)
gttccaccaggagctgctagttctcttctggaagctctgcgacttcaacaagaaattcctcttcttcgtgctgaagagcagcgacgtcctagacatccttgtccccatcctcttcttcct

SEQ ID NO: 546085 - DNA, 120 bp, Artificial Sequence
  ENSG00000167861_11 (sequence is synthesized)
caacgatgcccgggccgatcagtctcgggtgggcctgatgcacattggtgtcttcatcttgctgcttctgagcggggagcggaacttcggggtgcggctgaacaaaccctactcaatccg

SEQ ID NO: 546086 - DNA, 120 bp, Artificial Sequence
  ENSG00000167861_12 (sequence is synthesized)
cgtgcccatggacatcccagtcttcacagggacccacgccgacctgctcattgtggtgttccacaagatcatcaccagcgggcaccagcggttgcagcccctcttcgactgcctgctcac

SEQ ID NO: 546087 - DNA, 120 bp, Artificial Sequence
  ENSG00000167861_13 (sequence is synthesized)
ttgctgcacctgctggaggccttctccaccacctggttcctcttctctgccgcccagaaccaccacctggtcttcttcctcctggaggtcttcaacaacatcatccagtaccagtttgat

SEQ ID NO: 546088 - DNA, 120 bp, Artificial Sequence
  ENSG00000167861_14 (sequence is synthesized)
ggcaactccaacctggtctacgccatcatccgcaagcgcagcatcttccaccagctggccaacctgcccacggacccgcccaccattcacaaggccctgcagcggcgccggcggacacct

SEQ ID NO: 546089 - DNA, 120 bp, Artificial Sequence
  ENSG00000167861_15 (sequence is synthesized)
gagcccttgtctcgcaccggctcccaggagggcacctccatggagggctcccgccccgctgcccctgcagagccaggcaccctcaagaccagtctggtggctactccaggcattgacaag

SEQ ID NO: 546090 - DNA, 120 bp, Artificial Sequence
  ENSG00000167861_16 (sequence is synthesized)
ctgaccgagaagtcccaggtgtcagaggatggcaccttgcggtccctggaacctgagccccagcagagcttggaggatggcagcccggctaagggggagcccagccaggcatggagggag

SEQ ID NO: 546091 - DNA, 120 bp, Artificial Sequence
  ENSG00000167861_17 (sequence is synthesized)
cagcggcgaccgtccacctcatcagccagtgggcagtggagcccaacgccagagtgggtcctctcctggaagtcgaagctgccgctgcagaccatcatgaggctgctgcaggtgctggtt

SEQ ID NO: 546092 - DNA, 120 bp, Artificial Sequence
  ENSG00000167861_18 (sequence is synthesized)
ccgcaggtggagaagatctgcattgacaagggcctgacggatgagtctgagatcctgcggttcctgcagcatggcaccctggtggggctgctgcccgtgccccaccccatcctcatccgc

SEQ ID NO: 546093 - DNA, 120 bp, Artificial Sequence
  ENSG00000167861_19 (sequence is synthesized)
aagtaccaggccaactcgggcactgccatgtggttccgcacctacatgtggggcgtcatctatctgaggaatgtggacccccctgtctggtacgacaccgacgtgaagctgtttgagata

SEQ ID NO: 546094 - DNA, 120 bp, Artificial Sequence
  ENSG00000167861_20 (sequence is synthesized)
cagcgggtgtgaggatgaagccgacgaggggctcagtctaggggaaggcagggccttggtccctgaggcttcccccatccaccattctgagctttaaattaccacgatcagggcctggaa

SEQ ID NO: 546095 - DNA, 120 bp, Artificial Sequence
  ENSG00000167861_21 (sequence is synthesized)
caggcagagtggccctgagtgtcatgccctagagacccctgtggccaggacaatgtgaactggctcagatccccctcaacccctaggctggactcacaggagccccatctctggggctat

SEQ ID NO: 546096 - DNA, 120 bp, Artificial Sequence
  ENSG00000167861_22 (sequence is synthesized)
gcccccaccagagaccactgcccccaacactcggactccctctttaagacctggctcagtgctggcccctcagtgcccacccactcctgtgctacccagccccagaggcagaagccaatg

SEQ ID NO: 546097 - DNA, 120 bp, Artificial Sequence
  ENSG00000167861_23 (sequence is synthesized)
ggtcactgtgccctaaggggtttgaccagggaaccacgggctgtcccttgaggtgcctggacagggtaagggggtgcttccagcctcctaacccaaagccagctgttccaggctccaggg

SEQ ID NO: 546098 - DNA, 120 bp, Artificial Sequence
  ENSG00000167861_24 (sequence is synthesized)
gaaaaaggtgtggccaggctgctcctcgaggaggctgggagctggccgactgcaaaagccagactggggcacctcccgtatccttggggcatggtgtggggtggtgagggtctcctgcta

SEQ ID NO: 546099 - DNA, 120 bp, Artificial Sequence
  ENSG00000167861_25 (sequence is synthesized)
tattctcctggatccatggaaatagcctggctccctcttacccagtaatgaggggcagggaagggaactgggaggcagccgtttagtcctccctgccctgcccactgcctggatggggcg

SEQ ID NO: 546100 - DNA, 120 bp, Artificial Sequence
  ENSG00000167861_26 (sequence is synthesized)
atgccacccctcatccttcacccagctctggcctctgggtcccaccacccagccccccgtgtcagaacaatctttgctctgtacaatcggcctctttacaataaaacctcctgctccaca

SEQ ID NO: 546101 - DNA, 120 bp, Artificial Sequence
  ENSG00000167861_27 (sequence is synthesized)
gctccagacctacctgcctaactccaccaagaagatccagttccaccaggagctgctagttctcttctggaagctctgcgacttcaacaagcccacttggcccctccccgcacccctaga

SEQ ID NO: 546102 - DNA, 120 bp, Artificial Sequence
  ENSG00000167861_28 (sequence is synthesized)
gaggaggggtctgtgggcctggccagggctgggtgggaggcagagttggcgtcacagggagagcgccctttagggccggccatgctcctccaagcctcttctgggatttgggaagtacag

SEQ ID NO: 546103 - DNA, 120 bp, Artificial Sequence
  ENSG00000167861_29 (sequence is synthesized)
gggtggggccagtgggtgctgctgagggatggtgttcaatgccacctccttgggccctcagttcccctcccatgggggtttctgtgcccacagtctggaggaagtagggtatggagagaa

SEQ ID NO: 546104 - DNA, 120 bp, Artificial Sequence
  ENSG00000167861_30 (sequence is synthesized)
cagtttctattattgctatttccaaagtcgggcaaatttgcagtgatctctgagggagaaataggggtaaggtggggcaagagacagcacatgcaaaggccctggggtgggatgttggaa

SEQ ID NO: 546105 - DNA, 120 bp, Artificial Sequence
  ENSG00000167861_31 (sequence is synthesized)
ctgaaagtgaagagtatggcataaggcaggaccagagatggggactggggcctgagagccaggagaagtcagcgttgggggatggacggatcctctgtgacttctcctggccaccttgct

SEQ ID NO: 546106 - DNA, 120 bp, Artificial Sequence
  ENSG00000167861_32 (sequence is synthesized)
cgaggggaggtgggaagagagtcagaatatttaacagctggcctgacgtggatgctgccatgctggggcctgtactttttgccaggtgttagctgtttagtgctgggttgtggcgggaac

SEQ ID NO: 546107 - DNA, 120 bp, Artificial Sequence
  ENSG00000167861_33 (sequence is synthesized)
tcaaaggcactggggcgggggtgttgtgaggtgctcaggcctgacattctgggatagccatagtgggcacacacagccagtgccagccctgccccagcaccctctcttgggctccctgta

SEQ ID NO: 546108 - DNA, 120 bp, Artificial Sequence
  ENSG00000167861_34 (sequence is synthesized)
ccatctccaaccccttgggcagacaccctcctgtcctccaaactcccccttccaggaagcccacccagattggacggggggagctggagggggcctccctgaggcgaggcatgctccctg

SEQ ID NO: 546109 - DNA, 120 bp, Artificial Sequence
  ENSG00000167861_35 (sequence is synthesized)
acaatgctccgacgcagaaggaagagcgtcgaggctccgggtgggacctgagaaggcacccggcgtgcggcggcgctgggttggaaccgccgactccgcgggtcttcggcggcgggcgct

SEQ ID NO: 546110 - DNA, 120 bp, Artificial Sequence
  ENSG00000167861_36 (sequence is synthesized)
ccgactccaagctgaacttccggaaggcggtgatccagctcaccaccaagacgcagagatagtctcactatgttacccaggctggtcttcaacttctgggctcaagtgatcctcctgctt

SEQ ID NO: 546111 - DNA, 120 bp, Artificial Sequence
  ENSG00000167861_37 (sequence is synthesized)
ctcccagcccacagcaggagaaggcaggcgcatccagggcctcccgccccacaggggcaggcagccctgtggcctcactcagctcttccacttctctgtggttctctttgctgggcgttg

SEQ ID NO: 546112 - DNA, 120 bp, Artificial Sequence
  ENSG00000167861_38 (sequence is synthesized)
ggaccacggcagccgtcatttatgggggagtcctccaggccacatctgactgagcaccttccacagatcagttcatttagctccctctgtggggtgggtactgccagggtcgccagttta

SEQ ID NO: 546113 - DNA, 120 bp, Artificial Sequence
  ENSG00000167861_39 (sequence is synthesized)
cagatagggaaactgaggctgggagactcacttagcaaggcctcagccatccagtggctagctgggccctggctgtcctgatgctccaagctgctctggcctgtgtcccagtcccccaag

SEQ ID NO: 546114 - DNA, 120 bp, Artificial Sequence
  ENSG00000167861_40 (sequence is synthesized)
gctggccgaccccaactccaggtggctcctctgcctgtggccccactgtctctcctctgcagcctgggtgccccccctgaccctcctctgcagcctgggtgcccaccctgaccccaagtg

SEQ ID NO: 546115 - DNA, 120 bp, Artificial Sequence
  ENSG00000167861_41 (sequence is synthesized)
tctcccccacaccacctgccctgggtttatgtccaggtgaggtgctgagggatgcaacacagtgattcctagcagggctgagactcttgatgttggggtcaccgcccggccccctccagt

SEQ ID NO: 546116 - DNA, 120 bp, Artificial Sequence
  ENSG00000167861_42 (sequence is synthesized)
cagtaggggaggttccctcgctgttcccggcccggctccctgctgtgccccacttctgccttgggaggtttggggcaaccaggagtccacttcctgtcccttcattcctctgcccatggg

SEQ ID NO: 546117 - DNA, 120 bp, Artificial Sequence
  ENSG00000167861_43 (sequence is synthesized)
cttattccaggcaatccagagctgagtccattcgccagctctgggtctcgtttgaggggaggtgctgccccctggtggtgatgaactttaacttaccagccacacctcacactagccccg

SEQ ID NO: 546118 - DNA, 120 bp, Artificial Sequence
  ENSG00000167861_44 (sequence is synthesized)
tctctccttggagtcctcgacaggacagaatctgggggcccctcagtaatccgtccctgggtcctccatcaagagccgcctgtccagtagaaatagaatgcaaaccacgagtgcaatttt

SEQ ID NO: 546119 - DNA, 120 bp, Artificial Sequence
  ENSG00000167861_45 (sequence is synthesized)
agaaaaagggagaaccaagagagtggatgctcagaaaacatgaatgggaaagacagactgagaaggaggaaagtgggatggagagggccagctgagacgtgggccaggagccggagcgga

SEQ ID NO: 546120 - DNA, 120 bp, Artificial Sequence
  ENSG00000167861_46 (sequence is synthesized)
cacaggccaacctgccacttgctccaggtttcaagcccctccagcccacagaaagaacgcaagcttgtgtacccttcatagtagccacattaaaaaaaaagggtgacaacaattgaataa

SEQ ID NO: 546121 - DNA, 120 bp, Artificial Sequence
  ENSG00000167862_0 (sequence is synthesized)
agtcgcaagacctgagcatggcggccaccaggtgcctgcgctggggcctgagccgagccggagtctggctgctcccaccgcccgcacggtgcccacgccgggcgctgcacaagcagaaag

SEQ ID NO: 546122 - DNA, 120 bp, Artificial Sequence
  ENSG00000167862_1 (sequence is synthesized)
acggcactgagttcaagagcatctacagcctggacaagctctaccccgaatctcagggctcggacaccgcctggagggtcccgaatggtgcaaagcaagccgacagtgacatccctctag

SEQ ID NO: 546123 - DNA, 120 bp, Artificial Sequence
  ENSG00000167862_2 (sequence is synthesized)
atcgcttgacaatatcttattgtcggagtagtggtcctggggggcagaatgtgaacaaagtgaattccaaggcagaagtcaggttccatttggcaactgccgagtggatcgcggagcccg

SEQ ID NO: 546124 - DNA, 120 bp, Artificial Sequence
  ENSG00000167862_3 (sequence is synthesized)
tgatcctcacctctgagagcagccgctatcagttccggaatctggcagattgcctgcagaaaattcgagacatgatcactgaggccagccagacaccgaaggagccaacaaaagaagatg

SEQ ID NO: 546125 - DNA, 120 bp, Artificial Sequence
  ENSG00000167862_4 (sequence is synthesized)
ttaaacttcatagaatcaggatagaaaacatgaatcgggaaaggctgagacaaaagagaattcattctgctgtaaagacaagcaggagggtcgacatggactgaaatcaccctctgcagc

SEQ ID NO: 546126 - DNA, 120 bp, Artificial Sequence
  ENSG00000167862_5 (sequence is synthesized)
tgggagggctcttctgggcgtccgggcagctgcagctgagaggactttcacaccataaggagatttctgtttttctttttggctgttaatgcttgtctataacattggagccatcacaag

SEQ ID NO: 546127 - DNA, 120 bp, Artificial Sequence
  ENSG00000167862_6 (sequence is synthesized)
aatgttcatttggaatgaaggctgcaggcactggttgcagacgtctttataggcagtcaccatgttgtcaaaccttaataatgcacctcatgtattagtcacaataaaaatcagaactca

SEQ ID NO: 546128 - DNA, 120 bp, Artificial Sequence
  ENSG00000167862_7 (sequence is synthesized)
ttcagaatggtcactggtcacccaggggttgatccttcctggaagtctcaggcacccatgctcccttctccctttcctccacagtgaattccaaggcagaagtcaggttccatttggcaa

SEQ ID NO: 546129 - DNA, 120 bp, Artificial Sequence
  ENSG00000167863_0 (sequence is synthesized)
ccgttacttgctgcggaggaccgtgggcagccagggtcggtgaaggatcccaaaatggctgggcgaaaacttgctctaaaaaccattgactgggtagcttttgcagagatcataccccag

SEQ ID NO: 546130 - DNA, 120 bp, Artificial Sequence
  ENSG00000167863_1 (sequence is synthesized)
aaccaaaaggccattgctagttccctgaaatcctggaatgagaccctcacctccaggttggctgctttacctgagaatccaccagctatcgactgggcttactacaaggccaatgtggcc

SEQ ID NO: 546131 - DNA, 120 bp, Artificial Sequence
  ENSG00000167863_2 (sequence is synthesized)
ttggtggatgactttgagaagaagtttaatgcgctgaaggttcccgtgccagaggataaatatactgcccaggtggatgccgaagaaaaagaagatgtgaaatcttgtgctgagtgggtg

SEQ ID NO: 546132 - DNA, 120 bp, Artificial Sequence
  ENSG00000167863_3 (sequence is synthesized)
tctctctcaaaggccaggattgtagaatatgagaaagagatggagaagatgaagaacttaattccatttgatcagatgaccattgaggacttgaatgaagctttcccagaaaccaaatta

SEQ ID NO: 546133 - DNA, 120 bp, Artificial Sequence
  ENSG00000167863_4 (sequence is synthesized)
gacaagaaaaagtatccctattggcctcaccaaccaattgagaatttataaaattgagtccaggaggaagctctggcccttgtattacacattctggacattaaaaataataattataca

SEQ ID NO: 546134 - DNA, 120 bp, Artificial Sequence
  ENSG00000167863_5 (sequence is synthesized)
ggaagagttaacagccatataaaggaatgacttgtcaataaatgcaacaacatggacgaatttcaaaataattatgcggagtgaaagaagccaacaagaaaaagaagagtatagcatatg

SEQ ID NO: 546135 - DNA, 120 bp, Artificial Sequence
  ENSG00000167863_6 (sequence is synthesized)
attccatctttgtgaaatcttgtgctgagtgggtgtctctctcaaaggccaggattgtagaatatgagaaagagatggagaagatgaagaacttaattccatttgatcagatgaccattg

SEQ ID NO: 546136 - DNA, 120 bp, Artificial Sequence
  ENSG00000167863_7 (sequence is synthesized)
acacctctaaagcactgagcttgtaacatgcctgtgggtagggagcaggaacagggataattacatacacagcatgacagccagatccctaaggaagcttaggaaggatgcgtatggcca

SEQ ID NO: 546137 - DNA, 120 bp, Artificial Sequence
  ENSG00000167863_8 (sequence is synthesized)
aaggccttgtggtcgattgaactgtaaataggtgcaggaatttaggctctgttcattcagcagtagagtgtagccttaatctgggagccagagggctttctgatcagcacaggagttttg

SEQ ID NO: 546138 - DNA, 120 bp, Artificial Sequence
  ENSG00000167863_9 (sequence is synthesized)
tgggccggttcaccccttcttaggcaacctggtggtcccccgctcctgggaggtcaccatattgatgctgaacttggtgaagacacccgatcggcataacgcgctacagcccagaactct

SEQ ID NO: 546139 - DNA, 120 bp, Artificial Sequence
  ENSG00000167863_10 (sequence is synthesized)
tgggctcaagcaatccacgtgcctcagccaggcatgcgccaccacgccccagggggctttcaagttaaatgtttgcccacctcctgggttccttttagcttccttcctgtctccctttgg

SEQ ID NO: 546140 - DNA, 120 bp, Artificial Sequence
  ENSG00000167863_11 (sequence is synthesized)
tgggttccttttagcttccttcctgtctccctttggaacaaactgactttttttctactcttttcctgtcctttttcttttgagacggagttttgctctgtcacccagggtggagtgcag

SEQ ID NO: 546141 - DNA, 73 bp, Artificial Sequence
  ENSG00000167863_12 (sequence is synthesized)
gcagtggcgcaatctcagcttactgcagcctctgcctcccaagctcaagccatccttcacacctgataaattt

SEQ ID NO: 546142 - DNA, 120 bp, Artificial Sequence
  ENSG00000167863_13 (sequence is synthesized)
cctctgctttttttaactgtcccttatagctgtaatttctcatccatctatcctcctctgatatttacacaagtctcaatatccagagttcatttgcttattcattcaaagatgtgtatg

SEQ ID NO: 546143 - DNA, 120 bp, Artificial Sequence
  ENSG00000167863_14 (sequence is synthesized)
atccagagttcatttgcttattcattcaaagatgtgtatggagggcctactctgtgccaggtagtgttaagtgctggagccataacactaagcagtcttttttttttttttttgagacgg

SEQ ID NO: 546144 - DNA, 120 bp, Artificial Sequence
  ENSG00000167863_15 (sequence is synthesized)
taagcagtcttctaaggagaccattcattacgcagtgctccttccaccagtcagctccctagggttccatgcagaagagaaatcagaatttctttacaattcaaggtgctaagaggccat

SEQ ID NO: 546145 - DNA, 120 bp, Artificial Sequence
  ENSG00000167863_16 (sequence is synthesized)
tttttggtcatcaagtccagctgtccttttcagatgaagaaaatgaagcttatcatcataaagaattgtccagggttccgagttagtgatagggctgagaagacccttgagctcctgttc

SEQ ID NO: 546146 - DNA, 120 bp, Artificial Sequence
  ENSG00000167863_17 (sequence is synthesized)
ccagtctaatattctttctactccagtattgagatgcgtattcgtttccgcttgggacacagaatgtctttcagtatgacctttaaggattcgtagcttccagccctttgagctcctggg

SEQ ID NO: 546147 - DNA, 120 bp, Artificial Sequence
  ENSG00000167863_18 (sequence is synthesized)
tgtattggcgacgactcactgtccttgtgtttgtagtttaatgcgctgaaggttcccgtgcccttgtgtttgtagtttaatgcgctgaaggttcccgtgccagaggataaatatactgcc

SEQ ID NO: 546148 - DNA, 120 bp, Artificial Sequence
  ENSG00000167863_19 (sequence is synthesized)
gtctacagtggctgcctggggatggttgagaggggactgctggtttcacaggtggatacctatatcaaaacttatcaaatggtgttctttaaatatgtgcattttatcatatttcagata

SEQ ID NO: 546149 - DNA, 120 bp, Artificial Sequence
  ENSG00000167863_20 (sequence is synthesized)
tacctcaacaaagctgttagaaacaaggagttggaattagaaaaattacccaagtagtattcaaatacctaattatttgcttgaaagcactgaaggccaactatggaactcagtggctcc

SEQ ID NO: 546150 - DNA, 120 bp, Artificial Sequence
  ENSG00000167863_21 (sequence is synthesized)
accagagagaagtctggctaggtgctcaggtggcgtgtcctgaccattcagtggctgagccctgtgaaaacaggcattctgtaggtcttcggatgaggaacttgcagaagcagccgggtg

SEQ ID NO: 546151 - DNA, 120 bp, Artificial Sequence
  ENSG00000167863_22 (sequence is synthesized)
ctgccatcctaagctggttttccatatgggcttctctgtgagtgttaagaaaagctgtggtttgcctgtcagagtgagcgcccccactcagggtaaccacagtttctccatagagcaata

SEQ ID NO: 546152 - DNA, 120 bp, Artificial Sequence
  ENSG00000167863_23 (sequence is synthesized)
ggacagcaggagtgggctgggacgactcctaccttagcagctgctggggtagaatgcagcctggtttcagaactgaatttctctttcttcttaaaggtgaaatcttgtgctgagtgggtg

SEQ ID NO: 546153 - DNA, 120 bp, Artificial Sequence
  ENSG00000167874_0 (sequence is synthesized)
aggcgggccatggcggatgtccccggggcacagcgagcggttcctggtgacggcccagagccccgggaccccctggactgttgggcctgcgctgttcttgtaacagcccagaatctgctg

SEQ ID NO: 546154 - DNA, 120 bp, Artificial Sequence
  ENSG00000167874_1 (sequence is synthesized)
gtggctgccttcaatcttctcctgctggtgctggtgctagggaccatcttgctacccgctgtcaccatgctgggcttcggcttcctctgccactctcagttcctgcgctcccaggcaccc

SEQ ID NO: 546155 - DNA, 120 bp, Artificial Sequence
  ENSG00000167874_2 (sequence is synthesized)
ccttgcaccgcgcacctgcgggaccccggtttcacggccctactggtcaccggattcctgctcctcgtgccgctgctcgtgcttgctctggccagctaccgccgcctctgcctgcgcctc

SEQ ID NO: 546156 - DNA, 120 bp, Artificial Sequence
  ENSG00000167874_3 (sequence is synthesized)
ccctttatcggcgtcggcgcgccccgcagccgcggcaaatccgggcctcaccagggtcccaggccgttcccacatcaggaaaggtctgggtctaatgaccctcgagtcaagaacaaccct

SEQ ID NO: 546157 - DNA, 120 bp, Artificial Sequence
  ENSG00000167874_4 (sequence is synthesized)
gacggctgccctccctcttattcggcccaaggacttgaagcccggcatcttccgacctgccctgcccccacccctgcctgagcggagtcctagcatccccttgggagcagcagcgtcagt

SEQ ID NO: 546158 - DNA, 120 bp, Artificial Sequence
  ENSG00000167874_5 (sequence is synthesized)
ggacccagtgctgagaaaagcccccacatcccggaaaacccactttcctttcacgacccacatctcaatcctgaacatctaggctggaacctgcacacctccccctcagctccgtcgtga

SEQ ID NO: 546159 - DNA, 120 bp, Artificial Sequence
  ENSG00000167874_6 (sequence is synthesized)
atgggacaacaatctcgtgccctcgttttatggtgcagcttctctagtatttctggggctggggggcggggctggaggggaaggagtgtccacgcatcaataaagatttaacgaactgaa

SEQ ID NO: 546160 - DNA, 120 bp, Artificial Sequence
  ENSG00000167880_0 (sequence is synthesized)
agactggttgtgcaggaggaggcatgagtgtggccgttgtgggtgcatgcgcgtcaggcctgggacccggccgcccgcccgctgcctcacctgcaaggaggggcctcccagaaactccct

SEQ ID NO: 546161 - DNA, 120 bp, Artificial Sequence
  ENSG00000167880_1 (sequence is synthesized)
tccccagtgcccagccgccccacctcgccagacttagctgaccagccagtgaggacgcccgctgcctcccacctgccctcctgccgtctttcgccagccaagcccagcctgagccagcac

SEQ ID NO: 546162 - DNA, 120 bp, Artificial Sequence
  ENSG00000167880_2 (sequence is synthesized)
ttgcctttacgaccatgttcaaggggctgagcaaaggctcccaggggaaggggtcccccaagggctcccccgccaaggggtcccccaaaggctcccccagcaggcacagccgggctgcca

SEQ ID NO: 546163 - DNA, 120 bp, Artificial Sequence
  ENSG00000167880_3 (sequence is synthesized)
cccaggagctggcccttctcatctcccgcatgcaagccaacgccgaccaggtggagcgggacatcctggagacgcagaagaggctgcagcaggaccggctgaacagtgagcagagccagg

SEQ ID NO: 546164 - DNA, 120 bp, Artificial Sequence
  ENSG00000167880_4 (sequence is synthesized)
ccctgcagcaccagcaggagacgggccgcagcctgaaggaggctgaggtgctgctcaaggacctcttcctggacgtggacaaggcccggcggctcaagcacccgcaggctgaggagattg

SEQ ID NO: 546165 - DNA, 120 bp, Artificial Sequence
  ENSG00000167880_5 (sequence is synthesized)
agaaggacatcaagcagctgcacgagcgggtgacccaggagtgtgcggagtaccgtgccctgtacgagaagatggtgctgccccccgacgtgggacccagggtcgactgggcacgcgtgc

SEQ ID NO: 546166 - DNA, 120 bp, Artificial Sequence
  ENSG00000167880_6 (sequence is synthesized)
tggagcagaaacagaagcaggtctgcgcaggccagtacgggccgggcatggcggagctggagcaacagatcgccgagcacaacatcctgcagaaggagatcgacgcctatgggcagcagc

SEQ ID NO: 546167 - DNA, 120 bp, Artificial Sequence
  ENSG00000167880_7 (sequence is synthesized)
tgcggagcctcgtggggccggatgcagccaccatccggagccaataccgagacctactgaaggcggcgtcgtggcgcgggcagagcctgggcagcctgtacacgcacctccagggctgca

SEQ ID NO: 546168 - DNA, 120 bp, Artificial Sequence
  ENSG00000167880_8 (sequence is synthesized)
cgcggcagctgagcgccctggctgagcagcagcgccgcatcctgcagcaggactggagcgacctcatggccgaccctgcgggcgtgcggcgggagtacgagcacttcaagcagcacgagc

SEQ ID NO: 546169 - DNA, 120 bp, Artificial Sequence
  ENSG00000167880_9 (sequence is synthesized)
tgctgagccaggagcagagcgtgaaccagctggaggacgacggcgagcgcatggtggagctgcggcaccccgcggtggggcccatccaggcccaccaggaggccctgaagatggagtggc

SEQ ID NO: 546170 - DNA, 120 bp, Artificial Sequence
  ENSG00000167880_10 (sequence is synthesized)
agaacttcctgaacctgtgtatctgccaggagacccagctgcagcacgtggaggactaccgccggttccaggaagaggccgactcagtcagccagaccctggcgaagctcaactccaact

SEQ ID NO: 546171 - DNA, 120 bp, Artificial Sequence
  ENSG00000167880_11 (sequence is synthesized)
tggatgccaagtacagccctgcacctgggggcccccctggcgcccccacagagctgctgcaacagctggaggcagaggaaaaacggctggccgtcaccgagagggccactggggacctgc

SEQ ID NO: 546172 - DNA, 120 bp, Artificial Sequence
  ENSG00000167880_12 (sequence is synthesized)
agcggcgaagccgggatgtggcccctctgccacagcgaagaaacccccctcagcagcccctgcacgtggacagcatctgcgactgggactcaggagaagtgcagctgctgcagggtgagc

SEQ ID NO: 546173 - DNA, 120 bp, Artificial Sequence
  ENSG00000167880_13 (sequence is synthesized)
ggtataagctggtagataacactgacccgcacgcctgggtcgtgcagggccctggcggggagaccaagcgtgctcccgccgcctgcttctgcatcccagcaccagaccctgatgctgtgg

SEQ ID NO: 546174 - DNA, 120 bp, Artificial Sequence
  ENSG00000167880_14 (sequence is synthesized)
ccagggcctcccggctggcctcagagctgcaggccctgaagcagaaattggccacagtccagagccgcctgaaggccagtgctgtggagtctcttcggcccagccagcaggctccatctg

SEQ ID NO: 546175 - DNA, 120 bp, Artificial Sequence
  ENSG00000167880_15 (sequence is synthesized)
gctcagacctggccaacccacaggcccagaagctcctgacacagatgacccggctggatggagacctgggacagatagagaggcaggtgctggcctgggcgcgggccccgctgagccgcc

SEQ ID NO: 546176 - DNA, 120 bp, Artificial Sequence
  ENSG00000167880_16 (sequence is synthesized)
ccacacccttggaggacttggagggccgcatccacagccatgagggcacagcccagcgcctgcagagcctgggaacggagaaggagacagcccagaaggagtgcgaggcgtttctgtcca

SEQ ID NO: 546177 - DNA, 120 bp, Artificial Sequence
  ENSG00000167880_17 (sequence is synthesized)
cgcggcccgtgggccccgctgccctgcagctgcccgtagccctcaacagcgtgaagaacaagttcagtgacgtgcaggttctgtgcagcctctacggggagaaagccaaggctgccctgg

SEQ ID NO: 546178 - DNA, 120 bp, Artificial Sequence
  ENSG00000167880_18 (sequence is synthesized)
atctggagcggcagatccaggatgcggacagggtcatccgaggcttcgaggccaccctggtgcaggaggcccccatccctgctgaaccgggggctctgcaggagagggtcagcgagctgc

SEQ ID NO: 546179 - DNA, 120 bp, Artificial Sequence
  ENSG00000167880_19 (sequence is synthesized)
agcgccagcggagggagctgctggaacagcagacctgcgtgctgcggctacaccgcgcgctgaaggcctcggagcacgcatgcgctgccctgcagaacaacttccaggagttctgccaag

SEQ ID NO: 546180 - DNA, 120 bp, Artificial Sequence
  ENSG00000167880_20 (sequence is synthesized)
acctgcctcgccagcagcgccaggtgcgagccctcaccgaccgctaccacgccgtaggggaccagctggacctgcgggagaaggtggtgcaggatgccgccctcacctaccagcagttca

SEQ ID NO: 546181 - DNA, 120 bp, Artificial Sequence
  ENSG00000167880_21 (sequence is synthesized)
agaactgcaaggataacctgagctcctggctggagcacctgccccgcagccaggtgcggcccagcgacggccccagccagatcgcctacaagctgcaggcgcagaagaggctgacgcagg

SEQ ID NO: 546182 - DNA, 120 bp, Artificial Sequence
  ENSG00000167880_22 (sequence is synthesized)
agatccagagccgagagcgggacagggccacagcatcccacctctcccaggccctgcaggcagcgctccaggactatgagctccaggcagacacctaccgctgctctttggagcccaccc

SEQ ID NO: 546183 - DNA, 120 bp, Artificial Sequence
  ENSG00000167880_23 (sequence is synthesized)
tggcagtgtcagcccccaagagaccccgagtggctcccctgcaagagagcatccaagcccaggagaagaaccttgcaaaggcctatactgaggttgcagcagcacagcagcagctgctcc

SEQ ID NO: 546184 - DNA, 120 bp, Artificial Sequence
  ENSG00000167880_24 (sequence is synthesized)
agcagctggagtttgctagaaaaatgctggagaagaaggagctcagtgaggacatccgaaggacccatgatgcaaagcagggctccgagagccctgcccaagcagggagagagtcagagg

SEQ ID NO: 546185 - DNA, 120 bp, Artificial Sequence
  ENSG00000167880_25 (sequence is synthesized)
ccctgaaggcccagctggaagaggagaggaagcgggtggcccgggtgcagcatgagctggaggcgcagaggagccaactgctgcagctgaggacccagcggcccttggagaggctggagg

SEQ ID NO: 546186 - DNA, 120 bp, Artificial Sequence
  ENSG00000167880_26 (sequence is synthesized)
agaaggaagtggtagagttctaccgggacccccagctggagggcagcctgtccagggtgaaggcccaggtggaggaggagggcaagcggcgggctggcctgcaggcagacctggaagtgg

SEQ ID NO: 546187 - DNA, 120 bp, Artificial Sequence
  ENSG00000167880_27 (sequence is synthesized)
gtgcagctggaaagcaagaggaagaccatgcagcctcatctgctgaccaaggaggtcacccaggtggagagggaccccggcctggacagccaggcggcccagctcaggatccagatccag

SEQ ID NO: 546188 - DNA, 120 bp, Artificial Sequence
  ENSG00000167880_28 (sequence is synthesized)
cagctccgcggggaggatgccgtcatctcggcccggctggaagggctgaagaaggagctactggcccttgagaagagggaggtggacgtgaaggagaaggtcgtggtgaaagaggtagtc

SEQ ID NO: 546189 - DNA, 120 bp, Artificial Sequence
  ENSG00000167880_29 (sequence is synthesized)
aaggtggagaagaatctggaaatggtcaaggcagcccaggctctgaggctgcagatggaggaggatgctgcgcggaggaagcaggcggaggaggctgtggccaagctacaggctcgcatc

SEQ ID NO: 546190 - DNA, 120 bp, Artificial Sequence
  ENSG00000167880_30 (sequence is synthesized)
gaagacctggagcgggctatcagctcggtggagcccaaggtcatcgtgaaggaggtgaagaaggtggagcaggacccagggctcctccaggagtcctccaggctgaggagcctcctcgag

SEQ ID NO: 546191 - DNA, 120 bp, Artificial Sequence
  ENSG00000167880_31 (sequence is synthesized)
gaggagaggaccaagaacgcgacgctggccagggagctgagcgacctgcacagcaagtacagcgtggtggagaagcagaggcccaaagtgcagctccaggagcgcgtccacgagatcttc

SEQ ID NO: 546192 - DNA, 120 bp, Artificial Sequence
  ENSG00000167880_32 (sequence is synthesized)
caggtggatccggagacagagcaggagatcactcggctcaaggccaagctgcaggagatggcgggcaagaggagcggtgtggagaaggaggtggagaagctgctgcccgacctggaggtc

SEQ ID NO: 546193 - DNA, 120 bp, Artificial Sequence
  ENSG00000167880_33 (sequence is synthesized)
ctgcgggcccagaagcccacggtggagtacaaggaggtgacccaggaggtggtgaggcatgagaggagccccgaggtgctgcgtgagatcgaccgcctgaaggctcagctcaacgagctc

SEQ ID NO: 546194 - DNA, 120 bp, Artificial Sequence
  ENSG00000167880_34 (sequence is synthesized)
gtcaacagccacgggcgctcccaggagcagctcatccgcctgcagggtgagcgcgacgagtggaggcgcgagcgggccaaggtggagaccaagacggtgagcaaggaggtggtgcgccac

SEQ ID NO: 546195 - DNA, 120 bp, Artificial Sequence
  ENSG00000167880_35 (sequence is synthesized)
gagaaggacccggtgctggagaaagaagcagagcggctccgccaggaggtgcgggaggcggcccagaagaggcgggccgcggaggacgcggtgtacgagctgcagagcaagcgcctgctg

SEQ ID NO: 546196 - DNA, 120 bp, Artificial Sequence
  ENSG00000167880_36 (sequence is synthesized)
ctggagaggaggaagcccgaggagaaggtggtggtgcaggaggtggtggtcacccagaaggacccgaagctgcgcgaggagcacagccggctgagcgggagcctggatgaggaggtgggc

SEQ ID NO: 546197 - DNA, 120 bp, Artificial Sequence
  ENSG00000167880_37 (sequence is synthesized)
cggcggcgccagctagagcttgaggtgcagcagctgcgggccggcgtggaggagcaggagggcctgctcagcttccaggaggaccgcagcaagaagctggccgtggagagggagctgcgg

SEQ ID NO: 546198 - DNA, 120 bp, Artificial Sequence
  ENSG00000167880_38 (sequence is synthesized)
cagctgaccttgaggatccaggagctcgagaagcggcctcccacggtgcaggagaagatcatcatggaggaagtggtcaagctggagaaggacccggacctggagaagtccacggaagcc

SEQ ID NO: 546199 - DNA, 120 bp, Artificial Sequence
  ENSG00000167880_39 (sequence is synthesized)
ctgcggtgggacctggaccaggagaagacccaggtaaccgagctgaatcgggagtgcaagaacctgcaggtccagattgacgtcctccagaaagccaaatcgcaggagaagaccatctac

SEQ ID NO: 546200 - DNA, 120 bp, Artificial Sequence
  ENSG00000167880_40 (sequence is synthesized)
aaggaagtgatccgggtgcagaaggaccgcgtcctggaagatgagcgggcccgcgtgtgggagatgctcaacagggagcgcacggcccggcaggcccgggaggaggaggcacggcgcctg

SEQ ID NO: 546201 - DNA, 120 bp, Artificial Sequence
  ENSG00000167880_41 (sequence is synthesized)
cgggagcgcattgaccgggccgagacgctggggagaacctggtcccgggaggagtccgagctgcagagggcccgggaccaggccgaccaggagtgtgggcggctgcagcaggagctgcgg

SEQ ID NO: 546202 - DNA, 120 bp, Artificial Sequence
  ENSG00000167880_42 (sequence is synthesized)
gctctggagaggcagaagcagcagcagacactgcagctgcaggaggagtcgaagctgctcagccagaagacggagagcgagcgacagaaggcggcccagcggggccaggagctctcgcgg

SEQ ID NO: 546203 - DNA, 120 bp, Artificial Sequence
  ENSG00000167880_43 (sequence is synthesized)
ctggaggcggccatcctccgcgagaaggaccagatctacgagaaggagcggacgctccgggacctccacgccaaggtgagccgggaggagctcagccaggagacccagacgcgagagacc

SEQ ID NO: 546204 - DNA, 120 bp, Artificial Sequence
  ENSG00000167880_44 (sequence is synthesized)
aacctttccaccaagatctccatcctggaacccgagacggggaaggacatgtccccatacgaggcctacaagaggggcatcatcgacaggggccagtacttgcagctgcaggagctcgag

SEQ ID NO: 546205 - DNA, 120 bp, Artificial Sequence
  ENSG00000167880_45 (sequence is synthesized)
tgtgactgggaggaggtcaccacctcggggccctgtggggaggagtctgtgctcctggaccgcaagagcgggaagcagtactccatcgaggccgccctccgctgccggcgcatctctaag

SEQ ID NO: 546206 - DNA, 120 bp, Artificial Sequence
  ENSG00000167880_46 (sequence is synthesized)
gaggagtaccatctgtacaaggacggccacctgcccatctccgagtttgcgctgcttgtagctggggagaccaagccaagctcctcactctccatcggctctatcatctccaagtccccg

SEQ ID NO: 546207 - DNA, 120 bp, Artificial Sequence
  ENSG00000167880_47 (sequence is synthesized)
ctcgcctccccggccccccagagcaccagtttcttctctcccagcttctctctcgggctcggtgatgacagcttccctatcgccgggatctatgacacaaccacagacaacaagtgcagc

SEQ ID NO: 546208 - DNA, 120 bp, Artificial Sequence
  ENSG00000167880_48 (sequence is synthesized)
atcaagacggccgtggccaagaacatgctggaccccatcactgggcagaagctactggaggcccaggcggccacagggggcatcgtggacctgctcagccgtgagcgctactctgtgcac

SEQ ID NO: 546209 - DNA, 120 bp, Artificial Sequence
  ENSG00000167880_49 (sequence is synthesized)
aaggcgatggagaggggcctgatcgagaacacctccacacagaggctgcttaacgcccagaaggccttcaccggcatcgaggaccccgtcaccaagaagaggctctcggtgggcgaggcc

SEQ ID NO: 546210 - DNA, 120 bp, Artificial Sequence
  ENSG00000167880_50 (sequence is synthesized)
gtccagaagggctggatgccccgggagagcgtgctcccacacctgcaggtgcagcacctgaccggggggctcatcgaccccaagaggacaggccgcatccccatccagcaggccctcctc

SEQ ID NO: 546211 - DNA, 120 bp, Artificial Sequence
  ENSG00000167880_51 (sequence is synthesized)
tccgggatgatcagtgaagagctggcccagctcctgcaggacgagtccagctacgagaaggatttgacagaccccatctccaaggaacggctgagctacaaggaggccatgggccgctgc

SEQ ID NO: 546212 - DNA, 120 bp, Artificial Sequence
  ENSG00000167880_52 (sequence is synthesized)
cgcaaagaccccctgagcggcctgctgctcctgccagcggcactggaggggtaccgctgctaccgctccgcctcccccaccgtcccgcgctcccttcgctgacacgggccaaggagccag

SEQ ID NO: 546213 - DNA, 120 bp, Artificial Sequence
  ENSG00000167880_53 (sequence is synthesized)
tggggaagtgcgtgtgttgggccaggtaggatacgtacacctcttgcctcagagcagcctcatcccaggcagtgggtcttccctctgtccaaccactgttttattattttactaacatgg

SEQ ID NO: 546214 - DNA, 120 bp, Artificial Sequence
  ENSG00000167880_54 (sequence is synthesized)
tgatgggctccctcccctaaccttggtgcctgatccatccccagaccaggacagcagccactcagttcttcctccacctccacccagtgatcccaataaacgaattctgtctccccgtgc

SEQ ID NO: 546215 - DNA, 120 bp, Artificial Sequence
  ENSG00000167880_55 (sequence is synthesized)
caaggtgcctcggagaggaaggaggaaaagcagagagaatgatgtcagggaaaggagggagtttggcccaggtctccctccctgccctttcttgtccctgggaggcagctctgcctgact

SEQ ID NO: 546216 - DNA, 81 bp, Artificial Sequence
  ENSG00000167880_56 (sequence is synthesized)
ggacagtggacgggcgcagtggctcacacctgtgatccccccagcactttgagaggccatctgagcaacatagtgagaccc

SEQ ID NO: 546217 - DNA, 120 bp, Artificial Sequence
  ENSG00000167880_57 (sequence is synthesized)
gctcaaaggctggccttcacctgaagctgcgtctactggggctggggagggagagaggcagagtggggacctctttcttcaatctcctcttcattctaggctggcctcagagctgcaggc

SEQ ID NO: 546218 - DNA, 120 bp, Artificial Sequence
  ENSG00000167880_58 (sequence is synthesized)
gagtagattccgacttccgactggtctgtgatgggcaggggtcgccttgggttagggaccatcactctggggatttcatctctggggtggccctgcccatcccctccaccctaccccgac

SEQ ID NO: 546219 - DNA, 120 bp, Artificial Sequence
  ENSG00000167881_0 (sequence is synthesized)
gtcttgctctgcggcgcaggggcaagatggctgctgagaagcaggtcccaggcggcggcggcggcggcggcagtggcggcggcggtggcagtggcggcggcggtagcggcggtggacgtg

SEQ ID NO: 546220 - DNA, 120 bp, Artificial Sequence
  ENSG00000167881_1 (sequence is synthesized)
gtgccggaggggaagaaaataaagaaaacgaacgcccttcggccggatcgaaggcaaacaaagaatttggggatagcctgagtttggagattcttcagattattaaggaatcccagcagc

SEQ ID NO: 546221 - DNA, 120 bp, Artificial Sequence
  ENSG00000167881_2 (sequence is synthesized)
agcatggtttacggcatggagattttcagaggtacaggggctactgttcccgtagacaaagacgtcttcgaaaaacactcaacttcaagatgggtaacagacacaaattcacagggaaga

SEQ ID NO: 546222 - DNA, 120 bp, Artificial Sequence
  ENSG00000167881_3 (sequence is synthesized)
aagtgactgaagagcttctgaccgataatagatacttgcttctggttctgatggatgctgaaagagcctggagctacgccatgcagctgaaacaggaagccaacactgaaccccgaaaac

SEQ ID NO: 546223 - DNA, 120 bp, Artificial Sequence
  ENSG00000167881_4 (sequence is synthesized)
ggtttcacttgttatctcgcctacgcaaagccgtgaagcatgcagaggaattggaacgcttgtgtgagagcaatcgcgtggatgccaagaccaaattagaggctcaggcttacacagctt

SEQ ID NO: 546224 - DNA, 120 bp, Artificial Sequence
  ENSG00000167881_5 (sequence is synthesized)
acctctcaggaatgctacgttttgaacatcaagaatggaaagctgccattgaggcttttaacaaatgcaaaactatctatgagaagctagccagtgctttcacagaggagcaggctgtgc

SEQ ID NO: 546225 - DNA, 120 bp, Artificial Sequence
  ENSG00000167881_6 (sequence is synthesized)
tgtataaccaacgtgtggaagagatttcacccaacatccgctattgtgcatataatattggggaccagtcagccatcaatgaactcatgcagatgagattgaggtctgggggcactgagg

SEQ ID NO: 546226 - DNA, 120 bp, Artificial Sequence
  ENSG00000167881_7 (sequence is synthesized)
gtctcttggctgaaaaattggaggctttgatcactcagactcgagccaaacaggcagctaccatgagtgaagtggagtggagagggagaacggttccagtgaagattgacaaagtgcgca

SEQ ID NO: 546227 - DNA, 120 bp, Artificial Sequence
  ENSG00000167881_8 (sequence is synthesized)
ttttcttattaggactggctgataacgaagcagctattgtccaggctgaaagcgaagaaactaaggagcgcctgtttgaatcaatgctcagcgagtgtcgggacgccatccaggtggttc

SEQ ID NO: 546228 - DNA, 120 bp, Artificial Sequence
  ENSG00000167881_9 (sequence is synthesized)
gggaggagctcaagccagatcagaaacagagagattatatccttgaaggagagccagggaaggtgtctaatcttcaatacttgcatagctacctgacttacatcaagctatcaacggcaa

SEQ ID NO: 546229 - DNA, 120 bp, Artificial Sequence
  ENSG00000167881_10 (sequence is synthesized)
tcaagcgtaatgagaacatggccaaaggtctgcagagggctctgctgcagcagcagccagaggatgacagcaagcgctcaccccggccccaggacctgatccgactctatgacatcatct

SEQ ID NO: 546230 - DNA, 120 bp, Artificial Sequence
  ENSG00000167881_11 (sequence is synthesized)
ctcaagactctggtgttcaaagcttacaggtgttttttcattgctcagtcctatgtgctggtgaagaagtggagcgaagcccttgtcctgtatgacagagtcctgaaatatgcaaatgaa

SEQ ID NO: 546231 - DNA, 120 bp, Artificial Sequence
  ENSG00000167881_12 (sequence is synthesized)
gtaaattctgatgctggcgccttcaagaacagcctaaaggacctgcctgatgtgcaagagctcatcactcaagtgcggtcagagaagtgctccctgcaggccgcagccatccttgatgca

SEQ ID NO: 546232 - DNA, 120 bp, Artificial Sequence
  ENSG00000167881_13 (sequence is synthesized)
aacgacgctcatcaaacagagacctcctcctcccaagtcaaggacaataagcctctggttgaacggtttgagacattctgcctggacccttcccttgtcaccaagcaagccaaccttgtg

SEQ ID NO: 546233 - DNA, 120 bp, Artificial Sequence
  ENSG00000167881_14 (sequence is synthesized)
cacttcccaccaggcttccagcccattccctgcaagcctttgttctttgacctggccctcaaccatgtggctttcccaccccttgaggacaagttggaacagaagaccaagagtggcctc

SEQ ID NO: 546234 - DNA, 120 bp, Artificial Sequence
  ENSG00000167881_15 (sequence is synthesized)
actggatacatcaagggcatctttggattcaggagctaaccaggctcttcctcgggggcgggggagattctgactcttaatctgtattgtgagaaaatcccagcaagttccatgatatta

SEQ ID NO: 546235 - DNA, 120 bp, Artificial Sequence
  ENSG00000167881_16 (sequence is synthesized)
aatccaggtctgcattggcccggggcaagagtttaacatcttcggccctgcattcctacatcttgtgtctgtacacgttcttaagcagcgtgtcaggagagcaccctgttgtcttctggt

SEQ ID NO: 546236 - DNA, 120 bp, Artificial Sequence
  ENSG00000167881_17 (sequence is synthesized)
aaatgtgtgcagggtcatcctgtctcctgtacctcctgggaaaggggccgctgctgtctggtgccctgtgagctgtgattgattgcctttggtcagtaatgcgttcaggagtccacacca

SEQ ID NO: 546237 - DNA, 120 bp, Artificial Sequence
  ENSG00000167881_18 (sequence is synthesized)
ggcacagatggggccttgaaacgctttgtcatgcttcttcagtaccatggatttgaaatgaactcatccttgctgtgagcatccaggagcccttgagaagtttatctatgactatgaaac

SEQ ID NO: 546238 - DNA, 120 bp, Artificial Sequence
  ENSG00000167881_19 (sequence is synthesized)
tggcaacgtcaccccagaattacggtcagccttattccccttcacctcccagtgaacgctaagaagtttcagacaagcagagagctctatttttagaagaaatatgttacactcagaaat

SEQ ID NO: 546239 - DNA, 120 bp, Artificial Sequence
  ENSG00000167881_20 (sequence is synthesized)
gatgaaaccaaatcttatattaaaaggcaaagatgacggagactgtgcccatttcttatatgccctccctcatgtccagtccccgttctctcctcgggagcctagttgcgtgaagccggt

SEQ ID NO: 546240 - DNA, 120 bp, Artificial Sequence
  ENSG00000167881_21 (sequence is synthesized)
gaggtcaagtgtaacctgacttaccggcaactaggtgaggctgatgccagatacacatgttagaggcactatttttcaggacttcccaatgtgtaatttttagatgccattatattttaa

SEQ ID NO: 546241 - DNA, 120 bp, Artificial Sequence
  ENSG00000167881_22 (sequence is synthesized)
tccccttcgttaccccccgtttttccttagtcatcccttttcacttctattataacatcaataatagaagtcacaaaaacaatgtaagaaagcaaggaataaaagtgatttaaacatgta

SEQ ID NO: 546242 - DNA, 120 bp, Artificial Sequence
  ENSG00000167881_23 (sequence is synthesized)
aggctggtcctccctggctgcccgtgggacctggtgtagccctgactgcccaggagctgcaggctgtgtcactcatggctgtgctccaggcctgaggaggatttaggtatgaagaaggga

SEQ ID NO: 546243 - DNA, 120 bp, Artificial Sequence
  ENSG00000167881_24 (sequence is synthesized)
aggcatttttctgatttaaaagaaacaaaaaccaccacaggaaaacctgaagtactgctctcagacttgactgcacgttgaaatctcttaggaagatttttttcaaggtagatgtctggg

SEQ ID NO: 546244 - DNA, 120 bp, Artificial Sequence
  ENSG00000167881_25 (sequence is synthesized)
tcgcacccccagagattgtggttctaatcagtgtgagggatctgaagtgggcattgggacttagaaaggccccttagtgattctgacatgcaaccaagtgagaagcactggtgaagctgt

SEQ ID NO: 546245 - DNA, 120 bp, Artificial Sequence
  ENSG00000167881_26 (sequence is synthesized)
gactttttccttcattgctttttaggatgtttgtaaaattcccagtgggaacttagagctttgtgggagcagtggggaggttttttggtttcagcaccttgatgcagaggcttagttaaa

SEQ ID NO: 546246 - DNA, 120 bp, Artificial Sequence
  ENSG00000167881_27 (sequence is synthesized)
gggagcagaggtgatacgtggcagtcaagaggttttaaacttgaactgtaccctaccgacaggaaaagaggcaaatcctgtgtagctggctgaaagcgaagaaactaaggagcgcctgtt

SEQ ID NO: 546247 - DNA, 120 bp, Artificial Sequence
  ENSG00000167881_28 (sequence is synthesized)
ttttctttcctatagaaatgttgatgattctctttcaaccttagaacatgccagttatggtagttggtaggagagcttcaaaaggccataatttgtttttagtcactgtgttccccatga

SEQ ID NO: 546248 - DNA, 120 bp, Artificial Sequence
  ENSG00000167881_29 (sequence is synthesized)
gtttttcttatataaggctgatgtaaaacctggcttttcttttctcgcagaactatctatgagaagctagccagtgctttcacagaggagcaggctgtgctgtataaccaacgtgtggaa

SEQ ID NO: 546249 - DNA, 120 bp, Artificial Sequence
  ENSG00000167881_30 (sequence is synthesized)
atcatcttgggacgcggggcaaaccagtgtggacctgatttcatgtgctgaattgttttgtgggggaagtgtcagaatggaggcatgaaggattctgtggcatccagaccttctcaggtc

SEQ ID NO: 546250 - DNA, 120 bp, Artificial Sequence
  ENSG00000167881_31 (sequence is synthesized)
attcccaatatgccaagcaagagaccgaggccaggaaaattcatcaccctcgttgaagcagtgggatgtaacgactaagggcttatgcccttgagccagatggcccagccctttacccca

SEQ ID NO: 546251 - DNA, 120 bp, Artificial Sequence
  ENSG00000167881_32 (sequence is synthesized)
gcccgctgccacttgggcgcatggctggcacattgcttaacctctccatgcttccattttctcatctgtaaaatgggagtgcaaactgcctcaggattattgagaaggttaagctagtga

SEQ ID NO: 546252 - DNA, 120 bp, Artificial Sequence
  ENSG00000167881_33 (sequence is synthesized)
ttatgtaacctgcttagaacaatgcctggcacactgtttagtgtatgataaatttattaatattaacatcatctttatttccaggcattattacttaagccgtggcatagcttttcccat

SEQ ID NO: 546253 - DNA, 120 bp, Artificial Sequence
  ENSG00000167881_34 (sequence is synthesized)
ttgaaacaggctagtgttttgctttgttttgttttgttctaatagtgagaaccgtttagaaagtctaaagtcctgtgaaaataccagtggggtcggttaactcgggttagcttggtgtgc

SEQ ID NO: 546254 - DNA, 120 bp, Artificial Sequence
  ENSG00000167881_35 (sequence is synthesized)
ttctctgacctggccctggctcgggagtacacgttttctgaatcttacaggacctgcctgatgtgcaagagctcatcactcaagtgcggtcagagaagtgctccctgcaggccgcagcca

SEQ ID NO: 546255 - DNA, 120 bp, Artificial Sequence
  ENSG00000167881_36 (sequence is synthesized)
tccttggtgagccccctgcctggcctttgtatccccagacttcccttcctgccactccccttctctgtcacaccccatactactgttttaaggttgaaagggttgtcttggttcatctgt

SEQ ID NO: 546256 - DNA, 120 bp, Artificial Sequence
  ENSG00000167881_37 (sequence is synthesized)
aagatgttcctggcctttacttgtgccagctgggcatcagattgtgtagaagcatttcgagtgcactgttacactggcccttctccctgttactgtcctcatgcaactgtgctggcttca

SEQ ID NO: 546257 - DNA, 120 bp, Artificial Sequence
  ENSG00000167881_38 (sequence is synthesized)
ctgggccgacggcattggatctgggattgatctgtttatctccaccacttctcagcaggagacaggcctggcttccccacatgctggctccttttgcttttgggatgtaggggccacctg

SEQ ID NO: 546258 - DNA, 120 bp, Artificial Sequence
  ENSG00000167881_39 (sequence is synthesized)
tcttcccccaccagaggggtgcatttgttacaattgatggccctttatagacacaccatcatctcccaaagtccatagtttacatcagggttcacgcttgatgttgtacattctatgggt

SEQ ID NO: 546259 - DNA, 120 bp, Artificial Sequence
  ENSG00000167881_40 (sequence is synthesized)
ttggacaaatgtttcatgatgtgtatttaccattatataccatatggagtattttcattgccccagtcaatttcattctttataaaagacttgtcttcagagaacagattgtgctgcaga

SEQ ID NO: 546260 - DNA, 120 bp, Artificial Sequence
  ENSG00000167881_41 (sequence is synthesized)
gtttcatacccagactccctgggttttatgcgccctacttagagaccactggcctctcagttcagacttgagctggtgtacaagccttccttagtctgttcccagccttgtacttcactg

SEQ ID NO: 546261 - DNA, 120 bp, Artificial Sequence
  ENSG00000167881_42 (sequence is synthesized)
catccttctgagtcctctgcctcaagctgttccacttactggcatctcagtaatgcctttcccaccccgtgtgttacactgttctcattcccctccctccgcacacttgggtaatctttc

SEQ ID NO: 546262 - DNA, 120 bp, Artificial Sequence
  ENSG00000167881_43 (sequence is synthesized)
ctgcccctcttcacctgtccaaaccccatctgtttttcaaggtccagctcatagcttaccatttctgaaaagcatatgcctgcaccatcctagcccacagagatctctgcagtttctaaa

SEQ ID NO: 546263 - DNA, 120 bp, Artificial Sequence
  ENSG00000167881_44 (sequence is synthesized)
tatctgatacttgcagctataagctttgatagttaattaagtattacctcttcataaaaactttattgtggtaaaaaacgttaaacataaaaccttaaccatttttaagtgtatggttca

SEQ ID NO: 546264 - DNA, 120 bp, Artificial Sequence
  ENSG00000167881_45 (sequence is synthesized)
gtggtaattaaatgcattcataacgtacaaccatcaccaacagtccatctccagaactctctgcattttgtaaaactgaaacgctgaacccattaaacaacaataacttcgttgcctagc

SEQ ID NO: 546265 - DNA, 120 bp, Artificial Sequence
  ENSG00000167881_46 (sequence is synthesized)
aactatttttttttcagcatctgccacaaagccttgagtataaactttgttttgaatcactgctttctctaaggagtcacctgcttccttgccccgttaggctgcctttatgtattgtgc

SEQ ID NO: 546266 - DNA, 120 bp, Artificial Sequence
  ENSG00000167881_47 (sequence is synthesized)
ttcccttcatcgacttaacagaggtgcctacagagtcccagcccctgtcactgtcattcaccttgaatgcatagcagttgggagacacctcacagaatgtaaggaatgtgatgccgcaaa

SEQ ID NO: 546267 - DNA, 120 bp, Artificial Sequence
  ENSG00000167881_48 (sequence is synthesized)
ggcgcattcatttcctgttgctgcgatcatattaaccacaaacttgatggtttaagatgatccaaatgtattatcttacgcttctcgaggtcagaaatctagtgggttcacagggctgtg

SEQ ID NO: 546268 - DNA, 120 bp, Artificial Sequence
  ENSG00000167881_49 (sequence is synthesized)
ttcctttagaaaccctaggggaatccttttccagtattcccaagaatgcatctcctggcttctagcggctgcctgtagtccttggcttgtggctctccgtttgtgcttcaaagcgatcag

SEQ ID NO: 546269 - DNA, 120 bp, Artificial Sequence
  ENSG00000167881_50 (sequence is synthesized)
ctcctctcccctctgcttccgttccttcatcttctgcatctctgacccatctgcctccctcttctcaggaccctgggatgacattggacccacccagataattcagagatccctaattta

SEQ ID NO: 546270 - DNA, 120 bp, Artificial Sequence
  ENSG00000167881_51 (sequence is synthesized)
gagtctcttttaccatatatggtaacatcttcccagattgcacggaggctagcatatagacagctctggcgtatgttattcggccagccacaaaaggcacactctgacagcacaaggggt

SEQ ID NO: 546271 - DNA, 120 bp, Artificial Sequence
  ENSG00000167881_52 (sequence is synthesized)
ggaactgggatctgtggcacagaccttcacacagagccgtggactgtggaatgtctgattttaatgctttggggttaggcacggggaggagtggacaggaagtctcatctggccgttact

SEQ ID NO: 546272 - DNA, 120 bp, Artificial Sequence
  ENSG00000167881_53 (sequence is synthesized)
ctcagttctcttatttgaggtcaatttttagatgccagtggcaacttgagtgccactgtcattctagattatgtcaagtatagatctttgatatttgaggactcctgtcttactagagtt

SEQ ID NO: 546273 - DNA, 120 bp, Artificial Sequence
  ENSG00000167881_54 (sequence is synthesized)
tgtgtctatgttcagggcactttggagaccccaccattccatgaggtggtcagagcgatggagagcatcagttgctttactttttacctttttcactttctgcagaaacagagagattat

SEQ ID NO: 546274 - DNA, 120 bp, Artificial Sequence
  ENSG00000167881_55 (sequence is synthesized)
gaggaagacaaagccttccagaaagagataggcctcaagactctggtgttcaaagcttacaggtaacgtcccatgggatgggcagttttcctccgcctcccaggttctataagcattggg

SEQ ID NO: 546275 - DNA, 120 bp, Artificial Sequence
  ENSG00000167881_56 (sequence is synthesized)
agcatgacccagcccacagcagatgggaccgttggccttgagtgtatggttaccttgcctgtgatcagaggaaggtcagcccagcatgttcaaggggagtttctaaaggctgtggtcagt

SEQ ID NO: 546276 - DNA, 120 bp, Artificial Sequence
  ENSG00000167881_57 (sequence is synthesized)
agtggccagtgatgatgtctgccttttggccaggtcggaggagtggagcacacacgttaaacttggcttcctcgctgggcgcggtggctcacacttgtcatcccagaactttgggaggct

SEQ ID NO: 546277 - DNA, 120 bp, Artificial Sequence
  ENSG00000167881_58 (sequence is synthesized)
tgtgtgagagcaatcgcgtggatgccaagaccaaattagaggctcagttagaagccaataaaggaagattgagtgggagcactggtttgctgttgaagcagttcctcctcttccatctcc

SEQ ID NO: 546278 - DNA, 80 bp, Artificial Sequence
  ENSG00000167889_0 (sequence is synthesized)
ccagcgggcgagagagcgcgcggcgggcgcgggttgccctcgtcgagagccatgggcgcggcgcggcgcggggctgagga

SEQ ID NO: 546279 - DNA, 80 bp, Artificial Sequence
  ENSG00000167889_1 (sequence is synthesized)
gatgagggcgcccgccgcggggagcccgtctgcgcgccgcggcaccttcccgcccagcgagcgagcccgagcaggcagac

SEQ ID NO: 546280 - DNA, 120 bp, Artificial Sequence
  ENSG00000167889_2 (sequence is synthesized)
ggcaccttcccgcccagcgagcgagcccgagcaggcagacgcgcggccggcggtctgggggcgcgccgcctcccggtccccaaaatgtgaagcggggagggcggagacgcagagacggcc

SEQ ID NO: 546281 - DNA, 120 bp, Artificial Sequence
  ENSG00000167889_3 (sequence is synthesized)
cgctccctccgctgcacgcccaggcctgagcagcgaggccaccgggccgcgcgctcccagcttcgctcggacgcggcttcggcccgcagagggttcgtggcccggacgcggcgagagctg

SEQ ID NO: 546282 - DNA, 120 bp, Artificial Sequence
  ENSG00000167889_4 (sequence is synthesized)
cgcagagggttcgtggcccggacgcggcgagagctgggcccaggacggtgcgtccggcctcgcccgcggctgctcgcaccaacaagtttgaacaatgatcaccgtcaaccccgatgggaa

SEQ ID NO: 546283 - DNA, 120 bp, Artificial Sequence
  ENSG00000167889_5 (sequence is synthesized)
gataatggtcagaagatgcctggtcaccctgagaccctttcggctttttgtcctgggcatcggcttcttcactctctgcttcctgatgacgtctctgggaggccagttctcggcccggcg

SEQ ID NO: 546284 - DNA, 120 bp, Artificial Sequence
  ENSG00000167889_6 (sequence is synthesized)
cctgggggactcgccattcaccatccgcacagaagtgatggggggccccgagtcccgcggcgtcctgcgcaagatgagcgacctgctggagctgatggtgaagcgcatggacgcactggc

SEQ ID NO: 546285 - DNA, 120 bp, Artificial Sequence
  ENSG00000167889_7 (sequence is synthesized)
caggctggagaacagcagtgagctgcaccgggccggcggcgacctgcactttcccgcagacaggatgccccctggggccggcctcatggagcggatccaggctattgcccagaacgtctc

SEQ ID NO: 546286 - DNA, 120 bp, Artificial Sequence
  ENSG00000167889_8 (sequence is synthesized)
cgacatcgctgtgaaggtggaccagatcctgcgccacagtctgctcctgcacagcaaggtgtcagaaggccggcgggaccagtgtgaggcacccagtgaccccaagttccctgactgctc

SEQ ID NO: 546287 - DNA, 120 bp, Artificial Sequence
  ENSG00000167889_9 (sequence is synthesized)
agggaaggtggagtggatgcgtgcccgctggacctctgacccctgctacgccttctttggggtggacggcaccgagtgctccttcctcatctacctcagtgaggtcgagtggttctgccc

SEQ ID NO: 546288 - DNA, 120 bp, Artificial Sequence
  ENSG00000167889_10 (sequence is synthesized)
cccgctgccctggaggaaccagacggctgcccagagggcacccaagcccctccccaaagtccaggcagttttccgaagcaacctgtcccaccttctggacctgatgggcagcgggaagga

SEQ ID NO: 546289 - DNA, 120 bp, Artificial Sequence
  ENSG00000167889_11 (sequence is synthesized)
gtccctgatcttcatgaagaagcggaccaagaggctcacagcccagtgggcgctggctgcccagcgcctggcacagaagctgggggccacccagagggaccagaagcagatcctggtcca

SEQ ID NO: 546290 - DNA, 120 bp, Artificial Sequence
  ENSG00000167889_12 (sequence is synthesized)
catcggcttcctgacggaggagtccggggacgtgttcagccctcgggtcctgaagggcgggcccctaggggagatggtgcagtgggcggacattctgactgcactctatgtcctgggcca

SEQ ID NO: 546291 - DNA, 120 bp, Artificial Sequence
  ENSG00000167889_13 (sequence is synthesized)
tggcctgcgggtcacagtctccctgaaggagctgcagagtaacttaggggtaccgccaggccggggaagctgcccgctcaccatgcccctgcccttcgacctcatctacaccgactacca

SEQ ID NO: 546292 - DNA, 120 bp, Artificial Sequence
  ENSG00000167889_14 (sequence is synthesized)
cggcctgcagcagatgaagcggcacatgggactctccttcaagaagtaccggtgccgaatcagggtcatcgacaccttcgggacggaacctgcgtacaaccacgaggagtacgccacgct

SEQ ID NO: 546293 - DNA, 120 bp, Artificial Sequence
  ENSG00000167889_15 (sequence is synthesized)
gcacggctaccggaccaactggggctactggaacctcaaccccaagcagttcatgaccatgtttcctcatacccccgacaactccttcatgggcttcgtgtccgaggagctcaacgagac

SEQ ID NO: 546294 - DNA, 120 bp, Artificial Sequence
  ENSG00000167889_16 (sequence is synthesized)
ggagaagcggctcatcaaaggcggcaaggccagcaacatggccgtggtgtacggcaaggaggcgagcatctggaaggggaaggagaagttcctgggcatcctgaacaaatacatggagat

SEQ ID NO: 546295 - DNA, 120 bp, Artificial Sequence
  ENSG00000167889_17 (sequence is synthesized)
ccatggcaccgtgtactacgagagccagcggccccccgaggtgccagcctttgtgaagaaccacggcctcttaccgcagcctgagtttcagcagctgctgcgcaaggccaaactcttcat

SEQ ID NO: 546296 - DNA, 120 bp, Artificial Sequence
  ENSG00000167889_18 (sequence is synthesized)
gccaatggttgcatcttcctgcagtcccgcttcagcccgccccacagctccctcaaccacgagttcttccgaggcaagcccacctccagagaggtgttctcccagcatccctacgcggag

SEQ ID NO: 546297 - DNA, 120 bp, Artificial Sequence
  ENSG00000167889_19 (sequence is synthesized)
aacttcatcggcaagccccacgtgtggacagtcgactacaacaactcagaggagtttgaagcagccatcaaggccattatgagaactcaggtagacccctacctaccctacgagtacacc

SEQ ID NO: 546298 - DNA, 120 bp, Artificial Sequence
  ENSG00000167889_20 (sequence is synthesized)
tgcgaggggatgctggagcggatccacgcctacatccagcaccaggacttctgcagagctccagaccctgccctaccagaggcccacgccccgcagagcccctttgtcctggcccccaat

SEQ ID NO: 546299 - DNA, 120 bp, Artificial Sequence
  ENSG00000167889_21 (sequence is synthesized)
gccacccacctcgagtgggctcggaacaccagcttggctcctggggcctggccccccgcgcacgccctgcgggcctggctggccgtgcctgggagggcctgcaccgacacctgcctggac

SEQ ID NO: 546300 - DNA, 120 bp, Artificial Sequence
  ENSG00000167889_22 (sequence is synthesized)
cacgggctaatctgtgagccctccttcttccccttcctgaacagccaggacgccttcctcaagctgcaggtgccctgtgacagcaccgagtcggagatgaaccacctgtacccggcgttc

SEQ ID NO: 546301 - DNA, 120 bp, Artificial Sequence
  ENSG00000167889_23 (sequence is synthesized)
gcccagcctggccaggagtgctacctgcagaaggagcctctgctcttcagctgcgccggctccaacaccaagtaccgccggctctgcccctgccgcgacttccgcaagggccaggtggcc

SEQ ID NO: 546302 - DNA, 120 bp, Artificial Sequence
  ENSG00000167889_24 (sequence is synthesized)
ttgtgccagggctgtctgtgaatccgcctctgccgccctgcctggcacccacgctggctctctcctgccgcgggagaaagcaccagcaggttctgagccctggctgcttgtcctcctcgc

SEQ ID NO: 546303 - DNA, 120 bp, Artificial Sequence
  ENSG00000167889_25 (sequence is synthesized)
aacccccccaggccggagcttccttccttagccgggaagctggcagaggagagccgtgcccgggaataggaggaggcagcatgccgagcccctgggacctcccaggcaggctccggttct

SEQ ID NO: 546304 - DNA, 120 bp, Artificial Sequence
  ENSG00000167889_26 (sequence is synthesized)
ctcctggggactcacagaagcatcgtggccaagcaggtgtcggactgctcagagtccgcatggcccaggagcaggtggtcggaggcccctggctttgtgcaaggccggatctgggccagg

SEQ ID NO: 546305 - DNA, 120 bp, Artificial Sequence
  ENSG00000167889_27 (sequence is synthesized)
tggcgaaaggggcccagtcgttcttgggcccaggatggggcctctagacttgcaagggagaggaacagggaccaggctgccccacggtccctgaagggtccaaggaggggccctccccat

SEQ ID NO: 546306 - DNA, 120 bp, Artificial Sequence
  ENSG00000167889_28 (sequence is synthesized)
ggccctggagagtgggcctgggtggtacctgctccaggcagggaaactgggggctcgcccttctcctgtgaggggagccaggcacacagggcccattggtgtttgggatgtggacagagg

SEQ ID NO: 546307 - DNA, 120 bp, Artificial Sequence
  ENSG00000167889_29 (sequence is synthesized)
ggcagggggctgggagaaggctaagccgaggggtcctgtttgtgcctccccttagtcccttccctcccgatttcccgattcccccaccctccctctacacttgaggaccacagttggggg

SEQ ID NO: 546308 - DNA, 120 bp, Artificial Sequence
  ENSG00000167889_30 (sequence is synthesized)
tgtagggaccacccagaccctggttgaattgtttctctctcctgcttgttccaacccttttcactctgggcttctcccaaaacccatcctggcatgacctgcaactccaggtggtggatt

SEQ ID NO: 546309 - DNA, 120 bp, Artificial Sequence
  ENSG00000167889_31 (sequence is synthesized)
tgttccaaagcctcaatccctaccccctccaaggggcaggtttccagtccagcctcagagatcaggctctgggacccctgcctggggggtggccttcatgcactagccacttccgcaggt

SEQ ID NO: 546310 - DNA, 120 bp, Artificial Sequence
  ENSG00000167889_32 (sequence is synthesized)
gctgactcccgcactccctggcattttttgcagacaagggcttgggatggaccctcagccccatggtacgccctgcccagtttccagttgccctgtccacttaccctaggtagcccccca

SEQ ID NO: 546311 - DNA, 120 bp, Artificial Sequence
  ENSG00000167889_33 (sequence is synthesized)
ccccatcagtgccgagtccttgtccctacctccagcttcctccagcctcaaaccgcctctggatctagctgtccttctccgagtggcacgcctgccccaggatgccccctttccctcccc

SEQ ID NO: 546312 - DNA, 120 bp, Artificial Sequence
  ENSG00000167889_34 (sequence is synthesized)
cccatgcccagagccccgcctgcctcagcgggtcaggccttcagaacactgccacccacccagttttataatcccgctccctctccaggcaaccccacccaccagcctaggcctgctcct

SEQ ID NO: 546313 - DNA, 120 bp, Artificial Sequence
  ENSG00000167889_35 (sequence is synthesized)
ccacccttcccgggaggcagccccgggatgctgagagttggtggaggggccaggctggacgcttcctgtgggagtcccctccagacctggctggcccctgcagccacagaaaccacgatg

SEQ ID NO: 546314 - DNA, 120 bp, Artificial Sequence
  ENSG00000167889_36 (sequence is synthesized)
gcaaaaaatctcattggttctcaaggactaacctgtgggggaaagcaatagagacactctttttctctcttttttttaaagatttatttcttgaaataataaatattttattgggatgtg

SEQ ID NO: 546315 - DNA, 120 bp, Artificial Sequence
  ENSG00000167889_37 (sequence is synthesized)
gccagcatcttgtagttgagctctctttatcctatagtgggggggccctcctgggtctggagctcagcccccatcctttcattctcccttgcttccttcactcatgcactcattcgtaaa

SEQ ID NO: 546316 - DNA, 120 bp, Artificial Sequence
  ENSG00000167889_38 (sequence is synthesized)
acatttgtgcagccggtacgtggtggagcgtcagggcacgatggcccttcctgccctcctgacccgcctccttcctctccgcaggctttttgtcctgggcatcggcttcttcactctctg

SEQ ID NO: 546317 - DNA, 120 bp, Artificial Sequence
  ENSG00000167889_39 (sequence is synthesized)
cctgacagccatggaaaaccagggcccggcaccccttctgtgtctctgcacctccctgggtttgcctgtggacatctctgtgtccagagcaaggccattcaaggtgatgccaacactggc

SEQ ID NO: 546318 - DNA, 120 bp, Artificial Sequence
  ENSG00000167889_40 (sequence is synthesized)
ttccgctgcacccctccctgctgtcattcccgcaggccagcagttcccaggcaggatcagcacctgtcactctgtcgagactgattagggcgcacacctgtaattagacctaatgggggt

SEQ ID NO: 546319 - DNA, 120 bp, Artificial Sequence
  ENSG00000167889_41 (sequence is synthesized)
ctagaaggagatgtggccagcaacacattgctcattgaaaagccaagtaagaaggagactgaaaaatgtccaaagaatttggtcacatgaggctgggtggggcggctcactcctgtaatc

SEQ ID NO: 546320 - DNA, 120 bp, Artificial Sequence
  ENSG00000167889_42 (sequence is synthesized)
ccagcactttgggaggtcacggcgggaggattgcttgattccaggagttggagaccagcctgggcaagatagtgagacctggtctttaccaaaaacaaaaaaattagccaagtgcgcctg

SEQ ID NO: 546321 - DNA, 88 bp, Artificial Sequence
  ENSG00000167889_43 (sequence is synthesized)
ggtctttaccaaaaacaaaaaaattagccaagtgcgcctgtggtcccagctactcaggcgactgaggaaacagtcagccgtgatcatg

SEQ ID NO: 546322 - DNA, 120 bp, Artificial Sequence
  ENSG00000167889_44 (sequence is synthesized)
cgggttctgcatgcattctgagctcccgggcgtcctcctctggtggagtggggatgggaacgtggaagggccgtctctgcggaggacggtacatcccacctgactcaggggctcggcata

SEQ ID NO: 546323 - DNA, 120 bp, Artificial Sequence
  ENSG00000167889_45 (sequence is synthesized)
gacttaactgaatgaataagtgaccggatgcctcgtcatcccctgcaggggagaaaccgaggctgtggagttggaataagcaggggcttctggcgggaggagctggtttgtacggatgct

SEQ ID NO: 546324 - DNA, 120 bp, Artificial Sequence
  ENSG00000167889_46 (sequence is synthesized)
aaattggcagctgtggctgctgggacagggggctttgaacccttctccagggaggtggactgagcagatgtggggattctagaggaagccatggggtgtggtcatgtccttccatgtcct

SEQ ID NO: 546325 - DNA, 120 bp, Artificial Sequence
  ENSG00000167889_47 (sequence is synthesized)
cctgtccatacccctggagctgggggcctggggggtccagcaggaggagatgacccagcagctccagccggatgggatgccagatggcagaggggcaccacccctcctctggccaagctg

SEQ ID NO: 546326 - DNA, 120 bp, Artificial Sequence
  ENSG00000167889_48 (sequence is synthesized)
cgtcttccaggtcaccagaggcaaccttgtcccagatgaaaacctgtgtgtaaataacccggcagtaacttaggggtaccgccaggccggggaagctgcccgctcaccatgcccctgccc

SEQ ID NO: 546327 - DNA, 120 bp, Artificial Sequence
  ENSG00000167889_49 (sequence is synthesized)
cccgcagacaggtgaggggacgtggggaggaggcacacggagcaggggagcggtggcacctgccactccatccggggtgctgtccgtcatctccttttgtgaatctggagaagatttgga

SEQ ID NO: 546328 - DNA, 120 bp, Artificial Sequence
  ENSG00000167889_50 (sequence is synthesized)
ccacactgtggtacagcccagagtgcatttctaccacccaaatttaacaaccgttaacatttggtcacatttgtggcctgttttcctctttaaataaaacgtcacagatgaaaactaaaa

SEQ ID NO: 546329 - DNA, 120 bp, Artificial Sequence
  ENSG00000167889_51 (sequence is synthesized)
tcggctccctgggcatggcacaggatgtgagagcccaccagacctccacccccaatgccgagcatggcagggcccccgacggctgggccttctcccgccccatgtgtctgcccatccctc

SEQ ID NO: 546330 - DNA, 120 bp, Artificial Sequence
  ENSG00000167895_0 (sequence is synthesized)
tgcctggcttggcaggagtcgtctgagaaggggactcctccagggacttggtccctaggtccccagatggggagactgaggccgtggctgtgtgtccctctgagagttggagcggggctg

SEQ ID NO: 546331 - DNA, 120 bp, Artificial Sequence
  ENSG00000167895_1 (sequence is synthesized)
ggcccgaattcgaccgcagcaggattctctctcatttctgagccccggaggtggcagagcggcagacccgggcaagtgaaccctagggctgcaggagcccaggccccgacgccggcgcag

SEQ ID NO: 546332 - DNA, 120 bp, Artificial Sequence
  ENSG00000167895_2 (sequence is synthesized)
aggggacggaagggcccgcccccagcccagcgtgcacagaggccatagccaaggccttaaggctcatccaaccggggactcatatcccccccaccggcagcccggcgccccagcctctac

SEQ ID NO: 546333 - DNA, 120 bp, Artificial Sequence
  ENSG00000167895_3 (sequence is synthesized)
ccgtgcccgccgagatgctgctgccgcggtcggtgtcatcggagcgggcccctggggtgccggagccggaggagctgtgggaggcagagatggagcggctgcgcggctctgggacgcccg

SEQ ID NO: 546334 - DNA, 120 bp, Artificial Sequence
  ENSG00000167895_4 (sequence is synthesized)
tgcgcgggctgccctatgccatgatggacaagcgcctcatctggcagctgcgggagcccgcgggggtgcagaccttgcgctggcagcggtggcagcgccggcggcagacggtggaaaggc

SEQ ID NO: 546335 - DNA, 120 bp, Artificial Sequence
  ENSG00000167895_5 (sequence is synthesized)
gcctgcgggaggcagcgcagcggctggcccggggccttgggctctgggagggggcgctctacgagatcgggggcctcttcggcacaggaattcggtcctacttcaccttcctccgcttcc

SEQ ID NO: 546336 - DNA, 120 bp, Artificial Sequence
  ENSG00000167895_6 (sequence is synthesized)
tgctgctactcaacctgctgagcctgctgctcaccgcaagcttcgtgctgctgcccctggtctggctccgcccccctgacccaggccccaccctgaacttgaccctccagtgccctggta

SEQ ID NO: 546337 - DNA, 120 bp, Artificial Sequence
  ENSG00000167895_7 (sequence is synthesized)
gccgccagtccccgcctggcgttttgaggttccacaatcaactttggcatgttttgactggcagggccttcaccaacacctatctcttctacggtgcgtaccgagtggggccggagagca

SEQ ID NO: 546338 - DNA, 120 bp, Artificial Sequence
  ENSG00000167895_8 (sequence is synthesized)
gctccgtgtacagcatccgcctggcctacctcctcagcccgctggcctgcctgctcctctgcttctgtgggactctgcggcggatggtgaaggggctgccgcagaagactctgctgggtc

SEQ ID NO: 546339 - DNA, 120 bp, Artificial Sequence
  ENSG00000167895_9 (sequence is synthesized)
agggctatcaggcgcctctcagcgccaaggtcttctcctcatgggacttctgcatccgggtgcaggaagcagccaccatcaagaagcatgagatcagcaacgagttcaaggtggagctgg

SEQ ID NO: 546340 - DNA, 120 bp, Artificial Sequence
  ENSG00000167895_10 (sequence is synthesized)
aggagggccgtcgcttccagctgatgcagcagcagacccgggcccagacggcctgccgcctgctctcctacctgcgggtcaacgtactcaacgggctcctggtggttggggccatcagcg

SEQ ID NO: 546341 - DNA, 120 bp, Artificial Sequence
  ENSG00000167895_11 (sequence is synthesized)
ccatcttctgggctaccaagtactcacaggacaacaaggaggagtccctgtttctgctgctccagtacctgccccctggggtcatcgccctggtcaacttcctgggtcccctgctgttca

SEQ ID NO: 546342 - DNA, 120 bp, Artificial Sequence
  ENSG00000167895_12 (sequence is synthesized)
catttctggtccagctggagaactaccctcccaacacggaggtcaacctcactctgatctggtgcgtggtgctgaagctggccagcttggggatgttctccgtctccctgggtcagacca

SEQ ID NO: 546343 - DNA, 120 bp, Artificial Sequence
  ENSG00000167895_13 (sequence is synthesized)
tactgtgcattggcagagacaagagcagctgtgagtcctacggctacaacgtttgtgactatcagtgctgggagaactccgtgggggaggagctgtacaagctgagtatcttcaacttcc

SEQ ID NO: 546344 - DNA, 120 bp, Artificial Sequence
  ENSG00000167895_14 (sequence is synthesized)
tcctcaccgtggccttcgccttcctggtcaccctgcctcggaggctgctggtggaccggttctcaggccggttctgggcctggctggaacgggaggagttcctggtccccaagaatgtgc

SEQ ID NO: 546345 - DNA, 120 bp, Artificial Sequence
  ENSG00000167895_15 (sequence is synthesized)
tggacatcgtggcggggcagacggtcacctggatgggcctcttctactgccccctgctgcccctgctgaatagcgtcttcctcttcctcaccttctacatcaagaagtacaccctcctga

SEQ ID NO: 546346 - DNA, 120 bp, Artificial Sequence
  ENSG00000167895_16 (sequence is synthesized)
agaactccagggcatcttcgcggcccttccgtgcctccagctccaccttcttcttccagctagtgctcctcctgggcctgcttctggctgcagtgcccctgggctatgtggtcagcagca

SEQ ID NO: 546347 - DNA, 120 bp, Artificial Sequence
  ENSG00000167895_17 (sequence is synthesized)
tccactcctcctgggactgcggcctcttcaccaactactcagcaccctggcaagtggtcccggagctggtggcccttgggctcccgcccattggccagcgtgccctccactacctgggct

SEQ ID NO: 546348 - DNA, 120 bp, Artificial Sequence
  ENSG00000167895_18 (sequence is synthesized)
caggctccggaagcagctggtgtggcaggttcaggagaagtggcacctggtggaggacctgtcgcgactgctgccggagccaggcccgagcgactctccgggccccaagtaccctgcctc

SEQ ID NO: 546349 - DNA, 120 bp, Artificial Sequence
  ENSG00000167895_19 (sequence is synthesized)
ccaagcttcgcgcccgcagtccttctgccccggatgcccatgccctggctccccgggccaccaggccccgcggccgggcccctccgtcgtggatgccgcgggactgcgttccccttgccc

SEQ ID NO: 546350 - DNA, 120 bp, Artificial Sequence
  ENSG00000167895_20 (sequence is synthesized)
tggacagcacggtgccccggcctccgcccgcagattccgcttccccagcggcgcggagctgtaacccctacccctgcctccccgaagcctccctggggccccttcaggcctccttactcc

SEQ ID NO: 546351 - DNA, 120 bp, Artificial Sequence
  ENSG00000167895_21 (sequence is synthesized)
atcttccagacccctggcgaccaccgcccctctcagtggctccagggcctccctcagaggtccccaaagatggacacacaaccccagcggcagcaggaaaaacatatgggaattttcttt

SEQ ID NO: 546352 - DNA, 120 bp, Artificial Sequence
  ENSG00000167895_22 (sequence is synthesized)
ctatattttaatctcatccctttaaaatgtctattttttattgtgttttttataatatacataatctattagtatagtatctcttgaatgcgattttttctagaatgtgttctgctgatt

SEQ ID NO: 546353 - DNA, 120 bp, Artificial Sequence
  ENSG00000167895_23 (sequence is synthesized)
tgttttagagccatgagtgcaatttatacacatacatctattgggaatgctcagaagttgtttactgatggaagtgccttcagaagagtccgggaaccacttcctaaggaaggaaagagc

SEQ ID NO: 546354 - DNA, 120 bp, Artificial Sequence
  ENSG00000167895_24 (sequence is synthesized)
tggccacagttagagcaagcctgcctggggccctgctctgtgttccagctgcaaactgcctgcatcatcccttcctgttactcttccttcacctgagacagtcgaggccacagcgtcagc

SEQ ID NO: 546355 - DNA, 120 bp, Artificial Sequence
  ENSG00000167895_25 (sequence is synthesized)
cagggccagagctgggatttgaacccaggcactcgggctccagagccacactgccccagtgtggggcttagtggcggctcctggccctgactgaggggctgactgaagcctggtgagagc

SEQ ID NO: 546356 - DNA, 120 bp, Artificial Sequence
  ENSG00000167895_26 (sequence is synthesized)
gtgctgggtcagcctctccctggcgggaatcctctccgtccagtcttctaacctagcagcctcacgtccacagagctgccttgtgaaactcagcagagccctggcttcctgcagagccgt

SEQ ID NO: 546357 - DNA, 120 bp, Artificial Sequence
  ENSG00000167895_27 (sequence is synthesized)
gttctcccagcctgcttcatggctccctggttgagccaagcttgcggatccgtggggtgaaggtacccgcaccgcctgggccttagtggtatgtacgggcctgcatcgtgagcagcgggc

SEQ ID NO: 546358 - DNA, 120 bp, Artificial Sequence
  ENSG00000167895_28 (sequence is synthesized)
gggggcccaggcaggtgaggcagctggccacaagggcagggcccggcccccctcccaaggctgtgtctgatattcttgagcctgttcgagtttccttttccaagcctcctgttctcccac

SEQ ID NO: 546359 - DNA, 120 bp, Artificial Sequence
  ENSG00000167895_29 (sequence is synthesized)
ccccacccctgccatgctgcagtgactaaatctgtggttctcatccttggagaacacctgagtagctgctacaagctggccacagcccagcgactctgatgtggttgggctgggtgtggc

SEQ ID NO: 546360 - DNA, 120 bp, Artificial Sequence
  ENSG00000167895_30 (sequence is synthesized)
cagcagccagggcatcgggacttttcgaagctcccaggtgactcaccggcagctggggatgagaactgtcaggagggaaggtcagaagtcccaggatgcacttgaaaagcctctagctcc

SEQ ID NO: 546361 - DNA, 120 bp, Artificial Sequence
  ENSG00000167895_31 (sequence is synthesized)
accagtgaccagctcctggctggactcctggtctggactcagcatcagggaggctctggcctctcgccctcagggctgggggcttcttcacatggtcatcaaagacttggccagttccgc

SEQ ID NO: 546362 - DNA, 120 bp, Artificial Sequence
  ENSG00000167895_32 (sequence is synthesized)
ctctcccacggccgtccttgtctcacccagcatcacgacgcatcagttcaccaacaaacacgattcagtgctgctagtgctgggtcctgttctgggggctggtgatgaggccaagaggga

SEQ ID NO: 546363 - DNA, 120 bp, Artificial Sequence
  ENSG00000167895_33 (sequence is synthesized)
aagagggagctctgtgttccatcgagggggcgacaagcctggaccagatgaaagtgactcatgttgttaattagcggcttagggccaaaggtggcccctggaccagtggcctcagcatca

SEQ ID NO: 546364 - DNA, 120 bp, Artificial Sequence
  ENSG00000167895_34 (sequence is synthesized)
cctgggaaaaggttagaaatgaacattcccaggccccacctcagcctcctgaatcagagcatccctttggcaaaccatactgagaaacaaccacgtgcatcaccaagcgctgtgaagaag

SEQ ID NO: 546365 - DNA, 120 bp, Artificial Sequence
  ENSG00000167895_35 (sequence is synthesized)
gcaagctttgagaccttgaaggaatcatcaaactctgggcctcggtgtgctcacccagggcgagacaaagacgccatgctcctccaagtggcctccaagattaaatgagcaatgactttt

SEQ ID NO: 546366 - DNA, 120 bp, Artificial Sequence
  ENSG00000167895_36 (sequence is synthesized)
acggctacaacgtttgtgactatcaggtggctggcagcccggcggggcctgtccctcccttccttctccccaaaaagctcacctcaaactgtgcagagccctgttcctgcccctttagtc

SEQ ID NO: 546367 - DNA, 120 bp, Artificial Sequence
  ENSG00000167895_37 (sequence is synthesized)
acatggtgtagtgtggctgccctggctgtggggcttcctgctctaatcccatcctcaaggcctgggtttcaacctaacgattctatcagacaccaggcaaggcacctgcaccacagaaac

SEQ ID NO: 546368 - DNA, 120 bp, Artificial Sequence
  ENSG00000167895_38 (sequence is synthesized)
cctcacaggaggctaagggaaggaagggccggggtggccgtgagtggtgacgggtccccttcccctgcaccccagtgctgggagaactccgtgggggaggagctgtacaagctgagtatc

SEQ ID NO: 546369 - DNA, 120 bp, Artificial Sequence
  ENSG00000167895_39 (sequence is synthesized)
gaactccagggcatcttcgcggcccttccgtgcctccagctccaccttcttcttccagctagtgctcctcctgggcctgcttctggctgcagtgcccctgggctatgtggtcagcagccc

SEQ ID NO: 546370 - DNA, 120 bp, Artificial Sequence
  ENSG00000167895_40 (sequence is synthesized)
cccagatcggaaaaaggagagtggcatcatcccacctgccttcacccgggtcccccgaccaatcggcccctcccccctcccaccccttccgcccgcaggcaccgcaaacctcgggcccac

SEQ ID NO: 546371 - DNA, 120 bp, Artificial Sequence
  ENSG00000167895_41 (sequence is synthesized)
gcagcacccccaggcctcttcggcacaggaattcggtcctacttcaccttcctccgcttcctgctgctactcaacctgctgagcctgctgctcaccgcaagcttcgtgctgctgcccctg

SEQ ID NO: 546372 - DNA, 120 bp, Artificial Sequence
  ENSG00000167895_42 (sequence is synthesized)
ggctccctcaccaccctgcctggcttggcaggagtcgtctgagaaggggactcctccagggacttggtccctaggtccccaggtgagctggatgtccagtggagggagaatgcagaggat

SEQ ID NO: 546373 - DNA, 120 bp, Artificial Sequence
  ENSG00000167895_43 (sequence is synthesized)
aggtcaacctcactctgatctggcggcggaggaaaggaggagctcgcctgcagtcaggatcctgaaaaggccacaggcttctccaccgcagggcttgctgcatgtgcctctccacaccag

SEQ ID NO: 546374 - DNA, 85 bp, Artificial Sequence
  ENSG00000167895_44 (sequence is synthesized)
gtcacaacactgaactcctgcctgggtgacagagtgagactcggtcttgaaacaaaacgaaaacacagaaccctttttcccatga

SEQ ID NO: 546375 - DNA, 120 bp, Artificial Sequence
  ENSG00000167900_0 (sequence is synthesized)
ggcttactgcgggacggccttggagagtactcgggttcgtgaacttcccggaggcgcaatgagctgcattaacctgcccactgtgctgcctggctcccccagcaagacccgggggcagat

SEQ ID NO: 546376 - DNA, 120 bp, Artificial Sequence
  ENSG00000167900_1 (sequence is synthesized)
ccaggtgattctcgggccgatgttctcaggaaaaagcacagagttgatgagacgcgtccgtcgcttccagattgctcagtacaagtgcctggtgatcaagtatgccaaagacactcgcta

SEQ ID NO: 546377 - DNA, 120 bp, Artificial Sequence
  ENSG00000167900_2 (sequence is synthesized)
cagcagcagcttctgcacacatgaccggaacaccatggaggcactgcccgcctgcctgctccgagacgtggcccaggaggccctgggcgtggctgtcataggcatcgacgaggggcagtt

SEQ ID NO: 546378 - DNA, 120 bp, Artificial Sequence
  ENSG00000167900_3 (sequence is synthesized)
tttccctgacatcgtggagttctgcgaggccatggccaacgccgggaagaccgtaattgtggctgcactggatgggaccttccagaggaagccatttggggccatcctgaacctggtgcc

SEQ ID NO: 546379 - DNA, 120 bp, Artificial Sequence
  ENSG00000167900_4 (sequence is synthesized)
gctggccgagagcgtggtgaagctgacggcggtgtgcatggagtgcttccgggaagccgcctataccaagaggctcggcacagagaaggaggtcgaggtgattgggggagcagacaagta

SEQ ID NO: 546380 - DNA, 120 bp, Artificial Sequence
  ENSG00000167900_5 (sequence is synthesized)
caggaagctctttgccccacagcagattctgcaatgcagccctgccaactgagggacctgcgagggccgcccgctcccttcctgccactgccgcctactggacgctgccctgcatgctgc

SEQ ID NO: 546381 - DNA, 120 bp, Artificial Sequence
  ENSG00000167900_6 (sequence is synthesized)
ccagccactccaggaggaagtcgggaggcgtggagggtgaccacaccttggccttctgggaactctcctttgtgtggctgccccacctgccgcatgctccctcctctcctacccactggt

SEQ ID NO: 546382 - DNA, 120 bp, Artificial Sequence
  ENSG00000167900_7 (sequence is synthesized)
ctgcttaaagcttccctctcagctgctgggacgatcgcccaggctggagctggccccgcttggtggcctgggatctggcacactccctctccttggggtgagggacagagccccacgctg

SEQ ID NO: 546383 - DNA, 120 bp, Artificial Sequence
  ENSG00000167900_8 (sequence is synthesized)
ttgacatcagcctgcttcttcccctctgcggctttcactgctgagtttctgttctccctgggaagcctgtgccagcacctttgagccttggcccacactgaggcttaggcctctctgcct

SEQ ID NO: 546384 - DNA, 120 bp, Artificial Sequence
  ENSG00000167900_9 (sequence is synthesized)
gggatgggctcccaccctcccctgaggatggcctggattcacgccctcttgtttccttttgggctcaaagcccttcctacctctggtgatggtttccacaggaacaacagcatctttcac

SEQ ID NO: 546385 - DNA, 120 bp, Artificial Sequence
  ENSG00000167900_10 (sequence is synthesized)
caagatgggtggcaccaaccttgctgggacttggatcccaggggcttatctcttcaagtgtggagagggcagggtccacgcctctgctgtagcttatgaaattaactaattgaaaattca

SEQ ID NO: 546386 - DNA, 120 bp, Artificial Sequence
  ENSG00000167900_11 (sequence is synthesized)
cgggttcgtgaacttcccggaggcgcaatgagctgcattaacctgcccactgtgctgcctggctcccccagcaagacccgggggcagatccaggtgcgggggccagccctgcgcgtggct

SEQ ID NO: 546387 - DNA, 120 bp, Artificial Sequence
  ENSG00000167900_12 (sequence is synthesized)
cctgatttccaggccctcccagtccctgggcgcacgtcccggattcctcccacgagggggcgggctgcggccaaatctcccgccaggtcagcggccgggcgctgattggccccatggcgg

SEQ ID NO: 546388 - DNA, 120 bp, Artificial Sequence
  ENSG00000167900_13 (sequence is synthesized)
ggctcggcacagagaaggaggtagctccacctgccttccctgcaggccggcggggtgggggtatggctctgcctccttcctgtcctggcccttcacccatcccctgtccctgcggccagg

SEQ ID NO: 546389 - DNA, 120 bp, Artificial Sequence
  ENSG00000167904_0 (sequence is synthesized)
ggtgtcacccccatcgcggcccgggctgcagccgccgcttggcttctttcacacgggttgcttcggaggaatccgccgtgcaaatctgtccgcccccttggccactgatcccccgaagag

SEQ ID NO: 546390 - DNA, 120 bp, Artificial Sequence
  ENSG00000167904_1 (sequence is synthesized)
cttctgtcgccgctctaggaatagagacattgaagtttgggacaagatatttatctaacttctgtgtcaaaattagcgacctgctatggcaatgaagaaagaaactgaatttgtcatttt

SEQ ID NO: 546391 - DNA, 120 bp, Artificial Sequence
  ENSG00000167904_2 (sequence is synthesized)
cacctgaagaaaaatgatagacaaaaatcaaacctgtggtgtaggacaggattctgtgccctatatgatttgtctgattcacatactcgaagaatggtttggtgtggagcagttggagga

SEQ ID NO: 546392 - DNA, 120 bp, Artificial Sequence
  ENSG00000167904_3 (sequence is synthesized)
ctatttgaattttgcaaactatctcttgtgggtttttacaccactaatacttttaatacttccttactttactatctttcttctctaccttactattattttcttacacatttataagag

SEQ ID NO: 546393 - DNA, 120 bp, Artificial Sequence
  ENSG00000167904_4 (sequence is synthesized)
aaagaatgtattgaaagaagcctactctcataatttatgggatggtgcaaggaaaacagtggcaactctgtgggatggacatgcagccgtttggcatggttatgaagttcatggaatgga

SEQ ID NO: 546394 - DNA, 120 bp, Artificial Sequence
  ENSG00000167904_5 (sequence is synthesized)
aaaaataccagaagatggaccagcacttataattttttatcatggagctattcctatagatttttactatttcatggctaaaatatttatacacaaaggcagaacttgccgagtagtagc

SEQ ID NO: 546395 - DNA, 120 bp, Artificial Sequence
  ENSG00000167904_6 (sequence is synthesized)
tgatcactttgtctttaaaattccagggtttagtttattactggatgtgttttgtgctctacatggaccaagagaaaaatgtgttgaaattctgaggagtggccacttgttagctatctc

SEQ ID NO: 546396 - DNA, 120 bp, Artificial Sequence
  ENSG00000167904_7 (sequence is synthesized)
accaggtggagttcgagaagccctaattagtgatgaaacttataacatcgtatggggtcatcgcagaggctttgctcaggttgcaattgatgcaaaagtgacgaagaatgctgttcaagc

SEQ ID NO: 546397 - DNA, 120 bp, Artificial Sequence
  ENSG00000167904_8 (sequence is synthesized)
tttgattgataagcaccaaagaataccaggaaacattatgagtgctttgttagaacgttttcattgataacaaagggtcaactagaagatgatttagtacatttatattaaatgtttgta

SEQ ID NO: 546398 - DNA, 120 bp, Artificial Sequence
  ENSG00000167904_9 (sequence is synthesized)
tctaaggtactgtcttctgaattttgtaggtcctataattagtattttttaaaaaaatcatgttaataagcatctttcacagaattcgtttctttaaaatagtcaattttgtttttgcaa

SEQ ID NO: 546399 - DNA, 120 bp, Artificial Sequence
  ENSG00000167904_10 (sequence is synthesized)
tgtgtcaaatactaacaaattacacacctagtaattcagaaaaagatgtcttatttgtaaattcctaacaatttatgctaaacatatagattcttaagtttattaataacagcagtttag

SEQ ID NO: 546400 - DNA, 120 bp, Artificial Sequence
  ENSG00000167904_11 (sequence is synthesized)
gttaaacaaacattcctggataatgcgttaaatttctgtatctgtcgccctgagctgattttgaaagatggtataagctaggggttagtatagttgtttaagttagaaaaaacatgctgt

SEQ ID NO: 546401 - DNA, 120 bp, Artificial Sequence
  ENSG00000167904_12 (sequence is synthesized)
tgtctgcccctcattcccttcatgaccttgggcaagtcacgtaatgtttttgtgcctcaacaattcactttttaaaaacatgatcgtatgatgaatgatattattttgttatttatattt

SEQ ID NO: 546402 - DNA, 120 bp, Artificial Sequence
  ENSG00000167904_13 (sequence is synthesized)
actgtgattgataactgttgaaccaaaataataaaataattaatttaaacaatgtcaaaatcctttagcagttatgtatatattttctccattgtgtgtttaaattatgtcatgtccagt

SEQ ID NO: 546403 - DNA, 120 bp, Artificial Sequence
  ENSG00000167904_14 (sequence is synthesized)
gtcatgtccagttgccaagcacaatgaaaaagatgtattattttttaaattgaataaaaaattaggaaaaataaaatttctaattattatttttagtatgatatttttaacaagagtcta

SEQ ID NO: 546404 - DNA, 120 bp, Artificial Sequence
  ENSG00000167904_15 (sequence is synthesized)
atagggtgtgctgtgcattgtcagccctatactgtggtcttaataatgccagcttaaaaatcactgttgtgctctgcatttcgtgtgttagaagctgattctaggctgaggaaagcaaga

SEQ ID NO: 546405 - DNA, 120 bp, Artificial Sequence
  ENSG00000167904_16 (sequence is synthesized)
gttctctacttttgctcaatattgaggcttacccagtttgactctacagccagtgaagtggtttattgcttcaataaaaatatacttgaatgatgaatttatttatgttttgttttgttt

SEQ ID NO: 546406 - DNA, 120 bp, Artificial Sequence
  ENSG00000167904_17 (sequence is synthesized)
gcctgaatgatgaatttatgtgaacacaaagccctctgaaaaattaatgattttcaatttgttgtcttcttgaaaactgaatttaagtattatttaaacagaaaagtgtcagaaatcaaa

SEQ ID NO: 546407 - DNA, 120 bp, Artificial Sequence
  ENSG00000167904_18 (sequence is synthesized)
tgcagtatctccctctcccttttttaaatgttgaattagtagggtttttgtatagctttttgtattgtgtgtatttatgatatgtgaaatgtacataaaattaaacaatgtgaaaataaa

SEQ ID NO: 546408 - DNA, 120 bp, Artificial Sequence
  ENSG00000167904_19 (sequence is synthesized)
ttggaggaacaaggttatttaggtggctttatgaaaaattccgctatccatttgctccaatgtatggaggttttccagtgaagttacggacctatttaggcgaccccattccgtatgacc

SEQ ID NO: 546409 - DNA, 120 bp, Artificial Sequence
  ENSG00000167904_20 (sequence is synthesized)
gatgcaaaagtgcccattattcctatgtttacacaaaatattcgagaaggatttagatcacttggaggaacaaacgaagaatgctgttcaagctttgattgataagcaccaaagaatacc

SEQ ID NO: 546410 - DNA, 120 bp, Artificial Sequence
  ENSG00000167904_21 (sequence is synthesized)
gccgtttggcatgggtttagtttattactggatgtgttttgtgctctacatggaccaagagaaaaatgtgttgaaattctgaggagtggccacttgttagctatctcaccaggtggagtt

SEQ ID NO: 546411 - DNA, 120 bp, Artificial Sequence
  ENSG00000167904_22 (sequence is synthesized)
agtctcttcgcgggcaggctcggcttcccgccggcctcagtgttgcgccccagcgccagagtggccgggtgtggagatcctccctcctctgggtcaaagagcctgctctccccgcccctc

SEQ ID NO: 546412 - DNA, 120 bp, Artificial Sequence
  ENSG00000167904_23 (sequence is synthesized)
agccgccgcttggcttctttcacacgggttgcttcggaggaatccgccgtgcaaatctgtccgcccccttggccactgatcccccgaagagcttctgtcgccgctctagggtaaaggaga

SEQ ID NO: 546413 - DNA, 120 bp, Artificial Sequence
  ENSG00000167904_24 (sequence is synthesized)
gcatggtaagcaaggatactttcacctttgtgttgccattcatgtgtgctgcattggaactgtgttaccattccattttattgattgagaagatactgaaaaatataatagaagtgatat

SEQ ID NO: 546414 - DNA, 120 bp, Artificial Sequence
  ENSG00000167904_25 (sequence is synthesized)
ttactattccctgttacctgtttgcatgcattgtgcatatgtatgtgtctttcttaaaatgagttttcccatagacgttggtttccattaaacaaagaaccacgcagcactgtagactat

SEQ ID NO: 546415 - DNA, 120 bp, Artificial Sequence
  ENSG00000167904_26 (sequence is synthesized)
ccaccgcacctggccaaattctttaatatatgtgcttttcctttttgtctgtgtggttgagtcttatagttacttttcattgatgttgagtattttagatttaatagactcacaaaaaat

SEQ ID NO: 546416 - DNA, 120 bp, Artificial Sequence
  ENSG00000167904_27 (sequence is synthesized)
ttttagatttaatagactcacaaaaaattttaccaattccacgacagcatcttgccaaaacttgtcatttaaatatacataaatttccctttggagccaggtgcagtggctcacgcctgt

SEQ ID NO: 546417 - DNA, 120 bp, Artificial Sequence
  ENSG00000167904_28 (sequence is synthesized)
ggaggattgcttgaacctgggaggttgagactgcagtgagccgtgatcacgccactgcaatccagcctgagccacagagtgagactctgtccccaactccccccgaaaaattacccttag

SEQ ID NO: 546418 - DNA, 120 bp, Artificial Sequence
  ENSG00000167904_29 (sequence is synthesized)
aatccctgcttgcaacttttctccagtgagcgtactattcagtagcccactaaagacaattcagtttaccacattcattttatttagtgaaattaatgattactgtaatctctattttga

SEQ ID NO: 546419 - DNA, 120 bp, Artificial Sequence
  ENSG00000167904_30 (sequence is synthesized)
gtttcaaggttttatgtgaaatgttaggaaaactggtcaatgaaatattatatattaccactggagggtagtgtttccaatttctatttttacaaatgatcaagttgaatttagttgata

SEQ ID NO: 546420 - DNA, 120 bp, Artificial Sequence
  ENSG00000167904_31 (sequence is synthesized)
gactaatcgtgtgcttttattttaaaaatattttattttcataatatcaaacaggccctcaaaagtttgcataatcactttgtgatcccctcacgcccccatgctaatgaatttgtaccc

SEQ ID NO: 546421 - DNA, 120 bp, Artificial Sequence
  ENSG00000167904_32 (sequence is synthesized)
cttttctctttctcccatgccaatactaacgagacccgaccctgcttagcttctgggatcagacgagattgggcatgttcagggtggcatggccataggtgccttttctctttcttaaaa

SEQ ID NO: 546422 - DNA, 120 bp, Artificial Sequence
  ENSG00000167904_33 (sequence is synthesized)
aaaaaaagtttgcattagttactctaatggagacattgaatggattaatttatttactttttaattcaaattctccttttctttagcccattattcctatgtttacacaaaatattcgag

SEQ ID NO: 546423 - DNA, 120 bp, Artificial Sequence
  ENSG00000167904_34 (sequence is synthesized)
aaaattccagggttaatggaagattagatttctgattgctgatgggatatcatttctgaatcccattagaatcctatctctggaatctctgccctgccacttcttagatgtgtgactttg

SEQ ID NO: 546424 - DNA, 120 bp, Artificial Sequence
  ENSG00000167904_35 (sequence is synthesized)
atgaaagcttgcgtgccagtgtagaaaccatattcccagactatagtgaggaatactgagcctgctagggtaagctttcttttatttagtgggccctagaaatgtccagcttctagagag

SEQ ID NO: 546425 - DNA, 120 bp, Artificial Sequence
  ENSG00000167904_36 (sequence is synthesized)
gtagctatttaaggaatgatatttcaacaggaaagtctttaaatgcatacatcaatacagaattctgggatcatgccagtcagtagatataaatccagccatactggttggaagtggcaa

SEQ ID NO: 546426 - DNA, 120 bp, Artificial Sequence
  ENSG00000167904_37 (sequence is synthesized)
atggtatatgcatgagctgaaatatttctgtttcttcttggacattttaggttctcaactataaagacattttataactatttaaaacattaggatttcagccatactaatattttattt

SEQ ID NO: 546427 - DNA, 120 bp, Artificial Sequence
  ENSG00000167904_38 (sequence is synthesized)
tacaaaactagttttattttacaaaactagtagtgatttccagataacagtctgaattttttactgaagaattcagtgtctgagtattgtggaagctaccaaaataataataataataat

SEQ ID NO: 546428 - DNA, 83 bp, Artificial Sequence
  ENSG00000167904_39 (sequence is synthesized)
ccagttcaagactagcctgagcaacaaagcaagaacccatctctacaaaaacaagcaaataaactatatttacttatatgtat

SEQ ID NO: 546429 - DNA, 120 bp, Artificial Sequence
  ENSG00000167904_40 (sequence is synthesized)
tacaaaaacaagcaaataaactatatttacttatatgtataaataattcagtgtattttgtcttctttatcttcttgtgttttagctttatgagttaactccatcaaattttaatttctt

SEQ ID NO: 546430 - DNA, 82 bp, Artificial Sequence
  ENSG00000167904_41 (sequence is synthesized)
ctgcgcttcttttctttacctaacttctccccttttcctaactgattttgagattgctgctgtctatttctgacttttgtat

SEQ ID NO: 546431 - DNA, 120 bp, Artificial Sequence
  ENSG00000167904_42 (sequence is synthesized)
tgattttgagattgctgctgtctatttctgacttttgtattcagagaatacaaattaattcatttagaagcattgtctctttgctctgtttactcactgtttgtttaattcctccatctc

SEQ ID NO: 546432 - DNA, 120 bp, Artificial Sequence
  ENSG00000167904_43 (sequence is synthesized)
actttctgttagcacctagtggattccaggcacagttctaggtgctatacaacagtgaacaaaacaatgtccttgcagtatattaggcgtcttccttctggcgagaggagagatataaca

SEQ ID NO: 546433 - DNA, 120 bp, Artificial Sequence
  ENSG00000167904_44 (sequence is synthesized)
aatgattggttagttatatgtgaagtagtaggttttatgaaggctttgcctgtagtctctttcctttagtccactgtattttactgttttccaaagcttagtaggaataacttttaagct

SEQ ID NO: 546434 - DNA, 120 bp, Artificial Sequence
  ENSG00000167904_45 (sequence is synthesized)
tatttaaatatctcacctattaagcaggtaattttatattaggcatttactcatggttgactgtaagtaatgtaatactcccccaaccaaaattttatctattctgaaacatcatttaat

SEQ ID NO: 546435 - DNA, 120 bp, Artificial Sequence
  ENSG00000167904_46 (sequence is synthesized)
attctgaaacatcatttaattcagtatattatgtatatttttaagtgtttcattcaattttttatctattttagtattcacagtggcataacctctttacatatcaatacttcattattt

SEQ ID NO: 546436 - DNA, 120 bp, Artificial Sequence
  ENSG00000167904_47 (sequence is synthesized)
aggttttcattattaaaaatatactgaatcattgatatttttggagaataaaaatcatgaacttattagcagaaattctctacaatcaattatggagaattctttttttttttttttttt

SEQ ID NO: 546437 - DNA, 83 bp, Artificial Sequence
  ENSG00000167904_48 (sequence is synthesized)
tcttaaacaatcctcccacctcagcctcccaggtaactgagactacaggcacgtaccaccgcaactggccaaattctttaata

SEQ ID NO: 546438 - DNA, 120 bp, Artificial Sequence
  ENSG00000167904_49 (sequence is synthesized)
gctaataaaagccccttggaaaaactagcttcataccttgcctatgcattccctgtacaggattcttgacctgtgtatcaagattaagacaaaaaggttgcccccttcagcatgtcgagt

SEQ ID NO: 546439 - DNA, 120 bp, Artificial Sequence
  ENSG00000167904_50 (sequence is synthesized)
agggtggctaccctctggggctgcagctttctcactttggaagacttatgagttttttcctgtgccctgtacagtgaagaacaaagaaactagtgacagtttgatgagaaacagatatac

SEQ ID NO: 546440 - DNA, 120 bp, Artificial Sequence
  ENSG00000167904_51 (sequence is synthesized)
acatagcttcaaagaatctctccataaagtacttattcattataaaaggaaaaaaataatttcatagggaagaaacctggtggatgacatcttaatcaagtgatcaaagttaccaccacg

SEQ ID NO: 546441 - DNA, 120 bp, Artificial Sequence
  ENSG00000167904_52 (sequence is synthesized)
actaatgacacaaaccaacattatatgcctcctgatgtgatgtgacatgctagaaagaaaacaacatcatttatacggtatttctgccagagaaacataatctgcattttcatgttaaag

SEQ ID NO: 546442 - DNA, 120 bp, Artificial Sequence
  ENSG00000167904_53 (sequence is synthesized)
aactgctttaaaaatgcttcaattatttagcatttacttctgttcaaaataagtttgactctaccagtgtggatttaaaaaaatgaaatattaaataatattacattaaatataatttgc

SEQ ID NO: 546443 - DNA, 120 bp, Artificial Sequence
  ENSG00000167904_54 (sequence is synthesized)
ataccaaaatttatgcattttctgttgattcattcctgaggttggtgtgtctttctgaataaataagatagcaatagatttctctccaggatagtcattcttttctttattactcgagaa

SEQ ID NO: 546444 - DNA, 120 bp, Artificial Sequence
  ENSG00000167904_55 (sequence is synthesized)
attttgatgttgtatacttaatgattggtggttcttctttgtttggccatcatgaaaattgccttctggtggcctatttttaagtggttagtgtttcactctaccaacttttacttcatt

SEQ ID NO: 546445 - DNA, 120 bp, Artificial Sequence
  ENSG00000167904_56 (sequence is synthesized)
attccaacaatatctagtttgttggtctcttttgtttttagactacacaaaaatactgaagattcaataggcaggtaacaaacattggctttctgtattatgttgttgagcatcacagtg

SEQ ID NO: 546446 - DNA, 120 bp, Artificial Sequence
  ENSG00000167904_57 (sequence is synthesized)
gtttcatagaaggacatggaaggaagcacagactttaaaagacacttgaggatatatatcactgaactattaggctgctattagcagaaatcaccagtgacatgcttattagactaatgt

SEQ ID NO: 546447 - DNA, 120 bp, Artificial Sequence
  ENSG00000167904_58 (sequence is synthesized)
attttcattttaatactacatacatacttaacgaacctacaaattttttttgagcacctacctatgccagacactgtcaattgcttaatataaattaactgctttaaatctcattaacat

SEQ ID NO: 546448 - DNA, 120 bp, Artificial Sequence
  ENSG00000167904_59 (sequence is synthesized)
aatggagtctatgtggtaccccgattatactcatgaggaaactgaggcacagagaggttgttatttgcccaaggtatactaggaatagggccaggttacaaccccagatacctgggagta

SEQ ID NO: 546449 - DNA, 120 bp, Artificial Sequence
  ENSG00000167904_60 (sequence is synthesized)
tacatttgagagagctcttggaggtaaaataaacagaacttggggactgagtgtagagtcttgagggaggaggagttaaagtccagtaagatttctactgctagacagggaaacatgaac

SEQ ID NO: 546450 - DNA, 120 bp, Artificial Sequence
  ENSG00000167904_61 (sequence is synthesized)
tggaagtgctccaagtaatagcaaccatgtgagcagaagcacaaaggtggaaaagtactctgggagccacagttagttcatatgatacatgaaataatgtaatgtcactttataggcaat

SEQ ID NO: 546451 - DNA, 120 bp, Artificial Sequence
  ENSG00000167904_62 (sequence is synthesized)
tggggcctcaaggggcttgaaaatgttggactagagtggtaatgcactgatactttctcagcagggagtagtatgatcacatctgctctaagagtgacacagttaaatagccctaggttt

SEQ ID NO: 546452 - DNA, 120 bp, Artificial Sequence
  ENSG00000167904_63 (sequence is synthesized)
taaggtttactggcactatagtaaactattttttttaaatatttgattagttggatttttctgctttcaaccaggtggtttggtattatgtgagtagttcaattgtttattatttaaaaa

SEQ ID NO: 546453 - DNA, 120 bp, Artificial Sequence
  ENSG00000167904_64 (sequence is synthesized)
aatactctgtaaaaccagagagaaccttggtaatattctgtatagaatccttcaaaggagtttctttattgctcagaaaatgtatttgatgggacagttgatcctcaaactcagtgactg

SEQ ID NO: 546454 - DNA, 120 bp, Artificial Sequence
  ENSG00000167904_65 (sequence is synthesized)
ttttgtagagcttaaagtaaattgaattacttgagttagaattatgtaattggaaagaaatgatataatatggaaacatacaaaatcttggaatatcattaaattatttttcaaaacatt

SEQ ID NO: 546455 - DNA, 120 bp, Artificial Sequence
  ENSG00000167904_66 (sequence is synthesized)
cgaagagcttctgtcgccgctctaggaatagagacattgaagtttgggacaagatatttatctaacttctgagttatctcaatatggctgggcatggtggctgatgcctgtaatctcagc

SEQ ID NO: 546456 - DNA, 86 bp, Artificial Sequence
  ENSG00000167904_67 (sequence is synthesized)
gggatgctgaggcaggaggattacctgaacctgggaggcagaggtttcagtgactgagatcgtgccactgtactccagcccgagca

SEQ ID NO: 546457 - DNA, 120 bp, Artificial Sequence
  ENSG00000167904_68 (sequence is synthesized)
tcagtgactgagatcgtgccactgtactccagcccgagcaaaaggtgtcaaaattagcgacctgctatggcaatgaagaaagaaactgaatttgtcattttcacctgaagaaaaatgata

SEQ ID NO: 546458 - DNA, 120 bp, Artificial Sequence
  ENSG00000167910_0 (sequence is synthesized)
agtggcatccttccctttctaatcagagattttcttcctcagagattttggcctagatttgcaaaatgatgaccacatctttgatttgggggattgctatagcagcatgctgttgtctat

SEQ ID NO: 546459 - DNA, 120 bp, Artificial Sequence
  ENSG00000167910_1 (sequence is synthesized)
ggcttattcttggaattaggagaaggcaaacgggtgaaccacctctagagaatggattaattccatacctgggctgtgctctgcaatttggtgccaatcctcttgagttcctcagagcaa

SEQ ID NO: 546460 - DNA, 120 bp, Artificial Sequence
  ENSG00000167910_2 (sequence is synthesized)
atcaaaggaaacatggtcatgtttttacctgcaaactaatgggaaaatatgtccatttcatcacaaatcccttgtcataccataaggtgttgtgccacggaaaatattttgattggaaaa

SEQ ID NO: 546461 - DNA, 120 bp, Artificial Sequence
  ENSG00000167910_3 (sequence is synthesized)
aatttcactttgctacttctgcgaaggcatttgggcacagaagcattgacccgatggatggaaataccactgaaaacataaacgacactttcatcaaaaccctgcagggccatgccttga

SEQ ID NO: 546462 - DNA, 120 bp, Artificial Sequence
  ENSG00000167910_4 (sequence is synthesized)
attccctcacggaaagcatgatggaaaacctccaacgtatcatgagacctccagtctcctctaactcaaagaccgctgcctgggtgacagaagggatgtattctttctgctaccgagtga

SEQ ID NO: 546463 - DNA, 120 bp, Artificial Sequence
  ENSG00000167910_5 (sequence is synthesized)
tgtttgaagctgggtatttaactatctttggcagagatcttacaaggcgggacacacagaaagcacatattctaaacaatcttgacaacttcaagcaattcgacaaagtctttccagccc

SEQ ID NO: 546464 - DNA, 120 bp, Artificial Sequence
  ENSG00000167910_6 (sequence is synthesized)
tggtagcaggcctccccattcacatgttcaggactgcgcacaatgcccgggagaaactggcagagagcttgaggcacgagaacctccaaaagagggaaagcatctcagaactgatcagcc

SEQ ID NO: 546465 - DNA, 120 bp, Artificial Sequence
  ENSG00000167910_7 (sequence is synthesized)
tgcgcatgtttctcaatgacactttgtccacctttgatgatctggagaaggccaagacacacctcgtggtcctctgggcatcgcaagcaaacaccattccagcgactttctggagtttat

SEQ ID NO: 546466 - DNA, 120 bp, Artificial Sequence
  ENSG00000167910_8 (sequence is synthesized)
ttcaaatgattaggaacccagaagcaatgaaagcagctactgaagaagtgaaaagaacattagagaatgctggtcaaaaagtcagcttggaaggcaatcctatttgtttgagtcaagcag

SEQ ID NO: 546467 - DNA, 120 bp, Artificial Sequence
  ENSG00000167910_9 (sequence is synthesized)
aactgaatgacctgccagtattagatagtataatcaaggaatcgctgaggctttccagtgcctccctcaacatccggacagctaaggaggatttcactttgcaccttgaggacggttcct

SEQ ID NO: 546468 - DNA, 120 bp, Artificial Sequence
  ENSG00000167910_10 (sequence is synthesized)
acaacatccgaaaagatgacatcatagctctttacccacagttaatgcacttagatccagaaatctacccagaccctttgacttttaaatatgataggtatcttgatgaaaacgggaaga

SEQ ID NO: 546469 - DNA, 120 bp, Artificial Sequence
  ENSG00000167910_11 (sequence is synthesized)
tgattctgatgctttcttattttgaattggagcttatagagggccaagctaaatgtccacctttggaccagtcccgggcaggcttgggcattttgccgccattgaatgatattgaattta

SEQ ID NO: 546470 - DNA, 120 bp, Artificial Sequence
  ENSG00000167910_12 (sequence is synthesized)
aatataaattcaagcatttgtgaatacatggctggaataagaggacactagatgatattacaggactgcagaacaccctcaccacacagtccctttggacaaatgcatttagtggtggta

SEQ ID NO: 546471 - DNA, 120 bp, Artificial Sequence
  ENSG00000167910_13 (sequence is synthesized)
gaaatgattcaccaggtccaatgttgttcaccagtgcttgcttgtgaatcttaacattttggtgacagtttccagatgctatcacagactctgctagtgaaaagaactagtttctaggag

SEQ ID NO: 546472 - DNA, 120 bp, Artificial Sequence
  ENSG00000167910_14 (sequence is synthesized)
cacaataatttgttttcatttgtataagtccatgaatgttcatatagccagggattgaagtttattattttcaaaggaaaacacctttattttattttttttcaaaatgaagatacacat

SEQ ID NO: 546473 - DNA, 120 bp, Artificial Sequence
  ENSG00000167910_15 (sequence is synthesized)
ctttattttattttttttcaaaatgaagatacacattacagccaggtgtggtagcaggcacctgtagtcttagctactcgagaggccaaagaaggaggatggcttgagcccaggagttca

SEQ ID NO: 546474 - DNA, 120 bp, Artificial Sequence
  ENSG00000167910_16 (sequence is synthesized)
gaagaaaagatatgtattctaattggcagattgttttttcctaaggaaactgctttatttttataaaactgcctgacaattatgaaaaaatgttcaaattcacgttctagtgaaactgca

SEQ ID NO: 546475 - DNA, 120 bp, Artificial Sequence
  ENSG00000167910_17 (sequence is synthesized)
ttatttgttgactagatggtggggttcttcgggtgtgatcatatatcataaaggatatttcaaatgattatgattagttatgtcttttaataaaaaggaaatatttttcaacttcttcta

SEQ ID NO: 546476 - DNA, 120 bp, Artificial Sequence
  ENSG00000167910_18 (sequence is synthesized)
tatccaaaattcagggctttaaacatgattatcttgatttcccaaaaacactaaaggtggttttattttcccttcatgttttaacttattgttgctgaaaactctatgtccggctttaac

SEQ ID NO: 546477 - DNA, 120 bp, Artificial Sequence
  ENSG00000167910_19 (sequence is synthesized)
tatcttctctatatttttatttcattcacattaatgagaagagttttctcagagattaaaaaaggtagtttttctgtcattgttaaatacacattatcactgaaaaaatgtagcttttat

SEQ ID NO: 546478 - DNA, 120 bp, Artificial Sequence
  ENSG00000167910_20 (sequence is synthesized)
gtgatatgttttaaagttaaaactggatggaaatagccatttggaagctttggttatgaaacatgtggagtgtattaagtgcagcttgacattatgttttatttaaatgctttttatcgc

SEQ ID NO: 546479 - DNA, 120 bp, Artificial Sequence
  ENSG00000167910_21 (sequence is synthesized)
taaatgacttgcagatgaaaaaaactaaggtgactcgagtgtttaaatgctgtgtacaacaatgctttgataaaatattttaagtatgagttatcagctctatgtcaattgatatttctg

SEQ ID NO: 546480 - DNA, 120 bp, Artificial Sequence
  ENSG00000167914_0 (sequence is synthesized)
atcctctcaacctacagacccagtgagccctaggccctcaccccagacccagctgctggataggacccagccccgctcccagagacaatgaccatgtttgaaaatgtcacccgggccctg

SEQ ID NO: 546481 - DNA, 120 bp, Artificial Sequence
  ENSG00000167914_1 (sequence is synthesized)
gccagacagctaaaccctcgaggggacctgacaccacttgacagcctcatcgacttcaagcgcttccatcccttctgcctggtgctgaggaagaggaagagcacgctcttctggggggcc

SEQ ID NO: 546482 - DNA, 120 bp, Artificial Sequence
  ENSG00000167914_2 (sequence is synthesized)
cggtacgtccgcaccgactacacgctgctggatgtgcttgagcccggcagctcaccttcagacccaacagacactgggaattttggctttaagaatatgctggacacccgagtggaggga

SEQ ID NO: 546483 - DNA, 120 bp, Artificial Sequence
  ENSG00000167914_3 (sequence is synthesized)
gatgtggatgtaccaaagacggtgaaggtgaagggaacggcagggctctcgcagaacagcactctggaggtccagacactcagtgtggctcccaaggccctggagaccgtgcaggagagg

SEQ ID NO: 546484 - DNA, 120 bp, Artificial Sequence
  ENSG00000167914_4 (sequence is synthesized)
aagctggcagcagaccacccattcctgaaggagatgcaagatcaaggggagaacctgtatgtggtgatggaggtggtggagacggtgcaggaggtcacactggagcgagccggcaaggca

SEQ ID NO: 546485 - DNA, 120 bp, Artificial Sequence
  ENSG00000167914_5 (sequence is synthesized)
gaggcctgcttctccctccccttcttcgccccattggggctacagggatccataaatcacaaggaggctgtaaccatccccaagggctgcgtcctggcctttcgagtgagacagctgatg

SEQ ID NO: 546486 - DNA, 120 bp, Artificial Sequence
  ENSG00000167914_6 (sequence is synthesized)
gtcaaaggcaaagatgagtgggatattccacatatctgcaatgataacatgcaaaccttccctcctggagaaaagtcaggagaggagaaggtcatccttatccaggcatctgatgttggg

SEQ ID NO: 546487 - DNA, 120 bp, Artificial Sequence
  ENSG00000167914_7 (sequence is synthesized)
gacgtacacgaaggcttcaggacactaaaagaagaagttcagagagagacccaacaagtggagaagctgagccgagtagggcaaagctccctgctcagctccctcagcaaacttctaggg

SEQ ID NO: 546488 - DNA, 120 bp, Artificial Sequence
  ENSG00000167914_8 (sequence is synthesized)
gctatcaaaggaggccgtgggcgccatcctctatttcgttggagccctaacagagctaagtgaagcccaacagaagctgctggtgaaatccatggagaaaaagatcctacccgtgcagct

SEQ ID NO: 546489 - DNA, 120 bp, Artificial Sequence
  ENSG00000167914_9 (sequence is synthesized)
aaagctggtggagagcacgatggaacagaacttcctgctggataaagagggtgttttccccctgcaacctgagctgctctcctcccttggggacgaggagctgaccctcacggaggctct

SEQ ID NO: 546490 - DNA, 120 bp, Artificial Sequence
  ENSG00000167914_10 (sequence is synthesized)
agtcgggctgagtggcctggaagtgcagagatcgggcccccaatatatgtgggacccagacaccctccctcgcctctgtgctctttatgcaggcctctctctccttcagcagcttaccaa

SEQ ID NO: 546491 - DNA, 120 bp, Artificial Sequence
  ENSG00000167914_11 (sequence is synthesized)
ggcctcctaatttgccttttacgtctgcttcatgactccctaatgccttcccaacctcgtggtgctgtgtccttaccacctaagggcatttcagagccatcagctgaagacatctgaaat

SEQ ID NO: 546492 - DNA, 120 bp, Artificial Sequence
  ENSG00000167914_12 (sequence is synthesized)
ctcagctggtcacccatgataaccaacttccacctgcccaaccatatatcaccccctacccctccagctccgcaacccactaagcccatctgctgatgcttaaattttctttacttttct

SEQ ID NO: 546493 - DNA, 120 bp, Artificial Sequence
  ENSG00000167914_13 (sequence is synthesized)
ggcgtgagccaccgtgcccggcctgtgcttaaatattctaggagtagaagcactcagacttttaaaactatgagccgtttcagcaaaactgagaaaaaaagaagattaattaatttccta

SEQ ID NO: 546494 - DNA, 120 bp, Artificial Sequence
  ENSG00000167914_14 (sequence is synthesized)
cagcaaaactgagaaaaaaagaagattaattaatttcctatcctaatccctcctacttatacttccccaaaaaacaagctttactggaattaatggaaaatattatgtcaatcttaggaa

SEQ ID NO: 546495 - DNA, 120 bp, Artificial Sequence
  ENSG00000167916_0 (sequence is synthesized)
acactcttcgtcatcacctctcctattcgcctggacaagctcatgtttgcaggagcaccatgtcttgctcgtctcgcgcctcctcctccagggctggaggcagcagctcagccagggtgt

SEQ ID NO: 546496 - DNA, 120 bp, Artificial Sequence
  ENSG00000167916_1 (sequence is synthesized)
ctgctggtggaagcagcttcagcagtggaagcagatgtggtctggggggcagctcggcccagggcttccgaggaggagccagcagctgcagcctgagtggggggtctagcggtgcttttg

SEQ ID NO: 546497 - DNA, 120 bp, Artificial Sequence
  ENSG00000167916_2 (sequence is synthesized)
ggggcagctttggagggggctttggtagctgctcagtagggggtggttttgggggagcttcaggctctgggacaggatttggtgggggttctagctttggcggggtctctggatttggca

SEQ ID NO: 546498 - DNA, 120 bp, Artificial Sequence
  ENSG00000167916_3 (sequence is synthesized)
ggggttctggattctgtgggagttctagattcagcagtggtgctactggaggcttctacagctatggtggtggtatgggaggtggtgttggcgatggggggcttttctctggaggggaaa

SEQ ID NO: 546499 - DNA, 120 bp, Artificial Sequence
  ENSG00000167916_4 (sequence is synthesized)
agcaaaccatgcagaacctcaatgaccgcttggccaattacctagacaaggtcagagccctggaggaggctaacactgatctggagaacaaaatcaaggagtggtatgacaaatatgggc

SEQ ID NO: 546500 - DNA, 120 bp, Artificial Sequence
  ENSG00000167916_5 (sequence is synthesized)
ctgggtctggagacggtggatcgggaagagattatagcaaatactattcaataattgaagatctcagaaaccagatcattgctgccactgttgaaaatgctgggatcattttgcacattg

SEQ ID NO: 546501 - DNA, 120 bp, Artificial Sequence
  ENSG00000167916_6 (sequence is synthesized)
acaatgccagattggctgctgatgacttcagactgaagtatgagaacgagctgtgtctccggcagagcgtggaggctgacatcaatggcctgcggaaagtcctggatgacctgactatga

SEQ ID NO: 546502 - DNA, 120 bp, Artificial Sequence
  ENSG00000167916_7 (sequence is synthesized)
aatatgcaaggaagctctggaggggaggtgaccgtagaaatgaatgctgcgccagggaccgacctgaccaaattactgaatgacatgagggcgcagtacgaggagctggctgagcaaaac

SEQ ID NO: 546503 - DNA, 120 bp, Artificial Sequence
  ENSG00000167916_8 (sequence is synthesized)
cgccgagaggctgaggagcggttcaacaagcagagcgcatcactacaagcacaaatctccactgatgctggggcagccacttctgccaagaatgagataacagaactaaaacgtaccctg

SEQ ID NO: 546504 - DNA, 120 bp, Artificial Sequence
  ENSG00000167916_9 (sequence is synthesized)
caagccctggaaattgagcttcagtcccaactggccatgaaaagctccctggagggaaccctggctgacacagaagctggctacgtggctcagctgtcagaaattcaaacgcagatcagt

SEQ ID NO: 546505 - DNA, 120 bp, Artificial Sequence
  ENSG00000167916_10 (sequence is synthesized)
gccctggaggaggagatctgccagatctggggtgagactaaatgccagaacgcagagtacaagcaattgctggacatcaagacacgcctggaggtggagatcgagacctaccgccgcctg

SEQ ID NO: 546506 - DNA, 120 bp, Artificial Sequence
  ENSG00000167916_11 (sequence is synthesized)
ctcgatggagagggaggtggttctagttttgcagaatttggtggtagaaactcaggatctgtaaacatgggatccagggatctggtatctggtgactcaagatctggaagctgttctggt

SEQ ID NO: 546507 - DNA, 120 bp, Artificial Sequence
  ENSG00000167916_12 (sequence is synthesized)
caaggacgagattcaagcaagactagagtgactaagactatcgtagaggagttggtggatggcaaggttgtctcgtctcaagtcagcagtatttctgaggtgaaagttaaataaggaact

SEQ ID NO: 546508 - DNA, 120 bp, Artificial Sequence
  ENSG00000167916_13 (sequence is synthesized)
tccagatcaacaaaagtgtctttcaaagaaaaaaaaatcaagaaggacacaagcgaagaaatggcatcaatctaggcatctttctggataatttcaggaaaagcttcagtccagaaatgg

SEQ ID NO: 546509 - DNA, 120 bp, Artificial Sequence
  ENSG00000167916_14 (sequence is synthesized)
atgactagccaacttttctgcatcttcttatttcctcattagaatgctcttgaaatagctgaattaacaactttgctttaattgtttctatgcttcaataaatttacttttgcaagttaa

SEQ ID NO: 546510 - DNA, 120 bp, Artificial Sequence
  ENSG00000167920_0 (sequence is synthesized)
gttggaaaacggtgggtagctttccagttgccgttaatttagaaaataagcaaaacgtgttgaaaaaataaaaccctgccagatggagctaacacccattatggagattaaccacttttc

SEQ ID NO: 546511 - DNA, 120 bp, Artificial Sequence
  ENSG00000167920_1 (sequence is synthesized)
atcaggtttttaacttaagtcgtgaggaatacaacggtgaacacaagattcattttattttcatcaccatgggacgtatcctgttgttgagttctctgggtcagacctctgaagacttct

SEQ ID NO: 546512 - DNA, 120 bp, Artificial Sequence
  ENSG00000167920_2 (sequence is synthesized)
tagtctctgggcttgccctgaaattactcgctgctcagggagagagttgaaatggttagtcttgttcaaagtcaactcatctaagacacttcgcaggcccttgctatcagcctcaacaca

SEQ ID NO: 546513 - DNA, 120 bp, Artificial Sequence
  ENSG00000167920_3 (sequence is synthesized)
gtgataaaggacaactttactctggcatctgaacagagcccaattggaagaatcaatacagcttagatggaggtctcctcatccagtggtaataaaacatcccacatagtggagcttaga

SEQ ID NO: 546514 - DNA, 120 bp, Artificial Sequence
  ENSG00000167920_4 (sequence is synthesized)
gagcacagcactgggatgtgaagacatgggttcaaattgcacctctgccatgttcagctgtcaccttgggcaaattacttctctgaaccttagttttctcatcattaaaatgggaatatt

SEQ ID NO: 546515 - DNA, 120 bp, Artificial Sequence
  ENSG00000167920_5 (sequence is synthesized)
actctgttgctccggctgtgtcccctcgctctgttgttccagctatgtgccctctgttgctccaactgcagctcattctgttagagttcctcattcagctggtcactgtggccagagggt

SEQ ID NO: 546516 - DNA, 120 bp, Artificial Sequence
  ENSG00000167920_6 (sequence is synthesized)
ctcccttgagttattttcctttcttcgctatcttgggactcttctttgtgcttgcggtcatcggttgagagaaggacttcttcttccttgtctccttggtgttggctcgtggttgctctt

SEQ ID NO: 546517 - DNA, 120 bp, Artificial Sequence
  ENSG00000167920_7 (sequence is synthesized)
caacaactggactggaggctcttggttttctcttcatcttcaacaagtcagtctctctcaagggtctcacgttgcagcattcttaccagaggccattgggcctggagttccagttccagt

SEQ ID NO: 546518 - DNA, 120 bp, Artificial Sequence
  ENSG00000167920_8 (sequence is synthesized)
gtctggagagtccacctcagctcagcaatctcatgccggttggcaattgtcagcagaagccgatgcctgcccatcagttctttactctgaggtgttagagtggaataaaaatataaatac

SEQ ID NO: 546519 - DNA, 120 bp, Artificial Sequence
  ENSG00000167920_9 (sequence is synthesized)
gtccgccgcctccggaactaaacggggtgaggtcacattcggttatctctaacgttggaaaacgattacttcaccagcttctgaagtggttttcttgactcagcactgtcaattaagatc

SEQ ID NO: 546520 - DNA, 120 bp, Artificial Sequence
  ENSG00000167920_10 (sequence is synthesized)
tgttcactgcggcagggttgatgttcttgaaacagtactgtcatcacttcatcaacatactcggacctcttgtggatggattaagtcttctccataaccttgcccgactctgtctgtcca

SEQ ID NO: 546521 - DNA, 120 bp, Artificial Sequence
  ENSG00000167920_11 (sequence is synthesized)
aaaccaggccttagcctttctgtggctttgttatggcaaagcctcatattactctctagtctggttcagcaggacagtcaggtccacacctggggctgtttgttttctacgtttacctca

SEQ ID NO: 546522 - DNA, 120 bp, Artificial Sequence
  ENSG00000167920_12 (sequence is synthesized)
acataaggtaccttatcattgtcagccttcatctcctgatccaaaataaaataaaatgccacaggttacttgattttgcatctggaatatgattatttaaagaaattaaaaatttaaaac

SEQ ID NO: 546523 - DNA, 120 bp, Artificial Sequence
  ENSG00000167920_13 (sequence is synthesized)
tgaaaatgtagagtttagaaatcttttttaaggtttcaaaaaaatttctaggagacaacaaaatagtgttactagatttagcaaataaaatacagaatgccaattaaatttgaatttcaa

SEQ ID NO: 546524 - DNA, 120 bp, Artificial Sequence
  ENSG00000167920_14 (sequence is synthesized)
atgaacattgaatactttttttggtataactatattccatgcaatatttgggacatatctgttatattattcattgtttacctgaaattataatttaaactgagagttctgtattttatc

SEQ ID NO: 546525 - DNA, 120 bp, Artificial Sequence
  ENSG00000167920_15 (sequence is synthesized)
taggatcaatataaaggaataatatttttaatttttacaaactattttaatataagtaatttatttgattttcattgtcatcctgagagttaagttttgccttacagtctatgttacttt

SEQ ID NO: 546526 - DNA, 120 bp, Artificial Sequence
  ENSG00000167920_16 (sequence is synthesized)
ttgccttacagtctatgttactttacctgtgttttatgaaaagactgtctcttataatgatagccaccaccaccatatcttgacaagtattgacatactgaaactttaaattcattttgt

SEQ ID NO: 546527 - DNA, 120 bp, Artificial Sequence
  ENSG00000167920_17 (sequence is synthesized)
gtagttcccgcctcttcatgattgtttctgaggtaattcagcttctccgtctggctttccattttcaactctaggttagtcttgttcaaagtcaactcatctaagacacttcgcaggccc

SEQ ID NO: 546528 - DNA, 120 bp, Artificial Sequence
  ENSG00000167920_18 (sequence is synthesized)
gccgtagccgccgccgaaacttccgccgccgcgtccgccgcctccggaactaaacggggtgaggtcacattcggttatctctaacgttggaaaacgatggagctaacacccattatggag

SEQ ID NO: 546529 - DNA, 120 bp, Artificial Sequence
  ENSG00000167920_19 (sequence is synthesized)
gccgccgaaacttccgccgccgcgtccgccgcctccggaactaaacggggtgaggtcacattcggttatctctaacgttggaaaacgccccactgtaactgccctaatctgagctttcac

SEQ ID NO: 546530 - DNA, 120 bp, Artificial Sequence
  ENSG00000167920_20 (sequence is synthesized)
atacactatatatattaagaaaacattttggccctcactttttcctcttcattaaaggtcactttttttttgtcttggatctgttgagattatcttgatactagtaacctgctaaaatat

SEQ ID NO: 546531 - DNA, 64 bp, Artificial Sequence
  ENSG00000167920_21 (sequence is synthesized)
tccagcccacggaatgagagaaaatatttgcaaactatccatctgacagagggttaataaccag

SEQ ID NO: 546532 - DNA, 86 bp, Artificial Sequence
  ENSG00000167920_22 (sequence is synthesized)
gaaaatctaataatctgataaaaaaaatgggcaaaagatctgaatagacatacaaatctcaaaagacatacaggctaggcatggtg

SEQ ID NO: 546533 - DNA, 120 bp, Artificial Sequence
  ENSG00000167920_23 (sequence is synthesized)
ggtggctcacacctctaatcccagcacttagggagactgggatgggaggactacttgagcctaggaattcaagaccagcctgggtaacgtagggagaccccatctctacaaaaaataaaa

SEQ ID NO: 546534 - DNA, 120 bp, Artificial Sequence
  ENSG00000167920_24 (sequence is synthesized)
ggaggactacttgagcctaggaattcaagaccagcctgggtaacgtagggagaccccatctctacaaaaaataaaaataaattagctgggtgtgatggcatgtgtctgtagtcccagcta

SEQ ID NO: 546535 - DNA, 120 bp, Artificial Sequence
  ENSG00000167925_0 (sequence is synthesized)
ccaagtagctgcgactatgggtgtgacaccacgctgggctagtttttcaattttttgtagagatggagtctccctatgttgctcaggccggttgcaaactcctgggctcaagtgattctc

SEQ ID NO: 546536 - DNA, 120 bp, Artificial Sequence
  ENSG00000167925_1 (sequence is synthesized)
gcctcccaaagtgctgggattacagatgatagccacctcacccggcccacccctaccttctgaaagaggcattcttattcttattcccattttgcagatcaggaaacagagctcagtgca

SEQ ID NO: 546537 - DNA, 120 bp, Artificial Sequence
  ENSG00000167925_2 (sequence is synthesized)
tcagtgcagcccactaaattgctcagggccctacagctaacaagcggcagaggcaggatctgcactcaggagctgcttggagatgctgctgtggccactgctgctgctgctgctgctgct

SEQ ID NO: 546538 - DNA, 120 bp, Artificial Sequence
  ENSG00000167925_3 (sequence is synthesized)
gccaacattggccctgctcaggcagcagcggtcccaggatgccaggctgtcctggcttgctggcctccagcaccgagtggcatggggggccctggtctgggcagccacctggcagcggcg

SEQ ID NO: 546539 - DNA, 120 bp, Artificial Sequence
  ENSG00000167925_4 (sequence is synthesized)
gaggctggagcagagcacgctccatgtgcaccagagccagcagcaggccctgaggtggtgtctacagggagcccagcgcccccactgttccctcagaaggagcacagacataagcacctt

SEQ ID NO: 546540 - DNA, 120 bp, Artificial Sequence
  ENSG00000167925_5 (sequence is synthesized)
ccggaatcatctccctctgaccaaggccagccagacccagcaggaagacagtggagagcagccactgcccccgacctcaaaccaggaccttggggaggcctctctgcaggccaccttgct

SEQ ID NO: 546541 - DNA, 120 bp, Artificial Sequence
  ENSG00000167925_6 (sequence is synthesized)
gggtctggcagccctaaacaaggcctacccagaagtgctggctcagggacgcactgcccgtgtgacgcttacatccccttggccccgacccctgccttggcctgggaataccctgggcca

SEQ ID NO: 546542 - DNA, 120 bp, Artificial Sequence
  ENSG00000167925_7 (sequence is synthesized)
ggtgggcacccctggaaccaaggaccctagggccctgctgctggacgcactgaggtccccagggctgagggcactggaggctgggacggctgtcgaacttctggatgttttcttgggcct

SEQ ID NO: 546543 - DNA, 120 bp, Artificial Sequence
  ENSG00000167925_8 (sequence is synthesized)
ggagactgatggtgaagagctagctggggcgatagctgccgggaaccctggagcgcctctccgtgaacgggcagctgagctccgggaggccctagagcaggggccacggggactggccct

SEQ ID NO: 546544 - DNA, 120 bp, Artificial Sequence
  ENSG00000167925_9 (sequence is synthesized)
tcggctctggccaaagctgcaggtggtggtgactctggatgcaggaggccaggccgaggctgtggctgccctcggggccttgtggtgccaaggactagccttcttctctcctgcttatgc

SEQ ID NO: 546545 - DNA, 120 bp, Artificial Sequence
  ENSG00000167925_10 (sequence is synthesized)
ggggtgctgggcctaaacctacagccagagcagccccatgggctctaccttctgccccctggggccccctttatcgagctgctcccagtcaaggaaggcacccaggaggaagctgcctcc

SEQ ID NO: 546546 - DNA, 120 bp, Artificial Sequence
  ENSG00000167925_11 (sequence is synthesized)
accctccttttggccgaggcccagcagggcaaggagtatgagctggtgctgacggaccgcgccagcctcaccaggtgccgcctgggtgatgtggtgcgagtggttggtgcctacaatcag

SEQ ID NO: 546547 - DNA, 120 bp, Artificial Sequence
  ENSG00000167925_12 (sequence is synthesized)
tgtccagtcgtcaggttcatctgcaggctggaccagaccctgagtgtgcgaggggaagatattggtgaagacctgttctctgaggccctgggccgggcagtggggcagtgggcgggggcc

SEQ ID NO: 546548 - DNA, 120 bp, Artificial Sequence
  ENSG00000167925_13 (sequence is synthesized)
aagctgctggaccatggctgtgtggagagcagcattctggattcctctgcgggctctgctccccactacgaggtgtttgtggcgctgagggggctgaggaatctgtcagaggaaaatcga

SEQ ID NO: 546549 - DNA, 120 bp, Artificial Sequence
  ENSG00000167925_14 (sequence is synthesized)
gacaagctggaccactgccttcaggaagcctctccccgctacaagtccctgcggttctggggcagcgtgggccctgccagagtccacctggtggggcagggagccttccgagcactccgg

SEQ ID NO: 546550 - DNA, 120 bp, Artificial Sequence
  ENSG00000167925_15 (sequence is synthesized)
gcagccctcgctgcctgcccctcctcccccttcccccctgcgatgccccgggtccttcggcacaggcacctggcccagtgtctgcaggagagggtggtgtcctgagtcaagtcctgcccc

SEQ ID NO: 546551 - DNA, 120 bp, Artificial Sequence
  ENSG00000167925_16 (sequence is synthesized)
accgcccagctccccccagaggccacctcgcccctccctctgggacctctccggatggggagtccttggccagggtctctgactctgtgtcacctgacatttgcccatgagagccgctgg

SEQ ID NO: 546552 - DNA, 120 bp, Artificial Sequence
  ENSG00000167925_17 (sequence is synthesized)
gccttagagaggccttggcccagctgaccggttctgaagtatgggcctccggggttagcagatgccagcagtgcctgcccgtgtccccatgtcccggcatgaaggacactgctagagagt

SEQ ID NO: 546553 - DNA, 120 bp, Artificial Sequence
  ENSG00000167925_18 (sequence is synthesized)
taccatgcacaccgatggtttcctgtatcacagcccaaagaggttctctggtggccacagctgtgtgctcagtcagtgcactgggcaagctagaagtgttggggggttaatgtccccagg

SEQ ID NO: 546554 - DNA, 120 bp, Artificial Sequence
  ENSG00000167925_19 (sequence is synthesized)
agcagcaaccctgagtcaataaggagcaggacctcagcttcattgtccttgagcaggacaattctgaagtgtattctacataaactctcagaggatgcccagcaggatggagtcccagtt

SEQ ID NO: 546555 - DNA, 120 bp, Artificial Sequence
  ENSG00000167925_20 (sequence is synthesized)
gcccgcagcagtaacccactcattcatgtacttcctgcgggggctctcccttccctctcttccccactcccccgccttgggcttcctgggatggctcccaaataaacctcttgcacccag

SEQ ID NO: 546556 - DNA, 120 bp, Artificial Sequence
  ENSG00000167925_21 (sequence is synthesized)
agccattcccccactgagctccaggactttcccccaacattctgctctgggcctggcaaggctgcatgcgcacacaggagccttggaggactcgtggcacatcctaggccagcacccaca

SEQ ID NO: 546557 - DNA, 120 bp, Artificial Sequence
  ENSG00000167925_22 (sequence is synthesized)
aaccacttctgcggtggggaagggagagctattacttcacatcataaggcatcgccgcaggaagcaactccggagaccatctgggttcactgttccatactaatgaggaaacgcagcctc

SEQ ID NO: 546558 - DNA, 120 bp, Artificial Sequence
  ENSG00000167925_23 (sequence is synthesized)
cccagggtctggggaggtgacccaaagagaaagaaaccccacaggaccgtcagattccagagcctgatggcccccttacctcctccactgccaacggagtggcctgacccagagacccag

SEQ ID NO: 546559 - DNA, 120 bp, Artificial Sequence
  ENSG00000167925_24 (sequence is synthesized)
agttggggcccagccttttaaagccatcgctccttctttctggccggatgtgtgctgagacccagagtcacccaggggtctccgtcacgtgccaggagtaggcagaagtgggctgtgaca

SEQ ID NO: 546560 - DNA, 120 bp, Artificial Sequence
  ENSG00000167925_25 (sequence is synthesized)
agccttttaaagccatcgctccttctttctggccggatgtgtgctgagacccagagtcacccaggggtctccgtcacgtgccaggagtaggcagaagtgggctgtgacaggagctgcttg

SEQ ID NO: 546561 - DNA, 120 bp, Artificial Sequence
  ENSG00000167925_26 (sequence is synthesized)
gtggagagcagcattctgggtgagcctccccaccggctcctgcctaccatccttgagctacccttcaactcctacctcccctgccaggggactgctaggaaagagataagcctcctttac

SEQ ID NO: 546562 - DNA, 120 bp, Artificial Sequence
  ENSG00000167925_27 (sequence is synthesized)
ctaggttcctctccatttaccccactccccaccaagaaactcttttttccctatgaatctcagagtggggaagaacagatagggcagaggacactagacttggcagctgcccattcaccg

SEQ ID NO: 546563 - DNA, 120 bp, Artificial Sequence
  ENSG00000167925_28 (sequence is synthesized)
aaaggagacgaggacagggtctgactgtagaccccttcactctgcacactcccagggtgccatggagatcagggctgatgggaaggagaggggtggcggaggagaagctccctggggctc

SEQ ID NO: 546564 - DNA, 120 bp, Artificial Sequence
  ENSG00000167925_29 (sequence is synthesized)
tgggaggggagggctaagtcccacagacacacacctgtccacacaaaacttctaaacacatgtagcctgggcacagccacacacgcctcgtgtgcacactcacagtcacacaccagctca

SEQ ID NO: 546565 - DNA, 120 bp, Artificial Sequence
  ENSG00000167930_0 (sequence is synthesized)
ccgcggcggcaggtccacctgggcttgcgaaggcacagattccccgtccacagctcacgaccagatgcaccagcaggagtccacatcgaggacgtcctccgggcactcccacgaccagga

SEQ ID NO: 546566 - DNA, 120 bp, Artificial Sequence
  ENSG00000167930_1 (sequence is synthesized)
gttaaactttgggatgtgcccgtgatgttggaccacaaggacttagaggccgaaatccaccccttgaaaaatgaagaaagaaaatcgcaggaaaatctgggaaatccatcaaaaaatgag

SEQ ID NO: 546567 - DNA, 120 bp, Artificial Sequence
  ENSG00000167930_2 (sequence is synthesized)
gataacgtgaaaagcgcgcctccacagtcccggctctcccggtgccgagcggcggcgttttttctttcattgtttctctgcctttttgtggtgttcgtcgtctcattcgtcatcccgtgt

SEQ ID NO: 546568 - DNA, 120 bp, Artificial Sequence
  ENSG00000167930_3 (sequence is synthesized)
ccagaccggccggcgtcacagcgaatgtggaggatagactacagtgccgctgttatctatgactttctggctgtggatgatataaacggggacaggatccaagatgttctttttctttat

SEQ ID NO: 546569 - DNA, 120 bp, Artificial Sequence
  ENSG00000167930_4 (sequence is synthesized)
aaaaacaccaacagcagcaacaatttcagccgatcctgtgtggacgaaggcttttcctctccctgcacctttgcagctgctgtgtcgggggccaacggcagcacgctctgggagagacct

SEQ ID NO: 546570 - DNA, 120 bp, Artificial Sequence
  ENSG00000167930_5 (sequence is synthesized)
gtggcccaagacgtggccctcgtggagtgtgctgtgccccagccaagaggcagtgaggcaccttctgcctgcatcctggtgggcagacccagttctttcattgcagtcaacttgttcaca

SEQ ID NO: 546571 - DNA, 120 bp, Artificial Sequence
  ENSG00000167930_6 (sequence is synthesized)
ggggaaaccctgtggaaccacagcagcagcttcagcgggaatgcgtccatcctgagccctctgctgcaggtgcctgatgtggacggcgatggggccccagacctgctggttctcacccag

SEQ ID NO: 546572 - DNA, 120 bp, Artificial Sequence
  ENSG00000167930_7 (sequence is synthesized)
gagcgggaggaggttagtggccacctctactccggcagcaccgggcaccagattggcctcagaggcagccttggtgtggacggggaaagtggcttcctccttcacgtcaccaggacaggt

SEQ ID NO: 546573 - DNA, 120 bp, Artificial Sequence
  ENSG00000167930_8 (sequence is synthesized)
gcccactacatcctctttccctgcgcaagctccctctgcggctgctctgtgaagggtctctacgagaaggtgaccgggagcggcggcccgttcaagagtgacccgcactgggagagcatg

SEQ ID NO: 546574 - DNA, 120 bp, Artificial Sequence
  ENSG00000167930_9 (sequence is synthesized)
ctcaatgccaccacccgcaggatgctttcccacagctctggagcagtgcgctacctgatgcatgtcccagggaacgccggtgcagatgtgcttcttgtgggctcagaggccttcgtgctg

SEQ ID NO: 546575 - DNA, 120 bp, Artificial Sequence
  ENSG00000167930_10 (sequence is synthesized)
ctggacgggcaggagctgacgcctcgctggacacccaaggcagcccatgtcctgagaaaacccatcttcggccgctacaaaccagacaccttggctgtagccgttgaaaacggaactggc

SEQ ID NO: 546576 - DNA, 120 bp, Artificial Sequence
  ENSG00000167930_11 (sequence is synthesized)
accgacagacagatcctgtttctggaccttggcactggagccgtcctgtgtagcctagccctcccgagcctccctgggggtccactgtccgccagcctgccgaccgcagaccaccgctca

SEQ ID NO: 546577 - DNA, 120 bp, Artificial Sequence
  ENSG00000167930_12 (sequence is synthesized)
cacgagctggggagcaccagcgagacggagaccggggaggcccggcacagcctgtacatgttccaccccaccctgccgcgcgtgctgctggagctggccaatgtctctacccacattgtc

SEQ ID NO: 546578 - DNA, 120 bp, Artificial Sequence
  ENSG00000167930_13 (sequence is synthesized)
gcctttgacgccgtcctgtttgagccaagccgccacgccgcctacatccttctgacaggcccggcagactcagaggcacccggcctggtctctgtgatcaagcacaaggtgcgggacctt

SEQ ID NO: 546579 - DNA, 120 bp, Artificial Sequence
  ENSG00000167930_14 (sequence is synthesized)
gtcccaagcagcagggtggtccgcctgggtgagggtgggccagacagtgaccaagccatcagggaccggttctcccggctgcggtaccagagtgaggcgtagaggcacgccagccagagc

SEQ ID NO: 546580 - DNA, 120 bp, Artificial Sequence
  ENSG00000167930_15 (sequence is synthesized)
ctgtggagagactccgcctgctgacactaaacgtcctgggaagtgggcccttccctgggtctctgcactgactcccccactcctgaccctggtgatggtcgccactgggcagcagcagcc

SEQ ID NO: 546581 - DNA, 120 bp, Artificial Sequence
  ENSG00000167930_16 (sequence is synthesized)
ttaccagtcctccatgatcacacccagggacctgcatgggtgaggggacaccctgggcctctctcccgcccagcatcctccctgagtccccacacagggcctcactctgcaccccaccag

SEQ ID NO: 546582 - DNA, 120 bp, Artificial Sequence
  ENSG00000167930_17 (sequence is synthesized)
ggtcccgctcacaccaggcagccttcatagtggtctccctggccaccttgggcagagctgggtcatgcagcaccccatccttacccggtgccctctccttgccagcttctccccaggcca

SEQ ID NO: 546583 - DNA, 120 bp, Artificial Sequence
  ENSG00000167930_18 (sequence is synthesized)
gagcggccatcgcgtagaaagaaccagggtgtccccgggacaggccgtcccccaccccatcctgtagaagtccattccccttttccctcctgtgctctgtcccccaaggagtcatggaac

SEQ ID NO: 546584 - DNA, 120 bp, Artificial Sequence
  ENSG00000167930_19 (sequence is synthesized)
tcagggtactgggcctcaacgggaacctgagacagctccagcttcgcagcccttcccggagctacagggggatcctctagcatggggggtgtgacttggttcctttgaccaggtcctgtg

SEQ ID NO: 546585 - DNA, 120 bp, Artificial Sequence
  ENSG00000167930_20 (sequence is synthesized)
aggaagcctggagcaagggtctcccccagcaggatgggtggggcctgctctggagctgagcccgtggccgctcacaggtgtccttagtggtgttgcagctgtctactggctgcatgtgct

SEQ ID NO: 546586 - DNA, 120 bp, Artificial Sequence
  ENSG00000167930_21 (sequence is synthesized)
gtgaatatcccaaggaactggctgtggaatgcgtgtttgggtcagtctgtgccctctcagtagacactggagctgctctgtccctgaagaggccccgtgccccaggcatggcaagcgcct

SEQ ID NO: 546587 - DNA, 120 bp, Artificial Sequence
  ENSG00000167930_22 (sequence is synthesized)
gcctctccccttccggtgctcacacgcccacgccgtgccacccgatgcaggactcacctctgtgccttgctgctcctgaggcccaagggcagccatggtgctctgtactgctcgggccgc

SEQ ID NO: 546588 - DNA, 120 bp, Artificial Sequence
  ENSG00000167930_23 (sequence is synthesized)
ccaggtcacagagcctgagcttcgtagccaaagcagcctgatgacccacccaccaaggaagaaagcagaataaacatttttgcactgcctgaaaaaccccggtggtcaggcgtgagccta

SEQ ID NO: 546589 - DNA, 120 bp, Artificial Sequence
  ENSG00000167930_24 (sequence is synthesized)
gaaagaaggcgggaagaggacaaggtcgggagaggaggaggaggggagcgaggacgcagagaaggaggggaaagaggacggagaggagcgaggacggaggggggacgggaacgaagaggg

SEQ ID NO: 546590 - DNA, 120 bp, Artificial Sequence
  ENSG00000167930_25 (sequence is synthesized)
gcgaggacgttcagcatccattgcgacagcgacaaacaggacaccgccaggttcccggcggaggcagcgcccaagatccccgttgccgagcaaccgaagcatggcggtggggcggggtcg

SEQ ID NO: 546591 - DNA, 120 bp, Artificial Sequence
  ENSG00000167930_26 (sequence is synthesized)
gcatcttgcttccgggtattcgctggctgatttactggttttagagatggggatgggcacccagtgctggactgaagaccagagaaggtggagctccctgtggccttggtctcacctctc

SEQ ID NO: 546592 - DNA, 120 bp, Artificial Sequence
  ENSG00000167930_27 (sequence is synthesized)
ttcaggtaacaggctctgccctgacccaagctgagccaatgaaccccctccctgggaatccacacctggacccattccttctgggcagggagggcttgctggagggagggaggctgtgca

SEQ ID NO: 546593 - DNA, 120 bp, Artificial Sequence
  ENSG00000167930_28 (sequence is synthesized)
ccccacagaagactgggccccctgggcacaaggggacactggtgctgggttcagcagcccccaggacctgggccaagacgggggtggctgctgcattcacgcaggacgttgagctgcagg

SEQ ID NO: 546594 - DNA, 120 bp, Artificial Sequence
  ENSG00000167930_29 (sequence is synthesized)
gactagagtggcagatgggccaggtccactaggccaccccatctccacccccagggccacaagccgctgtgggctccacaggggtgggaaggagtgcagggctggggctcgagtgccgtg

SEQ ID NO: 546595 - DNA, 120 bp, Artificial Sequence
  ENSG00000167930_30 (sequence is synthesized)
gcctccacgtaaacgggaacacgctgtgggcgagaaggcggctgagaacaggctggccagctggtgtcctgcccacctcactgcagggccccagcagcccccaggccacagccgccggcc

SEQ ID NO: 546596 - DNA, 120 bp, Artificial Sequence
  ENSG00000167930_31 (sequence is synthesized)
acagggcactgcctgggctcaccgtctcttcatctccagcgggatcccagcctctgccaggagggccttgtacatgtcagacttcaggaaccttgggtaggagtcctacaagagacagcg

SEQ ID NO: 546597 - DNA, 120 bp, Artificial Sequence
  ENSG00000167930_32 (sequence is synthesized)
tccagcccctgacccttctgcctcctcacctctcagccagctccacccgaaggagcagccaaacattgctggagcctcctccagccacagagtctccggcggacagggtgctggaggcag

SEQ ID NO: 546598 - DNA, 120 bp, Artificial Sequence
  ENSG00000167930_33 (sequence is synthesized)
ccgcctcggacctgcccagaccaaggcagacgcagggagacctgggctcccgtctgcctgggccatgtcgcagcaaaaaatggcaagagccctggtggccacgtgtagaggaataaaccg

SEQ ID NO: 546599 - DNA, 120 bp, Artificial Sequence
  ENSG00000167930_34 (sequence is synthesized)
cggcacctcctcagccattagcgggaaccaggaatggctccgtgtgccccacagagtgagggcagggttgtggagtcaaataaaaaaacaaggtaggccacgcatggtggctcacgcctg

SEQ ID NO: 546600 - DNA, 60 bp, Artificial Sequence
  ENSG00000167930_35 (sequence is synthesized)
tgatcccggctgaggttgggagatcgagaccgtcctgggtaacacggtgaaaccccgtct

SEQ ID NO: 546601 - DNA, 120 bp, Artificial Sequence
  ENSG00000167930_36 (sequence is synthesized)
cctgccatggggtagcagagaggaggagcggcttggcccccggctgctcctggggtgtcagtggtggcagtgcccagggcgagcccagaacatgaaccagcactcggcccgtcaggggag

SEQ ID NO: 546602 - DNA, 120 bp, Artificial Sequence
  ENSG00000167930_37 (sequence is synthesized)
atcggggcctgtcagtgcccctaagcctgaaggtgcaggtctccgagccccagcggagccggcctcgtggaaggacgagggaaagaatgcgtggtgcacggggccatgtgtgtgtgtggg

SEQ ID NO: 546603 - DNA, 120 bp, Artificial Sequence
  ENSG00000167930_38 (sequence is synthesized)
ctccttgcacctcatcgcggtctggaagatttctgtgcctagatttggtgaatgttcatatttcccttacaagctgtcattttaaggatatggaggagaataaagagcaggctgaaaata

SEQ ID NO: 546604 - DNA, 69 bp, Artificial Sequence
  ENSG00000167930_39 (sequence is synthesized)
cgtgagccaccgcgcccggcctaatatgtcacattttcaaatgtacttaaattatgtttttaaacaaca

SEQ ID NO: 546605 - DNA, 120 bp, Artificial Sequence
  ENSG00000167930_40 (sequence is synthesized)
ggccgcggcggcagagatggtccgtgcatgggggaaatgtttgtcctttcggccaggctctccaattcaaaaggcaggaattgagaaaatgacagtactttctctgtccctgccacagaa

SEQ ID NO: 546606 - DNA, 120 bp, Artificial Sequence
  ENSG00000167930_41 (sequence is synthesized)
gtgttctggatgaaaatagttcctgcctgctggctctccacagctaactcgcctttccacactaattagagaccttcttaagtataatctgttaagactgacaccctaaacatttattta

SEQ ID NO: 546607 - DNA, 120 bp, Artificial Sequence
  ENSG00000167930_42 (sequence is synthesized)
gcttttatttcctgggctggtggcccatagttagagctgcagccagtccccaagaagccgacgccagcagacccctctgtgctgcagctttgtgccgtgggactgctggcctcgccgacc

SEQ ID NO: 546608 - DNA, 120 bp, Artificial Sequence
  ENSG00000167930_43 (sequence is synthesized)
cacgagcacaggagtgccgccctcccctcctgttggcatctgctctgagtgtgcagtgagccgtgggctcacgagggtgatgcctcaacaggagcctgcctgtcacaggccttgcagttg

SEQ ID NO: 546609 - DNA, 120 bp, Artificial Sequence
  ENSG00000167941_0 (sequence is synthesized)
accagagcctgtgctactggaaggtggcgtgccctcctctggctggtaccatgcagctcccactggccctgtgtctcgtctgcctgctggtacacacagccttccgtgtagtggagggcc

SEQ ID NO: 546610 - DNA, 120 bp, Artificial Sequence
  ENSG00000167941_1 (sequence is synthesized)
aggggtggcaggcgttcaagaatgatgccacggaaatcatccccgagctcggagagtaccccgagcctccaccggagctggagaacaacaagaccatgaaccgggcggagaacggagggc

SEQ ID NO: 546611 - DNA, 120 bp, Artificial Sequence
  ENSG00000167941_2 (sequence is synthesized)
ggcctccccaccacccctttgagaccaaagacgtgtccgagtacagctgccgcgagctgcacttcacccgctacgtgaccgatgggccgtgccgcagcgccaagccggtcaccgagctgg

SEQ ID NO: 546612 - DNA, 120 bp, Artificial Sequence
  ENSG00000167941_3 (sequence is synthesized)
tgtgctccggccagtgcggcccggcgcgcctgctgcccaacgccatcggccgcggcaagtggtggcgacctagtgggcccgacttccgctgcatccccgaccgctaccgcgcgcagcgcg

SEQ ID NO: 546613 - DNA, 120 bp, Artificial Sequence
  ENSG00000167941_4 (sequence is synthesized)
tgcagctgctgtgtcccggtggtgaggcgccgcgcgcgcgcaaggtgcgcctggtggcctcgtgcaagtgcaagcgcctcacccgcttccacaaccagtcggagctcaaggacttcggga

SEQ ID NO: 546614 - DNA, 120 bp, Artificial Sequence
  ENSG00000167941_5 (sequence is synthesized)
gggaccgaggccgctcggccgcagaagggccggaagccgcggccccgcgcccggagcgccaaagccaaccaggccgagctggagaacgcctactagagcccgcccgcgcccctccccacc

SEQ ID NO: 546615 - DNA, 120 bp, Artificial Sequence
  ENSG00000167941_6 (sequence is synthesized)
ggcgccccggccctgaacccgcgccccacatttctgtcctctgcgcgtggtttgattgtttatatttcattgtaaatgcctgcaacccagggcagggggctgagaccttccaggccctga

SEQ ID NO: 546616 - DNA, 120 bp, Artificial Sequence
  ENSG00000167941_7 (sequence is synthesized)
ggaatcccgggcgccggcaaggcccccctcagcccgccagctgaggggtcccacggggcaggggagggaattgagagtcacagacactgagccacgcagccccgcctctggggccgccta

SEQ ID NO: 546617 - DNA, 120 bp, Artificial Sequence
  ENSG00000167941_8 (sequence is synthesized)
cctttgctggtcccacttcagaggaggcagaaatggaagcattttcaccgccctggggttttaagggagcggtgtgggagtgggaaagtccagggactggttaagaaagttggataagat

SEQ ID NO: 546618 - DNA, 120 bp, Artificial Sequence
  ENSG00000167941_9 (sequence is synthesized)
ctgcccatcagaaagcctgaggcgtgcccagagcacaagactgggggcaactgtagatgtggtttctagtcctggctctgccactaacttgctgtgtaaccttgaactacacaattctcc

SEQ ID NO: 546619 - DNA, 120 bp, Artificial Sequence
  ENSG00000167941_10 (sequence is synthesized)
ttcgggacctcaatttccactttgtaaaatgagggtggaggtgggaataggatctcgaggagactattggcatatgattccaaggactccagtgccttttgaatgggcagaggtgagaga

SEQ ID NO: 546620 - DNA, 120 bp, Artificial Sequence
  ENSG00000167941_11 (sequence is synthesized)
gagagagagaaagagagagaatgaatgcagttgcattgattcagtgccaaggtcacttccagaattcagagttgtgatgctctcttctgacagccaaagatgaaaaacaaacagaaaaaa

SEQ ID NO: 546621 - DNA, 120 bp, Artificial Sequence
  ENSG00000167941_12 (sequence is synthesized)
aaaagtaaagagtctatttatggctgacatatttacggctgacaaactcctggaagaagctatgctgcttcccagcctggcttccccggatgtttggctacctccacccctccatctcaa

SEQ ID NO: 546622 - DNA, 120 bp, Artificial Sequence
  ENSG00000167941_13 (sequence is synthesized)
agaaataacatcatccattggggtagaaaaggagagggtccgagggtggtgggagggatagaaatcacatccgccccaacttcccaaagagcagcatccctcccccgacccatagccatg

SEQ ID NO: 546623 - DNA, 120 bp, Artificial Sequence
  ENSG00000167941_14 (sequence is synthesized)
ttttaaagtcaccttccgaagagaagtgaaaggttcaaggacactggccttgcaggcccgagggagcagccatcacaaactcacagaccagcacatcccttttgagacaccgccttctgc

SEQ ID NO: 546624 - DNA, 120 bp, Artificial Sequence
  ENSG00000167941_15 (sequence is synthesized)
ccaccactcacggacacatttctgcctagaaaacagcttcttactgctcttacatgtgatggcatatcttacactaaaagaatattattgggggaaaaactacaagtgctgtacatatgc

SEQ ID NO: 546625 - DNA, 120 bp, Artificial Sequence
  ENSG00000167941_16 (sequence is synthesized)
tgagaaactgcagagcataatactgccacccaaaaatctttttgaaaatcatttccagacaacctcttactttctgtgtagtttttaattgttaaaaaaaaaaagttttaaacagaagca

SEQ ID NO: 546626 - DNA, 120 bp, Artificial Sequence
  ENSG00000167941_17 (sequence is synthesized)
catgacatatgaaagcctgcaggactggtcgtttttttggcaattcttccacgtgggacttgtccacaagaatgaaagtagtggtttttaaagagttaagttacatatttattttctcac

SEQ ID NO: 546627 - DNA, 120 bp, Artificial Sequence
  ENSG00000167941_18 (sequence is synthesized)
ttaagttatttatgcaaaagtttttcttgtagagaatgacaatgttaatattgctttatgaattaacagtctgttcttccagagtccagagacattgttaataaagacaatgaatcatga

SEQ ID NO: 546628 - DNA, 120 bp, Artificial Sequence
  ENSG00000167962_0 (sequence is synthesized)
cggaggcggcggcagctcctgagcggggaggcgggagctgcgtgctgtgctgcggagacctggaggccacggcgctgggccgctgcgaccacccggtgtgctaccgctgctctaccaaga

SEQ ID NO: 546629 - DNA, 120 bp, Artificial Sequence
  ENSG00000167962_1 (sequence is synthesized)
tgcgggtgctctgcgagcagcgctactgcgccgtgtgccgcgaggagctgcgccaggtggtctttgggaagaagcttcctgcctttgccaccatccccatccaccagctgcagcatgaga

SEQ ID NO: 546630 - DNA, 120 bp, Artificial Sequence
  ENSG00000167962_2 (sequence is synthesized)
agaaatatgatatctactttgcagatggaaaggtgtacgcattgtacaggcagctgctgcagcacgagtgcccgcggtgccccgagctgccacctttcagcctcttcggggacctggagc

SEQ ID NO: 546631 - DNA, 120 bp, Artificial Sequence
  ENSG00000167962_3 (sequence is synthesized)
agcacatgcggaggcagcatgagctcttctgctgccgtctgtgcctccagcacctccagatcttcacatatgagcgcaagtggtactcgcgcaaggacctggcccggcatcgcatgcagg

SEQ ID NO: 546632 - DNA, 120 bp, Artificial Sequence
  ENSG00000167962_4 (sequence is synthesized)
gtgaccccgatgacacgtcgcaccgtgggcacccgctctgcaagttctgtgacgagcgctacctggacaatgatgagctgcttaagcacctgcgccgcgaccactacttctgccacttct

SEQ ID NO: 546633 - DNA, 120 bp, Artificial Sequence
  ENSG00000167962_5 (sequence is synthesized)
gcgactcggacggggcccaggactactacagcgactatgcctacctgcgtgagcacttccgggagaagcactttctgtgtgaggaaggccgctgcagcacggagcagttcacccacgcct

SEQ ID NO: 546634 - DNA, 120 bp, Artificial Sequence
  ENSG00000167962_6 (sequence is synthesized)
tccgcaccgagatcgacctcaaggcccacaggacggcctgccacagtcgcagccgcgccgaggcacgccagaaccgccacatcgacctgcagttcagctacgcgccacggcactcgcgcc

SEQ ID NO: 546635 - DNA, 120 bp, Artificial Sequence
  ENSG00000167962_7 (sequence is synthesized)
ggaacgagggggtcgttggtggcgaagactacgaggaggtggacaggtacagccgccagggccgagtggcccgggctggcactcgcggagcccagcagagccgccgaggaagctggaggt

SEQ ID NO: 546636 - DNA, 120 bp, Artificial Sequence
  ENSG00000167962_8 (sequence is synthesized)
acaaaagggaagaagaggaccgagaagtagcagctgctgtccgggcctccgtggccgcacagcagcaggaggaggctcgcaggagtgaggatcaggaggaaggcggtaggcccaagaagg

SEQ ID NO: 546637 - DNA, 120 bp, Artificial Sequence
  ENSG00000167962_9 (sequence is synthesized)
aggaggcagcggcgcggggacctgaggatccccgtggcccccggcgctcaccccggactcagggcgaaggcccaggccccaaggaaacctcgacaaatggtcctgtaagccaagaagcct

SEQ ID NO: 546638 - DNA, 120 bp, Artificial Sequence
  ENSG00000167962_10 (sequence is synthesized)
tctcggtgacaggcccagccgccccagggtgtgtgggggtgccaggcgccctcccaccacccagcccgaagctcaaggacgaagacttccccagcctctctgcctccacttcctcctcct

SEQ ID NO: 546639 - DNA, 120 bp, Artificial Sequence
  ENSG00000167962_11 (sequence is synthesized)
gctccactgcagcaaccccgggccctgtggggttggcgctgccgtacgccatccctgccagaggcaggagtgccttccaggaggaggacttccccgccctggtgtcctcggtgcccaagc

SEQ ID NO: 546640 - DNA, 120 bp, Artificial Sequence
  ENSG00000167962_12 (sequence is synthesized)
ctggcaccgcccccaccagccttgtctctgcctggaacagcagcagtagcagcaagaaggtagcacagcccccactctcggcgcaggctaccggcagcggccagcccaccaggaaggctg

SEQ ID NO: 546641 - DNA, 120 bp, Artificial Sequence
  ENSG00000167962_13 (sequence is synthesized)
ggagcaggggcggcaggaagggcggcccgcccttcacacaggaggaggaggaggacggcggcccggccctgcaggagcttctgagcacacgccccacgggctccgtctcctccacactgg

SEQ ID NO: 546642 - DNA, 120 bp, Artificial Sequence
  ENSG00000167962_14 (sequence is synthesized)
ggctggcctccatccaaccctctaaagttgggaagaagaagaaagtgggctcggagaagccaggcaccacattgccacagcccccgcccgctacctgtcccccaggggctttgcaggccc

SEQ ID NO: 546643 - DNA, 120 bp, Artificial Sequence
  ENSG00000167962_15 (sequence is synthesized)
cggaagctcctgccagcagagccgaggggccagttgccgtcgtcgttaatggacacatggagggcccggcccctgctcggagtgcccccaaggaaccccctgggctcccaaggcccctgg

SEQ ID NO: 546644 - DNA, 120 bp, Artificial Sequence
  ENSG00000167962_16 (sequence is synthesized)
ggtccttcccctgccccacgccacaggaggacttcccagcgctcggcggcccctgcccaccccggatgccgccgcccccaggcttcagcgctgtggtgctcctgaagggcacgcctcccc

SEQ ID NO: 546645 - DNA, 120 bp, Artificial Sequence
  ENSG00000167962_17 (sequence is synthesized)
cacccccgccgggcctggtgcccccaatcagcaagccgccccctggcttctctggccttctgcctagcccccacccggcctgtgtccccagccccgccaccaccaccaccacaaaagcac

SEQ ID NO: 546646 - DNA, 120 bp, Artificial Sequence
  ENSG00000167962_18 (sequence is synthesized)
ccaggctgctgcctgccccacgggcgtacctagtccccgagaacttccgggagaggaaccttcagctcatccagtccatcagggacttcctgcagagcgacgaggcccgcttcagcgagt

SEQ ID NO: 546647 - DNA, 120 bp, Artificial Sequence
  ENSG00000167962_19 (sequence is synthesized)
tcaagagccactcaggggagttcagacagggcctgatctccgcagcccagtattacaagagttgccgggacctgctgggggagaatttccagaaggtctttaatgagctgctggtcctgc

SEQ ID NO: 546648 - DNA, 120 bp, Artificial Sequence
  ENSG00000167962_20 (sequence is synthesized)
tgcccgacacggccaagcagcaggagctcctgtctgcacacacggacttctgcaaccgcgagaagcctctgagcaccaagtccaagaagaacaagaagagcgcgtggcaggccaccaccc

SEQ ID NO: 546649 - DNA, 120 bp, Artificial Sequence
  ENSG00000167962_21 (sequence is synthesized)
agcaggcgggcctggactgccgtgtgtgccccacctgccagcaggtgctcgcgcatggcgatgccagcagccaccaggcgctgcatgctgcccgggacgacgacttcccctccctgcaag

SEQ ID NO: 546650 - DNA, 120 bp, Artificial Sequence
  ENSG00000167962_22 (sequence is synthesized)
ccatcgccaggatcatcacgtagctcccgccagcgtggccagagctgtcgcaccgtgagcgtccttcctccttcctctccgggctgccaggcagccaggtaaggcctggtgaggccactt

SEQ ID NO: 546651 - DNA, 120 bp, Artificial Sequence
  ENSG00000167962_23 (sequence is synthesized)
ggcctcttggttggccaggcccaccaggaagtcaccaggacagtccacccgccctgttggcacactcaagcgggagtccacccctgcctcagtggtgggccagtctcggtttgcattctt

SEQ ID NO: 546652 - DNA, 120 bp, Artificial Sequence
  ENSG00000167962_24 (sequence is synthesized)
gtgcttttgggaggtgccaggggagggaagggctgggatgctgggacctgttgttgctggcaaagccagaggtcacagtggcctgatctgggccctcccaaagctgagggctgcagcccg

SEQ ID NO: 546653 - DNA, 120 bp, Artificial Sequence
  ENSG00000167962_25 (sequence is synthesized)
tggggcctcagagctgaaagctgcggcgccactggtgccagagtcagatgtcacagatgtgttgtgtaaacagttggctgtttcatgcttcaagaatgttcaggattaaaagcagacaag

SEQ ID NO: 546654 - DNA, 120 bp, Artificial Sequence
  ENSG00000167962_26 (sequence is synthesized)
aaattgtgctacttgaagttgaatctttttatgagacaagctgaatctgggatctcaaattgcctctgaccttttataagacagtttatcttcaaataaatttattttgcaataccacgc

SEQ ID NO: 546655 - DNA, 120 bp, Artificial Sequence
  ENSG00000167962_27 (sequence is synthesized)
gcggaggcggcggcagctcctgagcggggaggcgggagctgcgtgctgtgctgcggagacctggaggccacggcgctggggccgctgcgaccacccggtgtgctaccgctgctctaccaa

SEQ ID NO: 546656 - DNA, 120 bp, Artificial Sequence
  ENSG00000167962_28 (sequence is synthesized)
atggaaaggtgtacgcattgtacaggtgagcagggcctctccctgggtcctggcctccctgtggttgtggcccttcacgtcccactctcctcacaaccggaggcacttcgggggccacct

SEQ ID NO: 546657 - DNA, 120 bp, Artificial Sequence
  ENSG00000167962_29 (sequence is synthesized)
ggtgcaccaatgctggggccaggcacctgggtttccatcctgtgactggggaggcttaccaggccctcctgggggtagagctggtggttgtgctggggaaaggcatgcccaggtggtgca

SEQ ID NO: 546658 - DNA, 120 bp, Artificial Sequence
  ENSG00000167962_30 (sequence is synthesized)
gcacctgcctcgggggcaccttgaggggcacacgaggtgtgtgagccaggcccgtggcctgaaaatcctataaagggtacagctgtcccagggctggtctctcagaggaggggcagctca

SEQ ID NO: 546659 - DNA, 120 bp, Artificial Sequence
  ENSG00000167962_31 (sequence is synthesized)
tgggctcagggctagagccaggcttctgacccaggccatgtgcacagccatggccttgcatctgtcctgggtcacgggcctggggcctggtgagtggccctgctcccggcggtgacactg

SEQ ID NO: 546660 - DNA, 120 bp, Artificial Sequence
  ENSG00000167962_32 (sequence is synthesized)
ggaggcagcatgagctcttctgctgccgtctgtgcctccagcacctccaggtgtgcccccccagcgaccccggagagagcctaggcggtgggtggtgcaagggatgtggccacacggctg

SEQ ID NO: 546661 - DNA, 120 bp, Artificial Sequence
  ENSG00000167962_33 (sequence is synthesized)
ggaggggcttgtccacctgctgcttctggccccggatggccccctgagggtcaggctgcacgtggcagggaggcctctggctgctggcggggccctctcccgccccttgctgctccgcca

SEQ ID NO: 546662 - DNA, 120 bp, Artificial Sequence
  ENSG00000167962_34 (sequence is synthesized)
ctggcctgtgggaagaggcaggaggcttggggtcccccagcctgtgcccagcctcctgtgccttgtagatcttcacatatgagcgcaagtggtactcgcgcaaggacctggcccggcatc

SEQ ID NO: 546663 - DNA, 80 bp, Artificial Sequence
  ENSG00000167964_0 (sequence is synthesized)
ttcgggtccgggtcgggctcggcgggcgcggggtgcgggacggcccagggcacggcggctgcagcgggagcacactgagc

SEQ ID NO: 546664 - DNA, 120 bp, Artificial Sequence
  ENSG00000167964_1 (sequence is synthesized)
cggcggctgcagcgggagcacactgagcgcccgcccgccatgtccaggaagaagacccccaagagcaaaggggccagcacccccgctgcctccacgctgcccaccgccaacggggcccga

SEQ ID NO: 546665 - DNA, 120 bp, Artificial Sequence
  ENSG00000167964_2 (sequence is synthesized)
ccggcgcgctccgggactgcgctttccggccccgacgcgccgcccaacgggcccttgcagcccggccggccctcgcttggcggcggtgtcgacttctacgacgtcgccttcaaggtcatg

SEQ ID NO: 546666 - DNA, 120 bp, Artificial Sequence
  ENSG00000167964_3 (sequence is synthesized)
ctggtgggggactcgggtgtggggaagacctgtctgctggtgcgattcaaggatggtgctttcctggcggggaccttcatctccaccgtaggcattgacttccggaacaaagttctggac

SEQ ID NO: 546667 - DNA, 120 bp, Artificial Sequence
  ENSG00000167964_4 (sequence is synthesized)
gtggatggtgtgaaggtgaagctgcagatgtgggacacagctggtcaggagcggttccgcagtgttacccatgcctactaccgggatgctcatgctctgctgctgctctacgatgtcacc

SEQ ID NO: 546668 - DNA, 120 bp, Artificial Sequence
  ENSG00000167964_5 (sequence is synthesized)
aacaaggcctcctttgacaacatccaggcctggctgaccgagatccacgagtacgcccagcacgacgtggcgctcatgctgctggggaacaaggtggactctgcccatgagcgtgtggtg

SEQ ID NO: 546669 - DNA, 120 bp, Artificial Sequence
  ENSG00000167964_6 (sequence is synthesized)
aagcagcgctccatgaaggctcccagcgagccgcgcttccggctgcatgattacgttaagagggagggtcgaggggcctcctgctgccgcccttgaacctggctgagctcagtcctctgg

SEQ ID NO: 546670 - DNA, 120 bp, Artificial Sequence
  ENSG00000167964_7 (sequence is synthesized)
aggaagccgtccagtccctagaaggctggacagagggtctccaggcccttctgactttgttgcccagtggccaacgcccgagtgtctgttttcaggagccccaggtcaagccttgtccct

SEQ ID NO: 546671 - DNA, 120 bp, Artificial Sequence
  ENSG00000167964_8 (sequence is synthesized)
tcctcctcccagcaacagtcccaacaagcaggcttctgagagcccgtggccgcacactggccgccacggaaaagcagtcttctgcacgggacggggagcggcaagtggacagactttgcc

SEQ ID NO: 546672 - DNA, 120 bp, Artificial Sequence
  ENSG00000167964_9 (sequence is synthesized)
acggtgctctgctgccccctcctgggcacgtccaggtgagggagggctggggctggcaccacgcacagtgcctaaccctagaaaagccatgtcttcagccgcacatgctcaggcagctaa

SEQ ID NO: 546673 - DNA, 120 bp, Artificial Sequence
  ENSG00000167964_10 (sequence is synthesized)
gggaggacgcctgcccacgcctgggacagaaggcttcactgctaatcacatcgtgcatctgtgtgtcctgggagctgcctgctcccggcccaccctctaggaggctctggctcaaacagc

SEQ ID NO: 546674 - DNA, 120 bp, Artificial Sequence
  ENSG00000167964_11 (sequence is synthesized)
aatagggtcttcctcactgaccttggaggatgcctgtggccttgtgataaaatgtgggaaatcacagaaaacaccagaaacaacaactgccagcccggcctggccacaggtgaggtctgt

SEQ ID NO: 546675 - DNA, 120 bp, Artificial Sequence
  ENSG00000167964_12 (sequence is synthesized)
gatttccgagcacgctccaccttgcactcaacttggccttttgattgcacaagcctttgttttcagtcctagtgaataaagttgtgttttctggagcgtctgtctcatctgttgaaaaaa

SEQ ID NO: 546676 - DNA, 120 bp, Artificial Sequence
  ENSG00000167964_13 (sequence is synthesized)
ggagaagctggccaaggtgagtcagggcaggggggtggtgagggggtgcccctggaggctgcgagcctaggctgtccccgccaggccaccacctggctggcagcagctgtttacaggagt

SEQ ID NO: 546677 - DNA, 120 bp, Artificial Sequence
  ENSG00000167964_14 (sequence is synthesized)
atggactgcccttcatggagaccagcgccaagacgggcctcaacgtggacttggccttcacagccatagcaaagtaagtcctgccagtcaccaggactcccccagcccagggcctgaatc

SEQ ID NO: 546678 - DNA, 120 bp, Artificial Sequence
  ENSG00000167964_15 (sequence is synthesized)
ctcattagagtccaggccatcgtgtccccttgtcacccccactccgcagggagttgaagcagcgctccatgaaggctcccagcgagccgcgcttccggctgcatgattacgttaagaggg

SEQ ID NO: 546679 - DNA, 120 bp, Artificial Sequence
  ENSG00000167964_16 (sequence is synthesized)
gcatcaaatcttgaaaccagatcaaaactgaagctcccacaagcacagcctaattcagggactcccacctgagtagagaggccggaagaaccatccgcagagggtcacaggacagctgga

SEQ ID NO: 546680 - DNA, 120 bp, Artificial Sequence
  ENSG00000167964_17 (sequence is synthesized)
gtgtgtttgccaagccagggctggagcttcctggacccgcctaccctggaggggatggagcagtgaagggcaccgggccaagcgctaggcatctggggctaaggagacagaagcccgcgg

SEQ ID NO: 546681 - DNA, 120 bp, Artificial Sequence
  ENSG00000167964_18 (sequence is synthesized)
ctctgtcgccctggctggagtgcagtggtgatcatggtggactgcaacctccaacttctgggttcaagccatcctgagtctttcaaattagcaaaaagagctactgggaaggctgaggcg

SEQ ID NO: 546682 - DNA, 120 bp, Artificial Sequence
  ENSG00000167965_0 (sequence is synthesized)
cgcgtgactcccccctgccggctgcggaggtgggggggggacggcgcccccgccgtgtgcgtggggcggggatggagcacgcgccctggagccccggagccagatgctctgacctttgac

SEQ ID NO: 546683 - DNA, 120 bp, Artificial Sequence
  ENSG00000167965_1 (sequence is synthesized)
gagccccggagccagatgctctgacctttgacccctgccgttcagctctagggcccgtgcaggccacaccatgaacacctccccaggcacggtgggcagtgacccggtcatcctggccac

SEQ ID NO: 546684 - DNA, 120 bp, Artificial Sequence
  ENSG00000167965_2 (sequence is synthesized)
tgcaggctacgaccacaccgtgcgcttctggcaggcccacagcggcatctgcacccggacggtgcagcaccaggactcccaggtgaatgccttggaggtcacaccggaccgcagcatgat

SEQ ID NO: 546685 - DNA, 120 bp, Artificial Sequence
  ENSG00000167965_3 (sequence is synthesized)
tgctgctgcaggttaccagcacatccgcatgtatgatctcaactccaataaccctaaccccatcatcagctacgacggcgtcaacaagaacatcgcgtctgtgggcttccacgaagacgg

SEQ ID NO: 546686 - DNA, 120 bp, Artificial Sequence
  ENSG00000167965_4 (sequence is synthesized)
ccgctggatgtacacgggcggcgaggactgcacagccaggatctgggacctcaggtcccggaacctgcagtgccagcggatcttccaggtgaacgcacccattaactgcgtgtgcctgca

SEQ ID NO: 546687 - DNA, 120 bp, Artificial Sequence
  ENSG00000167965_5 (sequence is synthesized)
ccccaaccaggcagagctcatcgtgggtgaccagagcggggctatccacatctgggacttgaaaacagaccacaacgagcagctgatccctgagcccgaggtctccatcacgtccgccca

SEQ ID NO: 546688 - DNA, 120 bp, Artificial Sequence
  ENSG00000167965_6 (sequence is synthesized)
catcgatcccgacgccagctacatggcagctgtcaatagcaccggaaactgctatgtctggaatctgacggggggcattggtgacgaggtgacccagctcatccccaagactaagatccc

SEQ ID NO: 546689 - DNA, 120 bp, Artificial Sequence
  ENSG00000167965_7 (sequence is synthesized)
gctacgccctgcagtgtcgcttcagccccgactccacgctcctcgccacctgctcggctgatcagacgtgcaagatctggaggacgtccaacttctccctgatgacggagctgagcatca

SEQ ID NO: 546690 - DNA, 120 bp, Artificial Sequence
  ENSG00000167965_8 (sequence is synthesized)
agagcggcaaccccggggagtcctcccgcggctggatgtggggctgcgccttctcgggggactcccagtacatcgtcactgcttcctcggacaacctggcccggctctggtgtgtggaga

SEQ ID NO: 546691 - DNA, 120 bp, Artificial Sequence
  ENSG00000167965_9 (sequence is synthesized)
ctggagagatcaagagagagtatggcggccaccagaaggctgttgtctgcctggccttcaatgacagtgtgctgggctagcctgtgacccctcgggactgcctggtgcaggtggtggcag

SEQ ID NO: 546692 - DNA, 120 bp, Artificial Sequence
  ENSG00000167965_10 (sequence is synthesized)
ctggagggacccatgcagcacccaggtcagagcagaccctcccctgccggcctgcgccagctggacctgatggccccctgtggcgccttgacctgctgggccaggctgccctgggactct

SEQ ID NO: 546693 - DNA, 120 bp, Artificial Sequence
  ENSG00000167965_11 (sequence is synthesized)
cagcccccagttgcttatccagatgtgacagagctcgacccaagccaggctgcacactcctggactgggctagcctgcactgcctgggaaagtcggccgagggcccaaagctgctgaggg

SEQ ID NO: 546694 - DNA, 120 bp, Artificial Sequence
  ENSG00000167965_12 (sequence is synthesized)
gtctgaggctggtgcccacccccaagctagtgtgttctctgcccctccctgcccgcgtttcagggcctcggtccatagagaacaccaccaccatggccaggtggaagggtttattagtcc

SEQ ID NO: 546695 - DNA, 120 bp, Artificial Sequence
  ENSG00000167965_13 (sequence is synthesized)
ctgccagcagctgtcctccctggtgcaggtggcctggccagcccactggattggggacgggccaggctgggccaggtcgggggctcagtctgggaggtaataaaagcagaccgacacgca

SEQ ID NO: 546696 - DNA, 120 bp, Artificial Sequence
  ENSG00000167965_14 (sequence is synthesized)
gtagtgggtcagggagggcaccggaacagcgcgacccgacagcccgggaaacggacagccgtgtcagaagggcaggtgccagtgggcaggaggccggagagaaagccgcagcttccttcc

SEQ ID NO: 546697 - DNA, 120 bp, Artificial Sequence
  ENSG00000167965_15 (sequence is synthesized)
ttccacctcgcgccgggcccgcggccgcgcacggggaccgctccgagttcctcccggcgggaaccccccgccccagaactttggtctcgtcccacccacccccgcccgcgccatggtctc

SEQ ID NO: 546698 - DNA, 120 bp, Artificial Sequence
  ENSG00000167965_16 (sequence is synthesized)
tagggagccatcgataactctacgctcggcctcgatcgactcgctccggctcccctcgccgtcctggacacggcggagtgcggagccgcccgtaagctctagggcccgtgcaggccacac

SEQ ID NO: 546699 - DNA, 120 bp, Artificial Sequence
  ENSG00000167965_17 (sequence is synthesized)
ctcgccgtcctggacacggcggagtgcggagccgcccgtaaggtacggaggccgcgagccaggggccgggaaccggctgctgggtggctgggagagcacggccaggggaagccggccagc

SEQ ID NO: 546700 - DNA, 120 bp, Artificial Sequence
  ENSG00000167965_18 (sequence is synthesized)
aggacggagcaagggcggtcaccggaggaaaggggagctcgggggtccagccagactgcgccctttcccatcagggcctgccgctggcctgctacgcatgcgcagccgcagcgctcggct

SEQ ID NO: 546701 - DNA, 120 bp, Artificial Sequence
  ENSG00000167965_19 (sequence is synthesized)
ggtgcggtggggagggggcgtgctgcccggggctggggtgggctgctctgggagaccgttttaggttgggttctcttcaagcagaggctgagacagggagcttcctgtgggcgacttact

SEQ ID NO: 546702 - DNA, 120 bp, Artificial Sequence
  ENSG00000167965_20 (sequence is synthesized)
atcccgacgccagctacatggcagctgtcaatagcaccgtgagtcctggtggcaggtgctgggtgcgggcagcttggcactcagccctcagcctctgcaggtgggcttattcctggatgt

SEQ ID NO: 546703 - DNA, 120 bp, Artificial Sequence
  ENSG00000167965_21 (sequence is synthesized)
cccttagcggccccctcctgctttccccatcccgggcactaacacccaccttgccagcaaagccagaagccttagtgtcgctcccgatggcttagtcctgtctgcaggtcggtcactccg

SEQ ID NO: 546704 - DNA, 120 bp, Artificial Sequence
  ENSG00000167965_22 (sequence is synthesized)
atgagtgggaggtgaggacgtggaactagaaaaatggtgaggaccgctctttgaagaagataatttgggattgttttatggtgtttttttaaaggctaaccggcaggaaggagaggaggt

SEQ ID NO: 546705 - DNA, 120 bp, Artificial Sequence
  ENSG00000167965_23 (sequence is synthesized)
gaaggtataggaaggaaggctccatgggaactatggcctggtcaagggacaagatgcaccccctctgcggccagaggaaggggtgcagccaggtctgtaagagcagcaggaaaaaaccat

SEQ ID NO: 546706 - DNA, 120 bp, Artificial Sequence
  ENSG00000167965_24 (sequence is synthesized)
gcttgttattccccttccaccagccactggcttaggctccctgctggagcagagggccctgcgtcccaagtatttcccaagaggtcccggaacctgcagtgccagcggatcttccaggtg

SEQ ID NO: 546707 - DNA, 120 bp, Artificial Sequence
  ENSG00000167965_25 (sequence is synthesized)
ttttttttcattaacttcatttaatcccagtgcatcacttgtacctcttgcccccggatttcccttctgctggcctttgtcatgctgtctctctagctggtgcccttctcctgtctactt

SEQ ID NO: 546708 - DNA, 120 bp, Artificial Sequence
  ENSG00000167965_26 (sequence is synthesized)
ccgttggccatcggcatcctccaggaaggagaatttgagtccttggccaggcgtggcctcctgttcttggcttgccaggtgtggcccttgcttggggccaggcttcccaggtgccttctg

SEQ ID NO: 546709 - DNA, 80 bp, Artificial Sequence
  ENSG00000167965_27 (sequence is synthesized)
ttgaggtcaggagtttgagaccagccttgccagccaggctaaccggcaggaaggagaggaggtgaaggtataggaaggaa

SEQ ID NO: 546710 - DNA, 120 bp, Artificial Sequence
  ENSG00000167965_28 (sequence is synthesized)
tttcactctgttgcctcctggtcccagtcacccttgtttctggtgacggctgacacactctctgaggcttcctttccccctccctgacctcccctggcccctgacacgttctctcttgga

SEQ ID NO: 546711 - DNA, 120 bp, Artificial Sequence
  ENSG00000167965_29 (sequence is synthesized)
tgcttctagtggtgcctggtcagtatcagccaggtggcgtcattcccctgaggagacccggggctgctggcctcgcccgtaggctgctgtggcgtggcccctgctcttctctccagcctc

SEQ ID NO: 546712 - DNA, 120 bp, Artificial Sequence
  ENSG00000167967_0 (sequence is synthesized)
atcttcctgcggcgcgttgcgacatggagggcgcgatggcagtgcgggtgacggccgctcatacggcagaagcccaggccgaagccgggcgggaagcgggcgagggtgcagttgcggcgg

SEQ ID NO: 546713 - DNA, 120 bp, Artificial Sequence
  ENSG00000167967_1 (sequence is synthesized)
tggcggcggccttggcccccagcggcttcctcggcctcccggcgcccttcagcgaggaagatgaggacgatgtgcacagatgcggccgctgccaggcagagttcaccgccttggaggatt

SEQ ID NO: 546714 - DNA, 120 bp, Artificial Sequence
  ENSG00000167967_2 (sequence is synthesized)
ttgttcagcacaagattcagaaggcctgccagcgggcccctccggaggccctgcctgccacccctgccaccacagcgttgctgggccaggaggtggtgccggcagcaccaggcccagagg

SEQ ID NO: 546715 - DNA, 120 bp, Artificial Sequence
  ENSG00000167967_3 (sequence is synthesized)
agcccatcactgtggcccacatcgtggtggaggcggcctctctggcagcagacatcagccacgcatctgaccttgttggtggtgggcacatcaaagaggtcatcgtggctgctgaggcgg

SEQ ID NO: 546716 - DNA, 120 bp, Artificial Sequence
  ENSG00000167967_4 (sequence is synthesized)
agctgggagacggtgagatggccgaggccccgggcagcccccgccagcaggggctggggctcgcaggggagggtgagcaggcccaggtgaagctactggtgaacaaggatggccgctatg

SEQ ID NO: 546717 - DNA, 120 bp, Artificial Sequence
  ENSG00000167967_5 (sequence is synthesized)
tgtgtgcgctgtgccacaagaccttcaagacgggcagcatcctcaaggcccacatggtcactcacagcagccgcaaggaccacgagtgcaagctctgtggggcctccttccgcaccaagg

SEQ ID NO: 546718 - DNA, 120 bp, Artificial Sequence
  ENSG00000167967_6 (sequence is synthesized)
gctcactcatccggcaccaccggcggcacacggatgagcgcccctacaagtgctccaagtgtggaaagagcttccgggagtcgggtgcactgacccggcacctcaagtctctcaccccct

SEQ ID NO: 546719 - DNA, 120 bp, Artificial Sequence
  ENSG00000167967_7 (sequence is synthesized)
gcacagagaaaatccgcttcagtgtgagcaaggacgtggttgtcagcaaagaggacgcacgtgcaggttctggagctggagctgccggcttggggacagccacatcatcggtgacaggcg

SEQ ID NO: 546720 - DNA, 120 bp, Artificial Sequence
  ENSG00000167967_8 (sequence is synthesized)
agcctatagagacttcacccgtgattcacctggtgacagatgccaagggcaccgtcatccacgaagtccacgtccagatgcaggagctgtccctgggcatgaaagccctggccccagagc

SEQ ID NO: 546721 - DNA, 120 bp, Artificial Sequence
  ENSG00000167967_9 (sequence is synthesized)
cccccgtctcccaggagctcccctgctccagcgagggcagccgtgagaacctgctgcaccaggccatgcagaactccggcatcgtccttgagcgcgctgctggggaggagggtgccctgg

SEQ ID NO: 546722 - DNA, 120 bp, Artificial Sequence
  ENSG00000167967_10 (sequence is synthesized)
ccagcccctggcagtggcagccccgcagctgccggtactggaagtgcagccgctggagacacaggtggccagcgaggcctcagcggtgcccaggacccacccatgtcctcagtgcagtga

SEQ ID NO: 546723 - DNA, 120 bp, Artificial Sequence
  ENSG00000167967_11 (sequence is synthesized)
gaccttcccgacagcagccaccctggaggcccacaagaggggccacaccgggccgaggccgttcgcctgcgcgcagtgtggcaaggccttccccaaggcctacctgctcaagaagcacca

SEQ ID NO: 546724 - DNA, 120 bp, Artificial Sequence
  ENSG00000167967_12 (sequence is synthesized)
ggaggtgcacgtgcgtgagcgccgcttccgctgtggcgactgcgggaagctctacaagaccattgcccatgtgcgtggccaccggcgcgtccactcagacgagcggccctacccttgtcc

SEQ ID NO: 546725 - DNA, 120 bp, Artificial Sequence
  ENSG00000167967_13 (sequence is synthesized)
caagtgtggcaagcgctacaagactaagaacgcacagcaggtgcacttcaggacacacctggaggagaagccgcacgtgtgccagttctgcagccgtggcttccgagagaagggctcact

SEQ ID NO: 546726 - DNA, 120 bp, Artificial Sequence
  ENSG00000167967_14 (sequence is synthesized)
ggtgcggcacgtgcgacaccacacaggcgagaagccgttcaagtgctacaagtgcggccgtggcttcgccgagcacggcacgctgaaccggcacctgcgcaccaaagggggctgcctgct

SEQ ID NO: 546727 - DNA, 120 bp, Artificial Sequence
  ENSG00000167967_15 (sequence is synthesized)
ggaggtggaggagttgctggtgtctgaggacagccccgcggcagccaccaccgtcctcacggaagacccgcacacagtgttggtggagttctcgtccgtggtagctgacacccaggagta

SEQ ID NO: 546728 - DNA, 120 bp, Artificial Sequence
  ENSG00000167967_16 (sequence is synthesized)
tatcatcgaggccactgcggacgatgcggagaccagtgaggccacggagatcatcgagggcacccagacagaggtggacagccacatcatgaaggtggtgcagcagatcgtgcaccaggc

SEQ ID NO: 546729 - DNA, 120 bp, Artificial Sequence
  ENSG00000167967_17 (sequence is synthesized)
tagcgccggccaccagatcatcgtgcagaacgtcaccatggacgaggagacggcgctgggcccagaggcggctgccgccgacaccatcaccatcgccacccccgagagcctgacagagca

SEQ ID NO: 546730 - DNA, 120 bp, Artificial Sequence
  ENSG00000167967_18 (sequence is synthesized)
ggtggccatgacgctggcctcggccatcagcgagggcactgtgcttgccgcccgggcagggacaagtggcactgaacaggccactgtgaccatggtgtcatcagaggacatcgagatcct

SEQ ID NO: 546731 - DNA, 120 bp, Artificial Sequence
  ENSG00000167967_19 (sequence is synthesized)
ggagcatgcaggcgagctggtcatcgcctcgccggagggccagctggaggtgcagacggtcatcgtctagcatgaggtctgcggggtcctggccgggcagggacagggcagaggactctg

SEQ ID NO: 546732 - DNA, 120 bp, Artificial Sequence
  ENSG00000167967_20 (sequence is synthesized)
agcgccccacccatgcctgcctggcctggtagagaagatggcacaggatggaggcgccccaagacggacagtgtacataagagtttcttgttgctttacaataaaacatgagaacctgca

SEQ ID NO: 546733 - DNA, 120 bp, Artificial Sequence
  ENSG00000167967_21 (sequence is synthesized)
gtggggccctggggccgtgctgggacccaggggcagccaaggctgacctctgtccttctgcccatctgcccaggccactgcggacgatgcggagaccagtgaggccacggagatcatcga

SEQ ID NO: 546734 - DNA, 120 bp, Artificial Sequence
  ENSG00000167967_22 (sequence is synthesized)
gggcacccagacagaggtgaggggtagggcaggcgggggcggggaggctccctggcacagccgctcttgctgagccgtggccctgcaggtggacagccacatcatgaaggtggtgcagca

SEQ ID NO: 546735 - DNA, 120 bp, Artificial Sequence
  ENSG00000167967_23 (sequence is synthesized)
cctccctgaagtggctttctgcagtgactttgtccattgatctgtttactgccttccctggggccacaagggagcctgccagggtggggcccatggttgtgttcttggtactgccagggc

SEQ ID NO: 546736 - DNA, 120 bp, Artificial Sequence
  ENSG00000167967_24 (sequence is synthesized)
gcggccttggcccccagcggcttcctcggcctcccggcgcccttcagcgaggaaggtaaccgggccgacccggagggtgcggccggggtgcgggcagttcatcccgggctggcagaggcc

SEQ ID NO: 546737 - DNA, 120 bp, Artificial Sequence
  ENSG00000167967_25 (sequence is synthesized)
cggatggcccgagctgcgggctcgaccgaccctcccagacccagacacctcgcggatctcgcgggaccctcacagccctccacgaaacccccagatgaggacgatgtgcacagatgcggc

SEQ ID NO: 546738 - DNA, 120 bp, Artificial Sequence
  ENSG00000167967_26 (sequence is synthesized)
gttctgggcactggctccaggggtctgagccaggcaggcgagggctgggcttcccacagggagagcagggccagtgggagcgccatgggggtctgagggtttgcacaaggctcctggcgt

SEQ ID NO: 546739 - DNA, 120 bp, Artificial Sequence
  ENSG00000167967_27 (sequence is synthesized)
agccgacttccatgaatcgctggcctgatagaccttcgtggttggggccagaggatggggcccctgctgcctgtatgctcgtctctcccgagaccagggcctggctgggaggggccgcgg

SEQ ID NO: 546740 - DNA, 120 bp, Artificial Sequence
  ENSG00000167967_28 (sequence is synthesized)
cctcgtggcagcctttctgcgggcacagcctgcaggaggaggaagcgttgggcactgggccttcctcaggtgtccacagtggccgggggcacacccaggcaccagggagtcattgggctg

SEQ ID NO: 546741 - DNA, 120 bp, Artificial Sequence
  ENSG00000167967_29 (sequence is synthesized)
tgctctctcccgtcagctttcccgggtggtctctgccgtgtccctcccagaatcttccccacttccctgccaccccctggttcctgctccctgcccgtaggcagcaacatccaccaggca

SEQ ID NO: 546742 - DNA, 120 bp, Artificial Sequence
  ENSG00000167967_30 (sequence is synthesized)
cccaccagaatggcccactcgcccagcagcggctctggagggtgggtacagggtggacgggactctcccgcctctctagctgggctcggacttgctgctggccgtggcctgccctcccca

SEQ ID NO: 546743 - DNA, 120 bp, Artificial Sequence
  ENSG00000167967_31 (sequence is synthesized)
gtgctccctctggtgtgggagtggtgattgctacactggtcctcatggggcttttatgagcgtgcaatgccaggactctttgatggctactttttaagtgaagatgtctctctccctgat

SEQ ID NO: 546744 - DNA, 120 bp, Artificial Sequence
  ENSG00000167967_32 (sequence is synthesized)
gtgctgtgggaggggctgttgcgaggtctggatgggcaggctctcatcggggacagatgcttgtgcaggggggcattcagaggcagccagggcctgggcaggttgagggagctaggggct

SEQ ID NO: 546745 - DNA, 120 bp, Artificial Sequence
  ENSG00000167967_33 (sequence is synthesized)
gctggggttgggggtgcggcaggggcgagtggctaggtgtgcagacgcgagggaaggagctgtctagggacctgatgctgtgggaggtggggcggggcatggctgctgcctggggagcct

SEQ ID NO: 546746 - DNA, 120 bp, Artificial Sequence
  ENSG00000167967_34 (sequence is synthesized)
gctggaccggggctgaggcaggcggggagtgggcagctggacaggaagtaggtttgggcaccaggcggaacctggccttgggcagccctggggactggctgcagcaggaagagggggtgg

SEQ ID NO: 546747 - DNA, 120 bp, Artificial Sequence
  ENSG00000167967_35 (sequence is synthesized)
aggagccgtggcggaggccaacccggggcctgggaagggcacctgtgagcaggctgctctccaggaggcagccagggcacctgtctcacctccgtgctgcctttccctggcattcctgcg

SEQ ID NO: 546748 - DNA, 120 bp, Artificial Sequence
  ENSG00000167967_36 (sequence is synthesized)
accaagacactcatcaatgccactcagagctcggaatgttcatgtgggaggtggggcgggctctggccttgacctggcgtttggtttctgggatggtggcgtcacctgggagcatgaact

SEQ ID NO: 546749 - DNA, 120 bp, Artificial Sequence
  ENSG00000167967_37 (sequence is synthesized)
ccttaggttctggcggggtctctgggctgggtctctggccagccaggcccctttccacccacctaaactctagcagcctccagccctaggctcagcacccctccctgtgcttcagcagcc

SEQ ID NO: 546750 - DNA, 120 bp, Artificial Sequence
  ENSG00000167967_38 (sequence is synthesized)
cctcttggcacccctgccactctggcacccctgggattttcccctttgcgggcatcctgggtactctgtgtgtgcccttggccagtcagcaggcccggtgggcttagtccagggctgcta

SEQ ID NO: 546751 - DNA, 120 bp, Artificial Sequence
  ENSG00000167967_39 (sequence is synthesized)
gctctcctgttggcctctagtggagatggcagagggtcctgcctgctggtggccaagggctggggcgtgccaggtcctgtctttgcgggtgcaggggtgcggtcagctgtgtgggcagtt

SEQ ID NO: 546752 - DNA, 120 bp, Artificial Sequence
  ENSG00000167967_40 (sequence is synthesized)
ggaacccacctccaggccctcctgccgcttcgcggaaaaagttcgcgtctcctctggcctcgcagcagccatgttcccccaggtcctccccatcagaggcctctgtcctttggaagatca

SEQ ID NO: 546753 - DNA, 120 bp, Artificial Sequence
  ENSG00000167967_41 (sequence is synthesized)
ctcctggggcatcgagcgtgtaagggctcgggcaggagaggctcttaattgtttctgagtcaccacgcttttgtcgtgtttcaagagaacagcttgtcaaaacaagacgccagccggact

SEQ ID NO: 546754 - DNA, 120 bp, Artificial Sequence
  ENSG00000167967_42 (sequence is synthesized)
gaggtggtttctaagcagtggcttcacagctgtttcccacttgtcatctttatgagcagaaaacctgaactgtgtttacaacctagctttgcacattgtcagatttttcccagcatcctc

SEQ ID NO: 546755 - DNA, 120 bp, Artificial Sequence
  ENSG00000167967_43 (sequence is synthesized)
cagaagtgcaaaagcccagcttcctcgcctcaggctgtcccgggtgtctggagagcgttcactctcccaggccaagcctgccttgggacggggctctggccaggcctgcctgccctgctg

SEQ ID NO: 546756 - DNA, 120 bp, Artificial Sequence
  ENSG00000167967_44 (sequence is synthesized)
cagtggcccagcccatctcctccgatggaagagtggccccggacgcacatcctccctatgttggtgggagcagtggcaggagcagtggcagcgagcaggacaggcggctgtctcttcacc

SEQ ID NO: 546757 - DNA, 120 bp, Artificial Sequence
  ENSG00000167967_45 (sequence is synthesized)
caaggaccttgtcaccaggattcgcacgtcctcctggctttggggatggggcatctgtgctccatggtgggtctccctgtggacacatttaggggccctggagcatctctgggcagcctg

SEQ ID NO: 546758 - DNA, 120 bp, Artificial Sequence
  ENSG00000167967_46 (sequence is synthesized)
acagagtcgggaggtgtctctccacctctcactctgacctggagaggtgaatgggaccttggctgttgctcggacctgtgtgttgagggctcagtgcaggttgggtccagggtgtggctc

SEQ ID NO: 546759 - DNA, 120 bp, Artificial Sequence
  ENSG00000167967_47 (sequence is synthesized)
agagcagcaggtcccctcccctggagccagcagtctctggggtctctggacaggggcaggtcctggggcttaggcccagatgcttctcctaggtggtgggcacatcaaagaggtcatcgt

SEQ ID NO: 546760 - DNA, 120 bp, Artificial Sequence
  ENSG00000167967_48 (sequence is synthesized)
accttcccgacagcagccaccctggaggcccacaagaggggccacaccggtaggtgatgggtgggtgtgtggcccatggcagtggatgggctataggtggccggggtgcttctgggtgtc

SEQ ID NO: 546761 - DNA, 120 bp, Artificial Sequence
  ENSG00000167967_49 (sequence is synthesized)
cagggtgggtccatagacagcagggagccaggggatctgtgggcaggtggcaggcggcctggcgggcccgcgggtgatgggcttggcctgatgctgtgtgtggctgcagggccgaggccg

SEQ ID NO: 546762 - DNA, 120 bp, Artificial Sequence
  ENSG00000167967_50 (sequence is synthesized)
tccccccatcctgctccctggccgtggcccaggtgcacccccttccctgcctccaccatgctcagtcttgacccagcccctcccttgggccacaggcgggaggggagagctgtagtctgt

SEQ ID NO: 546763 - DNA, 120 bp, Artificial Sequence
  ENSG00000167967_51 (sequence is synthesized)
gcttcctcggcctcccggcgcccttcagcgaggaagggctggaggaaaagccagacggagccctggctgcccagcctccgccttcccaggccctgctgacagcaggctcgttgcagatga

SEQ ID NO: 546764 - DNA, 120 bp, Artificial Sequence
  ENSG00000167968_0 (sequence is synthesized)
agagctactgccagagggagtcagtgcagtcctgtgtcggacacgcccgcagcctggacccgggatccccatccccctaggatctctgagcctcgggcctctgcacccacatccaaggcg

SEQ ID NO: 546765 - DNA, 120 bp, Artificial Sequence
  ENSG00000167968_1 (sequence is synthesized)
gcagcgtctgtccctcccagcctctcgctccgcgccatgggcgggccccgggctctgctggccgcactctgggcgctggaagccgccgggaccgccgcgcttcgcatcggagccttcaac

SEQ ID NO: 546766 - DNA, 120 bp, Artificial Sequence
  ENSG00000167968_2 (sequence is synthesized)
attcagagcttcggtgacagcaaagtgtcggaccccgcttgcggcagcatcatcgcgaagatcctggctggctatgacctcgcgctggtgcaggaggtgcgagacccagacctcagcgcc

SEQ ID NO: 546767 - DNA, 120 bp, Artificial Sequence
  ENSG00000167968_3 (sequence is synthesized)
gtgtccgcgctcatggagcagatcaacagcgtgtccgagcacgagtacagctttgtgagcagccagcccctgggccgggaccagtacaaggagatgtacctgttcgtgtacaggaaagac

SEQ ID NO: 546768 - DNA, 120 bp, Artificial Sequence
  ENSG00000167968_4 (sequence is synthesized)
gcggtgtcggtcgtggacacctacctgtacccagaccccgaggacgtcttcagccgcgagcccttcgtggtcaagttctcggcccccggcaccggtgagcgggccccgcccctcccctcc

SEQ ID NO: 546769 - DNA, 120 bp, Artificial Sequence
  ENSG00000167968_5 (sequence is synthesized)
cgcagcagcacagaacctggtgctgatcccgctgcacgcggcgccgcatcaagccgtggcggagatcgacgcgctctacgacgtgtacctggacgtgatcgacaagtggggcaccgacga

SEQ ID NO: 546770 - DNA, 120 bp, Artificial Sequence
  ENSG00000167968_6 (sequence is synthesized)
catgctgttcctgggcgacttcaacgccgactgcagctatgtgcgggcgcaggactgggccgccatccgtctgaggagcagtgaggtcttcaagtggctcatccctgacagcgccgacac

SEQ ID NO: 546771 - DNA, 120 bp, Artificial Sequence
  ENSG00000167968_7 (sequence is synthesized)
cacggtgggcaactcagactgcgcctacgaccgcattgtggcctgtggcgcccgcctgcgccggagcctgaagccccagtcggccaccgtgcacgacttccaggaggaattcggcctgga

SEQ ID NO: 546772 - DNA, 120 bp, Artificial Sequence
  ENSG00000167968_8 (sequence is synthesized)
ccagactcaggctcttgccatcagcgaccactttccagtggaggtgaccctcaagttccaccgatgactcgaggcctggctggggcatgccacctgcagaccctggctctgaggaatggc

SEQ ID NO: 546773 - DNA, 120 bp, Artificial Sequence
  ENSG00000167968_9 (sequence is synthesized)
ccaacagtggccccttcagggtggcagccacccttcagtgaggccccaaggcagagtcggctgggcgtggaccaggggccatggacacgtgatgtgctgctctgtacctccgttccccat

SEQ ID NO: 546774 - DNA, 120 bp, Artificial Sequence
  ENSG00000167968_10 (sequence is synthesized)
ctgtgggacgggctgcatccagcgacctcatggggtgttgtgagccccatgaggggtgcagggggcactgcccggcagatgtctgctcaataaatgagctgctcccggtcgggccccaca

SEQ ID NO: 546775 - DNA, 120 bp, Artificial Sequence
  ENSG00000167968_11 (sequence is synthesized)
ctgcctcccaggccactcctagactcacgtgcctggccgccccacccaggggcttctgccagccctggcggcgccttggtgctgtgtgggtgtcattggcatgttgaccaacagcctcct

SEQ ID NO: 546776 - DNA, 120 bp, Artificial Sequence
  ENSG00000167968_12 (sequence is synthesized)
gccctgcccagctggagctgtgcccccagctgcgctgcctgaggcctgtgggtgggtgggaggaccagggacggggacagggagatctgggagcctcggcctccaccgcagggtgagcag

SEQ ID NO: 546777 - DNA, 120 bp, Artificial Sequence
  ENSG00000167968_13 (sequence is synthesized)
gtggagcagcagcaggagatgctgggtagggagtgtggctggtcctacctgcgctgccttgctttccctgaagggattctgctcagggaggcagagtctaggcgacctaatttctagggg

SEQ ID NO: 546778 - DNA, 120 bp, Artificial Sequence
  ENSG00000167968_14 (sequence is synthesized)
cgaggacaagaacacagccgcaccgggatgtggctgaccgtctacctccctcctagggggctggcaggggcttctgggacggttttgggacaggtctggggcaccagaaccggctcaggc

SEQ ID NO: 546779 - DNA, 120 bp, Artificial Sequence
  ENSG00000167968_15 (sequence is synthesized)
aggtctcccaccccttaccctgggggtctccatgggaatgaaagccaggagttcatcaggcacccagctgagtcgagggggcgggacccagtgcagcccggcccctccctggcccaggac

SEQ ID NO: 546780 - DNA, 120 bp, Artificial Sequence
  ENSG00000167968_16 (sequence is synthesized)
ctcaaataccggcccctgccttggtgccagagctactgccagagggagtcagtgcagtcctgtgtcggacacgcccgcagcctggacccgggatccccatccccctaggatctctgagcc

SEQ ID NO: 546781 - DNA, 120 bp, Artificial Sequence
  ENSG00000167968_17 (sequence is synthesized)
tcgggcctctgcacccacatccaaggtgagtctctcggctgccctgagctggggctggatgggccggaccctccattccggctgcagcttcccgcgcagtgagaaggcagcggtccctga

SEQ ID NO: 546782 - DNA, 120 bp, Artificial Sequence
  ENSG00000167968_18 (sequence is synthesized)
gagcccagcagtgccctgggagcctgcagaacgcaggggcggattccgcgtcgcactggccgtcaaggggcggccgcggagggaaggggtgggtcggtgggtctgacagcgggtctgcgt

SEQ ID NO: 546783 - DNA, 80 bp, Artificial Sequence
  ENSG00000167969_0 (sequence is synthesized)
atcccgcgcgttgcggtcaagatggcgctggtggcttctgtgcgagtcccggcgcgcgttctgctccgcgcgggggcccg

SEQ ID NO: 546784 - DNA, 120 bp, Artificial Sequence
  ENSG00000167969_1 (sequence is synthesized)
ggcggcggagacggcgcgcggcgcttcgggagccagcgggtgctggtggagccggacgcgggcgcaggggtcgctgtgatgaaattcaagaaccccccagtgaacagcctgagcctggag

SEQ ID NO: 546785 - DNA, 120 bp, Artificial Sequence
  ENSG00000167969_2 (sequence is synthesized)
tttctgacggagctggtcatcagcctggagaagctggagaatgacaagagcttccgcggtgtcattctgacctcggaccgcccgggtgtcttctcggccggcctggacctgacggagatg

SEQ ID NO: 546786 - DNA, 120 bp, Artificial Sequence
  ENSG00000167969_3 (sequence is synthesized)
tgtgggaggagccccgcccactacgctgggtactggaaggccgttcaggagctgtggctgcggttgtaccagtccaacctggtgctggtctccgccatcaacggagcctgccccgctgga

SEQ ID NO: 546787 - DNA, 120 bp, Artificial Sequence
  ENSG00000167969_4 (sequence is synthesized)
ggctgcctggtggccctgacctgtgactaccgcatcctggcggacaaccccaggtactgcataggactcaatgagacccagctgggcatcatcgcccctttctggttgaaagacaccctg

SEQ ID NO: 546788 - DNA, 120 bp, Artificial Sequence
  ENSG00000167969_5 (sequence is synthesized)
gagaacaccatcgggcaccgggcggcggagcgtgccctgcagctggggctgctcttcccgccggcggaggccctgcaggtgggcatagtggaccaggtggtcccggaggagcaggtgcag

SEQ ID NO: 546789 - DNA, 120 bp, Artificial Sequence
  ENSG00000167969_6 (sequence is synthesized)
ccatgatgcgaaaggccacggccagccgcctggtcacgcagcgcgatgcggacgtgcagaacttcgtcagcttcatctccaaagactccatccagaagtccctgcagatgtacttagaga

SEQ ID NO: 546790 - DNA, 120 bp, Artificial Sequence
  ENSG00000167969_7 (sequence is synthesized)
ggctcaaagaagaaaaaggctaacgattgggctgccacaggcttacggccacacgtgcccctgtgggtcccagggaggtcttaaacaaggtatttttcaacttaaaagtactgccagcgt

SEQ ID NO: 546791 - DNA, 120 bp, Artificial Sequence
  ENSG00000167969_8 (sequence is synthesized)
ttcattttgctgatgttacgtagaagttcctgttcctcatagcccagtggcccaaggcccagccacacacaaacacacatgggtgcctgtgcccgtcaggcaaggggagttggagggcag

SEQ ID NO: 546792 - DNA, 120 bp, Artificial Sequence
  ENSG00000167969_9 (sequence is synthesized)
ccttttgacttgggattgtgactggcaggggatgccattctggacctggtgaggttgccacggagtgtctctgttcccaaggcagaatcgtaagtcaagtccctggtcatccattctggc

SEQ ID NO: 546793 - DNA, 120 bp, Artificial Sequence
  ENSG00000167969_10 (sequence is synthesized)
ctttggactgcctgctcttaggtgtaaggccaggtggtcttggcccccatgacccacacagaactccccagggaaaagccctttggtcactgcccttactcatcaggatgaagagcgcac

SEQ ID NO: 546794 - DNA, 120 bp, Artificial Sequence
  ENSG00000167969_11 (sequence is synthesized)
agtgaatcagagcaactgggggatcctgagccagcgggagtgggactctggaggcagctgtgctgccagggatccaaatgtcccttaagaaggattttgcaagaaccaaactcatccaaa

SEQ ID NO: 546795 - DNA, 120 bp, Artificial Sequence
  ENSG00000167969_12 (sequence is synthesized)
gctggctgttctgggccagcgccagggggtgggacagacactgtcctgcccttggaatctctcacaggggaaggggacggttggagaggccctgagatgtgcacaggtgagcgccatcgc

SEQ ID NO: 546796 - DNA, 120 bp, Artificial Sequence
  ENSG00000167969_13 (sequence is synthesized)
agaccacggggcgtgttgagaaaggtgggcctcgggtgagggccctggcctgggtcaatcagacaagacccagaaaagagccagtgggtagggaccagggcctggggttgatgccagcct

SEQ ID NO: 546797 - DNA, 120 bp, Artificial Sequence
  ENSG00000167969_14 (sequence is synthesized)
aacacagctgggaccttactgcccagtgctcccagtggtctgaccaaaaccccacaccagacagtacaaaggcccactcccgagctgccgcttacggcccagcgggaacagactgtattc

SEQ ID NO: 546798 - DNA, 120 bp, Artificial Sequence
  ENSG00000167969_15 (sequence is synthesized)
ttatctttcggcatttctctgcaaataaaaaggtgccactgcggtccggcctttgtgcacttgcccttgtgctgagcaaggcgggtggcctgttcttaccgctgggttctgctgccccca

SEQ ID NO: 546799 - DNA, 120 bp, Artificial Sequence
  ENSG00000167969_16 (sequence is synthesized)
cccccatttcggtgactaaacctgcagctctgatcctgttcccaaaggggcaggaggccgggctcaccccaggcagcccctggcctccctgacggccccctcgggaggggttccgtgctt

SEQ ID NO: 546800 - DNA, 120 bp, Artificial Sequence
  ENSG00000167969_17 (sequence is synthesized)
tgatcgcctttccagcgccgatactgcagtagctgggcccggccgagagctcgcggtcacgaacaccggcagcctcttgcctacagtgtcccgcgctgtagaagagcctgccctggcgct

SEQ ID NO: 546801 - DNA, 120 bp, Artificial Sequence
  ENSG00000167969_18 (sequence is synthesized)
gagctggtcgtggctgcttcagcagtgggcctgcgcctccttgtaggccagccctggcccagatccaggtgcctgccccggaagcgcgcggctgcccggggtgaagccggagggcggcga

SEQ ID NO: 546802 - DNA, 120 bp, Artificial Sequence
  ENSG00000167969_19 (sequence is synthesized)
cgatgatgctggggagaccagaaggttctccacccaaaggttttctgtggacatcgtgacttcgggagactgttgataatcacagccatgtgggtgtcaggaggctgctgtaacaacgca

SEQ ID NO: 546803 - DNA, 120 bp, Artificial Sequence
  ENSG00000167969_20 (sequence is synthesized)
gaccgggtggcccagaccgcagaagctcatctcacggtgctggagaccagaggtgcaaaatcaaagtgtgggcaggactgcacttcctccctgcgttccagggaggctccttcctgcccc

SEQ ID NO: 546804 - DNA, 120 bp, Artificial Sequence
  ENSG00000167969_21 (sequence is synthesized)
gcccacttctgctggctccaggcctccctgggcttgtgggcgcctcgctctaatctctgcctccatccttacgcagctttctcccctgtgtttctgtgggtctcaggtctctctctccct

SEQ ID NO: 546805 - DNA, 120 bp, Artificial Sequence
  ENSG00000167969_22 (sequence is synthesized)
tctcaggacacctgccatgtgatttaggacctaccttaaatccaagatgatcccaacttaattacatctgcagagactctttccaaataaggtcacacttccaagttccagagcagtggt

SEQ ID NO: 546806 - DNA, 120 bp, Artificial Sequence
  ENSG00000167969_23 (sequence is synthesized)
tagggcttggacctatcttttggggcacacttttcaacctactacaaagacaattgtccacttcatagaaaaagagctggtcatatcagcgatggtatagaccagggcccagcaaattct

SEQ ID NO: 546807 - DNA, 120 bp, Artificial Sequence
  ENSG00000167969_24 (sequence is synthesized)
ctttatcccgcgcgttgcggtcaagatggcgctggtggcttctgtgcgagtcccggcgcgcgttctgctccgcgcgggtgcgaaacccggggtgggcagggatcgggccggggccggggc

SEQ ID NO: 546808 - DNA, 120 bp, Artificial Sequence
  ENSG00000167969_25 (sequence is synthesized)
tgcttgttgtggagggaacagacccgcctggggccatgtggtgagtgggtgtctgcatttccaggttgaaagacaccctggagaacaccatcgggcaccgggcggcggagcgtgccctgc

SEQ ID NO: 546809 - DNA, 120 bp, Artificial Sequence
  ENSG00000167971_0 (sequence is synthesized)
gagccgcgccgagctcacgagcgcagccgcgtcgctgcggccccggccgcgccatggggaaggagcaggagctggtgcaggcggtgaaggcggaggacgtagggaccgcgcagaggctgc

SEQ ID NO: 546810 - DNA, 120 bp, Artificial Sequence
  ENSG00000167971_1 (sequence is synthesized)
tgcagaggccgcggcccgggaaggccaagctcctgggttccaccaagaagatcaatgtcaacttccaggacccggatggcttctcggctctgcaccatgcggccctgaacggcaacacgg

SEQ ID NO: 546811 - DNA, 120 bp, Artificial Sequence
  ENSG00000167971_2 (sequence is synthesized)
aattgatcagcctgctgctggaggcccaggccgctgtggacatcaaggacaacaaaggcatgcggccgctgcactatgcggcctggcagggccggaaggagcccatgaagctggtgctga

SEQ ID NO: 546812 - DNA, 120 bp, Artificial Sequence
  ENSG00000167971_3 (sequence is synthesized)
aggcgggctcggccgtgaacatcccgtctgatgagggccacatccccctgcacctggcggcccagcatggtcactatgatgtgtctgagatgctgctacagcaccagtctaacccgtgca

SEQ ID NO: 546813 - DNA, 120 bp, Artificial Sequence
  ENSG00000167971_4 (sequence is synthesized)
tggtggacaactcggggaagacgcccctggacctggcctgcgagttcggccgcgttggggtggtccagctgctcctcagcagcaatatgtgtgcggcgctgctggagccccggccgggag

SEQ ID NO: 546814 - DNA, 120 bp, Artificial Sequence
  ENSG00000167971_5 (sequence is synthesized)
acgccaccgaccccaacggcaccagccctttgcacctcgcagctaaaaacggccacatcgacatcatcaggctcctcctccaagccggcatcgacattaaccgccagaccaagtccggca

SEQ ID NO: 546815 - DNA, 120 bp, Artificial Sequence
  ENSG00000167971_6 (sequence is synthesized)
cggccctgcacgaggctgcgctctgcggaaagacagaggtggtgcggctgctgctggatagcgggatcaatgcccacgtgaggaacacctacagccagacagccctggacatcgtgcacc

SEQ ID NO: 546816 - DNA, 120 bp, Artificial Sequence
  ENSG00000167971_7 (sequence is synthesized)
agttcaccacgtcccaggccagcagggagatcaagcagctgttgcgagaggcctcagcggccctgcaggtccgggcgaccaaggattattgcaacaattacgacctgaccagcctcaacg

SEQ ID NO: 546817 - DNA, 120 bp, Artificial Sequence
  ENSG00000167971_8 (sequence is synthesized)
tgaaggcaggggacatcatcacagtcctcgagcagcatccggatggccggtggaagggctgcatccatgacaaccggacgggcaatgaccgggtgggctacttcccgtcctccctgggcg

SEQ ID NO: 546818 - DNA, 120 bp, Artificial Sequence
  ENSG00000167971_9 (sequence is synthesized)
aggccattgtcaagcgagcaggttcccgagcaggcactgaaccaagcctgccccagggaagcagctcatcgggaccctctgcacccccagaggagatctgggtgctgaggaagccttttg

SEQ ID NO: 546819 - DNA, 120 bp, Artificial Sequence
  ENSG00000167971_10 (sequence is synthesized)
caggtggggaccgaagcggcagcattagcggcatggctggcggccggggcagcgggggtcacgccctacacgcgggctctgaaggcgtcaagctcctggcaacggtgctttcccagaagt

SEQ ID NO: 546820 - DNA, 120 bp, Artificial Sequence
  ENSG00000167971_11 (sequence is synthesized)
ccgtctctgagtccggcccgggggacagccccgccaagcctccggaaggctctgcaggtgtggcccggtcccagcctccagtggcccacgccgggcaggtctatggggagcagccgccca

SEQ ID NO: 546821 - DNA, 120 bp, Artificial Sequence
  ENSG00000167971_12 (sequence is synthesized)
agaagctggagccagcatcggagggcaagagctctgaggccgtgagccagtggctcaccgcgttccagctgcagctctacgcccccaacttcatcagcgccggctacgacctgcccacca

SEQ ID NO: 546822 - DNA, 120 bp, Artificial Sequence
  ENSG00000167971_13 (sequence is synthesized)
tcagccgcatgactcccgaggacctcacggccattggtgtcaccaagccgggccaccggaagaagatcgcggcagagatcagcggcctaagcatccctgactggctgcctgagcacaaac

SEQ ID NO: 546823 - DNA, 120 bp, Artificial Sequence
  ENSG00000167971_14 (sequence is synthesized)
ccgctaacctggccgtgtggctgtccatgatcggcctggcccagtactacaaggtgttggtggacaatggctacgagaacattgatttcatcaccgacatcacctgggaggacctgcagg

SEQ ID NO: 546824 - DNA, 120 bp, Artificial Sequence
  ENSG00000167971_15 (sequence is synthesized)
agatcggcatcaccaagctggggcaccagaagaagctgatgctcgctgtgaggaagctggcagagctgcagaaggctgaatacgccaagtatgaggggggccccctgcgccggaaggcgc

SEQ ID NO: 546825 - DNA, 120 bp, Artificial Sequence
  ENSG00000167971_16 (sequence is synthesized)
cccagtctcttgaagtgatggccatcgagtcgccgcccccgcctgagcccacaccggccgactgccagtcccctaaaatgaccaccttccaggacagcgagctcagtgacgagctgcagg

SEQ ID NO: 546826 - DNA, 120 bp, Artificial Sequence
  ENSG00000167971_17 (sequence is synthesized)
ctgccatgactggcccggctgaggtggggcccaccactgagaagccctccagccacctgccacccaccccgagggccaccacgcggcaggactccagcctgggtggtcgggcacggcaca

SEQ ID NO: 546827 - DNA, 120 bp, Artificial Sequence
  ENSG00000167971_18 (sequence is synthesized)
tgagcagctcgcaggagctgctgggagatgggccccctgggcccagcagccccatgtctcgaagccaggagtacctcctggatgagggccccgcccccggcaccccgcccagggaggccc

SEQ ID NO: 546828 - DNA, 120 bp, Artificial Sequence
  ENSG00000167971_19 (sequence is synthesized)
ggcccggccgccacggccacagcatcaagagggccagcgtgccccccgtgcctggcaagccacggcaggtcctcccaccaggcactagccacttcacgcccccccagacgcccaccaaaa

SEQ ID NO: 546829 - DNA, 120 bp, Artificial Sequence
  ENSG00000167971_20 (sequence is synthesized)
cccgaccaggctctccccaggcccttgggggacctcatggtccagccccagctacggccaaggtgaagcccaccccgcagctgctgccgccgacagagcgccccatgtcaccccgctccc

SEQ ID NO: 546830 - DNA, 120 bp, Artificial Sequence
  ENSG00000167971_21 (sequence is synthesized)
tcagtcaccgacgcaccgcggctttgcctacgtgctgccccagcccgtggagggcgaggtggggccggctgccccggggcctgcgcccccacccgtgccgacggctgtgcccacactgtg

SEQ ID NO: 546831 - DNA, 120 bp, Artificial Sequence
  ENSG00000167971_22 (sequence is synthesized)
tgtgcctgccccctgaggccgacgcggagccggggcggcccaagaagcgggcccacagcctgaatcgctatgcggcgtccgacagcgagccggagcgggacgagctgctggtgcctgcgg

SEQ ID NO: 546832 - DNA, 120 bp, Artificial Sequence
  ENSG00000167971_23 (sequence is synthesized)
cgtcaaccgcagccagtcctttgccgtgcggccccgaaagaaggggcccccgccgcccccacccaagcgctccagctcggccctggctagtgccaacctggcggatgagccggtgcctga

SEQ ID NO: 546833 - DNA, 120 bp, Artificial Sequence
  ENSG00000167971_24 (sequence is synthesized)
cgccgagcctgaggatggcctgctgggggtccgggcacagtgccggcgggccagtgacctggccggcagcgtggacacgggtagtgccggcagtgtgaagagcatcgcggccatgctgga

SEQ ID NO: 546834 - DNA, 120 bp, Artificial Sequence
  ENSG00000167971_25 (sequence is synthesized)
gctgtcctccattgggggtgggggccgggctgcccgcaggcctcctgagggccaccccactccccgccctgccagcccagagccgggccgggtggccaccgtgctggcctcagtgaaaca

SEQ ID NO: 546835 - DNA, 120 bp, Artificial Sequence
  ENSG00000167971_26 (sequence is synthesized)
caaagaggccatcgggcctggcggggaggtggtgaaccggcgccgcacgctcagcgggccagtcaccggacttctggccactgcccgccgggggcctggggagtcggcagacccaggccc

SEQ ID NO: 546836 - DNA, 120 bp, Artificial Sequence
  ENSG00000167971_27 (sequence is synthesized)
ctttgtggaggatggcactggccggcagcggcctcggggtccctccaagggcgaggcgggtgtcgaaggcccgcccttggccaaggtggaagccagcgccacactcaagaggcgcatccg

SEQ ID NO: 546837 - DNA, 120 bp, Artificial Sequence
  ENSG00000167971_28 (sequence is synthesized)
ggccaagcagaaccagcaggagaacgtcaagttcatcctgaccgagtctgacacggtcaagcgcaggcccaaggccaaggagcgggaggccgggcctgagccaccaccgccactgtccgt

SEQ ID NO: 546838 - DNA, 120 bp, Artificial Sequence
  ENSG00000167971_29 (sequence is synthesized)
gtaccataatggcactggcaccgtgcgccgccgaccggcctcggagcaggctgggcctccggagctgcctccaccgcccccgcctgccgaacccccgcccaccgacctggcgcacctacc

SEQ ID NO: 546839 - DNA, 120 bp, Artificial Sequence
  ENSG00000167971_30 (sequence is synthesized)
cccattgcccccgcccgagggcgaagcccggaagccggccaagccgcctgtctctcccaagcccgtcctgacgcagcctgtgcccaagctccagggctcgcccacacccacctccaagaa

SEQ ID NO: 546840 - DNA, 120 bp, Artificial Sequence
  ENSG00000167971_31 (sequence is synthesized)
agaaggtgccgctgccaggccctggcagcccagaggtgaagcgcgcccacggcacgccaccgcccgtgtctcccaagccgccgccgccgcccacagcgcccaagcccgtcaaggcggtcg

SEQ ID NO: 546841 - DNA, 80 bp, Artificial Sequence
  ENSG00000167971_32 (sequence is synthesized)
ccttcgggcagcgccggcccttcacccgcaccctcgcccgcgcgacagccgcccgccgccctcgccaagccgcccggtac

SEQ ID NO: 546842 - DNA, 80 bp, Artificial Sequence
  ENSG00000167971_33 (sequence is synthesized)
gccgccgccgccgcgccccccgccccgcccgaaggcgcctcgccaggggacagcgcccggcagaaactggaggagacaag

SEQ ID NO: 546843 - DNA, 120 bp, Artificial Sequence
  ENSG00000167971_34 (sequence is synthesized)
ccggcagaaactggaggagacaagcgcgtgcctggccgcggcgctgcaggcggtggaggagaagatccggcaggaggacgcgcagggcccgcgcgactcggcggcggaaaagagcactgg

SEQ ID NO: 546844 - DNA, 120 bp, Artificial Sequence
  ENSG00000167971_35 (sequence is synthesized)
cagcatcctggacgacatcggcagcatgttcgacgacctggccgaccagctggatgccatgctggagtgaacgccgcctggccgggccctcccgcgccgcccgggccctccccgcacact

SEQ ID NO: 546845 - DNA, 120 bp, Artificial Sequence
  ENSG00000167971_36 (sequence is synthesized)
cactgacctatacctcaggatgggcgcgtctgggcgcggcgcgagcggccgggcagggccctgcagaagcacaactccggcccctggacccgggccggggcgcccaccggggaccgcctg

SEQ ID NO: 546846 - DNA, 120 bp, Artificial Sequence
  ENSG00000167971_37 (sequence is synthesized)
ggggctccaagggctctaggcagaccctgcgcccgcgggtcctccccacctgctgctccccgtgcaatacctgctgggcctcctgcccgcgcgggaggggagggcgccccgggaccaggg

SEQ ID NO: 546847 - DNA, 120 bp, Artificial Sequence
  ENSG00000167971_38 (sequence is synthesized)
atggggcagcgcacaggcccgggcccagcacagaactgcccatcgggacgcccggccagccgctcgggcgcagcacaagggacaggggaccaaggtcagggcccccctgccccaccgcac

SEQ ID NO: 546848 - DNA, 120 bp, Artificial Sequence
  ENSG00000167971_39 (sequence is synthesized)
ccccagaatataagctatcaagagtattaatttattgggaatgagctgaggcggatttccccagagaaacaaaaaggtataactttaacaaatatatatttaaagaaagaaatattattg

SEQ ID NO: 546849 - DNA, 120 bp, Artificial Sequence
  ENSG00000167971_40 (sequence is synthesized)
attctatagaaaaccatttaccaactgaaaggacacgaagtctagctccggacaaaagctgttagaggcccaggctgtctgcctgcggtccttcctccggccagagtggaggccccaggc

SEQ ID NO: 546850 - DNA, 120 bp, Artificial Sequence
  ENSG00000167971_41 (sequence is synthesized)
tgctagcacaggtggaaggctggggcccgggggcgggtgctctgccgggggctcctccgtgcttctctcctaagttctctgcgccccaagaactcgaggttgtgccttgctctcggcggc

SEQ ID NO: 546851 - DNA, 120 bp, Artificial Sequence
  ENSG00000167971_42 (sequence is synthesized)
cgtgtcctcctcctggcgtggctgcgtcccagggcgcgggtgggtttggtgaatgtgggtgtgtcagcgtggcagccacgtggaagcagggcatgtagcaggccaggccacgggcttgca

SEQ ID NO: 546852 - DNA, 120 bp, Artificial Sequence
  ENSG00000167971_43 (sequence is synthesized)
gctcctctgagggtgtgcctggccccctctccaggggctgtgcaggcagcccatccaccccagtggagttcccacggacgcttctgctcatggtccaaggctgtgttgtgtggtcattct

SEQ ID NO: 546853 - DNA, 120 bp, Artificial Sequence
  ENSG00000167971_44 (sequence is synthesized)
cgccctcccttttcctctctcctcctgccccctccaagaagtactgactggtctcctctatcgtgtttgctgatccacagtgttgggcacaactttgacgtttcttaaaaaaaaaattta

SEQ ID NO: 546854 - DNA, 120 bp, Artificial Sequence
  ENSG00000167971_45 (sequence is synthesized)
aaaaatgccgaaaaccagcgattgtggtgtggggcgggtggaggcggctggcggaggtggcgtcccggcgtgcagggccccttcctgctgtctcaccccgtgtttccctgcgagtggacg

SEQ ID NO: 546855 - DNA, 120 bp, Artificial Sequence
  ENSG00000167971_46 (sequence is synthesized)
tgcccagctgtccccccaggcctctcctcagagggcggcacaggctgggctccagcaggtgggcaggggaggtctgggcaaggcgctgccgtcggctgtcaataaacagcaggaaacaga

SEQ ID NO: 546856 - DNA, 120 bp, Artificial Sequence
  ENSG00000167971_47 (sequence is synthesized)
tagcagggagggcctcagccttagggtccccagggttcagcagcagcctggggctcagggcaccagcttctggcttggggatagggcgggagcaggcagggtcccaggtccctggtcagg

SEQ ID NO: 546857 - DNA, 120 bp, Artificial Sequence
  ENSG00000167972_0 (sequence is synthesized)
agtagcgggttgcaggcgcaccctcccctccagggcggccacgcagctgtcagtgccgccgccactgcgaggctggagcggagcccgggtggccgagggaggggaccccgcgagagggcc

SEQ ID NO: 546858 - DNA, 120 bp, Artificial Sequence
  ENSG00000167972_1 (sequence is synthesized)
gcgcgccggccgccgccgccccggcgcccaggctcggtgctggagagtcatgcctgtgagccctgggcacctcctgatgtcctgcgaggtcacggtgttcccaaacctcagggttgccct

SEQ ID NO: 546859 - DNA, 120 bp, Artificial Sequence
  ENSG00000167972_2 (sequence is synthesized)
gccccactccagaggctctcaggccccaccccggagccctctgtgcggagccgcctcctcctggccagttccccagtagtcctgaagggagacctgctgtgtggagcctcttctgggacc

SEQ ID NO: 546860 - DNA, 120 bp, Artificial Sequence
  ENSG00000167972_3 (sequence is synthesized)
cagccatgagtgtggagctgagcaactgaacctgaaactcttccactgtgagtcaaggaggcttttccgcacatgaaggacgctgagcgggaaggactcctctctgcctgcagttgtagc

SEQ ID NO: 546861 - DNA, 120 bp, Artificial Sequence
  ENSG00000167972_4 (sequence is synthesized)
gagtggaccagcaccaggggctctctagactgcccctcctccatcgccttccctgcctctccaggacagagcagccacgtctgcacacctcgccctctttacactcagttttcagagcac

SEQ ID NO: 546862 - DNA, 120 bp, Artificial Sequence
  ENSG00000167972_5 (sequence is synthesized)
gtttctcctatttcctgcgggttgcagcgcctacttgaacttactcagaccacctacttctctagcagcactgggcgtccctttcagcaagacgatggctgtgctcaggcagctggcgct

SEQ ID NO: 546863 - DNA, 120 bp, Artificial Sequence
  ENSG00000167972_6 (sequence is synthesized)
cctcctctggaagaactacaccctgcagaagcggaaggtcctggtgacggtcctggaactcttcctgccattgctgttttctgggatcctcatctggctccgcttgaagattcagtcgga

SEQ ID NO: 546864 - DNA, 120 bp, Artificial Sequence
  ENSG00000167972_7 (sequence is synthesized)
aaatgtgcccaacgccaccatctacccgggccagtccatccaggagctgcctctgttcttcaccttccctccgccaggagacacctgggagcttgcctacatcccttctcacagtgacgc

SEQ ID NO: 546865 - DNA, 120 bp, Artificial Sequence
  ENSG00000167972_8 (sequence is synthesized)
tgccaagaccgtcactgagacagtgcgcagggcacttgtgatcaacatgcgagtgcgcggctttccctccgagaaggactttgaggactacattaggtacgacaactgctcgtccagcgt

SEQ ID NO: 546866 - DNA, 120 bp, Artificial Sequence
  ENSG00000167972_9 (sequence is synthesized)
gctggccgccgtggtcttcgagcaccccttcaaccacagcaaggagcccctgccgctggcggtgaaatatcacctacggttcagttacacacggagaaattacatgtggacccaaacagg

SEQ ID NO: 546867 - DNA, 120 bp, Artificial Sequence
  ENSG00000167972_10 (sequence is synthesized)
ctcctttttcctgaaagagacagaaggctggcacactacttcccttttcccgcttttcccaaacccaggaccaagggaacctacatcccctgatggcggagaacctgggtacatccggga

SEQ ID NO: 546868 - DNA, 120 bp, Artificial Sequence
  ENSG00000167972_11 (sequence is synthesized)
aggcttcctggccgtgcagcatgctgtggaccgggccatcatggagtaccatgccgatgccgccacacgccagctgttccagagactgacggtgaccatcaagaggttcccgtacccgcc

SEQ ID NO: 546869 - DNA, 120 bp, Artificial Sequence
  ENSG00000167972_12 (sequence is synthesized)
gttcatcgcagaccccttcctcgtggccatccagtaccagctgcccctgctgctgctgctcagcttcacctacaccgcgctcaccattgcccgtgctgtcgtgcaggagaaggaaaggag

SEQ ID NO: 546870 - DNA, 120 bp, Artificial Sequence
  ENSG00000167972_13 (sequence is synthesized)
gctgaaggagtacatgcgcatgatggggctcagcagctggctgcactggagtgcctggttcctcttgttcttcctcttcctcctcatcgccgcctccttcatgaccctgctcttctgtgt

SEQ ID NO: 546871 - DNA, 120 bp, Artificial Sequence
  ENSG00000167972_14 (sequence is synthesized)
caaggtgaagccaaatgtagccgtgctgtcccgcagcgacccctccctggtgctcgccttcctgctgtgcttcgccatctctaccatctccttcagcttcatggtcagcaccttcttcag

SEQ ID NO: 546872 - DNA, 120 bp, Artificial Sequence
  ENSG00000167972_15 (sequence is synthesized)
caaagccaacatggcagcagccttcggaggcttcctctacttcttcacctacatcccctacttcttcgtggcccctcggtacaactggatgactctgagccagaagctctgctcctgcct

SEQ ID NO: 546873 - DNA, 120 bp, Artificial Sequence
  ENSG00000167972_16 (sequence is synthesized)
cctgtctaatgtcgccatggcaatgggagcccagctcattgggaaatttgaggcgaaaggcatgggcatccagtggcgagacctcctgagtcccgtcaacgtggacgacgacttctgctt

SEQ ID NO: 546874 - DNA, 120 bp, Artificial Sequence
  ENSG00000167972_17 (sequence is synthesized)
cgggcaggtgctggggatgctgctgctggactctgtgctctatggcctggtgacctggtacatggaggccgtcttcccagggcagttcggcgtgcctcagccctggtacttcttcatcat

SEQ ID NO: 546875 - DNA, 120 bp, Artificial Sequence
  ENSG00000167972_18 (sequence is synthesized)
gccctcctattggtgtgggaagccaagggcggttgcagggaaggaggaagaagacagtgaccccgagaaagcactcagaaacgagtactttgaagccgagccagaggacctggtggcggg

SEQ ID NO: 546876 - DNA, 120 bp, Artificial Sequence
  ENSG00000167972_19 (sequence is synthesized)
gatcaagatcaagcacctgtccaaggtgttcagggtgggaaataaggacagggcggccgtcagagacctgaacctcaacctgtacgagggacagatcaccgtcctgctgggccacaacgg

SEQ ID NO: 546877 - DNA, 120 bp, Artificial Sequence
  ENSG00000167972_20 (sequence is synthesized)
tgccgggaagaccaccaccctctccatgctcacaggtctctttccccccaccagtggacgggcatacatcagcgggtatgaaatttcccaggacatggttcagatccggaagagcctggg

SEQ ID NO: 546878 - DNA, 120 bp, Artificial Sequence
  ENSG00000167972_21 (sequence is synthesized)
cctgtgcccgcagcacgacatcctgtttgacaacttgacagtcgcagagcacctttatttctacgcccagctgaagggcctgtcacgtcagaagtgccctgaagaagtcaagcagatgct

SEQ ID NO: 546879 - DNA, 120 bp, Artificial Sequence
  ENSG00000167972_22 (sequence is synthesized)
gcacatcatcggcctggaggacaagtggaactcacggagccgcttcctgagcgggggcatgaggcgcaagctctccatcggcatcgccctcatcgcaggctccaaggtgctgatactgga

SEQ ID NO: 546880 - DNA, 120 bp, Artificial Sequence
  ENSG00000167972_23 (sequence is synthesized)
cgagcccacctcgggcatggacgccatctccaggagggccatctgggatcttcttcagcggcagaaaagtgaccgcaccatcgtgctgaccacccacttcatggacgaggctgacctgct

SEQ ID NO: 546881 - DNA, 120 bp, Artificial Sequence
  ENSG00000167972_24 (sequence is synthesized)
gggagaccgcatcgccatcatggccaagggggagctgcagtgctgcgggtcctcgctgttcctcaagcagaaatacggtgccggctatcacatgacgctggtgaaggagccgcactgcaa

SEQ ID NO: 546882 - DNA, 120 bp, Artificial Sequence
  ENSG00000167972_25 (sequence is synthesized)
cccggaagacatctcccagctggtccaccaccacgtgcccaacgccacgctggagagcagcgctggggccgagctgtctttcatccttcccagagagagcacgcacaggtttgaaggtct

SEQ ID NO: 546883 - DNA, 120 bp, Artificial Sequence
  ENSG00000167972_26 (sequence is synthesized)
ctttgctaaactggagaagaagcagaaagagctgggcattgccagctttggggcatccatcaccaccatggaggaagtcttccttcgggtcgggaagctggtggacagcagtatggacat

SEQ ID NO: 546884 - DNA, 120 bp, Artificial Sequence
  ENSG00000167972_27 (sequence is synthesized)
aggccatccagctccctgccctgcagtaccagcacgagaggcgcgccagcgactgggctgtggacagcaacctctgtggggccatggacccctccgacggcattggagccctcatcgagg

SEQ ID NO: 546885 - DNA, 120 bp, Artificial Sequence
  ENSG00000167972_28 (sequence is synthesized)
aggagcgcaccgctgtcaagctcaacactgggctcgccctgcactgccagcaattctgggccatgttcctgaagaaggccgcatacagctggcgcgagtggaaaatggtggcggcacagg

SEQ ID NO: 546886 - DNA, 120 bp, Artificial Sequence
  ENSG00000167972_29 (sequence is synthesized)
tcctggtgcctctgacctgcgtcaccctggccctcctggccatcaactactcctcggagctcttcgacgaccccatgctgaggctgaccttgggcgagtacggcagaaccgtcgtgccct

SEQ ID NO: 546887 - DNA, 120 bp, Artificial Sequence
  ENSG00000167972_30 (sequence is synthesized)
tctcagttcccgggacctcccagctgggtcagcagctgtcagagcatctgaaagacgcactgcaggctgagggacaggagccccgcgaggtgctcggtgacctggaggagttcttgatct

SEQ ID NO: 546888 - DNA, 120 bp, Artificial Sequence
  ENSG00000167972_31 (sequence is synthesized)
tcagggcttctgtggaggggggcggctttaatgagcggtgccttgtggcagcgtccttcagagatgtgggagagcgcacggtcgtcaacgccttgttcaacaaccaggcgtaccactctc

SEQ ID NO: 546889 - DNA, 120 bp, Artificial Sequence
  ENSG00000167972_32 (sequence is synthesized)
cagccactgccctggccgtcgtggacaaccttctgttcaagctgctgtgcgggcctcacgcctccattgtggtctccaacttcccccagccccggagcgccctgcaggctgccaaggacc

SEQ ID NO: 546890 - DNA, 120 bp, Artificial Sequence
  ENSG00000167972_33 (sequence is synthesized)
agtttaacgagggccggaagggattcgacattgccctcaacctgctcttcgccatggcattcttggccagcacgttctccatcctggcggtcagcgagagggccgtgcaggccaagcatg

SEQ ID NO: 546891 - DNA, 120 bp, Artificial Sequence
  ENSG00000167972_34 (sequence is synthesized)
tgcagtttgtgagtggagtccacgtggccagtttctggctctctgctctgctgtgggacctcatctccttcctcatccccagtctgctgctgctggtggtgtttaaggccttcgacgtgc

SEQ ID NO: 546892 - DNA, 120 bp, Artificial Sequence
  ENSG00000167972_35 (sequence is synthesized)
gtgccttcacgcgggacggccacatggctgacaccctgctgctgctcctgctctacggctgggccatcatccccctcatgtacctgatgaacttcttcttcttgggggcggccactgcct

SEQ ID NO: 546893 - DNA, 120 bp, Artificial Sequence
  ENSG00000167972_36 (sequence is synthesized)
acacgaggctgaccatcttcaacatcctgtcaggcatcgccaccttcctgatggtcaccatcatgcgcatcccagctgtaaaactggaagaactttccaaaaccctggatcacgtgttcc

SEQ ID NO: 546894 - DNA, 120 bp, Artificial Sequence
  ENSG00000167972_37 (sequence is synthesized)
tggtgctgcccaaccactgtctggggatggcagtcagcagtttctacgagaactacgagacgcggaggtactgcacctcctccgaggtcgccgcccactactgcaagaaatataacatcc

SEQ ID NO: 546895 - DNA, 120 bp, Artificial Sequence
  ENSG00000167972_38 (sequence is synthesized)
agtaccaggagaacttctatgcctggagcgccccgggggtcggccggtttgtggcctccatggccgcctcagggtgcgcctacctcatcctgctcttcctcatcgagaccaacctgcttc

SEQ ID NO: 546896 - DNA, 120 bp, Artificial Sequence
  ENSG00000167972_39 (sequence is synthesized)
agagactcaggggcatcctctgcgccctccggaggaggcggacactgacagaattatacacccggatgcctgtgcttcctgaggaccaagatgtagcggacgagaggacccgcatcctgg

SEQ ID NO: 546897 - DNA, 120 bp, Artificial Sequence
  ENSG00000167972_40 (sequence is synthesized)
cccccagtccggactccctgctccacacacctctgattatcaaggagctctccaaggtgtacgagcagcgggtgcccctcctggccgtggacaggctctccctcgcggtgcagaaagggg

SEQ ID NO: 546898 - DNA, 120 bp, Artificial Sequence
  ENSG00000167972_41 (sequence is synthesized)
agtgcttcggcctgctgggcttcaatggagccgggaagaccacgactttcaaaatgctgaccggggaggagagcctcacttctggggatgcctttgtcgggggtcacagaatcagctctg

SEQ ID NO: 546899 - DNA, 120 bp, Artificial Sequence
  ENSG00000167972_42 (sequence is synthesized)
atgtcggaaaggtgcggcagcggatcggctactgcccgcagtttgatgccttgctggaccacatgacaggccgggagatgctggtcatgtacgctcggctccggggcatccctgagcgcc

SEQ ID NO: 546900 - DNA, 120 bp, Artificial Sequence
  ENSG00000167972_43 (sequence is synthesized)
acatcggggcctgcgtggagaacactctgcggggcctgctgctggagccacatgccaacaagctggtcaggacgtacagtggtggtaacaagcggaagctgagcaccggcatcgccctga

SEQ ID NO: 546901 - DNA, 120 bp, Artificial Sequence
  ENSG00000167972_44 (sequence is synthesized)
tcggagagcctgctgtcatcttcctggacgagccgtccactggcatggaccccgtggcccggcgcctgctttgggacaccgtggcacgagcccgagagtctggcaaggccatcatcatca

SEQ ID NO: 546902 - DNA, 120 bp, Artificial Sequence
  ENSG00000167972_45 (sequence is synthesized)
cctcccacagcatggaggagtgtgaggccctgtgcacccggctggccatcatggtgcaggggcagttcaagtgcctgggcagcccccagcacctcaagagcaagttcggcagcggctact

SEQ ID NO: 546903 - DNA, 120 bp, Artificial Sequence
  ENSG00000167972_46 (sequence is synthesized)
ccctgcgggccaaggtgcagagtgaagggcaacaggaggcgctggaggagttcaaggccttcgtggacctgacctttccaggcagcgtcctggaagatgagcaccaaggcatggtccatt

SEQ ID NO: 546904 - DNA, 120 bp, Artificial Sequence
  ENSG00000167972_47 (sequence is synthesized)
accacctgccgggccgtgacctcagctgggcgaaggttttcggtattctggagaaagccaaggaaaagtacggcgtggacgactactccgtgagccagatctcgctggaacaggtcttcc

SEQ ID NO: 546905 - DNA, 120 bp, Artificial Sequence
  ENSG00000167972_48 (sequence is synthesized)
tgagcttcgcccacctgcagccgcccaccgcagaggaggggcgatgaggggtggcggctgtctcgccatcaggcagggacaggacgggcaagcagggcccatcttacatcctctctctcc

SEQ ID NO: 546906 - DNA, 120 bp, Artificial Sequence
  ENSG00000167972_49 (sequence is synthesized)
aagtttatctcatcctttatttttaatcacttttttctatgatggatatgaaaaattcaaggcagtatgcacagaatggacgagtgcagcccagccctcatgcccaggatcagcatgcgc

SEQ ID NO: 546907 - DNA, 120 bp, Artificial Sequence
  ENSG00000167972_50 (sequence is synthesized)
atctccatgtctgcatactctggagttcactttcccagagctggggcaggccgggcagtctgcgggcaagctccggggtctctgggtggagagctgacccaggaagggctgcagctgagc

SEQ ID NO: 546908 - DNA, 120 bp, Artificial Sequence
  ENSG00000167972_51 (sequence is synthesized)
tgggggttgaatttctccaggcactccctggagagaggacccagtgacttgtccaagtttacacacgacactaatctcccctggggaggaagcgggaagccagccaggttgaactgtagc

SEQ ID NO: 546909 - DNA, 120 bp, Artificial Sequence
  ENSG00000167972_52 (sequence is synthesized)
gaggcccccaggccgccaggaatggaccatgcagatcactgtcagtggagggaagctgctgactgtgattaggtgctggggtcttagcgtccagcgcagcccgggggcatcctggaggct

SEQ ID NO: 546910 - DNA, 120 bp, Artificial Sequence
  ENSG00000167972_53 (sequence is synthesized)
ctgctccttagggcatggtagtcaccgcgaagccgggcaccgtcccacagcatctcctagaagcagccggcacaggagggaaggtggccaggctcgaagcagtctctgtttccagcactg

SEQ ID NO: 546911 - DNA, 120 bp, Artificial Sequence
  ENSG00000167972_54 (sequence is synthesized)
caccctcaggaagtcgcccgccccaggacacgcagggaccaccctaagggctgggtggctgtctcaaggacacattgaatacgttgtgaccatccagaaaataaatgctgaggggacaca

SEQ ID NO: 546912 - DNA, 90 bp, Artificial Sequence
  ENSG00000167972_55 (sequence is synthesized)
gttaccagcccgggctgttgactagtgacagtcatatgggggcagccccactttgcaaaagtatttcttgaagaaatacttttcagttgt

SEQ ID NO: 546913 - DNA, 120 bp, Artificial Sequence
  ENSG00000167972_56 (sequence is synthesized)
tcccatctcctggaggctccaggcatcctgagctcctggctgcacctactccccaccaccgcctccatcctcgcatggcagctcctgtctcctgtctcaaatctccttctgcatttctct

SEQ ID NO: 546914 - DNA, 120 bp, Artificial Sequence
  ENSG00000167972_57 (sequence is synthesized)
tataaggacacttgctgttgggtttaaggcccacactaatccagtgtctcaccttaagatccttactaatcacatattcaaagaccctgtttctaagcaagatcacaaccccaggtccag

SEQ ID NO: 546915 - DNA, 120 bp, Artificial Sequence
  ENSG00000167972_58 (sequence is synthesized)
ggggacagaacttggacctgtcctgtggggcctcctcagcctcccacacacccctcggtgcttgtaacggtctctgtcctggtcaggaggcagcccaggattcacgcagagcctgtgcct

SEQ ID NO: 546916 - DNA, 120 bp, Artificial Sequence
  ENSG00000167972_59 (sequence is synthesized)
ttacgtgcctggcccctctctgagctgtggtgcctcgagaggcagctgtgacctactggccttcacatctccccatggaggggacattgttacaggcgccttgagcagcctggggagggg

SEQ ID NO: 546917 - DNA, 120 bp, Artificial Sequence
  ENSG00000167972_60 (sequence is synthesized)
gacactgaattatacacccggatgcctgtgcttcctgaggaccaagatgtagcggacgagaggacccgcatcctggcccccagtccggactccctgctccacacacctctgattatcaag

SEQ ID NO: 546918 - DNA, 120 bp, Artificial Sequence
  ENSG00000167972_61 (sequence is synthesized)
ggcgggggaagggcgagcagcccccaaacgcctcatgtaagcccatgcagaggagagtctgcgagggcgcaaacagggtccgggagagtcagcacaccgggcagagggcgggcagcggct

SEQ ID NO: 546919 - DNA, 120 bp, Artificial Sequence
  ENSG00000167972_62 (sequence is synthesized)
cacaccgcatgggtcggcagggagaagcgtttgaatggagcaactggaatttctcatgctctacctcaggcacagcaccctgctcaacaggagcttgtcgggtgcccagctctgtgttga

SEQ ID NO: 546920 - DNA, 120 bp, Artificial Sequence
  ENSG00000167972_63 (sequence is synthesized)
tgaggctctctagcagccaacgacacggaggttggttgatgcactcggttcacagatgggaaaccgaggcctgggccaaagtcagatgtgacagagtcacagagctcattctgatccctg

SEQ ID NO: 546921 - DNA, 120 bp, Artificial Sequence
  ENSG00000167977_0 (sequence is synthesized)
gagctgttgcggggcttgctgggatcatggcggagaatcactgcgagctcctgtcgccggcccggggcggcatcggggcggggctggggggcggcctgtgccgccgctgcagcgctgggc

SEQ ID NO: 546922 - DNA, 120 bp, Artificial Sequence
  ENSG00000167977_1 (sequence is synthesized)
tcggcgccctggcccagcgccctggcagcgtgtccaagtgggtccgactcaacgtcggcggcacctacttcctcaccactcggcagaccctgtgccgggacccgaaatccttcctgtacc

SEQ ID NO: 546923 - DNA, 120 bp, Artificial Sequence
  ENSG00000167977_2 (sequence is synthesized)
gcttatgccaggccgatcccgacctggactcagacaaggatgaaacaggcgcctatttaatcgacagagaccccacctactttgggcctgtgctgaactacctgagacacggcaagctgg

SEQ ID NO: 546924 - DNA, 120 bp, Artificial Sequence
  ENSG00000167977_3 (sequence is synthesized)
tgattaacaaagacctcgcggaggaaggagtgttggaggaagcagaattttacaatatcacctcattaataaaacttgtaaaggacaaaattagagaacgagacagcaaaacatcgcagg

SEQ ID NO: 546925 - DNA, 120 bp, Artificial Sequence
  ENSG00000167977_4 (sequence is synthesized)
tgcctgtgaagcatgtgtaccgtgtgctgcagtgccaggaggaggagctcacgcagatggtgtccaccatgtccgacggctggaagttcgagcagttggtcagcatcggctcctcttaca

SEQ ID NO: 546926 - DNA, 120 bp, Artificial Sequence
  ENSG00000167977_5 (sequence is synthesized)
actatgggaacgaagaccaagccgagttcctctgtgtggtgtccaaggagctgcacaacaccccgtacggtacggccagcgagcccagcgagaaggccaagattttgcaagaacgaggct

SEQ ID NO: 546927 - DNA, 120 bp, Artificial Sequence
  ENSG00000167977_6 (sequence is synthesized)
caaggatgtgagggacacagtattgacagctgaagaaatgatttacgttttcccgagatgtaatgaactgccatgtccaggaagcttggctgtgagaagaaacctgcttttgatcatttt

SEQ ID NO: 546928 - DNA, 120 bp, Artificial Sequence
  ENSG00000167977_7 (sequence is synthesized)
tctagagatctgggtgtgaatccttttttgcctctgaggtgggtggtgagagacgggcccagctgtccaaggccagacgtccccaagttgggggagcacggcggccgggtgggcgctgcc

SEQ ID NO: 546929 - DNA, 120 bp, Artificial Sequence
  ENSG00000167977_8 (sequence is synthesized)
tcttgggggggcctcgctctgttttttccaagtgccacgtgggactgaggcagacactcccagtcagcccgctcgatcctgaagatcgtgtgaaggaagcgttcttggtgctacacacag

SEQ ID NO: 546930 - DNA, 120 bp, Artificial Sequence
  ENSG00000167977_9 (sequence is synthesized)
tctggaaaagcagcctgggcttcactggcaggaagcggccgcagccgcgtcagtgtccagcacgtcgtggcctctggtccgaccaccaggccctagtctcggtcagggagtctgctctgc

SEQ ID NO: 546931 - DNA, 120 bp, Artificial Sequence
  ENSG00000167977_10 (sequence is synthesized)
gcagagctcctgacaaaggcggcttctgcgtcgtcactgcttcccggcgccattccgaggccgggccttcttctgacacgggctccaaccccacctgaccaagcccgggacagtcaaggc

SEQ ID NO: 546932 - DNA, 120 bp, Artificial Sequence
  ENSG00000167977_11 (sequence is synthesized)
ttctcaatttgtattttccaggcaagagaactttgtaccccttctctgtgtggatagactccccagcgtttttcctctggaaatgcccacagggcttgccgcgtggagactgatctgttc

SEQ ID NO: 546933 - DNA, 120 bp, Artificial Sequence
  ENSG00000167977_12 (sequence is synthesized)
catccgttagcgcgaggtagcagtgtcgcctcgcccctcccactgcgggctcacggggagctggcgtctgtcagtgccttgtcacgcctggcatagaggttgggctggaggcctgtccac

SEQ ID NO: 546934 - DNA, 120 bp, Artificial Sequence
  ENSG00000167977_13 (sequence is synthesized)
tggcttctggagctgaaggtctgcgtcacggtgaaaattcgggatgtttacagagcatcacaaatgcctctctctcgccgctctctcattttctttgtataactatgcagccttccctct

SEQ ID NO: 546935 - DNA, 120 bp, Artificial Sequence
  ENSG00000167977_14 (sequence is synthesized)
ctttctgggatgtttgggacttcactcgacctgcacgggctctgcccgacatgccgtgggagctgctgggattcctttagaaaccgctgcccgcatgctttgaaaacagacctttctcag

SEQ ID NO: 546936 - DNA, 120 bp, Artificial Sequence
  ENSG00000167977_15 (sequence is synthesized)
ctggctgtggggacctgtcagagtctggggactcggcgtgcagggcgggctccaagcgctttgcttccggaactccggcttcccaaggggtactgtgcagactgaccaccggcctcccgc

SEQ ID NO: 546937 - DNA, 120 bp, Artificial Sequence
  ENSG00000167977_16 (sequence is synthesized)
ctgcaggtcagaggctctgacactgtctggtttccaatgcttctggagacttcctgcctaggcctcatcctcctctttgccagtcacctgattaaccaattctccagcattaggacttac

SEQ ID NO: 546938 - DNA, 120 bp, Artificial Sequence
  ENSG00000167977_17 (sequence is synthesized)
ctccttctttttgtaaggtctcttgtatgttgttaaatgtttggcttaaacaatttataaaagcctttctagaaggcagacttagccccagcagagcctgggaggaaggcggccgctggg

SEQ ID NO: 546939 - DNA, 120 bp, Artificial Sequence
  ENSG00000167977_18 (sequence is synthesized)
gctcctgggcatcctctctggggagctgctggccgcttagcgttgtttgatttttgaccttgacatagtagataggcttgtggtttttttaatttaaagatattaagacttaattcacta

SEQ ID NO: 546940 - DNA, 120 bp, Artificial Sequence
  ENSG00000167977_19 (sequence is synthesized)
aaatttattctaaggggatatttatacttttatacttttttaggtatcgtattttatcagcttacagtttaatgcctaagtttcccctggaaatagcaaataaaattgtgtatttatgaa

SEQ ID NO: 546941 - DNA, 120 bp, Artificial Sequence
  ENSG00000167977_20 (sequence is synthesized)
ctgatgaaagaatgtcccaggagattcctcctaattaaatgctgactgaggaatctgaggagggggggaaggggtgtcaggagtgggaggccattaatgacacgttggaagacaaacagg

SEQ ID NO: 546942 - DNA, 120 bp, Artificial Sequence
  ENSG00000167977_21 (sequence is synthesized)
atgttgattcacctgtaaagatctccaaggcctgacctcagagttgagattaaggaaagaatattcctcgagttggacttaagcatggatctggtggaagagtccctgcctggattatta

SEQ ID NO: 546943 - DNA, 120 bp, Artificial Sequence
  ENSG00000167977_22 (sequence is synthesized)
gacttgtgtggagtgagcacctgggcttgcagagtgtgggggtctggagaggagttgggtggggagatttaagggggaggagttcccaagaaaccacagaagctttgggtgcctgagagg

SEQ ID NO: 546944 - DNA, 120 bp, Artificial Sequence
  ENSG00000167977_23 (sequence is synthesized)
agggagggtggtgaaagccacgcacatcaaggggctggcttgattgccctctggccccacatctaagcttctgggctgtgactgcccccaaccaagtcctcagagcccagcttgggaccc

SEQ ID NO: 546945 - DNA, 120 bp, Artificial Sequence
  ENSG00000167977_24 (sequence is synthesized)
accacccgccatactccacgctcccaagcccttactctgctgttccaagggccgacctgctgccacaaagttctctttctagacagcccggtgtgaattctcacttcctcctgggacttc

SEQ ID NO: 546946 - DNA, 120 bp, Artificial Sequence
  ENSG00000167977_25 (sequence is synthesized)
ctccagcaggactgtggctgtggatgaaacaggcgcctatttaatcgacagagaccccacctactttgggcctgtgctgaactacctgagacacggcaagctggtgattaacaaagacct

SEQ ID NO: 546947 - DNA, 120 bp, Artificial Sequence
  ENSG00000167977_26 (sequence is synthesized)
agtgactgtccaggatgtggggccaccccgcccactggggagcagctccatgcaggcgggcggccctggtggctcaccatcactcccaggaccacagctgcctggaggggcacagcaagc

SEQ ID NO: 546948 - DNA, 120 bp, Artificial Sequence
  ENSG00000167977_27 (sequence is synthesized)
gacctcgcggaggaaggtggctgggtgttgtcctgagctgccatgtgccatatgtgggttcctctggggtcctggaggaatgaagaccacccatgaggaagccctgaggcaggacctgtg

SEQ ID NO: 546949 - DNA, 120 bp, Artificial Sequence
  ENSG00000167978_0 (sequence is synthesized)
gtgctgacgtgcagcgcggcccaggcggggtgcgagtggcgcagttggagcccgttgcggcccctgaggaagcgaggaggcgtcggcgtcggctgaggcgggcggaccggcgaggcgagg

SEQ ID NO: 546950 - DNA, 120 bp, Artificial Sequence
  ENSG00000167978_1 (sequence is synthesized)
gagggactcgggagctcgagcagcggcggcggcaagacctctccccctcggaggcggcgggcggaggcggcgggagcggtggtgccccccccgggcacggggccatgtacaacgggatcg

SEQ ID NO: 546951 - DNA, 120 bp, Artificial Sequence
  ENSG00000167978_2 (sequence is synthesized)
atgtacaacgggatcgggctgccgacgccccggggcagcggcaccaacggctacgtccagcgcaacctgtccctggtgcggggccgccggggtgagcggcctgactacaagggagaggag

SEQ ID NO: 546952 - DNA, 120 bp, Artificial Sequence
  ENSG00000167978_3 (sequence is synthesized)
gaactgcggcgcctggaggctgccctggtgaagcggcctaatcctgacatcctggaccacgagcgcaagcggcgcgtcgagctgcgatgcctcgagctggaggagatgatggaagagcag

SEQ ID NO: 546953 - DNA, 120 bp, Artificial Sequence
  ENSG00000167978_4 (sequence is synthesized)
gggtacgaggaacagcaaattcaggaaaaagtggcgacctttcgactcatgttgctggagaaggatgtgaaccctgggggcaaggaggagaccccagggcagaggccagcggtcacggag

SEQ ID NO: 546954 - DNA, 120 bp, Artificial Sequence
  ENSG00000167978_5 (sequence is synthesized)
actcaccagttggcagaattaaatgagaagaagaatgaaagactccgtgctgcctttggcatcagtgattcttacgtagatggcagctcttttgatcctcagcgtcgtgcccgagaagct

SEQ ID NO: 546955 - DNA, 120 bp, Artificial Sequence
  ENSG00000167978_6 (sequence is synthesized)
aaacaaccagctcctgagcctcccaaaccttacagccttgttcgggagtctagcagttctcgctcaccaaccccaaagcagaagaagaagaaaaagaagaaagatagaggacgcaggtca

SEQ ID NO: 546956 - DNA, 120 bp, Artificial Sequence
  ENSG00000167978_7 (sequence is synthesized)
gagagcagctctcctcgacgggagagaaagaaaagctcaaagaagaagaagcacaggtcagaatctgagtccaagaaacgtaagcataggtctcccactccaaagagcaaacgtaaatct

SEQ ID NO: 546957 - DNA, 120 bp, Artificial Sequence
  ENSG00000167978_8 (sequence is synthesized)
aaggacaaaaagcgaaagcggtctcgaagtacaacaccagcccccaagagccgccgggcccaccgttcaacttctgctgactctgcttcctcctccgatacttcccgcagtcggtctcga

SEQ ID NO: 546958 - DNA, 120 bp, Artificial Sequence
  ENSG00000167978_9 (sequence is synthesized)
agtgctgcagctaaaactcatacaactgccttggctgggcgaagtccttcccctgcttcagggcgacgcggggagggagatgcgcctttcagtgaaccaggtactaccagcacacaacgg

SEQ ID NO: 546959 - DNA, 120 bp, Artificial Sequence
  ENSG00000167978_10 (sequence is synthesized)
cctagtagcccggagactgctacgaaacagcctagcagcccttatgaagacaaagataaagacaagaaggagaaatctgcaactcgacctagcccctctccggaaaggagcagcacaggc

SEQ ID NO: 546960 - DNA, 120 bp, Artificial Sequence
  ENSG00000167978_11 (sequence is synthesized)
ccagaaccacctgctcccactccgctccttgctgagcgacatggcggctccccacaaccccttgcaaccacccccttaagccaggagccagtgaaccccccatctgaggcctctccaact

SEQ ID NO: 546961 - DNA, 120 bp, Artificial Sequence
  ENSG00000167978_12 (sequence is synthesized)
cgggaccgttcaccacctaagtctcccgagaaacttccccagtcttcttcctcagagagcagcccaccatcccctcaacctaccaaagtttctcggcatgccagctcttccccagaaagt

SEQ ID NO: 546962 - DNA, 120 bp, Artificial Sequence
  ENSG00000167978_13 (sequence is synthesized)
cctaaacctgctccagctccagggtcccaccgagagatttcttcttctcccacatctaagaatcgctcacatggccgagcaaaacgggataaatcacattctcataccccctcccgtagg

SEQ ID NO: 546963 - DNA, 120 bp, Artificial Sequence
  ENSG00000167978_14 (sequence is synthesized)
atggggaggtcccgtagccctgccaccgctaagagagggcgatctcggtctcgaacccctaccaagagaggtcattctcgatcccgatctccccagtggcgtaggtccaggtctgcacag

SEQ ID NO: 546964 - DNA, 120 bp, Artificial Sequence
  ENSG00000167978_15 (sequence is synthesized)
aggtggggaagatctagaagcccccagcgacgtggccgctctaggtctcctcagcgaccaggctggtctaggagcagaaatacccagagaagaggcaggtctaggtcagcaaggcgaggg

SEQ ID NO: 546965 - DNA, 120 bp, Artificial Sequence
  ENSG00000167978_16 (sequence is synthesized)
aggtcccactctagatccccagccactaggggtagatctcgttctagaacaccagcccgccggggcaggtcccgctctagaacacctgccaggcggagatcacgatccagaactcccacc

SEQ ID NO: 546966 - DNA, 120 bp, Artificial Sequence
  ENSG00000167978_17 (sequence is synthesized)
aggcgtaggtctcggtctagaacaccagcccggaggggcaggtctcggtctagaacacctgctaggcgcagatctaggacccgatcaccagtacgacgcaggtctcgtagtagatcacca

SEQ ID NO: 546967 - DNA, 120 bp, Artificial Sequence
  ENSG00000167978_18 (sequence is synthesized)
gccaggagaagtggcaggtcacgctctagaaccccagctagacgtggccgctcacgctccagaaccccagccagacgtggccgctcacgctctagaaccccagctagacgcagtggtcgc

SEQ ID NO: 546968 - DNA, 120 bp, Artificial Sequence
  ENSG00000167978_19 (sequence is synthesized)
tcacgctccagaacaccagccaggagagggaggtctcggtctaggacaccaagacgaggaagatcccgcagtagaagcttagttagacgtggaagatctcactctagaacacctcaaaga

SEQ ID NO: 546969 - DNA, 120 bp, Artificial Sequence
  ENSG00000167978_20 (sequence is synthesized)
agaggcagatctggctcatcttcagagcggaaaaacaaatccagaacatctcaaagaagaagcaggtccaattcaagcccagaaatgaagaaatctcgcatttcttcaaggcggagcagg

SEQ ID NO: 546970 - DNA, 120 bp, Artificial Sequence
  ENSG00000167978_21 (sequence is synthesized)
tctctctcttcaccacggtccaaagcaaaatctcgcttgtctttgaggcgcagcctttcagggtcttccccatgccctaaacaaaagtcacagacaccacccaggcgcagtcgctctgga

SEQ ID NO: 546971 - DNA, 120 bp, Artificial Sequence
  ENSG00000167978_22 (sequence is synthesized)
tcctcccaacctaaagctaaatctagaacgccacccagacgcagtcgctccagttcttctccgccacctaaacagaaatctaagacaccatcaagacaaagtcattccagttcatctcct

SEQ ID NO: 546972 - DNA, 120 bp, Artificial Sequence
  ENSG00000167978_23 (sequence is synthesized)
catcctaaagtgaaatctggaacaccaccgaggcaagggtccataacaagtccccaggccaatgagcaatctgtaacgccacagagacggagctgttttgaatcatcacctgaccctgag

SEQ ID NO: 546973 - DNA, 120 bp, Artificial Sequence
  ENSG00000167978_24 (sequence is synthesized)
ttgaaatctaggaccccttctagacatagctgctcagggtcctctcctcctagagtgaaatctagcacacctcccagacagagcccatctaggtcatcatctccacaacccaaagtgaag

SEQ ID NO: 546974 - DNA, 120 bp, Artificial Sequence
  ENSG00000167978_25 (sequence is synthesized)
gcaataatatcaccaagacaaagaagccattctggctcctcttctccaagtcctagtagggtgacgtcgagaacaactccacggcgaagcagatcagtatctccctgctccaatgtggaa

SEQ ID NO: 546975 - DNA, 120 bp, Artificial Sequence
  ENSG00000167978_26 (sequence is synthesized)
tccagattgttgccaagatacagtcattctgggtcctcctcaccagataccaaagtgaaacctgaaacaccgccaagacaaagtcactcagggtctatttcaccataccccaaagtaaag

SEQ ID NO: 546976 - DNA, 120 bp, Artificial Sequence
  ENSG00000167978_27 (sequence is synthesized)
gcccaaactccaccggggccaagtctttctggatcaaagtcaccatgtccccaagagaagtctaaagactcactagttcaaagttgccctggatccctctctctctgtgcaggagtaaaa

SEQ ID NO: 546977 - DNA, 120 bp, Artificial Sequence
  ENSG00000167978_28 (sequence is synthesized)
tctagcacaccaccaggcgagagctattttggtgtctcatctctgcaactgaaaggacaatctcaaacttcaccagaccacagatctgatacttcaagtccagaagtgagacagagtcat

SEQ ID NO: 546978 - DNA, 120 bp, Artificial Sequence
  ENSG00000167978_29 (sequence is synthesized)
tcagaatcaccatctctgcagagcaaatctcaaacatcacctaagggaggtcggtccaggtcttcatctccagtcactgagctggcatccagatctccaataagacaagatagaggtgag

SEQ ID NO: 546979 - DNA, 120 bp, Artificial Sequence
  ENSG00000167978_30 (sequence is synthesized)
ttctcagcgagtcctatgttgaaatctggaatgtctcctgagcagagcaggttccagtctgactcttcttcatatcctacagtggactcgaattctctcttggggcagagtagattggag

SEQ ID NO: 546980 - DNA, 120 bp, Artificial Sequence
  ENSG00000167978_31 (sequence is synthesized)
actgctgaatcaaaagagaaaatggccttaccccctcaggaggatgctactgcatcacctcctagacagaaagacaaatttagtccctttccagtacaggataggcctgagtcttcactg

SEQ ID NO: 546981 - DNA, 120 bp, Artificial Sequence
  ENSG00000167978_32 (sequence is synthesized)
gtattcaaagacacacttagaaccccgccaagggaaagaagtggtgctgggtcatctccagaaacaaaagagcaaaatagtgcattgcctacgtcaagccaagatgaagagttaatggag

SEQ ID NO: 546982 - DNA, 120 bp, Artificial Sequence
  ENSG00000167978_33 (sequence is synthesized)
gtggtagagaagtctgaagaacccgcaggccaaatcctgtctcatttgtcttcagaacttaaagaaatgtccacaagtaactttgaatcatctcctgaagtagaagaaaggcctgctgtg

SEQ ID NO: 546983 - DNA, 120 bp, Artificial Sequence
  ENSG00000167978_34 (sequence is synthesized)
tctttgactcttgatcagagccagtcacaggcttctttggaagcagtagaagtcccttcaatggcctcatcttggggtgggccacatttttctccagaacataaagaactgtctaactcc

SEQ ID NO: 546984 - DNA, 120 bp, Artificial Sequence
  ENSG00000167978_35 (sequence is synthesized)
ccactcagggagaacagctttggatcacctttagaatttagaaactcaggcccacttggtacagaaatgaatactggattttcttctgaggttaaagaagatttgaatggaccgtttctt

SEQ ID NO: 546985 - DNA, 120 bp, Artificial Sequence
  ENSG00000167978_36 (sequence is synthesized)
aatcagctggaaacagatccatctctagacatgaaagaacaatcgacaagatcctctggacacagcagttctgagttatccccagatgcagtggaaaaggcagggatgtcttcaaatcag

SEQ ID NO: 546986 - DNA, 120 bp, Artificial Sequence
  ENSG00000167978_37 (sequence is synthesized)
gagagaaagaagtagttctgcatcttctcctgaaatgaaagatggtttacccagaactccatcaaggagaagcaggtctgggtcttctccaggacttagagatgggtctgggactccctc

SEQ ID NO: 546987 - DNA, 120 bp, Artificial Sequence
  ENSG00000167978_38 (sequence is synthesized)
gaggcacagcctgtctgggtcctctcctggaatgaaagatatacctagaacgccatctagagggagaagcgaatgtgattcttccccagaaccgaaagctttgcctcagactcctaggcc

SEQ ID NO: 546988 - DNA, 120 bp, Artificial Sequence
  ENSG00000167978_39 (sequence is synthesized)
gaggagtcgttctccatcatccccagagctcaacaacaagtgtcttaccccccagagagaaagaagcgggtcagaatcatcagttgatcagaaaactgtggctcggactcccctggggca

SEQ ID NO: 546989 - DNA, 120 bp, Artificial Sequence
  ENSG00000167978_40 (sequence is synthesized)
gagaagtcgttcgggatcctctcaagaacttgatgtgaaacccagtgcatcccctcaggaaagaagtgagtcagactcttctccagattctaaagccaagacaagaaccccacttcggca

SEQ ID NO: 546990 - DNA, 120 bp, Artificial Sequence
  ENSG00000167978_41 (sequence is synthesized)
gaggagtcggtctggatcatctccagaggttgacagcaaatctcgactatcccctcggcgcagtaggtctggttcctcccctgaagtgaaagataagccaagagcagcacccagggcaca

SEQ ID NO: 546991 - DNA, 120 bp, Artificial Sequence
  ENSG00000167978_42 (sequence is synthesized)
gagtggttctgattcctctcctgaacctaaagctccagcccctcgggcccttcccagacgaagcagatcaggttcatcaagcaaaggcagaggcccttctcctgaaggaagcagcagtac

SEQ ID NO: 546992 - DNA, 120 bp, Artificial Sequence
  ENSG00000167978_43 (sequence is synthesized)
cgagtcctctcctgaacatccgcccaaatccagaactgctcgcagaggttccaggtcatcaccagagcccaagaccaagtctcgtacaccacctcgacgtcgcagctctcgatcatctcc

SEQ ID NO: 546993 - DNA, 120 bp, Artificial Sequence
  ENSG00000167978_44 (sequence is synthesized)
ggagctaacaaggaaggccagactgtcccgtagaagccgctctgcctcatcctcaccagaaactcgctctagaactcccccaaggcaccggagaagtccctcagtgtcttccccggagcc

SEQ ID NO: 546994 - DNA, 120 bp, Artificial Sequence
  ENSG00000167978_45 (sequence is synthesized)
agccgaaaaatcgaggtcttcacgccgacggcgctcagcttcatctccacgcactaagacaacctcaaggagaggccgctctccttcgccaaagcctcgtggactccagaggtcccgttc

SEQ ID NO: 546995 - DNA, 120 bp, Artificial Sequence
  ENSG00000167978_46 (sequence is synthesized)
ccgctcaaggagagagaaaacaagaacaacccgacgtcgagataggtctggatcttctcagtcaacctctcggcgaagacagcggagccggtcaaggtcgcgggttactcggcggcggag

SEQ ID NO: 546996 - DNA, 120 bp, Artificial Sequence
  ENSG00000167978_47 (sequence is synthesized)
gggaggctctggttatcactcaaggtcacctgcccggcaggaaagttcccggacctcctctcgacgccgaagaggccgctctcggacacccccaaccagtcggaagcgttctcgctcacg

SEQ ID NO: 546997 - DNA, 120 bp, Artificial Sequence
  ENSG00000167978_48 (sequence is synthesized)
cacatcaccagccccgtggaaacgctctagatctcgagcctctccagccactcaccggcgatccaggtccagaacccccctgataagccgacgtaggtccagatctcgaacttcaccagt

SEQ ID NO: 546998 - DNA, 120 bp, Artificial Sequence
  ENSG00000167978_49 (sequence is synthesized)
cagccggagacggtcaaggtccaggacttcagtgactcgacgaagatcccggtcaagagcatccccagtgagcagaaggcgatccagatccagaacgccaccagtaacccgccgtcgttc

SEQ ID NO: 546999 - DNA, 120 bp, Artificial Sequence
  ENSG00000167978_50 (sequence is synthesized)
aaggtctagaacgccaacaacacgccgccgctcccgttctagaactccaccagtgactcgcagaaggtccagatccaggactccaccagtaaccaggaggcgatctcgaagcagaacttc

SEQ ID NO: 547000 - DNA, 120 bp, Artificial Sequence
  ENSG00000167978_51 (sequence is synthesized)
gcctatcactcgcagaagatcaagatccagaacatctccggtcacccgaaggagatctcgatctcgcacatctccagtaactcgaagaaggtcccgctctcgaacctcaccagtgacacg

SEQ ID NO: 547001 - DNA, 120 bp, Artificial Sequence
  ENSG00000167978_52 (sequence is synthesized)
ccgccgctctaggtcccggacacctccagctattcggcgccgctctagatctcgaacgccactgttaccacgcaaacgttctcgaagtcgctcaccacttgctatccgccgccgctccag

SEQ ID NO: 547002 - DNA, 120 bp, Artificial Sequence
  ENSG00000167978_53 (sequence is synthesized)
atcccgtactccacgaacagctcggggtaaacggtccttaacaagatctcctccagccatccgcaggcgttctgcatctggaagtagttctgatcgttcacgatctgctactcctccagc

SEQ ID NO: 547003 - DNA, 120 bp, Artificial Sequence
  ENSG00000167978_54 (sequence is synthesized)
aacaagaaatcattctggttcacggacacctccagtagcactcaacagttccagaatgagctgcttcagtcgtcctagcatgtccccaacacctcttgatcgctgcagatcacctggaat

SEQ ID NO: 547004 - DNA, 120 bp, Artificial Sequence
  ENSG00000167978_55 (sequence is synthesized)
gcttgaaccccttggcagctctagaacacccatgtctgtcctgcagcaagccggcggctccatgatggatggtccaggtccccgaatacctgaccaccagagaacatctgtgccagaaaa

SEQ ID NO: 547005 - DNA, 120 bp, Artificial Sequence
  ENSG00000167978_56 (sequence is synthesized)
tcatgctcagtccaggattgcacttgccctgacagctatcagtcttggcaccgctcggcctcctccgtccatgtctgctgctggccttgctgcaagaatgtcccaggttccagccccggt

SEQ ID NO: 547006 - DNA, 120 bp, Artificial Sequence
  ENSG00000167978_57 (sequence is synthesized)
gcctctcatgagtctcagaaccgcaccagcagccaaccttgccagcaggattcctgcagcctctgcggcagccatgaacctagccagcgccaggacacctgccattccaacagcagtgaa

SEQ ID NO: 547007 - DNA, 120 bp, Artificial Sequence
  ENSG00000167978_58 (sequence is synthesized)
cctggctgactctcgaacgccagctgcagcagcggccatgaacttggccagccccagaacagcggtggcaccttcggctgtgaacctggctgaccctcgcactcccacagccccagctgt

SEQ ID NO: 547008 - DNA, 120 bp, Artificial Sequence
  ENSG00000167978_59 (sequence is synthesized)
gaacctagcaggggccagaaccccagctgccttggcagctctgagtctcacaggctctggcacaccaccaactgctgcaaactatccctccagctccagaacaccacaggctccagcctc

SEQ ID NO: 547009 - DNA, 120 bp, Artificial Sequence
  ENSG00000167978_60 (sequence is synthesized)
tgcaaacctggtgggtcctcggtctgcacatgccacagctcctgtgaatattgccggctccagaaccgccgcagccttggcccccgcgagcctcaccagtgctaggatggctccagcatt

SEQ ID NO: 547010 - DNA, 120 bp, Artificial Sequence
  ENSG00000167978_61 (sequence is synthesized)
gtctggtgcaaacctcaccagccccagggtgcccctttctgcctacgagcgtgtcagtggcagaacctcaccaccgctccttgaccgagctaggtccagaacaccaccgtctgccccaag

SEQ ID NO: 547011 - DNA, 120 bp, Artificial Sequence
  ENSG00000167978_62 (sequence is synthesized)
ccaatctaggatgacctctgaacgggctccctccccttcctctagaatgggccaggctccttcacagtctcttctccctccagcacaggatcagccgaggtctcctgtgccttctgcttt

SEQ ID NO: 547012 - DNA, 120 bp, Artificial Sequence
  ENSG00000167978_63 (sequence is synthesized)
ttcagaccaatcccgttgtttgattgcccagaccacccctgtagcagggtctcagtccctttcctctggggcagtggcaacgaccacgtcctctgctggtgatcacaatggcatgctctc

SEQ ID NO: 547013 - DNA, 120 bp, Artificial Sequence
  ENSG00000167978_64 (sequence is synthesized)
tgtccctgcccctggggtgccccactctgatgtgggggagccacctgcctctactggggcccagcagccttctgcattagccgccctgcagccagcaaaggagcggcggagttcctcctc

SEQ ID NO: 547014 - DNA, 120 bp, Artificial Sequence
  ENSG00000167978_65 (sequence is synthesized)
gtcgtcgtcgtcctctagctcctcctcttcttcatcatcgtcgtcgtcgtcctcctcctcctctggctccagttctagtgactcagagggctctagccttcctgtgcaacctgaggtggc

SEQ ID NO: 547015 - DNA, 120 bp, Artificial Sequence
  ENSG00000167978_66 (sequence is synthesized)
actgaagagggtccccagccccaccccagccccaaaggaggctgttcgagagggacgtcctccggagccaaccccagccaaacggaagaggcgctctagcagttccagttccagctcctc

SEQ ID NO: 547016 - DNA, 120 bp, Artificial Sequence
  ENSG00000167978_67 (sequence is synthesized)
ctcttcatcttcctcctcctcctcctcctcctcttcttcctcctcctcttcctcttcttcttcttcctcctcatcttcctcctcctcgtcgtcttcctccccttcccctgctaagcctgg

SEQ ID NO: 547017 - DNA, 120 bp, Artificial Sequence
  ENSG00000167978_68 (sequence is synthesized)
ccctcaggccttgcccaaacctgcaagccccaagaagccaccccctggcgagcggaggtcccgcagcccccggaagccaatagactccctcagggactctcggtccctcagctactcgcc

SEQ ID NO: 547018 - DNA, 120 bp, Artificial Sequence
  ENSG00000167978_69 (sequence is synthesized)
tgtggagcgtcgccgtccctcgccccagccctcaccacgggaccagcagagcagcagcagtgagcggggttcccggagaggccagcgtggggacagccgctcccccagccacaagcgcag

SEQ ID NO: 547019 - DNA, 120 bp, Artificial Sequence
  ENSG00000167978_70 (sequence is synthesized)
gagggagacacctagccctcggcccatgagacaccgctcctccaggtctccataaattgtctttgggggattccaccacacccaatgctctggagccacaaggagtgtcccttcttcccc

SEQ ID NO: 547020 - DNA, 120 bp, Artificial Sequence
  ENSG00000167978_71 (sequence is synthesized)
agcagagccgtgggagggtccttgtctgctctcctttgaaccttggcagcccttggatggagggctccctttccctccccttttttttttctttgttcctgtgaaatgttaatctccgtg

SEQ ID NO: 547021 - DNA, 120 bp, Artificial Sequence
  ENSG00000167978_72 (sequence is synthesized)
agttcttcctggttcatgtgttctggggggtttggggtgggagggaatgcagatgggagttgggggaggggaggatacagttcaggataccccagcctggagtcagggccagggaggcat

SEQ ID NO: 547022 - DNA, 120 bp, Artificial Sequence
  ENSG00000167978_73 (sequence is synthesized)
ggccccacttgtatccagaagttcccaggggtgattgtgatggtggttgggactggaggttgtataaggtgttcttggaaggaaggggcaggagttggaattagttggtccctactgtcc

SEQ ID NO: 547023 - DNA, 120 bp, Artificial Sequence
  ENSG00000167978_74 (sequence is synthesized)
cccatgaggttgtgaacccctccccccaacttttcatgtttcttaaaggcattttggttttttaaaatctgtacagcaagagcaactttttctgtcaaataaaaatgagaaatgcaggaa

SEQ ID NO: 547024 - DNA, 120 bp, Artificial Sequence
  ENSG00000167978_75 (sequence is synthesized)
gcgctgcacagaccattcggaagacacggtccctgccctctaggagctgacaggctaaagcaacaggatggacagacatatacatttccccttctctttttttttttgtttttgtttatt

SEQ ID NO: 547025 - DNA, 120 bp, Artificial Sequence
  ENSG00000167978_76 (sequence is synthesized)
tgttatttttgtttcgttctgatgtatatggactgccagaatagggggggtggtggtttgttcgtggtgtctgggggaggaaggaatccttaccctggcttccttaatcggggaaggctt

SEQ ID NO: 547026 - DNA, 120 bp, Artificial Sequence
  ENSG00000167978_77 (sequence is synthesized)
ggctggaaggatcttcagaggtcatcccatccctctccctgcctccaggcaggacggccccttccccagccaacctgcactcacaggggcctccccaagctgcggctctccgaggaagga

SEQ ID NO: 547027 - DNA, 120 bp, Artificial Sequence
  ENSG00000167978_78 (sequence is synthesized)
gactacccagcttcagcttccacacctgagcccagaggccttattcctccatcagggacattcttgaggtttaaccttgatcccttatgctgcgggccccagcctgttgcttctgttagc

SEQ ID NO: 547028 - DNA, 120 bp, Artificial Sequence
  ENSG00000167978_79 (sequence is synthesized)
agaggttgggtcagctcgcaccactgctctccagagaattgctggctcacgtggctcggagagctcccagcgcctttctcaggcacccctccccccactgccgttcctccaggccaagga

SEQ ID NO: 547029 - DNA, 120 bp, Artificial Sequence
  ENSG00000167978_80 (sequence is synthesized)
tctactctggctgctggctgctgctgctgtccttttccttacgtgggacttcctccctgctttcgtctgcctttcccatgccttatttggctcctgcttatacttgtgttctgaatatgg

SEQ ID NO: 547030 - DNA, 120 bp, Artificial Sequence
  ENSG00000167978_81 (sequence is synthesized)
gaagcgggtagggagtgggctgggtggatggtttggggatgtttgggggaggtgagtaaaggggtagagggagaacgctctttgggattgtgttgggaaaagaagaaccaaagtggactg

SEQ ID NO: 547031 - DNA, 120 bp, Artificial Sequence
  ENSG00000167978_82 (sequence is synthesized)
tacttgcatttcagtgaatgatttgagttgtgcgactaaaggctttttggaagagggttgtccagttaggaaaggtggatgggagttggggagggggttttctgttctccctttgagctg

SEQ ID NO: 547032 - DNA, 120 bp, Artificial Sequence
  ENSG00000167978_83 (sequence is synthesized)
atgttcctgagttggtgatgttcattggattgcaaatgtatagatttaggatagacatgtgatgtgaaagggagaggtaataacttattaaaataaataaattcagttttttttcctgca

SEQ ID NO: 547033 - DNA, 120 bp, Artificial Sequence
  ENSG00000167978_84 (sequence is synthesized)
taggaagtaagtgaacgccaccttagtgggagggagttgaatgagttatgtccctgactggtaaagggttgagggatacgtgaggagaatccagggcaggtacagcagtaccctgagctg

SEQ ID NO: 547034 - DNA, 120 bp, Artificial Sequence
  ENSG00000167978_85 (sequence is synthesized)
tttgagttgttagtggcggggagaaaccccaaatcttaaaaactgtgaagaaagtgaacgtgttcagtttacatttgtaaggtagaccgtgcgttccctttttacactttttcaacgtct

SEQ ID NO: 547035 - DNA, 120 bp, Artificial Sequence
  ENSG00000167978_86 (sequence is synthesized)
cagagaaggggccctggggtgtgagctccccgctgggtgtctcacgtggccttgggcatctggttgtgggggaggaggcacttgctctcctctccccatgctcgttgcaccctgttctgg

SEQ ID NO: 547036 - DNA, 120 bp, Artificial Sequence
  ENSG00000167978_87 (sequence is synthesized)
atcgtctgggagtggacatgcagcccttcccactgaccatgctggggcccctttcctcatcttccatgtccactagtgagtctgagggctcaccatctgcagccagcatcacccttcacc

SEQ ID NO: 547037 - DNA, 78 bp, Artificial Sequence
  ENSG00000167978_88 (sequence is synthesized)
tctgagggctcaccatctgcagccagcatcacccttcacccagaatatatctccttgttcccttcacgtcaagaccat

SEQ ID NO: 547038 - DNA, 120 bp, Artificial Sequence
  ENSG00000167978_89 (sequence is synthesized)
tcctccctgtctccccgtctccacgccattctcttccacatgtagccagagggacctttctaaaacgcacatctggctacttccctccactccacaaatccttcgggacgccctgtggcc

SEQ ID NO: 547039 - DNA, 120 bp, Artificial Sequence
  ENSG00000167978_90 (sequence is synthesized)
tgcaggacaaagccccacctctgcgggagtggcgtgtgaggctcttcaccaacgggccttgcccgccctgtgttctcctcctgcccgcccccacacatgccctgtgctccagccacaccc

SEQ ID NO: 547040 - DNA, 120 bp, Artificial Sequence
  ENSG00000167978_91 (sequence is synthesized)
agcgccttgcagtctaaggagagcccatgcctttggacatgctgttccttctgcctggaatttccttgtccgcctggtgaactcctcgttctgcaagactccgctcaaaacagcaccttc

SEQ ID NO: 547041 - DNA, 120 bp, Artificial Sequence
  ENSG00000167978_92 (sequence is synthesized)
gagaagactgccctgccccttccctgccttgccccatgtccccctcccttgggtccccagagccacgcacatccagccctgcttcccacacacggggccgtgcgtgcctttcttcaccac

SEQ ID NO: 547042 - DNA, 120 bp, Artificial Sequence
  ENSG00000167978_93 (sequence is synthesized)
tgagctccttcaagggcagggactgtctttatctttgcatcccccgctgcaccctgtgcctgcccactgggcactcggtggatggtgtgcgggcggatgggtgagtgagcggacaaaggt

SEQ ID NO: 547043 - DNA, 120 bp, Artificial Sequence
  ENSG00000167978_94 (sequence is synthesized)
gcttaggtctggggcattagtgctattaggacattcaagtgttttagaaacctttttaggagagagattgtaagtgggagggccaggaaagaagccaagcaggatgagcttgcttttgaa

SEQ ID NO: 547044 - DNA, 120 bp, Artificial Sequence
  ENSG00000167978_95 (sequence is synthesized)
ttgtgtcttgtttatacatagatagaactggaacaaacgttgtatcttatctgtgtactccgtatgatgcctctagtttcttctcttttttcattaaatgctggtcatgtctcaccaaaa

SEQ ID NO: 547045 - DNA, 120 bp, Artificial Sequence
  ENSG00000167978_96 (sequence is synthesized)
aatgactggagaaggtttgctgaattcaggcagaggtgtttcttatgttttttcttctcttttttccaacaggtcagaatctgagtccaagaaacgtaagcataggtaagagctctttaa

SEQ ID NO: 547046 - DNA, 120 bp, Artificial Sequence
  ENSG00000167978_97 (sequence is synthesized)
ctcatagggggcgcagtggcatgtggagtggtgatttttttttcttggagtgaagctcaattccttgatcttccttgtgtcaacactccctctttccatttcacttttggttttatttcc

SEQ ID NO: 547047 - DNA, 120 bp, Artificial Sequence
  ENSG00000167978_98 (sequence is synthesized)
ccagggggtccttggtttcttcctctccctccctcaacacatagcctgttcccagggttctagctttgtctccctgttgctactgccagggctctggtctggccaccatcatcttctccc

SEQ ID NO: 547048 - DNA, 120 bp, Artificial Sequence
  ENSG00000167981_0 (sequence is synthesized)
ggcttttcccgcagctcctgcgtaaaggagcatgagagcgtgggagttttgcagtggccgtggcgttcttcgtcgcgtctcggtcgggcgtcgctttctgcagctcctgtcagggagcgc

SEQ ID NO: 547049 - DNA, 120 bp, Artificial Sequence
  ENSG00000167981_1 (sequence is synthesized)
gaggcctgttattaaccgcggagcgctttgtcacgaagtccctgtggcgtcttgaagaaggcattccccacccgccaaatggcgtccatgcccccgacgcccgaggcccagggaccaata

SEQ ID NO: 547050 - DNA, 120 bp, Artificial Sequence
  ENSG00000167981_2 (sequence is synthesized)
ctctttgaggatctggctgtgtatttttctcaagaggagtgcgtgactctgcaccctgcccagaggtccctcagcaaagatggtacaaaagagtctttggaggatgcggctttgatggga

SEQ ID NO: 547051 - DNA, 120 bp, Artificial Sequence
  ENSG00000167981_3 (sequence is synthesized)
gaggaaggcaagcctgagattaatcagcagttaagcctagagtctatggaacttgacgagcttgccttagaaaagtaccccattgctgcaccccttgtcccttacccagaaaaatcctct

SEQ ID NO: 547052 - DNA, 120 bp, Artificial Sequence
  ENSG00000167981_4 (sequence is synthesized)
gaggatggagttggaaaccctgaagcgaaaatattaagtggaactcccacttacaagagaagggtcatcagccttttagttaccattgaaaaccacaccccattagtagaactctctgaa

SEQ ID NO: 547053 - DNA, 120 bp, Artificial Sequence
  ENSG00000167981_5 (sequence is synthesized)
tatttaggaaccaacacactttctgaaattcttgattctccctgggaaggagccaaaaatgtgtacaaatgtcctgagtgtgaccaaaacttcagcgatcattcatacctagttttgcat

SEQ ID NO: 547054 - DNA, 120 bp, Artificial Sequence
  ENSG00000167981_6 (sequence is synthesized)
cagaaaattcattcaggagagaaaaaacataaatgtggtgactgtggaaagatcttcaatcatagagccaacctgaggacacacaggagaatccatactggtgagaaaccttataagtgt

SEQ ID NO: 547055 - DNA, 120 bp, Artificial Sequence
  ENSG00000167981_7 (sequence is synthesized)
gccaagtgcagtgccagctttcgccagcactctcatctatcccgacacatgaatagccacgtaaaggagaagccctatacatgtagcatatgtggtagaggttttatgtggctcccagga

SEQ ID NO: 547056 - DNA, 120 bp, Artificial Sequence
  ENSG00000167981_8 (sequence is synthesized)
ttggcacagcatcagaaaagccacagtgctgaaaacacctacgaatctactaactgtgataaacattttaatgagaaaccaaatcttgctttgcctgaggaaacattcgtatcaggcccc

SEQ ID NO: 547057 - DNA, 120 bp, Artificial Sequence
  ENSG00000167981_9 (sequence is synthesized)
cagtaccagcacactaagtgcatgaagagcttcaggcagtccttatatcctgccctttccgagaagagccacgacgaggactctgaacgctgcagcgatgatggggacaatttcttctca

SEQ ID NO: 547058 - DNA, 120 bp, Artificial Sequence
  ENSG00000167981_10 (sequence is synthesized)
ttctcaaaattcaagcccttacagtgtcctgactgtgacatgacctttccttgtttctctgagcttatttcccatcagaacattcatacagaggaaaggccccataagtgcaaaacatgc

SEQ ID NO: 547059 - DNA, 120 bp, Artificial Sequence
  ENSG00000167981_11 (sequence is synthesized)
gaggaaagttttgctttggactcagaacttgcatgccaccagaagagccacatgctagcggaaccttttaaatgtaccgtgtgtgggaaaactttcaagtcgaatttgcatctcattact

SEQ ID NO: 547060 - DNA, 120 bp, Artificial Sequence
  ENSG00000167981_12 (sequence is synthesized)
cataagcgaactcacataaaaaacaccacgtaaagtaaatataacaaattgttattagtgattgggcttttcagtatctgtatggtgggaagcagttactgtatatgtcccaggcaatgt

SEQ ID NO: 547061 - DNA, 120 bp, Artificial Sequence
  ENSG00000167981_13 (sequence is synthesized)
gctaagcactttacacacattcccatgtaatacttaattctcagcacaaccgtgatttaggcagtatcatttccattttataagtagggatgcaaaatccgtgtcactaaactagtgaat

SEQ ID NO: 547062 - DNA, 120 bp, Artificial Sequence
  ENSG00000167981_14 (sequence is synthesized)
gaacccaggatttgaactcagttactgtacaactgtgagccagaagaagatacacaacttttgtttaaattcaattttcattaaaatgaaggctcttgctaaagttattttaattttgtt

SEQ ID NO: 547063 - DNA, 120 bp, Artificial Sequence
  ENSG00000167981_15 (sequence is synthesized)
tacgtagtttctgacttttagaaggaggagaatttatttatattttgccagttctgcagacatatctaggaaagtaaatgcttttatatgttttatacttttttttgctataactatttg

SEQ ID NO: 547064 - DNA, 120 bp, Artificial Sequence
  ENSG00000167981_16 (sequence is synthesized)
aatgtaatacttgtataagattgctgttctacatgtgaattcccacaggcgttcagaagtttttttctgccctgtaaaagttcccaaatgggtagactagtttatattttgatggccatt

SEQ ID NO: 547065 - DNA, 120 bp, Artificial Sequence
  ENSG00000167981_17 (sequence is synthesized)
agtatccggagttctctgtcatggttctgatgccaggggcacatactggcatttaggacccaattgtttgcaaggagttttggaagtctaactgcagcccttttctggaggctggacttg

SEQ ID NO: 547066 - DNA, 120 bp, Artificial Sequence
  ENSG00000167981_18 (sequence is synthesized)
acttggggagggggagaagtacttgctcttttctaagatttgcctccaaattgctactgaagcacattacctgtcttactatgaataattgtaattgtttctcagtgagcatgctagcta

SEQ ID NO: 547067 - DNA, 120 bp, Artificial Sequence
  ENSG00000167981_19 (sequence is synthesized)
ctttagatatattatgtaatttaatcttcagaatctgtgacagagaaaaaaaatctttgtttcataaacgaggaaactgaagtcctcagagggtaaagtcagttctttgcccagcacaca

SEQ ID NO: 547068 - DNA, 120 bp, Artificial Sequence
  ENSG00000167981_20 (sequence is synthesized)
aatcacattgtggtgaaactgacattaagcttgggtttctctgactccaaaggccatgcagtctgcaagactgcggcatttgttggcatttgcaccacgtagtagcactgcaggcagcca

SEQ ID NO: 547069 - DNA, 120 bp, Artificial Sequence
  ENSG00000167981_21 (sequence is synthesized)
gggaaaggggagctgagataggtgagggtggtcctcatggaggcgattctgtgtgcttgcatcctggaaccccttcattccctttgtgctgtacccaaagcctgactaacatatacagtt

SEQ ID NO: 547070 - DNA, 120 bp, Artificial Sequence
  ENSG00000167981_22 (sequence is synthesized)
tacaatactgaaggtcttaactgggttttggttttttaaaaaacacccataacatttcctctccatctccaaagaaaatgcatatagaaaattgttagattttaaccaaaatacttgata

SEQ ID NO: 547071 - DNA, 120 bp, Artificial Sequence
  ENSG00000167981_23 (sequence is synthesized)
ttagatattgctattatagataaatactggagcaaaatattattaaatggtatggttattaatgttaaagaaccacagaatgttgtaaatatagattcatatacaatttctcattaaagt

SEQ ID NO: 547072 - DNA, 120 bp, Artificial Sequence
  ENSG00000167981_24 (sequence is synthesized)
tctcattaaagtcgattgtatgcctatcagcaaaacaatatttacatgggttttgattaggatggaagaatgctctcattctatttaaatagacagtataaaagtacaatatttgctaaa

SEQ ID NO: 547073 - DNA, 120 bp, Artificial Sequence
  ENSG00000167981_25 (sequence is synthesized)
attgaattgttgctgggaatttttgctgggagaaaagataaaggactcttgaggactaattatatggaaggtagcagaaggtggtcctacagaacagcagattgaggactaaatatacaa

SEQ ID NO: 547074 - DNA, 120 bp, Artificial Sequence
  ENSG00000167981_26 (sequence is synthesized)
aaaatgctggctactcagctaagctcttattactgagtagaggcaggaagatactgttcaggtgagagaaaaactgaaactaacaaaaacatccctaacccagagagagtttctctctct

SEQ ID NO: 547075 - DNA, 120 bp, Artificial Sequence
  ENSG00000167981_27 (sequence is synthesized)
ttgtcattcttgtcttgtttcttgtttgcagatccacagttgagacaatgtgctgctctgtatgtcaaggtcagactttggctgtttgtttctgatgtctccactcttaggagacaggac

SEQ ID NO: 547076 - DNA, 120 bp, Artificial Sequence
  ENSG00000167981_28 (sequence is synthesized)
accagcttccaggtttctctgaggtgctttgaaatgtgtagaaagatagtctccagttagattacttattaggcaactctgagataccatgacctttgttaaataacaagaacaccacct

SEQ ID NO: 547077 - DNA, 120 bp, Artificial Sequence
  ENSG00000167981_29 (sequence is synthesized)
ccttgctctcctgcttctgccctcagtgggagaaactggcaggagcctcatcagcacatatcaggggccctaagagttcagtcaaagatctaatgagtcacaggatgggggatgaaattg

SEQ ID NO: 547078 - DNA, 120 bp, Artificial Sequence
  ENSG00000167981_30 (sequence is synthesized)
ggaaaggtctggattagcagagttgctgcagaaagaagtagaggggaatatcttagaaggcacttggacagaatgggggtgatataaaagatgtatgctgtcatttttgttttggctcct

SEQ ID NO: 547079 - DNA, 120 bp, Artificial Sequence
  ENSG00000167981_31 (sequence is synthesized)
agaaaatatagcagaaagtgagaatttgtgccatacatcctgttctgcaccttaatatggaagtttgcctttccacacgagtcttccttcacaattaacctctaatttttttttttgcag

SEQ ID NO: 547080 - DNA, 120 bp, Artificial Sequence
  ENSG00000167981_32 (sequence is synthesized)
ttttctccagattttggaagattacgacaaacttcctaaaagattagaaaaaatagcccttttcagaaacattaacatacgtgtgggtagaactaaaatggctttttggtataatactgt

SEQ ID NO: 547081 - DNA, 120 bp, Artificial Sequence
  ENSG00000167981_33 (sequence is synthesized)
taatgattagtatgcagaaaaaaatgaaaaccccggaagtgtcagttactgtgaaagaggcatattttcagttgtgcttattgtgcagttgtacttaaatacatttgctagatgtaattc

SEQ ID NO: 547082 - DNA, 120 bp, Artificial Sequence
  ENSG00000167981_34 (sequence is synthesized)
aagctgctttacccccagggaattgaaggaaaagatatatctgctggtgagcttcaggctttttatgatgatggcatttcacccttctgtttacagtgtcaactgatggagataaattcc

SEQ ID NO: 547083 - DNA, 120 bp, Artificial Sequence
  ENSG00000167981_35 (sequence is synthesized)
ataaaattgtcattaactcagatactagccttccatgttaggtgctattcacaaatactggataaaagttaatatgggaatgaaaaactaaatgcaagagtttattgctatgaatgattg

SEQ ID NO: 547084 - DNA, 120 bp, Artificial Sequence
  ENSG00000167981_36 (sequence is synthesized)
gttaactgcattttgcagcatggaaatcaacacactatgagagtgaaaactttgtgctgaataaattgactcagacaaatttctccgtttttgtcgttgatgcagtgatgaaaatgtata

SEQ ID NO: 547085 - DNA, 120 bp, Artificial Sequence
  ENSG00000167981_37 (sequence is synthesized)
tccaacagttccttaacatgattgctggaatagttaaacagtcttttaaacagtcgtcattgatgaaaacagcatttttccaatggaattcagatgtcagcagtttacattttataattt

SEQ ID NO: 547086 - DNA, 120 bp, Artificial Sequence
  ENSG00000167981_38 (sequence is synthesized)
aagaaattgtggaatgtagttgttttgaatgaggtcgactcagaatagttttatttagagctttgttgctacaggtggtagtctattgacacctcctcatttaacatagaaaatgactaa

SEQ ID NO: 547087 - DNA, 120 bp, Artificial Sequence
  ENSG00000167981_39 (sequence is synthesized)
cccaataattcagggagttaaaactcaaatgacatttcacagcaaatgccattttgagtctttgcctcctgagtttccatataattaagtggcaatgttctagtgactgcagcataagat

SEQ ID NO: 547088 - DNA, 120 bp, Artificial Sequence
  ENSG00000167981_40 (sequence is synthesized)
gtcatacaatctgaaactgcagagtttgatcaaagtaatctgcaatttactgcctatgtgtacaaagggagacatagcaggttatagtttatatgaatagtctattttgaatgttcatta

SEQ ID NO: 547089 - DNA, 120 bp, Artificial Sequence
  ENSG00000167981_41 (sequence is synthesized)
aacttgttatccctgtgggattttagtaggaaagtgtatttgctttgaccatctgtttaacaaaatgatgttcattacattagaagtgtatgtattcatctggtttagttttgtaattta

SEQ ID NO: 547090 - DNA, 120 bp, Artificial Sequence
  ENSG00000167981_42 (sequence is synthesized)
gaagagctattgatctgattcaaagataaccattacccatctttccaaggcccatctaagtagtacaggtgttttgtcttttaaaattgacagtcctctttgcattaagtctgtaggggg

SEQ ID NO: 547091 - DNA, 120 bp, Artificial Sequence
  ENSG00000167981_43 (sequence is synthesized)
ggaatacaatataaatattcttctgtgtaaacgtaagaatgtgctgtaatctccagttcctttggatacctcagaattctatttattgtatacacttatactgtttattcaatgttttgg

SEQ ID NO: 547092 - DNA, 120 bp, Artificial Sequence
  ENSG00000167981_44 (sequence is synthesized)
gtcttactctttttgacgtattctcatcagtcttcactctagtttgcaagctctgaagttattgattacgtctaatgtgcaatttggcttctattaaatgctattttatgatgatggcaa

SEQ ID NO: 547093 - DNA, 120 bp, Artificial Sequence
  ENSG00000167984_0 (sequence is synthesized)
ggagccacagggacagccggtgggctcggtggggctgcagaaggtcggggctgcactgctctcggcccccacacggttggttggttggcgtggtaagtgccctgatccctggtcctgaga

SEQ ID NO: 547094 - DNA, 120 bp, Artificial Sequence
  ENSG00000167984_1 (sequence is synthesized)
actcaggctggcacagggattcccagggcatctaccaccacgcagctggagcagggctgagcccaggagcatggagatggacgcccccaggccccccagtcttgctgtccctggagcagc

SEQ ID NO: 547095 - DNA, 120 bp, Artificial Sequence
  ENSG00000167984_2 (sequence is synthesized)
atcgaggcccgggagaactgtggacaacggaaggctgagccccatccattgagttcctggggccccactggaggggctgctgtggccagggtgcacggtcacaaatgaagacaccaaggc

SEQ ID NO: 547096 - DNA, 120 bp, Artificial Sequence
  ENSG00000167984_3 (sequence is synthesized)
gcagagaggtgactcagcctgccctcagtcacctatctgctcctggaggtgatccccgactccatgaggaagcaagaggtgcggacgggcagggaggccggccagggccacggtacgggc

SEQ ID NO: 547097 - DNA, 120 bp, Artificial Sequence
  ENSG00000167984_4 (sequence is synthesized)
tccccagccgagcaggtgaaagccctcatggatctgctggctgggaagggcagtcaaggctcccaggccccgcaggccctggataggacaccggatgccccgctggggccctgcagcaat

SEQ ID NO: 547098 - DNA, 120 bp, Artificial Sequence
  ENSG00000167984_5 (sequence is synthesized)
gactcaaggatacagaggcaccgcaaggccctgctgagcaaggtgggaggtggcccggagctgggcggaccctggcacaggctggcctccctcctgctggtggagggcctgacggacctg

SEQ ID NO: 547099 - DNA, 120 bp, Artificial Sequence
  ENSG00000167984_6 (sequence is synthesized)
cagctgagggaacacgacttcacacaggtggaggccacccgcgggggcgggcaccccgccaggaccgtcgccctggaccggctcttcctgcctctctcccgggtgtctgtcccaccccgg

SEQ ID NO: 547100 - DNA, 120 bp, Artificial Sequence
  ENSG00000167984_7 (sequence is synthesized)
gtctccatcactatcggggtggccggcatgggcaagaccaccctggtgaggcacttcgtccgcctctgggcccatgggcaggtcggcaaggacttctcgctggtgctgcctctgaccttc

SEQ ID NO: 547101 - DNA, 120 bp, Artificial Sequence
  ENSG00000167984_8 (sequence is synthesized)
cgggatctcaacacccacgagaagctgtgtgccgaccgactcatctgctcggtcttcccgcacgtcggggagcccagcctggcggtggcagtcccagccagggccctcctgatcctggac

SEQ ID NO: 547102 - DNA, 120 bp, Artificial Sequence
  ENSG00000167984_9 (sequence is synthesized)
ggcttggatgagtgcaggacgcctctggacttctccaacaccgtggcctgcacggacccaaagaaggagatcccggtggaccacctgatcaccaacatcatccgtggcaacctctttccg

SEQ ID NO: 547103 - DNA, 120 bp, Artificial Sequence
  ENSG00000167984_10 (sequence is synthesized)
gaagtttccatctggatcacctcccgtcccagtgcatctggccagatcccagggggcctggtggaccggatgacggagatccggggctttaacgaggaggagatcaaggtgtgtttggag

SEQ ID NO: 547104 - DNA, 120 bp, Artificial Sequence
  ENSG00000167984_11 (sequence is synthesized)
cagatgttccccgaggaccaggcccttctgggctggatgctgagccaagtgcaggctgacagggccctgtacctgatgtgcaccgtcccagccttctgcaggctcacggggatggcgcta

SEQ ID NO: 547105 - DNA, 120 bp, Artificial Sequence
  ENSG00000167984_12 (sequence is synthesized)
ggccacctgtggcgcagcaggacggggccccaggatgcagagctgtggcccccgaggaccctgtgcgagctctactcatggtactttaggatggccctcagcggggaggggcaggagaag

SEQ ID NO: 547106 - DNA, 120 bp, Artificial Sequence
  ENSG00000167984_13 (sequence is synthesized)
ggcaaggcaagccctcgcatcgagcaggtggcccatggtggccgcaagatggtggggacattgggccgtctggccttccatgggctgctcaagaagaaatacgtgttttacgagcaagac

SEQ ID NO: 547107 - DNA, 120 bp, Artificial Sequence
  ENSG00000167984_14 (sequence is synthesized)
atgaaggcgtttggtgtagacctcgctctgctgcagggcgccccgtgcagctgcttcctgcagagagaggagacgttggcatcgtcagtggcctactgcttcacccacctgtccctgcag

SEQ ID NO: 547108 - DNA, 120 bp, Artificial Sequence
  ENSG00000167984_15 (sequence is synthesized)
gagtttgtggcagccgcgtattactatggcgcatccaggagggccatcttcgacctcttcactgagagcggcgtatcctggcccaggctgggcttcctcacgcatttcaggagcgcagcc

SEQ ID NO: 547109 - DNA, 120 bp, Artificial Sequence
  ENSG00000167984_16 (sequence is synthesized)
cagcgggccatgcaggcagaggacgggaggctggacgtgttcctgcgcttcctctccggcctcttgtctccgagggtcaatgccctcctggccggctccctgctggcccaaggcgagcac

SEQ ID NO: 547110 - DNA, 120 bp, Artificial Sequence
  ENSG00000167984_17 (sequence is synthesized)
caggcctaccggacccaggtggctgagctcctgcagggctgcctgcgccccgatgccgcagtctgtgcacgggccatcaacgtgttgcactgcctgcatgagctgcagcacaccgagctg

SEQ ID NO: 547111 - DNA, 120 bp, Artificial Sequence
  ENSG00000167984_18 (sequence is synthesized)
gcccgcagcgtggaggaggccatggagagcggggccctggccaggctgactggtcccgcgcaccgcgctgccctggcctacctcctgcaggtgtccgacgcctgtgcccaggaggccaac

SEQ ID NO: 547112 - DNA, 120 bp, Artificial Sequence
  ENSG00000167984_19 (sequence is synthesized)
ctgtccctgagcctcagccagggcgtccttcagagcctgctgccccagctgctctactgccggaagctcaggctggacaccaaccagttccaggaccccgtgatggagctgctgggcagc

SEQ ID NO: 547113 - DNA, 120 bp, Artificial Sequence
  ENSG00000167984_20 (sequence is synthesized)
gtgctgagtgggaaggactgtcgcattcagaagatcagcttggcggagaaccagatcagtaacaaaggggccaaagctctggccagatccctcttggtcaacagaagtctgacctctctg

SEQ ID NO: 547114 - DNA, 120 bp, Artificial Sequence
  ENSG00000167984_21 (sequence is synthesized)
gacctccgcggtaactccattggaccacaaggggccaaggcgctggcagacgctttgaagatcaaccgcaccctgacctccctgagcctccagggcaacaccgttagggatgatggtgcc

SEQ ID NO: 547115 - DNA, 120 bp, Artificial Sequence
  ENSG00000167984_22 (sequence is synthesized)
aggtccatggctgaggccttggcctccaaccggaccctctccatgctgcacctgcagaagaacagcatcgggcccatgggagcccagcggatggcagatgccttgaagcagaacaggagt

SEQ ID NO: 547116 - DNA, 120 bp, Artificial Sequence
  ENSG00000167984_23 (sequence is synthesized)
ctgaaagagctcatgttctccagtaatagtattggtgatggaggtgccaaggccctggctgaggccctgaaggtgaaccagggcctggagagcctggacctgcagagcaattccatcagt

SEQ ID NO: 547117 - DNA, 120 bp, Artificial Sequence
  ENSG00000167984_24 (sequence is synthesized)
gacgcaggagtggcagcactgatgggggccctctgcaccaaccagaccctcctcagcctcagccttcgagaaaactccatcagtcccgagggagcccaggccatcgctcatgccctctgc

SEQ ID NO: 547118 - DNA, 120 bp, Artificial Sequence
  ENSG00000167984_25 (sequence is synthesized)
gccaacagcaccctgaagaacctggacctgacagccaacctcctccacgaccagggtgcccgggccatcgcagtggcagtgagagaaaaccgcaccctcacctcccttcacctgcagtgg

SEQ ID NO: 547119 - DNA, 120 bp, Artificial Sequence
  ENSG00000167984_26 (sequence is synthesized)
caggagcctcaccagcttagatttacaggagaacgccatcggggatgacggagcgtgtgcggtggcccgtgcactgaaggtcaacacagccctcactgctctctatctccaggtggcctc

SEQ ID NO: 547120 - DNA, 120 bp, Artificial Sequence
  ENSG00000167984_27 (sequence is synthesized)
aattggtgcttcaggcgcccaggtgctaggggaagccttggctgtgaacagaaccttggagattctcgacttaagaggaaatgccattggggtggctggagccaaagccctggcaaatgc

SEQ ID NO: 547121 - DNA, 120 bp, Artificial Sequence
  ENSG00000167984_28 (sequence is synthesized)
tctgaaggtaaactcaagtctccggagactcaatcttcaagagaattctctggggatggacggggcgatatgcattgccacagcactgtctggaaaccacaggctccagcatatcaatct

SEQ ID NO: 547122 - DNA, 120 bp, Artificial Sequence
  ENSG00000167984_29 (sequence is synthesized)
ccagggaaaccacattggggactccggggccaggatgatctcagaggccatcaagacaaatgctcccacgtgcactgttgaaatgtgatcctggtggacggatcaggagaatgggcagat

SEQ ID NO: 547123 - DNA, 120 bp, Artificial Sequence
  ENSG00000167984_30 (sequence is synthesized)
gctcagctggaagcttttgaacagaaaggccgacttctggggggcctgtctgggagctgggaacgctgcttgctcagcacgagagccgggctctgcagggaggaaggagaggtgctgccg

SEQ ID NO: 547124 - DNA, 120 bp, Artificial Sequence
  ENSG00000167984_31 (sequence is synthesized)
gaggaggtcgtgagctcctcttctgctgcaggagtggtccaggcagggggtgacgggtactctgttatggcacagagaagggaggggccacccccaagggactaggggccaaaggcctga

SEQ ID NO: 547125 - DNA, 120 bp, Artificial Sequence
  ENSG00000167984_32 (sequence is synthesized)
aagctgagcagtacaggaggctggttccagctttacaccctgaggacttcatgtgtccccaacctttaaaaatgtttattactgcccctttccactcacctggttaaaaatcatcccatg

SEQ ID NO: 547126 - DNA, 120 bp, Artificial Sequence
  ENSG00000167984_33 (sequence is synthesized)
ctctgagatgagctgccacctcaagcccgtgaggagcatccgtttggtaggggtaacagaggggacccttctttatcttctcaagaagaagatttcagggtatcatccttacagacatga

SEQ ID NO: 547127 - DNA, 120 bp, Artificial Sequence
  ENSG00000167984_34 (sequence is synthesized)
aaaagctatgggaaaattgtgaagataaatgaaagttttaattctaggattctggaaacagagacagtaagagttctccaaggattttgccttttttgtttgtttttgagatggagtctc

SEQ ID NO: 547128 - DNA, 120 bp, Artificial Sequence
  ENSG00000167984_35 (sequence is synthesized)
acaggcatgagccaccacacctggccccattttttatttattacaaaatcaaagacatgggtgatgcctggcacatgttgtctggagtctggcacactggttatcaatagcacattcagt

SEQ ID NO: 547129 - DNA, 83 bp, Artificial Sequence
  ENSG00000167984_36 (sequence is synthesized)
gttgtctggagtctggcacactggttatcaatagcacattcagtgtattcagtgatgtcattctttatttatttttgagacag

SEQ ID NO: 547130 - DNA, 87 bp, Artificial Sequence
  ENSG00000167984_37 (sequence is synthesized)
tgatgtcattccttactaggcttccaaagccactgctgtggccacagcttccatggagacaggcaagctgagcctctatgtggcacc

SEQ ID NO: 547131 - DNA, 120 bp, Artificial Sequence
  ENSG00000167984_38 (sequence is synthesized)
cttccatggagacaggcaagctgagcctctatgtggcaccaattcctgcagctgtttgtgttggagggaaaaaaatccaaatggacatcaacagctttcatcaactaaataaccacagaa

SEQ ID NO: 547132 - DNA, 120 bp, Artificial Sequence
  ENSG00000167984_39 (sequence is synthesized)
aatatttatgaagactataaagcaatgattacttttgaattggaaaggaatcactattatttgaaatgtttcttcaaaagtgagcatccggacaggaaccatcatggatgctgaggccat

SEQ ID NO: 547133 - DNA, 120 bp, Artificial Sequence
  ENSG00000167984_40 (sequence is synthesized)
ggatgaaggcctactcgggaagatgatatccttgcagtctcaaaacggcaccccacaaaggtgatatcctaatttacaaagggaaaaaggtaccttaatctgaaatctggcaaatgcagc

SEQ ID NO: 547134 - DNA, 120 bp, Artificial Sequence
  ENSG00000167984_41 (sequence is synthesized)
ctcaacagaagtgacagaattgaacatcgccaataatgggacacacagacatcacatgcccccagtctgatgcaccacggagtcgtctctgatgtattcttgtcaaaaaatgtttgcctg

SEQ ID NO: 547135 - DNA, 120 bp, Artificial Sequence
  ENSG00000167984_42 (sequence is synthesized)
attctaatcatgaaagaacaattagaaaaaatccaaattgacagatattctgcagaataaatggcctgacctcatcaaaaacatcaatgtcatgaaaaacacaaaacattgcagatagcg

SEQ ID NO: 547136 - DNA, 120 bp, Artificial Sequence
  ENSG00000167984_43 (sequence is synthesized)
tgaaattaaagattacagagatataatttaatgcaagatctctgactggatcctagactgcaggaaaaagtctgctataaagaacatttggatcacttgtagtagctgggaaataaaaca

SEQ ID NO: 547137 - DNA, 120 bp, Artificial Sequence
  ENSG00000167984_44 (sequence is synthesized)
aaacattatttgtaaaaggggggaaatctgaacatgggtcttgcagtatttatgacagtttttgcggggcagagatttctagattgacagctgttttagtactttcaaggtgatgctctg

SEQ ID NO: 547138 - DNA, 120 bp, Artificial Sequence
  ENSG00000167984_45 (sequence is synthesized)
tctgctggtttgcattgtttctgtctgagttaagagactggcagaacacagagttgcagtagccaaacactggagaaagctgggccctacagaaacctaacgctgaagaaacctcaggag

SEQ ID NO: 547139 - DNA, 120 bp, Artificial Sequence
  ENSG00000167984_46 (sequence is synthesized)
ccaaactggtggagaaaacaaagagtcctccctctctcccttttcaaataatgatcatacatcttcaagctgtctgaaatggttaaggagttcagtctgtcgtcaggcacacaccagagc

SEQ ID NO: 547140 - DNA, 120 bp, Artificial Sequence
  ENSG00000167984_47 (sequence is synthesized)
cagctagcccacacagaccccatcagagcaaaacagacaagagaatttaattcatatccacatagaaaggacttctaggtaggaggtagaccctttagctcccttccaattaaaggagtc

SEQ ID NO: 547141 - DNA, 120 bp, Artificial Sequence
  ENSG00000167984_48 (sequence is synthesized)
cccaattctggcacctgagagtcccctgggtctaacagctatgatatttatgtagtgtgttgcttacctaaatgaatacaatttccttccagacacgtgacactgatattaaagtgctaa

SEQ ID NO: 547142 - DNA, 120 bp, Artificial Sequence
  ENSG00000167984_49 (sequence is synthesized)
tgagagggatctatttcttcttgtacgctaaaagagaaacagcagttcagatttcccatcagaagtccgaggactttgttcttgataactactaccaataaaaattgagtatttgaaaaa

SEQ ID NO: 547143 - DNA, 120 bp, Artificial Sequence
  ENSG00000167984_50 (sequence is synthesized)
ctggcagacgctttgaagatcaaccgcaccctgacctccctgagggtgaaattcatgtaccataaaattgactgttttaggcgggtcccagaggctgatgcctgtaatcccagcactttg

SEQ ID NO: 547144 - DNA, 120 bp, Artificial Sequence
  ENSG00000167985_0 (sequence is synthesized)
cgtggtcggctggccgggcggctaggagttcccggaagtgcccgcgcagccggtttccggtgcaggtggggaaaatggcggtgtctacagtgttctcgacttcgtcgctgatgcttgctc

SEQ ID NO: 547145 - DNA, 120 bp, Artificial Sequence
  ENSG00000167985_1 (sequence is synthesized)
tgtcaaggcacagcctattgtctcctttgctcagtgtgacatcattcagacgcttctacagaggtgacagcccaacagattcccaaaaggacatgattgaaatccctttgcctccatggc

SEQ ID NO: 547146 - DNA, 120 bp, Artificial Sequence
  ENSG00000167985_2 (sequence is synthesized)
aggagagaactgatgaatccatagaaaccaaaagagcccgcctgctctatgagagcagaaagaggggaatgttggaaaactgcattcttcttagtctttttgctaaagaacatctgcagc

SEQ ID NO: 547147 - DNA, 120 bp, Artificial Sequence
  ENSG00000167985_3 (sequence is synthesized)
acatgacagaaaagcagctgaacctctatgaccgcctgattaacgagcctagtaatgactgggatatttactactgggccacagaagctaaaccagccccagaaatatttgaaaatgaag

SEQ ID NO: 547148 - DNA, 120 bp, Artificial Sequence
  ENSG00000167985_4 (sequence is synthesized)
tcatggccctgctgagagactttgctaaaaacaaaaacaaagagcagagactgcgtgccccagatcttgagtacctctttgaaaagccacgttgagctgtgctccacggcctggcatggg

SEQ ID NO: 547149 - DNA, 120 bp, Artificial Sequence
  ENSG00000167985_5 (sequence is synthesized)
ggttcagtctgtggatggtaactacttatgatggacgttagccttgcttccggcttcttagatgcccagctgccctaccccagaccactggtcctgcctcaagtgatggacataaccctc

SEQ ID NO: 547150 - DNA, 120 bp, Artificial Sequence
  ENSG00000167985_6 (sequence is synthesized)
tcctaggacatacatgtaaatgcacaatgtgactcattctcatacttttttgttcagctctgagcctcaaaagtgatttgtcagcagcgctggcatgcaggctttgcctggctgctatct

SEQ ID NO: 547151 - DNA, 120 bp, Artificial Sequence
  ENSG00000167985_7 (sequence is synthesized)
ctagaggcaagtctgccacgagagggcactgcaggcgaagcagttgtgcttgctcattgcctcagcccaagtgtactcaaagaaaagaggcagccagctgtgcgtgctgtatggaaagcc

SEQ ID NO: 547152 - DNA, 120 bp, Artificial Sequence
  ENSG00000167985_8 (sequence is synthesized)
cctgagctgaatccttcaaaggcacagcaggcagaatgagggccacaggcaggagtggtgtgggcacactgcttaggagtcaacatcttcatcattgggctttctttaaaacgtgcactt

SEQ ID NO: 547153 - DNA, 120 bp, Artificial Sequence
  ENSG00000167985_9 (sequence is synthesized)
tgtaatttgaaagagaattattaaagcatactgaaaaaaggaaatttacaatttcccagccctcacaattaattttaattttgtctattttcatataacccatagtcatgtttatagagt

SEQ ID NO: 547154 - DNA, 120 bp, Artificial Sequence
  ENSG00000167985_10 (sequence is synthesized)
tttacaagttcacaattacaggttttattttcatgtagcactatagaaaactttccccctcattcctacagtcttcacaattagttgactaaataataatacataagaaataatatatta

SEQ ID NO: 547155 - DNA, 120 bp, Artificial Sequence
  ENSG00000167985_11 (sequence is synthesized)
gaatgaattagttagaagtgtttttaaaagctctagggctgtgtgacttctgtgttgctagtggtgccctccctggaggggttttgccctcagagctgtaatctaggcagtagaatcagt

SEQ ID NO: 547156 - DNA, 120 bp, Artificial Sequence
  ENSG00000167985_12 (sequence is synthesized)
cacccagactggaccaggtgcatctaaaggtgttgactagaagaaggtcggccagatttgatgagcaggtggttggtgattataggagccgcacacagggactacacacgcacatgtttc

SEQ ID NO: 547157 - DNA, 120 bp, Artificial Sequence
  ENSG00000167985_13 (sequence is synthesized)
cagcattgttgagctccagggttcctacagagccacctcatggttcctgcctgctcttcagtatccctggtggctcaggagggaagggaagagatctagcctttacgtaatcacagttaa

SEQ ID NO: 547158 - DNA, 120 bp, Artificial Sequence
  ENSG00000167985_14 (sequence is synthesized)
gcctcacagcactctagactagtggtgttacctgtattttatacataagaaagtgggctcagagagaggaagtaatttgtccaaggtcaggtagctattgagtcgaaaaagcagaattta

SEQ ID NO: 547159 - DNA, 120 bp, Artificial Sequence
  ENSG00000167985_15 (sequence is synthesized)
gtatagctcagtctgcctccaaagctcttgaactttctactagaacacactgccttactgctggaaatttaatagaagtctctgtttgggaaagctgtggcaaatagatgtgacagttct

SEQ ID NO: 547160 - DNA, 120 bp, Artificial Sequence
  ENSG00000167985_16 (sequence is synthesized)
ggtgcaggtggggaaaatggcggtgtctacagtgttctcgacttcgtcgctgggaattggtttgtttgttgctgttggctcagtgtctccatcggggaaggaggatctggggtttcctac

SEQ ID NO: 547161 - DNA, 120 bp, Artificial Sequence
  ENSG00000167985_17 (sequence is synthesized)
tccaccatcttcacctcttgctgaggtcaccaccttgacatcatatcttgataagttgtcaacttctctggattgggagcctttgggggattagggatcatgctgtctctgtgtgctcag

SEQ ID NO: 547162 - DNA, 67 bp, Artificial Sequence
  ENSG00000167985_18 (sequence is synthesized)
ctaagctaaaccagccccagaaatatttgaaaatgaagtcatggccctgctgagagactttgctaaa

SEQ ID NO: 547163 - DNA, 120 bp, Artificial Sequence
  ENSG00000167985_19 (sequence is synthesized)
aggtactgggtatgataagcagcataatgtgaaaataggacagtttaggctgatttgagtctagaattgtatcctagataatttttttctttcttttttttttttgagactgagtttcac

SEQ ID NO: 547164 - DNA, 120 bp, Artificial Sequence
  ENSG00000167986_0 (sequence is synthesized)
gggagtctgcgggcgagctcggaggacactggcgcacctcccccgccggctcacggccgcatccgccacatccgaaggcgccgcgacttcccggagaccccgaagcgtgcgctctcatcc

SEQ ID NO: 547165 - DNA, 120 bp, Artificial Sequence
  ENSG00000167986_1 (sequence is synthesized)
gggtcctgcgggcgctggcggaaagaggcgaggcggtgcctccgggggcggggcctccttcggttggcggcctcgggcttcgggagtcctccaagaggccaggtgaggccgtcccgtgat

SEQ ID NO: 547166 - DNA, 120 bp, Artificial Sequence
  ENSG00000167986_2 (sequence is synthesized)
gccccgcgccccggccgctctggcctgcaacgtgtctctggggcggaggcagcggcagtggagttcgctgcgcgctgttgggggccacctgtcttttcgcttgtgtccctctttctagtg

SEQ ID NO: 547167 - DNA, 120 bp, Artificial Sequence
  ENSG00000167986_3 (sequence is synthesized)
tcgcgctcgagtcccgacgggccgctccaagcctcgacatgtcgtacaactacgtggtaacggcccagaagcccaccgccgtgaacggctgcgtgaccggacactttacttcggccgaag

SEQ ID NO: 547168 - DNA, 120 bp, Artificial Sequence
  ENSG00000167986_4 (sequence is synthesized)
acttaaacctgttgattgccaaaaacacgagattagagatctatgtggtcaccgccgaggggcttcggcccgtcaaagaggtgggcatgtatgggaagattgcggtcatggagcttttca

SEQ ID NO: 547169 - DNA, 120 bp, Artificial Sequence
  ENSG00000167986_5 (sequence is synthesized)
ggcccaagggggagagcaaggacctgctgtttatcttgacagcgaagtacaatgcctgcatcctggagtataaacagagtggcgagagcattgacatcattacgcgagcccatggcaatg

SEQ ID NO: 547170 - DNA, 120 bp, Artificial Sequence
  ENSG00000167986_6 (sequence is synthesized)
tccaggaccgcattggccgcccctcagagaccggcattattggcatcattgaccctgagtgccggatgattggcctgcgtctctatgatggccttttcaaggttattccactagatcgcg

SEQ ID NO: 547171 - DNA, 120 bp, Artificial Sequence
  ENSG00000167986_7 (sequence is synthesized)
ataataaagaactcaaggccttcaacatccgcctggaggagctgcatgtcattgatgtcaagttcctatatggttgccaagcacctactatttgctttgtctaccaggaccctcaggggc

SEQ ID NO: 547172 - DNA, 120 bp, Artificial Sequence
  ENSG00000167986_8 (sequence is synthesized)
ggcacgtaaaaacctatgaggtgtctctccgagaaaaggaattcaataagggcccttggaaacaggaaaatgtcgaagctgaagcttccatggtgatcgcagtcccagagccctttgggg

SEQ ID NO: 547173 - DNA, 120 bp, Artificial Sequence
  ENSG00000167986_9 (sequence is synthesized)
gggccatcatcattggacaggagtcaatcacctatcacaatggtgacaaatacctggctattgcccctcctatcatcaagcaaagcacgattgtgtgccacaatcgagtggaccctaatg

SEQ ID NO: 547174 - DNA, 120 bp, Artificial Sequence
  ENSG00000167986_10 (sequence is synthesized)
gctcaagatacctgctgggagacatggaaggccggctcttcatgctgcttttggagaaggaggaacagatggatggcaccgtcactctcaaggatctccgtgtagaactccttggagaga

SEQ ID NO: 547175 - DNA, 120 bp, Artificial Sequence
  ENSG00000167986_11 (sequence is synthesized)
cctctattgctgagtgcttgacataccttgataatggtgttgtgtttgtcgggtctcgcctgggtgactcccagcttgtgaagctcaacgttgacagtaatgaacaaggctcctatgtag

SEQ ID NO: 547176 - DNA, 120 bp, Artificial Sequence
  ENSG00000167986_12 (sequence is synthesized)
tggccatggaaacctttaccaacttaggacccattgtcgatatgtgcgtggtggacctggagaggcaggggcaggggcagctggtcacttgctctggggctttcaaggaaggttctttgc

SEQ ID NO: 547177 - DNA, 120 bp, Artificial Sequence
  ENSG00000167986_13 (sequence is synthesized)
ggatcatccggaatggaattggaatccacgagcatgccagcattgacttaccaggcatcaaaggattatggccactgcggtctgaccctaatcgtgagactgatgacactttggtgctct

SEQ ID NO: 547178 - DNA, 120 bp, Artificial Sequence
  ENSG00000167986_14 (sequence is synthesized)
cttttgtgggccagacaagagttctcatgttaaatggagaggaggtagaagaaaccgaactgatgggtttcgtggatgatcagcagactttcttctgtggcaacgtggctcatcagcagc

SEQ ID NO: 547179 - DNA, 120 bp, Artificial Sequence
  ENSG00000167986_15 (sequence is synthesized)
ttatccagatcacttcagcatcggtgaggttggtctctcaagaacccaaagctctggtcagtgaatggaaggagcctcaggccaagaacatcagtgtggcctcctgcaatagcagccagg

SEQ ID NO: 547180 - DNA, 120 bp, Artificial Sequence
  ENSG00000167986_16 (sequence is synthesized)
tggtggtggctgtaggcagggccctctactatctgcagatccatcctcaggagctccggcagatcagccacacagagatggaacatgaagtggcttgcttggacatcaccccattaggag

SEQ ID NO: 547181 - DNA, 120 bp, Artificial Sequence
  ENSG00000167986_17 (sequence is synthesized)
acagcaatggactgtcccctctttgtgccattggcctctggacggacatctcggctcgtatcttgaagttgccctcttttgaactactgcacaaggagatgctgggtggagagatcattc

SEQ ID NO: 547182 - DNA, 120 bp, Artificial Sequence
  ENSG00000167986_18 (sequence is synthesized)
cgcttttctactttgggctcaacattgagacaggtctgttgagcgaccgtaagaaggtgactttgggcacccagcccaccgtattgaggacttttcgttctctttctaccaccaacgtct

SEQ ID NO: 547183 - DNA, 120 bp, Artificial Sequence
  ENSG00000167986_19 (sequence is synthesized)
ttgcttgttctgaccgccccactgtcatctatagcagcaaccacaaattggtcttctcaaatgtcaacctcaaggaagtgaactacatgtgtcccctcaattcagatggctatcctgaca

SEQ ID NO: 547184 - DNA, 120 bp, Artificial Sequence
  ENSG00000167986_20 (sequence is synthesized)
gcctggcgctggccaacaatagcaccctcaccattggcaccatcgatgagatccagaagctgcacattcgcacagttcccctctatgagtctccaaggaagatctgctaccaggaagtgt

SEQ ID NO: 547185 - DNA, 120 bp, Artificial Sequence
  ENSG00000167986_21 (sequence is synthesized)
cccagtgtttcggggtcctctccagccgcattgaagtccaagacacgagtgggggcacgacagccttgaggcccagcgctagcacccaggctctgtccagcagtgtaagctccagcaagc

SEQ ID NO: 547186 - DNA, 120 bp, Artificial Sequence
  ENSG00000167986_22 (sequence is synthesized)
tgttctccagcagcactgctcctcatgagacctcctttggagaagaggtggaggtgcacaacctacttatcattgaccaacacacctttgaagtgcttcatgcccaccagtttctgcaga

SEQ ID NO: 547187 - DNA, 120 bp, Artificial Sequence
  ENSG00000167986_23 (sequence is synthesized)
atgaatatgccctcagtctggtttcctgcaagctgggcaaagaccccaacacttacttcattgtgggcacagcaatggtgtatcctgaagaggcagagcccaagcagggtcgcattgtgg

SEQ ID NO: 547188 - DNA, 120 bp, Artificial Sequence
  ENSG00000167986_24 (sequence is synthesized)
tctttcagtattcggatggaaaactacagactgtggctgaaaaggaagtgaaaggggccgtgtactctatggtggaatttaacgggaagctgttagccagcatcaatagcacggtgcggc

SEQ ID NO: 547189 - DNA, 120 bp, Artificial Sequence
  ENSG00000167986_25 (sequence is synthesized)
tctatgagtggacaacagagaaggagctgcgcactgagtgcaaccactacaacaacatcatggccctctacctgaagaccaagggcgacttcatcctggtgggcgaccttatgcgctcag

SEQ ID NO: 547190 - DNA, 120 bp, Artificial Sequence
  ENSG00000167986_26 (sequence is synthesized)
tgctgctgcttgcctacaagcccatggaaggaaactttgaagagattgctcgagactttaatcccaactggatgagtgctgtggaaatcttggatgatgacaattttctgggggctgaaa

SEQ ID NO: 547191 - DNA, 120 bp, Artificial Sequence
  ENSG00000167986_27 (sequence is synthesized)
atgcctttaacttgtttgtgtgtcaaaaggatagcgctgccaccactgacgaggagcggcagcacctccaggaggttggtcttttccacctgggcgagtttgtcaatgtcttttgccacg

SEQ ID NO: 547192 - DNA, 120 bp, Artificial Sequence
  ENSG00000167986_28 (sequence is synthesized)
gctctctggtaatgcagaatctgggtgagacttccacccccacacaaggctcggtgctcttcggcacggtcaacggcatgatagggctggtgacctcactgtcagagagctggtacaacc

SEQ ID NO: 547193 - DNA, 120 bp, Artificial Sequence
  ENSG00000167986_29 (sequence is synthesized)
tcctgctggacatgcagaatcgactcaataaagtcatcaaaagtgtggggaagatcgagcactccttctggagatcctttcacaccgagcggaagacagaaccagccacaggtttcatcg

SEQ ID NO: 547194 - DNA, 120 bp, Artificial Sequence
  ENSG00000167986_30 (sequence is synthesized)
acggtgacttgattgagagtttcctggatattagccgccccaagatgcaggaggtggtggcaaacctacagtatgacgatggcagcggtatgaagcgagaggccactgcagacgacctca

SEQ ID NO: 547195 - DNA, 120 bp, Artificial Sequence
  ENSG00000167986_31 (sequence is synthesized)
tcaaggttgtggaggagctaactcggatccattagccaagggcagggggcccctttgctgaccctccccaaaggctttgccctgctgccctccccctcctctccaccatcgtcttcttgg

SEQ ID NO: 547196 - DNA, 120 bp, Artificial Sequence
  ENSG00000167986_32 (sequence is synthesized)
ccatgggaggcctttccctaagccagctgcccccagagccacagttcccctatgtggaagtggggcgggcttcatagagacttgggaatgagctgaaggtgaaacattttctccctggat

SEQ ID NO: 547197 - DNA, 120 bp, Artificial Sequence
  ENSG00000167986_33 (sequence is synthesized)
ttttaccagtctcacatgattccagccatcaccttagaccaccaagccttgattggtgttgccagttgtcctccttccggggaaggattttgcagttctttggctgaaaggaagctgtgc

SEQ ID NO: 547198 - DNA, 120 bp, Artificial Sequence
  ENSG00000167986_34 (sequence is synthesized)
gtgtgtgtgtatgtgtgtgtgtgtatgtgtatctcacactcatgcattgtcctctttttatttagattggcagtgtagggagttgtgggtagtggggaagagggttaggagggtttcatt

SEQ ID NO: 547199 - DNA, 120 bp, Artificial Sequence
  ENSG00000167986_35 (sequence is synthesized)
cattgtctgtgaagtgagaccttccttttacttttcttctattgcctctgagagcatcaggcctagaggcctgactgccaagccatgggtagcctgggtgtaaaacctggagatggtgga

SEQ ID NO: 547200 - DNA, 120 bp, Artificial Sequence
  ENSG00000167986_36 (sequence is synthesized)
tgatccccacgccacagcccttttgtctctgcaaactgccttcttcggaaagaagaaggtgggaggatgtgaattgttagtttctgagttttaccaaataaagtagaatataagaagaaa

SEQ ID NO: 547201 - DNA, 120 bp, Artificial Sequence
  ENSG00000167986_37 (sequence is synthesized)
ctggaggctgcagggctgacggctctcctggctcattaaggttccctacggagaaatactggttttgtgtttgaggttcgaatttgtagagcaataggggcactaataacgttgggcaag

SEQ ID NO: 547202 - DNA, 120 bp, Artificial Sequence
  ENSG00000167986_38 (sequence is synthesized)
gttacttaacacctaacaacaaactgttgttcctgctgtggaagttgactgttgaatgagttaggtattggagcatctcacaggatcctgtgataatctatccaagcagcctgtgagaaa

SEQ ID NO: 547203 - DNA, 120 bp, Artificial Sequence
  ENSG00000167986_39 (sequence is synthesized)
tgtgataatctatccaagcagcctgtgagaaaaggaaaagaaagggaaacagaaaaggatataatctggaattaaagatcaatctagctggtttcagtggctcacacctgtgatcccagc

SEQ ID NO: 547204 - DNA, 80 bp, Artificial Sequence
  ENSG00000167986_40 (sequence is synthesized)
atcccagcactttgggagactgagtcaggcagattgtgtgagccccaggagttcgagattagcctgggcaagtgggtatg

SEQ ID NO: 547205 - DNA, 71 bp, Artificial Sequence
  ENSG00000167986_41 (sequence is synthesized)
cgggaggctgaggtgggaggatcaccttagcccggggaggtcgatgttgcagtcagtgagccatggtggga

SEQ ID NO: 547206 - DNA, 120 bp, Artificial Sequence
  ENSG00000167986_42 (sequence is synthesized)
tattgctgatttcagttctgggaggaggctcccaaaaagtttaatattaatacttaggcagtatcttttggagcaggaatatgcaagacaaattatagatttttctgagtgtagggatgc

SEQ ID NO: 547207 - DNA, 120 bp, Artificial Sequence
  ENSG00000167986_43 (sequence is synthesized)
aatagatgaagaatcaaaaacttcagagatttagaaacatttgcttagtgtgacctgggaatttgaaacagaactgttctgaattatggctgcagttgggagttttctcagcagatgtct

SEQ ID NO: 547208 - DNA, 120 bp, Artificial Sequence
  ENSG00000167986_44 (sequence is synthesized)
gccccgggggcggccgggcaggagtgggcccggcgaatggaaggcgctggcggccgaggaacctcccccagcaccgcgacctcgaaagagtcgtccctgtacgcgctttttgggggttgg

SEQ ID NO: 547209 - DNA, 120 bp, Artificial Sequence
  ENSG00000167986_45 (sequence is synthesized)
aataaaaggtgacagaaatccacctctttagactggctcccctactgtggagtatgtcagctccccagggaaattgagcaccgtgaccactgcacgtggtcctgtctcagggcctgtggt

SEQ ID NO: 547210 - DNA, 120 bp, Artificial Sequence
  ENSG00000167986_46 (sequence is synthesized)
catgattgacaaagtctgggctagaatccaggcctcttcactccttgtcctaagtctgcccctacattatgtttgtctcactcagtagggaagttttaaaactcttaagagaaaattggc

SEQ ID NO: 547211 - DNA, 120 bp, Artificial Sequence
  ENSG00000167986_47 (sequence is synthesized)
tcttctcagtggtagccctgataatggggggaagttaagctaaggaacaagagtggaaaccaggaaaaaaaagtaaaagcttttacttggaaaggattagaagttgagaagaaaaatggg

SEQ ID NO: 547212 - DNA, 120 bp, Artificial Sequence
  ENSG00000167986_48 (sequence is synthesized)
ggagaatgcatggggaagaacatggagaagactccccacccataggaatagtcgaacaccagaagagtggcagtaaaaatactaccaggattagataatggccagttaacaaattctaag

SEQ ID NO: 547213 - DNA, 120 bp, Artificial Sequence
  ENSG00000167986_49 (sequence is synthesized)
ctcctatcatcaagaatgacgacatatcagtaaacatataagatatattgatggagcgcctcagaaaattatcttcaaaataaaaaagctccccattttctattaatgggcaataggatc

SEQ ID NO: 547214 - DNA, 120 bp, Artificial Sequence
  ENSG00000167986_50 (sequence is synthesized)
ctaactattggcctgaagactggcaccagctcacctatttattattaaagagctttcatccttatatataaactcaattgtgctagatcacttcagcatcggtgaggttggtctctcaag

SEQ ID NO: 547215 - DNA, 120 bp, Artificial Sequence
  ENSG00000167986_51 (sequence is synthesized)
taaggataactactgtttattgagtgcctatcttggtctgccaggcactttatatacattatctctaattacacaagtaccctagatagggatatttggccatctcagaagtgaggaaaa

SEQ ID NO: 547216 - DNA, 120 bp, Artificial Sequence
  ENSG00000167986_52 (sequence is synthesized)
ttagggctgagaaagattaagtaactttttccaaagtcacctaacttaataagtggcaggtgtatctaacagatcctgtgctcattctagtaaactaggtcccagcgatctaagcaagct

SEQ ID NO: 547217 - DNA, 120 bp, Artificial Sequence
  ENSG00000167986_53 (sequence is synthesized)
tgctaggagcagtggtagaagctttttgcttcctggactaggatgtcctgtctgctctgtaaatttgaaagactttggaaatcaacctctgccaagtctgcatcctcaaacctagcccca

SEQ ID NO: 547218 - DNA, 120 bp, Artificial Sequence
  ENSG00000167986_54 (sequence is synthesized)
caataaaggttcttggatttaggtataccgtgtttactttctgggcatcagtatgactggcccagtatcttgagggggttctttagaaacgttttctctgcttgcagctggtcacttgct

SEQ ID NO: 547219 - DNA, 120 bp, Artificial Sequence
  ENSG00000167986_55 (sequence is synthesized)
cacaggcctccttcctgataccagcattctgagggactggggagagcaactgtacaagacctaggtgtttactagaggaggctgcagcacattagccctccctgagctgctcacctgggc

SEQ ID NO: 547220 - DNA, 120 bp, Artificial Sequence
  ENSG00000167986_56 (sequence is synthesized)
tgccctttacgtagaggatacatgctgtggggttgagctctctgcagctcactgcctccttcacttcttcagggctggtgacctcactgtcagagagctggtacaacctcctgctggaca

SEQ ID NO: 547221 - DNA, 120 bp, Artificial Sequence
  ENSG00000167986_57 (sequence is synthesized)
tgcagaatcgactcaataaagtcatcaaaagtgtggggaagatcgagcactccttatatccttcccagagccatccccttgctgggaagcacatcccggcatatgtggcacacggagtca

SEQ ID NO: 547222 - DNA, 120 bp, Artificial Sequence
  ENSG00000167986_58 (sequence is synthesized)
cattacccggaagctactacatgtcttgattaggttcctgtacagaacaggttttttgttttgttttgtttttgactttttcatgtggaaaatttcaaacatacacaatagaacagtata

SEQ ID NO: 547223 - DNA, 120 bp, Artificial Sequence
  ENSG00000167986_59 (sequence is synthesized)
ttgactcccaaagtacttatcacctagcttccgctggtccatcttggaaatgtacatttatattcctgaaatgtgtccgcctctggccctctcggtgtagcaggccaaatgtgaatttag

SEQ ID NO: 547224 - DNA, 120 bp, Artificial Sequence
  ENSG00000167986_60 (sequence is synthesized)
atcacaacacaggagcacatcctttcagggatttggttgagggcaacagtgtctgagactagagaaactaccagaagaaagggaaaggtgaagaagcggaaaacactgaaagaatctgcc

SEQ ID NO: 547225 - DNA, 120 bp, Artificial Sequence
  ENSG00000167986_61 (sequence is synthesized)
accctgggacccccagaatccaagtgctattggaagtttgtgtagtacaggagatataaagggccctccccgcccccctggaggtgggaggagctcctgtctgtgactctggccctgctc

SEQ ID NO: 547226 - DNA, 120 bp, Artificial Sequence
  ENSG00000167986_62 (sequence is synthesized)
tagccaaggagggctgatgggctggtttattggttttttgctaacaagacttttggcagccttgtctcactgagtctcagtttattcatcaacggagctgctgcttttattcttcttctt

SEQ ID NO: 547227 - DNA, 120 bp, Artificial Sequence
  ENSG00000167986_63 (sequence is synthesized)
cttctttttttgttttaattggaggtgggttcttgctctgttgtccaggctagagtgcagtgacatgatcatggctcactgcagccttgacatcctgggctcaagtgattctcccatctc

SEQ ID NO: 547228 - DNA, 120 bp, Artificial Sequence
  ENSG00000167986_64 (sequence is synthesized)
cctcccgaatagctgggactgtaagcacgtgtcagctcacctggctaattaaaaaaaaattttgttttttgtagagacaggagttcatgatgttgccccggtttggtcttgaacttcggg

SEQ ID NO: 547229 - DNA, 120 bp, Artificial Sequence
  ENSG00000167986_65 (sequence is synthesized)
actcaaacgatccccctgcctcaacctcccaaagtgttgggttcacaggcatgagccaccaccacactgacccctctatggagctttgaggctagacttaggtggttcttgtgcatcagc

SEQ ID NO: 547230 - DNA, 120 bp, Artificial Sequence
  ENSG00000167986_66 (sequence is synthesized)
tttgcctagagcacttttaaagaacttccatacatatacgggcttcacattaatagactctgatctgtacttttaaaaactattttgaagatcaccccaattgagaaccaattagattag

SEQ ID NO: 547231 - DNA, 120 bp, Artificial Sequence
  ENSG00000167986_67 (sequence is synthesized)
gtcatatttttacatttttttcaattccaaaaatgtccaaataaaagcaaggcgaaaggaagtgtcatttcctttctaatcctgatgattgctttagattgtggtcttattcaaaggtgg

SEQ ID NO: 547232 - DNA, 120 bp, Artificial Sequence
  ENSG00000167986_68 (sequence is synthesized)
gtaatgttatctgagcgatttgtctgctggtaaaatggctgggtttggtaaagggagtggtccagtagggtttgttttctggtgtagaagatgctgaatctctaatgactgtttccttcc

SEQ ID NO: 547233 - DNA, 120 bp, Artificial Sequence
  ENSG00000167986_69 (sequence is synthesized)
atcaaatttctcctatgtttggcacctctcagaatctctccattttatccacatccctactatccagctttctacttggttaatttaacatcctacccctgactagctctttgcctttgt

SEQ ID NO: 547234 - DNA, 120 bp, Artificial Sequence
  ENSG00000167986_70 (sequence is synthesized)
ggttcattcagcaaatttgccaggcaaggtgctaggtgctgtggatacattgatgaacaagacccagctcctaccttcaaataggtcatagtttaatgtaatggacttcttctagaatat

SEQ ID NO: 547235 - DNA, 120 bp, Artificial Sequence
  ENSG00000167986_71 (sequence is synthesized)
gaaaacttcggaccttctctgcagaaaaatgcatgcaaacattttacattaattttcaaacattcactacttctctgaaatccatccatggactctaggtcagcaatccttggctgatta

SEQ ID NO: 547236 - DNA, 120 bp, Artificial Sequence
  ENSG00000167986_72 (sequence is synthesized)
atgggtcacctgtgggacaaccatattctttcgtcaatagtccccttctggaatcatcccttggaacatgagaatggcagatctagaaactagttattgagagtttcttttggacaataa

SEQ ID NO: 547237 - DNA, 120 bp, Artificial Sequence
  ENSG00000167986_73 (sequence is synthesized)
ttgttatccacgagagcctcatttctgacacccttccacccctcagcaattttttgaagtttggagtgaccctgacatccttcagcttttagcactctctccttaccttctgagctgttc

SEQ ID NO: 547238 - DNA, 120 bp, Artificial Sequence
  ENSG00000167986_74 (sequence is synthesized)
ttcactctgtggccagagtctgtcttgcctttggtgggtagggcactggagtgcctaaggattaatgaactgtctctgtctttttatccacctggttttccttttagccacctggcagtg

SEQ ID NO: 547239 - DNA, 120 bp, Artificial Sequence
  ENSG00000167986_75 (sequence is synthesized)
atttatacaatatatttctatacaattttgtaatctttactaaggaactttaaataatttaaatggctcatacacagtaaagaacttagatattttagaggtctgatttgggggttgaga

SEQ ID NO: 547240 - DNA, 68 bp, Artificial Sequence
  ENSG00000167986_76 (sequence is synthesized)
agaacttagatattttagaggtctgatttgggggttgagaaaaactgctaagactggtggtcacagtc

SEQ ID NO: 547241 - DNA, 120 bp, Artificial Sequence
  ENSG00000167986_77 (sequence is synthesized)
cacagggtcttactctattcatatcttcccacaggatgcagtttgtattacccaagtaagtctcaattagaatgaaataggccttttccccaccagctgtaggtttgtaagctgtaagct

SEQ ID NO: 547242 - DNA, 120 bp, Artificial Sequence
  ENSG00000167986_78 (sequence is synthesized)
acttttaagctggcctccttcaggcattcatgcaaaaatgacatctattgtaatcattagcaggactttggggaataagaaatagaagcctcatgtagcttattcgtagggctctattag

SEQ ID NO: 547243 - DNA, 120 bp, Artificial Sequence
  ENSG00000167986_79 (sequence is synthesized)
gtgccttgggagatggagcgcttttctactttgggctcaacattgagacaggtgagagtagtattttgagtgagggactctttcaaaaatagagtattagaattacacagaattcttagt

SEQ ID NO: 547244 - DNA, 120 bp, Artificial Sequence
  ENSG00000167986_80 (sequence is synthesized)
cccagggttctgcttttgaactttcacaggccagctttttgtcctgttttctttcttcctttctcctgatgtcattctctctgtaggtctgttgagcgaccgtaagaaggtgactttggg

SEQ ID NO: 547245 - DNA, 120 bp, Artificial Sequence
  ENSG00000167986_81 (sequence is synthesized)
tgacttaccaggcatcaaaggtagcttttttggtgggcataggatgtagatcttacatgagggactttggccttgttacatgttgtgaaggcgttttggtgggagccagaggaaagcaga

SEQ ID NO: 547246 - DNA, 120 bp, Artificial Sequence
  ENSG00000167986_82 (sequence is synthesized)
tcaagtgaagagtgaaagtcgtaacaacagatcagaagcttaaacatatctgaaagtataaaagtaaactttagaaaaaaaaaaaaaagaaaatactactgatcaaaattggtagtggaa

SEQ ID NO: 547247 - DNA, 120 bp, Artificial Sequence
  ENSG00000167986_83 (sequence is synthesized)
tagaggactaggggattaaaagattataaattaaaattaatgttgtttatatgaggcaaccgatagaattcataaagaaaggagagactgaggatattttatgaagatataagtataaat

SEQ ID NO: 547248 - DNA, 120 bp, Artificial Sequence
  ENSG00000167986_84 (sequence is synthesized)
acaatctcatcggcggttgccatctgtcagagggagccaggaatgagctgcatctggggggccttggccttagggcggcctgtgccagagggaccacctacctttatccggcgcacacca

SEQ ID NO: 547249 - DNA, 120 bp, Artificial Sequence
  ENSG00000167986_85 (sequence is synthesized)
gcttccccgtggatccctgcggatagatgtggtcactgctgacccactcaaggcctggggatttgctcatcgtttttatcaaggactcacacagtgctggactcacacaagccagaagag

SEQ ID NO: 547250 - DNA, 120 bp, Artificial Sequence
  ENSG00000167986_86 (sequence is synthesized)
gcctggcccagtgctgggtttgccttgttgacgatgcgcttggattgttaaggacaccgatgttcagaacccgggaagagtcatcttaacccacattctcagctgaatatgcagacccca

SEQ ID NO: 547251 - DNA, 120 bp, Artificial Sequence
  ENSG00000167986_87 (sequence is synthesized)
agcttgcatgtttatatacaccctaatcatgattccaaaacaaaactgttgttcagagttggaggtagctgagtgtggatggaggtattggtagactgccaggagggcagggggtgtgga

SEQ ID NO: 547252 - DNA, 120 bp, Artificial Sequence
  ENSG00000167986_88 (sequence is synthesized)
caaaacagtgttttcatataaagctctgggacttcttcatttgacttggtctgtcagataaaagttttgtgagactttagatgaagactggaagaagtgaacactttctccggcattctc

SEQ ID NO: 547253 - DNA, 120 bp, Artificial Sequence
  ENSG00000167986_89 (sequence is synthesized)
aattagagcctgccactgtaactgtaatagagtaaaattggaggggcaagaggcatgagaagggattacgcagtcattgtcatttggaggacacacggctcttaggtccagtccagtttt

SEQ ID NO: 547254 - DNA, 120 bp, Artificial Sequence
  ENSG00000167986_90 (sequence is synthesized)
cttagtctgattagggaagtagctttgttgaatgcatgaactgagactctttgaggtgccggatttggcaagaaggggagtagctggagggagttggagaagtatgtgaagtaaatgaga

SEQ ID NO: 547255 - DNA, 120 bp, Artificial Sequence
  ENSG00000167986_91 (sequence is synthesized)
ggtgataactgagaaaggggcaggtgttaccatatacttgaattgacctagatgcagtacagagcaccactggattttaaaacaaccaatttttatggctccaaaaataatgtaaaaatt

SEQ ID NO: 547256 - DNA, 120 bp, Artificial Sequence
  ENSG00000167986_92 (sequence is synthesized)
ctagggaaaaaattacagataatccactactcagagatcacaactcttaaccttagagttgctccttttagctttatttttcttctgcaaatgtctgtgtatttatttacattttctttt

SEQ ID NO: 547257 - DNA, 120 bp, Artificial Sequence
  ENSG00000167986_93 (sequence is synthesized)
atagactcgggtcattatatatataaacataaaaatatagtttcggatcctattttagcactaattatatcttccgagacactcaaattttttccctttgttaaactagtgatacatcct

SEQ ID NO: 547258 - DNA, 120 bp, Artificial Sequence
  ENSG00000167986_94 (sequence is synthesized)
tatttataaaattagaaaatgccaaaatgcacaaaaaaagaaaaaatcatgatgctaccatccaatatgactcttggcagccctttccacatactaattataaccgaagcttaccctatt

SEQ ID NO: 547259 - DNA, 82 bp, Artificial Sequence
  ENSG00000167986_95 (sequence is synthesized)
gtatttttagtacagatggggtttcactgtgttggccagcctggtctcgaactcttgcaattacaagcgtgagccactgtgc

SEQ ID NO: 547260 - DNA, 120 bp, Artificial Sequence
  ENSG00000167986_96 (sequence is synthesized)
gagccactgtgcctggcctggcttccaggtttattgctagctgtgtgaccttgggaaagcctaaacttcagttttcttatctgcagaatgaggcagataacagtctggagctacacatac

SEQ ID NO: 547261 - DNA, 120 bp, Artificial Sequence
  ENSG00000167986_97 (sequence is synthesized)
taggctcagtggtgataccagctggtcattttcttccatgtattctctgcctttcatgtttccacatatctgcgataggacctccctccgtagtccagagttgaagtcttcatggcttct

SEQ ID NO: 547262 - DNA, 120 bp, Artificial Sequence
  ENSG00000167986_98 (sequence is synthesized)
gtttttatttgaagtgcccccctcctcttcccattgagggtagtggagtctgtccccattaggtcacctgagttcctttttagctgtgcttgattgacttgaagcatcactgttttgtct

SEQ ID NO: 547263 - DNA, 120 bp, Artificial Sequence
  ENSG00000167986_99 (sequence is synthesized)
ttaatgacccttagatttttactgtttgggattgatgtttcaactacatgcctcctctgaaacactctcctcaggctccttgagctgccagccatcagagttcttggctagctgcagcct

SEQ ID NO: 547264 - DNA, 120 bp, Artificial Sequence
  ENSG00000167986_100 (sequence is synthesized)
atctctgggcagttggcaaccaaatgggctgcgttggcagagaggtcggggagaatccctctagggtgacacttgttgaacaccatgctatatcttctgcagggtggggccttgctcctg

SEQ ID NO: 547265 - DNA, 120 bp, Artificial Sequence
  ENSG00000167986_101 (sequence is synthesized)
aataaaggaaacacaagtcccagaactggattccgtgcaaactgctgattatgctttcttctttcaccttgtctgttttaagattgctcgagactttaatcccaactggatgagtgctgt

SEQ ID NO: 547266 - DNA, 120 bp, Artificial Sequence
  ENSG00000167986_102 (sequence is synthesized)
aagctcaccatgtattttctctttagggagagaagaatttggaaaattcttaaagaatttggtgtgcttaaagactggacaggttgttcctgttttaaaaagaacctcttttgatagcat

SEQ ID NO: 547267 - DNA, 120 bp, Artificial Sequence
  ENSG00000167987_0 (sequence is synthesized)
aacccgcggtggcggcggcgacggcggccctggcagggaaggatggagacgctgaaggataagaccctgcaggagctggaggagttgcagaatgactcggaggcgattgaccagctggcc

SEQ ID NO: 547268 - DNA, 120 bp, Artificial Sequence
  ENSG00000167987_1 (sequence is synthesized)
ctggagtcccctgaggtccaggacctacagctggaacgggagatggcactggccaccaaccggagcctggcagagcggaacttggagttccagggtcccctggagatcagccgctcaaac

SEQ ID NO: 547269 - DNA, 120 bp, Artificial Sequence
  ENSG00000167987_2 (sequence is synthesized)
ctctcggatagataccaggagctccggaagctcgtggagcggtgccaggagcagaaggcaaagctggagaaattttcttcagcactgcagccagggaccttgttagaccttctgcaggtg

SEQ ID NO: 547270 - DNA, 120 bp, Artificial Sequence
  ENSG00000167987_3 (sequence is synthesized)
gaaggcatgaagatcgaagaagagtccgaggccatggctgagaagttcctggagggcgaggtgcccctggaaacgttcctggagaatttttcctccatgaggatgctgtcccacctgcgc

SEQ ID NO: 547271 - DNA, 120 bp, Artificial Sequence
  ENSG00000167987_4 (sequence is synthesized)
cgggttcgcgtggaaaagctccaggaagtggtgaggaagcccagggcttcccaggagctggccggcgatgcccctccaccccgtccaccacccccggtgcgcccagtcccccagggaaca

SEQ ID NO: 547272 - DNA, 120 bp, Artificial Sequence
  ENSG00000167987_5 (sequence is synthesized)
ccccctgtggttgaagagcagccgcagccaccattagccatgcctccctaccctttgccctacagcccatcccccagcctgcctgtgggccccactgcccatggagccctgccaccggcc

SEQ ID NO: 547273 - DNA, 120 bp, Artificial Sequence
  ENSG00000167987_6 (sequence is synthesized)
cctttcccagtagtgtcccagccctccttctacagcgggcctctgggccccacttacccggcagcccagcttggacccaggggtgctgcgggttactcctggtccccacagaggagcatg

SEQ ID NO: 547274 - DNA, 120 bp, Artificial Sequence
  ENSG00000167987_7 (sequence is synthesized)
ccaccccggccgggctatcctgggaccccaatgggtgcctctgggcctgggtaccccttgcggggaggcagggcccccagtcctggttatcctcaacagtccccataccccgcaacagga

SEQ ID NO: 547275 - DNA, 120 bp, Artificial Sequence
  ENSG00000167987_8 (sequence is synthesized)
ggaaaacctccctacccaatacagcctcagctccccagctttccaggccagccccagccctcagtgcccctgcagcccccttatccccccgggcccgcccctccctatgggttcccacca

SEQ ID NO: 547276 - DNA, 120 bp, Artificial Sequence
  ENSG00000167987_9 (sequence is synthesized)
ccgccggggcctgcctggcctgggtattagacacactcctggccctcggcccctccctagtcccacccacgctcaacctttggcccagccatcgccgagattcgagggtcaactggaagt

SEQ ID NO: 547277 - DNA, 120 bp, Artificial Sequence
  ENSG00000167987_10 (sequence is synthesized)
ggcgttggtgctccctgtggacttgcgtcggcacccagaggccttggagggacaaggcactgggcggtgtgactggtcatggcacttgctggccttctggccagaggtcctcctggaagc

SEQ ID NO: 547278 - DNA, 120 bp, Artificial Sequence
  ENSG00000167987_11 (sequence is synthesized)
gccaggctggagtccagcacctctcgccggtgtctgtgtgagtgagcgcatgtgcgcatttatgagcatctacttgcggctgcactcagggccatttgaacccagtgcagagttatctct

SEQ ID NO: 547279 - DNA, 120 bp, Artificial Sequence
  ENSG00000167987_12 (sequence is synthesized)
atgaggaggccccgggtctccagccccctccatctcccctggggtttggcatatttgacatggagccccatgccaagggatgcagctgttggtgtctgtccagtccattcaaggctagcc

SEQ ID NO: 547280 - DNA, 120 bp, Artificial Sequence
  ENSG00000167987_13 (sequence is synthesized)
tgcccatgcactgtggcaggggttggattggagggagagaacagagttgggaaaaacaacaggtttgagtcctataaagccataatttaactccagtagctgatgtcagacaagcttgtc

SEQ ID NO: 547281 - DNA, 120 bp, Artificial Sequence
  ENSG00000167987_14 (sequence is synthesized)
ctatgtcctatttgagtggcagcagcgccagcccagcaagaaggctgggggttgtcaaggttgtccccagaccttgcttgcagtggttggagaacccagggggctgccttgggccctctg

SEQ ID NO: 547282 - DNA, 120 bp, Artificial Sequence
  ENSG00000167987_15 (sequence is synthesized)
gccagagggaagcgggcagctctagccctggagattgtggtcacattggggcttgtttaggattggagggccaggtcacctccccagccaccctcccttctctcctctggggtccccact

SEQ ID NO: 547283 - DNA, 120 bp, Artificial Sequence
  ENSG00000167987_16 (sequence is synthesized)
ttagggcgactttgcccgaggcccacgcatccatccactcctttagtgccttgaatctcattcacaagcagccccctcccttcccctccccttctcactctgttgatgtaatcctcccac

SEQ ID NO: 547284 - DNA, 120 bp, Artificial Sequence
  ENSG00000167987_17 (sequence is synthesized)
ccccagtgtccatcctaagacaggcatcaaaagaggccctaactttacttcccaaatggtgctttttaaaaaacaccatcactacattaggggcaattttttcacacctccctgtcttca

SEQ ID NO: 547285 - DNA, 120 bp, Artificial Sequence
  ENSG00000167987_18 (sequence is synthesized)
gaatgtaaagggtggggattatgtctctgtttaatatgcagccccctgcactgtggggtttggggcatgttcagtaataagaatgaatacaatagacaaagggggtgtgatgagtgttaa

SEQ ID NO: 547286 - DNA, 120 bp, Artificial Sequence
  ENSG00000167987_19 (sequence is synthesized)
cttggttgttccagaggtaaaccaggtctcagggaagagcctggagctgctattgcttaggaagttgtacgtgccttgaaatgtccactacctgaggacgcagcatctggtgggcccggg

SEQ ID NO: 547287 - DNA, 120 bp, Artificial Sequence
  ENSG00000167987_20 (sequence is synthesized)
gctgctggggccaaggagggaccttgaccttctggtgcctgcccctccccggcctatgtgccatccgcgtgacgctaggtcagcgctgccggttctttaccaaatgtgcttgcttctcct

SEQ ID NO: 547288 - DNA, 120 bp, Artificial Sequence
  ENSG00000167987_21 (sequence is synthesized)
aagttatttataaagagaaatcactaatggactctactggtttgagtgcttctgagctggatgaccgaccgcctgtatgtttgtgtaattaattgccataataaactttgatgagtcaca

SEQ ID NO: 547289 - DNA, 120 bp, Artificial Sequence
  ENSG00000167987_22 (sequence is synthesized)
ggcccgggcggccgcgagcgtgtgtgtgtggcacgatgtcgtggtaactcagaggcgcgcgaggcggggcggccaacggggtcgcggggcgagcacgcgcgccactggggcgccggacgt

SEQ ID NO: 547290 - DNA, 120 bp, Artificial Sequence
  ENSG00000167987_23 (sequence is synthesized)
tttttaaggatgctggcttattggaagttttggccaaattcatctcccttttctgtgaacttcatcctggtttggactcagaggaatccctgaggcttcagaccagttcctgggagttct

SEQ ID NO: 547291 - DNA, 120 bp, Artificial Sequence
  ENSG00000167987_24 (sequence is synthesized)
tgggagtgctggggagtccactgcctcctggtgccttcccaggacccagataccccaggagtccccacactgtcgttccagcccaaatctggaggcagctcctcaaagcactggtatggt

SEQ ID NO: 547292 - DNA, 120 bp, Artificial Sequence
  ENSG00000167987_25 (sequence is synthesized)
tttgtacccacttttccccaagagccttgtgcgatcccatatctccaggtgactctaaggcttctaggagccattcttgggctgagatctagctcgtctcccatttgatcctgtttctcc

SEQ ID NO: 547293 - DNA, 120 bp, Artificial Sequence
  ENSG00000167987_26 (sequence is synthesized)
tcataactggcccctaatcctctagttcttaatcacagactccttgaggaaagaaacagaatcctgcctgtgcagagatttacacttaataaaggacattccctgcccctagcatctcct

SEQ ID NO: 547294 - DNA, 120 bp, Artificial Sequence
  ENSG00000167987_27 (sequence is synthesized)
acccctcttccctggacggggtgtcagtccctgcagcaggggcccttggaaggagaagcagatgtctgcaaagcatggaacaagggagctttcgtagatggcagaggtgaaggacatctt

SEQ ID NO: 547295 - DNA, 120 bp, Artificial Sequence
  ENSG00000167987_28 (sequence is synthesized)
tagtcctggggaggccttttgggtataaataacaggaacccagtcccactagctgaagcagaaacgggtgacagtggacaagggcagctcgcagccctggatggtagggcagcacagcag

SEQ ID NO: 547296 - DNA, 120 bp, Artificial Sequence
  ENSG00000167987_29 (sequence is synthesized)
gaggcccccaggggctgaggccagctccctactccactctccctgcttcctgcttccctccggccacctcttcagcctctgtgggcaaactggtgctgtccactctgtgtctgggtggaa

SEQ ID NO: 547297 - DNA, 120 bp, Artificial Sequence
  ENSG00000167987_30 (sequence is synthesized)
gaagcttctaggccctcccagtccctgggctagtgctcatccaggtgttcagcacatatatgcagtggccactgtgggcctggcatgatgccaaggtgccaggacagaggtgaccacgac

SEQ ID NO: 547298 - DNA, 120 bp, Artificial Sequence
  ENSG00000167992_0 (sequence is synthesized)
gcgcctctcggagaggcatcagcaggcgggcggcgttgcctttgtgtgtttcgcttcgaggtgccagagaccctccccacaatcgtccgccgcgtcccctcgcggccctcggcccctcct

SEQ ID NO: 547299 - DNA, 120 bp, Artificial Sequence
  ENSG00000167992_1 (sequence is synthesized)
ctcggcgtcccaagcccccctgctcagctctgcgtgccatttcggggatcgctggttcgctccccacggcgccaggaggaggggcgagggccggcagccccctctcccgcgcgcggcgca

SEQ ID NO: 547300 - DNA, 120 bp, Artificial Sequence
  ENSG00000167992_2 (sequence is synthesized)
ccgagcccagcccgggggacccgccgccgccggtcatgtgggccggactgctccttcgggccgcctgtgtcgcgctcctgctgccgggggcaccagcccgaggctacaccgggaggaagc

SEQ ID NO: 547301 - DNA, 120 bp, Artificial Sequence
  ENSG00000167992_3 (sequence is synthesized)
aagccgcccgggcacttcgcggccgagagacgccgactgggcccccacgtctgcctctctgggtttgggagtggctgctgccctggctgggcgccctctatgggtggtgggcactgcacc

SEQ ID NO: 547302 - DNA, 120 bp, Artificial Sequence
  ENSG00000167992_4 (sequence is synthesized)
ctgcccctctgctccttcggctgtgggagtggcatctgcatcgctcccaatgtctgctcctgccaggatggagagcaaggggccacctgcccagaaacccatggaccatgtggggagtac

SEQ ID NO: 547303 - DNA, 120 bp, Artificial Sequence
  ENSG00000167992_5 (sequence is synthesized)
ggctgtgaccttacctgcaaccatggaggctgtcaggaggtggcccgagtgtgccccgtgggcttctcgatgacggagacagctgttggcatcaggtgtacagacattgacgaatgtgta

SEQ ID NO: 547304 - DNA, 120 bp, Artificial Sequence
  ENSG00000167992_6 (sequence is synthesized)
acctcctcctgcgagggccactgtgtgaacacagaaggtgggtttgtgtgcgagtgtgggccgggcatgcagctgtctgccgaccgccacagctgccaagacactgacgaatgcctaggg

SEQ ID NO: 547305 - DNA, 120 bp, Artificial Sequence
  ENSG00000167992_7 (sequence is synthesized)
actccctgtcagcagagatgtaaaaacagcattggcagctacaagtgttcctgtcgaactggcttccaccttcatggcaaccggcactcctgtgtagatgtaaacgagtgtcggaggcca

SEQ ID NO: 547306 - DNA, 120 bp, Artificial Sequence
  ENSG00000167992_8 (sequence is synthesized)
ttggagaggcgagtctgtcaccattcctgccacaacaccgtgggcagcttcctatgcacatgccgacctggcttcaggctccgagctgaccgcgtgtcctgtgaagctttcccgaaagcc

SEQ ID NO: 547307 - DNA, 120 bp, Artificial Sequence
  ENSG00000167992_9 (sequence is synthesized)
gtgctggccccatctgccatcctgcaaccccggcaacacccgtccaagatgcttctgttgcttcctgaggccggccggcctgccctgtccccaggacatagccctccttctggggctcca

SEQ ID NO: 547308 - DNA, 120 bp, Artificial Sequence
  ENSG00000167992_10 (sequence is synthesized)
gggcccccagccggagtcaggaccacccgcctgccatctcccaccccacgactacccacatcctccccttctgcccctgtgtggctgctgtccaccctgctggccaccccagtgcctact

SEQ ID NO: 547309 - DNA, 120 bp, Artificial Sequence
  ENSG00000167992_11 (sequence is synthesized)
gcctccctgctggggaacctcagacccccctcactccttcagggggaggtgatggggaccccttcctcacccaggggccctgagtccccccgactggcagcagggccctctccctgctgg

SEQ ID NO: 547310 - DNA, 120 bp, Artificial Sequence
  ENSG00000167992_12 (sequence is synthesized)
cacctgggagccatgcatgaatcaaggagtcgctggacagagcctgggtgttcccagtgctggtgcgaggacgggaaggtgacctgtgaaaaggtgaggtgtgaagctgcttgttcccac

SEQ ID NO: 547311 - DNA, 120 bp, Artificial Sequence
  ENSG00000167992_13 (sequence is synthesized)
ccaattccctccagagatggtgggtgctgcccatcgtgcacaggctgttttcacagtggtgtcgtccgagctgaaggggatgtgttttcacctcccaatgagaactgcaccgtctgtgtc

SEQ ID NO: 547312 - DNA, 120 bp, Artificial Sequence
  ENSG00000167992_14 (sequence is synthesized)
gacccccccacagacggattgctgtacttgtgttccagtgagatgctatttccacggccggtggtacgcagacggggctgtgttcagtgggggtggtgacgagtgtaccacctgtgtttg

SEQ ID NO: 547313 - DNA, 120 bp, Artificial Sequence
  ENSG00000167992_15 (sequence is synthesized)
ccagaatggggaggtggagtgctccttcatgccctgccctgagctggcctgcccccgagaagagtggcggctgggccctgggcagtgttgcttcacctgccaggagcccacaccctcgac

SEQ ID NO: 547314 - DNA, 120 bp, Artificial Sequence
  ENSG00000167992_16 (sequence is synthesized)
aggctgctctcttgacgacaacggggttgagtttccgattggacagatctggtcgcctggtgacccctgtgagttatgcatctgccaggcagatggctcggtgagctgcaagaggacaga

SEQ ID NO: 547315 - DNA, 120 bp, Artificial Sequence
  ENSG00000167992_17 (sequence is synthesized)
ctgtgtggactcctgccctcacccgatccggatccctggacagtgctgcccagactgttcagcaggctgcacctacacaggcagaatcttctataacaacgagaccttcccgtctgtgct

SEQ ID NO: 547316 - DNA, 120 bp, Artificial Sequence
  ENSG00000167992_18 (sequence is synthesized)
ggacccatgtctgagctgcatctgcctgctgggctcagtggcctgttcccccgtggactgccccatcacctgtacctaccctttccaccctgacggggagtgctgccccgtgtgccgaga

SEQ ID NO: 547317 - DNA, 120 bp, Artificial Sequence
  ENSG00000167992_19 (sequence is synthesized)
ctgcaactacgagggaaggaaggtggcgaatggccaggtgttcaccttggatgatgaaccctgcacccggtgcacgtgccagctgggagaggtgagctgtgagaaggttccctgccagcg

SEQ ID NO: 547318 - DNA, 120 bp, Artificial Sequence
  ENSG00000167992_20 (sequence is synthesized)
ggcctgtgccgaccctgccctgcttcctggggactgctgctcttcctgtccagattccctgtctcctctggaagaaaagcaggggctctcccctcacggaaatgtggcattcagcaaagc

SEQ ID NO: 547319 - DNA, 120 bp, Artificial Sequence
  ENSG00000167992_21 (sequence is synthesized)
tggtcggagcctgcatggagacactgaggcccctgtcaactgtagctcctgtcctgggcccccgacagcatcaccctcgaggccggtgcttcatctcctccagctccttttaagaacgaa

SEQ ID NO: 547320 - DNA, 120 bp, Artificial Sequence
  ENSG00000167992_22 (sequence is synthesized)
cttgatgaaaacacagactttacctacaagcccggcaggagctcatggtccacactcactcgctttggggctgacagccactttcccaggggagcctggggcctcccctcgactctcacc

SEQ ID NO: 547321 - DNA, 120 bp, Artificial Sequence
  ENSG00000167992_23 (sequence is synthesized)
agggccttcgacccctccaggagcccccactctacctctagcttccccaggggctcctcagccacctcctgtgactccagagcgctcgttctcagcctctggggcccagatagtgtccag

SEQ ID NO: 547322 - DNA, 120 bp, Artificial Sequence
  ENSG00000167992_24 (sequence is synthesized)
gtggcctcctctgcctggcaccctcctgacggaagcttcagcactttccatgatggaccccagcccctcgaagacccccatcaccctcctcgggcctcgcgtgctttctcccaccacctc

SEQ ID NO: 547323 - DNA, 120 bp, Artificial Sequence
  ENSG00000167992_25 (sequence is synthesized)
tagactctccacagcccttgcagccaccacccaccctggcccccagcagcccccagtgggggcttctcggggggaagagtccaccatgtaaggaggtcactgtgtccgggagactctgga

SEQ ID NO: 547324 - DNA, 120 bp, Artificial Sequence
  ENSG00000167992_26 (sequence is synthesized)
gagaggacctctgccagtggcccagggtgtgtgcagggcagctccaaggatgaacctggtggggatgcctgggctccctcctgcaggggccctggtgaggatggaagacccccaaggctg

SEQ ID NO: 547325 - DNA, 120 bp, Artificial Sequence
  ENSG00000167992_27 (sequence is synthesized)
gatgtaaccttgttcccaagaagtgtttggaatgtgctgtaagaatggaggaagtcgtttccactgtcagcatcctccctggaccgcgtggctggctcatcttttgagaagggttgggac

SEQ ID NO: 547326 - DNA, 120 bp, Artificial Sequence
  ENSG00000167992_28 (sequence is synthesized)
tgccaagttctcctggaggaagagttgcgtccggctgggattccactcactgggactgtaccgccaggtgtcatgcgtctctctgaggtttcctgattaaaggttgtctcggtttcccca

SEQ ID NO: 547327 - DNA, 120 bp, Artificial Sequence
  ENSG00000167992_29 (sequence is synthesized)
ctttcacaaaaagggttggaccgagtttatcctgctctcagtagatgtgtgaggacgatggtgcttggcagttggccttaagaagtgtgtattgttggccaggtgcggtggctcacgcct

SEQ ID NO: 547328 - DNA, 120 bp, Artificial Sequence
  ENSG00000167992_30 (sequence is synthesized)
gacccctgtgagttatgcatctgccagggcggggaggcaggggccggtgtcaccggtggggtcttggtgaagttcctccttcctccaggcagatggctcggtgagctgcaagaggacaga

SEQ ID NO: 547329 - DNA, 120 bp, Artificial Sequence
  ENSG00000167992_31 (sequence is synthesized)
ctctgaaatagacacttctggtggcattgttttttctaaaaatagggttttatggtactctgtaggttcctggtgagccagggttccagggaaaagctgagaaaggatttggatggtggt

SEQ ID NO: 547330 - DNA, 120 bp, Artificial Sequence
  ENSG00000167992_32 (sequence is synthesized)
gacggtgcaggctttggctgctacaggaagcggaggagaccagaatcccaaccctgaccttccttctccttaaagatgcatagacttcctggaaggctcacatggcctttctcaagtagc

SEQ ID NO: 547331 - DNA, 80 bp, Artificial Sequence
  ENSG00000167994_0 (sequence is synthesized)
gtgacccgcccagggcagggtcggggctgggctgggggccgcgagcccaggcgtctgagacctactgaccggccgcgggc

SEQ ID NO: 547332 - DNA, 120 bp, Artificial Sequence
  ENSG00000167994_1 (sequence is synthesized)
gcgctgggaacggacgcctgggcgccccgaggcgccgggatgtggagcggcccaccccagccagaccagggcctcccgccgccccttgcagctgtcccggtcccctggaagagcacggac

SEQ ID NO: 547333 - DNA, 120 bp, Artificial Sequence
  ENSG00000167994_2 (sequence is synthesized)
gccccttgcagctgtcccggtcccctggaagagcacggacccctgccaaggccacagggagtccccaggagccctggtggagacctctgcaggggaggaggcccaaggccaggagggccc

SEQ ID NO: 547334 - DNA, 120 bp, Artificial Sequence
  ENSG00000167994_3 (sequence is synthesized)
cgcagccgcccagctggacgtgttgcgcctgcgcagctcttccatggagatccgagagaagggctccgagttcctgaaggaggagctgcacagagcgcagaaggagctgaagctaaagga

SEQ ID NO: 547335 - DNA, 120 bp, Artificial Sequence
  ENSG00000167994_4 (sequence is synthesized)
cgaggaatgtgagcggctgtccaaggtgcgggagcagctagaacaggagctggaagagctgacggccagcctgtttgaggaagctcacaagatggttcgagaagccaacatgaagcaggc

SEQ ID NO: 547336 - DNA, 120 bp, Artificial Sequence
  ENSG00000167994_5 (sequence is synthesized)
ggcatcagaaaagcagctgaaggaggctcggggcaagatcgacatgctgcaggcagaggtgacagccttgaagacgctggtcatcacgtccacaccagcctctcccaaccgcgagcttca

SEQ ID NO: 547337 - DNA, 120 bp, Artificial Sequence
  ENSG00000167994_6 (sequence is synthesized)
cccccagctgctgagccccaccaaggccgggccccgaaagggccactctcgccacaagagcaccagcagcaccctctgccccgccgtgtgtcccgctgcgggacacaccctcaccccaga

SEQ ID NO: 547338 - DNA, 120 bp, Artificial Sequence
  ENSG00000167994_7 (sequence is synthesized)
cagagagggcaaggaggtggacacaatcctgtttgcagagttccaggcctggagggaatcccccaccctggacaagacctgccccttcctggaaagggtgtaccgagaggacgtgggccc

SEQ ID NO: 547339 - DNA, 120 bp, Artificial Sequence
  ENSG00000167994_8 (sequence is synthesized)
ctgcctggacttcacaatgcaggagctctcggtgctggtacgggccgccgtggaggacaacacgctcaccattgagccggtggcttcgcagacgctgcccacagtgaaggtggccgaggt

SEQ ID NO: 547340 - DNA, 120 bp, Artificial Sequence
  ENSG00000167994_9 (sequence is synthesized)
cacctgccgccaccgaatccggctcggggactccaaaagccattactacatctcgccatcttcccgggccaggatcaccgcagtgtgcaacttcttcacctacatccgctacatccagca

SEQ ID NO: 547341 - DNA, 120 bp, Artificial Sequence
  ENSG00000167994_10 (sequence is synthesized)
aggcctggtgcggcaggacgcagagcccatgttctgggagatcatgaggttgcggaaggagatgtcactggccaagctcggcttcttcccccaggaggcttagggcgcggcccaggcctg

SEQ ID NO: 547342 - DNA, 120 bp, Artificial Sequence
  ENSG00000167994_11 (sequence is synthesized)
aaggggagctctgagacagagcaaacacccaccccagaacaagccgacacacagggagacgggggcctggagccagccctgagccagaggcagaatggatggacagacaggccatggagg

SEQ ID NO: 547343 - DNA, 120 bp, Artificial Sequence
  ENSG00000167994_12 (sequence is synthesized)
cagcactgagccagcaccacacgtccatcctgggacagacgggcctggacttcacggcaagacccccctctcttccccactgggttctgccaccaccaggaggatttcaagaaagcacca

SEQ ID NO: 547344 - DNA, 120 bp, Artificial Sequence
  ENSG00000167994_13 (sequence is synthesized)
aagaccagggagctcggatccatactcggggggcctcagcccttgggaggggacacctgaggcagccagcgccccctccccagtccccagaactgcctgcaggtgccttgttgctggctt

SEQ ID NO: 547345 - DNA, 120 bp, Artificial Sequence
  ENSG00000167994_14 (sequence is synthesized)
gtcttcagaaagggactgttctgggtggctggatctccagggtaccctccaccccagctgccaagccctgggccagcagcacccccttgtggccatcctgtgccttgttcccggtggcct

SEQ ID NO: 547346 - DNA, 120 bp, Artificial Sequence
  ENSG00000167994_15 (sequence is synthesized)
ccctattggactactaggaggggctggcagggcctccatagcacagaattgccccaaagccttgttaagatgagtcaagacccctcccccgcttcctcccttcctttcccccttcctccc

SEQ ID NO: 547347 - DNA, 120 bp, Artificial Sequence
  ENSG00000167994_16 (sequence is synthesized)
tcccccttcataaaggcctcccttgtcaccttccctcccaccccgtctcagccctgtgctcctggaggccctgctcccaaaaccgctggaaggactggggcactttctgccacagtagaa

SEQ ID NO: 547348 - DNA, 120 bp, Artificial Sequence
  ENSG00000167994_17 (sequence is synthesized)
cacagacagggcttcagatcacccacgcctgttttcagctgtgggtggccatgcagacacgcgccctggcatgtggggcctgggtgggcaggcaggacctgggccctcccacccatcaga

SEQ ID NO: 547349 - DNA, 120 bp, Artificial Sequence
  ENSG00000167994_18 (sequence is synthesized)
gcccactcaggaccagcgttcggagctcccacctggacgcatccctcaccacgtccggatttccttctttggatggaatgtaacgcgatctctatttaataaaggcaggctttgttggta

SEQ ID NO: 547350 - DNA, 120 bp, Artificial Sequence
  ENSG00000167994_19 (sequence is synthesized)
ctggtggggggaagaaggctcctgctacctcccttcccggcaccctccagagggaccctcagtctggccttgcaagcatggactcttctgaggagcacgctgggtgccccgcccgaggga

SEQ ID NO: 547351 - DNA, 120 bp, Artificial Sequence
  ENSG00000167994_20 (sequence is synthesized)
catgtcccgtgttcctggccatgagtgcagggactgtccgctacgccccatcaggcctgtgccctgtacttgaggggaacttgagagaagagccctggggcacagacagcccaccccagc

SEQ ID NO: 547352 - DNA, 120 bp, Artificial Sequence
  ENSG00000167994_21 (sequence is synthesized)
ccggttcatctcacagctctgctgcatgctggttcattagctccgccatctccgtgatggatgtcagcggctttccccgggtggctccgctttcccccatgtaagatggaataataagcg

SEQ ID NO: 547353 - DNA, 120 bp, Artificial Sequence
  ENSG00000167994_22 (sequence is synthesized)
cgtctgctccgttcgctgcaggcgcttgatgaaatggctgctgctgctgctgctgctattacagcagggctagtcatgctgttgttgattactacttgaaagcccagtcccagctgagtc

SEQ ID NO: 547354 - DNA, 120 bp, Artificial Sequence
  ENSG00000167994_23 (sequence is synthesized)
agggagcactgcctggctctgcagggacctggggcctcctgctctggactcagatccgcctgtcaggggacccccagcgtggggctggcaggtcacaccgtccccacctctgcccacaga

SEQ ID NO: 547355 - DNA, 120 bp, Artificial Sequence
  ENSG00000167994_24 (sequence is synthesized)
cagcaaggcctggtgcggcaggacgcccattctgcaaggcctggctccccgctcctccaccaacctttgctcgctgctgagtcttctcctgaaccagtctggcccgaccctctgacagag

SEQ ID NO: 547356 - DNA, 120 bp, Artificial Sequence
  ENSG00000167995_0 (sequence is synthesized)
acagagtcccagggagtcccaccagcctagtcgccagaccttctgtgggatcatcggacccacctggaaccccacctgacccaagcccacctgctgcagcccactgcctggccatgacca

SEQ ID NO: 547357 - DNA, 120 bp, Artificial Sequence
  ENSG00000167995_1 (sequence is synthesized)
tcacttacacaagccaagtggctaatgcccgcttaggctccttctcccgcctgctgctgtgctggcggggcagcatctacaagctgctatatggcgagttcttaatcttcctgctctgct

SEQ ID NO: 547358 - DNA, 120 bp, Artificial Sequence
  ENSG00000167995_2 (sequence is synthesized)
actacatcatccgctttatttataggctggccctcacggaagaacaacagctgatgtttgagaaactgactctgtattgcgacagctacatccagctcatccccatttccttcgtgctgg

SEQ ID NO: 547359 - DNA, 120 bp, Artificial Sequence
  ENSG00000167995_3 (sequence is synthesized)
gcttctacgtgacgctggtcgtgacccgctggtggaaccagtacgagaacctgccgtggcccgaccgcctcatgagcctggtgtcgggcttcgtcgaaggcaaggacgagcaaggccggc

SEQ ID NO: 547360 - DNA, 120 bp, Artificial Sequence
  ENSG00000167995_4 (sequence is synthesized)
tgctgcggcgcacgctcatccgctacgccaacctgggcaacgtgctcatcctgcgcagcgtcagcaccgcagtctacaagcgcttccccagcgcccagcacctggtgcaagcaggcttta

SEQ ID NO: 547361 - DNA, 120 bp, Artificial Sequence
  ENSG00000167995_5 (sequence is synthesized)
tgactccggcagaacacaagcagttggagaaactgagcctaccacacaacatgttctgggtgccctgggtgtggtttgccaacctgtcaatgaaggcgtggcttggaggtcgaatccggg

SEQ ID NO: 547362 - DNA, 120 bp, Artificial Sequence
  ENSG00000167995_6 (sequence is synthesized)
accctatcctgctccagagcctgctgaacgagatgaacaccttgcgtactcagtgtggacacctgtatgcctacgactggattagtatcccactggtgtatacacaggtggtgactgtgg

SEQ ID NO: 547363 - DNA, 120 bp, Artificial Sequence
  ENSG00000167995_7 (sequence is synthesized)
cggtgtacagcttcttcctgacttgtctagttgggcggcagtttctgaacccagccaaggcctaccctggccatgagctggacctcgttgtgcccgtcttcacgttcctgcagttcttct

SEQ ID NO: 547364 - DNA, 120 bp, Artificial Sequence
  ENSG00000167995_8 (sequence is synthesized)
tctatgttggctggctgaaggtggcagagcagctcatcaacccctttggagaggatgatgatgattttgagaccaactggattgtcgacaggaatttgcaggtgtccctgttggctgtgg

SEQ ID NO: 547365 - DNA, 120 bp, Artificial Sequence
  ENSG00000167995_9 (sequence is synthesized)
aagcccgagccacagcccccctacacagctgcttccgcccagttccgtcgagcctcctttatgggctccaccttcaacatcagcctgaacaaagaggagatggagttccagcccaatcag

SEQ ID NO: 547366 - DNA, 120 bp, Artificial Sequence
  ENSG00000167995_10 (sequence is synthesized)
gaggacgaggaggatgctcacgctggcatcattggccgcttcctaggcctgcagtcccatgatcaccatcctcccagggcaaactcaaggaccaaactactgtggcccaagagggaatcc

SEQ ID NO: 547367 - DNA, 120 bp, Artificial Sequence
  ENSG00000167995_11 (sequence is synthesized)
cttctccacgagggcctgcccaaaaaccacaaggcagccaaacagaacgttaggggccaggaagacaacaaggcctggaagcttaaggctgtggacgccttcaagtctgccccactgtat

SEQ ID NO: 547368 - DNA, 120 bp, Artificial Sequence
  ENSG00000167995_12 (sequence is synthesized)
cagaggccaggctactacagtgccccacagacgcccctcagccccactcccatgttcttccccctagaaccatcagcgccgtcaaagcttcacagtgtcacaggcatagacaccaaagac

SEQ ID NO: 547369 - DNA, 120 bp, Artificial Sequence
  ENSG00000167995_13 (sequence is synthesized)
aaaagcttaaagactgtgagttctggggccaagaaaagttttgaattgctctcagagagcgatggggccttgatggagcacccagaagtatctcaagtgaggaggaaaactgtggagttt

SEQ ID NO: 547370 - DNA, 120 bp, Artificial Sequence
  ENSG00000167995_14 (sequence is synthesized)
aacctgacggatatgccagagatccccgaaaatcacctcaaagaacctttggaacaatcaccaaccaacatacacactacactcaaagatcacatggatccttattgggccttggaaaac

SEQ ID NO: 547371 - DNA, 120 bp, Artificial Sequence
  ENSG00000167995_15 (sequence is synthesized)
agggatgaagcacattcctaacctgcttcctaatggggatgcttcgccagccaggtcctcacctgtgtgtacaccagcaggacactgatccagtcacagccatacagctgtccacactga

SEQ ID NO: 547372 - DNA, 120 bp, Artificial Sequence
  ENSG00000167995_16 (sequence is synthesized)
agaacatgtcctacaacagcctgaatcaaatggttagcttaatagataaaaatcccagactacttcagcctttaatgccttttattcataaaaactgtgaaagctagactgaaccattgg

SEQ ID NO: 547373 - DNA, 120 bp, Artificial Sequence
  ENSG00000167995_17 (sequence is synthesized)
aaacatttaactcagactctggattcagagtcgggaacccttagttctatctgaatccaagacagccacaccttagtatactgcccaaactaatgagtttaataaatacaaatactcgtt

SEQ ID NO: 547374 - DNA, 120 bp, Artificial Sequence
  ENSG00000167995_18 (sequence is synthesized)
ccctgtgccccaccccagcttcccttgctctgagcctacccttcctccacaatttcctagggttccatcactgccagagcacactggacctacgcccagcactggcttggggtatatact

SEQ ID NO: 547375 - DNA, 120 bp, Artificial Sequence
  ENSG00000167995_19 (sequence is synthesized)
tggccaccttcacagggatcctagggaagtgttcgggaccttttctcacttcaccctggtatcacccggaagacttcttgggaccaggtgaaggaagatgaggttgtgctgaccagaatg

SEQ ID NO: 547376 - DNA, 120 bp, Artificial Sequence
  ENSG00000167995_20 (sequence is synthesized)
ctgctggagaactgccccagggctgacaggccaggcttagctgagcagatgttatcactggccccaacttactttgagcaagggtggctgacccaaaaccatgaggtggcagtcagctgg

SEQ ID NO: 547377 - DNA, 120 bp, Artificial Sequence
  ENSG00000167995_21 (sequence is synthesized)
ggaactgcctcactcctaggaactggtagatggtgaggttgagggtgtccagcgcccttaggtcattttctcactgcctgggaacctcaccaaaatacttcttgcttccttggggtcagc

SEQ ID NO: 547378 - DNA, 120 bp, Artificial Sequence
  ENSG00000167995_22 (sequence is synthesized)
ccaaagctgtcacaaaatcagatatttccctttattccagatttcctggacactttcacccaattataaacaccccacttcagccccaatcacgtgggaggaagtgtaacttcccttttc

SEQ ID NO: 547379 - DNA, 120 bp, Artificial Sequence
  ENSG00000167995_23 (sequence is synthesized)
tggattctcaagcagttactttcacggtcagaacacgcagctattatgattgaaaacttaaaagggcaacaatttcagtcttgcttctagggctagacaggaacttggcaaacatctgtg

SEQ ID NO: 547380 - DNA, 120 bp, Artificial Sequence
  ENSG00000167995_24 (sequence is synthesized)
gaacttggcaaacatctgtggcctgttcagcaaaggatgttaatatttaagaatcttgtcttgggctgggtgtggaggcaagtggatcacaggaggtcaggagtttgagaccaacctggc

SEQ ID NO: 547381 - DNA, 88 bp, Artificial Sequence
  ENSG00000167995_25 (sequence is synthesized)
tggaaatacaaatcagctgggcgtcgtggtgtgcctgtagtcccaacgcaggaggttgaggggagaattgcttgaacccaggaggtgg

SEQ ID NO: 547382 - DNA, 120 bp, Artificial Sequence
  ENSG00000167995_26 (sequence is synthesized)
gagactgtctcaaaaaaaaaaaaaaaaggatcgtctcaacctttgccctcctactgcaacattttggtatttgaaatgaagggaccttccatacttatgctgttaatactttcattctca

SEQ ID NO: 547383 - DNA, 120 bp, Artificial Sequence
  ENSG00000167995_27 (sequence is synthesized)
gacaacacctgggtaccaaatttctttatttgaaggaatggtacaaatcaaagaacttaagtggatgttttggtacaacttatagaaaaggtaaaggaaaccccaacatgcatgcactgc

SEQ ID NO: 547384 - DNA, 120 bp, Artificial Sequence
  ENSG00000167995_28 (sequence is synthesized)
cttggtgaccagggaagtcaccccacggctatggggaaattagcccgaggcttagctttcattatcactgtctcccagggtgtgcttgtcaaagagatattccgccaagccagattcggg

SEQ ID NO: 547385 - DNA, 120 bp, Artificial Sequence
  ENSG00000167995_29 (sequence is synthesized)
cgctcccatcttgcgcaagttggtcacgtggtcacccaattctttgatggctttcacctgctcattcaggtaatgtgtctcaatgaagtcacacaactgcaaaacaatggggaagacagt

SEQ ID NO: 547386 - DNA, 120 bp, Artificial Sequence
  ENSG00000167995_30 (sequence is synthesized)
tagtgggcagctttcccaatccctaaggcaaatgatttcctccatttatttcctggggttccaatactcacatgggggtcatttttgtcagtggccagtttgtgcagttccagtagtgac

SEQ ID NO: 547387 - DNA, 120 bp, Artificial Sequence
  ENSG00000167995_31 (sequence is synthesized)
tgattcacatttttttccaaatgtaatgcacactccattgcattcagcccgctctcccagtcatcacagtctggtttctgaatgagaataggttaatgcatctctaccaactaacctaga

SEQ ID NO: 547388 - DNA, 120 bp, Artificial Sequence
  ENSG00000167995_32 (sequence is synthesized)
agtcagcaagcccatcatctctaaccaccacgttttggcaaaagggacattactatttgcctaatttagtttagatggtaagcctaaaaaagcacaaaaggcaaaagcccagtgtatcat

SEQ ID NO: 547389 - DNA, 120 bp, Artificial Sequence
  ENSG00000167995_33 (sequence is synthesized)
cactttataagggcaattgctagtttaagtgatttctgatacccgaacactgccagatgatgaagtatgacacccctaggatcttttgttcaccttgatatcctgaaggaagattcggcc

SEQ ID NO: 547390 - DNA, 79 bp, Artificial Sequence
  ENSG00000167995_34 (sequence is synthesized)
atcttttgttcaccttgatatcctgaaggaagattcggccacctcgttggttctgcagcttcatcagtttctcagcatg

SEQ ID NO: 547391 - DNA, 120 bp, Artificial Sequence
  ENSG00000167995_35 (sequence is synthesized)
tcaggggtcagaacactggtggagcagatcctttagcctctggattttagggccatggtagagggggtgttgccctaaattccagccctggtctcagcccaacaccctccaagaagaaat

SEQ ID NO: 547392 - DNA, 120 bp, Artificial Sequence
  ENSG00000167995_36 (sequence is synthesized)
tagaggggccatggccaggctgtgctagccgttgcttctgagcagattacaagaagggactaagacaaggactcctttgtggaggtcctggcttagggagtcaagtgacggcggctcagc

SEQ ID NO: 547393 - DNA, 120 bp, Artificial Sequence
  ENSG00000167995_37 (sequence is synthesized)
actcacgtgggcagtgccagcctctaagagtgggcaggggcactggccacagagtcccagggagtcccaccagcctagtcgccagaccttctgtgggatcatcggacccacctggaaccc

SEQ ID NO: 547394 - DNA, 120 bp, Artificial Sequence
  ENSG00000167995_38 (sequence is synthesized)
gctgcggcaaggggctggggagggggcgggggaacgccagcggcaggtcggcgcctctctgtagggaaaggtgcggactgcagccagtgaaactgaagttagacgttaggtaagacgtcc

SEQ ID NO: 547395 - DNA, 120 bp, Artificial Sequence
  ENSG00000167995_39 (sequence is synthesized)
tgccgttagcaatgaaaaccccattttctgagggaagcgctgacatcatggtccctggagcccctgcgcgggaggggagggggtctggcggatttctgggaccagcagggggacccccgg

SEQ ID NO: 547396 - DNA, 120 bp, Artificial Sequence
  ENSG00000167995_40 (sequence is synthesized)
gtgacagaacccttggggctctcgcgcctccatgcgaggctctgcctgcctctcgctcccgagcgccttccaggagggctgggggctaggcccgctcgcagcagaaagctggaggagccg

SEQ ID NO: 547397 - DNA, 120 bp, Artificial Sequence
  ENSG00000167995_41 (sequence is synthesized)
ctgggctggaggcatggccagaggggtcatggccagcagctgcctgagacgaggatgcagtgtcaggaaaggaaggtctcacgggtagaaagcagccaggcgtggtggcgcacacctgta

SEQ ID NO: 547398 - DNA, 76 bp, Artificial Sequence
  ENSG00000167995_42 (sequence is synthesized)
aacccgggaggcggaggttgtatgaaactctatctcaaaaacaacaacaacaacaaaacaaagccctaaggttcag

SEQ ID NO: 547399 - DNA, 120 bp, Artificial Sequence
  ENSG00000167995_43 (sequence is synthesized)
aaaaacaacaacaacaacaaaacaaagccctaaggttcagaagcccctgccctttagaaggcagatcggcaccacctctccttattcaagatgcctgttgggctgtcttgttcctcacct

SEQ ID NO: 547400 - DNA, 120 bp, Artificial Sequence
  ENSG00000167995_44 (sequence is synthesized)
caagtggcttgtccaggtattccctcccaccacagccaatactccgaacagatgttctgaatcacacagttttctctccacctctttatctttccttccttctgttgcccacccactctc

SEQ ID NO: 547401 - DNA, 120 bp, Artificial Sequence
  ENSG00000167995_45 (sequence is synthesized)
tctgttgcccacccactctctctcccttcctaccttcctttattttttggtaatgggggtgtaagtctctgtctctgcccttcctgtcactgtgacacacacacacacacacacacacac

SEQ ID NO: 547402 - DNA, 120 bp, Artificial Sequence
  ENSG00000167995_46 (sequence is synthesized)
acacgcattcctattcctctaaattccccctgcccccccagttatctttggtttctgcagatcaaaacaaatcacacttttatgcttgaaattctccggggtgccccagtggcctgcaag

SEQ ID NO: 547403 - DNA, 120 bp, Artificial Sequence
  ENSG00000167995_47 (sequence is synthesized)
atgtcccctggacccctaaggcagacgcgtgtcacctcttcggggctttgttagggcattttagaggttgctatccaggaatctgcccacctagactgccctttagttcagcccagcttc

SEQ ID NO: 547404 - DNA, 120 bp, Artificial Sequence
  ENSG00000167995_48 (sequence is synthesized)
agtatatatctctgttgcatgaatgaataaaattatgcaactccaggtaagatacatgaggtgagataaaggcagtgactcagccgagtgatacactcagggacagctgtgggtgttcag

SEQ ID NO: 547405 - DNA, 120 bp, Artificial Sequence
  ENSG00000167995_49 (sequence is synthesized)
ggaaggactggctcagaagagttagaggggctgtgtccagaagtgtgtgggtgcccacaagtgtggggggctggagccctaaactctgcctttgaagacagtggtcaggcaggaagggcg

SEQ ID NO: 547406 - DNA, 120 bp, Artificial Sequence
  ENSG00000167995_50 (sequence is synthesized)
aagcccctcctagtgcaggggtctgcctaggaacttagaatagcactagttaatgcatacaggttgcttcagtaagtgtcaggcactgtactatgctctttataaacattaactattttt

SEQ ID NO: 547407 - DNA, 120 bp, Artificial Sequence
  ENSG00000167995_51 (sequence is synthesized)
attctggtttgttatcccaagttttcagataattaaagtacaggttcagagagagtaagttgtccaaggccacatagctaccaaatggtgcatttgctactcgaaggacagcctgtgatc

SEQ ID NO: 547408 - DNA, 120 bp, Artificial Sequence
  ENSG00000167995_52 (sequence is synthesized)
agtgatgcagtggaacgttaggacctggctcttgtcatccagaactatgttttcttttctttttgagacagtatctcgctctgtcgcccaggttggagcgcagtggcgtgatcttggctc

SEQ ID NO: 547409 - DNA, 120 bp, Artificial Sequence
  ENSG00000167995_53 (sequence is synthesized)
gccaggctggtctccaactcctgaccagtaatctgcccgctttggcctcccaaaatgctggaattataggtgtcaaaactatgttttctgataagctacgatgcttggatgggaagtgga

SEQ ID NO: 547410 - DNA, 120 bp, Artificial Sequence
  ENSG00000167995_54 (sequence is synthesized)
atgggaagtggaagtggggttccctgggatgggggaggggcagcaaagtcccagcaggcagccaggccatcacaggtacctcctgaattgactttgtcctaccgagtaaagggctcaggc

SEQ ID NO: 547411 - DNA, 120 bp, Artificial Sequence
  ENSG00000167995_55 (sequence is synthesized)
cacccacagcagccagacttatccccacatggtcccacttccctgattccatctgaatccctcttgagctgcagtgggctgaagggctatcccagctggtcctttctccccaggacaaca

SEQ ID NO: 547412 - DNA, 120 bp, Artificial Sequence
  ENSG00000167995_56 (sequence is synthesized)
gagttgaaagtgccttggagagtgttgggcacatgtcagggttcatactcaagggtttcttccacggtatccagtgctgttctcgcttgttcttttctttttttttttttaaacggagtt

SEQ ID NO: 547413 - DNA, 120 bp, Artificial Sequence
  ENSG00000167995_57 (sequence is synthesized)
tacatgtgtgagccactgtgcctggctgcttgttcttttaagaaccaaatatcctactagactgcaatcgagtttaactacagtctatagatagtgtgaggaagggttgggaaggtgatc

SEQ ID NO: 547414 - DNA, 120 bp, Artificial Sequence
  ENSG00000167995_58 (sequence is synthesized)
gatcaaatgaaggctggaggcttgcttaggtcagaaacatttctggaggatgactttgagccctacatggtctgtaccccagcagctgaaggttgttgaggggtggggagggctgaaaac

SEQ ID NO: 547415 - DNA, 120 bp, Artificial Sequence
  ENSG00000167995_59 (sequence is synthesized)
agaacgataaagcatagaccttgtctccaaggaatgcacaatttatggagggagctcaaacccaagcctcaaactctggatacaaggtacaaagtactggatgtccagaaaagggacaga

SEQ ID NO: 547416 - DNA, 120 bp, Artificial Sequence
  ENSG00000167995_60 (sequence is synthesized)
acatggaacacagtcatctttgtctgcctgggaggcggcttccagctgggtctggagctgagccatggaacatgggaagaatctgaacttgggcaagggcaggccatactctctggtaga

SEQ ID NO: 547417 - DNA, 120 bp, Artificial Sequence
  ENSG00000167995_61 (sequence is synthesized)
taagctttcccttgcagggtaaaggtctggggctcccgggatgcctgttgctaggaagtcaaatttctctttgtggatgtcactcccagttggaaccacaaattcctggcattgcccaga

SEQ ID NO: 547418 - DNA, 120 bp, Artificial Sequence
  ENSG00000167995_62 (sequence is synthesized)
gtcactcatgggcctcatctgaaccactcatgccagggcaccagtgtttctgactgcctggagtgaggggttttacaggggaagtgaatgatgaggaggcctttacacgccaggcggggt

SEQ ID NO: 547419 - DNA, 120 bp, Artificial Sequence
  ENSG00000167995_63 (sequence is synthesized)
ggttgcgggggttggatgttaactctggtcaagagggaatcaacaaacagtgaggtgagctgggcctggagggatcaccgggaggtacaggacagatcaggagagaggtgagagctgggg

SEQ ID NO: 547420 - DNA, 120 bp, Artificial Sequence
  ENSG00000167995_64 (sequence is synthesized)
catggtgaggaagacggtgtggccttggcttgggccaactgagagagaggagcgggggtaagggagaagtaaggccaggtgttggtcctttgtccactggctcagccctgcatctcctgt

SEQ ID NO: 547421 - DNA, 120 bp, Artificial Sequence
  ENSG00000167996_0 (sequence is synthesized)
gccagacgttcttcgccgagagtcgtcggggtttcctgcttcaacagtgcttggacggaacccggcgctcgttccccaccccggccggccgcccatagccagccctccgtcacctcttca

SEQ ID NO: 547422 - DNA, 120 bp, Artificial Sequence
  ENSG00000167996_1 (sequence is synthesized)
ttcaccgcaccctcggactgccccaaggcccccgccgccgctccagcgccgcgcagccaccgccgccgccgccgcctctccttagtcgccgccatgacgaccgcgtccacctcgcaggtg

SEQ ID NO: 547423 - DNA, 120 bp, Artificial Sequence
  ENSG00000167996_2 (sequence is synthesized)
agaactaccaccaggactcagaggccgccatcaaccgccagatcaacctggagctctacgcctcctacgtttacctgtccatgtcttactactttgaccgcgatgatgtggctttgaaga

SEQ ID NO: 547424 - DNA, 120 bp, Artificial Sequence
  ENSG00000167996_3 (sequence is synthesized)
tcttcaccaatctcatgaggagagggaacatgctgagaaactgatgaagctgcagaaccaacgaggtggccgaatcttccttcaggatatcaagaaaccagactgtgatgactgggagag

SEQ ID NO: 547425 - DNA, 120 bp, Artificial Sequence
  ENSG00000167996_4 (sequence is synthesized)
gtgatgactgggagagcgggctgaatgcaatggagtgtgcattacatttggaaaaaaatgtgaatcagtcactactggaactgcacaaactggccactgacaaaaatgacccccatttgt

SEQ ID NO: 547426 - DNA, 120 bp, Artificial Sequence
  ENSG00000167996_5 (sequence is synthesized)
acttcattgagacacattacctgaatgagcaggtgaaagccatcaaagaattgggtgaccacgtgaccaacttgcgcaagatgggagcgcccgaatctggcttggcggaatatctctttg

SEQ ID NO: 547427 - DNA, 120 bp, Artificial Sequence
  ENSG00000167996_6 (sequence is synthesized)
ctggcttggcggaatatctctttgacaagcacaccctgggagacagtgataatgaaagctaagcctcgggctaatttccccatagccgtggggtgacttccctggtcaccaaggcagtgc

SEQ ID NO: 547428 - DNA, 120 bp, Artificial Sequence
  ENSG00000167996_7 (sequence is synthesized)
ttttctataagttgtaccaaaacatccacttaagttctttgatttgtaccattccttcaaataaagaaatttggtacccaggtgttgtctttgaggtcttgggatgaatcagaaatctat

SEQ ID NO: 547429 - DNA, 120 bp, Artificial Sequence
  ENSG00000167996_8 (sequence is synthesized)
ccaggctatcttccagattccttaagtgccgttgttcagttctaatcacactaatcaaaaagaaacgagtatttgtatttattaaactcattagtttgggcagtatactaaggtgtggct

SEQ ID NO: 547430 - DNA, 120 bp, Artificial Sequence
  ENSG00000167996_9 (sequence is synthesized)
gtcttggattcagatagaactaagggttcccgactctgaatccagagtctgagttaaatgtttccaatggttcagtctagctttcacagtttttatgaataaaaggcattaaaggctgaa

SEQ ID NO: 547431 - DNA, 120 bp, Artificial Sequence
  ENSG00000167996_10 (sequence is synthesized)
agacgttcttcgccgagagtcgtcggggtttcctgcttcaacagtgcttggacggaacccggcgctcgttccccaccccggccgccgccgccgcctctccttagtcgccgccatgacgac

SEQ ID NO: 547432 - DNA, 120 bp, Artificial Sequence
  ENSG00000167996_11 (sequence is synthesized)
ctctacgcctcctacgtttacctgtccatggtcctggtgcatctcatccacagccaacagggacacctggtcaccagggacagaagaagtcccacagaaagatcatcccaggcaggacct

SEQ ID NO: 547433 - DNA, 120 bp, Artificial Sequence
  ENSG00000167996_12 (sequence is synthesized)
tgtatgtgcctgatgacttggaggaatctctccctctctctggacctcagtttccctgcctgtgaaatggggagatgggtgcctgcctgcagcctcaaagattgaggtgagaatcctgtg

SEQ ID NO: 547434 - DNA, 120 bp, Artificial Sequence
  ENSG00000167996_13 (sequence is synthesized)
attgcccttataaagtgatgatacactgggcttttgccttttgtgcttttttaggcttaccatctaaactaaattaggcaaatagtaatgtcccttttgccaaaacgtggtggttagaga

SEQ ID NO: 547435 - DNA, 120 bp, Artificial Sequence
  ENSG00000167996_14 (sequence is synthesized)
ggacttctctggcgcagaaagtcggggcagctggttcttctcggctgtaccctgagaatgctccctcctaggccagggccgcctctgcacacccttcttttttaaggagaccttggtgtc

SEQ ID NO: 547436 - DNA, 120 bp, Artificial Sequence
  ENSG00000168000_0 (sequence is synthesized)
cggcgggctggtttccatggttgcacgattaggtaggggctccgggcgctttgcccacccccgagctggaggggactggcgggaagcggcggttggctgcagggcgctccgccgggcgtg

SEQ ID NO: 547437 - DNA, 120 bp, Artificial Sequence
  ENSG00000168000_1 (sequence is synthesized)
gggtgtagccgtgtcggtgagcgagctctgctcgaggcggagaggagaaactcgggaagcaattgtggctactctaaggctactggtttcgagtcaggccgtgcgaccttaggcaagtcg

SEQ ID NO: 547438 - DNA, 120 bp, Artificial Sequence
  ENSG00000168000_2 (sequence is synthesized)
cacattctctccgtgcagctgcctagcagtgtggattcagtatcaccgtgtgtgtaaagctctttctaagaatcgtaaggaaccaccagctgctgcatcccatggccaggggtggcgtcc

SEQ ID NO: 547439 - DNA, 120 bp, Artificial Sequence
  ENSG00000168000_3 (sequence is synthesized)
aggtggcagagcagctaggaacgcaaggcctgaacctggggccagacaccctgctctcccggccatggtcaacgaccctccagtacctgccttactgtgggcccaggaggtgggccaagt

SEQ ID NO: 547440 - DNA, 120 bp, Artificial Sequence
  ENSG00000168000_4 (sequence is synthesized)
cttggcaggccgtgcccgcaggctgctgctgcagtttggggtgctcttctgcaccatcctccttttgctctgggtgtctgtcttcctctatggctccttctactattcctatatgccgac

SEQ ID NO: 547441 - DNA, 120 bp, Artificial Sequence
  ENSG00000168000_5 (sequence is synthesized)
agtcagccacctcagccctgtgcatttctactacaggaccgactgtgattcctccaccacctcactctgctccttccctgttgccaatgtctcgctgactaagggtggacgtgatcgggt

SEQ ID NO: 547442 - DNA, 120 bp, Artificial Sequence
  ENSG00000168000_6 (sequence is synthesized)
gctgatgtatggacagccgtatcgtgttaccttagagcttgagctgccagagtcccctgtgaatcaagatttgggcatgttcttggtcaccatttcctgctacaccagaggtggccgaat

SEQ ID NO: 547443 - DNA, 120 bp, Artificial Sequence
  ENSG00000168000_7 (sequence is synthesized)
tcgcgttcggtgatgctgcattaccgctcagacctgctccagatgctggacacactggtcttctctagcctcctgctatttggctttgcagagcagaagcagctgctggaggtggaactc

SEQ ID NO: 547444 - DNA, 120 bp, Artificial Sequence
  ENSG00000168000_8 (sequence is synthesized)
tacgcagactatagagagaactcgtacgtgccgaccactggagcgatcattgagatccacagcaagcgcatccagctgtatggagcctacctccgcatccacgcgcacttcactgggctc

SEQ ID NO: 547445 - DNA, 120 bp, Artificial Sequence
  ENSG00000168000_9 (sequence is synthesized)
agatacctgctatacaacttcccgatgacctgcgccttcataggtgttgccagcaacttcaccttcctcagcgtcatcgtgctcttcagctacatgcagtgggtgtgggggggcatctgg

SEQ ID NO: 547446 - DNA, 120 bp, Artificial Sequence
  ENSG00000168000_10 (sequence is synthesized)
ccccgacaccgcttctctttgcaggttaacatccgaaaaagagacaattcccggaaggaagtccaacgaaggatctctgctcatcagccagggcctgaaggccaggaggagtcaactccg

SEQ ID NO: 547447 - DNA, 120 bp, Artificial Sequence
  ENSG00000168000_11 (sequence is synthesized)
caatcagatgttacagaggatggtgagagccctgaagatccctcagggacagagggtcagctgtccgaggaggagaaaccagatcagcagcccctgagcggagaagaggagctagagcct

SEQ ID NO: 547448 - DNA, 120 bp, Artificial Sequence
  ENSG00000168000_12 (sequence is synthesized)
gaggccagtgatggttcaggctcctgggaagatgcagctttgctgacggaggccaacctgcctgctcctgctcctgcttctgcttctgcccctgtcctagagactctgggcagctctgaa

SEQ ID NO: 547449 - DNA, 120 bp, Artificial Sequence
  ENSG00000168000_13 (sequence is synthesized)
cctgctgggggtgctctccgacagcgccccacctgctctagttcctgaagaaaaggggcagactcctcacattccagcactttcccacctgactcctctcccctcgtttttccttcaata

SEQ ID NO: 547450 - DNA, 120 bp, Artificial Sequence
  ENSG00000168000_14 (sequence is synthesized)
tacaaaagcggccggcggagaggggcgggacttccccgggagccggaagtcccgtctcacggttgccctggcagcgcgcgaggctggtgagtcggcagccctgtggcagccggcgggctg

SEQ ID NO: 547451 - DNA, 120 bp, Artificial Sequence
  ENSG00000168000_15 (sequence is synthesized)
tacaaaagcggccggcggagaggggcgggacttccccgggagccggaagtcccgtctcacggttgccctggcagcgcgcgaggctggaaccaccagctgctgcatcccatggccaggggt

SEQ ID NO: 547452 - DNA, 120 bp, Artificial Sequence
  ENSG00000168000_16 (sequence is synthesized)
agtcgcccccctcctcctttcctccctctactctgacacagcacttagcacctgaatcttcgtttctctcccagggaccctccattttccatatccaggaaaatgtgatgcgccacaggt

SEQ ID NO: 547453 - DNA, 120 bp, Artificial Sequence
  ENSG00000168000_17 (sequence is synthesized)
atcagcgtctggatcgccacttcacgttttagccacaagtgactcagtggaagatccagagtcaacagaggctcgtcaggaagatgtctacagaaaaggtagaccaaaaggaggaagctg

SEQ ID NO: 547454 - DNA, 120 bp, Artificial Sequence
  ENSG00000168000_18 (sequence is synthesized)
cctaagagttcctctgctgtacgactgcactcccgcaccctcccctaaatcccccctcttcggcctgtttaccttttaacttggcttcgttgcacgtttgtgtgtgtgtgtttgctcttc

SEQ ID NO: 547455 - DNA, 120 bp, Artificial Sequence
  ENSG00000168000_19 (sequence is synthesized)
gcagcctcttgagcgtcttttgtacttaattcttacactgtggacgctctctcgcgcccgccatcccccgacccctctgatctccgatccttgacgatgtctagcctgcattgattggcc

SEQ ID NO: 547456 - DNA, 120 bp, Artificial Sequence
  ENSG00000168000_20 (sequence is synthesized)
cttttccctgggtatggcagatctattgcttgatgatcctctccccccaagaattctaacacaggagctgtcctgaggctctggatgactttattcttcaaatggctttaccctcccagt

SEQ ID NO: 547457 - DNA, 120 bp, Artificial Sequence
  ENSG00000168000_21 (sequence is synthesized)
agagtctgacggggccctgctgtgggtggagcaaagggtgcctcatatctctggggtgcttggggtcggccacaaaggtggtaggaaatggggtcgacagataggtgagggtgggccttg

SEQ ID NO: 547458 - DNA, 120 bp, Artificial Sequence
  ENSG00000168000_22 (sequence is synthesized)
tgcttcagataacctcacatggtcaggcaagggttagggatgggatgcaaggagcctaaggggctcacaacaattactgacctaaggaagggcccaggagagggaaaagggaggagttgt

SEQ ID NO: 547459 - DNA, 120 bp, Artificial Sequence
  ENSG00000168000_23 (sequence is synthesized)
ctgctcatcagccaggtaaaggtgttggctggggagctgttgaggtgggctaggttgagctgggctgggccagaaggagtccctgcttcatccagtatgaggcttagggtatcaccgact

SEQ ID NO: 547460 - DNA, 120 bp, Artificial Sequence
  ENSG00000168000_24 (sequence is synthesized)
gaggccaaggccgactccccctctcaaatggcgtggtctgggcctatgacggcccctgcagtggagtctgtactggctgcgggggaccctgctcatttgaaaatctgacatcagctgggc

SEQ ID NO: 547461 - DNA, 120 bp, Artificial Sequence
  ENSG00000168000_25 (sequence is synthesized)
attttgagaccagaagagggcggaagggaccatattgagaacgccggttgcctgggggccgccattttaagagaagccctgtacggtaaactccgtgacgtgggggctgccatgttggta

SEQ ID NO: 547462 - DNA, 120 bp, Artificial Sequence
  ENSG00000168000_26 (sequence is synthesized)
gaccggacaaagaggagatgcctacaggtcctaggagctgtgggcgataaaaatcagcgccagctggatgaccgcctcactcggccgcttcgcgggtgaaatggcctgtggtgaaggaac

SEQ ID NO: 547463 - DNA, 120 bp, Artificial Sequence
  ENSG00000168000_27 (sequence is synthesized)
ctcttcagctacatgcagtgggtgtgggggggcatctggccccgacaccgcttctctttgcaggtcgaaaggggcaaggacccccttttgtccctttgatctttgtgggtggtcaggggt

SEQ ID NO: 547464 - DNA, 120 bp, Artificial Sequence
  ENSG00000168000_28 (sequence is synthesized)
atgttggggattaaggcatgagggtcctgattgttagtgagggaagtcagtcctggctgctcagtagtttttcctccacaggttaacatccgaaaaagagacaattcccggaaggaagtc

SEQ ID NO: 547465 - DNA, 120 bp, Artificial Sequence
  ENSG00000168002_0 (sequence is synthesized)
aagtgtttccggtggattcccagggactgtcggaggtgtggactctgcctgcctacctggtctgggaagatgttctaccatatctccctagagcacgaaatcctgctgcacccgcgctac

SEQ ID NO: 547466 - DNA, 120 bp, Artificial Sequence
  ENSG00000168002_1 (sequence is synthesized)
ttcggccccaacttgctcaacacggtgaagcagaagctcttcaccgaggtggaggggacctgcacagggaagtatggctttgtaattgctgtcaccaccattgacaatattggtgctggt

SEQ ID NO: 547467 - DNA, 120 bp, Artificial Sequence
  ENSG00000168002_2 (sequence is synthesized)
gtgatccagccaggccgaggctttgtcctttatccagttaagtacaaggccattgttttccggccatttaaaggggaggtcgtggatgctgttgtcactcaggtcaacaaggttggactc

SEQ ID NO: 547468 - DNA, 120 bp, Artificial Sequence
  ENSG00000168002_3 (sequence is synthesized)
taactccaacccaccatgttacaagacaatggatgaggatattgtgattcagcaggacgatgagatccgcttaaagattgtggggacccgtgtggacaagaatgacatttttgctattgg

SEQ ID NO: 547469 - DNA, 120 bp, Artificial Sequence
  ENSG00000168002_4 (sequence is synthesized)
ctccctgatggacgattacttggggcttgtaagctgagcctggtggcctcctacccttggtcctactctaggaagtgtgattgtcacacttatcatgttgtccagaggtccagtctggct

SEQ ID NO: 547470 - DNA, 120 bp, Artificial Sequence
  ENSG00000168002_5 (sequence is synthesized)
gctgttgtggaggcaaggaaggcaactcatcccagaaggcatctggtgcttcttgtagcttaactactgcctcctcatttttcagtatgtgttctaagtataaaaagtccttggttctca

SEQ ID NO: 547471 - DNA, 120 bp, Artificial Sequence
  ENSG00000168002_6 (sequence is synthesized)
tggtctgggaagatgttctaccatgtgagcagggctcagggtggcggcaagggctgggtggaaaggaagagcaaggccaggcgccggcgcgagactccccttgtcgtccaataacctgcc

SEQ ID NO: 547472 - DNA, 120 bp, Artificial Sequence
  ENSG00000168002_7 (sequence is synthesized)
attctcaggcatcccgaagattgagatctgttgcctcaaggactccagccttcttggacatttattgtgaaattaccagaacagcatttggtcttacacatactgatctctgttctgtct

SEQ ID NO: 547473 - DNA, 120 bp, Artificial Sequence
  ENSG00000168002_8 (sequence is synthesized)
ctcagcgacttttattgcagatgtctttagaggctcttggacacacagtgtcttcctgtttctcatcctccttgcaggttggactcttcacagaaattgggcccatgtcttgcttcatct

SEQ ID NO: 547474 - DNA, 120 bp, Artificial Sequence
  ENSG00000168002_9 (sequence is synthesized)
ttgtccttttgctctccccgaccctacccccaagagctcagcgacttttattgcagatgtctttagaggctcttggacacacagtgtcttcctgtttctcatcctccttgcaggtatggc

SEQ ID NO: 547475 - DNA, 120 bp, Artificial Sequence
  ENSG00000168002_10 (sequence is synthesized)
ctatacctgcaacccctccccaactcctactcgtcctgccacccactctggggacccctctcctctctcaggcagccagttgcttcctgctttgggttcccagggcgccctctgcaatgc

SEQ ID NO: 547476 - DNA, 120 bp, Artificial Sequence
  ENSG00000168002_11 (sequence is synthesized)
tggacaataagacttccttctctcagctgagatgggtcattcattgactcctcaaacattttaaaaacccttggtgtgtgccaggacccgtgttgggctcagaacaaggtatggctttgt

SEQ ID NO: 547477 - DNA, 120 bp, Artificial Sequence
  ENSG00000168002_12 (sequence is synthesized)
cagtgtaatcattgttcctgtgtctgctctccctctgtcattctgctggttttctcttatcccctgtgcccagggaccacacaccatgggcctctatatatcttctgaatgaatgaccag

SEQ ID NO: 547478 - DNA, 120 bp, Artificial Sequence
  ENSG00000168002_13 (sequence is synthesized)
aaaaagcagatcgagagtttgggggaggaaggaagtagcctgggatttgaccatctctgggctttgcacagaggggcctctctgatattaatgagctgggacccagctcagggcagtgga

SEQ ID NO: 547479 - DNA, 120 bp, Artificial Sequence
  ENSG00000168003_0 (sequence is synthesized)
accgaccgcattgcggcttggttttctcacccagtgcatgtggcaggagcggtgagatcactgcctcacggcgatcctggactgacggtcacgactgcctaccctctaaccctgttctga

SEQ ID NO: 547480 - DNA, 120 bp, Artificial Sequence
  ENSG00000168003_1 (sequence is synthesized)
gctgccccttgcccacacaccccaaacctgtgtgcaggatccgcctccatggagctacagcctcctgaagcctcgatcgccgtcgtgtcgattccgcgccagttgcctggctcacattcg

SEQ ID NO: 547481 - DNA, 120 bp, Artificial Sequence
  ENSG00000168003_2 (sequence is synthesized)
cgccagttgcctggctcacattcggaggctggtgtccagggtctcagcgcgggggacgactcagagttggggtctcactgtgttgcccagactggtctcgaactcttggcctcaggtgat

SEQ ID NO: 547482 - DNA, 89 bp, Artificial Sequence
  ENSG00000168003_3 (sequence is synthesized)
cttggcctcaggtgatcctcttccctcagcttcccagaatgccgagatgatagagacggggtctgactgtgttacccaggctggtcttc

SEQ ID NO: 547483 - DNA, 120 bp, Artificial Sequence
  ENSG00000168003_4 (sequence is synthesized)
gacaccgaggtggatatgaaggaggtggagctgaatgagttagagcccgagaagcagccgatgaacgcggcgtctggggcggccatgtccctggcgggagccgagaagaatggtctggtg

SEQ ID NO: 547484 - DNA, 120 bp, Artificial Sequence
  ENSG00000168003_5 (sequence is synthesized)
aagatcaaggtggcggaagacgaggcggaggcggcagccgcggctaagttcacgggcctgtccaaggaggagctgctgaaggtggcaggcagccccggctgggtacgcacccgctgggca

SEQ ID NO: 547485 - DNA, 120 bp, Artificial Sequence
  ENSG00000168003_6 (sequence is synthesized)
ctgctgctgctcttctggctcggctggctcggcatgcttgctggtgccgtggtcataatcgtgcgagcgccgcgttgtcgcgagctaccggcgcagaagtggtggcacacgggcgccctc

SEQ ID NO: 547486 - DNA, 120 bp, Artificial Sequence
  ENSG00000168003_7 (sequence is synthesized)
taccgcatcggcgaccttcaggccttccagggccacggcgcgggcaacctggcgggtctgaaggggcgtctcgattacctgagctctctgaaggtgaagggccttgtgctgggtccaatt

SEQ ID NO: 547487 - DNA, 120 bp, Artificial Sequence
  ENSG00000168003_8 (sequence is synthesized)
cacaagaaccagaaggatgatgtcgctcagactgacttgctgcagatcgaccccaattttggctccaaggaagattttgacagtctcttgcaatcggctaaaaaaaagagcatccgtgtc

SEQ ID NO: 547488 - DNA, 120 bp, Artificial Sequence
  ENSG00000168003_9 (sequence is synthesized)
ttctggaccttactcccaactaccggggtgagaactcgtggttctccactcaggttgacactgtggccaccaaggtgaaggatgctctggagttttggctgcaagctggcgtggatgggt

SEQ ID NO: 547489 - DNA, 120 bp, Artificial Sequence
  ENSG00000168003_10 (sequence is synthesized)
tccaggttcgggacatagagaatctgaaggatgcatcctcattcttggctgagtggcaaaatatcaccaagggcttcagtgaagacaggctcttgattgcggggactaactcctccgacc

SEQ ID NO: 547490 - DNA, 120 bp, Artificial Sequence
  ENSG00000168003_11 (sequence is synthesized)
ttcagcagatcctgagcctactcgaatccaacaaagacttgctgttgactagctcatacctgtctgattctggttctactggggagcatacaaaatccctagtcacacagtatttgaatg

SEQ ID NO: 547491 - DNA, 120 bp, Artificial Sequence
  ENSG00000168003_12 (sequence is synthesized)
ccactggcaatcgctggtgcagctggagtttgtctcaggcaaggctcctgacttccttcttgccggctcaacttctccgactctaccagctgatgctcttcaccctgccagggacccctg

SEQ ID NO: 547492 - DNA, 120 bp, Artificial Sequence
  ENSG00000168003_13 (sequence is synthesized)
ttttcagctacggggatgagattggcctggatgcagctgcccttcctggacagcctatggaggctccagtcatgctgtgggatgagtccagcttccctgacatcccaggggctgtaagtg

SEQ ID NO: 547493 - DNA, 120 bp, Artificial Sequence
  ENSG00000168003_14 (sequence is synthesized)
ccaacatgactgtgaagggccagagtgaagaccctggctccctcctttccttgttccggcggctgagtgaccagcggagtaaggagcgctccctactgcatggggacttccacgcgttct

SEQ ID NO: 547494 - DNA, 120 bp, Artificial Sequence
  ENSG00000168003_15 (sequence is synthesized)
ccgctgggcctggactcttctcctatatccgccactgggaccagaatgagcgttttctggtagtgcttaactttggggatgtgggcctctcggctggactgcaggcctccgacctgcctg

SEQ ID NO: 547495 - DNA, 120 bp, Artificial Sequence
  ENSG00000168003_16 (sequence is synthesized)
ccagcgccagcctgccagccaaggctgacctcctgctcagcacccagccaggccgtgaggagggctcccctcttgagctggaacgcctgaaactggagcctcacgaagggctgctgctcc

SEQ ID NO: 547496 - DNA, 120 bp, Artificial Sequence
  ENSG00000168003_17 (sequence is synthesized)
gcttcccctacgcggcctgacttcagcctgacatggacccactacccttctcctttccttcccaggccctttggcttctgatttttctcttttttaaaaacaaacaaacaaactgttgca

SEQ ID NO: 547497 - DNA, 120 bp, Artificial Sequence
  ENSG00000168003_18 (sequence is synthesized)
cagaggccgcgcctgctgctgagcagatgcagtagccgaaactgcgcggaggcacagaggccggggagagcgttctgggtccgagggtccaggtaggggttgagccaccatctgaccgca

SEQ ID NO: 547498 - DNA, 120 bp, Artificial Sequence
  ENSG00000168003_19 (sequence is synthesized)
cccacccttaggcgctgggagaagggagggtggggaggtcaggggcctctcagaggggcctcacttgttaacccagcccccatttcaggtctgaaggggcgtctcgattacctgagctct

SEQ ID NO: 547499 - DNA, 120 bp, Artificial Sequence
  ENSG00000168003_20 (sequence is synthesized)
aaactcctgggttcaagtgatcctccctcctcagcctccccagtatctgggactatagggatgtaacactacacccagctaatttttaaaaattttgtagtagagatgagggctcattat

SEQ ID NO: 547500 - DNA, 120 bp, Artificial Sequence
  ENSG00000168003_21 (sequence is synthesized)
ctcattatgttgctgaggctggtttcaaatgcctgggctcaagcaatcctcttggccttgacctcccagactgctggaattacagatgtgagccaccatgcctgaccccaggccttttta

SEQ ID NO: 547501 - DNA, 120 bp, Artificial Sequence
  ENSG00000168003_22 (sequence is synthesized)
gactgacattttagatcctgtctgctgctcactgattatgactgtggacgcgtctccctgcttctctgggtctgtttcttcatctctaaaataggatgctctggagttttggctgcaagc

SEQ ID NO: 547502 - DNA, 79 bp, Artificial Sequence
  ENSG00000168003_23 (sequence is synthesized)
cccctgttttcagctacggggatgagattggcctggatgcagctgcccttcctggacagacagcatttccctttgcagc

SEQ ID NO: 547503 - DNA, 120 bp, Artificial Sequence
  ENSG00000168003_24 (sequence is synthesized)
gcaagccttggtgggggaaaaggcagaagttgtgactggctgcctctgagagtgcaagtagccatgcaaagttgggaaaaccagacggcggccggagccgtgaaccaggggcaaatggag

SEQ ID NO: 547504 - DNA, 120 bp, Artificial Sequence
  ENSG00000168003_25 (sequence is synthesized)
aaaaaagatagagacaattttcaacatgttgaccggtctggttttgaactcgcctggcctgccttcccatatcttaaggcccttccttgctcacatctgtttcaatggaatgaattttgc

SEQ ID NO: 547505 - DNA, 120 bp, Artificial Sequence
  ENSG00000168003_26 (sequence is synthesized)
tgatgtgtttggaatagagcccagtctgaaattataagcactggggtactcctatgtgtctgggactctatgccaagtattttatagatgttttctaattctctgtataaccatacaagg

SEQ ID NO: 547506 - DNA, 120 bp, Artificial Sequence
  ENSG00000168003_27 (sequence is synthesized)
tatataatttgccataggttcaaatgtgtacccagcaggctaggagtagggctttgaatgtcacctagctcctgatgtctgggtcctaggacactgacctgttcagaatgggtagaacaa

SEQ ID NO: 547507 - DNA, 120 bp, Artificial Sequence
  ENSG00000168003_28 (sequence is synthesized)
aaatggaagcagatactgacactgctggtagctgtgattctaagatagaattctggactcccagcatttgggtaggaccccgggatcatccagtttaggccttgccagttactaggggac

SEQ ID NO: 547508 - DNA, 120 bp, Artificial Sequence
  ENSG00000168003_29 (sequence is synthesized)
cctttaaaagttgctgatgagggaatgtttttggatggtttggcatgaggggcggtaccctcagatggaaatggagaccagaggagagagtacatggcccagagaaagggaagaaaagga

SEQ ID NO: 547509 - DNA, 120 bp, Artificial Sequence
  ENSG00000168003_30 (sequence is synthesized)
gaatgggggtgaagttccacagtgtgtgcaggactgccaggattccattcagcagcactggcctcttttcaaatctaaactgccctggggctatgctttgaatttcaatctttcatcctt

SEQ ID NO: 547510 - DNA, 120 bp, Artificial Sequence
  ENSG00000168003_31 (sequence is synthesized)
gtggctttcaaagttgaagctgtgtgatttgccagaggcaagaatgagaagtaaaatgctgtagcactaagaaaatgagtggaagggtagagctggaggggtccaaaggctaagcctttg

SEQ ID NO: 547511 - DNA, 120 bp, Artificial Sequence
  ENSG00000168003_32 (sequence is synthesized)
tagtgcaggtggggaagacccaggcaaggcacaggactctccccagctcccggggaagtgtgtggtgggtgaggtttagtgtgggctggaattttctgagccttttcctgagaactgatg

SEQ ID NO: 547512 - DNA, 120 bp, Artificial Sequence
  ENSG00000168003_33 (sequence is synthesized)
ttgcccgggttcaaattcaagcttttgtaccaagtaatacataggaaacactcagtgacttgcatttgtgatttccttattttcccttaactcatagactgtctcatgattgcgtcttcc

SEQ ID NO: 547513 - DNA, 120 bp, Artificial Sequence
  ENSG00000168003_34 (sequence is synthesized)
gatatgaaggaggcggcagccgcggctaagttcacgggcctgtccaaggaggagctgctgaaggtggcaggcagccccggctgggtacgcacccgctgggcactgctgctgctcttctgg

SEQ ID NO: 547514 - DNA, 120 bp, Artificial Sequence
  ENSG00000168003_35 (sequence is synthesized)
tcctgctaactggctctgagttttcctagggcaggtagaggggagatttgttagtcttcagcctaaaatggatttgtccagtcgtctgggggctttctacttggctgtggaatcttgagc

SEQ ID NO: 547515 - DNA, 120 bp, Artificial Sequence
  ENSG00000168003_36 (sequence is synthesized)
aggtcatttaacttctgggcttcagtgcccttatttgcaaaatatagatatttactaaaccagtggttttaaacttgtaaaacagtaggtttttttggggggggggaatcccaaatattg

SEQ ID NO: 547516 - DNA, 89 bp, Artificial Sequence
  ENSG00000168003_37 (sequence is synthesized)
cttcccagaatgccgagatgatagagacggggtctgactgtgttacccaggctggtcttcagcttccaagaatgctgaggttacagaaa

SEQ ID NO: 547517 - DNA, 120 bp, Artificial Sequence
  ENSG00000168004_0 (sequence is synthesized)
tttgcagcccgcggcgctttcccctccgcggttcctccccgagccgcccccagtgcccaagcttccgcggctccgccgaccaggggccgcgccgactgggaactcgccaggggcgtagtc

SEQ ID NO: 547518 - DNA, 120 bp, Artificial Sequence
  ENSG00000168004_1 (sequence is synthesized)
ccctgcaaggcctgggggccggcgaggccgcagaggcgggatgggcctgagcccgggcgccgagggggagtacgcgctccgcctccctaggattcccccacccctccccaaacccgcctc

SEQ ID NO: 547519 - DNA, 120 bp, Artificial Sequence
  ENSG00000168004_2 (sequence is synthesized)
gcgaaccgccagtaccgggcccaaggaccagccgcctgcgctcagacgttcagctgtgccccactcaggtctaaatagcatttccccccttgaattagaagaatccgtgggattcgcagc

SEQ ID NO: 547520 - DNA, 120 bp, Artificial Sequence
  ENSG00000168004_3 (sequence is synthesized)
gttggtccagctcccagccaagcagcctccgccgggcacattagaacagggcagaagcatccagcaaggggagaaggctgtagttagcttggagaccacacccagccagaaagcagactg

SEQ ID NO: 547521 - DNA, 120 bp, Artificial Sequence
  ENSG00000168004_4 (sequence is synthesized)
ttgagatttttcgaattggctatgagcactgggccatctatgtagaagatgattgcgtggtccatctggctcccccaagtgaggagtttgaggtgggcagcattacttccatctttagca

SEQ ID NO: 547522 - DNA, 120 bp, Artificial Sequence
  ENSG00000168004_5 (sequence is synthesized)
atcgggccgtggtgaaatacagtcgtctggaggatgtgctgcatggctgctcctggaaggtcaataacaagctagatgggacgtacctgcccttgccggtggacaagatcatccagcgta

SEQ ID NO: 547523 - DNA, 120 bp, Artificial Sequence
  ENSG00000168004_6 (sequence is synthesized)
caaaaaagatggtcaacaagatcgtgcagtacagcctgattgaagggaactgtgagcactttgtcaatggcctcagatatggcgtaccccggagccagcaggtagagcacgccctgatgg

SEQ ID NO: 547524 - DNA, 120 bp, Artificial Sequence
  ENSG00000168004_7 (sequence is synthesized)
aaggagcgaaggctgctggagcagttatttcagctgtagtggatagcataaagcccaaaccaataactgcctgaaggtgatgaaaactccagctagaggaagagttactgacacaagcaa

SEQ ID NO: 547525 - DNA, 120 bp, Artificial Sequence
  ENSG00000168004_8 (sequence is synthesized)
aaagaacatgcttccttcccttgccttctctcaatggctccgattaagaaaattgtgaacttctggaagaatctacaatgtatccaattacccttccagaaatacatccaatatatacga

SEQ ID NO: 547526 - DNA, 120 bp, Artificial Sequence
  ENSG00000168004_9 (sequence is synthesized)
ggatctaatttcactctctttgtaggatgggaccttgcttgtgtcttaggctgaccttggtctccgatgcttgagtgccatcagaaacatcccagaaacctctgcttgaatatttccagt

SEQ ID NO: 547527 - DNA, 120 bp, Artificial Sequence
  ENSG00000168004_10 (sequence is synthesized)
aacgaagatgtctttttccagatgttctttttatttaactaaaatgtctctagcttctttccatttatgataatcctgcccttttcgacccacagtgtagctcagaggaggaggacctta

SEQ ID NO: 547528 - DNA, 120 bp, Artificial Sequence
  ENSG00000168004_11 (sequence is synthesized)
ggtaccttaatctagaaacacatatcccaagaaatattttctttttaaaattatacatcaactttatgccttattgtttaaaaatcttctatcaaaagtatcatcgataagacaatttat

SEQ ID NO: 547529 - DNA, 120 bp, Artificial Sequence
  ENSG00000168004_12 (sequence is synthesized)
cttgcttttgtacctcataattaccctaaaatgtgaagtttctagtctcactgatttcagatgaatatttaaaataatttgataagtttaatcaattgaactctactgtgtgagtgaggg

SEQ ID NO: 547530 - DNA, 120 bp, Artificial Sequence
  ENSG00000168004_13 (sequence is synthesized)
agagaaaggagttatttttgtgttttgaagaaagttgacaggatggaagatctgaaattatggctggggattgtagtgatagctggtagctgaaaccacccaaaaaagctagaaaagtgt

SEQ ID NO: 547531 - DNA, 120 bp, Artificial Sequence
  ENSG00000168004_14 (sequence is synthesized)
tctcttatgcctccagagatacctagaaaatatgaagaatgtggaaaagagcaagatggaaccctcagagtgtttcagataaggtctgttggtatctccataagcttttctcctatttgg

SEQ ID NO: 547532 - DNA, 120 bp, Artificial Sequence
  ENSG00000168004_15 (sequence is synthesized)
agaaaatagactctcactgaaactcttcaatgtttttaccctccatccttttcttagcaatctaaactcaatggcctcctgttccccaacactgcagtctgggcatctgactttgtcttc

SEQ ID NO: 547533 - DNA, 120 bp, Artificial Sequence
  ENSG00000168004_16 (sequence is synthesized)
cctctgcactcatttctgtgaatcatgaccaggatgaaactgatatccctagttcctcttccccatttcttctcacactcccctgcctgagaatcagttgagttcccaatacctcttcct

SEQ ID NO: 547534 - DNA, 120 bp, Artificial Sequence
  ENSG00000168004_17 (sequence is synthesized)
tcagtctctattcattatatggtctaggttgagacttccttggaagcagaacctgagtaccaggaactcatattttataaagtatatttattccttttagctgcaaactaacccagccat

SEQ ID NO: 547535 - DNA, 120 bp, Artificial Sequence
  ENSG00000168004_18 (sequence is synthesized)
gttttagtgaatgctttaatctgaagatgactttgagctcattgaccatattaatctttcatcaaacaaactggatgttgtttcattaacaaaaaactcctccacaccaaggagtgttta

SEQ ID NO: 547536 - DNA, 120 bp, Artificial Sequence
  ENSG00000168004_19 (sequence is synthesized)
gtaacttctgcacagaggactcatccatctcttgcttatgtttgggacagaaagacacttctctggctttttactggcttgaacccaatgggacagagactctctagaaagtttcagggc

SEQ ID NO: 547537 - DNA, 120 bp, Artificial Sequence
  ENSG00000168004_20 (sequence is synthesized)
tcacattcacttgtttgtccaaaaaatatttttgagtgtctcccaagtgccaaaccctggctactcccacctttgcctgagcccatgagcggtagtctgggggctggatgtgaggagttc

SEQ ID NO: 547538 - DNA, 120 bp, Artificial Sequence
  ENSG00000168004_21 (sequence is synthesized)
tgagttggctaggaagacacaaggcacaatggacatggggcaaagtccacttgctggacattggtcccttccacttccaagctgtccatcaggctgagagatctggaatgcataccccac

SEQ ID NO: 547539 - DNA, 120 bp, Artificial Sequence
  ENSG00000168004_22 (sequence is synthesized)
actttgaagatgaggaagggcgagtttctcaaagtgtgtgtgtgtgtttctcttttaatctgtaatggtttctgcattttgaggtagaaacagaaatctcttttttgagtgggaccactc

SEQ ID NO: 547540 - DNA, 120 bp, Artificial Sequence
  ENSG00000168004_23 (sequence is synthesized)
gggtgcggcttcttagtcttgttgatataataaagcacatgcccactcctcatggagtggagaggagaaaattctaagggaacgtactctgaatgcaaatgtttctgagattaaacacta

SEQ ID NO: 547541 - DNA, 120 bp, Artificial Sequence
  ENSG00000168004_24 (sequence is synthesized)
tctctttggcagaggaactgaacccgctccagcacctagttccacaaccctctccattcatcccaagattttctgaggcctaaccaggggccaggcacgatgctagactagagctctgag

SEQ ID NO: 547542 - DNA, 80 bp, Artificial Sequence
  ENSG00000168005_0 (sequence is synthesized)
ggattgagccctccccgcccgggctcccgacgcgccgaggtctcggggaggcccggacgcgccggtcgcaggcccggccg

SEQ ID NO: 547543 - DNA, 120 bp, Artificial Sequence
  ENSG00000168005_1 (sequence is synthesized)
cggcgggcccggcgctattccggccaggaggcgggaggcggttgccggctgcgcgccgaagcctgcgcgccagtcctccggccactgctatcgcccacggccgcaccatggccctaaagg

SEQ ID NO: 547544 - DNA, 120 bp, Artificial Sequence
  ENSG00000168005_2 (sequence is synthesized)
aaggccgagggcgccgcactcgactgcttcgaggtgacgctgaaatgcgaggaaggggaggacgaggaggaggccatggtggtggccgtaattccgcggcccgagccgatgctcagagtg

SEQ ID NO: 547545 - DNA, 120 bp, Artificial Sequence
  ENSG00000168005_3 (sequence is synthesized)
acccaacaggagaagaccccaccgcctagacccagcccgctagaggcaggcagtgatggctgtgaggagccgaagcagcaggtgtcttgggagcaggagttcctggtgggcagcagccca

SEQ ID NO: 547546 - DNA, 120 bp, Artificial Sequence
  ENSG00000168005_4 (sequence is synthesized)
ggaggcagcgggcgggcactgtgcatggtgtgtggcgctgagatccgggcaccctcggccgacacagctcgctcgcacatcttggagcagcaccctcacaccttggacctgagcccttct

SEQ ID NO: 547547 - DNA, 120 bp, Artificial Sequence
  ENSG00000168005_5 (sequence is synthesized)
gagaagagcaatatcctggaggcctggagtgaaggggtggccctcttgcaagacgtgagagctgagcagccgtccccacccaactcagactcgggccaggatgcccacccagacccagac

SEQ ID NO: 547548 - DNA, 120 bp, Artificial Sequence
  ENSG00000168005_6 (sequence is synthesized)
gccaacccagacgctgccagaatgccagccgaaatcgtcgttctccttgactctgaggataacccatccctccctaaaaggagccggcccaggggactccgccccctcgagcttcctgct

SEQ ID NO: 547549 - DNA, 120 bp, Artificial Sequence
  ENSG00000168005_7 (sequence is synthesized)
gtccctgccacagagccaggaaataagaagccccgtggtcagagatggaaggaacccccaggggaagagccagtcagaaagaaaagaggcagacctatgaccaaaaacctggaccctgac

SEQ ID NO: 547550 - DNA, 120 bp, Artificial Sequence
  ENSG00000168005_8 (sequence is synthesized)
ctttcgcagcaccagccgaggtccgacacttcactgacggcagcttccccgccggcttcgtcttgcagctcttctcccacacccagctcaggggcccagacagcaaggactcacccaaag

SEQ ID NO: 547551 - DNA, 120 bp, Artificial Sequence
  ENSG00000168005_9 (sequence is synthesized)
acagggaagtggcagaaggaggccttccccgggcggagagcccctctccagctccccctccggggctccgcgggacactggatctccaggttatccgcgtgcggatggaggagcccccag

SEQ ID NO: 547552 - DNA, 120 bp, Artificial Sequence
  ENSG00000168005_10 (sequence is synthesized)
cggtcagcctcctgcaagactggtccaggcacccccagggcaccaagcgtgtgggagcaggtgacacctcagactggcccacagttctgtcagaatccagcaccactgtggcagggaagc

SEQ ID NO: 547553 - DNA, 120 bp, Artificial Sequence
  ENSG00000168005_11 (sequence is synthesized)
cggaaaaagggaatggagtgtaaattcttgctttcctggggagggagggagggatgaggcagcgtcccccagtggcttataactcagagctgcctggctcacccacctggtggagagagt

SEQ ID NO: 547554 - DNA, 120 bp, Artificial Sequence
  ENSG00000168005_12 (sequence is synthesized)
agaaacaggtgccagggcaggagggggctggggcagcatccactgttatttcggggcactggaaagtgtctgttcctggccaggcctgaggtcggcgagggtggctgaggctgttgtgca

SEQ ID NO: 547555 - DNA, 120 bp, Artificial Sequence
  ENSG00000168005_13 (sequence is synthesized)
gtagggcactgggcctgtggagaacacctaccccagtccttcgctgacccccacctctgtttgtcccccatgacctcctcccaccctccccctgctccccaccattctcccttggcacag

SEQ ID NO: 547556 - DNA, 120 bp, Artificial Sequence
  ENSG00000168005_14 (sequence is synthesized)
tgccttacacaagagtggtcataagggggtttgaactgagtcccactacctcgggggacacctctcctccccacttgttcaggcttctaaaccaggaggcctccattacctcttcctgtc

SEQ ID NO: 547557 - DNA, 120 bp, Artificial Sequence
  ENSG00000168005_15 (sequence is synthesized)
ccacccctgcagaggcctgaagctgggcctgggcaccccattcactcccgttctcatttacatctgttttcctgttgtatatatcacctttgttgacaataaattatttttttttattaa

SEQ ID NO: 547558 - DNA, 120 bp, Artificial Sequence
  ENSG00000168005_16 (sequence is synthesized)
gtggtatataggctggaggcagtaaatctttaaaaaccaggggcccccgtggcggttctttgcggagcagaggctctggacctgtggtttcagacgatctcacgaacccaaagcttggac

SEQ ID NO: 547559 - DNA, 120 bp, Artificial Sequence
  ENSG00000168005_17 (sequence is synthesized)
agatttctcagaaacctgtgaggcttcgaccaaaatgtctctactttctgtgttgttatgtacgtattgaagttctctgaagactttatttaaataaagatcctgccactttaaaaaaaa

SEQ ID NO: 547560 - DNA, 120 bp, Artificial Sequence
  ENSG00000168005_18 (sequence is synthesized)
caaagacagggaagtggcagaaggaggccttccccgggcggagagcccctctccaggcctcaccccttcacgtagatcacagttttaactgtctcaagtttcagcttgagtcacattcca

SEQ ID NO: 547561 - DNA, 120 bp, Artificial Sequence
  ENSG00000168005_19 (sequence is synthesized)
gtcctggctccctgagaccgagtgtgctgcttggacttgagcgtgtcccgagtctcctggtcctctccggtggatccctgctctaaatggctgacctcttccactgtctaatgggtcttc

SEQ ID NO: 547562 - DNA, 120 bp, Artificial Sequence
  ENSG00000168005_20 (sequence is synthesized)
tgatttcattctcgaaagggagccctcatttcaagtcctggggtaccctgtgcgcaaactccatctatctggagtggtgagtagatgagaagagaatccctgagattctaggtttctttg

SEQ ID NO: 547563 - DNA, 120 bp, Artificial Sequence
  ENSG00000168005_21 (sequence is synthesized)
ggcaaagtctgagaggaaggggcttcagcaggctgcttgagtgatctgagggggcggaggcaattgtagggtgttgtcagcagtggcagccttcgtggaggttggagatgcctgggaaac

SEQ ID NO: 547564 - DNA, 120 bp, Artificial Sequence
  ENSG00000168010_0 (sequence is synthesized)
gggaggaacgcgccgctaggcgggagagcgcggccatggcggggccgggcgtccccggtgcccccgcagcgcgctggaaacgccacatcgtgcggcagctgcggcttcgggaccgtacgc

SEQ ID NO: 547565 - DNA, 120 bp, Artificial Sequence
  ENSG00000168010_1 (sequence is synthesized)
aaaaggcgcttttcctggagctggtgccggcctataaccatctcttagagaaggctgagctgctggacaagttctcaaagaagctgcagccggagccaaacagtgtcactcccaccaccc

SEQ ID NO: 547566 - DNA, 120 bp, Artificial Sequence
  ENSG00000168010_2 (sequence is synthesized)
accagggcccctgggaggagtcagagcttgactcagaccaagtcccatcactggtcgcactgagggtgaagtggcaggaggaggaggaggggctccggctggtctgtggtgagatggcct

SEQ ID NO: 547567 - DNA, 120 bp, Artificial Sequence
  ENSG00000168010_3 (sequence is synthesized)
accaggtggtggagaagggcgcggccctgggcacgctggagtcggagctgcagcagaggcaaagcaggctggcagccctggaggcccgcgtggcgcagctgcgagaggcgcgggcgcagc

SEQ ID NO: 547568 - DNA, 120 bp, Artificial Sequence
  ENSG00000168010_4 (sequence is synthesized)
aggcccagcaggtggaggagtggcgggcgcagaatgcggtgcagcgggcagcctacgaggcgctgcgcgcgcacgtcgggctccgggaggcggcactgcgcaggctccaggaagaggcgc

SEQ ID NO: 547569 - DNA, 120 bp, Artificial Sequence
  ENSG00000168010_5 (sequence is synthesized)
gcgacctgctggagaggctcgtgcagcgcaaggcgcgcgccgcggccgagcgcaacctgcgcaacgagcgccgggagcgggccaagcaggcgcgggtgtcccaggagctgaagaaggctg

SEQ ID NO: 547570 - DNA, 120 bp, Artificial Sequence
  ENSG00000168010_6 (sequence is synthesized)
ccaagcggaccgtgagcatcagcgagggcccggacaccctaggcgatgggatgagggagagaagggagactctggctctggcccctgagccagagcccctggagaaggaagcttgtgaga

SEQ ID NO: 547571 - DNA, 120 bp, Artificial Sequence
  ENSG00000168010_7 (sequence is synthesized)
agtggaagaggcccttcaggtctgcctcagccacctccctgacgctgtcccactgtgtggatgtggtgaaggggcttctggattttaagaagaggagaggtcactcaattgggggagccc

SEQ ID NO: 547572 - DNA, 120 bp, Artificial Sequence
  ENSG00000168010_8 (sequence is synthesized)
tcgttttggccccaacagcagcctcctggccactggaggggctgaccgcctgatccacctctggaatgttgtgggaagtcgcctggaggccaaccagaccctggagggagctggtggcag

SEQ ID NO: 547573 - DNA, 120 bp, Artificial Sequence
  ENSG00000168010_9 (sequence is synthesized)
catcaccagtgtggactttgacccctcgggctaccaggttttagcagcaacttacaaccaggctgcccagctctggaaggtgggggaggcacagtccaaggagacactgtctggacacaa

SEQ ID NO: 547574 - DNA, 120 bp, Artificial Sequence
  ENSG00000168010_10 (sequence is synthesized)
ggataaggtgacagctgccaaattcaagctaacgaggcaccaggcagtgactgggagccgcgaccggacagtgaaggagtgggacctcggccgtgcctattgctccaggaccatcaatgt

SEQ ID NO: 547575 - DNA, 120 bp, Artificial Sequence
  ENSG00000168010_11 (sequence is synthesized)
cctttcctactgtaatgacgtggtgtgtggggaccatatcatcattagtggccacaatgaccagaagatccggttctgggacagcagggggccccactgcacccaggtcatccctgtgca

SEQ ID NO: 547576 - DNA, 120 bp, Artificial Sequence
  ENSG00000168010_12 (sequence is synthesized)
gggccgggtcacctccctgagcctcagccacgaccaactgcacctgctcagctgttcccgagacaacacactcaaggtcatcgacctgcgtgtcagcaacatccgccaggtgttcagggc

SEQ ID NO: 547577 - DNA, 120 bp, Artificial Sequence
  ENSG00000168010_13 (sequence is synthesized)
cgatggcttcaagtgtggttctgactggaccaaagctgtgttcagcccggacagaagctatgcactggcaggctcctgtgatggggccctttacatctgggatgtggacaccgggaaact

SEQ ID NO: 547578 - DNA, 120 bp, Artificial Sequence
  ENSG00000168010_14 (sequence is synthesized)
ggagagcagactacagggaccccattgcgctgccgtcaacgccgtggcctggtgctactccgggagccacatggtgagcgtggaccagggcaggaaggttgtgctctggcagtagggcca

SEQ ID NO: 547579 - DNA, 120 bp, Artificial Sequence
  ENSG00000168010_15 (sequence is synthesized)
cgacctgcctgcctgggctggagctcttgcccgaagcctgaagcttccttcggcgccatgcaggggttggggttgggactggagctggccttgggatttaatggggaagaaggcctggca

SEQ ID NO: 547580 - DNA, 120 bp, Artificial Sequence
  ENSG00000168010_16 (sequence is synthesized)
ggacctggcctgtttgtttaaaaatgaagtatgggttgggggattacgctagtttttctttgtatttttatctctatctcctcactttttctcccaaagtagaaaaaaatgatatctgaa

SEQ ID NO: 547581 - DNA, 120 bp, Artificial Sequence
  ENSG00000168010_17 (sequence is synthesized)
gcagggaggagtcgggcctcgccggtgtctggaagggaggggggcagcagccgccccctggaggaagggaccgggtctagccccgcctgcgtgcgaggcgccgcgccagggtctcaggat

SEQ ID NO: 547582 - DNA, 120 bp, Artificial Sequence
  ENSG00000168010_18 (sequence is synthesized)
agctcttgggttgggagggggcttgaggagaggccagaaagctcagatctcccagggctagtctgacctccattgtctggagccacttggggtcagttccatctcacccccccaacccct

SEQ ID NO: 547583 - DNA, 120 bp, Artificial Sequence
  ENSG00000168010_19 (sequence is synthesized)
accctcaaccctttccctccttcttgggatcagagctctgggggtggggagtcaggcttctgaatagctgtcaccaggagagaacctgtgggcaaagcccagagcccagtcatgccaggc

SEQ ID NO: 547584 - DNA, 120 bp, Artificial Sequence
  ENSG00000168010_20 (sequence is synthesized)
agggacatgaggccacaggtgtgtacaagcttgactgagcccgtctgtatgtgtgaatatataagcatgtgtagatgtgtgctcacacttgtgggacctgattggggcttcagaccttgg

SEQ ID NO: 547585 - DNA, 120 bp, Artificial Sequence
  ENSG00000168010_21 (sequence is synthesized)
gtgcctgtccgcagggtctcctccatccttcttgatttgcctgtcattgaggctgcccgctctgggcgccattccccagcctaacacctcttctcagtctttccttgcaggtccctggtg

SEQ ID NO: 547586 - DNA, 120 bp, Artificial Sequence
  ENSG00000168010_22 (sequence is synthesized)
tccaggccttggggcagtgaagaaaccgtggggaggggcatgagatgccagtccccaaagtccttgggagcccttgtgggccaagtcattgtaggacacaccctctcctgggcattgctg

SEQ ID NO: 547587 - DNA, 87 bp, Artificial Sequence
  ENSG00000168010_23 (sequence is synthesized)
aacctccagaatgtcggctggataattgctcaaggactttctattctggcctgggggtaccttacaccagggctggggaagttggga

SEQ ID NO: 547588 - DNA, 120 bp, Artificial Sequence
  ENSG00000168010_24 (sequence is synthesized)
tcccagagcgctgggaattcaggtgtgagccaccgcgcccggctggggattatttttaagtgcagaaagctagagcccttggaggggaagtgacttgccaaaggccattgacagataacc

SEQ ID NO: 547589 - DNA, 120 bp, Artificial Sequence
  ENSG00000168010_25 (sequence is synthesized)
tatagtacccacaaccaggaaactgggattggtatgaagtgtgtatatgtcctttgtcattttatcacgtgtagatttgtgtaaccatcaagatatggcactgtttcaccactgcaaaga

SEQ ID NO: 547590 - DNA, 120 bp, Artificial Sequence
  ENSG00000168010_26 (sequence is synthesized)
ctgggctctgagggcgaaggcttgggggagacctggcttagccacccggctagccgcgtttggcatgggcaggtctgtctctgctccgaggcatattcccactgggcagtgacgggggaa

SEQ ID NO: 547591 - DNA, 120 bp, Artificial Sequence
  ENSG00000168010_27 (sequence is synthesized)
gtggggatgggccggtccgacccttgcgttctgcctcccgccccgcctgcctgcggcgacccaggctgccgactgtacttgtgcacagccccgtcctgaggcccccatgtggtcggagcc

SEQ ID NO: 547592 - DNA, 120 bp, Artificial Sequence
  ENSG00000168010_28 (sequence is synthesized)
cacgagacacctgcagaggaccgtgtggtcgtaggagcctgcatgcgtgaccgctgcacgtgtacacccacacagaaccctcatcactgggaattcctgtcttcagcgtatcctgtgctg

SEQ ID NO: 547593 - DNA, 120 bp, Artificial Sequence
  ENSG00000168010_29 (sequence is synthesized)
tctctcctccctgtaggccccggctcagcttcccaggaacttttgttggtgggtactagtagggtaaggcagttcttcccatcatgagggagaccttgggagactttcattaccaaatcc

SEQ ID NO: 547594 - DNA, 120 bp, Artificial Sequence
  ENSG00000168010_30 (sequence is synthesized)
attgctgccccgaccttcctgggactgatctgggtcaccctggtctcctgatcttggagaagtcaagttcttatcccagacttgagaggttacaagcctccaggtctctggcaaagtgtg

SEQ ID NO: 547595 - DNA, 120 bp, Artificial Sequence
  ENSG00000168010_31 (sequence is synthesized)
aggggcttctggagtaagtgtgtgtgtgcctgtgtgtgcacccacgtgtgtgtcgggctccccagcccaggcttggtctgtgtctgtgcctcgacctgtccatccctgtgatgtgcagct

SEQ ID NO: 547596 - DNA, 120 bp, Artificial Sequence
  ENSG00000168010_32 (sequence is synthesized)
gtctgcctgtgagtctgttgggccttggagacaggagccaggtgaatggcctcagccccggccccggttcagctgtcttccaggttctgtcctcacaagggtctgtcttcatccaaggtc

SEQ ID NO: 547597 - DNA, 120 bp, Artificial Sequence
  ENSG00000168010_33 (sequence is synthesized)
gctccagcctcaggcagggcaggagctcctactcaattgggaaaaatgctctgaaatgtcagggactcattcagagtcacagagccaagcagtggcaagactgggattgaaaccccggcc

SEQ ID NO: 547598 - DNA, 120 bp, Artificial Sequence
  ENSG00000168010_34 (sequence is synthesized)
ctgaggtttctttgcacccaccaaccctaccctgctcctgtgtctgcctctgtgtgctccccaccccgtctccacaccaacccctggggtcgaggctgggttggggaatgctctcgctgc

SEQ ID NO: 547599 - DNA, 120 bp, Artificial Sequence
  ENSG00000168010_35 (sequence is synthesized)
tccttggggccatgttctgccgcctgccatgtctgcttcctatggttgatgcctcaggggagctggaggctcccacctgagaaggacttgctgaatgccctcctgaccccaacccacctt

SEQ ID NO: 547600 - DNA, 120 bp, Artificial Sequence
  ENSG00000168010_36 (sequence is synthesized)
ccaaggtgaggcctgactggggaggctgcctggaggtcagaggtcatacctcaggactagggggcctgttatggggtcttggccaaactcttgatccgtacctggggccggggtacagga

SEQ ID NO: 547601 - DNA, 120 bp, Artificial Sequence
  ENSG00000168010_37 (sequence is synthesized)
tgagcccgagccccagccccacctctcctccccaccagccaggagccccaggccagggcacaagggacctcacctgctctctgggagtggctctgagattcataggcatttgggggtgaa

SEQ ID NO: 547602 - DNA, 120 bp, Artificial Sequence
  ENSG00000168010_38 (sequence is synthesized)
acctctcaaggccctccaattccctaatggtatcccccagtggtgttttctgtctggtttcttggtgacctcaggctgtgggtaggaaaaagacgtgggtgagccctgtgctgggaagcg

SEQ ID NO: 547603 - DNA, 120 bp, Artificial Sequence
  ENSG00000168010_39 (sequence is synthesized)
gaagacctgggttctagtcttgggaggacactgggttctgggcctcagcttctccatatgtcctgtggggtggctcccgacaaccctcctctgaggccctggggtctgctgcttggtccc

SEQ ID NO: 547604 - DNA, 120 bp, Artificial Sequence
  ENSG00000168010_40 (sequence is synthesized)
cagaccaggtcctgctgaggtaccaaacccctcgacaaagaggaagctctggaagctcactgcagagggcagagactagtgatgacctctgttctgaccccagccctgtctgtcctcagg

SEQ ID NO: 547605 - DNA, 120 bp, Artificial Sequence
  ENSG00000168010_41 (sequence is synthesized)
gtagagagatgtggtccaagggagccagccagtgacgggtactcctgtgtttgctgaattctccaagcccagtgctgcaagcattgagtgagccctagtgtgtgccaggccctgacctga

SEQ ID NO: 547606 - DNA, 120 bp, Artificial Sequence
  ENSG00000168010_42 (sequence is synthesized)
agctgagcaggggtcagagtgccctgggcagcccaggatgaagtgggctccaacagcagctggagggagttaggtgtgcaagggcctggcagcccatttcccttccacatggtttagcct

SEQ ID NO: 547607 - DNA, 120 bp, Artificial Sequence
  ENSG00000168010_43 (sequence is synthesized)
gctctgctcactactccatggctcacccctcgcccagccatccccaaggcctagcaccagttgatgctcaatatacatttgcagactacagaagttaggttcatttagcgcattggcaga

SEQ ID NO: 547608 - DNA, 120 bp, Artificial Sequence
  ENSG00000168010_44 (sequence is synthesized)
tctcttggcttctctttcaccatgctctcctggtttccctctcatttctgtgattgttgcctctgaacttccttcactggctccttcccctcctccctattcctgtcccttcaaatgtgg

SEQ ID NO: 547609 - DNA, 120 bp, Artificial Sequence
  ENSG00000168010_45 (sequence is synthesized)
gtgttcttggggttcactgacccccgttttttctgtttgccaactctcagttctgtctctagccgagccttcttttctgagcttgactctcttgctcagctgctttttggagatcacatc

SEQ ID NO: 547610 - DNA, 120 bp, Artificial Sequence
  ENSG00000168010_46 (sequence is synthesized)
taaaatcaggctcaccatctcccccagaatttggcccacaccgttttgagagttgactccttgcaggcatcgggctaaacattgtctcagttaatccttcacaactttatggttgtagag

SEQ ID NO: 547611 - DNA, 120 bp, Artificial Sequence
  ENSG00000168010_47 (sequence is synthesized)
gaggaaactgaggcttggagaggtagagccaggatttgagcccttctcacacaaatcaacttctgtgctctccattcattctctcaacatctgttgacagttgctatatccaaagtacgg

SEQ ID NO: 547612 - DNA, 120 bp, Artificial Sequence
  ENSG00000168010_48 (sequence is synthesized)
ggagtgcaacaataaacaagacctggccccatggggcttccagtcctctgaaagagactgtgatagcccaggaaatacacatccagtcacagaatggcaagtcacctgcccaacagaaat

SEQ ID NO: 547613 - DNA, 120 bp, Artificial Sequence
  ENSG00000168010_49 (sequence is synthesized)
gcgggcataggtacggactcatttgagaacctttccctagagctgctgttgtaggtccaatttaatatttgtttgagaggtgattctcaaacatctgacccccacaccacccccagcctc

SEQ ID NO: 547614 - DNA, 120 bp, Artificial Sequence
  ENSG00000168010_50 (sequence is synthesized)
gctgaaagttcttccactagcaccgatgggaaaactccaatacgcccattgaattccccttcccagaagccatcatcatcttggttttctttgttcaagatacggattattgctccctca

SEQ ID NO: 547615 - DNA, 120 bp, Artificial Sequence
  ENSG00000168010_51 (sequence is synthesized)
aaacatactagggagcaagagaaaaacaaatctggtaagataattaacagccggttgcttttgcaaccacccctatgctcacatgacaactaaaagagcatcatacagaataggattaaa

SEQ ID NO: 547616 - DNA, 120 bp, Artificial Sequence
  ENSG00000168010_52 (sequence is synthesized)
gttgtaatttttttactcactgatgaatgattaactttagggttctactgtgcaggacaaacgtgaccatataaagaaaagcatattataggacaggaggaaagttgtgctttttatcct

SEQ ID NO: 547617 - DNA, 120 bp, Artificial Sequence
  ENSG00000168010_53 (sequence is synthesized)
actgaaggcttactccagggcaatacagtttaggtcaaacgtgaccaaataaagagtgccttgtttcagtctttaccactggcatctccgttgaggctgcctgaaacgagttctgcttcc

SEQ ID NO: 547618 - DNA, 120 bp, Artificial Sequence
  ENSG00000168010_54 (sequence is synthesized)
gtggaattgctggacgtgtgtgaccgactgtccaaagcggccagggactgcagcatgctcaggaggctgttcgaggtgggaaactgtaggtacttttctggcacataacccacttggcca

SEQ ID NO: 547619 - DNA, 120 bp, Artificial Sequence
  ENSG00000168010_55 (sequence is synthesized)
actttatttcgagcctgggtaaaagacatgtgacaaaacaagtttacacacacaatttagacagggcacaacaaagaccaaaacaaactcctaaaaatgtcacaagaaagggcgatatga

SEQ ID NO: 547620 - DNA, 120 bp, Artificial Sequence
  ENSG00000168010_56 (sequence is synthesized)
gcaaaggaatatacctttacccagtcttccatatctccatcttcaatcacttctaacacctcatgttcctcaatggtcaactcatctggttgagaagcctgcagtgtaggatggtcatgg

SEQ ID NO: 547621 - DNA, 120 bp, Artificial Sequence
  ENSG00000168010_57 (sequence is synthesized)
acaaaattaaaaaggttagataaggagcagatgtgagctgatcatgacaaaaactggggatcaaaatattgaaatgattttgagaaacatgttgaacataaaaatttaaatgctgtaaaa

SEQ ID NO: 547622 - DNA, 120 bp, Artificial Sequence
  ENSG00000168010_58 (sequence is synthesized)
tggtgtggtgaggatggaaggagcgtgtagcctgctgggaacatcatggcgcccgagggccggatgggcatttggcagcctctgcgcgaggagtcctcgcagtggttatgcatggtgctg

SEQ ID NO: 547623 - DNA, 120 bp, Artificial Sequence
  ENSG00000168010_59 (sequence is synthesized)
ggagcggagcgctggcttcccactcttcaggcgaggcagtggagcgggttgctcttgccagagaggttcctagtagggtcgcagagaaacgaagcggcacggcgaggattgggacccagg

SEQ ID NO: 547624 - DNA, 120 bp, Artificial Sequence
  ENSG00000168010_60 (sequence is synthesized)
gctgactccagagcccgagggccttccactgctccacaaacagcagcgcgtccctgtgcaaggtcccaaacctgtgtggggctcagcttgcttttcaggaagggggcgggcaggtgagca

SEQ ID NO: 547625 - DNA, 120 bp, Artificial Sequence
  ENSG00000168014_0 (sequence is synthesized)
aaagcgtcctgggtattgtagtgtattggagggaaggcgtcttggcgccttctcttcgcaccgttttccggagactgttagaggaagagtcgctttttcctgcctcccaggctgcccagc

SEQ ID NO: 547626 - DNA, 120 bp, Artificial Sequence
  ENSG00000168014_1 (sequence is synthesized)
ggcgccggttgccggggaacgcaggcgccgtggggagggatggcgggaggatactgcttaggtgctggagacggagttgagctggtgaagaagagctcgggctcatcatgaaacaacgaa

SEQ ID NO: 547627 - DNA, 120 bp, Artificial Sequence
  ENSG00000168014_2 (sequence is synthesized)
aaggccaagggtctgggggcagccgtgggcgcaaaaaaagaggtttaagtgacatttctccatctacaagcctgccacctctggttgaaggccagctacgctgttttctaaaacttactg

SEQ ID NO: 547628 - DNA, 120 bp, Artificial Sequence
  ENSG00000168014_3 (sequence is synthesized)
ttaatagagtcatatggaagattgcaaagcctcccacttgtgtacttgtccgagtgagatggtggggagaaacatcagatggaaccctcttttgtcccagggatgcattgcagactgaac

SEQ ID NO: 547629 - DNA, 120 bp, Artificial Sequence
  ENSG00000168014_4 (sequence is synthesized)
caaaagctgtgagaacaactacacgttacgctattcgttgtggtccaaaacagtttacctcttatctaacagatatggctgtgctggtgctggaagtaatcaccaaacttgatggtcttc

SEQ ID NO: 547630 - DNA, 120 bp, Artificial Sequence
  ENSG00000168014_5 (sequence is synthesized)
caattggtagagttcagatcaatggactagctcaactttctccaacccatcaaatcaatggattttttaccattgtttcatcaacgtctaagaaacttggagaactccaggtctcacttg

SEQ ID NO: 547631 - DNA, 120 bp, Artificial Sequence
  ENSG00000168014_6 (sequence is synthesized)
ccctggaacctctgtcagaaacttacgacagctaccatccacttcctaccactgacatgacagaaaatgtgcttttatctaagcagggattcagagagaatactgaacccagcagtaccc

SEQ ID NO: 547632 - DNA, 120 bp, Artificial Sequence
  ENSG00000168014_7 (sequence is synthesized)
agtttcaggttccatcaaggcctcgcgacatacataccatcaaaattgatggaaaagagttagcagccaacagcagtagatcaaccactccgaggggaaaagaccatgtatgctttgcag

SEQ ID NO: 547633 - DNA, 120 bp, Artificial Sequence
  ENSG00000168014_8 (sequence is synthesized)
agaaccctgatacaataaaggattcttcctttggactacagcacagtcttaattcaggacagagtttagagtctgtaactctgaaaggcagagctccacggaagcagatgtcccttctga

SEQ ID NO: 547634 - DNA, 120 bp, Artificial Sequence
  ENSG00000168014_9 (sequence is synthesized)
acagttctgaattccagcctcaaattagaacagttgccaagagtcacagtgactcatgcattctttcttcaaacaacctccctaccaaggatcttctttcagctctgttagaacaaggca

SEQ ID NO: 547635 - DNA, 120 bp, Artificial Sequence
  ENSG00000168014_10 (sequence is synthesized)
ataaactgcgtaatgccatggtgatttctgcaatgaaatcaagcccagagaccagcatgttgttggaccaagttcatcctcctattaatgaagattctcttagagcatcaacacagatca

SEQ ID NO: 547636 - DNA, 120 bp, Artificial Sequence
  ENSG00000168014_11 (sequence is synthesized)
gagccttttctaggaatcggtttaaagaccacattgaagatcacctcctcccttcaactgagaatacattttggagacatgacacaaaagctgataccagagctatacagctgctattag

SEQ ID NO: 547637 - DNA, 120 bp, Artificial Sequence
  ENSG00000168014_12 (sequence is synthesized)
gcagtgctgaattatcccaaggcaatttctgggatgggctaggctctcctccagattccccatctcctgggagtgatgtgtattgcatcagtgagctgaatgaccctcagtatgaccaga

SEQ ID NO: 547638 - DNA, 120 bp, Artificial Sequence
  ENSG00000168014_13 (sequence is synthesized)
gtcttctggagaatttattttatacagcacctaaatctgataccagcatcagtgatttcctcagtgaagaggatgatatcgtcccttctaaaaaaataagccagtcaacagctcttgcca

SEQ ID NO: 547639 - DNA, 120 bp, Artificial Sequence
  ENSG00000168014_14 (sequence is synthesized)
gatcatctaaggttctggagtcaagtgatcataagctgaagaagaggtcagcaggcaagagaaatagaaatttggttgaacaacagatgctctcagaaactccagaagatgcccaaacga

SEQ ID NO: 547640 - DNA, 120 bp, Artificial Sequence
  ENSG00000168014_15 (sequence is synthesized)
tgacactaagtgtggatagactggcccttttgggtagaacacattcagtcagaatcatcatcgaaaccatgggagttcctccagatagtcctcagatgacccctggcaaaaaaagctatg

SEQ ID NO: 547641 - DNA, 120 bp, Artificial Sequence
  ENSG00000168014_16 (sequence is synthesized)
ctggtccaccacctaaggtgactacagcaaaaaagcgcactttctttgtagaatatcactttcctgtgggcttttcggaaagcggattgggaaagacagctttgatcactgaggttgttc

SEQ ID NO: 547642 - DNA, 120 bp, Artificial Sequence
  ENSG00000168014_17 (sequence is synthesized)
gactcgcctccagtaaaattacagatggaaaggtgaagttccagcagcgatttgtgtttccagtacagtttggtggcccaatgatagagcactggtggaattccaacctcactttccaaa

SEQ ID NO: 547643 - DNA, 120 bp, Artificial Sequence
  ENSG00000168014_18 (sequence is synthesized)
tttatgtaaagaaaactccacagaaaaagccagaagtcattggatctgtgtcactttctttgcgagctgtcattcaatcagagctgctttctttcagtgatcagcttccagtgcaacaag

SEQ ID NO: 547644 - DNA, 120 bp, Artificial Sequence
  ENSG00000168014_19 (sequence is synthesized)
aaaatggtcagtctccatttggccccctcaaggtaaccatggagcttattacagataacaaagatttcactggtatcaatactaagttaagtggcaacacccattataccccactttgtg

SEQ ID NO: 547645 - DNA, 120 bp, Artificial Sequence
  ENSG00000168014_20 (sequence is synthesized)
ctcctacaagtccaaataaggcactaccagaacttaaccaagatatgacctgtaccaaaaatccacaaaacttaaaccaaattcatgaggaaactgcaaagaaagcacagaacttggtgc

SEQ ID NO: 547646 - DNA, 120 bp, Artificial Sequence
  ENSG00000168014_21 (sequence is synthesized)
tccccaaccgaaagtcaccaagccctgtagcaccacatccttcaaccttcgtagctacgccagcctcccataatttagtcaatcagacaaatgggacaacaaaagagagtgctttgctgt

SEQ ID NO: 547647 - DNA, 120 bp, Artificial Sequence
  ENSG00000168014_22 (sequence is synthesized)
tgcatgtgctgttgatggtgccagatgggaaagattttattagtggagaatctgagaaacaatcaccatgcaatgtttatttaaattgtaaactcttcagcacagaggaagtcaccagat

SEQ ID NO: 547648 - DNA, 120 bp, Artificial Sequence
  ENSG00000168014_23 (sequence is synthesized)
ctgtcatcgcatggggcacaacacaaccggtctttaacttttctcaggtgattcctgtctctctgtcttccaaatacctggaaaggcttaagaacaatgtgatggtaattgaaacttgga

SEQ ID NO: 547649 - DNA, 120 bp, Artificial Sequence
  ENSG00000168014_24 (sequence is synthesized)
ataaggtgcggagcccaggacaggacaagctgctcgggctggtgaaacttcccctccaccagttttacatgtcattcaaagatgctaagatttctcgcctgctgctggatgcccagtacc

SEQ ID NO: 547650 - DNA, 120 bp, Artificial Sequence
  ENSG00000168014_25 (sequence is synthesized)
cagttgttgctgtcgacagctacatgcctgtgattgatgtgttttcaggccaccaaaatgggagtcttcgagtctttttagctatgggttcttcaaatcaaataatggcactacaaagat

SEQ ID NO: 547651 - DNA, 120 bp, Artificial Sequence
  ENSG00000168014_26 (sequence is synthesized)
agcccatttcctggaccagccaactgcagcatctgttgctatggcagaggaccgaggaaatggactgatggagcactgctttgagatccatatagagatggttaaagggctagcccctct

SEQ ID NO: 547652 - DNA, 120 bp, Artificial Sequence
  ENSG00000168014_27 (sequence is synthesized)
tcaggcaacagtctggggagaagcagattgttatgtccagtactactttccagttcaacactctcaatccagtgtgctgaaaggacctgagttccttgaaaatggaattactctgaagcc

SEQ ID NO: 547653 - DNA, 120 bp, Artificial Sequence
  ENSG00000168014_28 (sequence is synthesized)
cttcagaactgcaaccacactctgtgttccagatcccatctttaatagtgaacaccatcactctctcctgttgccagctgaggttccagtgcaaaggctcctactaagtgctttctctgc

SEQ ID NO: 547654 - DNA, 120 bp, Artificial Sequence
  ENSG00000168014_29 (sequence is synthesized)
acagggcctcgtgcctggaggtggagtccagtttgaaatctggtgcagatactattatcctaatgtgagagaccagaaggtcgccaaaggaaccttgccattatcaaggatctgtgctat

SEQ ID NO: 547655 - DNA, 120 bp, Artificial Sequence
  ENSG00000168014_30 (sequence is synthesized)
ggtaaccacccagcatcgtgaggatgtgggaatacagacctttaatctccctttaacccccaggattgagaacaggaaagaattgaggaaccagtcatcaggtttactggatgtgggcct

SEQ ID NO: 547656 - DNA, 120 bp, Artificial Sequence
  ENSG00000168014_31 (sequence is synthesized)
aaggtacaggcgtagtccaagaacagcagagggagttcttgctgcccgaactgtttccatctcagtccagattatcagagcctgtggtctgcaagcagcagccaaggctttggctgaacg

SEQ ID NO: 547657 - DNA, 120 bp, Artificial Sequence
  ENSG00000168014_32 (sequence is synthesized)
ggaacccgctctacagtttagtgccacagtcggggtcaatgcctctgtcaccactcatctctccttcctgccccagggagaacagcgccgaacccaccctgtggcctgttctttctgccc

SEQ ID NO: 547658 - DNA, 120 bp, Artificial Sequence
  ENSG00000168014_33 (sequence is synthesized)
tgagttctcccatcacgttgagttcacatgtaacttggtgactcagcactgtagtggagaggcctgtttcctagcagagttgttggagtttgcagaagttatttttgctgtctatcatga

SEQ ID NO: 547659 - DNA, 120 bp, Artificial Sequence
  ENSG00000168014_34 (sequence is synthesized)
aaataccaagtcagcaagtgatataatcagtattgagtcatgcaaagagtatctgcttggagtagtaaaagttccaacaaaagagctgctgatcaagagatctgggatcacaggatggta

SEQ ID NO: 547660 - DNA, 120 bp, Artificial Sequence
  ENSG00000168014_35 (sequence is synthesized)
tcctatcattttaccagaagacgggggcctacctcatggcctggagctcatgcagaagatcgtgggtggtctggagctttcgatttccttcacgcatcgtggagatagagaacgggtgtt

SEQ ID NO: 547661 - DNA, 120 bp, Artificial Sequence
  ENSG00000168014_36 (sequence is synthesized)
ggaagctgctgagcatttgggctggagctttgagaacagcctgaaagattttgtcagaatggatgaaggggagccagccactgtcaccatctccaccccaaggctgtggctgcccatcca

SEQ ID NO: 547662 - DNA, 120 bp, Artificial Sequence
  ENSG00000168014_37 (sequence is synthesized)
ttgtgtgctgcttgctggccacaaccacattcataagaatacatattgctaccttcgctacaagttctatgatcatgaagccttttggacccctctcaagaagcctaaggaatctgtaaa

SEQ ID NO: 547663 - DNA, 120 bp, Artificial Sequence
  ENSG00000168014_38 (sequence is synthesized)
caaaaagcagattatggtcactttcaaggcatccaaaagagcagaagtcaccaggggcccatcactgctttggtacttcagggaggagaggctagagatccaagtgtggcgagcttatgg

SEQ ID NO: 547664 - DNA, 120 bp, Artificial Sequence
  ENSG00000168014_39 (sequence is synthesized)
caatgacagtgtggagagaccccatcagacagacagctggattggctcagcctatgtggacctggccagacttggggagaggtcagcgaggacgctaactgtcagtggtgtgtatcctct

SEQ ID NO: 547665 - DNA, 120 bp, Artificial Sequence
  ENSG00000168014_40 (sequence is synthesized)
gtttggacgaaatgcttccaacctctcaggagctgccttgcgagttcatgtggttctttcctctctttcctcacaccttgagcccactcatgagctggactccatggactgcagcagcca

SEQ ID NO: 547666 - DNA, 120 bp, Artificial Sequence
  ENSG00000168014_41 (sequence is synthesized)
cagtgagtctgagcagctccccagaaggaatgatgaggtccagctctctccaccagaagtcatctcctgccaccagaagtctcctgcctccacccaggtcccctgcagcagcaccacagc

SEQ ID NO: 547667 - DNA, 120 bp, Artificial Sequence
  ENSG00000168014_42 (sequence is synthesized)
tgaagtccgcctgacgcaggagggccctgctgatttggatggaacgtttgcagtcagcatcctagtagaaagagcaatgcacttgagcttgaaagggagccccttgacagagcggaaagt

SEQ ID NO: 547668 - DNA, 120 bp, Artificial Sequence
  ENSG00000168014_43 (sequence is synthesized)
atcgatacccagttgttgtgtatcctttgcaacagccgatgagtcatctcctgtatacacccaagtggttgaaaacacagattcccccatctggaattttcaacagcagtcaaggctatc

SEQ ID NO: 547669 - DNA, 120 bp, Artificial Sequence
  ENSG00000168014_44 (sequence is synthesized)
aaaagagctgcttctggacccacaacaaaccctggtcttcaaagtttggcataaaggagatgaggagagggtgattggctttgcctcggtggacctctccccacttctctctggcttcca

SEQ ID NO: 547670 - DNA, 120 bp, Artificial Sequence
  ENSG00000168014_45 (sequence is synthesized)
gtttgtctgtggctggtacaacatcacagacttcagtggagagtgccaggggcagataaaagttgctgtctcccctttggagagtttgatacacttcaaagaagaaaggcaagcaaggcg

SEQ ID NO: 547671 - DNA, 120 bp, Artificial Sequence
  ENSG00000168014_46 (sequence is synthesized)
tggagtggagacctcaaaatcactgatcccaatatacagtcccttttccttccctgcctctgatacgtatgctgcattctccagccacatggcaaggcagaccctagaccaacttgctca

SEQ ID NO: 547672 - DNA, 120 bp, Artificial Sequence
  ENSG00000168014_47 (sequence is synthesized)
tgcctcctcaaaggagcttgatttctcctctcctgggagaagtgataccacaagaagccaagcatcacgccatgaagagcatgtgcagaacattcgccggtttcatgaatccctgcatct

SEQ ID NO: 547673 - DNA, 120 bp, Artificial Sequence
  ENSG00000168014_48 (sequence is synthesized)
tcagggagaggcacccttgccatgtgatgacaaactgaccacatcacctttgtcctcccaaacctccattctgacttctctcaggaagaatctgagtgagcttgatcagattcagaggta

SEQ ID NO: 547674 - DNA, 120 bp, Artificial Sequence
  ENSG00000168014_49 (sequence is synthesized)
cttccgccagaagctcaccaagcctttcctacccctcagccctcagactcaaacggccatctcacagcaccaggagagctgtagggaccatcttgggccaggtgccagcagcctagaccc

SEQ ID NO: 547675 - DNA, 120 bp, Artificial Sequence
  ENSG00000168014_50 (sequence is synthesized)
tgggagccagtgtatcctggagaaatccagtaacctggtgttgcaagtcagctccttaatcacaggtagttactgaagtaactggaagcatgaacatgcccaccaggactcccagctccc

SEQ ID NO: 547676 - DNA, 120 bp, Artificial Sequence
  ENSG00000168014_51 (sequence is synthesized)
aacgattcctgagcatgagcagatagtctctgaaagcatttccacagatgtatccacaactatagattagattctggtcctctgatattagaataaagtactaaaaattgtaccgccttg

SEQ ID NO: 547677 - DNA, 120 bp, Artificial Sequence
  ENSG00000168014_52 (sequence is synthesized)
caggagtagaagcaacaaggccaccaccctcccagatgctcaggacacagaagcactgcaagaacgatgcacaatgccagatgagccattggtaagagctccagataaaggcacagattc

SEQ ID NO: 547678 - DNA, 120 bp, Artificial Sequence
  ENSG00000168014_53 (sequence is synthesized)
cccatcaccccctcctctcgaagagacttcaaatggaggaagaatgctccatgagtccctgaggcatgcagtacccattacaaggatgcagagcagtgaagacactgaggcaggcccagc

SEQ ID NO: 547679 - DNA, 120 bp, Artificial Sequence
  ENSG00000168014_54 (sequence is synthesized)
ctacagtgatgaggactatgaagaagacatcattgagcccaggaccttaaatgagatcaccacggtgacagacaaaactagcccttggtctagtgtcatatcagacacaagtgaggtcat

SEQ ID NO: 547680 - DNA, 120 bp, Artificial Sequence
  ENSG00000168014_55 (sequence is synthesized)
cagccctcagcctgacgaggtgcagagggaaggcccctcttgtccttctccagggcctttctgcagagaggagcttatggtcaaaagtagctttctctccagcccagaaagggctgtcaa

SEQ ID NO: 547681 - DNA, 120 bp, Artificial Sequence
  ENSG00000168014_56 (sequence is synthesized)
cccccacctgcctaggcagggttctcctagccaaagtcttgttgcttgtgagtgtgaggcctctaaggccagggttggtggcgagtctgcctcagccaaccctcagcccatcccatgccc

SEQ ID NO: 547682 - DNA, 120 bp, Artificial Sequence
  ENSG00000168014_57 (sequence is synthesized)
aacactctcaggagctcaacagagcagcacgtttgttggatggagctcaccacagacagatcagaacaaggagcccaagtcagaggccccagctgagaatgaagctgccaccagtgagct

SEQ ID NO: 547683 - DNA, 120 bp, Artificial Sequence
  ENSG00000168014_58 (sequence is synthesized)
cggtgactctgctgatagcttcaagaagttgccgctaaatctagcctcccagagcagaagggaaaaccataagggaccacccatcgactcctctgacatcaggcagaggcaggtgacaac

SEQ ID NO: 547684 - DNA, 120 bp, Artificial Sequence
  ENSG00000168014_59 (sequence is synthesized)
tggatcagagacgtccacaaagcagagcctcctgctcccagggcccattgtggtgcccaacttctttttgcctccccagcagttggaggcttccctgcggatgctttcactctcagcaac

SEQ ID NO: 547685 - DNA, 120 bp, Artificial Sequence
  ENSG00000168014_60 (sequence is synthesized)
tttgccaccagcagccacaacagatcaggacaagagcgaagccaccaggggagctctctcccaaaggccttgtcgccccagacctaactcgctccccctcaacctgcctgaggaagaaac

SEQ ID NO: 547686 - DNA, 120 bp, Artificial Sequence
  ENSG00000168014_61 (sequence is synthesized)
tctcaggattgcacggatattttcttctcagtactcccagaaagactgacgcagcctgaggggctggggggaaggagacacctgcccaccctccgtcagctttgtccagcttgcaggagg

SEQ ID NO: 547687 - DNA, 120 bp, Artificial Sequence
  ENSG00000168014_62 (sequence is synthesized)
caccaggtctggctccttcagggctgtcacagtcctgaaaccaccacttgcctaggccacggatgcctcaagagacccggtcagcccagactggaggagtgccccaaaccagtccagtgt

SEQ ID NO: 547688 - DNA, 120 bp, Artificial Sequence
  ENSG00000168014_63 (sequence is synthesized)
ccacttgccagaatttcagctccttttttctgtggtgaggcaaaggctagaaataaaatggaatccgcgcccaagtgggacccaagcaggcatctttcggtggagaaacgccccccagtg

SEQ ID NO: 547689 - DNA, 120 bp, Artificial Sequence
  ENSG00000168014_64 (sequence is synthesized)
tccttgacacagctgactgctggcatgagcccaccctctgcctgaagatgcaggaccatttttgccttaaaagttggggaggagggacatgtagattgtgtgcattgtgcatagtcaagg

SEQ ID NO: 547690 - DNA, 120 bp, Artificial Sequence
  ENSG00000168014_65 (sequence is synthesized)
aaatcctagggccacctccagttcatttgtgtgggaacaaggatattttatagatacaaattatttttatgctgtgttgaattaatcaattaggagaggaaggggaaatcacttccttca

SEQ ID NO: 547691 - DNA, 120 bp, Artificial Sequence
  ENSG00000168014_66 (sequence is synthesized)
aactttttatctgattgtctaaaattctaaccatgcttttaacttattatttttacccagctctgaaggtcattgttcttgcctgtgtttgaataaaatcatattggtgtttgtaatctg

SEQ ID NO: 547692 - DNA, 120 bp, Artificial Sequence
  ENSG00000168014_67 (sequence is synthesized)
cagatacctaacctgttggtatccatggcctcagataaatgctctgtgtttgacttccacttgcttggatattttcagtcaagtgtttattgagcaccatctgtgccaggcactattctg

SEQ ID NO: 547693 - DNA, 120 bp, Artificial Sequence
  ENSG00000168014_68 (sequence is synthesized)
ttatttgtcccaggaagatacagtggtggatatgacaggcattatctcccttcatcaagcttatattctatagtcaaccaaagaaaaatcctctcacaaagaaagtatgacagcaaaaca

SEQ ID NO: 547694 - DNA, 120 bp, Artificial Sequence
  ENSG00000168014_69 (sequence is synthesized)
gcaaaacagatgaaggcttgtttggagtagaggtggaaacaaataggggaatctttctaaaggggcatattaaaagaggagagagaagggaattgtggccaggcacggtggctcacacct

SEQ ID NO: 547695 - DNA, 82 bp, Artificial Sequence
  ENSG00000168014_70 (sequence is synthesized)
ccgtctctgcccagccgccccgtctgagaaatgaggagacctctgcccggcagccaccccatctgagaagtgaggagcccct

SEQ ID NO: 547696 - DNA, 120 bp, Artificial Sequence
  ENSG00000168014_71 (sequence is synthesized)
ccagtaaaattacagatggaagtaagagacacactggttttctgcaccttagacattctgactttggaagaatttttgaattcctaattactcatttgactttttttttttttttttttt

SEQ ID NO: 547697 - DNA, 120 bp, Artificial Sequence
  ENSG00000168014_72 (sequence is synthesized)
gggattacaggcataagccatcacgcccagccaatattttcaaggctgtgcaaccatcaccacaatctaattttagaacattttcatcccccctaaaagaaaccccatacttactagcat

SEQ ID NO: 547698 - DNA, 120 bp, Artificial Sequence
  ENSG00000168014_73 (sequence is synthesized)
acttactagcattcgcttcgcatttccctcttcccccagccctaagcaactgctaatctttctttccctatcaatttgtccattctggatgtctcatataaatggaatcatgcaacttgt

SEQ ID NO: 547699 - DNA, 120 bp, Artificial Sequence
  ENSG00000168014_74 (sequence is synthesized)
catttgagggtatccctgctctggccaatttcgcctctggccaaccccaccagggttgtgtgttagggtagcagtcctgatgaaggaagaatcttcactactagtcaagatggtttctaa

SEQ ID NO: 547700 - DNA, 120 bp, Artificial Sequence
  ENSG00000168014_75 (sequence is synthesized)
accctattgaggtcaacaaaagcaaaatgctgctgagtgacaagagcgaagccaccaggggagctctctcccaaaggccttgtcgccccagacctaactcgctccccctcaacctgcctg

SEQ ID NO: 547701 - DNA, 120 bp, Artificial Sequence
  ENSG00000168014_76 (sequence is synthesized)
aaactagtcttttaaaaacagtgctattacctaaaacccagtgaagtatatagatatgtctccttacacatccagtactcatatgattgacattcatttctcatggcaaagcggagcaac

SEQ ID NO: 547702 - DNA, 120 bp, Artificial Sequence
  ENSG00000168014_77 (sequence is synthesized)
atagcactgcctgtcttctgtgtactatctccagagttttctctttgtccctgctcattcaatcctacaaccctagcactttctgtgaaagcacactgactcgatttctgcaggagattt

SEQ ID NO: 547703 - DNA, 120 bp, Artificial Sequence
  ENSG00000168014_78 (sequence is synthesized)
taattaaatttgaaagggaggcaggtggtatcaaggcatgaattgatgatgacttcagttgggtggtgtgacatgtctgtgtgtctggttctccttacagaggtgaagttccagcagcga

SEQ ID NO: 547704 - DNA, 120 bp, Artificial Sequence
  ENSG00000168014_79 (sequence is synthesized)
gtccaaaacagtttacctcttatctaacaggtatgttattgttttatcattgcacctgcagacgtaatacaaagcatgtggttatattgtcagcaataagtgttgttgtgtacctagcat

SEQ ID NO: 547705 - DNA, 120 bp, Artificial Sequence
  ENSG00000168014_80 (sequence is synthesized)
atatgggcattcttaattattgaagagtcaaagagtttttatagtagacatttttctttgtaaatttattgagtgttactgtgtgccagcagttttgaaatgtattacttctaatcctta

SEQ ID NO: 547706 - DNA, 120 bp, Artificial Sequence
  ENSG00000168014_81 (sequence is synthesized)
caataaccctgaaagataggtattttctctgttttatagacaattaaacaagttggagagatgaaatgaatactttctaaggtcacaaagttgataaatggctgaattaggatttgaacc

SEQ ID NO: 547707 - DNA, 120 bp, Artificial Sequence
  ENSG00000168014_82 (sequence is synthesized)
gaaacagcatgctcaaaagcttggtagtatgagagaatgggacattggccaaaaaaaggtcattaaatgtgagtaaaaagtagtgagaaatggggctggaaagactaattaggctacata

SEQ ID NO: 547708 - DNA, 120 bp, Artificial Sequence
  ENSG00000168014_83 (sequence is synthesized)
ggcagcattttgtatgctacatgactgacactgcaggtgagatgaaaccaacaaaatcttaatctgtggagaggcaaggtcatatttgttgaccagacatgaaatcttggtggcagtatg

SEQ ID NO: 547709 - DNA, 120 bp, Artificial Sequence
  ENSG00000168014_84 (sequence is synthesized)
agactcccggctgggaacccgacgactttcaccggaaggaggagcgctcttcagggcaatgcaccctgcgcaatggagtccacaaagggcgcatccctatgcgcttgcgcagctggaggc

SEQ ID NO: 547710 - DNA, 120 bp, Artificial Sequence
  ENSG00000168016_0 (sequence is synthesized)
gtgcacgtgacagtttttgggctctcgcaactacgtggaaacttggaataggtctgcggctgcacaccgcccggacgccggggttcctgcgtcccccgccccctctgatcgcggctgggt

SEQ ID NO: 547711 - DNA, 120 bp, Artificial Sequence
  ENSG00000168016_1 (sequence is synthesized)
ctgatcgcggctgggtagccgagccgcaggcagctgggggcccccgaacgccgcctctgcatcgcgccgcccctgccccgggctccggtagctttcgggcttccgcactgcccgccgcgc

SEQ ID NO: 547712 - DNA, 120 bp, Artificial Sequence
  ENSG00000168016_2 (sequence is synthesized)
cgcttccccaggcggcggcggtcctggtgcggaccctccggccgcagccatgtgggacccgcgggcagctaggatggacctgacagcttacgctgagctgctgaaagaatccggcaacca

SEQ ID NO: 547713 - DNA, 120 bp, Artificial Sequence
  ENSG00000168016_3 (sequence is synthesized)
ggttcttaagaatgggaacttctctttggccatcagaaagtacgatgaagccatccagattctcctgcagttataccagtggggggttcccccgagggacttggctgtgctgctgtgcaa

SEQ ID NO: 547714 - DNA, 120 bp, Artificial Sequence
  ENSG00000168016_4 (sequence is synthesized)
caaatcaaatgcatttttcagccttgggaagtggaatgaggcatttgttgctgccaaggaatgtctccaatgggatccaacctacgtgaagggatactaccgagctggttattccttgct

SEQ ID NO: 547715 - DNA, 120 bp, Artificial Sequence
  ENSG00000168016_5 (sequence is synthesized)
gaggttgcaccagccttacgaagccgctcgcatgttttttgagggtctgcgacttgtgcagagaagccaagaccaggcaccggttgctgatttccttgttggagtcttcaccactatgag

SEQ ID NO: 547716 - DNA, 120 bp, Artificial Sequence
  ENSG00000168016_6 (sequence is synthesized)
cagtgactccattgttttgcaaagtttcttgccttgctttgatcatattttcacaactggattcccaacagaagtgtggcaatctgtaatagaaaagttggcaaagaaaggattatggca

SEQ ID NO: 547717 - DNA, 120 bp, Artificial Sequence
  ENSG00000168016_7 (sequence is synthesized)
ttcatttctgcttctgtcagcaaaaaaagaccgattaccaagaaatattcatgtcccagagttatcactgaaaagtctctttgagaaatacgttttcattggactttatgagaagatgga

SEQ ID NO: 547718 - DNA, 120 bp, Artificial Sequence
  ENSG00000168016_8 (sequence is synthesized)
acaagtgcccaagttagtccagtggctcatctccattggtgcaagtgttgagactataggaccgtatccccttcatgccctcatgcgactctgtatccaagccagagaaaaccatctttt

SEQ ID NO: 547719 - DNA, 120 bp, Artificial Sequence
  ENSG00000168016_9 (sequence is synthesized)
ccggtggttaatggatcacaagcccgagtggaaaggccgcattaaccagaaggatggggatggctgcactgtcctgcacgtcgtcgctgcccactccccaggatacctcgttaagcgaca

SEQ ID NO: 547720 - DNA, 120 bp, Artificial Sequence
  ENSG00000168016_10 (sequence is synthesized)
aacagaggatgtgcagatgctcctgcgctttggggcagatcccactttgctggatcgacagtctcggtctgttgtggatgtcctgaagaggaataagaacttcaaagccatcgagaaaat

SEQ ID NO: 547721 - DNA, 120 bp, Artificial Sequence
  ENSG00000168016_11 (sequence is synthesized)
caacagtcacttagaaaagctagctacgtgttctaaggacctatcaggattcagcaatggtgatggacccactagtgaaaacgacattttcaggaaggtcttggagcagctggtgaagta

SEQ ID NO: 547722 - DNA, 120 bp, Artificial Sequence
  ENSG00000168016_12 (sequence is synthesized)
tatgaactcaggaaaccggttattgcataaaaactttctgaagcaggaagtagttcagaggttcttgcgtctcctttctactctgcaagaaattcctcctgacctggtctgtgatattaa

SEQ ID NO: 547723 - DNA, 120 bp, Artificial Sequence
  ENSG00000168016_13 (sequence is synthesized)
tcaagactgtgccaccaccgtcttcaaattcttattggaaaaacagagatggcctgaggtgcttctgctgctgacccgcaaagtaagtggagaaccaccgcttggggattgcctcatcaa

SEQ ID NO: 547724 - DNA, 120 bp, Artificial Sequence
  ENSG00000168016_14 (sequence is synthesized)
agactgcaacttctcagacctcgacatctgtaccatcatcccccatctcagcacctgggaccagcggaagaaacagcttctgggctgcctgatagacagtggagccttgcctgatggtct

SEQ ID NO: 547725 - DNA, 120 bp, Artificial Sequence
  ENSG00000168016_15 (sequence is synthesized)
tcaggagagccaggagaggccagttgtcacgtgcctgaaacatgaggacttcgagttggctttccttctcttgaccaagggcgcagacccccgtgctatttctctcacggaaggtgatac

SEQ ID NO: 547726 - DNA, 120 bp, Artificial Sequence
  ENSG00000168016_16 (sequence is synthesized)
tcctttgcatgcagcactccacatctttctagagattaaagctgacattggttttagcttcctcagccatctgttggatctgttttggtccaaccccactgaattcgactacctcaaccc

SEQ ID NO: 547727 - DNA, 120 bp, Artificial Sequence
  ENSG00000168016_17 (sequence is synthesized)
caatgtccaggacagcaatgggaacacgctgatgcacatcctcttccagaagggcatgctaaagcgcgtgaagaagctgttagacctgctggtgaagtttgacatcaacttcaatctgaa

SEQ ID NO: 547728 - DNA, 120 bp, Artificial Sequence
  ENSG00000168016_18 (sequence is synthesized)
gaacaaagagggcaaagatgcacggcaccggattaagaagaacgactctctgctcttggcctggaacaaagctctgatggagaacaggaggaggagccggcaggactctgctgcccacct

SEQ ID NO: 547729 - DNA, 120 bp, Artificial Sequence
  ENSG00000168016_19 (sequence is synthesized)
ggggaagctctcaaagtccactgcccctggtcacacatctcagctcaagtcccagggttcattcaagtcagtgccatgtggtgccactgccagaacactgcctgaaggaagtgcagtccc

SEQ ID NO: 547730 - DNA, 120 bp, Artificial Sequence
  ENSG00000168016_20 (sequence is synthesized)
tgacagctgggagactctcccaggtacccaggtgaccaggaaggagcctggagctctcaggccctgctcgctgagagactgccttatgcaggacatcacagttttgattcagcaggttga

SEQ ID NO: 547731 - DNA, 120 bp, Artificial Sequence
  ENSG00000168016_21 (sequence is synthesized)
agtggatccgtctttcccagaggactgtcttcagagctctgagcctctggaggcaggagctggcaaagaaggaaagaaagatgacaagccgactctgggtgcaggggcccctgactgtag

SEQ ID NO: 547732 - DNA, 120 bp, Artificial Sequence
  ENSG00000168016_22 (sequence is synthesized)
tgaggtgggggaaggacatgctcaggtgggccttggggccttgcagcttgtgcctgatgataacagggggaaggagggcaatgatgatcaggatgactggagcacgcaggagattgaggc

SEQ ID NO: 547733 - DNA, 120 bp, Artificial Sequence
  ENSG00000168016_23 (sequence is synthesized)
ctgcctccaggacttcgataacatgacctgggagatcgagtgcacttcagaaatgctgaagaagctgtctagtaaggtaatgaccaaggtcatcaagaagaaaatcatccttgccattca

SEQ ID NO: 547734 - DNA, 120 bp, Artificial Sequence
  ENSG00000168016_24 (sequence is synthesized)
gcagctgggaaatggcgagtggacccagggcctgcagaagcgactgaagcacctgaaaggaagcatccagctcttcgaagctaagctggacaaaggagcccggatgctctgggagctcgc

SEQ ID NO: 547735 - DNA, 120 bp, Artificial Sequence
  ENSG00000168016_25 (sequence is synthesized)
cattgacttctcccctcgatgcagtgagaaccctgagaagatcattgccacggagcagaacacgtgtgcaatggagaaatcagggcggatctacacggaaatcatccggatttgggacat

SEQ ID NO: 547736 - DNA, 120 bp, Artificial Sequence
  ENSG00000168016_26 (sequence is synthesized)
cgtcttagatcactgcaaactggctgattccatcaaggccatctgcaatgcctacaaccggggcttgtcctgtgtcctgcggaagaagctgaaaggtatcaataaaggccaagtgtcagc

SEQ ID NO: 547737 - DNA, 120 bp, Artificial Sequence
  ENSG00000168016_27 (sequence is synthesized)
taacatgaaaattcaaaagcgtatacctcgctgctatgtggaggacacagaggccgagaagggcagggagcatgtcaatcctgagtactttcccccagccagtgcagtggagacagaata

SEQ ID NO: 547738 - DNA, 120 bp, Artificial Sequence
  ENSG00000168016_28 (sequence is synthesized)
taacatcatgaagttccacagcttcagcaccaacatggcctttaacatcctcaatgacacgacagccacagtggagtaccccttccgggtgggtgagcttgagtacgcggtgatcgacct

SEQ ID NO: 547739 - DNA, 120 bp, Artificial Sequence
  ENSG00000168016_29 (sequence is synthesized)
caatcccaggccactggagcccatcatccttattgggcgaagtggcactgggaagacaacctgctgcttgtacagattgtggaagaaattccacgtttactgggaaaaagctgagcaggc

SEQ ID NO: 547740 - DNA, 120 bp, Artificial Sequence
  ENSG00000168016_30 (sequence is synthesized)
aggaagcccattgctggccaaacaggtctggctgaagagaaggttggaagtggaacccggaaaagagagtccaggtggggaggaagaggaggaggaagaggacgaggaagaggaagattc

SEQ ID NO: 547741 - DNA, 120 bp, Artificial Sequence
  ENSG00000168016_31 (sequence is synthesized)
tattgaagtggaaacagtagaaagcatagatgagcaggagtatgaagcctgcgcaggaggagccggtgtggagccagcaggggacggccaagctgcagaagtatgtgcaccagaacatcc

SEQ ID NO: 547742 - DNA, 120 bp, Artificial Sequence
  ENSG00000168016_32 (sequence is synthesized)
ccaccagctggagcatttacatcagatctttgtgaccaagaaccatgtgctgtgccaggaggtacaaaggaatttcattgagctttccaagtccaccaaggccactagtcattacaaacc

SEQ ID NO: 547743 - DNA, 120 bp, Artificial Sequence
  ENSG00000168016_33 (sequence is synthesized)
actggaccccaacattcacaaactccaggacctgagggacgagaactttcctctgtttgtcacttccaagcagctgcttcttctgcttgatgcttctctgcccaaaccattttttctgag

SEQ ID NO: 547744 - DNA, 120 bp, Artificial Sequence
  ENSG00000168016_34 (sequence is synthesized)
aaacgaagatggaagcttgaaaagaaccatcataggatggtctgcacaggaagagtcaaccattcctagttggcaagaggatgaagaggaggctgaggtggatggggactacagtgagga

SEQ ID NO: 547745 - DNA, 120 bp, Artificial Sequence
  ENSG00000168016_35 (sequence is synthesized)
ggataaagctgtagaaatgcgtacgggtgacagtgacccccgggtgtacgtgacgtttgaggtgttcaaaaatgaaatatggcccaaaatgaccaaagggaggactgcctacaaccctgc

SEQ ID NO: 547746 - DNA, 120 bp, Artificial Sequence
  ENSG00000168016_36 (sequence is synthesized)
actgatttggaaagaaataaaatcttttctaaagggttcttttgaggccctcagctgtccccatgggagactcactgaagaagtatataagaaattagggaggaaacggtgccccaattt

SEQ ID NO: 547747 - DNA, 120 bp, Artificial Sequence
  ENSG00000168016_37 (sequence is synthesized)
caaggaagaccggagtgagatctacagcctcttcagtctgtatcagcaaatcaggtcccagaaaggttattttgatgaagaggatgttctgtacaacatatcccggaggctgtcgaagct

SEQ ID NO: 547748 - DNA, 120 bp, Artificial Sequence
  ENSG00000168016_38 (sequence is synthesized)
cagggtgctcccatggtccatccacgagctctatggtgatgagattcaagactttacccaggccgagctggcgctgctgatgaaatgcatcaatgaccccaactctatgttcctcacggg

SEQ ID NO: 547749 - DNA, 120 bp, Artificial Sequence
  ENSG00000168016_39 (sequence is synthesized)
ggacacggcccagagcatcatgaagggcgtggccttccgcttcagcgatctgcgctctctgttccattatgccagcagaaacaccatagacaagcagtgtgctgtccggaagcccaagaa

SEQ ID NO: 547750 - DNA, 120 bp, Artificial Sequence
  ENSG00000168016_40 (sequence is synthesized)
gatccaccagctgtaccagaattacaggtcccactcaggaatcctcaatctggcatctggagtggtggatttacttcagttctatttcccagaatcttttgatcgccttccaagggattc

SEQ ID NO: 547751 - DNA, 120 bp, Artificial Sequence
  ENSG00000168016_41 (sequence is synthesized)
tggcctctttgatggtcctaagccaactgttctggagtcttgtagtgtaagcgacttggcaattttgctacgagggaataaaaggaaaactcagcccattgaatttggagcccaccaggt

SEQ ID NO: 547752 - DNA, 120 bp, Artificial Sequence
  ENSG00000168016_42 (sequence is synthesized)
aatccttgtggccaatgaaacggcaaaggagaaaattccagaagagctggggttagcacttgtgctaacaatttatgaagcaaaaggcttagaatttgatgatgtcctcctttacaactt

SEQ ID NO: 547753 - DNA, 120 bp, Artificial Sequence
  ENSG00000168016_43 (sequence is synthesized)
ttttactgattctgaggcttataaggaatggaagatcatttcctcattcacacctacctcaactgactccagagaggaaaaccggccattggttgaagtacccctggacaaaccaggctc

SEQ ID NO: 547754 - DNA, 120 bp, Artificial Sequence
  ENSG00000168016_44 (sequence is synthesized)
gctcgggtcaacctctggatctttgatgaaaaccgagagaaacgggctcccgcattcaaatatttcattagaagagattttgtccaagttgtaaagacagatgaaaataaagactttgat

SEQ ID NO: 547755 - DNA, 120 bp, Artificial Sequence
  ENSG00000168016_45 (sequence is synthesized)
gatagcatgttcgttaagacctcaactcctgcggagtggattgcacagggagattactacgccaagcaccagtgctggaaggttgcagccaagtgttaccagaaaggaggtgcatttgag

SEQ ID NO: 547756 - DNA, 120 bp, Artificial Sequence
  ENSG00000168016_46 (sequence is synthesized)
aaggagaagttggccctggcccatgacactgccctgagcatgaaatccaagaaagtcagccccaaggaaaagcagttggaatatttggaattggctaagacctatttggagtgcaaagag

SEQ ID NO: 547757 - DNA, 120 bp, Artificial Sequence
  ENSG00000168016_47 (sequence is synthesized)
ccaacactgtcccttaagtgtctgagctatgccaaggagttccagctctctgcccagctgtgcgagaggctgggaaagataagagatgctgcctatttctataagcgaagccagtgctac

SEQ ID NO: 547758 - DNA, 120 bp, Artificial Sequence
  ENSG00000168016_48 (sequence is synthesized)
aaagacgctttcagatgctttgagcagattcaggaatttgatctagcactcaaaatgtactgccaagaggagctttttgaagaagctgctattgcagtggaaaagtatgaagaaatgcta

SEQ ID NO: 547759 - DNA, 120 bp, Artificial Sequence
  ENSG00000168016_49 (sequence is synthesized)
aagactaagacccttcccatttccaagctctcctattctgccagtcagttttacttggaagctgcagcaaagtatctgagtgcaaataagatgaaggaaatgatggctgtcctctcaaag

SEQ ID NO: 547760 - DNA, 120 bp, Artificial Sequence
  ENSG00000168016_50 (sequence is synthesized)
ctagacatagaagaccagctggtgttcttgaagtctcggaaacgcttagcagaagctgcagacctgctgaacagggaaggtaggagagaagaggctgccctgctgatgaagcaacatggc

SEQ ID NO: 547761 - DNA, 120 bp, Artificial Sequence
  ENSG00000168016_51 (sequence is synthesized)
tgcctcctggaggctgccaggctcactgccgacaaggacttccaggcctcatgtctgctgggggccgcccgcctcaatgtggccagggattccgacatagaacacaccaaggacattctg

SEQ ID NO: 547762 - DNA, 120 bp, Artificial Sequence
  ENSG00000168016_52 (sequence is synthesized)
agagaagcacttgatatctgctatcaaactggccagttgtctggcattgcggaggcccacttcctgcaaggggtaatcctgagagactttcagaagctcagggatgccttcttcaagttt

SEQ ID NO: 547763 - DNA, 120 bp, Artificial Sequence
  ENSG00000168016_53 (sequence is synthesized)
gacacgctcaaccactcagctggagtggtggaagcactctacgaagcagccagccagtgtgaggccgagcctgagaagattctgggcctggctccagggggcttggaaatcctcctcagt

SEQ ID NO: 547764 - DNA, 120 bp, Artificial Sequence
  ENSG00000168016_54 (sequence is synthesized)
ctggtcagggctctcaaaagagtgaccaacaatgctgagaaggaaatggtcaaatcttgctttgagttttttgggatttcccaggtggatgccaagtattgccagatagctcagaatgac

SEQ ID NO: 547765 - DNA, 120 bp, Artificial Sequence
  ENSG00000168016_55 (sequence is synthesized)
cctgggcccatattaagaataatttttgacctggatttgaacttgagagagaaaaaaacaaaagatcattttttgataatgactgaccaagtgaaattagccctaaacaaacaccttttg

SEQ ID NO: 547766 - DNA, 120 bp, Artificial Sequence
  ENSG00000168016_56 (sequence is synthesized)
ggcaggctgtgtcagatcacacggagcctgcttgggaagacctaccgaggagtctgcatgaggtttattgtaggcttaaaatgtgaggatgaaaactgtgaacattttcacaggcctctg

SEQ ID NO: 547767 - DNA, 120 bp, Artificial Sequence
  ENSG00000168016_57 (sequence is synthesized)
cggcgttgtgaagccaagtgtttagttcagtcgaaaatgaacttggtggcaatcaacgggttgcttttggaagccaaaaaagtattccctaaaatcttagcagaagaacttaaagaaatt

SEQ ID NO: 547768 - DNA, 120 bp, Artificial Sequence
  ENSG00000168016_58 (sequence is synthesized)
gattatattttgtctacagatatgtatggcctttgcaagtccattctggatgtccttttccctaagcatttccatcagagagtgttgtcagaaaaccccatggcatgcaaagaaatcctc

SEQ ID NO: 547769 - DNA, 120 bp, Artificial Sequence
  ENSG00000168016_59 (sequence is synthesized)
aaaccaaattacaaatccttccggttctacagatttgctttgaaggagtacatccactttctgtttgaaaatgaaagcgcacgcaaccgccgggaatccacagacctgtggctgagtgcc

SEQ ID NO: 547770 - DNA, 120 bp, Artificial Sequence
  ENSG00000168016_60 (sequence is synthesized)
atgcaagctttccttctctcttccaactacccggaggagtttgaaaagctgctccaccaggaggaggacaactacaacagggaactcaaagctctagagtctgaaaaggatgaaaggggc

SEQ ID NO: 547771 - DNA, 120 bp, Artificial Sequence
  ENSG00000168016_61 (sequence is synthesized)
agggggagaggcagcaggataaaaggaatagaagggaaatttggcatgctggcacccaacagggatgatgaaaatatggacaagacccacctgtgcttcatccggcttctggagaattgc

SEQ ID NO: 547772 - DNA, 120 bp, Artificial Sequence
  ENSG00000168016_62 (sequence is synthesized)
attgatcaattctacgtgtacaggaacccagaagactacaagaggctctttttccgtttcatgaatgtcctcatcaagaggtgcaaagaaccactcatccccagcattggaaacacagta

SEQ ID NO: 547773 - DNA, 120 bp, Artificial Sequence
  ENSG00000168016_63 (sequence is synthesized)
gccctcctggagttccagttcatccactgtggggtggtgctggcccgcctctggaagaatgtcattctatgcctccccaagagctacattgcactcttgcactactgggagttcctgttt

SEQ ID NO: 547774 - DNA, 120 bp, Artificial Sequence
  ENSG00000168016_64 (sequence is synthesized)
agcaagaaggacaaggagcttggggatgtgttctccatcattcaggaatacaaacccaaggacgtgacaagagccattcaggatttccggttccatctctcctacctcgccaaggtgcta

SEQ ID NO: 547775 - DNA, 120 bp, Artificial Sequence
  ENSG00000168016_65 (sequence is synthesized)
tgtggctatgagaatgtgaacttcaacgtcctgcttgatgccttcagtgaaatagactatgtggtctcgggtgaggctgagcggacactggtgctgtgcttggtgatgctagtgaatgct

SEQ ID NO: 547776 - DNA, 120 bp, Artificial Sequence
  ENSG00000168016_66 (sequence is synthesized)
gaggagatcctgcagccatactgcaagcctctcctgtatcgccacttccgggagattgagtcaaggctgcagctcatgagcatggactgccctggccaggttcccgagaggctcctgaag

SEQ ID NO: 547777 - DNA, 120 bp, Artificial Sequence
  ENSG00000168016_67 (sequence is synthesized)
gtggtgaagcgggtcttggtggcagtcaatgtgaagtctgtggctgaggcactgcaggacctgctctttgagcgggatgaagagtacctaatggactgtgactggcggtgggaccctgtg

SEQ ID NO: 547778 - DNA, 120 bp, Artificial Sequence
  ENSG00000168016_68 (sequence is synthesized)
cacaccaaagggtccatagtccgtggcctctattatgaggaggtcagactaaaccgcctgctctgtttggaccctgtggactactttgctgaacctgagtgtgagtttggccaggatgag

SEQ ID NO: 547779 - DNA, 120 bp, Artificial Sequence
  ENSG00000168016_69 (sequence is synthesized)
atggatgaactggcattagaagaccgagaccacgtcctggccaccattctttcccaaaagcaacggaaggcctccatacagcggaagttgaggagggcatgcctggtggtgtctctgtgc

SEQ ID NO: 547780 - DNA, 120 bp, Artificial Sequence
  ENSG00000168016_70 (sequence is synthesized)
atcagttggaggagaagagtgggcacccagatggagcgtgtcagggaggaggccagggagcccagggctgggaacttcaaaaaggcagacgtggacaggacccagtgtgacctatgtgga

SEQ ID NO: 547781 - DNA, 120 bp, Artificial Sequence
  ENSG00000168016_71 (sequence is synthesized)
gtgaagtttacccgtggcccagagaactatttcagccccagcaaagcgtttgagggggcagcttccgaggtggcagtcctttccagggctgagctggaaagggaggagtgtcaggagagg

SEQ ID NO: 547782 - DNA, 120 bp, Artificial Sequence
  ENSG00000168016_72 (sequence is synthesized)
aacagcgagtcttacgagcagcatatccatctagaacaccaccagaggcagcaagtggcctaccagaaatactcagaatttttccacgagaaggtggacccggccattgatgaaggcaag

SEQ ID NO: 547783 - DNA, 120 bp, Artificial Sequence
  ENSG00000168016_73 (sequence is synthesized)
ctggtggtgcaggacatcgagcaaagtgtatggatccacagtcacgtgggctccaaggagcacagccacatgctgcagaaggtccaggagcacatcaagagggtttcggatatggtggag

SEQ ID NO: 547784 - DNA, 120 bp, Artificial Sequence
  ENSG00000168016_74 (sequence is synthesized)
gacctctacaggcggaaggcctgggctggcgcggaggaggcgatgactcggctggtcaacattctgatcctgtcagtcagggatgcacgagactggttgatgaaaacagagacccgctta

SEQ ID NO: 547785 - DNA, 120 bp, Artificial Sequence
  ENSG00000168016_75 (sequence is synthesized)
aagaaggaaggtattgttcaggaagatgattatgaaaatgaagttgaagactttggtgagcttcggcctagaaggcgttctcggaaatgtggaaagcagagaaaatactaatgtccacac

SEQ ID NO: 547786 - DNA, 120 bp, Artificial Sequence
  ENSG00000168016_76 (sequence is synthesized)
agctgcagcctcctcatccttcggaacattccattctgacttagaattctgagcgctggggcagaagacaaaaagaatgtgaattagcattttaaaaataggggagtctaacaacaccat

SEQ ID NO: 547787 - DNA, 120 bp, Artificial Sequence
  ENSG00000168016_77 (sequence is synthesized)
tgctttttattctcattacttctctttcagtggcttaggatctgattgctccctcacctctaaagtgtttccaagtagagtctggcagtattagtttcccccacaaacaaattcaggtag

SEQ ID NO: 547788 - DNA, 120 bp, Artificial Sequence
  ENSG00000168016_78 (sequence is synthesized)
agaagttgtagtcgaagggaatgttgggactcctcactgcatggtccctggggtgtctggctcatccccatcatgacatgagttggtagcagaggactaggtgttaggacagactctcct

SEQ ID NO: 547789 - DNA, 120 bp, Artificial Sequence
  ENSG00000168016_79 (sequence is synthesized)
cacctcagttgctgctgctctgggccaggaaatctctctatggattccctcatctcctgccacactgctgcagcatcaagtgtgctatgagagctgtatgtgcccaggggtgggccctgc

SEQ ID NO: 547790 - DNA, 120 bp, Artificial Sequence
  ENSG00000168016_80 (sequence is synthesized)
cactggccaccccgagcccaggacgcattctggtcatctctgagcccacttgtagtgtagcttcttctgttagagatgttagccttttctctctgtggcgacttttctgccttcccttct

SEQ ID NO: 547791 - DNA, 120 bp, Artificial Sequence
  ENSG00000168016_81 (sequence is synthesized)
tctgttttttgtgatcattcttagctacctgtgccaagtcacagttagactacctcagaatgtagtcaagaattcacccagtgttctttggatgtcccttccctagggggaaaggctggg

SEQ ID NO: 547792 - DNA, 120 bp, Artificial Sequence
  ENSG00000168016_82 (sequence is synthesized)
gaatgttgctgggagcattcccagctgcctctccaaagtggtcctaactctgccttggctatggtgcagacattccaaaaagtgttttgtatacagccctgtacatctagttttcttggt

SEQ ID NO: 547793 - DNA, 120 bp, Artificial Sequence
  ENSG00000168016_83 (sequence is synthesized)
tctccctggcaagttcgctaccctagcttaggctgacgttctgatgagtctctgcttgctgagctcatcactgtgggatggtgacctgcagagctgcagattggagcaagtggacagagg

SEQ ID NO: 547794 - DNA, 120 bp, Artificial Sequence
  ENSG00000168016_84 (sequence is synthesized)
agggagccagctaagccaaatccgtcactgccacttggctggcaggccttataagagggcggatctgggcccgtttgcaggaggccattgcctaccctctccccacagtgagccagcagc

SEQ ID NO: 547795 - DNA, 120 bp, Artificial Sequence
  ENSG00000168016_85 (sequence is synthesized)
catcagctgatcccacctgggaaaccttcatgcctctctgatggttactgcccacccttaccccacccctcagctcagcctggtatggaaagcaaggtgcacgttggtctttgattgttc

SEQ ID NO: 547796 - DNA, 120 bp, Artificial Sequence
  ENSG00000168016_86 (sequence is synthesized)
tgtcctcacagcagagccagctttccccccatgttgctgctgcttttgctgctcatgctgcttgttgttttctcttccttatctttccaaattgtttccttgaaatgcttgtttccaatt

SEQ ID NO: 547797 - DNA, 120 bp, Artificial Sequence
  ENSG00000168016_87 (sequence is synthesized)
tttcttagattatgtttctaatttttattccaggtgtttttttttcttacttgacagaaaaaaagaaaaccccaacaatatcttgctgtattatcacattttttataaagttaaagcatt

SEQ ID NO: 547798 - DNA, 72 bp, Artificial Sequence
  ENSG00000168016_88 (sequence is synthesized)
atttttatagagataaatcttcctgccttggcctcccgaagtgctgagattataagcatgagccacctttat

SEQ ID NO: 547799 - DNA, 120 bp, Artificial Sequence
  ENSG00000168016_89 (sequence is synthesized)
ctcccgaagtgctgagattataagcatgagccacctttatctgtagataaagcagaaggtcactgagattagtacatttctcatagtcgtaatgtagatggcagagcctggagatgaact

SEQ ID NO: 547800 - DNA, 120 bp, Artificial Sequence
  ENSG00000168016_90 (sequence is synthesized)
cagatgctttgagttctaaatctctttccattttccttccttttaaagcctcgcatgcgaattgaattccagaaccttccacaattagtgtatcattgctgttccttatgtacattcctt

SEQ ID NO: 547801 - DNA, 89 bp, Artificial Sequence
  ENSG00000168016_91 (sequence is synthesized)
aagcgcttccccaggcggcggcggtcctggtgcggaccctccggccgcagccatgtgggacccgcgggcagctaggcccggtggcggtc

SEQ ID NO: 547802 - DNA, 120 bp, Artificial Sequence
  ENSG00000168016_92 (sequence is synthesized)
ggatgcccaagttggagcaagctctaaggagagccttacagatgaagccaaggttagcaatgtccaccctgtgatgacagaactgggtaaggtcagttcatagatagagacaattccagg

SEQ ID NO: 547803 - DNA, 120 bp, Artificial Sequence
  ENSG00000168016_93 (sequence is synthesized)
aagacaaatgaggcttggttcctgccctctggatcaggtaatgtgggggacaagaacagcttccttgcatgagagacccctctagcatggcttcactaccactgcttgcagctcatgcag

SEQ ID NO: 547804 - DNA, 120 bp, Artificial Sequence
  ENSG00000168016_94 (sequence is synthesized)
atgatggcagccaaagagtccccacattgacccccagtgacctctgtattggtccactgctttcacttggctcctgagtccttgtgggtttttctccccaagcttagttcattatgggta

SEQ ID NO: 547805 - DNA, 120 bp, Artificial Sequence
  ENSG00000168016_95 (sequence is synthesized)
gagctaccaactcacagccgttgtcctgggttttctagccactgttttctctttcccactatcttttggtggagactcaagctggctgctgactgtactgtggggtcttctctggggact

SEQ ID NO: 547806 - DNA, 120 bp, Artificial Sequence
  ENSG00000168016_96 (sequence is synthesized)
tagctggctgtgtcccagtccttgttgcagacttcctttgcacatgatgcatgcttgaaggggctatgttatacccaagtcaagagcactgttggctttaacactttaaaaatctgcccc

SEQ ID NO: 547807 - DNA, 120 bp, Artificial Sequence
  ENSG00000168016_97 (sequence is synthesized)
agaactgaccctttagatagagtccttcctttttttcttatcattttttaaatgttattttgccttaatagcacaactattacaatattgatataggtgctttgcagtttacagagtact

SEQ ID NO: 547808 - DNA, 120 bp, Artificial Sequence
  ENSG00000168026_0 (sequence is synthesized)
gacccggactcggagccgcgagcggcccgagatgagcagcaatgactcctcccttatggctgggatcatttactatagccaggaaaagtacttccaccatgtgcagcaggctgcagctgt

SEQ ID NO: 547809 - DNA, 120 bp, Artificial Sequence
  ENSG00000168026_1 (sequence is synthesized)
gggcctggaaaaattcagcaatgaccctgtgttgaagttctttaaagcctatggagtcctcaaagaagagcacatccaggatgccatcagtgacctggaaagcatcaggcatcacccaga

SEQ ID NO: 547810 - DNA, 120 bp, Artificial Sequence
  ENSG00000168026_2 (sequence is synthesized)
cgtgtccctgtgctccaccatggccctcatttatgctcacaaaagatgtgaaatcattgaccgagaagcaattcaggagcttgagtacagcctgaaggaaatacgcaagacagtcagtgg

SEQ ID NO: 547811 - DNA, 120 bp, Artificial Sequence
  ENSG00000168026_3 (sequence is synthesized)
gactgcactgtactatgctggccttttcctctggctcataggccgccatgacaaggccaaagagtacattgaccgcatgctgaagatttctagaggcttcagagaggcaatgtacttcat

SEQ ID NO: 547812 - DNA, 120 bp, Artificial Sequence
  ENSG00000168026_4 (sequence is synthesized)
gatgcagcagaactactcagaggccctggaggtggtgaaccagatcactgtgacttcagggagcttcctgccagccctcgtcctgaagatgcagctgttcttagctcggcaggactggga

SEQ ID NO: 547813 - DNA, 120 bp, Artificial Sequence
  ENSG00000168026_5 (sequence is synthesized)
gcagacagtagaaatgggacacagaatcctagaaaaagatgagagcaatattgatgcctgccaaattctaaccgtgcatgagcttgcaagagaaggaaacatgaccacagctaccaatca

SEQ ID NO: 547814 - DNA, 120 bp, Artificial Sequence
  ENSG00000168026_6 (sequence is synthesized)
cgttagaaatctgattaaggcactagagacaagggaacccgaaaatccaagcctccatcttaaaaaaattattgtggttagccgactgtgtgggagtcaccaggtgattctagggctagt

SEQ ID NO: 547815 - DNA, 120 bp, Artificial Sequence
  ENSG00000168026_7 (sequence is synthesized)
gtgtagtttcatcgagcgcaccttcatggccaccccctcgtatgtccatgtggccacagaactgggctatctcttcatcctgaagaaccaagtgaaagaggccttgctgtggtattcaga

SEQ ID NO: 547816 - DNA, 120 bp, Artificial Sequence
  ENSG00000168026_8 (sequence is synthesized)
agccatgaaactggacaaggatggcatggctggtttgacagggatcatcttgtgtcatatcttagaaggccacctggaggaagctgagtaccggctggaattcctgaaggaggtgcagaa

SEQ ID NO: 547817 - DNA, 120 bp, Artificial Sequence
  ENSG00000168026_9 (sequence is synthesized)
gtcccttgggaagtctgaggtgctaattttcctccaagccctcctgatgtccaggaagcacaagggggaggaagagaccacagcgctcctgaaggaggcagtggagcttcacttctccag

SEQ ID NO: 547818 - DNA, 120 bp, Artificial Sequence
  ENSG00000168026_10 (sequence is synthesized)
catgcaaggcatccctcttggctctgagtactttgaaaagctggacccgtacttcctggtctgcattgctaaggagtacttgctcttctgccccaagcagcccaggttaccaggccagat

SEQ ID NO: 547819 - DNA, 120 bp, Artificial Sequence
  ENSG00000168026_11 (sequence is synthesized)
cgtgtctccacttcttaaacaagtcgccgtgatcttgaatcctgtagtcaaagcagcaccagctctgatcgaccccctgtatttgatggctcaggtcaggtattactcaggagagctaga

SEQ ID NO: 547820 - DNA, 120 bp, Artificial Sequence
  ENSG00000168026_12 (sequence is synthesized)
gaatgcccagagcatcctgcagcgttgcctggagctggaccccgcctccgtggatgcccatctcctcatgtgtcagatctacttggctcagggcaactttggcatgtgcttccactgctt

SEQ ID NO: 547821 - DNA, 120 bp, Artificial Sequence
  ENSG00000168026_13 (sequence is synthesized)
agagctgggtgtcagccacaacttccaggtccgagatcaccccctctaccacctcatcaaggccagggccctcaacaaggctggagactatccagaggccataaagacgctgaaaatggt

SEQ ID NO: 547822 - DNA, 120 bp, Artificial Sequence
  ENSG00000168026_14 (sequence is synthesized)
catcaaattgccagctctgaagaaggaagaaggcagaaagttcctcaggccctctgtgcagcctagccagcgggcatccatcttattggaactggtggaggccctccggctgaatgggga

SEQ ID NO: 547823 - DNA, 120 bp, Artificial Sequence
  ENSG00000168026_15 (sequence is synthesized)
gctacatgaggccaccaaggtcatgcaggacaccatcaatgagttcggtggcacaccagaagagaaccgcatcaccattgccaacgtggacttggtcctgagcaagggcaatgtggacgt

SEQ ID NO: 547824 - DNA, 120 bp, Artificial Sequence
  ENSG00000168026_16 (sequence is synthesized)
gcctctacatcagatgctaccgtgagctctgtgaacatctgcctggcccccacaccagcctgctactgggcgatgccttaatgagcattctggagcccgagaaggccctggaggtctatg

SEQ ID NO: 547825 - DNA, 120 bp, Artificial Sequence
  ENSG00000168026_17 (sequence is synthesized)
atgaggcctatagacagaacccacatgacgcctccctggccagcagaattgggcacgcttatgtgaaggcccaccagtatactgaggcaattgagtattatgaggctgcccagaagatta

SEQ ID NO: 547826 - DNA, 120 bp, Artificial Sequence
  ENSG00000168026_18 (sequence is synthesized)
atggacaggactttctgtgctgcgatctgggcaaactgctcctgaagttaaagaaggtcaataaagcagaaaaagttttgaagcaggcactggaacatgacattgtccaagacatcccat

SEQ ID NO: 547827 - DNA, 120 bp, Artificial Sequence
  ENSG00000168026_19 (sequence is synthesized)
ccatgatgaatgatgttaagtgcctgcttttgctggcaaaggtttacaagagccataaaaaagaagctgtgatagaaactttgaacaaggccttggacctccagtctcggatactgaagc

SEQ ID NO: 547828 - DNA, 120 bp, Artificial Sequence
  ENSG00000168026_20 (sequence is synthesized)
gagttccactggagcaaccagaaatgattccctcccagaagcaactggcagcctctatctgcatccaatttgcagagcactacctggcagagaaagagtatgacaaggcggtacagtctt

SEQ ID NO: 547829 - DNA, 120 bp, Artificial Sequence
  ENSG00000168026_21 (sequence is synthesized)
ataaggatgtcttctcctacttgccaactgacaataaggtgatgctggagctggcgcagctctacctgctccaggggcacctggacctgtgtgagcagcactgtgccatcctcctgcaga

SEQ ID NO: 547830 - DNA, 120 bp, Artificial Sequence
  ENSG00000168026_22 (sequence is synthesized)
ctgagcagaaccatgagaccgcttctgtgttgatggctgacctgatgtttagaaaacagaaacatgaagcggccatcaatctttaccaccaagtcttggagaaagcgccagacaattttt

SEQ ID NO: 547831 - DNA, 120 bp, Artificial Sequence
  ENSG00000168026_23 (sequence is synthesized)
tggtattgcataaattaatcgatctgctaagaagaagtggaaaacttgaagacattcctgccttctttgaattggccaagaaggtgtctagccgggtgcctttggaaccagggttcaatt

SEQ ID NO: 547832 - DNA, 120 bp, Artificial Sequence
  ENSG00000168026_24 (sequence is synthesized)
actgcagaggtatctactgctggcacatagggcagcccaacgaagccttaaagttcctgaacaaggcacgcaaggacagcacttggggccagagcgccatctaccacatggtgcagatct

SEQ ID NO: 547833 - DNA, 120 bp, Artificial Sequence
  ENSG00000168026_25 (sequence is synthesized)
gtctgaatccagacaacgaggttgtgggcggagaggcttttgagaaccagggagctgagagcaactacatggagaagaaggagttggagcagcagggtgtgagcaccgccgagaaactgc

SEQ ID NO: 547834 - DNA, 120 bp, Artificial Sequence
  ENSG00000168026_26 (sequence is synthesized)
tgcgtgagttttacccacattcagactccagccagacccagctgcggctgctgcagggcctctgccggctggccaccagggagaaggctaacatggaggctgcgctgggcagcttcatcc

SEQ ID NO: 547835 - DNA, 120 bp, Artificial Sequence
  ENSG00000168026_27 (sequence is synthesized)
agatagcgcaggctgagaaggacagcgtccctgccctgctggccttggcacaagcctacgtgttcctgaagcagatccccaaggcgcgtatgcagttgaagcgcctggccaagaccccct

SEQ ID NO: 547836 - DNA, 120 bp, Artificial Sequence
  ENSG00000168026_28 (sequence is synthesized)
gggtgctgagtgaggctgaggacctggagaagagctggctcctgctggctgacatttactgccagggcagcaagttcgacctcgccttagaactgctgcggcgctgtgtgcaatacaaca

SEQ ID NO: 547837 - DNA, 120 bp, Artificial Sequence
  ENSG00000168026_29 (sequence is synthesized)
agtcctgctacaaggcctatgagtacatgggcttcatcatggagaaggagcagtcctacaaggatgcagtcaccaactacaaactggcctggaagtacagtcatcacgccaaccctgcca

SEQ ID NO: 547838 - DNA, 120 bp, Artificial Sequence
  ENSG00000168026_30 (sequence is synthesized)
ttggcttcaaacttgctttcaactacctgaaggacaagaaatttgtggaggccattgaaatctgcaacgatgtcctcagggagcaccccgactaccccaagatcagggaggaaattttgg

SEQ ID NO: 547839 - DNA, 120 bp, Artificial Sequence
  ENSG00000168026_31 (sequence is synthesized)
aaaaggcccgaaggtccctgaggccctagctggggtcaaggggcctggaccagtagaagccatcaacctactgaagttgtgtggagggatggaaagtgggtcagtggagaagggattcag

SEQ ID NO: 547840 - DNA, 120 bp, Artificial Sequence
  ENSG00000168026_32 (sequence is synthesized)
ttactcaaccctggagaccagtggagactctggagctgttggaatgtccctgctcagcccagatgggcagtatctcttggcttctcctagggccccagcaccctcatctgataacagcta

SEQ ID NO: 547841 - DNA, 120 bp, Artificial Sequence
  ENSG00000168026_33 (sequence is synthesized)
aggcctgacccaccaggggaaggaaagccctgccccagagataacacagcccctcaagggctgccaaaggagaccgagaagcaattcaggagcttgagtacagcctgaaggaaatacgca

SEQ ID NO: 547842 - DNA, 120 bp, Artificial Sequence
  ENSG00000168026_34 (sequence is synthesized)
agatgctgttaaccagtgagaagtggctgctgctcctctccccctggaggcctgggagaagactccatgcctgggcccaactgagtggaagcaggcagagcccatgacagtgggaggggc

SEQ ID NO: 547843 - DNA, 120 bp, Artificial Sequence
  ENSG00000168026_35 (sequence is synthesized)
tagtaagaaatgccgtgctctcttccctggggactggggcacactggaggctcagggtaggcccaggaaccaggttctttgattccacccactgtttacttgtgcatcaagtgaagggtc

SEQ ID NO: 547844 - DNA, 120 bp, Artificial Sequence
  ENSG00000168026_36 (sequence is synthesized)
agaatcaaggaggaacccttcatgacctgtgcacctgacccaaagcccttgtagggagctcctggatctcagcttcctcttttctaccccacccctatactcgctgccaaggaggcctgc

SEQ ID NO: 547845 - DNA, 120 bp, Artificial Sequence
  ENSG00000168026_37 (sequence is synthesized)
tctggtttgactctttgagttgtgtagcttgggagtcaggcagcatcaggcagtgagattgattctaggctctgccatgtgctatctgtggaagcctgggcaggtgtccccacctggata

SEQ ID NO: 547846 - DNA, 120 bp, Artificial Sequence
  ENSG00000168026_38 (sequence is synthesized)
agacagaattccacacaggactaaatgtgataagaagtgggagagtttggaacagtccctggcacactacagtaattccatcaatgttaactgatagtagaagtcgtggtagtatttctg

SEQ ID NO: 547847 - DNA, 120 bp, Artificial Sequence
  ENSG00000168026_39 (sequence is synthesized)
aattcaggaaatgccttttttttaggggatagttggaactgctcaggcattggccaggtaatactgggccccaaacatgctcgtaagtcttgtagttttccaaagaaaccaaaaatagcc

SEQ ID NO: 547848 - DNA, 120 bp, Artificial Sequence
  ENSG00000168026_40 (sequence is synthesized)
ctcaaatgcagtcagaaacacctagaattcttagtgaaacctcaatacccagacaggttctcattttcagaaaggtttgtttttagccaaagcattgccttttagatcagtgaaatatat

SEQ ID NO: 547849 - DNA, 120 bp, Artificial Sequence
  ENSG00000168026_41 (sequence is synthesized)
tgcctctatggagagcatggcaaaccaggagtctctaaggggtcatggtgggaaggggaagcttctggtttcttctgcacagctctgagattgtggattttgtgggatggggtgaggtag

SEQ ID NO: 547850 - DNA, 120 bp, Artificial Sequence
  ENSG00000168026_42 (sequence is synthesized)
aggggagagtccgtatttgggagaaaaaggccccagcccttttcgtctctgggtaggaataagagaataggactatcctcagctccctgtgactccagatccctaagcaggccttcctgg

SEQ ID NO: 547851 - DNA, 120 bp, Artificial Sequence
  ENSG00000168026_43 (sequence is synthesized)
ggcctggcctgaaagttaatcccaggggcagacttagcatttagctaactgagatttagcattagccccttttttactcccacttcaaaccttgggacctccccaccgaccccgggctgg

SEQ ID NO: 547852 - DNA, 120 bp, Artificial Sequence
  ENSG00000168026_44 (sequence is synthesized)
ctacccagttctaattttgttcatacttactgaacagagtggacccataccatccttggttttgcttttggcacttctctgcagctgggaactaagaattccttactcctgggtggggag

SEQ ID NO: 547853 - DNA, 120 bp, Artificial Sequence
  ENSG00000168026_45 (sequence is synthesized)
tgggaaagaacctaagctttggaatctgtcagtgacctaggtggctgggtgacctcagaccaattgcctaacctttctaacctttcatgtgttggacaggaaggtttggaaagttcgaat

SEQ ID NO: 547854 - DNA, 120 bp, Artificial Sequence
  ENSG00000168026_46 (sequence is synthesized)
agttatactgacttacatttgattcatgtcaaaatggagcagaggcttctgggccagcactagttagtttgctgctggcctggcaggctgcactgtggacacagtgagggctagctcctg

SEQ ID NO: 547855 - DNA, 120 bp, Artificial Sequence
  ENSG00000168026_47 (sequence is synthesized)
cctggctctgcctgggtgggtctgaaaaggcaacttctcttcacaaactcaggaacagggctactctatgggttagccctgctccataaggagcagtcaaaaaaaaaaaagaaaaaaaag

SEQ ID NO: 547856 - DNA, 120 bp, Artificial Sequence
  ENSG00000168026_48 (sequence is synthesized)
tccctgtgaccagatgcaggctacttcctagccccgtaacctcagatgcctcactgacacacctctgaggagctgtcgggcagagaggactcagtgctgcacctactctgccctttagcc

SEQ ID NO: 547857 - DNA, 120 bp, Artificial Sequence
  ENSG00000168026_49 (sequence is synthesized)
ggaagcggtaggctggctggcagtgggcagcatcaatctcctgggccagtctaaggtggggtgaggttgattcaccccaggggaaagcacattcactgtaggtgaaggcaagggcgggac

SEQ ID NO: 547858 - DNA, 120 bp, Artificial Sequence
  ENSG00000168026_50 (sequence is synthesized)
aggttcctggggcttcaggaaaagccctcctcggtcctgcctctctcttccctatcatccagacctcctctagggctggcccaggagcagaagctgagcccttgcagagcaaggaggggt

SEQ ID NO: 547859 - DNA, 120 bp, Artificial Sequence
  ENSG00000168026_51 (sequence is synthesized)
cctcatccctacctctattgcctggcagttctcagaatgggtggagaggcttcccctgtaggctgtcaaaaagccccactggtctctaccactagtcttaccttcccatgtacatcctca

SEQ ID NO: 547860 - DNA, 120 bp, Artificial Sequence
  ENSG00000168026_52 (sequence is synthesized)
cactaatttgagtttccatttaacagtccaagacatcccatccatgatgaatgatgttaagtgcctgcttttgctggcaaaggtttacaagagccataaaaaagaagctgtgatagaaac

SEQ ID NO: 547861 - DNA, 120 bp, Artificial Sequence
  ENSG00000168026_53 (sequence is synthesized)
gacacctactgtgtgctagttctagcctgtagtgcagtgaagcgaattagacacagaacctcaaggtgtgatggaagcaggtaaacaggctaagtacaaaagcgtgttttgtttgagtcc

SEQ ID NO: 547862 - DNA, 120 bp, Artificial Sequence
  ENSG00000168026_54 (sequence is synthesized)
tttgcttctgctcctgcccccagaggcagtgccagcttgcctcatgtgtactcagccagtggctttgcctattcagagtgacccaaatttgcccaagggcacttatgtgtcatttttcat

SEQ ID NO: 547863 - DNA, 120 bp, Artificial Sequence
  ENSG00000168026_55 (sequence is synthesized)
acttctggctttgaattaagaacttaggactttctgtgaactggtatgtcaggctctgagtttctgatcctggcttgattggtttctcgaggccttggacctccagtctcggatactgaa

SEQ ID NO: 547864 - DNA, 120 bp, Artificial Sequence
  ENSG00000168026_56 (sequence is synthesized)
gcctgcatccaacacacaggtccgacgcccgcatctcctccaggggagctgggaaaccagagatccagcctctgctttgtgcagactcacaaagtggtccttgtatatccctgccctgtc

SEQ ID NO: 547865 - DNA, 120 bp, Artificial Sequence
  ENSG00000168026_57 (sequence is synthesized)
aaagttgggttcagttgtgttagtctgtattctgttggtgtataccagaatacttgaaactgggtaattcatacattttctacagttctagaggctgagaagttcaaggtggaggagcca

SEQ ID NO: 547866 - DNA, 70 bp, Artificial Sequence
  ENSG00000168028_0 (sequence is synthesized)
cttttccgtgctacctgcagaggggtccatacggcgttgttctggattcccgtcgtaacttaaagggaaa

SEQ ID NO: 547867 - DNA, 67 bp, Artificial Sequence
  ENSG00000168028_1 (sequence is synthesized)
agttctgcgcatgcgtggcaccatttcccgtgaacacccatgggaggtcatgcctgatctggaaggc

SEQ ID NO: 547868 - DNA, 77 bp, Artificial Sequence
  ENSG00000168028_2 (sequence is synthesized)
cctgaggttgcagactggtctgaaggtgtacaggtgccctctgtgcctattcagcaattccctactgaagactggag

SEQ ID NO: 547869 - DNA, 79 bp, Artificial Sequence
  ENSG00000168028_3 (sequence is synthesized)
ccactgaatgggtaggagcaaccactgactggtcttaagctgttcttgcataggctcttaagcaaaagttgtcttcatt

SEQ ID NO: 547870 - DNA, 120 bp, Artificial Sequence
  ENSG00000168028_4 (sequence is synthesized)
acatcagtttctaaaagttgtcttcatttagtttgctttttactccagatcagaatacctgggattgcatatcaaagcataataataaatacatgtctcgacatgagttgtacttctaaa

SEQ ID NO: 547871 - DNA, 66 bp, Artificial Sequence
  ENSG00000168028_5 (sequence is synthesized)
gaggcatcttatgttaacctacctaccattgcgctgtgtaacacagattctcctctgcgctatgtg

SEQ ID NO: 547872 - DNA, 76 bp, Artificial Sequence
  ENSG00000168028_6 (sequence is synthesized)
accagcctctcacggaggcatcttatgttaacctacctaccattgcgctgtgtaacacagattctcctctgcgcta

SEQ ID NO: 547873 - DNA, 120 bp, Artificial Sequence
  ENSG00000168028_7 (sequence is synthesized)
agtttttatattatagaaataaagcttacagacattgtgagacatagaaagacataagaaaacagaaataactcaggccgggcgcggtggctacgcctgtaatcccagcactttgggagg

SEQ ID NO: 547874 - DNA, 68 bp, Artificial Sequence
  ENSG00000168028_8 (sequence is synthesized)
ctgtaatcccagcactttgggaggtggagtccggcgtattacgaggtcaggagatccacagggcgggt

SEQ ID NO: 547875 - DNA, 120 bp, Artificial Sequence
  ENSG00000168028_9 (sequence is synthesized)
tgagcttgctattctcgtggttagttctgggtaatttctttctatcttccttaaatgaagccagacccctacgttgaaaacatactttaaataaatgttcttgttattgagagaaaagat

SEQ ID NO: 547876 - DNA, 120 bp, Artificial Sequence
  ENSG00000168028_10 (sequence is synthesized)
ttctgctccaggggaggaatatgtcagttgtctgagttacgggacttgggttgggtcatgaacatgagaaagttcattggctgagtttctaatagctcgcatagtgccttcaacttcata

SEQ ID NO: 547877 - DNA, 120 bp, Artificial Sequence
  ENSG00000168028_11 (sequence is synthesized)
ggtacttacacaggctattgaactgaattttgagtggaaagtggggtaagaggtgggaatgaacaatatggtttggaagaaccagaggatggaaggcattaagttggctaaggcacttac

SEQ ID NO: 547878 - DNA, 120 bp, Artificial Sequence
  ENSG00000168028_12 (sequence is synthesized)
gagataaagctaccaaggacttgggagtgacatgctgtaaaggagttttaggatgaatcttgcatcagtgcagattataaaagggaaagagtggcagaaagccaggaagtggattattaa

SEQ ID NO: 547879 - DNA, 120 bp, Artificial Sequence
  ENSG00000168028_13 (sequence is synthesized)
gaaccaatgatggaataagtacagggaaagagaaaggaaagatggatttagccaactgaatctaggctgcacactattaaagctcagggtggaggccagtcttggctcatgaacttctga

SEQ ID NO: 547880 - DNA, 120 bp, Artificial Sequence
  ENSG00000168028_14 (sequence is synthesized)
gtgtcggaagtgtgctatatcaatggcaggattttcgctaacaccagtagagcttgcctctatgactggagtttggtagtactcgctgccacatagagtaaacttgagaagaatgtttgc

SEQ ID NO: 547881 - DNA, 120 bp, Artificial Sequence
  ENSG00000168028_15 (sequence is synthesized)
ccacatagagtaaacttgagaagaatgtttgcacagccaggtcaagtgttacaaatccttctgccctcacttaggcatctatatcataaatctcaagaggacctgggagaagcttctgct

SEQ ID NO: 547882 - DNA, 120 bp, Artificial Sequence
  ENSG00000168028_16 (sequence is synthesized)
tcttttccgtgctacctgcagaggggtccatacggcgttgttctgggtgagttccgtgtagcgtccctggcgccttccagggctagaaaaatgagcttttcctgctcaaatgaaggattc

SEQ ID NO: 547883 - DNA, 120 bp, Artificial Sequence
  ENSG00000168028_17 (sequence is synthesized)
ttgaattctaagagttctaacagggattttattcatcttaactattttgacagatttaaaaattatgtagtaagactttatttcaatgttgacaggacgggttcccatgtgtgtttttgc

SEQ ID NO: 547884 - DNA, 120 bp, Artificial Sequence
  ENSG00000168028_18 (sequence is synthesized)
agagggttattcctgaaactgacttgttactaggaccacatagtttggtacacagtagaaaaaaggcagttagttattgctgtagaatgaactgagtgacagttcttgcttgcttgagaa

SEQ ID NO: 547885 - DNA, 120 bp, Artificial Sequence
  ENSG00000168028_19 (sequence is synthesized)
aaatatactgagcatctagattgggccaggtagtgttgctaggtgctcgggatatatagtagaaaaacaagcctgtcttttttaatgtatgcaggaaatctctggagaagtaagagaggt

SEQ ID NO: 547886 - DNA, 120 bp, Artificial Sequence
  ENSG00000168028_20 (sequence is synthesized)
taaggaaagctgggtatgtgcctgctttacatggagtagtagtgattaagttggccagtgcccagaagtgcttactgggtgccaggattgttgctgtggaatatcgagtaccactaactt

SEQ ID NO: 547887 - DNA, 120 bp, Artificial Sequence
  ENSG00000168028_21 (sequence is synthesized)
gccatcccatgcaacaacaaggtaatgattttaggatctagagtttgtgaatgcgtgctctagaaaaaacattcctgtgcacattgttagagcttggagttgaggctactgactggccga

SEQ ID NO: 547888 - DNA, 120 bp, Artificial Sequence
  ENSG00000168028_22 (sequence is synthesized)
tgaactcgcaagtgtaggtagtgtgctacatgaggggcaagttttcgctaacaccacaagggtctctggcccaatgagtggagtttgatagtaattcttgctacaagtataacattactg

SEQ ID NO: 547889 - DNA, 120 bp, Artificial Sequence
  ENSG00000168028_23 (sequence is synthesized)
aaatgaaaacatttggaaaatagtgtgttcttctgcctttgtccatgtttcttgctcaggcctcaggcacttggcctttgttttcacaccaacttgatgggttctactataagatgctaa

SEQ ID NO: 547890 - DNA, 120 bp, Artificial Sequence
  ENSG00000168028_24 (sequence is synthesized)
aaaggtgggttgtgtgtggttcagattggttgatttgtaaccctagttgtgcataagaattgcccagatattttttttaaatgccagtgtccaggcatttttttttcaatccctatgatt

SEQ ID NO: 547891 - DNA, 120 bp, Artificial Sequence
  ENSG00000168028_25 (sequence is synthesized)
ccagtgtgcagacaaggttgaaaatccctatttataatgctccctgttacaattgcttttcaactaagagatgtctgtacttttggtacctagatgatgtaagagccaggaaggtgcttg

SEQ ID NO: 547892 - DNA, 120 bp, Artificial Sequence
  ENSG00000168028_26 (sequence is synthesized)
tagaggtgaatcaagctgatattttgcaacttctcagttttattctaactttaatgatctctgtgacttttatactagctttaagaggttttcattccagtgtgctacagcatctgatag

SEQ ID NO: 547893 - DNA, 120 bp, Artificial Sequence
  ENSG00000168028_27 (sequence is synthesized)
gggtgagttccgtgtagcgtccctggcgccttccagggctagaaaaatgagcttttcctgctcaaatgaagggtgagaagactagtgatgaaagccggtcagactggatctgtctcccgc

SEQ ID NO: 547894 - DNA, 120 bp, Artificial Sequence
  ENSG00000168028_28 (sequence is synthesized)
cgcgccccaccttaggcctgcggcccgcacgtggccaggctcgggctggcgggttcccagagtgccccgggagcgggtggaggccgccctccagcggaggctccgagctggggttcggac

SEQ ID NO: 547895 - DNA, 120 bp, Artificial Sequence
  ENSG00000168032_0 (sequence is synthesized)
gctgacacctccttagcgctggccgcgggccgcctctgcggcagcgctagtcgccttctccgaatcggctccgcacagctaggagaaaagatgttcactgtgctgacccgccaaccatgt

SEQ ID NO: 547896 - DNA, 120 bp, Artificial Sequence
  ENSG00000168032_1 (sequence is synthesized)
gagcaagcaggcctcaaggccctctaccgaactccaaccatcattgccttggtggtcttgcttgtgagtattgtggtacttgtgagtatcactgtcatccagatccacaagcaagaggtc

SEQ ID NO: 547897 - DNA, 120 bp, Artificial Sequence
  ENSG00000168032_2 (sequence is synthesized)
ctccctccaggactgaagtatggtattgtgctggatgccgggtcttcaagaaccacagtctacgtgtatcaatggccagcagaaaaagagaataataccggagtggtcagtcaaaccttc

SEQ ID NO: 547898 - DNA, 120 bp, Artificial Sequence
  ENSG00000168032_3 (sequence is synthesized)
aaatgtagtgtgaaaggctctggaatctccagctatggaaataacccccaagatgtccccagagcctttgaggagtgtatgcaaaaagtcaaggggcaggttccatcccacctccacgga

SEQ ID NO: 547899 - DNA, 120 bp, Artificial Sequence
  ENSG00000168032_4 (sequence is synthesized)
tccacccccattcacctgggagccacggctgggatgcgcttgctgaggttgcaaaatgaaacagcagctaatgaagtccttgaaagcatccaaagctacttcaagtcccagccctttgac

SEQ ID NO: 547900 - DNA, 120 bp, Artificial Sequence
  ENSG00000168032_5 (sequence is synthesized)
tttaggggtgctcaaatcatttctgggcaagaagaaggggtatatggatggattacagccaactatttaatgggaaatttcctggagaagaacctgtggcacatgtgggtgcacccgcat

SEQ ID NO: 547901 - DNA, 120 bp, Artificial Sequence
  ENSG00000168032_6 (sequence is synthesized)
ggagtggaaaccacgggtgccctggacttaggtggtgcctccacccaaatatccttcgtggcaggagagaagatggatctgaacaccagcgacatcatgcaggtgtccctgtatggctac

SEQ ID NO: 547902 - DNA, 120 bp, Artificial Sequence
  ENSG00000168032_7 (sequence is synthesized)
gtatacacgctctacacacacagcttccagtgctatggccggaatgaggctgagaagaagtttctggcaatgctcctgcagaattctcctaccaaaaaccatctcaccaatccctgttac

SEQ ID NO: 547903 - DNA, 120 bp, Artificial Sequence
  ENSG00000168032_8 (sequence is synthesized)
cctcgggattatagcatcagcttcaccatgggccatgtatttgatagcctgtgcactgtggaccagaggccagaaagttataaccccaatgatgtcatcacttttgaaggaactggggac

SEQ ID NO: 547904 - DNA, 120 bp, Artificial Sequence
  ENSG00000168032_9 (sequence is synthesized)
ccatctctgtgtaaggagaaggtggcttccatatttgacttcaaagcttgccatgatcaagaaacctgttcttttgatggggtttatcagccaaagattaaagggccatttgtggctttt

SEQ ID NO: 547905 - DNA, 120 bp, Artificial Sequence
  ENSG00000168032_10 (sequence is synthesized)
gcaggattctactacacagccagtgctttaaatctttcaggtagcttttccctggacaccttcaactccagcacctggaatttctgctcacagaattggagtcagctcccactgctgctc

SEQ ID NO: 547906 - DNA, 120 bp, Artificial Sequence
  ENSG00000168032_11 (sequence is synthesized)
cccaaatttgatgaggtatatgcccgctcttactgcttctcagccaactacatctaccacttgtttgtgaacggttacaaattcacagaggagacttggccccaaatacactttgaaaaa

SEQ ID NO: 547907 - DNA, 120 bp, Artificial Sequence
  ENSG00000168032_12 (sequence is synthesized)
tacatgctcagcctgaccaaccagatcccagctgaaagccctctgatccgtctgcccatagaaccacctgtctttgtgggcaccctcgctttcttcacagcggcagccttgctgtgtctg

SEQ ID NO: 547908 - DNA, 120 bp, Artificial Sequence
  ENSG00000168032_13 (sequence is synthesized)
gcatttcttgcatacctgtgttcagcaaccagaagaaagaggcactccgagcatgcctttgaccatgcagtggattctgactgagccttcaaagcagctcctggagtccaatggctgctt

SEQ ID NO: 547909 - DNA, 120 bp, Artificial Sequence
  ENSG00000168032_14 (sequence is synthesized)
agagtcagcctgggtggcaccaggcaatgcaggtgaagtggctgccttcaggaaatacaactaactaaaatcaaacacctaggtcacgtgcctctcaaatactgatttctgccacagcac

SEQ ID NO: 547910 - DNA, 120 bp, Artificial Sequence
  ENSG00000168032_15 (sequence is synthesized)
ctcttgaggcatcccttggctattctgtgcatattgttcttcagagacctcactacccacatgctgatctattggggaacagagaagagacaggccacgaaggtcaggctctttatatta

SEQ ID NO: 547911 - DNA, 120 bp, Artificial Sequence
  ENSG00000168032_16 (sequence is synthesized)
agttccccagaggaagagtaagttgagaaggtatcagtttaatgttgaagaattgacctcagggctcagtttccatttccctccctcagtattcttcctggcaagatacccattaagcat

SEQ ID NO: 547912 - DNA, 120 bp, Artificial Sequence
  ENSG00000168032_17 (sequence is synthesized)
ttcgccaatcagaatctcattttatagtttttcccattggtctttaactaagactttcttgtagcaatctcgtaagcagtgaaccccctcagatcagtagaatatagtatctgggggaga

SEQ ID NO: 547913 - DNA, 120 bp, Artificial Sequence
  ENSG00000168032_18 (sequence is synthesized)
agacttacttccttcagggcagcagccacagccaggcttctgtcatacaggtagatcccgaagcacagagacataaaaaaggtctcccagaaaactatagaccattctccaagtggaatt

SEQ ID NO: 547914 - DNA, 120 bp, Artificial Sequence
  ENSG00000168032_19 (sequence is synthesized)
cccacttagggctctggtcactagattgcaacctgtgtgtttgtcatcatcctcatctcaccattgtattgctatgccctcccataaaaacacattgatccctagcaagattattgcatt

SEQ ID NO: 547915 - DNA, 120 bp, Artificial Sequence
  ENSG00000168032_20 (sequence is synthesized)
ccagattttactgcctttgctaggcttttgcttagcaaagggctgactttccattgttatcatggtgtatatatttttgtcaccattcccacaagtatacttgatgttgtcatagaacga

SEQ ID NO: 547916 - DNA, 120 bp, Artificial Sequence
  ENSG00000168032_21 (sequence is synthesized)
acatcctactctatgatttactaaccaattactttcccagatcatagacctctctgcatagtagtcataggtcttgactttggggaaagaaaaggaagctgcaggaatatttatctccaa

SEQ ID NO: 547917 - DNA, 120 bp, Artificial Sequence
  ENSG00000168032_22 (sequence is synthesized)
agtcgaatgagaaagaactccagcaaatccaatggctacaaactaaaaatcagcattatttcatattgctgtttcttagctgaatatggaataaagaactattattttattttgacttgc

SEQ ID NO: 547918 - DNA, 120 bp, Artificial Sequence
  ENSG00000168032_23 (sequence is synthesized)
aaggggtgtgtgtgtgttaacttccatatggtactctttctcctaaggaccctaggtgatatttatgagagaaatttttttccctagcaaattaagaaacccattcattaatatcacctt

SEQ ID NO: 547919 - DNA, 120 bp, Artificial Sequence
  ENSG00000168032_24 (sequence is synthesized)
gaatcggctccgcacaggtaagatcaggggacccggcgcctgagctgccgaggaaggagtcgggggtgctgcgtgagactgagagttgggaggcaaagaaacaaaatcggatttcctcag

SEQ ID NO: 547920 - DNA, 69 bp, Artificial Sequence
  ENSG00000168032_25 (sequence is synthesized)
tgagtatcactgtcatccagatccacaagcaagaggtcctccctccaggactgaagatagggtttcacc

SEQ ID NO: 547921 - DNA, 120 bp, Artificial Sequence
  ENSG00000168032_26 (sequence is synthesized)
tgcccagccgcaactaagatatggtattgtgctggatgccgggtcttcaagaaccacagtctacgtgtatcaatggccagcagaaaaagagaataataccggagtggtcagtcaaacctt

SEQ ID NO: 547922 - DNA, 120 bp, Artificial Sequence
  ENSG00000168032_27 (sequence is synthesized)
agctgatatgaagcctgaaggatgtctggagtcagcctgttcaataccagcttcagcaataattagattaaaccaatcaatatcctgcattaggcctctgactatctacttttacataaa

SEQ ID NO: 547923 - DNA, 120 bp, Artificial Sequence
  ENSG00000168032_28 (sequence is synthesized)
taaaattgagtcatctacaaaaaaataaggatgtctggagacataaggactgttggtagcatgtactctctaagctttgcttctaataaatctaattaccagtaaagtatattataagaa

SEQ ID NO: 547924 - DNA, 120 bp, Artificial Sequence
  ENSG00000168032_29 (sequence is synthesized)
gaaggccagggctctcttcactgcctcccacttctccctgaccctgagttctgaatggagatcccaaatggagggaagggattggcctcagataagagaacacttcctgctttgcacagg

SEQ ID NO: 547925 - DNA, 120 bp, Artificial Sequence
  ENSG00000168036_0 (sequence is synthesized)
aagcctctcggtctgtggcagcagcgttggcccggccccgggagcggagagcgaggggaggcggagacggaggaaggtctgaggagcagcttcagtccccgccgagccgccaccgcaggt

SEQ ID NO: 547926 - DNA, 120 bp, Artificial Sequence
  ENSG00000168036_1 (sequence is synthesized)
cgaggacggtcggactcccgcggcgggaggagcctgttcccctgagggtatttgaagtataccatacaactgttttgaaaatccagcgtggacaatggctactcaagctgatttgatgga

SEQ ID NO: 547927 - DNA, 120 bp, Artificial Sequence
  ENSG00000168036_2 (sequence is synthesized)
gttggacatggccatggaaccagacagaaaagcggctgttagtcactggcagcaacagtcttacctggactctggaatccattctggtgccactaccacagctccttctctgagtggtaa

SEQ ID NO: 547928 - DNA, 120 bp, Artificial Sequence
  ENSG00000168036_3 (sequence is synthesized)
aggcaatcctgaggaagaggatgtggatacctcccaagtcctgtatgagtgggaacagggattttctcagtccttcactcaagaacaagtagctgatattgatggacagtatgcaatgac

SEQ ID NO: 547929 - DNA, 120 bp, Artificial Sequence
  ENSG00000168036_4 (sequence is synthesized)
tcgagctcagagggtacgagctgctatgttccctgagacattagatgagggcatgcagatcccatctacacagtttgatgctgctcatcccactaatgtccagcgtttggctgaaccatc

SEQ ID NO: 547930 - DNA, 120 bp, Artificial Sequence
  ENSG00000168036_5 (sequence is synthesized)
acagatgctgaaacatgcagttgtaaacttgattaactatcaagatgatgcagaacttgccacacgtgcaatccctgaactgacaaaactgctaaatgacgaggaccaggtggtggttaa

SEQ ID NO: 547931 - DNA, 120 bp, Artificial Sequence
  ENSG00000168036_6 (sequence is synthesized)
taaggctgcagttatggtccatcagctttctaaaaaggaagcttccagacacgctatcatgcgttctcctcagatggtgtctgctattgtacgtaccatgcagaatacaaatgatgtaga

SEQ ID NO: 547932 - DNA, 120 bp, Artificial Sequence
  ENSG00000168036_7 (sequence is synthesized)
aacagctcgttgtaccgctgggaccttgcataacctttcccatcatcgtgagggcttactggccatctttaagtctggaggcattcctgccctggtgaaaatgcttggttcaccagtgga

SEQ ID NO: 547933 - DNA, 120 bp, Artificial Sequence
  ENSG00000168036_8 (sequence is synthesized)
ttctgtgttgttttatgccattacaactctccacaaccttttattacatcaagaaggagctaaaatggcagtgcgtttagctggtgggctgcagaaaatggttgccttgctcaacaaaac

SEQ ID NO: 547934 - DNA, 120 bp, Artificial Sequence
  ENSG00000168036_9 (sequence is synthesized)
aaatgttaaattcttggctattacgacagactgccttcaaattttagcttatggcaaccaagaaagcaagctcatcatactggctagtggtggaccccaagctttagtaaatataatgag

SEQ ID NO: 547935 - DNA, 120 bp, Artificial Sequence
  ENSG00000168036_10 (sequence is synthesized)
gacctatacttacgaaaaactactgtggaccacaagcagagtgctgaaggtgctatctgtctgctctagtaataagccggctattgtagaagctggtggaatgcaagctttaggacttca

SEQ ID NO: 547936 - DNA, 120 bp, Artificial Sequence
  ENSG00000168036_11 (sequence is synthesized)
cctgacagatccaagtcaacgtcttgttcagaactgtctttggactctcaggaatctttcagatgctgcaactaaacaggaagggatggaaggtctccttgggactcttgttcagcttct

SEQ ID NO: 547937 - DNA, 120 bp, Artificial Sequence
  ENSG00000168036_12 (sequence is synthesized)
gggttcagatgatataaatgtggtcacctgtgcagctggaattctttctaacctcacttgcaataattataagaacaagatgatggtctgccaagtgggtggtatagaggctcttgtgcg

SEQ ID NO: 547938 - DNA, 120 bp, Artificial Sequence
  ENSG00000168036_13 (sequence is synthesized)
tactgtccttcgggctggtgacagggaagacatcactgagcctgccatctgtgctcttcgtcatctgaccagccgacaccaagaagcagagatggcccagaatgcagttcgccttcacta

SEQ ID NO: 547939 - DNA, 120 bp, Artificial Sequence
  ENSG00000168036_14 (sequence is synthesized)
tggactaccagttgtggttaagctcttacacccaccatcccactggcctctgataaaggctactgttggattgattcgaaatcttgccctttgtcccgcaaatcatgcacctttgcgtga

SEQ ID NO: 547940 - DNA, 120 bp, Artificial Sequence
  ENSG00000168036_15 (sequence is synthesized)
cgtacgtccatgggtgggacacagcagcaatttgtggagggggtccgcatggaagaaatagttgaaggttgtaccggagcccttcacatcctagctcgggatgttcacaaccgaattgtt

SEQ ID NO: 547941 - DNA, 120 bp, Artificial Sequence
  ENSG00000168036_16 (sequence is synthesized)
atcagaggactaaataccattccattgtttgtgcagctgctttattctcccattgaaaacatccaaagagtagctgcaggggtcctctgtgaacttgctcaggacaaggaagctgcagaa

SEQ ID NO: 547942 - DNA, 120 bp, Artificial Sequence
  ENSG00000168036_17 (sequence is synthesized)
gctattgaagctgagggagccacagctcctctgacagagttacttcactctaggaatgaaggtgtggcgacatatgcagctgctgttttgttccgaatgtctgaggacaagccacaagat

SEQ ID NO: 547943 - DNA, 120 bp, Artificial Sequence
  ENSG00000168036_18 (sequence is synthesized)
tacaagaaacggctttcagttgagctgaccagctctctcttcagaacagagccaatggcttggaatgagactgctgatcttggacttgatattggtgcccagggagaaccccttggatat

SEQ ID NO: 547944 - DNA, 120 bp, Artificial Sequence
  ENSG00000168036_19 (sequence is synthesized)
cgccaggatgatcctagctatcgttcttttcactctggtggatatggccaggatgccttgggtatggaccccatgatggaacatgagatgggtggccaccaccctggtgctgactatcca

SEQ ID NO: 547945 - DNA, 120 bp, Artificial Sequence
  ENSG00000168036_20 (sequence is synthesized)
gttgatgggctgccagatctggggcatgcccaggacctcatggatgggctgcctccaggtgacagcaatcagctggcctggtttgatactgacctgtaaatcatcctttaggtaagaagt

SEQ ID NO: 547946 - DNA, 120 bp, Artificial Sequence
  ENSG00000168036_21 (sequence is synthesized)
tttaaaaagccagtttgggtaaaatacttttactctgcctacagaacttcagaaagacttggttggtagggtgggagtggtttaggctatttgtaaatctgccacaaaaacaggtatata

SEQ ID NO: 547947 - DNA, 120 bp, Artificial Sequence
  ENSG00000168036_22 (sequence is synthesized)
ctttgaaaggagatgtcttggaacattggaatgttctcagatttctggttgttatgtgatcatgtgtggaagttattaactttaatgttttttgccacagcttttgcaacttaatactca

SEQ ID NO: 547948 - DNA, 120 bp, Artificial Sequence
  ENSG00000168036_23 (sequence is synthesized)
aatgagtaacatttgctgttttaaacattaatagcagcctttctctctttatacagctgtattgtctgaacttgcattgtgattggcctgtagagttgctgagagggctcgaggggtggg

SEQ ID NO: 547949 - DNA, 120 bp, Artificial Sequence
  ENSG00000168036_24 (sequence is synthesized)
ctggtatctcagaaagtgcctgacacactaaccaagctgagtttcctatgggaacaattgaagtaaactttttgttctggtcctttttggtcgaggagtaacaatacaaatggattttgg

SEQ ID NO: 547950 - DNA, 120 bp, Artificial Sequence
  ENSG00000168036_25 (sequence is synthesized)
gagtgactcaagaagtgaagaatgcacaagaatggatcacaagatggaatttatcaaaccctagccttgcttgttaaatttttttttttttttttttaagaatatctgtaatggtactga

SEQ ID NO: 547951 - DNA, 120 bp, Artificial Sequence
  ENSG00000168036_26 (sequence is synthesized)
ttttttttttttttttttttgcagtaactgttttttaagtctctcgtagtgttaagttatagtgaatactgctacagcaatttctaatttttaagaattgagtaatggtgtagaacacta

SEQ ID NO: 547952 - DNA, 120 bp, Artificial Sequence
  ENSG00000168036_27 (sequence is synthesized)
aagaattgagtaatggtgtagaacactaattcataatcactctaattaattgtaatctgaataaagtgtaacaattgtgtagcctttttgtataaaatagacaaatagaaaatggtccaa

SEQ ID NO: 547953 - DNA, 120 bp, Artificial Sequence
  ENSG00000168036_28 (sequence is synthesized)
ttagtttcctttttaatatgcttaaaataagcaggtggatctatttcatgtttttgatcaaaaactatttgggatatgtatgggtagggtaaatcagtaagaggtgttatttggaacctt

SEQ ID NO: 547954 - DNA, 120 bp, Artificial Sequence
  ENSG00000168036_29 (sequence is synthesized)
gttttggacagtttaccagttgccttttatcccaaagttgttgtaacctgctgtgatacgatgcttcaagagaaaatgcggttataaaaaatggttcagaattaaacttttaattcattc

SEQ ID NO: 547955 - DNA, 120 bp, Artificial Sequence
  ENSG00000168036_30 (sequence is synthesized)
gtgcagaatttgtgaaagcgaaaaagaagacgaaggagaagcaaagagggacggaatactgcagtgctagggtgctggagtccagaaatgattttttcgatgaatttaggattttgccgc

SEQ ID NO: 547956 - DNA, 120 bp, Artificial Sequence
  ENSG00000168036_31 (sequence is synthesized)
ggcgcccgttctacggagagttcacagccttcgtgagtggggacagaaggcggctcggcccggtgattcaggtcgaaattcaagctgaacagcctgctgagagggtatttgaagtatacc

SEQ ID NO: 547957 - DNA, 120 bp, Artificial Sequence
  ENSG00000168036_32 (sequence is synthesized)
aggtggggaaaaaaaggcatacaaagagtaggtttttcattgtttgtaaaatataaacacagatgaattctgtctttggtttgttcatgcttttcagtctgcacagcagggatgttctta

SEQ ID NO: 547958 - DNA, 120 bp, Artificial Sequence
  ENSG00000168036_33 (sequence is synthesized)
agaagttgccctctgcgaaatttcactaaatgggaaccgtggaccctgcatgatgggattataatcacaccagccactccttttacataattttttgtttaagatccagtaagactccct

SEQ ID NO: 547959 - DNA, 120 bp, Artificial Sequence
  ENSG00000168036_34 (sequence is synthesized)
gtttttaatacatataaagcaacagacatgtatatgtcgataaactgagggtttgcgtccctattgcctggtgcaagctacagcaaaaaaccggtgatatcacatctacaaatctcaatg

SEQ ID NO: 547960 - DNA, 120 bp, Artificial Sequence
  ENSG00000168036_35 (sequence is synthesized)
gattcaaaaacaatatgaaaatttttagctgacaagaacatgtctgctgcctgcagtccctgcaatagctcaccatgttgcctactaaccaaaagatcaaaaattatcgatttcatggcg

SEQ ID NO: 547961 - DNA, 120 bp, Artificial Sequence
  ENSG00000168036_36 (sequence is synthesized)
ctgcgaggtctggaaagaaaagctactttaaaatttgcattgtttaagaaatgacttaaaagaaaagaatcatttttttttctgaatactttggaaggtgaaaatggcttgttttaatct

SEQ ID NO: 547962 - DNA, 120 bp, Artificial Sequence
  ENSG00000168036_37 (sequence is synthesized)
ggagacatttatagggttaaaatcggaaatagcacggtgaattttgaagtatccttgtagttggaaagagtattatgttcatattgccaaaaaaaagatgcatggatgcattagactgga

SEQ ID NO: 547963 - DNA, 120 bp, Artificial Sequence
  ENSG00000168036_38 (sequence is synthesized)
tggaaaatacatgagaagttggctagccccctctttgtcaaaacatcacttggtggtgataaagctgttggaaaacacagcattctaatgtagtctgtagtttaatgataatctgtgtct

SEQ ID NO: 547964 - DNA, 120 bp, Artificial Sequence
  ENSG00000168036_39 (sequence is synthesized)
tgaaacatttagcgtagtacttatacaaacctagatggcatagtgtactgcatgcctagcctatatagtatagcctgttgcttctagggtgtaaagctgtatagcgtgttactataggca

SEQ ID NO: 547965 - DNA, 85 bp, Artificial Sequence
  ENSG00000168036_40 (sequence is synthesized)
cttctagggtgtaaagctgtatagcgtgttactataggcagttgaaacagtggtatttatgtatccttttttttttttttaaatt

SEQ ID NO: 547966 - DNA, 120 bp, Artificial Sequence
  ENSG00000168036_41 (sequence is synthesized)
actcctaagtgatcctctttgcctcagcctccccagtggctaggactacaggcacatactaccacacctggctaatttttaacatttttttgtagagatggaatttcgctgtgttgtcca

SEQ ID NO: 547967 - DNA, 120 bp, Artificial Sequence
  ENSG00000168036_42 (sequence is synthesized)
ggctggtcttggaactcttgtgctgcagcaatccacccgcctcccaaagtgttagaattacaagccacttcgcctggcttgtttacctaaacatagaaaagatccagtaaaaatacagaa

SEQ ID NO: 547968 - DNA, 120 bp, Artificial Sequence
  ENSG00000168036_43 (sequence is synthesized)
ttaaaatcttgtggggccactgtagcatatgtagtccatcttgactgaaatgtccttatgcagtgcatgattgtacttcataatttttaagcactcctccctcttgattggtacttagtg

SEQ ID NO: 547969 - DNA, 120 bp, Artificial Sequence
  ENSG00000168036_44 (sequence is synthesized)
gattttatcatttttgtttcttcataattctttctgaaatgtctactggttggacctttgatctcctgaattgatcgtgatttcttctgttgtattttttgtctttgtcatttttttgta

SEQ ID NO: 547970 - DNA, 120 bp, Artificial Sequence
  ENSG00000168036_45 (sequence is synthesized)
ctctaggcagttttctcaattttagtttctattcaactttttgtttttatttattctctccagtatttatggagatactaaattgaagtgttctgtttctctctccaccctatccctagt

SEQ ID NO: 547971 - DNA, 120 bp, Artificial Sequence
  ENSG00000168036_46 (sequence is synthesized)
ttcaagttttatctcagtttctatggagtcagttttttcgttgctttaaaaaaaaattttcctgaagtgattggtaagttttggctaattgggagcactagaattgggcccttaatggtt

SEQ ID NO: 547972 - DNA, 120 bp, Artificial Sequence
  ENSG00000168036_47 (sequence is synthesized)
ggcagggtgtggtggaggagagacagcccttagtccaaaggctcaggccagaaaaagaaagaggaaggctttccttttcctttccggagcagggttctgccctaggtcttgcttggcagt

SEQ ID NO: 547973 - DNA, 120 bp, Artificial Sequence
  ENSG00000168036_48 (sequence is synthesized)
gttggggttcgggcgctgaggcagagacgccaccctaagtcccatcagtcctggggatcggaccagtggactttctcttaagatttcctctttcattcttaagaatagaagtgttattat

SEQ ID NO: 547974 - DNA, 120 bp, Artificial Sequence
  ENSG00000168036_49 (sequence is synthesized)
tttttttaatgccctggctatgtgagtttgaatcgaagcaactttaaaccttagagcaactaaactctaagtgcagcgggtgcgatgcgtcagtagggtgagcacataaaaaatccatgt

SEQ ID NO: 547975 - DNA, 120 bp, Artificial Sequence
  ENSG00000168036_50 (sequence is synthesized)
gaagacgaaggagaagcaaagagggacggaatactgcagtgctagggtgcagctggagtccagaaatgattttttcgatgaatttaggattttgccgcagtatacatctgcagtcccaga

SEQ ID NO: 547976 - DNA, 120 bp, Artificial Sequence
  ENSG00000168036_51 (sequence is synthesized)
ggggagaatgaaagaaatttaggcaaattaagccccaaagcgcactataattttctatttctgaactgatttgtaagagaatgggtaactgaaattagcaaagaatcaccccacacaaag

SEQ ID NO: 547977 - DNA, 120 bp, Artificial Sequence
  ENSG00000168036_52 (sequence is synthesized)
gtagcaggcgcgcggtccgggcggcgggctgggcgcagccgggaggcctggggttgggagcggggagctcagagcaggtacaagggtatttgaagtataccatacaactgttttgaaaat

SEQ ID NO: 547978 - DNA, 120 bp, Artificial Sequence
  ENSG00000168036_53 (sequence is synthesized)
aggtcgaggacggtcggactcccgcggcgggaggagcctgttcccctgaggtgcttgggcgctcctttccttatccttccggggctgctcccgcttcctctcggagccaaacttcgtagc

SEQ ID NO: 547979 - DNA, 120 bp, Artificial Sequence
  ENSG00000168036_54 (sequence is synthesized)
gatggcaaagtattactggtgacagttaatgaaaatgcatatgcatgtgtttttagatttacaaattttactaagaactttttaaaaatccctgaaggtgtatcaaaagtttatcatgct

SEQ ID NO: 547980 - DNA, 120 bp, Artificial Sequence
  ENSG00000168036_55 (sequence is synthesized)
tatgaaatagagtagcactttctaactttaaaacggggaataattctttggatcttgattattggaaaagtgaattatgaattgctagtataaaactgtggttttaaaatatgtctgctt

SEQ ID NO: 547981 - DNA, 120 bp, Artificial Sequence
  ENSG00000168036_56 (sequence is synthesized)
tatatttttatgtagcagatttactcctagttaataatactcaaacttactgaaaactaaggtaattaagataattctgtcctgatgggaagaggaaaaataacttcagtgtgaaatcta

SEQ ID NO: 547982 - DNA, 120 bp, Artificial Sequence
  ENSG00000168036_57 (sequence is synthesized)
tagcatgtagaacagtgcctggcagcacataataggtgcttaatataatatttgttgaaagaacaagtcagtgagtatttttaatgtgaggtgcaaagagaaaaaaaaatgtatctttga

SEQ ID NO: 547983 - DNA, 120 bp, Artificial Sequence
  ENSG00000168036_58 (sequence is synthesized)
ggtgtggagttttgaagaacttccattttctaagcatttgtgtaatgttggagttacttgttccttttgtaatctgaaagtatgctttaaaaaaaattagtgtacttttgagaattttca

SEQ ID NO: 547984 - DNA, 120 bp, Artificial Sequence
  ENSG00000168036_59 (sequence is synthesized)
aaaatgaagcatctctagctgttggatggctgtctaagcatagtgatcaataagtaggaattgtattccttagtaagtaggaagtatggctgcgataggggtaagattctgaaatgtttg

SEQ ID NO: 547985 - DNA, 120 bp, Artificial Sequence
  ENSG00000168036_60 (sequence is synthesized)
tgtagtcagaactacttttagttgataccaatagatttagtgtggtgggaattttagggtaagaaaatgattttgttgagttgtatgccagttcttccttctgtttttcaggctactgtt

SEQ ID NO: 547986 - DNA, 120 bp, Artificial Sequence
  ENSG00000168036_61 (sequence is synthesized)
aaaggaatgcataaatccaaaggatcctgaacttctttctttggtcattggttccccccatccgtcttcctgaagagctaatgacaaagtaaataaataaataattacacatttctatgg

SEQ ID NO: 547987 - DNA, 120 bp, Artificial Sequence
  ENSG00000168036_62 (sequence is synthesized)
ctgcagagaaaataaggcatagtgtggccccagtgatatttccttggacacgtccttcacatggtcagtcttacaaaggttgggttaggtgtttcataaagtgttctcatttaatttaca

SEQ ID NO: 547988 - DNA, 120 bp, Artificial Sequence
  ENSG00000168036_63 (sequence is synthesized)
caaaggcccacttccttaggaagaggtagagtcataatttgagatcaaatctgtgtaatttcagagcctcttacccttgcctcatcatgcattttgactataaatatttagcagtccgtt

SEQ ID NO: 547989 - DNA, 120 bp, Artificial Sequence
  ENSG00000168036_64 (sequence is synthesized)
ttattatcttttctgtgagttaaacttttttcatggacctaagaatattcagaaataagtagtagcatttctgtactcttaaccacaaaaatctcaacctgaagctttgatacaaagttt

SEQ ID NO: 547990 - DNA, 120 bp, Artificial Sequence
  ENSG00000168036_65 (sequence is synthesized)
gtgtcttaaaagtagcttcattaaaagtatagtctaatgacatttctgatttctcagactttaagaccttattaggttagtttagaaaacaaagatggagcctaccagaacagatgttag

SEQ ID NO: 547991 - DNA, 120 bp, Artificial Sequence
  ENSG00000168036_66 (sequence is synthesized)
gaatctcattttgctggttgctttgtgtatgtactcatattggggctttggctttcttcatttattactgttggtattggcccatctccatgaggtgacttaatagaacgttgagggcac

SEQ ID NO: 547992 - DNA, 120 bp, Artificial Sequence
  ENSG00000168036_67 (sequence is synthesized)
cttttattttaaatctcttttctaggaagaagagagtttttgtgtccttgtaagaatcaagttatttataaaagctgctaaatgtagcagaataataaccccttttaaaactcaaatcca

SEQ ID NO: 547993 - DNA, 120 bp, Artificial Sequence
  ENSG00000168036_68 (sequence is synthesized)
gaaacaggagaaacagatggtacttacatattgcaaaagctatcttccttctatacatgaggctgtcagctgaatagtcttggaagagtgaggagtgaatttttctgctggcaactcggt

SEQ ID NO: 547994 - DNA, 120 bp, Artificial Sequence
  ENSG00000168036_69 (sequence is synthesized)
tagttttagcagttggtgctaaaacttggcaaagttttcaccaaatacatggaagatatacaaaaatagagggggcatgtaaaagaaaaacgttgacatagtctgagcattactttctca

SEQ ID NO: 547995 - DNA, 120 bp, Artificial Sequence
  ENSG00000168036_70 (sequence is synthesized)
tcttctctttttatataccttttacccagaatgattggtgcccttactgtaggaaagttgtctttgggattcagcgctgtatggaagctctgttgcactgtgtatgggggaggggtgctg

SEQ ID NO: 547996 - DNA, 120 bp, Artificial Sequence
  ENSG00000168036_71 (sequence is synthesized)
ctttgaattagtgctgccaggaggcctcttttcagtgacattcaagttaatggaatccttcttccttcctgaactaattgcaagttacggggaacttcgggtatataatgtaaataatta

SEQ ID NO: 547997 - DNA, 120 bp, Artificial Sequence
  ENSG00000168036_72 (sequence is synthesized)
ctcatctgggaaaccagtgttggcagaaaagtagtggcttcaattaaaagcagttcttaaattccagtcagcaacagtatctttaatggagcacagggaattcagagccacacaatgagt

SEQ ID NO: 547998 - DNA, 120 bp, Artificial Sequence
  ENSG00000168036_73 (sequence is synthesized)
gaaaatgagaggaaatcaaatacttaggtgaaaggaagtaaactctggaaatacagaaggacacctcctaaggctagaacagatatttaggattgataggcacttctagctaatgactag

SEQ ID NO: 547999 - DNA, 120 bp, Artificial Sequence
  ENSG00000168036_74 (sequence is synthesized)
tccataaaatttccagattgtaatgactaataacatttcagaaaattagggaccataatagggttaccaacatttaattttatgaaaattccctacattttttggtcagtaagagaaaca

SEQ ID NO: 548000 - DNA, 120 bp, Artificial Sequence
  ENSG00000168036_75 (sequence is synthesized)
ttgagacttgagaagagggaggagatttcacatttcacttttatgggtgcctagaggggagagctgacctgggctgccagaggcagggcatagacccccaaccaattctgggttttccaa

SEQ ID NO: 548001 - DNA, 120 bp, Artificial Sequence
  ENSG00000168036_76 (sequence is synthesized)
atcttagatcagttagagctgcctctgaagaaagggtttatagctaaaaaatattatggaaatccagtgctccagagcattaaacaccccaagacataaaattcagagaatattatttac

SEQ ID NO: 548002 - DNA, 120 bp, Artificial Sequence
  ENSG00000168036_77 (sequence is synthesized)
tacagtgtgaatgcctcttgcactctgaattgggaatgtttgcaccacagtggggggcttgccatgttttagctttagatttaattaggttttgtttgtgttttctccttagctgcttta

SEQ ID NO: 548003 - DNA, 120 bp, Artificial Sequence
  ENSG00000168036_78 (sequence is synthesized)
tcactctaggaatgaaggtgtgggtaagtaaaaaggaaccaaagcctttagcagatgtgtacattgaagtctcagtttttcctcaagggcctttttctccttgtctcttagcgacatatg

SEQ ID NO: 548004 - DNA, 120 bp, Artificial Sequence
  ENSG00000168036_79 (sequence is synthesized)
aatgtgagcagttatttatctggtagtttcctagagcaggtatggcagcttgttctttcctctcaaaacacttagtacacattcatttgcattgatgtttccctggcttgagtatttctt

SEQ ID NO: 548005 - DNA, 120 bp, Artificial Sequence
  ENSG00000168036_80 (sequence is synthesized)
ctttatgctgtctagcaactgctctgaggaagaactataatacaagctttaaagagtctgttcagaatcattacaaataagttgtgttatttaaaattataattcataagggagaaagat

SEQ ID NO: 548006 - DNA, 120 bp, Artificial Sequence
  ENSG00000168036_81 (sequence is synthesized)
gaaaaatgttaccagattaaagaagatttttcaaaaggatgtaaggaaagaggcagtgttaaacactgttaagaggacagtttatcagtattttttactaaactttaataaaacttttct

SEQ ID NO: 548007 - DNA, 120 bp, Artificial Sequence
  ENSG00000168036_82 (sequence is synthesized)
atttgaatttctgctatgaatttttcttcagcatttgtcctcagtacaggtggttccttgaaacattgtttctaataaaactagaacatcctgatattttatccattctatagagatcat

SEQ ID NO: 548008 - DNA, 120 bp, Artificial Sequence
  ENSG00000168036_83 (sequence is synthesized)
tgatggtacacagacatacagtggattatgtttgttgagtgaatggaaagagagattgttaggtttacaacgatgcagctcttgagaccggagtttaagatcagcctgggcaacatagtg

SEQ ID NO: 548009 - DNA, 120 bp, Artificial Sequence
  ENSG00000168036_84 (sequence is synthesized)
aaaccccatctttagctgggcatggagatggatgcctatagtcctagctactggggagacgggggcaggaggattgcttgaacccaggagttaacagactgcactcagtgacagagccag

SEQ ID NO: 548010 - DNA, 120 bp, Artificial Sequence
  ENSG00000168036_85 (sequence is synthesized)
cattttctgctcactcctcctaatggcttggtgaaatagcaaacaagccaccagcaggaatctagtctggatgactgcttctggagcctggatgcagtaccattcttccactgattcact

SEQ ID NO: 548011 - DNA, 120 bp, Artificial Sequence
  ENSG00000168036_86 (sequence is synthesized)
tctactgtgatgctgaattcatgactaagagactattggtgaacttatcctggctgtgattacagacgtcaagagggagtattccagcgacactaagaaaataatgcaagagaacgccag

SEQ ID NO: 548012 - DNA, 120 bp, Artificial Sequence
  ENSG00000168036_87 (sequence is synthesized)
cgaagagtgcccaggcaacactgacagactagaaaaaaaatatcaggagatgaagctgacacagtgagagcagcccaggtgcttcttggtgcttgttattacagacacacacttcacaca

SEQ ID NO: 548013 - DNA, 120 bp, Artificial Sequence
  ENSG00000168036_88 (sequence is synthesized)
ggggaggattattttaattctgtggccttcagatctcataaatacaagtaaaaacaagcaggtaactatgataactttacttcagagagtttaaatttcaaaaataaacctatccatcca

SEQ ID NO: 548014 - DNA, 120 bp, Artificial Sequence
  ENSG00000168036_89 (sequence is synthesized)
acgactagttcagttgcttgttcgtgcacatcaggatacccagcgccgtacgtccatgggtgggacacagcagcaatttgtgctgctttattctcccattgaaaacatccaaagagtagc

SEQ ID NO: 548015 - DNA, 120 bp, Artificial Sequence
  ENSG00000168036_90 (sequence is synthesized)
actctcaggaatctttcagatgctgcaactaaacaggtaaattctgagtaaactggtgccatgggaatagagtcaagatgagtatgtgcttgtactgaccatctgtttttatctccatag

SEQ ID NO: 548016 - DNA, 120 bp, Artificial Sequence
  ENSG00000168036_91 (sequence is synthesized)
ggggctgctcccgcttcctctcggagccaaacttcgtagcaggcgcgcggtccgggcggcgggctgggcgcagccgggaggcctggggttgggagcggggagctcagggtatttgaagta

SEQ ID NO: 548017 - DNA, 120 bp, Artificial Sequence
  ENSG00000168036_92 (sequence is synthesized)
cctaatgacttttgattaactttttttagggtatttgaagtataccatacaactgttttgaaaatccagcgtggacaatggctactcaaggtttgtgtcattaaatctttagttactgaa

SEQ ID NO: 548018 - DNA, 120 bp, Artificial Sequence
  ENSG00000168036_93 (sequence is synthesized)
attaggtatttcatcactgagctaaccctggctatcattctgcttttcttggctgtctttcagatttgactttatttctaaaaatatttcaatgggtcatatcacagattcttttttttt

SEQ ID NO: 548019 - DNA, 120 bp, Artificial Sequence
  ENSG00000168038_0 (sequence is synthesized)
gtggacctgtcctgaggcagaggccgagatgcgcgcaaccgcgggagcagccaagtggactggactcttttcttgacttagctaccaggagctagagatgctgttattctattgtatgtg

SEQ ID NO: 548020 - DNA, 120 bp, Artificial Sequence
  ENSG00000168038_1 (sequence is synthesized)
agaagtcggcccagagatggaaaactttattctgtatgaggagatcggaagaggaagcaagactgttgtctataaagggcgacggaagggaacaatcaattttgtagccattctttgtac

SEQ ID NO: 548021 - DNA, 120 bp, Artificial Sequence
  ENSG00000168038_2 (sequence is synthesized)
tgataagtgcaaaaggcctgaaataaccaactgggtccgtctcacccgtgaaataaaacacaagaatattgtaacttttcatgaatggtatgaaacaagcaaccacctctggctagtggt

SEQ ID NO: 548022 - DNA, 120 bp, Artificial Sequence
  ENSG00000168038_3 (sequence is synthesized)
ggaactctgcacaggtggttccttaaaaacagttattgctcaagatgaaaacctcccagaagatgttgtgagagaatttggaattgacctgattagtggattacatcatcttcataaact

SEQ ID NO: 548023 - DNA, 120 bp, Artificial Sequence
  ENSG00000168038_4 (sequence is synthesized)
tggcattctcttttgtgacatttctcctaggaagatactcttggaagggcctggcacactgaagtttagcaacttttgcttggcaaaagtggaaggtgaaaatttggaagagttctttgc

SEQ ID NO: 548024 - DNA, 120 bp, Artificial Sequence
  ENSG00000168038_5 (sequence is synthesized)
tttggtggcagcagaggaaggaggaggtgataatggggaaaatgtcctgaagaaaagcatgaaaagtagagtcaaaggatctcctgtatatacagcaccagaagttgtgaggggtgctga

SEQ ID NO: 548025 - DNA, 120 bp, Artificial Sequence
  ENSG00000168038_6 (sequence is synthesized)
cttttccatctccagtgacctctggtctttgggctgtctgctttatgaaatgttttcaggaaaacctccattcttctcagaaagtatttcagaattaactgaaaagatcttatgtgaaga

SEQ ID NO: 548026 - DNA, 120 bp, Artificial Sequence
  ENSG00000168038_7 (sequence is synthesized)
tcctttgccacctattccgaaagattcttctcgtcctaaagcttcttcagattttattaatttgcttgatgggttacttcaaagagatcctcagaaaagattgacttggacaaggctact

SEQ ID NO: 548027 - DNA, 120 bp, Artificial Sequence
  ENSG00000168038_8 (sequence is synthesized)
gcagcattcattttggaagaaagcttttgctggagcagatcaggaatcaagcgtcgaagatctcagtctcagcagaaacactatggagtgttctgggccacaagattccaaggagctttt

SEQ ID NO: 548028 - DNA, 120 bp, Artificial Sequence
  ENSG00000168038_9 (sequence is synthesized)
gcagaactctcagagtagacaagcaaaagggcacaagagtggtcaaccactaggtcactctttcagactagaaaatccaactgagtttcggcctaagagtactcttgagggtcaattgaa

SEQ ID NO: 548029 - DNA, 120 bp, Artificial Sequence
  ENSG00000168038_10 (sequence is synthesized)
tgaatccatgtttcttctcagttctcgtcctactcccagaactagcactgcagtggaagtaagtcctggtgaggatatgactcactgttcaccacagaagacttctcctctgaccaagat

SEQ ID NO: 548030 - DNA, 120 bp, Artificial Sequence
  ENSG00000168038_11 (sequence is synthesized)
tacaagtggacacctgagtcagcaggacctggaatcccagatgagagagcttatctacacggactcagatcttgttgtcacccccattatcgacaatccaaagataatgaaacagccacc

SEQ ID NO: 548031 - DNA, 120 bp, Artificial Sequence
  ENSG00000168038_12 (sequence is synthesized)
agttaaatttgatgcaaaaatattgcatctaccaacatattcagtggataagttattatttctgaaagatcaagattggaatgactttttgcaacaagtgtgctcgcagatcgactccac

SEQ ID NO: 548032 - DNA, 120 bp, Artificial Sequence
  ENSG00000168038_13 (sequence is synthesized)
tgagaagagcatgggggcctcccgagccaagctgaatctcctttgctatttgtgcgtggtggctggtcaccaggaggtggccaccaggctcctccattcccccctgttccaattgctaat

SEQ ID NO: 548033 - DNA, 120 bp, Artificial Sequence
  ENSG00000168038_14 (sequence is synthesized)
ccagcatttgcggatagctccaaactgggatatacgggccaaggttgctcacgtaattggtttactggcttcgcacacagctgagctccaggaaaatacacctgttgttgaggcaattgt

SEQ ID NO: 548034 - DNA, 120 bp, Artificial Sequence
  ENSG00000168038_15 (sequence is synthesized)
tctcttaactgaattaattagggaaaacttcaggaacagcaaattaaaacagtgccttttaccaacccttggggagctgatctatcttgtagccacccaggaagaaaaaaaaaagaaccc

SEQ ID NO: 548035 - DNA, 120 bp, Artificial Sequence
  ENSG00000168038_16 (sequence is synthesized)
tagagagtgctgggctgttcccttggctgcatacacagtgctaatgaggtgccttcgggaaggggaagagcgtgttgtgaatcacatggcagcaaaaattattgaaaatgtctgtaccac

SEQ ID NO: 548036 - DNA, 120 bp, Artificial Sequence
  ENSG00000168038_17 (sequence is synthesized)
acagcagtatcggccttgtgtagaatcactcgccattctcctactgccttccagaatgttattgaaaaggtgggactgaactcagtaataaactccctggcctctgccatctgcaaagtt

SEQ ID NO: 548037 - DNA, 120 bp, Artificial Sequence
  ENSG00000168038_18 (sequence is synthesized)
cagcagtacatgttgaccttattcgctgccatgttgtcctgtgggattcatcttcaaagactaatccaagaaaagggttttgtctccacaattatccgtttacttgacagcccctcaaca

SEQ ID NO: 548038 - DNA, 120 bp, Artificial Sequence
  ENSG00000168038_19 (sequence is synthesized)
tgcattagagcaaaagccttcctggttcttctatatattttgatttataaccgtgagatgttgctgctcagttgccaagcaagactggtgatgtacatcgagagagacagcagaaagacc

SEQ ID NO: 548039 - DNA, 120 bp, Artificial Sequence
  ENSG00000168038_20 (sequence is synthesized)
actccaggcaaggagcagcaaagtggcaatgaatacctgtccaaatgcctggatcttctcatctgtcacattgtgcaggagctgccacgaatcctgggtgacattcttaactccttggct

SEQ ID NO: 548040 - DNA, 120 bp, Artificial Sequence
  ENSG00000168038_21 (sequence is synthesized)
aatgtttctggacgtaaacacccatcaacagttcaagtgaaacagctgaagttgtgtctccccctgatgcctgtagtgcttcacctcgtaacttcacaggtatttcgacctcaagttgtg

SEQ ID NO: 548041 - DNA, 120 bp, Artificial Sequence
  ENSG00000168038_22 (sequence is synthesized)
acagaagagtttcttttcagctatggaactattcttagtcatattaaatctgtagactcaggagaaacgaacatagatggagccataggactgacagcatcagaagaatttatcaagatc

SEQ ID NO: 548042 - DNA, 120 bp, Artificial Sequence
  ENSG00000168038_23 (sequence is synthesized)
acattgtcagcttttgaagcaataatacagtatcctattttattgaaagactatcgctccacggttgttgactatatactgccacccttggtgtccttggttcaaagccaaaatgtggag

SEQ ID NO: 548043 - DNA, 120 bp, Artificial Sequence
  ENSG00000168038_24 (sequence is synthesized)
tggagactctttagcttgcggttgctctcagaaaccacatctctactcgtgaaccaggagtttggggatggcaaggagaaggccagtgttgattctgacagcaatcttctggctctcatt

SEQ ID NO: 548044 - DNA, 120 bp, Artificial Sequence
  ENSG00000168038_25 (sequence is synthesized)
cgagatgtcttacttccccagtatgagcacattcttttagaacctgacccagtaccagcatatgctctgaaactgctagtcgcgatgactgaacacaacccaactttcacaagacttgtg

SEQ ID NO: 548045 - DNA, 120 bp, Artificial Sequence
  ENSG00000168038_26 (sequence is synthesized)
gaagaaagcaaactgatcccactcatttttgaagtaactctggaacatcaggagagcattctgggtaataccatgcaaagtgtgattgcattactcagcaatctagttgcctgcaaagat

SEQ ID NO: 548046 - DNA, 120 bp, Artificial Sequence
  ENSG00000168038_27 (sequence is synthesized)
tcgaatatggaactactttatgaacaaggacttgtcagtcacatctgtaacctgctcactgaaactgccacactgtgcttggatgtggacaataaaaacaacaatgagatggcagctcca

SEQ ID NO: 548047 - DNA, 120 bp, Artificial Sequence
  ENSG00000168038_28 (sequence is synthesized)
ctgctcttttccctgcttgatattttgcacagcatgctgacctatacctccggtattgtacggctggctttgcaggcccagaagtctggctcaggagaggaccctcaggctgcagaagac

SEQ ID NO: 548048 - DNA, 120 bp, Artificial Sequence
  ENSG00000168038_29 (sequence is synthesized)
ctgctgctgctcaacagacctctgacagacctgattagcctgctcattccactgcttcctaatgaagatcctgagatttttgatgtttcatccaagtgcctgtctatactggttcagctg

SEQ ID NO: 548049 - DNA, 120 bp, Artificial Sequence
  ENSG00000168038_30 (sequence is synthesized)
tatggaggggaaaacccggacagcctctctcctgaaaatgtggaaatttttgctcatttactgacatccaaggaggacccaaaggagcagaagcttctgttaaggattctcagaagaatg

SEQ ID NO: 548050 - DNA, 120 bp, Artificial Sequence
  ENSG00000168038_31 (sequence is synthesized)
atcacctccaatgagaagcacttggagagcctcaagaatgcaggcagcctcctgcgggctctggagcggctggcccctgggagtggttcatttgccgacagtgcggtggctcccttggcc

SEQ ID NO: 548051 - DNA, 120 bp, Artificial Sequence
  ENSG00000168038_32 (sequence is synthesized)
ctggaaatcctccaagccgttgggcactaggcaagaaggtgcttagcacaagcccgccctgtggccccagccctcggatgcataagcaaggtcagctcccagacacctttgccacatccc

SEQ ID NO: 548052 - DNA, 120 bp, Artificial Sequence
  ENSG00000168038_33 (sequence is synthesized)
ctcacagctgtctttggacctaataaagtcagcttaacccagaacctggtggcccaagtgctcactaaccccagggcctagaaaactgactcagaatggacttccttggttcctgtggaa

SEQ ID NO: 548053 - DNA, 120 bp, Artificial Sequence
  ENSG00000168038_34 (sequence is synthesized)
tgcatctgggaagcccaggtttgttagctgttctcagaaatgttctttccctctctgtgtgggccaggtgggctaaggttagcactgcctgtggtaataaagcagtggatgcaaagcaca

SEQ ID NO: 548054 - DNA, 120 bp, Artificial Sequence
  ENSG00000168038_35 (sequence is synthesized)
cattggaatcgggattttgaactgtcttgttcaacactccactccagtgcctagacagtgccttgtgtatgtatagatactgacaaatatttcaaaataaataaaactgtatcagcattc

SEQ ID NO: 548055 - DNA, 120 bp, Artificial Sequence
  ENSG00000168038_36 (sequence is synthesized)
tcgactccgtttttcctaggctggttggagaaaccagactctatggaatttgaaccctgaaacttctaatgcttagttatcagactgtttcattctgtaccatttaatgcttctgaattg

SEQ ID NO: 548056 - DNA, 120 bp, Artificial Sequence
  ENSG00000168038_37 (sequence is synthesized)
tttctttttatcttgctgtctaaaagaggttaatagcatacaaaaatgaaataataaaatataaaatgatttcaaaggtacatgtgtaccttgtaaaatctgctatgtgtaattgggaca

SEQ ID NO: 548057 - DNA, 89 bp, Artificial Sequence
  ENSG00000168038_38 (sequence is synthesized)
attgttgaggcacagggtaggggaggctaggaggtagaccagagtgggaaagaggcccaaacaactagtttctagttctggttctgtca

SEQ ID NO: 548058 - DNA, 120 bp, Artificial Sequence
  ENSG00000168038_39 (sequence is synthesized)
agttttttgcttcagctgttgtttctgatctctgaccagatgtggttccttaaaaacagttattgctcaagatgaaaacctcccagaagatgttgtgagagaatttggaattgacctgat

SEQ ID NO: 548059 - DNA, 120 bp, Artificial Sequence
  ENSG00000168038_40 (sequence is synthesized)
aggcacgggagggaatctcctggtctgctggctgctaagactgtgggaaaagtgcagtgtttgggcaggagtgtcccgtttttttcaggtacagactatgatggcttcccttgggtagga

SEQ ID NO: 548060 - DNA, 120 bp, Artificial Sequence
  ENSG00000168038_41 (sequence is synthesized)
aagggaaatcccccgaccccttgtgcctcccaggtgaggcgacaccccgccctgcttcggcgcactctccatgggctgcacccatgtgcatcccatgagaagaaccaggtacctcagttg

SEQ ID NO: 548061 - DNA, 120 bp, Artificial Sequence
  ENSG00000168038_42 (sequence is synthesized)
gaaatcacctgtcttctgcatcgatctcactgggagctgcagagtagagctgttcccatttggccatcttggaagcaaaaacccctagggtttttaagccttgtggatgaaagtcatctt

SEQ ID NO: 548062 - DNA, 120 bp, Artificial Sequence
  ENSG00000168038_43 (sequence is synthesized)
gtcatcttctgatttatttgcaacttgtgggtgatttcctgggagcacagcctctgcacacaatctcatggcagggctggtcggggcactgagcctggatgtagtcagctgacctgtttg

SEQ ID NO: 548063 - DNA, 120 bp, Artificial Sequence
  ENSG00000168038_44 (sequence is synthesized)
gtaaaacatgcctacgtttgtaactgcacgtcacccaccaaaacaaaataaaaccccaaatacctcttcccttcatcatagtaattcatattcaacttttcaatgccagcagaaacttta

SEQ ID NO: 548064 - DNA, 120 bp, Artificial Sequence
  ENSG00000168038_45 (sequence is synthesized)
agaaaagcatgaaaagtagagtcaaaggtatgtggacctggaaagcttaaagatcataactctagttgtggaccatccaagtcctgtgtttaggagacaatgtcagtcttttgttttgcc

SEQ ID NO: 548065 - DNA, 120 bp, Artificial Sequence
  ENSG00000168038_46 (sequence is synthesized)
ggtaagaaagagtatgtaaaaagtgctatgaatatagtattgaaaaaaaacatgctgttaagttttgttacttttgatgttatttactatgttaacttgaaaatctattgctctgtggat

SEQ ID NO: 548066 - DNA, 120 bp, Artificial Sequence
  ENSG00000168038_47 (sequence is synthesized)
attagggaagggtgaagagcaaagacatttgggaaaaagaagaattatgtaaattcaattccgggttggatttactttcgtgtattattacgttatatacataaaaatttagaaatgttt

SEQ ID NO: 548067 - DNA, 120 bp, Artificial Sequence
  ENSG00000168038_48 (sequence is synthesized)
gagatggatttgggctaagactccaggtagcacctgatctagtggttctcaacattgatggcatgttggtgttaactgaagaatcccgaggctcctaaatttgaagaggaaaggttgatt

SEQ ID NO: 548068 - DNA, 120 bp, Artificial Sequence
  ENSG00000168040_0 (sequence is synthesized)
gacgatacgccgggcgcaggcgcagaagccgcgcccgtccgcggcgccgccagccagggcggaaacggctgcggcttcgctagggacgcatgcgcgggtcccttagttttcgcgagataa

SEQ ID NO: 548069 - DNA, 120 bp, Artificial Sequence
  ENSG00000168040_1 (sequence is synthesized)
cggtcgaaaacgcgctcttgtcgatttcctgtagtgaatcaggcaccggagtgcaggttcgggggtggaatccttgggccgctgggcaagcggcgagacctggccagggccagcgagccg

SEQ ID NO: 548070 - DNA, 120 bp, Artificial Sequence
  ENSG00000168040_2 (sequence is synthesized)
aggacagagggcgcacggagggccgggccgcagccccggccgcttgcagaccccgccatggacccgttcctggtgctgctgcactcggtgtcgtccagcctgtcgagcagcgagctgacc

SEQ ID NO: 548071 - DNA, 120 bp, Artificial Sequence
  ENSG00000168040_3 (sequence is synthesized)
gagctcaagttcctatgcctcgggcgcgtgggcaagcgcaagctggagcgcgtgcagagcggcctagacctcttctccatgctgctggagcagaacgacctggagcccgggcacaccgag

SEQ ID NO: 548072 - DNA, 120 bp, Artificial Sequence
  ENSG00000168040_4 (sequence is synthesized)
ctcctgcgcgagctgctcgcctccctgcggcgccacgacctgctgcggcgcgtcgacgacttcgaggcgggggcggcggccggggccgcgcctggggaagaagacctgtgtgcagcattt

SEQ ID NO: 548073 - DNA, 120 bp, Artificial Sequence
  ENSG00000168040_5 (sequence is synthesized)
aacgtcatatgtgataatgtggggaaagattggagaaggctggctcgtcagctcaaagtctcagacaccaagatcgacagcatcgaggacagatacccccgcaacctgacagagcgtgtg

SEQ ID NO: 548074 - DNA, 120 bp, Artificial Sequence
  ENSG00000168040_6 (sequence is synthesized)
cgggagtcactgagaatctggaagaacacagagaaggagaacgcaacagtggcccacctggtgggggctctcaggtcctgccagatgaacctggtggctgacctggtacaagaggttcag

SEQ ID NO: 548075 - DNA, 120 bp, Artificial Sequence
  ENSG00000168040_7 (sequence is synthesized)
gatgtcatggaactcagacgcatctacctccgaagcgtcctgatgggccgctgctttgcgctggtggaccacaggcatctacacagcctggactttggttctctccaggaaggtagccca

SEQ ID NO: 548076 - DNA, 120 bp, Artificial Sequence
  ENSG00000168040_8 (sequence is synthesized)
gcactgtgaagacccagcaggaagccaggctgagtgagccacagaccacctgcttctgaactcaagctgcgtttattaatgcctctcccgcaccaggccgggcttgggccctgcacagat

SEQ ID NO: 548077 - DNA, 120 bp, Artificial Sequence
  ENSG00000168040_9 (sequence is synthesized)
atttccatttcttcctcactatgacactgagcaagatcttgtctccactaaatgagctcctgcgggagtagttggaaagttggaaccgtgtccagcacagaaggaatctgtgcagatgag

SEQ ID NO: 548078 - DNA, 120 bp, Artificial Sequence
  ENSG00000168040_10 (sequence is synthesized)
cagtcacactgttactccacagcggaggagaccagctcagaggcccaggaatcggagcgaagcagagaggtggagaactgggatttgaacccccgccatccttcaccagagcccatgctc

SEQ ID NO: 548079 - DNA, 120 bp, Artificial Sequence
  ENSG00000168040_11 (sequence is synthesized)
aaccactgtggcgttctgctgcccctgcagttggcagaaaggatgttttgtcccatttccttggaggccaccgggacagacctggacactagggtcaggcggggtgctgtggtggggaga

SEQ ID NO: 548080 - DNA, 120 bp, Artificial Sequence
  ENSG00000168040_12 (sequence is synthesized)
ggcatggctggggtgggggtggggagacctggttggccgtggtccagctcttggcccctgtgtgagttgagtctcctctctgagactgctaagtaggggcagtgatggttgccaggacga

SEQ ID NO: 548081 - DNA, 120 bp, Artificial Sequence
  ENSG00000168040_13 (sequence is synthesized)
attgagataatatctgtgaggtgctgatgagtgattgacacacagcactctctaaatcttccttgtgaggattatgggtcctgcaattctacagtttcttactgttttgtatcaaaatca

SEQ ID NO: 548082 - DNA, 120 bp, Artificial Sequence
  ENSG00000168040_14 (sequence is synthesized)
ctatctttctgataacagaattgccaaggcagcgggatctcgtatctttaaaaagcagtcctcttattcctaaggtaatcctattaaaacacagctttacaacttccatactacaaaaaa

SEQ ID NO: 548083 - DNA, 80 bp, Artificial Sequence
  ENSG00000168056_0 (sequence is synthesized)
gctctacgcaggcctccccgccccgccccgcccggaggaatccgcggccggccagacggtcccaggtgagggccctctgg

SEQ ID NO: 548084 - DNA, 120 bp, Artificial Sequence
  ENSG00000168056_1 (sequence is synthesized)
atctggggtggggactgtccccgcgccaccccccagcctccgccagcctgcacaccctcgcttctccaggcggcagaggcgacgctttaaacaacaaaaaaaaaaaaactgtgtccctgg

SEQ ID NO: 548085 - DNA, 120 bp, Artificial Sequence
  ENSG00000168056_2 (sequence is synthesized)
gggccagcgtcccagcccccctcgccgccgccgcgccgcgctccagccagggaaaacaactgctcacttctccctgagccctccccgcgcgctccctgcctccccgcggccgcgggagag

SEQ ID NO: 548086 - DNA, 120 bp, Artificial Sequence
  ENSG00000168056_3 (sequence is synthesized)
agaggagcccggccagggggaggcgcggagcgggccggccgcccggccttcctctccctcgctcctcctctccgcctcaacttgctccggcctcctcgctcctgcctgagttcggggcct

SEQ ID NO: 548087 - DNA, 120 bp, Artificial Sequence
  ENSG00000168056_4 (sequence is synthesized)
ggtctgggcttcgtcctggggctgggaagtttctgcgctccccgctgtccagtctgcatctccgcgcctcccgccgggcccccgcggtcccctcccgcccgcttcccccgctgccctccc

SEQ ID NO: 548088 - DNA, 80 bp, Artificial Sequence
  ENSG00000168056_5 (sequence is synthesized)
tccctcgctgccccctaccctctcccggggctcccggccctctactcccttcgggcgcgggcccctcgccccgcccgggc

SEQ ID NO: 548089 - DNA, 80 bp, Artificial Sequence
  ENSG00000168056_6 (sequence is synthesized)
ctgctggcggcctggcccctgagatgcgcggggcgggggcggcggggctgctggcgctgctgctgctgctgctgctgctg

SEQ ID NO: 548090 - DNA, 120 bp, Artificial Sequence
  ENSG00000168056_7 (sequence is synthesized)
gccggccggcgagcggggcgcaggcgggggcggggcgctggcccgcgagcgcttcaaggtggtctttgcgccggtgatctgcaagcggacctgtctcaagggccagtgtcgggacagttg

SEQ ID NO: 548091 - DNA, 120 bp, Artificial Sequence
  ENSG00000168056_8 (sequence is synthesized)
tcagcagggctccaacatgacgctcatcggagagaacggccacagcacagacacgctcacgggctccggcttccgcgtggtggtgtgccctctcccctgcatgaatggcggccagtgctc

SEQ ID NO: 548092 - DNA, 120 bp, Artificial Sequence
  ENSG00000168056_9 (sequence is synthesized)
ctcgcgaaaccagtgcctgtgtcccccggacttcactgggcgcttctgccaggtgcccgcaggaggagccggtgggggtaccggcggctcaggccccggcctgagcaggacaggggccct

SEQ ID NO: 548093 - DNA, 120 bp, Artificial Sequence
  ENSG00000168056_10 (sequence is synthesized)
gtccacaggggcgctgccgcccctggctccggagggcgactctgtggccagcaagcacgccatctacgccgtccaggtgatcgctgaccctcctgggcccggggaggggcctcctgccca

SEQ ID NO: 548094 - DNA, 120 bp, Artificial Sequence
  ENSG00000168056_11 (sequence is synthesized)
gcacgcagccttcctggtgcccctaggcccgggacagatctcagcagaagtgcaggccccgccccccgtggtgaatgtgcgcgtccatcacccgcccgaggcctcagtccaggtgcaccg

SEQ ID NO: 548095 - DNA, 120 bp, Artificial Sequence
  ENSG00000168056_12 (sequence is synthesized)
cattgagagctcgaacgccgagagcgcagccccctcccagcacctgctgccgcaccccaagccctcgcacccccggccgcccacccagaagcccctgggccgctgctttcaggacactct

SEQ ID NO: 548096 - DNA, 120 bp, Artificial Sequence
  ENSG00000168056_13 (sequence is synthesized)
gcccaagcagccgtgtggcagcaaccccctccccggcctcaccaagcaggaagactgctgcggtagcatcggcactgcctggggccagagcaagtgccacaagtgtccccagctgcagta

SEQ ID NO: 548097 - DNA, 120 bp, Artificial Sequence
  ENSG00000168056_14 (sequence is synthesized)
cacaggagtgcagaagccagggcctgtacgtggggaagtgggcgctgactgtccccagggctacaagaggcttaacagcacccactgccaggacatcaacgagtgcgcaatgccgggcgt

SEQ ID NO: 548098 - DNA, 120 bp, Artificial Sequence
  ENSG00000168056_15 (sequence is synthesized)
gtgtcgccatggtgactgcctcaacaaccctggctcctatcgctgtgtctgcccacctggccatagtttaggcccctcccgtacacagtgcattgcagacaaaccggaggagaagagcct

SEQ ID NO: 548099 - DNA, 120 bp, Artificial Sequence
  ENSG00000168056_16 (sequence is synthesized)
gtgtttccgcctggtgagccctgagcaccagtgccagcacccactgaccacccgcctgacccgccagctctgctgctgcagtgtcggcaaggcctggggcgcgcggtgtcagcgctgccc

SEQ ID NO: 548100 - DNA, 120 bp, Artificial Sequence
  ENSG00000168056_17 (sequence is synthesized)
aacagatggcaccgctgcgttcaaggagatctgcccagctgggaagggataccacattctcacctcccaccagacgctcaccattcagggcgagagtgacttttcccttttcctgcaccc

SEQ ID NO: 548101 - DNA, 120 bp, Artificial Sequence
  ENSG00000168056_18 (sequence is synthesized)
tgacgggccacccaagccccagcagcttccggagagccctagccaggctccaccacctgaggacacagaggaagagagaggggtgaccacggactcaccggtgagtgaggagaggtcagt

SEQ ID NO: 548102 - DNA, 120 bp, Artificial Sequence
  ENSG00000168056_19 (sequence is synthesized)
gcagcagagccacccaactgccaccacgactcctgcccggccctaccccgagctgatctcccgtccctcgcccccgaccatgcgctggttcctgccggacttgcctccttcccgcagcgc

SEQ ID NO: 548103 - DNA, 120 bp, Artificial Sequence
  ENSG00000168056_20 (sequence is synthesized)
cgggcccccctgactactcctgccactgcaaccccggctaccggtcacatccccagcaccgctactgcgtggatgtgaacgagtgcgaggcagagccctgtggcccggggaggggcatct

SEQ ID NO: 548104 - DNA, 120 bp, Artificial Sequence
  ENSG00000168056_21 (sequence is synthesized)
gcatgaacaccggcggctcctacaattgccactgcaaccgcggctaccgcctgcacgtgggcgccggggggcgctcgtgcgtggacctgaacgaatgcgccaagccccacctgtgcggcg

SEQ ID NO: 548105 - DNA, 120 bp, Artificial Sequence
  ENSG00000168056_22 (sequence is synthesized)
acggcggcttctgcatcaactttcccggtcactacaagtgcaactgctaccccggctaccggctcaaagcctcccggcctcctgtgtgcgaagacatcgacgagtgccgggacccaagct

SEQ ID NO: 548106 - DNA, 120 bp, Artificial Sequence
  ENSG00000168056_23 (sequence is synthesized)
cttgcccggatggcaaatgcgagaacaagcccgggagcttcaagtgcatcgcctgtcagcctggctaccgcagccaggggggcggggcctgtcgcgacgtgaacgagtgcgccgagggca

SEQ ID NO: 548107 - DNA, 120 bp, Artificial Sequence
  ENSG00000168056_24 (sequence is synthesized)
gcccctgctcgcctggctggtgcgagaacctcccgggctccttccgctgcacctgtgcccagggctacgcgcccgcgcccgacggccgcagttgcttggatgtggacgagtgtgaggctg

SEQ ID NO: 548108 - DNA, 120 bp, Artificial Sequence
  ENSG00000168056_25 (sequence is synthesized)
gggacgtgtgtgacaatggcatctgcagcaacacgccaggatctttccagtgtcagtgcctctctggctaccatctgtccagggaccggagccactgcgaggacattgatgagtgtgact

SEQ ID NO: 548109 - DNA, 120 bp, Artificial Sequence
  ENSG00000168056_26 (sequence is synthesized)
tccctgcagcctgcattgggggtgactgcatcaataccaatggctcctacagatgtctttgcccccaggggcatcggctggtgggtggcaggaaatgccaagacatagatgagtgcagcc

SEQ ID NO: 548110 - DNA, 120 bp, Artificial Sequence
  ENSG00000168056_27 (sequence is synthesized)
aggacccgagcctgtgccttccccatggggcctgcaagaaccttcagggctcctatgtgtgtgtctgcgatgagggcttcactcccacccaggaccagcacggttgtgaggaggtggagc

SEQ ID NO: 548111 - DNA, 120 bp, Artificial Sequence
  ENSG00000168056_28 (sequence is synthesized)
agccccaccacaagaaggagtgctacctgaacttcgatgacacagtgttctgcgacagcgtattggccaccaacgtgacccagcaggagtgctgctgctctctgggggccggctggggcg

SEQ ID NO: 548112 - DNA, 120 bp, Artificial Sequence
  ENSG00000168056_29 (sequence is synthesized)
accactgcgaaatctacccctgcccagtctacagctcagccgagttccacagcctctgcccagacggaaagggctacacccaggacaacaacatcgtcaactacggcatcccagcccacc

SEQ ID NO: 548113 - DNA, 120 bp, Artificial Sequence
  ENSG00000168056_30 (sequence is synthesized)
gtgacatcgacgagtgcatgttgttcgggtcggagatttgcaaggagggcaagtgcgtgaacacgcagcctggctacgagtgctactgcaagcagggcttctactacgacgggaacctgc

SEQ ID NO: 548114 - DNA, 120 bp, Artificial Sequence
  ENSG00000168056_31 (sequence is synthesized)
tggaatgcgtggacgtggacgagtgcctggacgagtccaactgccggaacggagtgtgtgagaacacgcgcggcggctaccgctgtgcctgcacgccccctgccgagtacagtcccgcgc

SEQ ID NO: 548115 - DNA, 120 bp, Artificial Sequence
  ENSG00000168056_32 (sequence is synthesized)
agcgccagtgcctgagcccggaagagatggacgtggacgagtgccaggacccggcagcctgccgccctggccgctgcgtcaacctgccgggctcctaccgctgcgagtgtcgcccgccct

SEQ ID NO: 548116 - DNA, 120 bp, Artificial Sequence
  ENSG00000168056_33 (sequence is synthesized)
cgcgattgccagctccccgagagcccggccgagcgtgccccggagcggcgcgacgtgtgctggagccagcgcggagaggacggcatgtgcgctggccccctggccgggcctgccctcacc

SEQ ID NO: 548117 - DNA, 120 bp, Artificial Sequence
  ENSG00000168056_34 (sequence is synthesized)
cgggcctgccctcaccttcgacgactgctgctgccgccagggccgcggctggggcgcccaatgccgaccgtgcccgccgcgcggcgcggggtcccattgcccgacatcgcagagcgagag

SEQ ID NO: 548118 - DNA, 120 bp, Artificial Sequence
  ENSG00000168056_35 (sequence is synthesized)
agagcaattccttctgggacacaagccccctgctgttggggaagcccccaagagatgaggacagttcagaggaggattcagacgagtgtcgctgcgtgagtggccgctgcgtgccgcggc

SEQ ID NO: 548119 - DNA, 120 bp, Artificial Sequence
  ENSG00000168056_36 (sequence is synthesized)
cgggcggcgccgtgtgcgagtgtcccggcggcttccagctcgacgcctcccgcgcccgctgcgtggatatcgacgagtgccgagagctgaaccagcgcgggctgctgtgcaagagcgagc

SEQ ID NO: 548120 - DNA, 120 bp, Artificial Sequence
  ENSG00000168056_37 (sequence is synthesized)
gctgcgtgaacaccagcggctccttccgctgcgtctgcaaagccggcttcgcgcgcagccgcccgcacggggcctgcgttccccagcgccgccgctgacgccgccgacgccgccctcggc

SEQ ID NO: 548121 - DNA, 120 bp, Artificial Sequence
  ENSG00000168056_38 (sequence is synthesized)
ccagacctcggtgatcactgagggatttccgcgagctcggcctcacttctgccccgacttgtggctcggacccagggaccttcagggcccgcagaccctcccggcgccttgagacccgag

SEQ ID NO: 548122 - DNA, 120 bp, Artificial Sequence
  ENSG00000168056_39 (sequence is synthesized)
gcgcccctaccggcccccctccccggttagcgggcggttgtaaggtctccggcgggcgctgcctgccttcctcccagagggtgtttcctagaaactgataaatcagatcgtgcctcttta

SEQ ID NO: 548123 - DNA, 120 bp, Artificial Sequence
  ENSG00000168056_40 (sequence is synthesized)
ggacacagaggaagagagaggtctagcctgaccccttctgatccctgacccatgccaagcccctaggcctgaccccttgacccgtgatccacagatctgacctcacagtctaacccccaa

SEQ ID NO: 548124 - DNA, 120 bp, Artificial Sequence
  ENSG00000168056_41 (sequence is synthesized)
ttccttatccctgacccatccactgacctcccacctgaccctctgacccctgacccagatatttgaccctgagctataacctcctaagccttctacagcctgacctgtaacccaaggcca

SEQ ID NO: 548125 - DNA, 120 bp, Artificial Sequence
  ENSG00000168056_42 (sequence is synthesized)
ttcaacctgatcatgtgactactatgcaaacacaccctaaccccagaatctaacccctgacccttgacctggagacatgattgttgaactcccagagaccctaactgcaaatactcagct

SEQ ID NO: 548126 - DNA, 120 bp, Artificial Sequence
  ENSG00000168056_43 (sequence is synthesized)
gctgatcccagatctgactcccttctcccgccccaacacttcatggccccatcttcttcccttttaggggtgaccacggactcagtgagtatgagaacccagatgggaggggtgggcagg

SEQ ID NO: 548127 - DNA, 120 bp, Artificial Sequence
  ENSG00000168056_44 (sequence is synthesized)
ttctttctgctcctcttctggaccccacagacttcctcctgggacctccgtgagccctggccaaaggctgtccccaccctttagccctttcctcagaggggattggaccagcactaacga

SEQ ID NO: 548128 - DNA, 120 bp, Artificial Sequence
  ENSG00000168056_45 (sequence is synthesized)
gaagttactttggggccctgagacccccacgtttgcaagggaggctgggaaagagctggaaggcctgggctccggctccacccggcctccatcgtcagtgtgacccggcagggccacctc

SEQ ID NO: 548129 - DNA, 120 bp, Artificial Sequence
  ENSG00000168056_46 (sequence is synthesized)
aggtgcctcccccagtctggctccgctgggggcggggcggggtagcggtggtgattggcgtctgggggcggggccttccgggagtagaggctgccctctcaaccccgcgttccagggaag

SEQ ID NO: 548130 - DNA, 120 bp, Artificial Sequence
  ENSG00000168056_47 (sequence is synthesized)
tcgctgaccctcctgggcccggggaggggcctcctgcccagcacgcagccttcctggtgcccctaggcccgggacagatctcagcagaaggtaccaggcaactggcaaacccgggaaggt

SEQ ID NO: 548131 - DNA, 120 bp, Artificial Sequence
  ENSG00000168056_48 (sequence is synthesized)
gggaaggtcgccagtgggtgggcactagggtggccagggcagggcaggttcagccctggaggagctcagcgcggtgacccgcggcgcggtgcgggcagccctgaggccaccgcgcccgcc

SEQ ID NO: 548132 - DNA, 120 bp, Artificial Sequence
  ENSG00000168056_49 (sequence is synthesized)
gagctcctagggttagggctcaggtgggagatggctgttcttgggggctttgggaatgtggacaaggcccctcaaaggaggggctgttaaggaagcctaaggagaggtactccaggcaaa

SEQ ID NO: 548133 - DNA, 120 bp, Artificial Sequence
  ENSG00000168056_50 (sequence is synthesized)
gagaacagcctgcaaagcccactggccaggtgagtttggggcagagcagagttcactgttatggcccaggctgcatggcaggagtgagggggaaggggtgtgggaaatgaaactggtgag

SEQ ID NO: 548134 - DNA, 120 bp, Artificial Sequence
  ENSG00000168056_51 (sequence is synthesized)
cagtgaggatccaaaggaggggagaggctggaggcagggagtcctgggcttggtgacaaagagagtgaggggggtggttcctggatctgactgcctgtgcacagctttggcactagttag

SEQ ID NO: 548135 - DNA, 120 bp, Artificial Sequence
  ENSG00000168056_52 (sequence is synthesized)
gattcccaggaaaccagctcctgctagtcttgggagggggtaatcaacccttctggaatagggggtcgggtccctggggcaagggcttatggagtcactgggctagaggacactggtgtg

SEQ ID NO: 548136 - DNA, 120 bp, Artificial Sequence
  ENSG00000168056_53 (sequence is synthesized)
accgaggctatagagtttaaggtattgaggcgactggggagaaaggagttttagtcccttgggtgggagtactgggacgactgaggggccctgaggggatgtggtttggtttgaggtgag

SEQ ID NO: 548137 - DNA, 120 bp, Artificial Sequence
  ENSG00000168056_54 (sequence is synthesized)
tggggtcagggtcttggagtgaaccgggaatggaagtatccgggcctgggtgtggggtgatacggctgtcaggggcctggagtcctagtttggagctttctggggtcttgatattggggt

SEQ ID NO: 548138 - DNA, 120 bp, Artificial Sequence
  ENSG00000168056_55 (sequence is synthesized)
tatctaaaagagagaaataggacatcctggagttggagtatgggcgtacaggaacctgaggtcatggtgtgactggggtgttgaggtctgccctggggatatggcagaaggtgagcgctc

SEQ ID NO: 548139 - DNA, 120 bp, Artificial Sequence
  ENSG00000168056_56 (sequence is synthesized)
gtgaagggcctgggttgagtaggggactcaggagaacagtggcggtttggaagtatcccagggcatggggctgcctaggggctttatggaagtcaaagctttagaggagtcagagaggga

SEQ ID NO: 548140 - DNA, 120 bp, Artificial Sequence
  ENSG00000168056_57 (sequence is synthesized)
ggtgccagccacacgaggctctgttggactgaggctgaagcctgtgggtatgttccagcatgctcagcttggtggctgctccagtcccactccgcacccaggatccacaggccacagctc

SEQ ID NO: 548141 - DNA, 120 bp, Artificial Sequence
  ENSG00000168056_58 (sequence is synthesized)
tgaccagagactgggcattgccagacagtgaggaggaaggagaggtgtttatggatcagggacgggagtcctagggatgataagccctgggctccagctgggaactatcagagtctgggg

SEQ ID NO: 548142 - DNA, 120 bp, Artificial Sequence
  ENSG00000168056_59 (sequence is synthesized)
gtgtcaggcaagctcggaggactgagagggaggccaccaagccctgtgagagagaaggtggaggtgaggacttgagaacagtggaaagaaggcagcctctgagggccccagggtggagca

SEQ ID NO: 548143 - DNA, 120 bp, Artificial Sequence
  ENSG00000168056_60 (sequence is synthesized)
gatctgagtgatgaaaatccccttgggaccctgagagtgaggggaaggtcacggaagccgagagatccaggaatgtgaggtcagaggctgacctggttgtccacgcggatgttcgaaact

SEQ ID NO: 548144 - DNA, 120 bp, Artificial Sequence
  ENSG00000168056_61 (sequence is synthesized)
tagagggcacctgcagcattttaagtgtaagagtgacaagatttgccatttgttttagaacgttccctgctgctgattgtggagggaggtctgttgcagagacttagggcggagacagtg

SEQ ID NO: 548145 - DNA, 120 bp, Artificial Sequence
  ENSG00000168056_62 (sequence is synthesized)
gtggacaggatgagtggtgggctcaggatggccatgagacgatgatattggagaaatattagacctcctgggttttttaactggatgtcaagtgaaagcgagggtgataacgacccctcc

SEQ ID NO: 548146 - DNA, 120 bp, Artificial Sequence
  ENSG00000168056_63 (sequence is synthesized)
ccgtttccagtttgggtgagtgagggggtagtgctgctcactgggaatgggtcctcatgcgtgggcatgtttgggagggaaaatgctgagctccacattggacaaattgaatggattgtg

SEQ ID NO: 548147 - DNA, 120 bp, Artificial Sequence
  ENSG00000168056_64 (sequence is synthesized)
cctgtgagcctctcagcaggagatgccagcatacccacctggaatgatggaccatggaccgggggagctatggagtcttgggtgggcctgcttagccaacccaaggtgggttgggtaagc

SEQ ID NO: 548148 - DNA, 120 bp, Artificial Sequence
  ENSG00000168056_65 (sequence is synthesized)
agagcatctagcagagccttgtggacactgacagttcaggggcaggctgcggaaggcgttggaggagatggtgggggagggatggcaggggcgcctgaggggcaccatctgggaagctgg

SEQ ID NO: 548149 - DNA, 120 bp, Artificial Sequence
  ENSG00000168056_66 (sequence is synthesized)
ggaggacatatttccagggaaggaggaggatgagccaagtgcagtagagaggttcttgtaaaataataactggtgagacaataagtcttaggacaagacttaggggtctgccccctaatc

SEQ ID NO: 548150 - DNA, 120 bp, Artificial Sequence
  ENSG00000168056_67 (sequence is synthesized)
ctacatggaaatcctagtgatgccttccttggcaagaaggtccctggtagccttggcagggtagcttttgggatatgatagggacagaggccagagatatgtgggcagaaagtgaagaag

SEQ ID NO: 548151 - DNA, 120 bp, Artificial Sequence
  ENSG00000168056_68 (sequence is synthesized)
aacaagacctggggactcttgctcttccaaagtggggctttggtataggctgaggaggtgatgccaggagagtggaccaggagacgagggcagcagggtcaggagaggagggaggagagc

SEQ ID NO: 548152 - DNA, 120 bp, Artificial Sequence
  ENSG00000168056_69 (sequence is synthesized)
cacaggaggactgaggctgcaggaggccggcggcacctcagaggccgagctcaggcttggaggggtctgggatgtgggcaacaactggctccatcagagaggcctcaggaaagtgtgtcc

SEQ ID NO: 548153 - DNA, 120 bp, Artificial Sequence
  ENSG00000168056_70 (sequence is synthesized)
cgggggagggtcaagttcctttactgcatgagcagaagaaagtgggaagaacaaggatagggagtttatccccagaggaaaaagggagccatggcaggtgagggaagggtgggagcagca

SEQ ID NO: 548154 - DNA, 120 bp, Artificial Sequence
  ENSG00000168056_71 (sequence is synthesized)
gtgaaagcggctggggcagggagagagggcgggggaggctggggaggctctttagcatcagacctggcctagggaccctggcagcacctgacctggtcgtcagggcactgtgtgccaccc

SEQ ID NO: 548155 - DNA, 120 bp, Artificial Sequence
  ENSG00000168056_72 (sequence is synthesized)
agaagcagggtgaggcctgtgcttctgagtgctgctggcctcagctctggtgctccaggccatgcgcagaagtgagaaaacagtagtagaaacccaagaccacccagcctggtcctctga

SEQ ID NO: 548156 - DNA, 82 bp, Artificial Sequence
  ENSG00000168056_73 (sequence is synthesized)
tatccatccatccttccattcatccttccactcacccacccatccatctgctcagccttccagtctttcacctagaataaca

SEQ ID NO: 548157 - DNA, 120 bp, Artificial Sequence
  ENSG00000168056_74 (sequence is synthesized)
tccatctgctcagccttccagtctttcacctagaataacaatgatcacagtaaacatgacagttagtgctatcgtggtgcttactatgtgccaggcactctgttaagctctttacagata

SEQ ID NO: 548158 - DNA, 120 bp, Artificial Sequence
  ENSG00000168056_75 (sequence is synthesized)
tctttacagatattaatgtattggtcttccccatcaactcacccatacacatgcattcatccaacaaaagtttaggctgagtgcagtggctcaggctgggggcggtggctcatgcctgta

SEQ ID NO: 548159 - DNA, 120 bp, Artificial Sequence
  ENSG00000168056_76 (sequence is synthesized)
ggtggtctagagtaaggcgtgatgagacctaaaggtatcggaagctcaattgcatttgaggcctttccatttgggcttctgatacttttaggttttgtaaggttagtgggagccactgaa

SEQ ID NO: 548160 - DNA, 120 bp, Artificial Sequence
  ENSG00000168056_77 (sequence is synthesized)
ggtgttatgaaggacagcagctaatgtccacatgcacattcagacacatgcacagacacagcagacttcctgctgtacatactttgaaaccaaagtggaaattcaggttctgaacttgtg

SEQ ID NO: 548161 - DNA, 120 bp, Artificial Sequence
  ENSG00000168056_78 (sequence is synthesized)
ggcaggccccttcccagatcttcagtttcttcatctggaagccaaatgtgggaaatggcgccccctggcagttgggaaataggcggcgggctgcagccctaagcccacgcgcgcgctcag

SEQ ID NO: 548162 - DNA, 120 bp, Artificial Sequence
  ENSG00000168056_79 (sequence is synthesized)
gccagcacccccgccccgggcctccgccgccccctacgcgctgaagccggggagcgggtcacgctgtctgtaaacagtgggtggaaggtggctcattcatccccaggtgactctgctcac

SEQ ID NO: 548163 - DNA, 120 bp, Artificial Sequence
  ENSG00000168056_80 (sequence is synthesized)
tcattttctcaacgaactttgccaaggaaggcaccactagaatttccacgtaggaagggtctcggggtagagctcgaagctgcgtttgcaaagcatgttacttaaatttgaaggaaaaaa

SEQ ID NO: 548164 - DNA, 120 bp, Artificial Sequence
  ENSG00000168060_0 (sequence is synthesized)
agtcctaccccagctggccaagagtccgcaggatgcagtggacgaaggtgttggggctggggctgggggctgctgccctcttggggctggggatcatcctcggccactttgccatcccca

SEQ ID NO: 548165 - DNA, 120 bp, Artificial Sequence
  ENSG00000168060_1 (sequence is synthesized)
aaaaagccaactcactggccccccaggacctggacctggagatcctggagaccgtcatggggcagctggatgcccacaggatccgggagaacctcagagaactctccagggagccacacc

SEQ ID NO: 548166 - DNA, 120 bp, Artificial Sequence
  ENSG00000168060_2 (sequence is synthesized)
tggcctccagccctcgggatgaggacctggtgcagctgctgctgcagcgctggaaggacccagagtcaggcctggactcggccgaggcctccacgtacgaagtgctgctgtccttcccta

SEQ ID NO: 548167 - DNA, 120 bp, Artificial Sequence
  ENSG00000168060_3 (sequence is synthesized)
gccaggagcagcccaacgtcgtggacatcgtgggccccactgggggcatcatccactcctgccaccggactgaggagaacgtgaccggggagcaaggggggccagatgtggtacaaccct

SEQ ID NO: 548168 - DNA, 120 bp, Artificial Sequence
  ENSG00000168060_4 (sequence is synthesized)
atgctgcctatgctccttctggaaccccacagggcctcctcgtctatgccaaccggggcgcggaagaagactttaaggagctacagactcagggcatcaaacttgaaggcaccattgccc

SEQ ID NO: 548169 - DNA, 120 bp, Artificial Sequence
  ENSG00000168060_5 (sequence is synthesized)
tgactcgatatgggggtgtagggcgtggggccaaggctgtgaacgctgccaagcacggggtagctggggtgctggtgtacacagaccctgccgacatcaacgatgggctgagctcacccg

SEQ ID NO: 548170 - DNA, 120 bp, Artificial Sequence
  ENSG00000168060_6 (sequence is synthesized)
acgaaacctttcccaactcctggtacctgcccccctcaggagtggagcgaggctcctactacgagtattttggggaccctctgactccctaccttccagccgtcccctcttccttccgcg

SEQ ID NO: 548171 - DNA, 120 bp, Artificial Sequence
  ENSG00000168060_7 (sequence is synthesized)
tggaccttgccaatgtctccggatttcccccaattcctacacagcccattggcttccaggatgcaagagacctgctctgtaacctcaacggaactttggccccagccacctggcagggag

SEQ ID NO: 548172 - DNA, 120 bp, Artificial Sequence
  ENSG00000168060_8 (sequence is synthesized)
cactgggctgccactacaggttgggtcccggcttccggcctgacggagacttcccagcagacagccaggtgaatgtgagcgtctacaaccgcctggagctgaggaactcttccaacgtcc

SEQ ID NO: 548173 - DNA, 120 bp, Artificial Sequence
  ENSG00000168060_9 (sequence is synthesized)
tgggcatcatccgtggggctgtggagcctgatcgctacgtgctgtatgggaaccaccgagacagctgggtgcacggggctgtggaccccagcagtggcaccgccgtcctcctggagctct

SEQ ID NO: 548174 - DNA, 120 bp, Artificial Sequence
  ENSG00000168060_10 (sequence is synthesized)
cccgtgtcctggggaccctgctgaagaagggcacctggcgtcctcgcagatcaatcgtgtttgcgagctggggggctgaggagtttgggctcattggctccacggaattcacagaagagt

SEQ ID NO: 548175 - DNA, 120 bp, Artificial Sequence
  ENSG00000168060_11 (sequence is synthesized)
acccttagggtgcaggggacgccccctgtccagagcgtcgtcttctctgcaaccaaagagatccgctcaccaggccctggcgacctgagcatctacgacaactggatccggtacttcaac

SEQ ID NO: 548176 - DNA, 120 bp, Artificial Sequence
  ENSG00000168060_12 (sequence is synthesized)
cgcagcagcccggtgtacggcctggtccccagcttgggttctctgggtgctggcagcgactatgcacccttcgttcacttcctgggcatctcctccatggacattgcctatacctatgac

SEQ ID NO: 548177 - DNA, 120 bp, Artificial Sequence
  ENSG00000168060_13 (sequence is synthesized)
cggagcaagacttcagccaggatctaccccacctaccacacagcctttgacacctttgactatgtggacaagtttttggacccgggcttcagcagccatcaggctgtggcccggacagcg

SEQ ID NO: 548178 - DNA, 120 bp, Artificial Sequence
  ENSG00000168060_14 (sequence is synthesized)
gggagtgtgattctccggctcagtgacagcttcttcctgcccctcaaagtcagtgactacagtgagacactccgcagcttcctgcaggcagcccagcaagatcttggggccctgctggag

SEQ ID NO: 548179 - DNA, 120 bp, Artificial Sequence
  ENSG00000168060_15 (sequence is synthesized)
cagcacagcatcagcctggggcctctggtgactgcagtggagaagtttgaggcagaagctgcagccttgggccaacgcatatcaacactgcagaagggcagccctgaccccctgcaggtc

SEQ ID NO: 548180 - DNA, 120 bp, Artificial Sequence
  ENSG00000168060_16 (sequence is synthesized)
cggatgctcaatgaccagttgatgctcttggaacggacctttctgaaccctagagccttcccagaggaacgctactacagccatgtgctctgggcacctcgcacgggctccgtagtcaca

SEQ ID NO: 548181 - DNA, 120 bp, Artificial Sequence
  ENSG00000168060_17 (sequence is synthesized)
ttcccgggcctatccaatgcctgctccagggccagggacacagcttctggatctgaagcttgggctgaggtccagagacagctcagcattgtggtgacagccctggagggtgcggcagcc

SEQ ID NO: 548182 - DNA, 120 bp, Artificial Sequence
  ENSG00000168060_18 (sequence is synthesized)
accctgaggcctgtggctgacctctgaccccagccctctttcttcagccctccctttactccaaccctctcctgcctgctttcctgagatgtcctggtcttccttggtgccagaagaggg

SEQ ID NO: 548183 - DNA, 120 bp, Artificial Sequence
  ENSG00000168060_19 (sequence is synthesized)
cactaccacaggaccctctcaagcttctcaggcaacagcttgaggtccctgaggggagtggcaagccctaatgcaactcaccctcatcctggtgcttaggtggcagagggtgggcagcag

SEQ ID NO: 548184 - DNA, 120 bp, Artificial Sequence
  ENSG00000168060_20 (sequence is synthesized)
gggacagggatgggatggcaaaaccaccaactgcccttggtggcaggtgggtggagatgggatgcgtgccaacctcagatgccaactcaggtcatcaaggccaaggaccagtggcgaaag

SEQ ID NO: 548185 - DNA, 120 bp, Artificial Sequence
  ENSG00000168060_21 (sequence is synthesized)
tgagtcttggggtaccttaggccttggctagtctgcgttcctctccctgcatgctgtgtatcctaactccctacaacagcccctcaaataaatcacatctagtgactggtaccaacaaaa

SEQ ID NO: 548186 - DNA, 120 bp, Artificial Sequence
  ENSG00000168060_22 (sequence is synthesized)
gctggggcaagcctcgtaaggactggaccacgggtgggcaggagaccggtggagaacccgccctgttgttggggctggggagggccgcgcaccgagactaaattctccttccggccagat

SEQ ID NO: 548187 - DNA, 120 bp, Artificial Sequence
  ENSG00000168060_23 (sequence is synthesized)
acgctactacaggtgagtctgtcccagagtcctgggaggtgcctccaggtggggccggacaatggctccccacctgagacgaggtggtcagcttctctgccctttagagtgcaacccagc

SEQ ID NO: 548188 - DNA, 120 bp, Artificial Sequence
  ENSG00000168060_24 (sequence is synthesized)
ccctgaagaagatgggaatgtaaggctcagggaggggaggaaagttgcttgagggtccctctgggagctaggactggaacccacatttcctcccccgaccgccactgctgtaagagctcc

SEQ ID NO: 548189 - DNA, 120 bp, Artificial Sequence
  ENSG00000168060_25 (sequence is synthesized)
ctggccttcagagacaagtggacgggggtgcttttctgcctcgctgcgtacaggagctgagccagttctaggcccaggcttctctttcctggcccctgactgactgaccctgatcctgtc

SEQ ID NO: 548190 - DNA, 120 bp, Artificial Sequence
  ENSG00000168060_26 (sequence is synthesized)
cagagcgtcgtcttctctgcaaccaaagaggtggaagggggcaggccgggcggggctgaactagctggggcgggccgcgtgcggcggacggggccgctacgggtgggcggggctggggag

SEQ ID NO: 548191 - DNA, 120 bp, Artificial Sequence
  ENSG00000168060_27 (sequence is synthesized)
gctctggatgccgctgtcctcatccagccctgcccttgccaccacccagcccagctccccctgcccacctctccctctcctctggttctctgccccttttcctctggccagatcgctacg

SEQ ID NO: 548192 - DNA, 120 bp, Artificial Sequence
  ENSG00000168060_28 (sequence is synthesized)
ttttcccgctctcccctcctcacgtcagcagcctttctcctaaggcaccctaggatcaggaggaccctgtcctccaaccctctatcccccattcccaggcacctggcgtcctcgcagatc

SEQ ID NO: 548193 - DNA, 120 bp, Artificial Sequence
  ENSG00000168060_29 (sequence is synthesized)
ctggggggctgaggagtttgggctcattggctccacggaattcacagaagtgagtggccctacagggtaggggatcgaaaggggttcccaggacagaacggcgcggggctgacgtcgccc

SEQ ID NO: 548194 - DNA, 120 bp, Artificial Sequence
  ENSG00000168061_0 (sequence is synthesized)
acaaagcggttggttgcggcagggactacaccggtgtatcatgggagcggcccgggctacacgttaaaaacactaaggggagcgcgcgaagctgaacttggcgctcgatgggggccgtta

SEQ ID NO: 548195 - DNA, 120 bp, Artificial Sequence
  ENSG00000168061_1 (sequence is synthesized)
gccgccctagagcgcgcggagccgcagaggcgtagctggactacaacgcagtgcatctcgggaggccaactcgactggactgggtgagaggacagaggtggctcgatgggcggcccgaag

SEQ ID NO: 548196 - DNA, 120 bp, Artificial Sequence
  ENSG00000168061_2 (sequence is synthesized)
gggatcatggcgggaaggcgggcccagacaggttcagccccgccccgacccgccgctccccaccccccggccggcctcgcgtgccttcccgcagcactgccgtccccgggatgctgagcg

SEQ ID NO: 548197 - DNA, 120 bp, Artificial Sequence
  ENSG00000168061_3 (sequence is synthesized)
ggatgctgagcgcccaccgtctccccgcagccccctcatgcccggctgcgagctgcccgtgggcacctgcccggacatgtgcccggccgccgagcgcgcccagcgcgaaagggagcaccg

SEQ ID NO: 548198 - DNA, 120 bp, Artificial Sequence
  ENSG00000168061_4 (sequence is synthesized)
gcttggaggtggtgccgggttgccgccaggacccgccccgcgcggatccgcagcgcgcggtgaaggagtacagccgacccgccgccggcaagccccggcccccgcccagccagttgcgtc

SEQ ID NO: 548199 - DNA, 120 bp, Artificial Sequence
  ENSG00000168061_5 (sequence is synthesized)
cgccctccgtgctgctggccaccgtgcgctacctggccggtgaggtggcggagagcgccgacatcgcccgcgccgaggtggccagcttcgtggcagaccgcttgcgagctgtgctcctgg

SEQ ID NO: 548200 - DNA, 120 bp, Artificial Sequence
  ENSG00000168061_6 (sequence is synthesized)
gtgctcctggacctggcgctgcagggagcgggcgacgccgaggcagctgtggtgctggaggcggcgctggccacgctgctgaccgtagtggcgcggctcgggcccgacgcggcgcgggga

SEQ ID NO: 548201 - DNA, 120 bp, Artificial Sequence
  ENSG00000168061_7 (sequence is synthesized)
tgctgcaggcccaggtgcaggagggcttcggctcgctgcggcgctgctacgcgcggggcgccgggccgcacccccgccaacccgccttccagggcctctttctgctctataacctgggct

SEQ ID NO: 548202 - DNA, 120 bp, Artificial Sequence
  ENSG00000168061_8 (sequence is synthesized)
cggtggaagccctgcatgaggttctacagctgcctgctgccctgcgcgcctgcccgcccctccgcaaggccttggcggtagatgctgccttccgagagggcaatgctgcccgcctgttcc

SEQ ID NO: 548203 - DNA, 120 bp, Artificial Sequence
  ENSG00000168061_9 (sequence is synthesized)
gtctgctccagaccctgccctacctgccaagttgcgctgtgcagtgccatgtgggccatgcccgccgggaagccctggcccgcttcgctcgtgcctttagcacccccaagggccagacct

SEQ ID NO: 548204 - DNA, 120 bp, Artificial Sequence
  ENSG00000168061_10 (sequence is synthesized)
tgcctctgggcttcatggtcaacctcttggccctggatggactcagggaagcacgggacctgtgccaggcccacgggctgcccttggacggagaggagagagttgtgttcctgaggggtc

SEQ ID NO: 548205 - DNA, 120 bp, Artificial Sequence
  ENSG00000168061_11 (sequence is synthesized)
gctacgtggaggaagggctaccgcctgccagtacgtgcaaggtgttagtggagagcaaacttcgaggacgtaccctggaggaggtggtcatggcagaggaggaagatgagggcacggaca

SEQ ID NO: 548206 - DNA, 120 bp, Artificial Sequence
  ENSG00000168061_12 (sequence is synthesized)
gacctgggtccccagcctgaggagggagcgtgagcctcccagagccccaggactgggccagagcacttaggtttctttttccatggtttccaggtaataaaaggaacttgttttgttggt

SEQ ID NO: 548207 - DNA, 120 bp, Artificial Sequence
  ENSG00000168062_0 (sequence is synthesized)
agagggcactgggaagtcacagctgctgagggaccactctgctcccccgcctaagccatgcacctctgtgggggcaatgggctgctgacccagacagaccccaaggagcaacaaaggcag

SEQ ID NO: 548208 - DNA, 120 bp, Artificial Sequence
  ENSG00000168062_1 (sequence is synthesized)
ctgaagaagcagaagaaccgggcagccgcccagcgaagccggcagaagcacacagacaaggcagacgccctgcaccagcagcacgagtctctggaaaaagacaacctcgccctgcggaag

SEQ ID NO: 548209 - DNA, 120 bp, Artificial Sequence
  ENSG00000168062_2 (sequence is synthesized)
gagatccagtccctgcaggccgagctggcgtggtggagccggaccctgcacgtgcatgagcgcctgtgccccatggattgtgcctcctgctcagctccagggctcctgggctgctgggac

SEQ ID NO: 548210 - DNA, 120 bp, Artificial Sequence
  ENSG00000168062_3 (sequence is synthesized)
caggctgaggggctcctgggccctggcccacagggacaacatggctgccgggagcagctggagctgttccagaccccgggttcctgttacccagctcagccgctctctccaggtccacag

SEQ ID NO: 548211 - DNA, 120 bp, Artificial Sequence
  ENSG00000168062_4 (sequence is synthesized)
cctcatgattctcccagcctcctccagtgccccctgccctcactgtcccttggccccgctgtggttgctgaacctcctgtccagctgtcccccagccctctcctgtttgcctcgcacact

SEQ ID NO: 548212 - DNA, 120 bp, Artificial Sequence
  ENSG00000168062_5 (sequence is synthesized)
ggttccagcctgcaggggtcttcctctaagctcagtgccctccagcccagcctcacggcccaaactgcccctccacagcccctcgagctggagcatcccaccagagggaagctggggtcc

SEQ ID NO: 548213 - DNA, 120 bp, Artificial Sequence
  ENSG00000168062_6 (sequence is synthesized)
tctcccgacaacccttcctctgccctggggcttgcacgtctgcagagcagggagcacaaacctgctctctcagcagccacttggcaagggctggttgtggatcccagccctcaccctctc

SEQ ID NO: 548214 - DNA, 120 bp, Artificial Sequence
  ENSG00000168062_7 (sequence is synthesized)
ctggcctttcctctgctctcctctgctcaagtccacttctaacctggtcttcggagctgggttggccccttctttgggctcaggaagcagccttagcacacgggcctctcctccctcact

SEQ ID NO: 548215 - DNA, 120 bp, Artificial Sequence
  ENSG00000168062_8 (sequence is synthesized)
cagctggcccaggatttcacagtcgaaaaggaagccaccactgatgcctcccactgtgacaggccctgtcaccaccaatatcttatttcaacctcacagttgacctgagaaatcgagatt

SEQ ID NO: 548216 - DNA, 120 bp, Artificial Sequence
  ENSG00000168062_9 (sequence is synthesized)
atcactccactttttcagacaaggaaactgaggctcagggaagccaagtgacaagtccaaggtcacgaagactttcttggagcccgaaacaccaccctctgctcctccttctcctgtcct

SEQ ID NO: 548217 - DNA, 120 bp, Artificial Sequence
  ENSG00000168062_10 (sequence is synthesized)
ggcccaggcatcctaggggctgaaatcctggaaaccgtgggctggtgtgagaaggtttgcatgctcagagcagagaagggctctccccactgcttcgtgattccagggccagagccatgc

SEQ ID NO: 548218 - DNA, 120 bp, Artificial Sequence
  ENSG00000168062_11 (sequence is synthesized)
agtcccagaaaccccaacctagctggggcaggtccagagtccaagccctggtgggtagaggccaagcagaagccctgaagtggactcttgcttcccctagtagtgttttcagtgccaaga

SEQ ID NO: 548219 - DNA, 120 bp, Artificial Sequence
  ENSG00000168062_12 (sequence is synthesized)
agctgaaactgtgagctggagttggggagaggtctggaagaggaccatctgggatttctacagcctgggtacccatagccacaccaaggcttctgggagattctgcagggtcagctttcc

SEQ ID NO: 548220 - DNA, 120 bp, Artificial Sequence
  ENSG00000168062_13 (sequence is synthesized)
aggctgttcccaaatagctccctgcctccccactgcccctaaagccacagcagaagagccattcatctcataaacaaaaaggaagaggaaagaatgaggaaggaccctgtgcaaggttat

SEQ ID NO: 548221 - DNA, 120 bp, Artificial Sequence
  ENSG00000168062_14 (sequence is synthesized)
ttgcaggcagggatgggcttgtacctgacagcacccacccctgtgtggcccccaggccctcatcaccctcagacccctcctaagcagttccctcattgctctttggactaggctgacagc

SEQ ID NO: 548222 - DNA, 120 bp, Artificial Sequence
  ENSG00000168062_15 (sequence is synthesized)
aggaagagcagggcccatgaccgggtggaagttcagttttggtgtctgcttcaagagggggttttacactctgattccaggacaagcactctgaggcgggtgggggagagaaaccctggc

SEQ ID NO: 548223 - DNA, 120 bp, Artificial Sequence
  ENSG00000168062_16 (sequence is synthesized)
tcttcacccaggtttcacacacatgtaaatgaaacactatgttagtatctaacacactcctggatacagaacacaagtcttggcacatatgtgatggaaataaagtgttttgcaatcttt

SEQ ID NO: 548224 - DNA, 120 bp, Artificial Sequence
  ENSG00000168062_17 (sequence is synthesized)
aagaaagaaggcgagagagaggagaccggaggtctgagctgcagccactacacaggcctggaattctaccacagggaatttggtgggtgcctctaaagggctttaacctgcaattaatga

SEQ ID NO: 548225 - DNA, 120 bp, Artificial Sequence
  ENSG00000168062_18 (sequence is synthesized)
catggttgctgaatggctcctgtgggcaagagaataggtggtttgggggacacacgggttggaggcccgtgcatatcccagcagcacgagtctctggaaaaagacaacctcgccctgcgg

SEQ ID NO: 548226 - DNA, 120 bp, Artificial Sequence
  ENSG00000168062_19 (sequence is synthesized)
atgctgtcaacctgtaaaacaatcccctgaatcctcccacagtgctcgtaggggcgagttctgggccctcaaaagggcagtggcaataagcaatctaggacagaatgacatcaaggttgc

SEQ ID NO: 548227 - DNA, 120 bp, Artificial Sequence
  ENSG00000168062_20 (sequence is synthesized)
cacgggaaggccctgttgggatttgcacagagaagggcggcggaagggtgtccaggcagaggaaacaggaaatgtggccgggaagcagagttcatgtgagggtcaggaagggaggggagc

SEQ ID NO: 548228 - DNA, 120 bp, Artificial Sequence
  ENSG00000168062_21 (sequence is synthesized)
gacagcaggcggatctgagcccccttcagagggtgggacaggggagacttggtaggtggttatgaagggctggccagagagtggccaagagaccccacttggctattccaatggtggtgg

SEQ ID NO: 548229 - DNA, 120 bp, Artificial Sequence
  ENSG00000168062_22 (sequence is synthesized)
catctttctcctgaagttgaggaccctggaaggggctaaggctcatgcggggcccctgacactggctgaggttcccctccccgcccatctgcttctctgcagcagcacgagtctctggaa

SEQ ID NO: 548230 - DNA, 120 bp, Artificial Sequence
  ENSG00000168062_23 (sequence is synthesized)
agaaagaaggcgagagagaggagaccggaggtctgagctgcagccactacacaggcctggaattctaccacagggaatttgcagcacgagtctctggaaaaagacaacctcgccctgcgg

SEQ ID NO: 548231 - DNA, 120 bp, Artificial Sequence
  ENSG00000168065_0 (sequence is synthesized)
gcaatcggttccaaacagcagttaggtcagcagtccgctcagccgaggcagctctgttcatggcgttctcgaagctcttggagcaagccggaggcgtgggcctcttccagaccctgcagg

SEQ ID NO: 548232 - DNA, 120 bp, Artificial Sequence
  ENSG00000168065_1 (sequence is synthesized)
tgctcaccttcatcctcccctgcctcatgataccttcccagatgctcctggagaacttctcagccgccatcccaggccaccgatgctggacacacatgctggacaatggctctgcggttt

SEQ ID NO: 548233 - DNA, 120 bp, Artificial Sequence
  ENSG00000168065_2 (sequence is synthesized)
ccacaaacatgacccccaaggcccttctgaccatctccatcccgccaggccccaaccaggggccccaccagtgccgccgcttccgccagccacagtggcagctcttggaccccaatgcca

SEQ ID NO: 548234 - DNA, 120 bp, Artificial Sequence
  ENSG00000168065_3 (sequence is synthesized)
cggccaccagctggagcgaagctgacacggagccgtgtgtggacggctgggtctatgaccgcagcgtcttcacctccaccatcgtggccaagtgggacctggtgtgcagctcccagggct

SEQ ID NO: 548235 - DNA, 120 bp, Artificial Sequence
  ENSG00000168065_4 (sequence is synthesized)
tgaagcccctaagccagtccatcttcatgtccgggatcctggtgggctcctttatctggggcctcctctcctaccggtttgggaggaagccgatgctgagctggtgctgcctgcagttgg

SEQ ID NO: 548236 - DNA, 120 bp, Artificial Sequence
  ENSG00000168065_5 (sequence is synthesized)
ccgtggcgggcaccagcaccatcttcgccccaacattcgtcatctactgcggcctgcggttcgtggccgcttttgggatggccggcatctttctgagttcactgacactgatggtggagt

SEQ ID NO: 548237 - DNA, 120 bp, Artificial Sequence
  ENSG00000168065_6 (sequence is synthesized)
ggaccacgaccagcaggagggcggtcaccatgacggtggtgggatgtgccttcagcgcaggccaggcggcgctgggcggcctggcctttgccctgcgggactggaggactctccagctgg

SEQ ID NO: 548238 - DNA, 120 bp, Artificial Sequence
  ENSG00000168065_7 (sequence is synthesized)
cagcatcagtgcccttctttgccatctccctgatatcctggtggctgccagaatccgcccggtggctgattattaagggcaaaccagaccaagcacttcaggagctcagaaaggtggcca

SEQ ID NO: 548239 - DNA, 120 bp, Artificial Sequence
  ENSG00000168065_8 (sequence is synthesized)
ggataaatggccacaaggaggccaagaacctgaccatagaggtgctgatgtccagcgtgaaggaggaggtggcctctgcaaaggagccgcggtcggtgctggacctgttctgcgtgcccg

SEQ ID NO: 548240 - DNA, 120 bp, Artificial Sequence
  ENSG00000168065_9 (sequence is synthesized)
tgctccgctggaggagctgcgccatgctggtggtgaatttctctctattgatctcctactatgggctggtcttcgacctgcagagcctgggccgtgacatcttcctcctccaggccctct

SEQ ID NO: 548241 - DNA, 120 bp, Artificial Sequence
  ENSG00000168065_10 (sequence is synthesized)
tcggggccgtggacttcctgggccgggccaccactgccctcttgctcagtttccttggccgccgcaccatccaggcgggttcccaggccatggccggcctcgccattctagccaacatgc

SEQ ID NO: 548242 - DNA, 120 bp, Artificial Sequence
  ENSG00000168065_11 (sequence is synthesized)
tggtgccgcaagatttgcagaccctgcgtgtggtctttgctgtgctgggaaagggatgttttgggataagcctaacctgcctcaccatctacaaggctgaactctttccaacgccagtgc

SEQ ID NO: 548243 - DNA, 120 bp, Artificial Sequence
  ENSG00000168065_12 (sequence is synthesized)
ggatgacagcagatggcattctgcatacagtgggccggctgggggctatgatgggtcccctgatcctgatgagccgccaagccctgcccctgctgcctcctctcctctatggcgttatct

SEQ ID NO: 548244 - DNA, 120 bp, Artificial Sequence
  ENSG00000168065_13 (sequence is synthesized)
ccattgcttccagcctggttgtgctgttcttcctcccggagacccagggacttccgctccctgacactatccaggacctggagagccagaaatcaacagcagcccagggcaaccggcaag

SEQ ID NO: 548245 - DNA, 120 bp, Artificial Sequence
  ENSG00000168065_14 (sequence is synthesized)
gactcctggaaaggagttgcctcttctccaatcagagcgtggaggcgagttgggcgacttcaagggcctggcatggcagaggccaggcagccgtggccgagtggacagcgtggccgtctg

SEQ ID NO: 548246 - DNA, 120 bp, Artificial Sequence
  ENSG00000168065_15 (sequence is synthesized)
ctgtggctgaaggcagcttccacagctcactcctcttctccctgccctgatcagattccccaccttacccgggccctacaggagcctgtgcagatggccatgcccaaccaataacgagac

SEQ ID NO: 548247 - DNA, 120 bp, Artificial Sequence
  ENSG00000168065_16 (sequence is synthesized)
ggttcccctccctttccctgccaggctcatgtctttacaccttcactcagccacgccaaccagagactgggttccaatctcaccccaccacatacagagccctcatctgtgaaatgagaa

SEQ ID NO: 548248 - DNA, 120 bp, Artificial Sequence
  ENSG00000168065_17 (sequence is synthesized)
tgatcacgtgacccaccccccagggcaggtatcagggtgaactgatcttagcaccggccaaataaatggaacctgctgagagagctgccagatacaggtgtccaggttgtgcactggccc

SEQ ID NO: 548249 - DNA, 120 bp, Artificial Sequence
  ENSG00000168065_18 (sequence is synthesized)
gaggcacgcagccaaggaggcgtgtggggtctgaaactcagccccggctacactggccccaccacccaccctagcaaaggctgtgtcctctccaaaaaaaggagctgttttaatcacttt

SEQ ID NO: 548250 - DNA, 120 bp, Artificial Sequence
  ENSG00000168065_19 (sequence is synthesized)
tcatttactcatcagtgagggagggcttccagccctatggttacgaagacggccaaacacaccaccaaacaccagacagaggaggctggcagcaggttaccacacacgtgcgcagagccc

SEQ ID NO: 548251 - DNA, 120 bp, Artificial Sequence
  ENSG00000168065_20 (sequence is synthesized)
acgaagatgacgctgcactgaggcatggggcggggtgcactgaggatccgagcgagcagccagggctgcaggaaggcagctttggagcacaaagggggtggggcaactcctggcttctgc

SEQ ID NO: 548252 - DNA, 120 bp, Artificial Sequence
  ENSG00000168065_21 (sequence is synthesized)
gggaaggtgtaatcagcttgtttcatcatgctgcaggctggcgagaaacggagccttacaagcgtagggataagaggaacccctcttggtcccctcgatgagggttgttgggccggggag

SEQ ID NO: 548253 - DNA, 120 bp, Artificial Sequence
  ENSG00000168065_22 (sequence is synthesized)
cctcatccacagggcggagtgaaaggggagaaggggagctcacaggcaggcctgccaaggccttctggctttgccagatgtcaagggcagcacctaatactgaaccttaactttcggctt

SEQ ID NO: 548254 - DNA, 120 bp, Artificial Sequence
  ENSG00000168065_23 (sequence is synthesized)
tcaaccaaacggcacccttttgctgtttgttttctggaggggacaccttttcttgattcatgcccagacctcccttgtccaggccatgaaaactctgggatggtcgaggccggctgccca

SEQ ID NO: 548255 - DNA, 120 bp, Artificial Sequence
  ENSG00000168065_24 (sequence is synthesized)
tctcagatgggcaaggaagcaaaagtgcagagtggtggaggggccagcttgcagaaacacggccgaacccggccctgatcctagcccagggctctttccagcacaggaggctcctagccc

SEQ ID NO: 548256 - DNA, 120 bp, Artificial Sequence
  ENSG00000168065_25 (sequence is synthesized)
tcgtctccaaccctccatgccactgatatctgtggccctgccacaaagttaccctcatgcccttccctggagaccccactctgggccacctcaatctcaggcccctcaactcacctcttt

SEQ ID NO: 548257 - DNA, 120 bp, Artificial Sequence
  ENSG00000168065_26 (sequence is synthesized)
caccctgtgtacactgggtcaatcactcctgcctcctcacagctcccaaatccacctacttcccttcactctggctacaccctggttcacaccacggttgtagctccaaactggtccctg

SEQ ID NO: 548258 - DNA, 120 bp, Artificial Sequence
  ENSG00000168065_27 (sequence is synthesized)
atgtctacattgcactctgcacaacagccaccatgcttattaagaaacgcaatccaaaccaaatccctccctgctgaaagccctccagtggctcacaataaggatcacacttctccccct

SEQ ID NO: 548259 - DNA, 120 bp, Artificial Sequence
  ENSG00000168065_28 (sequence is synthesized)
gcctggtcaggcagccatgggaccccagcctttcctcccacttcggtaaattttaaaggattcggatcatacaaagaatgttcttgaaccagcatggaattaaattagaaatcaattatg

SEQ ID NO: 548260 - DNA, 120 bp, Artificial Sequence
  ENSG00000168065_29 (sequence is synthesized)
cttggtgggcagctcggatgccccaggcagcccgggcacagtgagcttagtccccttcaccccctccgcagagctctggggcatccgcacagtcactcctggacacaagataaggaggag

SEQ ID NO: 548261 - DNA, 120 bp, Artificial Sequence
  ENSG00000168065_30 (sequence is synthesized)
tttccccgaggcatcacagggcttcccgggactgagggactgactcaactggttattggacagtgccccacccccaatccggctgaggggcaggaaggcagaaggtcttggtggccctgg

SEQ ID NO: 548262 - DNA, 120 bp, Artificial Sequence
  ENSG00000168065_31 (sequence is synthesized)
atgctggtggtgaagtacgccgtcctggtgtccctccccaaggcagggctgggacaggcaggaggcagagctgggacaggcaggaggcagagcgtccaggggaaacagcacccgcaggcc

SEQ ID NO: 548263 - DNA, 120 bp, Artificial Sequence
  ENSG00000168065_32 (sequence is synthesized)
tcaagggggtgcatttctgtctgggacaggacgcagacagccccagcaggcaggagtcctggcaggcagcagagagggactatgcacaggtgggatctggaggctgccatctgcaggaag

SEQ ID NO: 548264 - DNA, 120 bp, Artificial Sequence
  ENSG00000168065_33 (sequence is synthesized)
ccagaggaaaaggcagctctaggctgggggtcccagggtcccagggaggtcccaagacagaggcagagccagggtccctagagccaggggaccagccacggccgaggagtaccactgtgt

SEQ ID NO: 548265 - DNA, 120 bp, Artificial Sequence
  ENSG00000168065_34 (sequence is synthesized)
gtcatcgttagagacttaccactttcctagagaccatggccatgctcctagagggtgaacctgcattcgctgacccctccatgcaaccccacttcactgatggggaaagaggatcccaga

SEQ ID NO: 548266 - DNA, 120 bp, Artificial Sequence
  ENSG00000168065_35 (sequence is synthesized)
ggggtaaggaacaagcccaaaataatagagcctgcattggaaccgggctgagctaacacttggcttaccggcactgtcactgccagggcccgcgcgaccagaccctggccctccccggga

SEQ ID NO: 548267 - DNA, 120 bp, Artificial Sequence
  ENSG00000168065_36 (sequence is synthesized)
cccaaggtcatctgggcccaggaaaaggcccttaaaacaaattcagttccggtgacatccaaaagagcatattaaaaagcaaggaccagtcaggcgcggtggctcaagcctgtaatccct

SEQ ID NO: 548268 - DNA, 120 bp, Artificial Sequence
  ENSG00000168065_37 (sequence is synthesized)
gagttcaagaccagcctgggtaacatagtaagaccctctcatcgctactaaaaatcaaaaaatgaggcaggaggatcactggagcccaggagatagaggctgcactgagctgagattgtg

SEQ ID NO: 548269 - DNA, 71 bp, Artificial Sequence
  ENSG00000168065_38 (sequence is synthesized)
atcgctactaaaaatcaaaaaatgaggcaggaggatcactggagcccaggagatagaggctgcattccgtc

SEQ ID NO: 548270 - DNA, 120 bp, Artificial Sequence
  ENSG00000168065_39 (sequence is synthesized)
ttaaccacatatgggttatgatggcaaatacttgctacatcttagaacaaagatagatcaaatgccttttttaaaaaacttcaatttttttctgataaatcagaaggagtgctctcactg

SEQ ID NO: 548271 - DNA, 120 bp, Artificial Sequence
  ENSG00000168065_40 (sequence is synthesized)
caaacacccgggaccagtttttttttttaaaaaaaaaaaaaaccttccaggattcctcagttctcccaggggccggctctgcaacctttgttattcaaatcagaggctttgaagctggtg

SEQ ID NO: 548272 - DNA, 120 bp, Artificial Sequence
  ENSG00000168065_41 (sequence is synthesized)
accttgtgggttttcctgtcttgttaacccagttgttatctgtccaaggctccagtgtcggccgctttgagcaccagcccagtgactctcacgtcactcacataaacttcatgaaacacc

SEQ ID NO: 548273 - DNA, 120 bp, Artificial Sequence
  ENSG00000168066_0 (sequence is synthesized)
cggagctcagttcacgcagtaacaaatgaagtgcgcgctgcgacacctcccagcccaccgaactccgccgccatttcctcgcttggcctaacggttcggccaatcccagcgcgcatcaag

SEQ ID NO: 548274 - DNA, 120 bp, Artificial Sequence
  ENSG00000168066_1 (sequence is synthesized)
caagaaggactgaggctccgccaatcggaggccgccgatttcgacccttcgcctcggcccggcccaatccaggccccggccccgccgcccccggcccgcccccgcggtgccctctctcct

SEQ ID NO: 548275 - DNA, 120 bp, Artificial Sequence
  ENSG00000168066_2 (sequence is synthesized)
ctttgtgcgtctcgcgccgccgccgcccgccgcgtgagaggacgggctccgcgcgctccggcagcgcattcgggtcccctccccccgggaggcttgcgaaggagaagccgccgcagagga

SEQ ID NO: 548276 - DNA, 120 bp, Artificial Sequence
  ENSG00000168066_3 (sequence is synthesized)
aaagcaggtgccggtgcctgtccccgggggcgccatggcgaccggagcgaacgccacgccgttggacttcccaagtaagaagcggaagaggagccgctggaaccaagacacaatggaaca

SEQ ID NO: 548277 - DNA, 120 bp, Artificial Sequence
  ENSG00000168066_4 (sequence is synthesized)
gaagacagtgattccaggaatgcctacagttattccccctggacttactcgagaacaagaaagagcttatatagtgcaactgcagatagaagacctgactcgtaaactgcgcacaggaga

SEQ ID NO: 548278 - DNA, 120 bp, Artificial Sequence
  ENSG00000168066_5 (sequence is synthesized)
cctgggcatcccccctaaccctgaggacaggtccccttcccctgagcccatctacaatagcgaggggaagcggcttaacacccgagagttccgcacccgcaaaaagctggaagaggagcg

SEQ ID NO: 548279 - DNA, 120 bp, Artificial Sequence
  ENSG00000168066_6 (sequence is synthesized)
gcacaacctcatcacagagatggttgcactcaatccggatttcaagccacctgcagattacaaacctccagcaacacgtgtgagtgataaagtcatgattccacaagatgagtacccaga

SEQ ID NO: 548280 - DNA, 120 bp, Artificial Sequence
  ENSG00000168066_7 (sequence is synthesized)
aatcaactttgtggggctgctcatcgggcccagagggaacaccctgaagaacatagagaaggagtgcaatgccaagattatgatccgggggaaagggtctgtgaaagaagggaaggttgg

SEQ ID NO: 548281 - DNA, 120 bp, Artificial Sequence
  ENSG00000168066_8 (sequence is synthesized)
gcgcaaagatggccagatgttgccaggagaagatgagccacttcatgccctggttactgccaatacaatggagaacgtcaaaaaggcagtggaacagataagaaacatcctgaagcaggg

SEQ ID NO: 548282 - DNA, 120 bp, Artificial Sequence
  ENSG00000168066_9 (sequence is synthesized)
tatcgagactccagaggaccagaatgatctacggaagatgcagcttcgggagttggctcgcttaaatgggacccttcgggaagacgataacaggatcttaagaccctggcagagctcaga

SEQ ID NO: 548283 - DNA, 120 bp, Artificial Sequence
  ENSG00000168066_10 (sequence is synthesized)
gacccgcagcattaccaacaccacagtgtgtaccaagtgtggaggggctggccacattgcttcagactgtaaattccaaaggcctggtgatcctcagtcagctcaggataaagcacggat

SEQ ID NO: 548284 - DNA, 120 bp, Artificial Sequence
  ENSG00000168066_11 (sequence is synthesized)
ggataaagaatatttgtccctcatggctgaactgggtgaagcacctgtcccagcatctgtgggctccacctctgggcctgccaccacacccctggccagcgcacctcgtcctgctgctcc

SEQ ID NO: 548285 - DNA, 120 bp, Artificial Sequence
  ENSG00000168066_12 (sequence is synthesized)
ggcatgcatggaggtggtcctggtgggcccggaggtggcccccacagcttcccacacccattacccagcctgacaggtgggcatggtggacatcccatgcagcacaaccccaatggaccc

SEQ ID NO: 548286 - DNA, 120 bp, Artificial Sequence
  ENSG00000168066_13 (sequence is synthesized)
ccacccccttggatgcagccaccaccaccaccgatgaaccagggcccccaccctcctgggcaccatggccctcctccaatggatcagtacctgggaagtacgcctgtgggctctggggtc

SEQ ID NO: 548287 - DNA, 120 bp, Artificial Sequence
  ENSG00000168066_14 (sequence is synthesized)
tatcgcctgcatcaaggaaaaggtatgatgccgccaccacctatgggcatgatgccgccgccgccgccgcctcccagtgggcagcccccaccccctccctctggtcctcttcccccatgg

SEQ ID NO: 548288 - DNA, 120 bp, Artificial Sequence
  ENSG00000168066_15 (sequence is synthesized)
caacaacagcagcagcagcctccgccaccccctccgcccagcagcagtatggcttccagtacccccttgccatggcagcaaaatacgacgactaccaccacgagcgctggcacagggtcc

SEQ ID NO: 548289 - DNA, 120 bp, Artificial Sequence
  ENSG00000168066_16 (sequence is synthesized)
atcccgccatggcaacagcagcaggcggctgccgcagcttctccaggagcccctcagatgcaaggcaaccccactatggtgcccctgccccccggggtccagccgcctctgccgcctggg

SEQ ID NO: 548290 - DNA, 120 bp, Artificial Sequence
  ENSG00000168066_17 (sequence is synthesized)
gcccctccccctccgccgcctccaccgcctggttccgccggcatgatgatccctccccgcggcggcgatggcccgagccatgagagtgaggactttccgcgcccattggtgacccttcca

SEQ ID NO: 548291 - DNA, 120 bp, Artificial Sequence
  ENSG00000168066_18 (sequence is synthesized)
ggcagacagcctcagcaacgcccctggtggacaggatggttcggcaaagcagcctgagttatttttgtggacggaatcggaacacgctggctccatatcgtgaaatttttattaattttt

SEQ ID NO: 548292 - DNA, 120 bp, Artificial Sequence
  ENSG00000168066_19 (sequence is synthesized)
ttctttttcctttgttacttctttatcttttcctttcttcagactccgtccaaggagatgctctccccggtcttctgctgcaatttagattcctttcccttctctccagttctccttccc

SEQ ID NO: 548293 - DNA, 120 bp, Artificial Sequence
  ENSG00000168066_20 (sequence is synthesized)
ttaccaaggagaggggagcaaatggttttgggcaagggctttggccattcatgtcaagctggttgtgggtttttcaaggtgccatagccacccccaaagatgtttgtttaaagcgtgggg

SEQ ID NO: 548294 - DNA, 120 bp, Artificial Sequence
  ENSG00000168066_21 (sequence is synthesized)
ttttttaatctctgccacccttgtcaagggagtcttgtaaagttgccgagggtaggttcatctccaggtttcgggattcccatccgtcctggcgatcctgccagcagtgggtgggcagcc

SEQ ID NO: 548295 - DNA, 120 bp, Artificial Sequence
  ENSG00000168066_22 (sequence is synthesized)
tgagctccctcgggctcgcctgccagcctggagttcttcctgtgctccttgatcacctgagctgcctcagattccatttggtcctctccttcctggaaggcttccttttatgttttgttt

SEQ ID NO: 548296 - DNA, 120 bp, Artificial Sequence
  ENSG00000168066_23 (sequence is synthesized)
taatcccaaatgtctgaatgttttgcagtgtgtaggggtttgagccccttgttcattctccttcctttttcctcccgcttccctctccatgaagtgattctgttgacaataatgtatact

SEQ ID NO: 548297 - DNA, 120 bp, Artificial Sequence
  ENSG00000168066_24 (sequence is synthesized)
gcgcgttctcttcactggtttatctgcagaaatttctctgggcttttttcggtgttagattcaacactgcgctaaagcggggatgttccattgaataaaagagcagtgtggttttctggg

SEQ ID NO: 548298 - DNA, 120 bp, Artificial Sequence
  ENSG00000168066_25 (sequence is synthesized)
cctcccatggacccttctaactttgtcaccatgatgggcatgggggtggcgggcatgccgcccttcgggatgcctccagctcccccaccgcctccaccacagaactagacttgtttttta

SEQ ID NO: 548299 - DNA, 120 bp, Artificial Sequence
  ENSG00000168066_26 (sequence is synthesized)
agaaaatatatattatatatagagagaattggtctcgtttaaacacgccgaacctcaccatatggagccagacattgggacgcacgcatgtgattgtgtgtgcacgcatgtgtgtgtgtg

SEQ ID NO: 548300 - DNA, 120 bp, Artificial Sequence
  ENSG00000168066_27 (sequence is synthesized)
cacgcactgggctgggccaagcgactgaggattcgcttgggaacgggcaggtggtagtaggggcgccagcttgggctctcctggcgccccgtagcatcgagtgtcttctttgtcttcttt

SEQ ID NO: 548301 - DNA, 120 bp, Artificial Sequence
  ENSG00000168066_28 (sequence is synthesized)
actcgagaacaagaaagagcttatataggtaaatatacgttctgcatccaaatgcactttgagattgttacgatttattctgagcaagatctgcattttttgaaagtttgagattgtagt

SEQ ID NO: 548302 - DNA, 120 bp, Artificial Sequence
  ENSG00000168066_29 (sequence is synthesized)
tatcttttttgagatgagatactttcacgactttggtatcatctgtcagtttttgcccagtgagttctgcatttgcagctccttgttttggtctgttcgtaactgcagtgttctccatga

SEQ ID NO: 548303 - DNA, 120 bp, Artificial Sequence
  ENSG00000168066_30 (sequence is synthesized)
gtatcaggaaggtagggtttcacttaggagtaagaacagtccccagtccagcagccacccttttcagctgctgttcattgccagttgatgaggtgagtgtcatctgcctctctggacagg

SEQ ID NO: 548304 - DNA, 120 bp, Artificial Sequence
  ENSG00000168066_31 (sequence is synthesized)
ccccagtggagaacaccgcaggtactgtaaaccaagtacttttcacagcgtggcctttcaccataattttatatttctccccctaaaatgtggtcttttactttttataggtactttctg

SEQ ID NO: 548305 - DNA, 120 bp, Artificial Sequence
  ENSG00000168066_32 (sequence is synthesized)
cctccccccgggaggcttgcgaaggagaagccgccgcagaggaaaagcaggtgccggtgcctgtccccgggggcgccatggcgaccggagcgaacgccacgccgttgggtaagctgggcc

SEQ ID NO: 548306 - DNA, 80 bp, Artificial Sequence
  ENSG00000168066_33 (sequence is synthesized)
gtaagctgggcccccccgggctgcccccgctccccgggcccaaaggaggcttcgagccgggccctccgcctgcacccggg

SEQ ID NO: 548307 - DNA, 120 bp, Artificial Sequence
  ENSG00000168066_34 (sequence is synthesized)
ccccctccgccgccgctctaccagcgcgtgtcgccgccgcagccgccgccaccccagccgccgcgtaaggaccagcagccgggcccggccggcggcggaggagacttcccaagtaagaag

SEQ ID NO: 548308 - DNA, 120 bp, Artificial Sequence
  ENSG00000168066_35 (sequence is synthesized)
attagccatgaacaaacctgaccttttattccatcgtgtgtgtaacgtggtgtgacatggttccctttaggctgaagacagtgggagcagccgagttcagtccttgctctccaactaggc

SEQ ID NO: 548309 - DNA, 120 bp, Artificial Sequence
  ENSG00000168066_36 (sequence is synthesized)
gacgcagtgaggtggccgggctgtgcggcgcaactgtatagactgggggcccactattgctgtccagtccgctggtgtcgggaacaggggtggcgggtgttcagcgctggacggggtgct

SEQ ID NO: 548310 - DNA, 120 bp, Artificial Sequence
  ENSG00000168066_37 (sequence is synthesized)
agctgtgaatgccagcagggcgtgaaagcctcacctgatgacgtgcagcgactcccttctggtcttgaggaaccagaatgggaaccgtaccaaggatagctcctctgcttctacagcaag

SEQ ID NO: 548311 - DNA, 120 bp, Artificial Sequence
  ENSG00000168066_38 (sequence is synthesized)
caaaatcttttatttttttcctttctcacacacaccccagacccctaacgttaagccagcttccatctccccattccacacgatcttgagtagcacacgttatggtcggttcctccgaag

SEQ ID NO: 548312 - DNA, 120 bp, Artificial Sequence
  ENSG00000168066_39 (sequence is synthesized)
agtgttgtattagggtctgagaggcagaggggctgggaaagacttgttatagtccgtgtgggaatgagagaagtcggtgcagaatagtaaacgggagtctgtttcccacaggtccccttc

SEQ ID NO: 548313 - DNA, 120 bp, Artificial Sequence
  ENSG00000168066_40 (sequence is synthesized)
ctcaatacgttttactggtggcaacatattgtgtcagttcaataaaatcatagtatgacgactgtaccctgaccactttggggattaaggtttaattagaaatatgtatggtcagtcaac

SEQ ID NO: 548314 - DNA, 120 bp, Artificial Sequence
  ENSG00000168066_41 (sequence is synthesized)
agttagaaaattggaataaaacttaaaaatgttgggagaataaaaagttacaggaaaatggacaactggtttccaattggtaagcatgtagatcttaacctgatttacccacccttaggg

SEQ ID NO: 548315 - DNA, 120 bp, Artificial Sequence
  ENSG00000168066_42 (sequence is synthesized)
gacagtgaggtggcccgttaacctgccttttcagtacctgctttggccaaaagcccagggcatagagtttttctcacaggtacacagtgcagggactaaaaatatttttgagcatcactg

SEQ ID NO: 548316 - DNA, 120 bp, Artificial Sequence
  ENSG00000168066_43 (sequence is synthesized)
cagaaagggcctcctggtccagggggtggaggggcatcttgaagaggagagctgatgtttggtgtggttgtgtctggggagaggttcgtgggggcctggaggggagcctgctattgtagg

SEQ ID NO: 548317 - DNA, 120 bp, Artificial Sequence
  ENSG00000168066_44 (sequence is synthesized)
tagggggccagaagtccagaccctcgcaggctgagtgagcggctggctggactgagcctggtgcatatgggtcgagtgggatggtgcatgcttgctctggcaagggctgcgattggggtg

SEQ ID NO: 548318 - DNA, 120 bp, Artificial Sequence
  ENSG00000168066_45 (sequence is synthesized)
agagactgcagaggtgggactgggcagtggggagacagcagctgtggccttgaggttgaatgtgccgttcggtggtggcggcggctgggcggagggacatcagagctgttcttgtgtctg

SEQ ID NO: 548319 - DNA, 120 bp, Artificial Sequence
  ENSG00000168067_0 (sequence is synthesized)
ctgccggcccgcccggcgccgggccatggcgctgctgcgggatgtgtcgctgcaggacccgcgggaccgcttcgagctgctgcagcgcgtgggggccgggacctatggcgacgtctacaa

SEQ ID NO: 548320 - DNA, 120 bp, Artificial Sequence
  ENSG00000168067_1 (sequence is synthesized)
tgcagcgcgtgggggccgggacctatggcgacgtctacaaggcccgcgacacggtcacgtccgaactggccgccgtgaagatagtcaagctagacccaggggacgacatcagctccctcc

SEQ ID NO: 548321 - DNA, 120 bp, Artificial Sequence
  ENSG00000168067_2 (sequence is synthesized)
agcaggaaatcaccatcctgcgtgagtgccgccaccccaatgtggtggcctacattggcagctacctcaggaatgaccgcttgtggatctgcatggagttctgcggagggggctccctgc

SEQ ID NO: 548322 - DNA, 120 bp, Artificial Sequence
  ENSG00000168067_3 (sequence is synthesized)
aggagatttaccatgccactgggcccctggaggagcggcagattgcctacgtctgccgagaggcactgaaggggctccaccacctgcattctcaggggaagatccacagagacatcaagg

SEQ ID NO: 548323 - DNA, 120 bp, Artificial Sequence
  ENSG00000168067_4 (sequence is synthesized)
gagccaaccttctcctcactctccagggagatgtcaaactggctgactttggggtgtcaggcgagctgacagcgtctgtggccaagaggaggtctttcattgggactccctactggatgg

SEQ ID NO: 548324 - DNA, 120 bp, Artificial Sequence
  ENSG00000168067_5 (sequence is synthesized)
ctcccgaggtggctgctgtggagcgcaaaggtggctacaatgagctatgtgacgtctgggccctgggcatcactgccattgagctgggcgagctgcagccccctctgttccacctgcacc

SEQ ID NO: 548325 - DNA, 120 bp, Artificial Sequence
  ENSG00000168067_6 (sequence is synthesized)
ccatgagggccctgatgctcatgtcgaagagcagcttccagccgcccaaactgagagataagactcgctggacccagaatttccaccactttctcaaactggccctgaccaagaatccta

SEQ ID NO: 548326 - DNA, 120 bp, Artificial Sequence
  ENSG00000168067_7 (sequence is synthesized)
agaagaggccgacagcagagaagctcctgcagcacccgttcacgactcagcagctccctcgggccctcctcacacagctgctggacaaagccagtgaccctcatctggggaccccctccc

SEQ ID NO: 548327 - DNA, 120 bp, Artificial Sequence
  ENSG00000168067_8 (sequence is synthesized)
ctgaggactgtgagctggagacctatgacatgtttccagacaccattcactcccgggggcagcacggcccagccgagaggaccccctcggagatccagtttcaccaggtgaaatttggcg

SEQ ID NO: 548328 - DNA, 120 bp, Artificial Sequence
  ENSG00000168067_9 (sequence is synthesized)
ccccacgcaggaaggaaactgacccactgaatgagccgtgggaggaagagtggacactactgggaaaggaagagttgagtgggagcctgctgcagtcggtccaggaggccctggaggaaa

SEQ ID NO: 548329 - DNA, 120 bp, Artificial Sequence
  ENSG00000168067_10 (sequence is synthesized)
ggagtctgactattcggtcagcctcagaattccaggagctggactccccagacgataccatgggaaccatcaagcgggccccgttcctagggccactccccactgaccctccagcagagg

SEQ ID NO: 548330 - DNA, 120 bp, Artificial Sequence
  ENSG00000168067_11 (sequence is synthesized)
agcctctgtccagtcccccaggaaccctgcccccacctccttcaggccccaacagctccccactgctgcccacggcctgggccaccatgaagcagcgggaggatcctgagaggtcatcct

SEQ ID NO: 548331 - DNA, 120 bp, Artificial Sequence
  ENSG00000168067_12 (sequence is synthesized)
gccacgggctccccccaactcccaaggtgcatatgggcgcctgcttctccaaggtcttcaatggctgccccctgcggatccacgctgctgtcacctggattcaccctgttactcgggacc

SEQ ID NO: 548332 - DNA, 120 bp, Artificial Sequence
  ENSG00000168067_13 (sequence is synthesized)
agttcctggtggtaggggccgaggaaggcatctacacactcaacctgcatgaactgcatgaggatacgctggagaagctgatttcacatcgctgctcctggctctactgcgtgaacaacg

SEQ ID NO: 548333 - DNA, 120 bp, Artificial Sequence
  ENSG00000168067_14 (sequence is synthesized)
tgctgctgtcactctcagggaaatccacgcacatctgggcccatgacctcccaggcctgtttgagcagcggaggctacagcaacaggttcccctctccatccccaccaaccgcctcaccc

SEQ ID NO: 548334 - DNA, 120 bp, Artificial Sequence
  ENSG00000168067_15 (sequence is synthesized)
agcgcatcatccccaggcgctttgctctgtccaccaagattcctgacaccaaaggctgcttgcagtgtcgtgtggtgcggaacccctacacgggtgccaccttcctgctggccgccctgc

SEQ ID NO: 548335 - DNA, 120 bp, Artificial Sequence
  ENSG00000168067_16 (sequence is synthesized)
ccaccagcctgctcctgctgcagtggtatgagccgctgcagaagtttctgctgctgaagaacttctccagccctctgcccagcccagctgggatgctggagccgctggtgctggatggga

SEQ ID NO: 548336 - DNA, 120 bp, Artificial Sequence
  ENSG00000168067_17 (sequence is synthesized)
aggagctgccgcaggtgtgtgttggggccgaggggcctgaggggcccggctgccgcgtcctgttccatgtcctgcccctggaggctggcctgacgcccgacatcctcatcccacctgagg

SEQ ID NO: 548337 - DNA, 120 bp, Artificial Sequence
  ENSG00000168067_18 (sequence is synthesized)
ggatcccaggctcggcccagcaggtgatccaggtggacagggacacaatcctagtcagctttgaacgctgtgtgaggattgtcaacatgcagggcgagcccacggccacactggcacctg

SEQ ID NO: 548338 - DNA, 120 bp, Artificial Sequence
  ENSG00000168067_19 (sequence is synthesized)
agctgacctttgatttccccatcgagactgtggtgtgcctgcaggacagtgtgctggccttctggagccatgggatgcaaggccgaagcctggataccaatgaggtgacccaggagatca

SEQ ID NO: 548339 - DNA, 120 bp, Artificial Sequence
  ENSG00000168067_20 (sequence is synthesized)
cagatgaaacaaggatcttccgagtgcttggggcccacagagacatcatcctggagagcattcccactgacaacccagaggcgcacagcaacctctacatcctcacgggccaccagagca

SEQ ID NO: 548340 - DNA, 120 bp, Artificial Sequence
  ENSG00000168067_21 (sequence is synthesized)
cctactaagagcagcgggcctgtccaggggctccccgccccaccccacgccttagctgcaggcccttttgggcaaaggggcccatcctagaccagaggagcccaggccctggccctgctg

SEQ ID NO: 548341 - DNA, 120 bp, Artificial Sequence
  ENSG00000168067_22 (sequence is synthesized)
gggctgaaggtcagaagtaatcctgagaaatgtttcaggcctggggagggaggggagcccccgacgcctctgcaataactggaccagggggagctgctgtcactcccccatccccgaggc

SEQ ID NO: 548342 - DNA, 120 bp, Artificial Sequence
  ENSG00000168067_23 (sequence is synthesized)
agcccagtccctagtgcccaaggcagggaccctgggcctgggccatccattccattttgttccacatttcctttctactctttctgccaagagcctgcccctgcatttgtcctgggaaac

SEQ ID NO: 548343 - DNA, 120 bp, Artificial Sequence
  ENSG00000168067_24 (sequence is synthesized)
acggtatttaagagagaactatattggtattaaagctggtttgttttagtcctctggtccctctgggtagggggagtgaacccacctcatctcccgcctccttccctccaacacacgttt

SEQ ID NO: 548344 - DNA, 120 bp, Artificial Sequence
  ENSG00000168067_25 (sequence is synthesized)
ctgtgggcaccacagaagggcagggcccccagggttttggagaagccaggtagaggtgacaggaggccatggcccccagcagccttctaggggcactgtgccttcccctgcatccttgct

SEQ ID NO: 548345 - DNA, 120 bp, Artificial Sequence
  ENSG00000168067_26 (sequence is synthesized)
cagaactgaccctcagctttgcagtttgagggctctgctgtagtttagcaccccaaggactcatgcagatggggggacctcaacaaagggactctcatccagggcacccttgccccacgt

SEQ ID NO: 548346 - DNA, 120 bp, Artificial Sequence
  ENSG00000168067_27 (sequence is synthesized)
aggatctcactgggtgacccctggaagggcccaggaggagcccccagagggctgttccctccattcccatggaggctgctgcccatggaggtagcctgtgtgacctgtatcccctgcctc

SEQ ID NO: 548347 - DNA, 120 bp, Artificial Sequence
  ENSG00000168067_28 (sequence is synthesized)
cacctactgcctaggtgttagaccaggaacatcagatgacagcacgatcatcagattggatgggaaggctagcctgtgtccgtctaccagactcccaagggctgcctcagtgccaggccc

SEQ ID NO: 548348 - DNA, 120 bp, Artificial Sequence
  ENSG00000168067_29 (sequence is synthesized)
agggcatggccattctcctgtagcttgtgcttacgctgtcattctccaagggtctgtctgctcagctctgaatgccagggcccccagggctgggcatcctcttttgccccaggcactgat

SEQ ID NO: 548349 - DNA, 120 bp, Artificial Sequence
  ENSG00000168067_30 (sequence is synthesized)
cagccgctcttgactggagcctttgggcagctgcagcccaggaggcaggatgggaactgccttgagggcccacagctggggggctgggaaggtgggggcagggtggggggaacagctgga

SEQ ID NO: 548350 - DNA, 120 bp, Artificial Sequence
  ENSG00000168067_31 (sequence is synthesized)
gcaaaggccccatggtcacccctacattcaaggcaggtgttggaggaagacctttgcacctggtgggtggcaataaagacttgcggagtgacgtggtaggtggatggcagccatgcgagt

SEQ ID NO: 548351 - DNA, 120 bp, Artificial Sequence
  ENSG00000168067_32 (sequence is synthesized)
aggctcagtggttcccagggtgtcacactgtcccctcagccaccctccagcagagtttcaactgttctgactctgtccagtgactgggagggtttcttggctggaatggggagccagccc

SEQ ID NO: 548352 - DNA, 120 bp, Artificial Sequence
  ENSG00000168067_33 (sequence is synthesized)
aggggagggaacacatctcttcacaccaggcattcacacccatgttcccgtgagccccaaggagggtgaggggcaccttccaaattggggtcggtggtaacagggatacaaagtgaattc

SEQ ID NO: 548353 - DNA, 120 bp, Artificial Sequence
  ENSG00000168067_34 (sequence is synthesized)
ctaacttccaattttccagatttctcggaggaatgttgggaccagggtggggtaagtggggacagggaggtgagctcctgctcagcaaaggccctgaccaaaggcgccctggggaggact

SEQ ID NO: 548354 - DNA, 120 bp, Artificial Sequence
  ENSG00000168067_35 (sequence is synthesized)
ggctttccgttcaccaaccggccagcagcagacagtgcctccttgtggcggatcttcccggacctcagattcagtctggaaacggggtttggactgcagagtgtaaactgccaaagtggg

SEQ ID NO: 548355 - DNA, 120 bp, Artificial Sequence
  ENSG00000168067_36 (sequence is synthesized)
ggcctcccataaaacgcttgctgccagcaaaggcaggccaagagcaaagaaaggccgagaaaccagggaatatgcactgagagactaacactttaaattttatttatgtatttttaaatg

SEQ ID NO: 548356 - DNA, 120 bp, Artificial Sequence
  ENSG00000168067_37 (sequence is synthesized)
cgtaacctttgcccatggtacatatttttttaaatacagcagagatataatgaagtctccctcttaccccgtccccagccaccctggtctcagttacttatgaacccttctagaagtatt

SEQ ID NO: 548357 - DNA, 120 bp, Artificial Sequence
  ENSG00000168067_38 (sequence is synthesized)
ttgcgtatttaagcaatttggtatattttattcttggcgattttttatatacgtattaacatattccacatactgtactgaccttgccctttaaaaatatatcctggggggccaggtgtg

SEQ ID NO: 548358 - DNA, 120 bp, Artificial Sequence
  ENSG00000168067_39 (sequence is synthesized)
aaaaaaaaaaaagagaaaaaaatatatatatatcctggagaatatgaatgtattaaattatcacatgcaccctgaaaagatatgtatatatcctggagagttttgcgttaaagatctccc

SEQ ID NO: 548359 - DNA, 120 bp, Artificial Sequence
  ENSG00000168067_40 (sequence is synthesized)
tatcctggagagttttgcgttaaagatctccctttaaaaaaaaatttttttttttttacagctagtggtattccattgtgtatgtttcccataacaaatgttaatgacctgcagtgagat

SEQ ID NO: 548360 - DNA, 120 bp, Artificial Sequence
  ENSG00000168067_41 (sequence is synthesized)
ccctattggtggaaatttgagttgtttttactacttttatattacaaacaatgctgcaataaatattattaggctagtgcccctctgtacatattcaagcacttctagaagataagttcc

SEQ ID NO: 548361 - DNA, 120 bp, Artificial Sequence
  ENSG00000168067_42 (sequence is synthesized)
tggaagcagcattaatgagttagcggtggctacatatgccgtggtgatagctgctgtccagttgcccctccatgggcagaaacctgtgggagggtcagaccagactctttaagtcattct

SEQ ID NO: 548362 - DNA, 120 bp, Artificial Sequence
  ENSG00000168067_43 (sequence is synthesized)
tgaggacaagtagaagggacgtgggcccccccaggatgttcaggtaactggcccatacccggagtcatcctggtgaaagtcaaggggagcaccatgatgtgtgcttcgggacggcggagg

SEQ ID NO: 548363 - DNA, 120 bp, Artificial Sequence
  ENSG00000168067_44 (sequence is synthesized)
atctgccgtgttccctgtggcatgtccagcacctgctcactaccagtgctcaggagaccctcacgagtaagggaatggacaagatgtggtgaagaggagtccctgcaatctgcccttgga

SEQ ID NO: 548364 - DNA, 120 bp, Artificial Sequence
  ENSG00000168067_45 (sequence is synthesized)
ctgggtgagccaccccagctcgctgagctttactttccttaggtttaccatatccaaagccaactgcagggctgtcaggaggatcagaaatactgtaacagacataatgcaataacatag

SEQ ID NO: 548365 - DNA, 120 bp, Artificial Sequence
  ENSG00000168067_46 (sequence is synthesized)
atgactcttagaggtaaattaaaacagcactttatgcacagtacgatagcatattataaagctcaaaaacaaaatgaaaccatctattgtttagcaatacatgcccaagatacaacccta

SEQ ID NO: 548366 - DNA, 120 bp, Artificial Sequence
  ENSG00000168067_47 (sequence is synthesized)
ttaaaaaatcatgggaaggaaaagcacaaaatctgagatggtcgtccctgagaggagtgtgggatgggataaggaaggagcccaggaatttttaaaggtattggtaatatcttagctctc

SEQ ID NO: 548367 - DNA, 120 bp, Artificial Sequence
  ENSG00000168067_48 (sequence is synthesized)
aggtttggtggtaggttcatgggtatttaagttataactcagttcctaactcacataaggtgccacacatccttttgtatgtatcaaatattatgtcataaaattttagtttgggcatgg

SEQ ID NO: 548368 - DNA, 79 bp, Artificial Sequence
  ENSG00000168067_49 (sequence is synthesized)
caaatattatgtcataaaattttagtttactgaggcaggcagatcacttgaacccaggagttctagaccagcctgggca

SEQ ID NO: 548369 - DNA, 80 bp, Artificial Sequence
  ENSG00000168067_50 (sequence is synthesized)
acatgacaaaaccctgtctctacaaaagatacacaaattagctggacatggtggcactcgcctgcagtcccagctactct

SEQ ID NO: 548370 - DNA, 120 bp, Artificial Sequence
  ENSG00000168067_51 (sequence is synthesized)
aaagaaaaaaaaaaaaaggaaaaaaatttttaaaaaatatttaaaagtaatcaccgaaaaaatagaactcgcttgaaagacaagaccaaaaacgaagaggacgtttccctagatggtgaa

SEQ ID NO: 548371 - DNA, 120 bp, Artificial Sequence
  ENSG00000168067_52 (sequence is synthesized)
aaaacgaagaggacgtttccctagatggtgaaaacaagtggggcggaatcactgcagcgtcctgcacagaactctggaattgccactttgcagttgctgccttctagtgtgtattgttga

SEQ ID NO: 548372 - DNA, 120 bp, Artificial Sequence
  ENSG00000168067_53 (sequence is synthesized)
aagacagttttattgaggcataattggcatacaataagctgcatataaaaatgtgtacgtgatgacttttgacatacgtgtacacccgtgaagctatttccacaatcaagataatcacca

SEQ ID NO: 548373 - DNA, 120 bp, Artificial Sequence
  ENSG00000168067_54 (sequence is synthesized)
tccccttcactctggaaagtttcccatgcccttggtaagcccaccctcctgcttcttgcctcccatccccaagtaacaactgtgctgctttctgtcactacaggttaatctgcactttct

SEQ ID NO: 548374 - DNA, 120 bp, Artificial Sequence
  ENSG00000168067_55 (sequence is synthesized)
agaatgtatgtaaatagaatcacacagtatgtacttgtgttttgtctggcttcttgcttagctgagcataaggatttgcgagtcatccctgttgcatgcattaatattttattccttttt

SEQ ID NO: 548375 - DNA, 120 bp, Artificial Sequence
  ENSG00000168067_56 (sequence is synthesized)
attgccaagtagtattccattgtttggatgcaccagtttggttagctgttcacctgttgatggacatttggaccatgttccgttgtgaactattacaaataaagctgctataaacattca

SEQ ID NO: 548376 - DNA, 120 bp, Artificial Sequence
  ENSG00000168067_57 (sequence is synthesized)
ctgctcctgctgcagtggtatgagccgctgcagaagtttctgctgctgaaggtgaggggcggtggggggaggcccagggcaccctcagagctctggggggagaaatggagacctgagcat

SEQ ID NO: 548377 - DNA, 120 bp, Artificial Sequence
  ENSG00000168067_58 (sequence is synthesized)
gtcgctgcaggacccgcgggaccgcttcgagctgctgcagcgcgtgggggccgggacctatggcgacgtctacaaggtgcgacgggacgggcgggagagccgggaggagggtgccagccc

SEQ ID NO: 548378 - DNA, 120 bp, Artificial Sequence
  ENSG00000168067_59 (sequence is synthesized)
tgggtaagaaatgggctgggcggggtggggcggggcctggtggggggcagcgcaggcccagcccggtgcccactgcctgctcccctgccagtgcggaacccctacacgggtgccaccttc

SEQ ID NO: 548379 - DNA, 120 bp, Artificial Sequence
  ENSG00000168070_0 (sequence is synthesized)
gcacttgcgcgtgcgcagaaggcctggtgggtgcgcggcacgagccccgaagttgcttaggagctggcgagccagtccctcaaaacgacttcgttcgaggttggcgcccgcctttttcag

SEQ ID NO: 548380 - DNA, 120 bp, Artificial Sequence
  ENSG00000168070_1 (sequence is synthesized)
agagcacttcttagtgggtattccgtccggggccacttttctgaggccgaaggacccctagtcagtgtgtgagacatagcctggccgagcctgggaaccacctggggctgagagacgacc

SEQ ID NO: 548381 - DNA, 120 bp, Artificial Sequence
  ENSG00000168070_2 (sequence is synthesized)
ttaagtggacagagattctagaacaggagaaataaaacagctatcgtttgggagcaatgagtttaaaaccctttacctacccgtttccagagacgaggtttcttcatgcaggacccaatg

SEQ ID NO: 548382 - DNA, 120 bp, Artificial Sequence
  ENSG00000168070_3 (sequence is synthesized)
tgtataaattcaaaatcagatatgggaagagtatcagaggagaagagatagaaaataaggaagtcatcacccaggagctggaggattctgtccgcgtggtcttgggaaacttggacaatc

SEQ ID NO: 548383 - DNA, 120 bp, Artificial Sequence
  ENSG00000168070_4 (sequence is synthesized)
ttcagccctttgctacagaacacttcattgtatttccctataaaagcaaatgggagagagtttcccacctgaaattcaaacatggggaaattatcttgatcccctacccatttgttttta

SEQ ID NO: 548384 - DNA, 120 bp, Artificial Sequence
  ENSG00000168070_5 (sequence is synthesized)
aaagcagtaggagctgtgatgaggaaacgaaaacacatggacgagcccagctcccccagcaggccagggctggacagaatagggaaagaaaaacccaacaaggattgcaggagactctgg

SEQ ID NO: 548385 - DNA, 120 bp, Artificial Sequence
  ENSG00000168070_6 (sequence is synthesized)
cctctgatatcactgatgtccagaaacaagattctgagtggggacacagcctgccagggcgaattgtcccacccctgcagcacaactcacctccacctaaggagcgagcagccaccggct

SEQ ID NO: 548386 - DNA, 120 bp, Artificial Sequence
  ENSG00000168070_7 (sequence is synthesized)
tctttgggtttctaagctctctcttcccgtttcgatatttcttcaggaagagcagccactcttgagccttccaaatgcagcgctggaaagaggatcatctcttgtagtgactcctcccga

SEQ ID NO: 548387 - DNA, 120 bp, Artificial Sequence
  ENSG00000168070_8 (sequence is synthesized)
gccattcttcctccaactctatccttttcttatgacacttcagtcgtggggaatgaggtccccatgctgagtcctctgtggttttatcgtgtcctttgcccctttataatagattttttc

SEQ ID NO: 548388 - DNA, 120 bp, Artificial Sequence
  ENSG00000168070_9 (sequence is synthesized)
ccccaatttaaaacattaagaatggaactttctaaaatgttcatgtcctgagggccggtttaggccttttgtcttcggcacttaggatcctaatgacaataaattatttatgaagagtta

SEQ ID NO: 548389 - DNA, 120 bp, Artificial Sequence
  ENSG00000168070_10 (sequence is synthesized)
agactgcctctggctcatactgggtgtttggccttctactcacatgaaaacggcctatggacaaacatcttgctcctgcctgattgttttccttacagattctgagtggggacacagcct

SEQ ID NO: 548390 - DNA, 120 bp, Artificial Sequence
  ENSG00000168070_11 (sequence is synthesized)
ggttttaattatttcctacaaactgagtcacaacctccacttgataacttggcttcctcctgctacatctcctttgcaaaggaactttatgtttttccatgggaatttaaagcctgtatt

SEQ ID NO: 548391 - DNA, 120 bp, Artificial Sequence
  ENSG00000168070_12 (sequence is synthesized)
ctttctcagttttcctagttgaaatgtcagcacctttgaggctgagagctttttgttttcaccagtttccagccttgggcagctctcttttgttgcagctggcatagagaaagattccgg

SEQ ID NO: 548392 - DNA, 120 bp, Artificial Sequence
  ENSG00000168070_13 (sequence is synthesized)
aggactgcctccttccagggctctgggaaacctcaccatcccaaccactgcctggtacttgacgttcaggaaactcgactgtaaatacacagacaaggctgctgtgtcttcatttaaatt

SEQ ID NO: 548393 - DNA, 120 bp, Artificial Sequence
  ENSG00000168070_14 (sequence is synthesized)
ggcaacatttgcaattgccttattccgacttcattttcattcctttctacccggttcctctagctttaggttttcctacagaagaagactgagcaggtgatcaactttacaaattggtgg

SEQ ID NO: 548394 - DNA, 120 bp, Artificial Sequence
  ENSG00000168070_15 (sequence is synthesized)
tggacaaggagttagagttctgggggttggccctggattccagtcctggcatagccaccacttagctgtgtgaccgttggcaaatcatatatcaacttggatcttaattgcctcatttgg

SEQ ID NO: 548395 - DNA, 120 bp, Artificial Sequence
  ENSG00000168070_16 (sequence is synthesized)
ccagggctggacagggccaagatagggacttccagccaaggccccagcaaaaagaagccccctgtggaaaccaggagaaatagggaaagaaaaacccaacaaggattgcaggagactctg

SEQ ID NO: 548396 - DNA, 120 bp, Artificial Sequence
  ENSG00000168070_17 (sequence is synthesized)
tcaagagtgggagagcaggggctgaactgctgagttcccgctgcgtcctgttgctatgctgcctgcacccttggtggggagaagagaagaggtggactgctgcggaggacctggcaaaca

SEQ ID NO: 548397 - DNA, 120 bp, Artificial Sequence
  ENSG00000168071_0 (sequence is synthesized)
gacttcctcttcctctcagggcaggtgcagctgccacagtgagacgggcaccccgacccgggcatggaggggggcaaggggcccaggctcagagacttcctgagtgggagtctggctacc

SEQ ID NO: 548398 - DNA, 120 bp, Artificial Sequence
  ENSG00000168071_1 (sequence is synthesized)
tgggcgctgggactggccgggctggtcggggaggcggaggactcggagggggaagaagaggaagaggaggaagagccgcccctttggttggagaagagattcctgcgcctcagcgatggg

SEQ ID NO: 548399 - DNA, 120 bp, Artificial Sequence
  ENSG00000168071_2 (sequence is synthesized)
gccctgctcctccgggtgctgggcatcattgcccccagctcccgagggggacctcggatgctcagaggccttgacggacctgctgcctggcgagtgtggaacctgaaccacctgtggggc

SEQ ID NO: 548400 - DNA, 120 bp, Artificial Sequence
  ENSG00000168071_3 (sequence is synthesized)
cgactgagggacttctaccaggaggagctgcagctgctgatcctgtcgccacccccagacctccagacattgggatttgaccctctctcagaagaagcggtggagcagctggaaggcgtt

SEQ ID NO: 548401 - DNA, 120 bp, Artificial Sequence
  ENSG00000168071_4 (sequence is synthesized)
cttcggctactgttgggagcgtcagtacagtgtgagcaccgggaactcttcatccgccacatccagggcctcagtctcgaggtccagagcgagctggccgctgccatccaggaggtgacc

SEQ ID NO: 548402 - DNA, 120 bp, Artificial Sequence
  ENSG00000168071_5 (sequence is synthesized)
cagccgggggccggcgtggtgctggcactgtctgggccagatcctggggagctggcacctgccgagctggagatgctgtcccggagcctgatggggacactgtcgaagctggcacgggag

SEQ ID NO: 548403 - DNA, 120 bp, Artificial Sequence
  ENSG00000168071_6 (sequence is synthesized)
cgtgacctgggggcccagcggctggctgaactgctgctggagcgagaacccctctgcttgaggcctgaggctccctctagggctcccgccgagggcccctcgcaccatctggccctgcag

SEQ ID NO: 548404 - DNA, 120 bp, Artificial Sequence
  ENSG00000168071_7 (sequence is synthesized)
ctggccaacgccaaggctcagctgcggcgtctgcggcaggagctggaggagaaggccgagctgctgctagactcccaggccgaggtgcagggtttggaggccgaaataagaaggctccgc

SEQ ID NO: 548405 - DNA, 120 bp, Artificial Sequence
  ENSG00000168071_8 (sequence is synthesized)
caggaggcccaggcgctgtcgggacaggccaagcgggccgagctgtaccgcgaggaggcagaggcgctgcgggagcgggccggccgcctgccccgcctgcaggaggagctgaggcgctgc

SEQ ID NO: 548406 - DNA, 120 bp, Artificial Sequence
  ENSG00000168071_9 (sequence is synthesized)
cgcgagcggctgcaggcggctgaggcctacaagagtcagctggaggaggagcgggtgctctcgggggtgctggaggcgtccaaggcgctgctggaagagcagctggaggctgcccgagag

SEQ ID NO: 548407 - DNA, 120 bp, Artificial Sequence
  ENSG00000168071_10 (sequence is synthesized)
cgctgcgcccggctgcacgagacccagcgcgagaacctgctgctgcgaacccggctgggcgaggcccatgcggagctggactctctgcggcatcaggtggaccagctggctgaggagaat

SEQ ID NO: 548408 - DNA, 120 bp, Artificial Sequence
  ENSG00000168071_11 (sequence is synthesized)
gtggagctggagctggagcttcagcggagcttggagccacctccaggatcccctggggaggcacccctagcaggagcggccccctcgctgcaagatgaggtgagggaggcagaggctggg

SEQ ID NO: 548409 - DNA, 120 bp, Artificial Sequence
  ENSG00000168071_12 (sequence is synthesized)
cggcttcggacccttgagagggagaaccgggagcttcgggggctgcttcaggtgcttcaggggcagccagggggccagcaccccctgctggaggcaccgagagaggaccctgttcttcca

SEQ ID NO: 548410 - DNA, 120 bp, Artificial Sequence
  ENSG00000168071_13 (sequence is synthesized)
gtgctggaggaggctccccagactcctgtggccttcgaccacagccctcagggcttggttcagaaggcaagggatggaggcccccaggccttggacttggctcccccggcattagactca

SEQ ID NO: 548411 - DNA, 120 bp, Artificial Sequence
  ENSG00000168071_14 (sequence is synthesized)
gtgctcgaggcatcagctgagtgtccccaggcacctgattcagacccacaggaggcagagagtccccttcaggcagctgccatggacccccaggcctcagactggtccccgcaagagtca

SEQ ID NO: 548412 - DNA, 120 bp, Artificial Sequence
  ENSG00000168071_15 (sequence is synthesized)
ggctctcctgtggagacacaggagtccccggagaaggctggccgtagatcctctctccagagccctgcctctgtggccccacctcagggtccagggaccaaaattcaggccccgcagttg

SEQ ID NO: 548413 - DNA, 120 bp, Artificial Sequence
  ENSG00000168071_16 (sequence is synthesized)
ctgggaggagagacagagggaagagaggctccccaaggcgagttggtgcctgaggcctgggggttgagacaggagggccctgagcacaagccagggccttcggagcccagctctgtgcag

SEQ ID NO: 548414 - DNA, 120 bp, Artificial Sequence
  ENSG00000168071_17 (sequence is synthesized)
ctggaggagcaggagggcccaaaccagggcctggacctggccacgggacaagcagaggccagagagcatgaccagaggctggaagggacggtcagggacccagcctggcaaaaaccacag

SEQ ID NO: 548415 - DNA, 120 bp, Artificial Sequence
  ENSG00000168071_18 (sequence is synthesized)
cagaagtcagaaggggctcttgaggtccaggtctgggaaggcccaatcccaggggagagcctggccagtggtgtcgcagagcaggaggccctcagggaggaggtggcacagttgaggaga

SEQ ID NO: 548416 - DNA, 120 bp, Artificial Sequence
  ENSG00000168071_19 (sequence is synthesized)
aaggctgaggcccttggagatgagctggaagcccaggcccgcaagctggaggcccaaaacacggaggctgcccgcctctccaaggagctggcccaagcgcgaagggcagaggccgaggcc

SEQ ID NO: 548417 - DNA, 120 bp, Artificial Sequence
  ENSG00000168071_20 (sequence is synthesized)
ggcccaggcctgggagcaagcccggctgcgggaggcagtggaggctgctggccaggagctggagtctgcgtcccaggaacgggaggcgctggtggaggcgctggcagcagcgggccggga

SEQ ID NO: 548418 - DNA, 120 bp, Artificial Sequence
  ENSG00000168071_21 (sequence is synthesized)
gcggaggcagtgggagcgtgaggggtccaggctgcgggcccagtcggaggccgccgaggaacggatgcaggtgctggagagcgagggccgccagcacttggaggaggctgagagggagcg

SEQ ID NO: 548419 - DNA, 120 bp, Artificial Sequence
  ENSG00000168071_22 (sequence is synthesized)
ccgggagaaggaggccctccaggcggagctggagaaagctgtggtgcggggcaaggagttgggggaccggctggagcatttgcagcgtgagctggagcaggcggctctcgagcgccagga

SEQ ID NO: 548420 - DNA, 120 bp, Artificial Sequence
  ENSG00000168071_23 (sequence is synthesized)
atttctgcgagaaaaggaaagccagcaccagaggtaccagggcttggagcagcggctggaagctgagctgcaggcggcggcgaccagcaaggaggaggcgctgatggagctcaagaccag

SEQ ID NO: 548421 - DNA, 120 bp, Artificial Sequence
  ENSG00000168071_24 (sequence is synthesized)
ggccctgcagctggaagaggagctgttccagctgcgccagggccccgcggggctggggcccaaaaagcgtgcggagcctcagctggtggagacccagaatgtgcggcttattgaggtgga

SEQ ID NO: 548422 - DNA, 120 bp, Artificial Sequence
  ENSG00000168071_25 (sequence is synthesized)
gcgcagtaatgcgatgctggtggcagagaaggcagctttgcaggggcagctgcagcacctggaggggcagctggggagcctgcagggccgtgcccaggagctgctgctgcagagccagcg

SEQ ID NO: 548423 - DNA, 120 bp, Artificial Sequence
  ENSG00000168071_26 (sequence is synthesized)
ggcgcaggagcacagcagccgcctgcaggccgagaagtctgtgctggagattcagggccaggagctgcaccggaagctggaggtgctggaggaggaggtgcgggcggcacggcagtccca

SEQ ID NO: 548424 - DNA, 120 bp, Artificial Sequence
  ENSG00000168071_27 (sequence is synthesized)
ggaggagacccgcgggcagcagcaggccctgcttcgggaccacaaggccctggcacagctgcagcggcggcaggaggccgagctagagggactgctggtgcggcaccgagacctcaaggc

SEQ ID NO: 548425 - DNA, 120 bp, Artificial Sequence
  ENSG00000168071_28 (sequence is synthesized)
caacatgcgggcactggagctggcccaccgggagctgcagggccggcacgagcagctgcaggcccagcgggccagcgtggaggcacaggaggtggccctgctggcagagcgtgaacgcct

SEQ ID NO: 548426 - DNA, 120 bp, Artificial Sequence
  ENSG00000168071_29 (sequence is synthesized)
gatgcaagatgggcatcggcagcggggcctggaggaggagctgcggaggcttcagagcgagcacgacagggctcagatgctgctggcagagttgtctcgggagcggggtgagctgcaggg

SEQ ID NO: 548427 - DNA, 120 bp, Artificial Sequence
  ENSG00000168071_30 (sequence is synthesized)
tgaacgcggggagctacggggccggctggcgcggctggagctggagcgggcacagctggagatgcagagccagcagctgcgcgagtccaaccagcagctggacctgagcgcctgccggct

SEQ ID NO: 548428 - DNA, 120 bp, Artificial Sequence
  ENSG00000168071_31 (sequence is synthesized)
gaccacgcagtgtgagctattgacacagctgcgaagtgcccaggaagaggagaaccggcagctgctggctgaagttcaggccctgagccgggagaacagggagctcctggagcgcagcct

SEQ ID NO: 548429 - DNA, 120 bp, Artificial Sequence
  ENSG00000168071_32 (sequence is synthesized)
ggagagtcgggaccacctgcaccgcgaacagcgggagtacctggaccagcttaatgccctgcgccgcgagaagcagaagctcgtggagaagatcatggaccaataccgcgtgctggagcc

SEQ ID NO: 548430 - DNA, 120 bp, Artificial Sequence
  ENSG00000168071_33 (sequence is synthesized)
ctggagcctgtgcccctgccccggaccaagaagggcagctggctggcagacaaggtgaagaggctgatgcggccccggcgggaggggggcccccctggggggctgcgcctgggggccgat

SEQ ID NO: 548431 - DNA, 120 bp, Artificial Sequence
  ENSG00000168071_34 (sequence is synthesized)
cagcaccgagagcctggggggccccccggagacggagcttcctgagggcagggaggcagatgggacagggtccccttccccggcacccatgcgccgggcccagagctccctctgcctgcg

SEQ ID NO: 548432 - DNA, 120 bp, Artificial Sequence
  ENSG00000168071_35 (sequence is synthesized)
ggatgagaccttggcaggcgggcagcggcggaaactcagctcaaggttcccggtggggcgaagctctgagtcattcagccctggggacacccctaggcaacgattccgacagcgccatcc

SEQ ID NO: 548433 - DNA, 120 bp, Artificial Sequence
  ENSG00000168071_36 (sequence is synthesized)
aggccccctgggggcgcccgtctcccacagcaaaggacctggtgtgggatgggagaactccgctgagaccctgcaggaacacgaaacagatgccaaccgagagggccctgaggtacagga

SEQ ID NO: 548434 - DNA, 120 bp, Artificial Sequence
  ENSG00000168071_37 (sequence is synthesized)
accggagaaacgtcccctcaccccatccctcagccagtgacaccgtgggaacagcaggcttgggagtgcagccttctcggcactggagtgtcagcggaggccccaggcagcccaagagct

SEQ ID NO: 548435 - DNA, 120 bp, Artificial Sequence
  ENSG00000168071_38 (sequence is synthesized)
cagggagccagggaccccaaggggagtccttggacaaggaggcctgggccctgagatcctccacggtcagcgccggggcccggagatggagctgggacgagtgtgtggacaggggggatg

SEQ ID NO: 548436 - DNA, 120 bp, Artificial Sequence
  ENSG00000168071_39 (sequence is synthesized)
gctggcccccacgagcagctccaggctggagttctggttcttccaggtggctcccgctgaggcagcggtctctgggggatcccccagctgaaggaggctggcaggagttggcaagagaac

SEQ ID NO: 548437 - DNA, 120 bp, Artificial Sequence
  ENSG00000168071_40 (sequence is synthesized)
cccctgccctgtccaggtgggaagctgagtcccagtgctgggggactgtggcctgggctgatcttgagccttaactggacatgaggggcatgagaataaagctgaactgcagcctcctga

SEQ ID NO: 548438 - DNA, 120 bp, Artificial Sequence
  ENSG00000168071_41 (sequence is synthesized)
tatcccgtgcagtgtgagtgtggactcacagtgggcccgggggtgggggtgccccatgcagtgtgagtgtgggcctgtggtaggcactagggggtgcccccgccacctggctattgctaa

SEQ ID NO: 548439 - DNA, 120 bp, Artificial Sequence
  ENSG00000168071_42 (sequence is synthesized)
aggtgccgcccctgccacagcctctagcagctctcagtggccccatcctgaaagtgggttgggggtgtggggtcctgtctggcctcccctccccggcataacttctctggccagcactcg

SEQ ID NO: 548440 - DNA, 120 bp, Artificial Sequence
  ENSG00000168071_43 (sequence is synthesized)
ctcccacagcaaaggtgagggacaagggtcactgtaccagccagccccccaactctttgtggacccaccagctccttgggggaggaggcttccttcttgtcccctgtgtctcctgcaagc

SEQ ID NO: 548441 - DNA, 120 bp, Artificial Sequence
  ENSG00000168071_44 (sequence is synthesized)
gggtgagtgggggactgtggaaggagtagtattctttgtcctgcctggggcccctggcagaacctcattcatccattctttcattcgacaatgatcctttaccaagtgccaggtgacgtg

SEQ ID NO: 548442 - DNA, 120 bp, Artificial Sequence
  ENSG00000168071_45 (sequence is synthesized)
ctggcaggggacacagcagggaacgttctggtgtgaggaggcagatagtaaacaatttgcctaaaaataattattatctacaacagccctgtccactagaaatatggtgtgaaccacatg

SEQ ID NO: 548443 - DNA, 90 bp, Artificial Sequence
  ENSG00000168071_46 (sequence is synthesized)
ttaataacatttaactcaatatgcctacgctattaccatttcagcatgtagccagtgtaaaaatcatgaatgagctattagacgtgatgt

SEQ ID NO: 548444 - DNA, 61 bp, Artificial Sequence
  ENSG00000168071_47 (sequence is synthesized)
ctcccaggttcaaaggctaattttgtataattattattattttttttagtagagacggggt

SEQ ID NO: 548445 - DNA, 72 bp, Artificial Sequence
  ENSG00000168071_48 (sequence is synthesized)
cagccagacgtgatttttttcatagtaagtctttggcagtttcggaggccaaggcaggcagatcacttgagg

SEQ ID NO: 548446 - DNA, 87 bp, Artificial Sequence
  ENSG00000168071_49 (sequence is synthesized)
cgtgatttttttcatagtaagtctttggcagtttcaagttagagaccagcctagccaaaatggtgaaatcccgtctctactaaaact

SEQ ID NO: 548447 - DNA, 120 bp, Artificial Sequence
  ENSG00000168071_50 (sequence is synthesized)
aaacaaaaaacaaaaaacaaaaaaacatagtaggtctttgaagcacgtcacaggccaaccccatctcacctacttagctccgccctgggcagctcagccctagacccggctggaccatca

SEQ ID NO: 548448 - DNA, 120 bp, Artificial Sequence
  ENSG00000168071_51 (sequence is synthesized)
atcaggaggcgctaatgctctgggaagaaaggagagcaggggaggggtcaggagctcaggagctctgggcaggctggttggagttttagtaactggggtgctggggtgggcctcagagag

SEQ ID NO: 548449 - DNA, 120 bp, Artificial Sequence
  ENSG00000168071_52 (sequence is synthesized)
gatgtgaaattggagcaaagacttggaggggagagtttgtcgtgtggacatacctgagaacagcattctgggcagagggaaccgctgagggaacagcaggcgtggtgcagctggaagcgg

SEQ ID NO: 548450 - DNA, 120 bp, Artificial Sequence
  ENSG00000168071_53 (sequence is synthesized)
ggggtattggcaggtcgggggtgggcagaaggtgctcgagcctgtgggcctcctgggactctgggagtcctcctgagggaagcagatctcagctgagcctttccctctaggccctgaggt

SEQ ID NO: 548451 - DNA, 120 bp, Artificial Sequence
  ENSG00000168071_54 (sequence is synthesized)
ctggcagcatcctggcgccccctgcccccccagcccccactgtcagctcctgacttcctgtccctccagccctccgtggccttttccctgtagccaaggtctctcacccgacccacctct

SEQ ID NO: 548452 - DNA, 120 bp, Artificial Sequence
  ENSG00000168071_55 (sequence is synthesized)
gctgagcctctctagctgtctcgctgtcacatggctggggtggcagcccaccgggcgcatccacctttcactgcgcacatgaagaaccgtgggctcagagaggagctggagaaagctgtg

SEQ ID NO: 548453 - DNA, 120 bp, Artificial Sequence
  ENSG00000168071_56 (sequence is synthesized)
aggaggaggggcgagattgggtcccgagggcagagaggcaggttctctggaggggacagtcacaggtggagaaatgggaggagcgggtgctctcgggggtgctggaggcgtccaaggcgc

SEQ ID NO: 548454 - DNA, 120 bp, Artificial Sequence
  ENSG00000168071_57 (sequence is synthesized)
gggtcatctgtcctcctagtcttgcctctggattcttggctagctacttgcctcactccccatgtggggcctgttggagagagcactgtgctgggagtcaggtggccgtgttgacttatc

SEQ ID NO: 548455 - DNA, 120 bp, Artificial Sequence
  ENSG00000168071_58 (sequence is synthesized)
tggggtctcattttccccattctgcacatggacagaacttctgctgtggatgactgctccgcctgtctcacccgaggtcctccactgcctagggagctcagtgtttggcatcaaggaagc

SEQ ID NO: 548456 - DNA, 120 bp, Artificial Sequence
  ENSG00000168071_59 (sequence is synthesized)
cagcgatggtttctgatacccaggctgtgtgcgggctccacacggagggtggggtggtggtggggcccaatcccaggctgccatcctcagggagctcacaggacagtcaggatagaggca

SEQ ID NO: 548457 - DNA, 120 bp, Artificial Sequence
  ENSG00000168071_60 (sequence is synthesized)
agaaaacaggtgacaataactaggtgccaggggctgtgaggaggccatgcaggggcttgggagggtggtacccagcaagatacccagcaggtgcatgcgagtctatcagggaaggttttg

SEQ ID NO: 548458 - DNA, 81 bp, Artificial Sequence
  ENSG00000168071_61 (sequence is synthesized)
tacccagcaggtgcatgcgagtctatcagggaaggttttgtggagaaggtggggttgaaacagaggcttagagaaggcccc

SEQ ID NO: 548459 - DNA, 73 bp, Artificial Sequence
  ENSG00000168071_62 (sequence is synthesized)
aggtcaggagatcgagagcatcctgatgaaattagctgttagctgggcatggtagtgggcgcctgtagtccca

SEQ ID NO: 548460 - DNA, 80 bp, Artificial Sequence
  ENSG00000168077_0 (sequence is synthesized)
cggcggggcttccccaggctgcgaccccgcgggaccctccactcctcccgccgcctccgcagcccgcgcgccggagcatg

SEQ ID NO: 548461 - DNA, 80 bp, Artificial Sequence
  ENSG00000168077_1 (sequence is synthesized)
catgagtcccggccggagccccacggccgcgggcggcgcctaggacggcgatccgcgccctggaggatccgccggccgcc

SEQ ID NO: 548462 - DNA, 120 bp, Artificial Sequence
  ENSG00000168077_2 (sequence is synthesized)
tccactacagctccagccgcctgcagcggggccctcctgaggccccagaggaagagaccatgaaagtgaggtcggccggcggcgatggagatgccttgtgcgttacagaagaggacctgg

SEQ ID NO: 548463 - DNA, 120 bp, Artificial Sequence
  ENSG00000168077_3 (sequence is synthesized)
cgggtgacgacgaggacatgccgaccttcccatgcacccagaagggccggccagggccccgctgcagccgctgccagaagaacctatctttgcacacatcggtgcggattctttacctct

SEQ ID NO: 548464 - DNA, 120 bp, Artificial Sequence
  ENSG00000168077_4 (sequence is synthesized)
tcctggccctgctcctggtggccgtggctgtgttggcctctctggttttcagaaaagtggactctctctccgaagacatctccttgacccagtctatttatgacaagaagcttgtgttaa

SEQ ID NO: 548465 - DNA, 120 bp, Artificial Sequence
  ENSG00000168077_5 (sequence is synthesized)
tgcagaaaaatctccagggcctggatccgaaagccctgaacaactgctctttctgccatgaagctgggcagctggggccagagatccgaaaactgcaggaggagctggagggaattcaga

SEQ ID NO: 548466 - DNA, 120 bp, Artificial Sequence
  ENSG00000168077_6 (sequence is synthesized)
agctgcttctggcccaggaggtgcagctggaccagaccttacaggcccaggaggtgctctccaccaccagcagacaaatctcccaggagatgggcagttgctccttctccatccaccagg

SEQ ID NO: 548467 - DNA, 120 bp, Artificial Sequence
  ENSG00000168077_7 (sequence is synthesized)
ttaaccagtctctggggctcttcctggcccaggtgagaggctggcaggccaccacagctggcctggacctctctctgaaggacctcacccaggagtgctacgatgtcaaggctgcagtgc

SEQ ID NO: 548468 - DNA, 120 bp, Artificial Sequence
  ENSG00000168077_8 (sequence is synthesized)
accagatcaacttcaccgtggggcagacttccgagtggatccacgggatccagcggaagacagacgaggagaccctgaccctccagaagattgtcaccgactggcagaactacacacggc

SEQ ID NO: 548469 - DNA, 120 bp, Artificial Sequence
  ENSG00000168077_9 (sequence is synthesized)
tcttcagcggcctgcgcaccacctccaccaagactggagaggcggtcaagaacatccaggccaccctgggggcctcctcacagcgcatcagccagaactcagagagcatgcacgacctgg

SEQ ID NO: 548470 - DNA, 120 bp, Artificial Sequence
  ENSG00000168077_10 (sequence is synthesized)
tactccaggtcatgggcttgcagctgcagctggataacatctcgtccttcctggatgaccacgaagagaacatgcatgatcttcagtaccatacccactacgcccagaaccgcactgtgg

SEQ ID NO: 548471 - DNA, 120 bp, Artificial Sequence
  ENSG00000168077_11 (sequence is synthesized)
agaggtttgagtctctggaaggacgcatggcttctcacgagattgaaattggcaccatcttcaccaacatcaatgccaccgacaaccacgtgcacagcatgctcaagtacctggatgacg

SEQ ID NO: 548472 - DNA, 120 bp, Artificial Sequence
  ENSG00000168077_12 (sequence is synthesized)
tgcggctctcctgcacgctgggcttccacacccatgccgaggagctctactacctgaacaagtctgtctccatcatgctgggcaccacagacctgctccgggagcgcttcagcctgctca

SEQ ID NO: 548473 - DNA, 120 bp, Artificial Sequence
  ENSG00000168077_13 (sequence is synthesized)
gtgcccggctggacctcaacgtccggaacctctccatgatcgtggaggagatgaaggcagtggacacacagcatggagaaatccttcgcaatgtcaccatcctacgaggtgcccccggcc

SEQ ID NO: 548474 - DNA, 120 bp, Artificial Sequence
  ENSG00000168077_14 (sequence is synthesized)
ctccaggaccaagaggattcaaaggagatatgggcgtgaaagggcctgttggcggcagaggcccgaaaggagaccccggcagcttgggccccctgggaccccagggtcctcaggggcaac

SEQ ID NO: 548475 - DNA, 120 bp, Artificial Sequence
  ENSG00000168077_15 (sequence is synthesized)
ctcaaagggcagctttggaactggagggccgagaggacagccaggcccaaaaggggacatagggcccccagggccagaagggcccccggggtctccagggccctcagggcctcagggaaa

SEQ ID NO: 548476 - DNA, 120 bp, Artificial Sequence
  ENSG00000168077_16 (sequence is synthesized)
accgggaattgcagggaagacagggtcaccaggccagcggggggccatggggcctaagggtgaaccagggatccagggtccccctggtctcccggggcctccaggtccaccaggaagcca

SEQ ID NO: 548477 - DNA, 120 bp, Artificial Sequence
  ENSG00000168077_17 (sequence is synthesized)
gagcttctactgaggagggctgtggcagagccactgtcacacagaatgccggaggggcgcagagcagatccaggccccagaaagcctcacctacagacagctgtggtcctctgattccaa

SEQ ID NO: 548478 - DNA, 120 bp, Artificial Sequence
  ENSG00000168077_18 (sequence is synthesized)
tgagggggctccccagggctgaccctgcagctttgggctcccccatagtgactgtgccataggaaagcagcccctcctcacacatacatgtgcacatgcacacacatgcatgcacacaca

SEQ ID NO: 548479 - DNA, 120 bp, Artificial Sequence
  ENSG00000168077_19 (sequence is synthesized)
tgcacacatacacgcacatgcacacatacacatgcatgcacacatacacaggcatacatgcatgcacacacacatgcacgcacacacacatgcacacatacacgtgcacacatacacagg

SEQ ID NO: 548480 - DNA, 120 bp, Artificial Sequence
  ENSG00000168077_20 (sequence is synthesized)
cacacatgcatgcacacatacacatgcacacacacatgcacacatatatgcacaggcacacacatgtacgcacacacacatgcactgcacacatatccatgcacacaaacacatatatac

SEQ ID NO: 548481 - DNA, 120 bp, Artificial Sequence
  ENSG00000168077_21 (sequence is synthesized)
acatgcacatacacagatttttctgctggccaggtgggccaactgggtttccctggctgggcaggaggagagggcagaggaagaccccctctcctgtgactgagcctgccagggaggcag

SEQ ID NO: 548482 - DNA, 120 bp, Artificial Sequence
  ENSG00000168077_22 (sequence is synthesized)
ctacctcgggaggaaggtctcacatctgtctctgggcacccatgctggccagcagtttcccagggctccctggggttgaaaagccccaaggaaacctttgcgggtggggcgttactgcca

SEQ ID NO: 548483 - DNA, 120 bp, Artificial Sequence
  ENSG00000168077_23 (sequence is synthesized)
aaactccagaggcaaagtggacctggcaaccacaagaccctccccataagcaggggaccagcatacccgggagctgtccctgtctgtcacagcacagtggggccacgaggctgacattct

SEQ ID NO: 548484 - DNA, 120 bp, Artificial Sequence
  ENSG00000168077_24 (sequence is synthesized)
ctggccttgcacacagtgccccctgagaagttcaacatttatttcttcacgtgtccagaaaattcctcaattcatccttgcctctgcccttcaggagcagcctggaaggaatccaagcag

SEQ ID NO: 548485 - DNA, 120 bp, Artificial Sequence
  ENSG00000168077_25 (sequence is synthesized)
gagtttcatctgcatgggggcactctgcaggccctggaacattgggcctgagtggagatgggagacagaggcaggccagaaggttctctctgcacagctgcctcccttgctctccctgag

SEQ ID NO: 548486 - DNA, 120 bp, Artificial Sequence
  ENSG00000168077_26 (sequence is synthesized)
gctggcctgccccattccccaagggggctcctctggagtggtggggaggattaggctgcagaagggccaaccccttgcaacagggcagctctcgcctcccgcacacggctctcctgatca

SEQ ID NO: 548487 - DNA, 120 bp, Artificial Sequence
  ENSG00000168077_27 (sequence is synthesized)
cagctgcatgccgaccttgtcccaccgggacccacaatggcccgagccctctttgcatgggcagccagctggactaggagtgggaagggcctggacactcacagaggccccctctgtcat

SEQ ID NO: 548488 - DNA, 120 bp, Artificial Sequence
  ENSG00000168077_28 (sequence is synthesized)
cactccttggcacccaccaacttcctgcacacactggcagagaggggcgctgggaaatcaccccacagggtggaggtctcctgttggctacactctaaagctgctttgccttcatgttca

SEQ ID NO: 548489 - DNA, 120 bp, Artificial Sequence
  ENSG00000168077_29 (sequence is synthesized)
aacagattcaggcaccaccccctccaccgcccgcaaggttagggcatagagttgtctccttcccaacacggacccagagagcagcccttccctgctcaaagcctttccgcaccctcctga

SEQ ID NO: 548490 - DNA, 120 bp, Artificial Sequence
  ENSG00000168077_30 (sequence is synthesized)
ctgtcctggatgtgcaactggtttgcactgcacaccccacggccatgtaactctcctgtccacatatgataataccattctgcatagtattactgactcagtaaagagctatttccagga

SEQ ID NO: 548491 - DNA, 120 bp, Artificial Sequence
  ENSG00000168077_31 (sequence is synthesized)
gtttactatccttaatggtaagcatcaccttaagcacatattatgccttgagacactagccaattgtggtacatgaaaataatttataaataaataaatttacctatattaggaagatga

SEQ ID NO: 548492 - DNA, 120 bp, Artificial Sequence
  ENSG00000168078_0 (sequence is synthesized)
gaaagccaggagggttcgaattgcaacggcagctgccgggcgtatgtgttggtgctagaggcagctgcagggtctcgctgggggccgctcgggaccaattttgaagaggtacttggccac

SEQ ID NO: 548493 - DNA, 120 bp, Artificial Sequence
  ENSG00000168078_1 (sequence is synthesized)
gacttattttcacctccgacctttccttccaggcggtgagactctggactgagagtggctttcacaatggaagggatcagtaatttcaagacaccaagcaaattatcagaaaaaaagaaa

SEQ ID NO: 548494 - DNA, 120 bp, Artificial Sequence
  ENSG00000168078_2 (sequence is synthesized)
tctgtattatgttcaactccaactataaatatcccggcctctccgtttatgcagaagcttggctttggtactggggtaaatgtgtacctaatgaaaagatctccaagaggtttgtctcat

SEQ ID NO: 548495 - DNA, 120 bp, Artificial Sequence
  ENSG00000168078_3 (sequence is synthesized)
tctccttgggctgtaaaaaagattaatcctatatgtaatgatcattatcgaagtgtgtatcaaaagagactaatggatgaagctaagattttgaaaagccttcatcatccaaacattgtt

SEQ ID NO: 548496 - DNA, 120 bp, Artificial Sequence
  ENSG00000168078_4 (sequence is synthesized)
ggttatcgtgcttttactgaagccaatgatggcagtctgtgtcttgctatggaatatggaggtgaaaagtctctaaatgacttaatagaagaacgatataaagccagccaagatcctttt

SEQ ID NO: 548497 - DNA, 120 bp, Artificial Sequence
  ENSG00000168078_5 (sequence is synthesized)
ccagcagccataattttaaaagttgctttgaatatggcaagagggttaaagtatctgcaccaagaaaagaaactgcttcatggagacataaagtcttcaaatgttgtaattaaaggcgat

SEQ ID NO: 548498 - DNA, 120 bp, Artificial Sequence
  ENSG00000168078_6 (sequence is synthesized)
tttgaaacaattaaaatctgtgatgtaggagtctctctaccactggatgaaaatatgactgtgactgaccctgaggcttgttacattggcacagagccatggaaacccaaagaagctgtg

SEQ ID NO: 548499 - DNA, 120 bp, Artificial Sequence
  ENSG00000168078_7 (sequence is synthesized)
tttgcctttggccttactttgtgggaaatgatgactttatcgattccacacattaatctttcaaatgatgatgatgatgaagataaaacttttgatgaaagtgattttgatgatgaagca

SEQ ID NO: 548500 - DNA, 120 bp, Artificial Sequence
  ENSG00000168078_8 (sequence is synthesized)
tactatgcagcgttgggaactaggccacctattaatatggaagaactggatgaatcataccagaaagtaattgaactcttctctgtatgcactaatgaagaccctaaagatcgtccttct

SEQ ID NO: 548501 - DNA, 120 bp, Artificial Sequence
  ENSG00000168078_9 (sequence is synthesized)
gctgcacacattgttgaagctctggaaacagatgtctagtgatcatctcagctgaagtgtggcttgcgtaaataactgtttattccaaaatatttacatagttactatcagtagttatta

SEQ ID NO: 548502 - DNA, 120 bp, Artificial Sequence
  ENSG00000168078_10 (sequence is synthesized)
gactctaaaattggcatatttgaggaccatagtttcttgttaacatatggataactatttctaatatgaaatatgcttatattggctataagcacttggaattgtactgggttttctgta

SEQ ID NO: 548503 - DNA, 120 bp, Artificial Sequence
  ENSG00000168078_11 (sequence is synthesized)
aagttttagaaactagctacataagtactttgatactgctcatgctgacttaaaacactagcagtaaaacgctgtaaactgtaacattaaattgaatgaccattacttttattaatgatc

SEQ ID NO: 548504 - DNA, 120 bp, Artificial Sequence
  ENSG00000168078_12 (sequence is synthesized)
tttcttaaatattctatattttaatggatctactgacattagcactttgtacagtacaaaataaagtctacatttgtttaaaacactgaaccttttgctgatgtgtttatcaaatgataa

SEQ ID NO: 548505 - DNA, 120 bp, Artificial Sequence
  ENSG00000168078_13 (sequence is synthesized)
ctggaagctgaggagaatatgcctcaaaaagagtagctccttggatacttcagactctggttacagattgtcttgatctcttggatctcctcagatctttggtttttgctttaatttatt

SEQ ID NO: 548506 - DNA, 120 bp, Artificial Sequence
  ENSG00000168078_14 (sequence is synthesized)
aaatgtattttccatactgagtttaaaatttattaatttgtaccttaagcatttcccagctgtgtaaaaacaataaaactcaaataggatgataaagaataaaggacactttgggtacca

SEQ ID NO: 548507 - DNA, 120 bp, Artificial Sequence
  ENSG00000168078_15 (sequence is synthesized)
attcaacacagatgtgagcgtttggagagagcttcagccttcagcacaggcaactgtgttctattcaccgggctgtgctcctcggaagggctggtggttcctgtaaaagtttgtgctccc

SEQ ID NO: 548508 - DNA, 120 bp, Artificial Sequence
  ENSG00000168078_16 (sequence is synthesized)
cgcgcctttccttccttccctcgtctttggcgcctgcgggcaccgggagtcctgggagagggaggaggaacggcgaatcggcggggcgtgtccttcacgccgccccgtagctcggggccg

SEQ ID NO: 548509 - DNA, 120 bp, Artificial Sequence
  ENSG00000168078_17 (sequence is synthesized)
aagctggcgcagcgcgcgactttttgaaagccaggagggttcgaattgcaacggcagctgccgggcgtatgtgttggtgctagaggcagctgcagggtctcgctgggggccgctcgggac

SEQ ID NO: 548510 - DNA, 120 bp, Artificial Sequence
  ENSG00000168079_0 (sequence is synthesized)
atacggactggcggcgagagcagctgcagttcgcatctcaggcagtacctagaggagctgccggtgcctcctcagaacatctcctgatcgctacccaggaccaggcaccaaggacaggga

SEQ ID NO: 548511 - DNA, 120 bp, Artificial Sequence
  ENSG00000168079_1 (sequence is synthesized)
gtcccaggcgcacaccccccattctgggtcccccaggcccagacccccactctgccacaggttgcatcttgacctggtcctcctgcagaagtggcccctgtggtcctgctctgagactcg

SEQ ID NO: 548512 - DNA, 120 bp, Artificial Sequence
  ENSG00000168079_2 (sequence is synthesized)
tccctgggcgcccctgcagcccctttctatgactccatctggatttggctggctgtggggacgcggtccgaggggcggcctggctctcagcgtggtggcagccagctctctggccaccat

SEQ ID NO: 548513 - DNA, 120 bp, Artificial Sequence
  ENSG00000168079_3 (sequence is synthesized)
ggcaaatgctgagatctgaggggacaaggctctacagcctcagccaggggcactcagctgttgcagggtgtgatggagaacaaagctatgtacctacacaccgtcagcgactgtgacacc

SEQ ID NO: 548514 - DNA, 120 bp, Artificial Sequence
  ENSG00000168079_4 (sequence is synthesized)
agctccatctgtgaggattcctttgatggcaggagcctgtccaagctgaacctgtgtgaggatggtccatgtcacaaacggcgggcaagcatctgctgtacccagctggggtccctgtcg

SEQ ID NO: 548515 - DNA, 120 bp, Artificial Sequence
  ENSG00000168079_5 (sequence is synthesized)
gccctgaagcatgctgtcctggggctctacctgctggtcttcctgattcttgtgggcatcttcatcttagcagtgtccaggccgcgcagctcccctgacgacctgaaggccctgactcgc

SEQ ID NO: 548516 - DNA, 120 bp, Artificial Sequence
  ENSG00000168079_6 (sequence is synthesized)
aatgtgaaccggctgaatgagagcttccgggacttgcagctgcggctgctgcaggctccgctgcaagcggacctgacggagcaggtgtggaaggtgcaggacgcgctgcagaaccagtca

SEQ ID NO: 548517 - DNA, 120 bp, Artificial Sequence
  ENSG00000168079_7 (sequence is synthesized)
gtcagactcgttgctggcgctggcgggcgcagtgcagcggctggagggcgcgctgtgggggctgcaggcgcaggcggtgcagaccgagcaggcggtggccctgctgcgggaccgcacggg

SEQ ID NO: 548518 - DNA, 120 bp, Artificial Sequence
  ENSG00000168079_8 (sequence is synthesized)
cagagcgacacggcgcagctggagctctaccagctgcaggtggagagcaacagtagccagctgctgctgaggcgccacgcgggcctgctggacgggctggcgcgcagggtgggcatcctg

SEQ ID NO: 548519 - DNA, 120 bp, Artificial Sequence
  ENSG00000168079_9 (sequence is synthesized)
ggcgaggagctggccgacgtgggcggcgtgctgcgcggcctcaaccacagcctgtcctacgacgtggccctccaccgcacgcggctgcaggacctgcgggtgctggtgagcaacgccagc

SEQ ID NO: 548520 - DNA, 120 bp, Artificial Sequence
  ENSG00000168079_10 (sequence is synthesized)
gaggacacgcgccgcctgcgcctggcgcacgtaggcatggagctgcagctgaagcaggagctggccatgctcaacgcggtcaccgaggacctgcgcctcaaggactgggagcactccatc

SEQ ID NO: 548521 - DNA, 120 bp, Artificial Sequence
  ENSG00000168079_11 (sequence is synthesized)
gcactgcggaacatctccctcgcgaaagggccaccgggacccaaaggtgatcagggggatgaaggaaaggaaggcaggcctggcatccctggattgcctggacttcgaggtctgcccggg

SEQ ID NO: 548522 - DNA, 120 bp, Artificial Sequence
  ENSG00000168079_12 (sequence is synthesized)
gagagaggtaccccaggattgcccgggcccaagggcgatgatgggaagctgggggccacaggaccaatgggcatgcgtgggttcaaaggtgaccgaggcccaaaaggagagaaaggagag

SEQ ID NO: 548523 - DNA, 120 bp, Artificial Sequence
  ENSG00000168079_13 (sequence is synthesized)
aaaggagacagagctggggatgccagtggcgtggaggccccgatgatgatccgcctggtgaatggctcaggtccgcacgagggccgcgtggaagtgtaccacgaccggcgttggggcacc

SEQ ID NO: 548524 - DNA, 120 bp, Artificial Sequence
  ENSG00000168079_14 (sequence is synthesized)
gtgtgtgacgacggctgggacaagaaggacggagacgtggtgtgccgcatgctcggcttccgcggtgtggaggaggtgtaccgcacagctcgattcgggcaaggcactgggaggatctgg

SEQ ID NO: 548525 - DNA, 120 bp, Artificial Sequence
  ENSG00000168079_15 (sequence is synthesized)
atggatgacgttgcctgcaagggcacagaggaaaccatcttccgctgcagcttctccaaatggggggtgacaaactgtggacatgccgaagatgccagcgtgacatgcaacagacactga

SEQ ID NO: 548526 - DNA, 120 bp, Artificial Sequence
  ENSG00000168079_16 (sequence is synthesized)
gcccaagttcggggtcctgcacagagcacccttcctgcatccctggggtggggcacagctcggggccaccctgaccatgcctcgaccacaccccgtccagcattctcagtcctcacacct

SEQ ID NO: 548527 - DNA, 120 bp, Artificial Sequence
  ENSG00000168079_17 (sequence is synthesized)
gcatcccaggaccgtgggggccggtcgtcatttccctcttgaacatgtgctccgaagtataactctgggacctactgcccgtctctctcttccaccaggttcctgcatgaggagccctga

SEQ ID NO: 548528 - DNA, 120 bp, Artificial Sequence
  ENSG00000168079_18 (sequence is synthesized)
tcaactggatcaccactttgcccagcctctgaacaccatgcaccaggcctcaatatcccagttccctttggccttttagttacaggtgaatgctgagaatgtgtcagagacaagtgcagc

SEQ ID NO: 548529 - DNA, 120 bp, Artificial Sequence
  ENSG00000168079_19 (sequence is synthesized)
agcagcgatggttggtagtatagatcatttactcttcagacaattcccaaacctccattagtccaagagtttctacatcttcctccccagcaagaggcaacgtcaagtgatgaatttccc

SEQ ID NO: 548530 - DNA, 120 bp, Artificial Sequence
  ENSG00000168079_20 (sequence is synthesized)
ccctttactctgcctctgctccccatttgctagtttgaggaagtgacatagaggagaagccagctgtaggggcaagagggaaatgcaagtcacctgcaggaatccagctagatttggaga

SEQ ID NO: 548531 - DNA, 120 bp, Artificial Sequence
  ENSG00000168079_21 (sequence is synthesized)
agggaatgaaactaacattgaatgactaccatggcacgctaaatagtatcttgggtgccaaattcatgtatccacttagctgcattggtccagggcatgtcagtctggatacagccttac

SEQ ID NO: 548532 - DNA, 120 bp, Artificial Sequence
  ENSG00000168079_22 (sequence is synthesized)
ctccaggtagcacttaactggtccattcacctagactgcaagtaagaagacaaaatgactgagaccgtgtgcccacctgaacttattgtctttacttggcctgagctaaaagcttgggtg

SEQ ID NO: 548533 - DNA, 120 bp, Artificial Sequence
  ENSG00000168079_23 (sequence is synthesized)
caggacctgtgtaactagaaagttgcctacttcagaacctccagggcgtgagtgcaaggtcaaacatgactggcttccaggccgaccatcaatgtaggaggagagctgatgtggagggtg

SEQ ID NO: 548534 - DNA, 120 bp, Artificial Sequence
  ENSG00000168079_24 (sequence is synthesized)
acatgggggctgcccatgttaaacctgagtccagtgctctggcattgggcagtcacggttaaagccaagtcatgtgtgtctcagctgtttggaggtgatgattttgcatcttccaagcct

SEQ ID NO: 548535 - DNA, 120 bp, Artificial Sequence
  ENSG00000168079_25 (sequence is synthesized)
cttcaggtgtgaatctgtggtcaggaaaacacaagtcctaatggaacccttaggggggaaggaaatgaagattccctataacctctgggggtggggagtaggaataaggggccttgggcc

SEQ ID NO: 548536 - DNA, 120 bp, Artificial Sequence
  ENSG00000168079_26 (sequence is synthesized)
tccataaatctgcaatctgcaccctcctcctagagacagggagatcgtgttctgctttttacatgaggagcagaactgggccatacacatgttcaagaactaggggagctacctggtagc

SEQ ID NO: 548537 - DNA, 120 bp, Artificial Sequence
  ENSG00000168079_27 (sequence is synthesized)
aagtgagtgcagacccacctcaccttgggggaatctcaaactcataggcctcagatacacgatcacctgtcatatcaggtgagcactggcctgcttggggagagacctgggcccctccag

SEQ ID NO: 548538 - DNA, 120 bp, Artificial Sequence
  ENSG00000168079_28 (sequence is synthesized)
gtgtaggaacagcaacactcctggctgacaactaagccaatatggccctaggtcattcttgcttccaatatgcttgccactccttaaatgtcctaatgatgagaaactctctttctgacc

SEQ ID NO: 548539 - DNA, 120 bp, Artificial Sequence
  ENSG00000168079_29 (sequence is synthesized)
aattgctatgtttacataacacgcatgtactcatgcatcccttgccagagcccatatatgtatgcatatataaacatagcactttttactacatagctcagcacattgcaaggtttgcat

SEQ ID NO: 548540 - DNA, 120 bp, Artificial Sequence
  ENSG00000168079_30 (sequence is synthesized)
gttaaaaaaaaaaaaaaaaaaaaactaaaggtgaaagatgccacattgaacaaactaaattcccaacccggttctggcaaagaatccagttatcccttccatgaagacgcacataactct

SEQ ID NO: 548541 - DNA, 120 bp, Artificial Sequence
  ENSG00000168079_31 (sequence is synthesized)
ctctcttacttggtctttccattagggacaacataagtcttgttttacatcaaataaaaacaatgttaaaaagtgtgtgaaccttaaaaatggaagtctactagtttacatacctacttc

SEQ ID NO: 548542 - DNA, 120 bp, Artificial Sequence
  ENSG00000168079_32 (sequence is synthesized)
agaggacatggaaatgaccatgggcctgcatttcagggaccaaagcaaattaggcctggcctaaaatacatcagaccttttgtaagaaagaatttcaataaagcaaaaaacatgtcacaa

SEQ ID NO: 548543 - DNA, 120 bp, Artificial Sequence
  ENSG00000168079_33 (sequence is synthesized)
gctgtcccccaagcagccccataagtttggaggttcagaggctggagccatggctggggctcaagtgtcaaaggaggctccctaccttttttagggctctgctggtctagcaagagatgc

SEQ ID NO: 548544 - DNA, 120 bp, Artificial Sequence
  ENSG00000168079_34 (sequence is synthesized)
tgatagaccccaggggcactggccacatttctagaggtgtcataaacctggcggttgtgtgcatggatctggaggcttcccccggtcactcgctagcccagctggtataatctctgtgcc

SEQ ID NO: 548545 - DNA, 120 bp, Artificial Sequence
  ENSG00000168079_35 (sequence is synthesized)
tcagtgttctcatctataaaatagggataacaggagtctttaccttataaggtcattgtgaaaattgaatgagttaatctgtgtaaagtgcttatgatcatgctggacacctggtgagga

SEQ ID NO: 548546 - DNA, 120 bp, Artificial Sequence
  ENSG00000168079_36 (sequence is synthesized)
atggagaacaaagctatgtacctacacaccgtcagcgactgtgacaccagctccatctgtgaggattcctttgatggcaggagcctgtccaagctgaacctgtgtgaggatgtgtccagg

SEQ ID NO: 548547 - DNA, 120 bp, Artificial Sequence
  ENSG00000168081_0 (sequence is synthesized)
aaccgagcctcgcatccatcggagggagccggggactgacagctctcagcacctgcttcctgctcctgcaccatgaaagtcctgctttgtgacctgctgctgctcagtctcttctccagt

SEQ ID NO: 548548 - DNA, 120 bp, Artificial Sequence
  ENSG00000168081_1 (sequence is synthesized)
gtgttcagcagttgtcagagggactgtctcacatgccaggagaagctccacccagccctggacagcttcgacctggaggtgtgcatcctcgagtgtgaagagaaggtcttccccagcccc

SEQ ID NO: 548549 - DNA, 120 bp, Artificial Sequence
  ENSG00000168081_2 (sequence is synthesized)
ctctggactccatgcaccaaggtcatggccaggagctcttggcagctcagccctgccgccccagagcatgtggcggctgctctctaccagccgagagcttcggagatgcagcatctgcgg

SEQ ID NO: 548550 - DNA, 120 bp, Artificial Sequence
  ENSG00000168081_3 (sequence is synthesized)
cgaatgccccgagtccggagcttgttccaggagcaggaagagcccgagcctggcatggaggaggctggtgagatggagcagaagcagctgcagaagagatttgggggcttcaccggggcc

SEQ ID NO: 548551 - DNA, 120 bp, Artificial Sequence
  ENSG00000168081_4 (sequence is synthesized)
tgcaccagaatggtaatgtgtagccggaaggggcgctcctcccagctgtaccggccactgcaacccatgagcgtccaggtgatcccccaaacagcatgtgctcagccccagacctgccgc

SEQ ID NO: 548552 - DNA, 120 bp, Artificial Sequence
  ENSG00000168081_5 (sequence is synthesized)
ctgggaatcaggattccttcttccccaaggcactgagcgcctgcagatcccgcaggcttcgtttgcctccagaaccttcccgtctgattgttcctccccagccccctggcatgtttcacc

SEQ ID NO: 548553 - DNA, 120 bp, Artificial Sequence
  ENSG00000168081_6 (sequence is synthesized)
acaaccctgttgctacatcagagtgtatttttgtaattcctctagctaccatttcaatagccccatctctcctgctcacccgcctcttgccccttctaggggcaggtgaaaggaatagga

SEQ ID NO: 548554 - DNA, 120 bp, Artificial Sequence
  ENSG00000168081_7 (sequence is synthesized)
aattgaacctggggttttgacttgccactgccataacttgtttgtaaaagagctgttctttttgactgattgttttaaacaacgatttctccattaaacttctactgagcaaatggttaa

SEQ ID NO: 548555 - DNA, 120 bp, Artificial Sequence
  ENSG00000168081_8 (sequence is synthesized)
agaacaaaataaaattctttatgggtgacagtcatgagctgtgcttggctccaaaaacccgactaaagatgtaacaaggtgcggtgttgggcgcatttatcctgtgttaacttcctatgt

SEQ ID NO: 548556 - DNA, 120 bp, Artificial Sequence
  ENSG00000168081_9 (sequence is synthesized)
acacaccccgcaaggagtccagcccaccctttctctaggcagcagattttcctatgattgcaccttgaagctgaccacttccggctagagactggttaccatggggataatagtagtatg

SEQ ID NO: 548557 - DNA, 120 bp, Artificial Sequence
  ENSG00000168081_10 (sequence is synthesized)
ttaagataactaattcctctatcactccccaggagcttagttactatggggacagttaagtggaccaatacgcccatccagttgccacagcaaccagtcagctcacctttcctcgagatt

SEQ ID NO: 548558 - DNA, 120 bp, Artificial Sequence
  ENSG00000168081_11 (sequence is synthesized)
gtctctctaaacaccaagagtgggacctactcttagccattagcagagtccaattaccacagctatgatggtgctatttcatcttcaaagacggcttacctatcccctctcctttcccca

SEQ ID NO: 548559 - DNA, 120 bp, Artificial Sequence
  ENSG00000168081_12 (sequence is synthesized)
gctctcagggtgcctggctccatggaaacattaaagtttcccattttacctggacaaagagttcctgttaagattaggagttgtggtttctgctcttcctccttccacaagccatttgtc

SEQ ID NO: 548560 - DNA, 120 bp, Artificial Sequence
  ENSG00000168081_13 (sequence is synthesized)
catcctgccaccttgccagagagggactgattccttgtggtcaacggtatcattactgagcaagacgtggagaatttggtccaatggacctagtagctactagaatatggactaaagggg

SEQ ID NO: 548561 - DNA, 120 bp, Artificial Sequence
  ENSG00000168090_0 (sequence is synthesized)
gaggctggcgggcgcggggaaaatggcggcggcggcggcggcggctgcagctacgaacgggaccggaggaagcagcgggatggaggtggatgcagcagtagtccccagcgtgatggcctg

SEQ ID NO: 548562 - DNA, 120 bp, Artificial Sequence
  ENSG00000168090_1 (sequence is synthesized)
cggagtgactgggagtgtttccgtcgctctccatccccttgtcattctcaacatctcagaccactggatccgcatgcgctcccaggaggggcggcctgtgcaggtgattggggctctgat

SEQ ID NO: 548563 - DNA, 120 bp, Artificial Sequence
  ENSG00000168090_2 (sequence is synthesized)
tggcaagcaggagggccgaaatatcgaggtgatgaactcctttgagctgctgtcccacaccgtggaagagaagattatcattgacaaggaatattattacaccaaggaggagcagtttaa

SEQ ID NO: 548564 - DNA, 120 bp, Artificial Sequence
  ENSG00000168090_3 (sequence is synthesized)
acaggtgttcaaggagctggagtttctgggttggtataccacaggggggccacctgacccctcggacatccacgtccataagcaggtgtgtgagatcatcgagagccccctctttctgaa

SEQ ID NO: 548565 - DNA, 120 bp, Artificial Sequence
  ENSG00000168090_4 (sequence is synthesized)
gttgaaccctatgaccaagcacacagatcttcctgtcagcgtttttgagtctgtcattgatataatcaatggagaggccacaatgctgtttgctgagctgacctacactctggccacaga

SEQ ID NO: 548566 - DNA, 120 bp, Artificial Sequence
  ENSG00000168090_5 (sequence is synthesized)
gatagcacagcacagcgccatcaagatgctgcacagccgcgtcaagctcatcttggagtacgtcaaggcctctgaagcgggagaggtcccctttaatcatgagatcctgcgggaggccta

SEQ ID NO: 548567 - DNA, 120 bp, Artificial Sequence
  ENSG00000168090_6 (sequence is synthesized)
tgctctgtgtcactgtctcccggtgctcagcacagacaagttcaagacagatttttatgatcaatgcaacgacgtggggctcatggcctacctcggcaccatcaccaaaacgtgcaacac

SEQ ID NO: 548568 - DNA, 120 bp, Artificial Sequence
  ENSG00000168090_7 (sequence is synthesized)
catgaaccagtttgtgaacaagttcaatgtcctctacgaccgacaaggcatcggcaggagaatgcgcgggctctttttctgatgagggtacttgaagggctgatggacaggggtcaggca

SEQ ID NO: 548569 - DNA, 120 bp, Artificial Sequence
  ENSG00000168090_8 (sequence is synthesized)
actatcccaaaggggagggcactacacttccttgagagaaaccgctgtcattaataaaaggggagcagcccctgagcacccctgctggtggctctgtcctctgttaggcaccacactggt

SEQ ID NO: 548570 - DNA, 120 bp, Artificial Sequence
  ENSG00000168090_9 (sequence is synthesized)
tggtcaacttggatgttcatcgaggctcattctggccttgctcagaagcccttctgatgctcttcagtgagggaggcactaccatttgaagtgaccccatgtcagtcacatggactggtc

SEQ ID NO: 548571 - DNA, 120 bp, Artificial Sequence
  ENSG00000168090_10 (sequence is synthesized)
tttagcaaagtccaaggctgcctgcttccacctaagtggtctctgttctacactttaatgtcaccctctacatcatcttacctagcccacccaaccttataaacatgataattgactact

SEQ ID NO: 548572 - DNA, 120 bp, Artificial Sequence
  ENSG00000168090_11 (sequence is synthesized)
aaagaattactatatgttctggccccttcccctctagttaaacaggtgttcaaggagctggagtttctgggttggtataccacaggggggccacctgacccctcggacatccacgtccat

SEQ ID NO: 548573 - DNA, 120 bp, Artificial Sequence
  ENSG00000168090_12 (sequence is synthesized)
aagcaggtatgcatgctcacacctgtgcatgctggggcagagaatggagaatgaggggaaggagaaaggtagggggcactgacttcctgtgcattgtccctctcttccaggtgtgtgaga

SEQ ID NO: 548574 - DNA, 120 bp, Artificial Sequence
  ENSG00000168090_13 (sequence is synthesized)
ggagagatctcagaaaaagaaaacgttcagagttctttctcaaaagaaagcaaaggatgagaggagacaggatagaagggagtagttattctaaactgagccaggatttgaggagggagg

SEQ ID NO: 548575 - DNA, 120 bp, Artificial Sequence
  ENSG00000168090_14 (sequence is synthesized)
gagggaggagagaagctggtgaaaatacaccaggagcttcacattgaggaaggatggtttaaagaattactatgtcaggccgggctcagtgactcatgcctctaatcccagcactttggg

SEQ ID NO: 548576 - DNA, 120 bp, Artificial Sequence
  ENSG00000168090_15 (sequence is synthesized)
caagcacacagatcttcctgtcagcgtttttgagtctgtcattgatataatcaatggagaggtaataccctacccttcaaccctcagatcctgctcttggcctctttcctgcttttgatt

SEQ ID NO: 548577 - DNA, 120 bp, Artificial Sequence
  ENSG00000168090_16 (sequence is synthesized)
caggcagtggagagaactccactggtaatggaggggattccttggaagtggggttggaaggtgtggccacatcccgtctcaacctcctcctgtcctcatccccttgcagtggctgaacac

SEQ ID NO: 548578 - DNA, 120 bp, Artificial Sequence
  ENSG00000168090_17 (sequence is synthesized)
aatactccatgcctactctgtcatgattgtcgctataccttttactgtgtgacactcctctattggggaatgccagatgccacttaccagctgtgactctggcttagtcatttaatctcc

SEQ ID NO: 548579 - DNA, 120 bp, Artificial Sequence
  ENSG00000168090_18 (sequence is synthesized)
aaactgtgaaaggaggtaatccctacttcattggtttcttgggaagatgagaggaaatgtgtaaaagcagctagcccaaatgttggcatatagtgttcaggtttctccgtctccttcaca

SEQ ID NO: 548580 - DNA, 120 bp, Artificial Sequence
  ENSG00000168090_19 (sequence is synthesized)
gactccagtctcttctccttgctcacctcccccaggcagtggtcttttccccttcctctactggagccaattccccctcccccaaatcatcgtttccccaatacatggttcccactgatc

SEQ ID NO: 548581 - DNA, 120 bp, Artificial Sequence
  ENSG00000168092_0 (sequence is synthesized)
ggaggagctgctgctggtgctggggccggaggagggacgcgccggagcgggaccgacgggaccgagcgagcgaccgacgcgccacccgccgacgcctcagccgcttggggcccgcacgga

SEQ ID NO: 548582 - DNA, 120 bp, Artificial Sequence
  ENSG00000168092_1 (sequence is synthesized)
ccctctacttcagtgtagaatgagccaaggagactcaaacccagcagctattccgcatgcagcagaagatattcaaggagatgaccgatggatgtctcagcacaacagatttgttttgga

SEQ ID NO: 548583 - DNA, 120 bp, Artificial Sequence
  ENSG00000168092_2 (sequence is synthesized)
ctgtaaagacaaagagcctgatgtactgttcgtgggagactccatggtgcagttaatgcagcaatatgagatatggcgagagcttttttccccacttcatgcactgaattttggaattgg

SEQ ID NO: 548584 - DNA, 120 bp, Artificial Sequence
  ENSG00000168092_3 (sequence is synthesized)
gggagatacaacaagacatgttttgtggagactaaagaatggagaactggagaatattaagcctaaggtcattgttgtctgggtaggaacaaataaccacgaaaatacagcagaagaagt

SEQ ID NO: 548585 - DNA, 120 bp, Artificial Sequence
  ENSG00000168092_4 (sequence is synthesized)
agcaggtgggatcgaggccattgtacaacttatcaacacaaggcagccacaggccaaaatcattgtattgggtttgttacctcgaggtgagaaacccaatcctttgaggcaaaagaacgc

SEQ ID NO: 548586 - DNA, 120 bp, Artificial Sequence
  ENSG00000168092_5 (sequence is synthesized)
caaggtgaaccaactcctcaaggtttcgctgccgaagcttgccaacgtgcagctcctggataccgacgggggttttgtgcactcggacggtgccatctcctgccacgacatgtttgattt

SEQ ID NO: 548587 - DNA, 120 bp, Artificial Sequence
  ENSG00000168092_6 (sequence is synthesized)
tctgcatctgacaggagggggctatgcaaagatctgcaaacccctgcatgaactgatcatgcagttgttggaggaaacacctgaggagaaacaaaccaccattgcctgactggctcttat

SEQ ID NO: 548588 - DNA, 120 bp, Artificial Sequence
  ENSG00000168092_7 (sequence is synthesized)
cagtgttaatagcatctcagcttcctcagatcagttctatcactggcactacagaatccttctctttcttaaggcactttgcattgtagaatgttcctggatgttcatatctagtgtttg

SEQ ID NO: 548589 - DNA, 120 bp, Artificial Sequence
  ENSG00000168092_8 (sequence is synthesized)
aaggggaggagggatttaaactggtcctgtacatagaaggtttgtttgacagaggagaaaaattagccaaggaagattgttgtttaaattcatttgaaaccagaaggggactttttagtt

SEQ ID NO: 548590 - DNA, 120 bp, Artificial Sequence
  ENSG00000168092_9 (sequence is synthesized)
gtatgtgtaacacattcattgaattattatcactgttttcttgggacaacatcaagcctaaatactgaacaatatgaagattcttttcttggcctttctgtggattatgtcatatataat

SEQ ID NO: 548591 - DNA, 120 bp, Artificial Sequence
  ENSG00000168092_10 (sequence is synthesized)
aattatcagaatcattctacttggctttaaaacatgttttctccaatttttttaaggttcataatttagccttttgtttttatgttgcttagattcttatgtatactgaatattttatta

SEQ ID NO: 548592 - DNA, 120 bp, Artificial Sequence
  ENSG00000168092_11 (sequence is synthesized)
acatgtagcatcaggttgaacatgcttgtcattgatatatggaagatgctatagttagaagtgaatttgttctgctttcttaatcttttccatgcttagcagtgaaaaacaggttttgcc

SEQ ID NO: 548593 - DNA, 120 bp, Artificial Sequence
  ENSG00000168092_12 (sequence is synthesized)
ccagtagagggattctttggagggtattattttttatgctgctgaatatcatgtctataatagacccgtgcatgcagcctttcctccttattccccttcatgcccccctttccccttcat

SEQ ID NO: 548594 - DNA, 120 bp, Artificial Sequence
  ENSG00000168092_13 (sequence is synthesized)
tttttttttttttttttggttcttgttgacattacaagcttttaacacatttttgacctaggagccctgttgctggaagtatagtctccagccagttactctcatgatagtactgctata

SEQ ID NO: 548595 - DNA, 120 bp, Artificial Sequence
  ENSG00000168092_14 (sequence is synthesized)
tactctcatgatagtactgctataaaactcattcttgtgtggtgttctgtgctatagattctgtgtattgctgttcatattcggagttctggttttgtttttcccttaaaacctgttaac

SEQ ID NO: 548596 - DNA, 120 bp, Artificial Sequence
  ENSG00000168092_15 (sequence is synthesized)
agttttttttgggggtggggggattcagaactcttgtttcccattccatagcacctgacattatttcaagttttataatatcttaaggtgtatattttattttttttattggcttagttg

SEQ ID NO: 548597 - DNA, 120 bp, Artificial Sequence
  ENSG00000168092_16 (sequence is synthesized)
tcttaaggtgtatattttattttttttattggcttagttgttttttgttttgttttgtttgagatggagtttcactgttgcccaggctggggtgcaatggtgtgatcttggctcactgca

SEQ ID NO: 548598 - DNA, 71 bp, Artificial Sequence
  ENSG00000168092_17 (sequence is synthesized)
tggcttagtttttaaattatcctccaaaaattttgggcctttttctgtggggaaacaagtgaagctgctct

SEQ ID NO: 548599 - DNA, 120 bp, Artificial Sequence
  ENSG00000168092_18 (sequence is synthesized)
tttgggcctttttctgtggggaaacaagtgaagctgctcttcagcatagacactacctttatcccatcattttagtaaaaactaggtttgtttcacttctgaggtgtcttattaatgtac

SEQ ID NO: 548600 - DNA, 120 bp, Artificial Sequence
  ENSG00000168092_19 (sequence is synthesized)
ttcatctgagaatttgttgatcttaatgttcgagctatataagaactgccattaaaaaaaatgggataatagatgattttatcagtatacctgtggaatatgtacaaactggatctatag

SEQ ID NO: 548601 - DNA, 120 bp, Artificial Sequence
  ENSG00000168092_20 (sequence is synthesized)
atattttgaactggaccaggtgggtattgaagtaacccatcaaaatatgctctgcagtgattccgcttaatgtttaaattcagtaacgtacttgaaaggcaaatttcagtgcttttgtat

SEQ ID NO: 548602 - DNA, 120 bp, Artificial Sequence
  ENSG00000168092_21 (sequence is synthesized)
gttggaggagggcttactgatgcgtgctaagaccgatttctgattgagggatgaaccttgggctcatttttttcttgtgaagtctctttctagaaaattttttggttttgttctttttaa

SEQ ID NO: 548603 - DNA, 120 bp, Artificial Sequence
  ENSG00000168092_22 (sequence is synthesized)
aaaatacatacttttttgaatgtatcatgtcttcattaacaacagaaaatccacatggtgtttactaaacttgtttacgacattaaaaatttcctttttatttttagtagcccaggttga

SEQ ID NO: 548604 - DNA, 120 bp, Artificial Sequence
  ENSG00000168092_23 (sequence is synthesized)
gtttttcacaagagatttttttcttagctgaggtatagttgtatagcaagaagaattaagccagatttttgtgtgtggaaagacagttttctatccacgtctttttctgtttgtcagaag

SEQ ID NO: 548605 - DNA, 120 bp, Artificial Sequence
  ENSG00000168092_24 (sequence is synthesized)
gtgggagtatggtccaaataaatccattaggttactcctgcagcatgcgcttttagcttctctcttgactgaggatcaaatatccctttgtgagctggccctcagctcctttgctcatgt

SEQ ID NO: 548606 - DNA, 120 bp, Artificial Sequence
  ENSG00000168092_25 (sequence is synthesized)
gtacaaacctcagatgttactacattttatatctaccagagctattcaagcaatagtatttgaaccactagccttttaaataaaattctgccccattactgatgtgcagatattgagttc

SEQ ID NO: 548607 - DNA, 120 bp, Artificial Sequence
  ENSG00000168092_26 (sequence is synthesized)
actttcattttttgccagatttctttgcactactttaggtaaaaatagttaatctatttttctttgacatcctagtttgcgtcagtgacagaacttactgcttagtctttgtacttttta

SEQ ID NO: 548608 - DNA, 120 bp, Artificial Sequence
  ENSG00000168092_27 (sequence is synthesized)
aaaaatctataaatttaatgcactgtccaagtgaaatgtcctagttgtcattgtgattaaggggccaactttccaggcagctagcagagatactattctcttcctctcccagcaaatttg

SEQ ID NO: 548609 - DNA, 120 bp, Artificial Sequence
  ENSG00000168092_28 (sequence is synthesized)
tattccttcgcccacgcattcctgctatactagatggcagccagtgatggaactataaagatgtctgtggtcatatgttgaatgtggcagcttgaagatgtactgccacgggtgatctag

SEQ ID NO: 548610 - DNA, 120 bp, Artificial Sequence
  ENSG00000168092_29 (sequence is synthesized)
ggcaggctgtcttccagtccatgtgttctcggtcgccgtagacagcgctctggctaccaccgtgaggctacttgaactgtcaggggcatctgcctaaaccagaatcttttgtcagaaacc

SEQ ID NO: 548611 - DNA, 120 bp, Artificial Sequence
  ENSG00000168092_30 (sequence is synthesized)
ttaacccaacaaaacaaatcttgagtagctcatgcccggctcttaggaattttgtctgtttaaaaaaaaaaaaaaaaaaaaagtccaacttactttattttatttttttaacctagtcac

SEQ ID NO: 548612 - DNA, 120 bp, Artificial Sequence
  ENSG00000168092_31 (sequence is synthesized)
tgtttacaattgtatgctaaagcctgaaatattgtctgtgctgtggtgtatgagcattgccaactttatatttattgcagtgaagaagaaactaaaaatatatggaaatgaggagcatgt

SEQ ID NO: 548613 - DNA, 120 bp, Artificial Sequence
  ENSG00000168092_32 (sequence is synthesized)
ccaagctcctaaatccgtgtgggtgcatgtgggagaagtgagttagggcctcttgaaaggaggctttttggagaggggtcccccaggtttcttggtgttcctgcttggggatcactgctg

SEQ ID NO: 548614 - DNA, 120 bp, Artificial Sequence
  ENSG00000168092_33 (sequence is synthesized)
ctagctgactggacctccccattggaagtttgtgattttgctttggcaaagtttcattgactagtagaactcattctgttttagtgtatatttcaatataaatgtaaacattttgctcaa

SEQ ID NO: 548615 - DNA, 120 bp, Artificial Sequence
  ENSG00000168092_34 (sequence is synthesized)
gggccggaggagggacgcgccggagcgggaccgacgggaccgagcgagcgaccgacgcgccacccgccgacgcctcagccgcttggggcccgcacggaccctctacttcaattatttact

SEQ ID NO: 548616 - DNA, 120 bp, Artificial Sequence
  ENSG00000168092_35 (sequence is synthesized)
ggcaagatgagcaggattaccatgaaagaaaagtccagatggactgaggaaatcctacactgattctccaaacttggcagctgactgcatggagggctcatgatgaagaaacctcttttg

SEQ ID NO: 548617 - DNA, 120 bp, Artificial Sequence
  ENSG00000168092_36 (sequence is synthesized)
ccatcctgaggattctctgattcatattcgcctagatgtgctggaaacagtactggaccaaggtgcaaacttgagtctagtgaggtactaatgggctgaagtttttctgagcgtcacttt

SEQ ID NO: 548618 - DNA, 120 bp, Artificial Sequence
  ENSG00000168092_37 (sequence is synthesized)
cctcatctgtataatgaggggttggccaaggaaacccataaggttatcttccagctgactttctaattggtgaaccctttggaaaaggggtgcagcttgcttctggtcttcatcctcaag

SEQ ID NO: 548619 - DNA, 120 bp, Artificial Sequence
  ENSG00000168092_38 (sequence is synthesized)
ggccaaaactaattcctccactcaccatttgcccagcataactacaacagtacctggcacatcgtggatgcttattaaatatttattgcaggaatgagtaaatataactaactgatcata

SEQ ID NO: 548620 - DNA, 120 bp, Artificial Sequence
  ENSG00000168092_39 (sequence is synthesized)
aggtaaaatagtcttcattggaacaaggctccagatagttgggcagggctgggagctgagactgctgcaatcctgccagctgagagaactctgacaaggcactgatctgggtggctttat

SEQ ID NO: 548621 - DNA, 120 bp, Artificial Sequence
  ENSG00000168092_40 (sequence is synthesized)
agaactctgacaaggcactgatctgggtggctttattaggatgtctgacagcttcagaggtggccacatttcttttcctttaaacatgtctaatttggccgggcgcagtggctcacgcct

SEQ ID NO: 548622 - DNA, 60 bp, Artificial Sequence
  ENSG00000168092_41 (sequence is synthesized)
tcagcctgaccaatatggtgaaaccccgctttactaaaaatacaagaaattagcactgaa

SEQ ID NO: 548623 - DNA, 120 bp, Artificial Sequence
  ENSG00000168092_42 (sequence is synthesized)
tcctccctgtcctctcaccccaaacttcataaatcccctgtgacttaaaatggagctggactcatgggtccagcaagctcctcagctgtgtgttgaatggtcccatttctttggtccatt

SEQ ID NO: 548624 - DNA, 120 bp, Artificial Sequence
  ENSG00000168092_43 (sequence is synthesized)
caacactcaggctcaggaagggtggtccacagggaaatataagtcaaataagccttatggccccaccctgaccgcttgagggccacggttagggttgagctctttgtatattatgccagg

SEQ ID NO: 548625 - DNA, 120 bp, Artificial Sequence
  ENSG00000168092_44 (sequence is synthesized)
gaatgcggtagctggacctgtgcacaaggccaggatcacatccctgaggccccgacatctcccctgtgtgctcacaagtctggctttgagacacaccactgcctttttttgctgactgct

SEQ ID NO: 548626 - DNA, 120 bp, Artificial Sequence
  ENSG00000168092_45 (sequence is synthesized)
gcagccaacaaaaaggcattctctcccagtggacagacctcagaaaggacctattcataagtgcggggtagggcagagggactgaggaaagttctgcagacctgggaacagcaagaaaat

SEQ ID NO: 548627 - DNA, 120 bp, Artificial Sequence
  ENSG00000168092_46 (sequence is synthesized)
gtgcagttgctgccctcccactctgtagacgcagggtcctgacgattcaaaagttaagtcttgagaccttgcaaaagggaaggatcccttcagagtttgcttggatggatttctctccag

SEQ ID NO: 548628 - DNA, 120 bp, Artificial Sequence
  ENSG00000168092_47 (sequence is synthesized)
ttgcagttttctgggctccacctcccaagatgaattaagtgtgaagtaggactctggatgtgcgtttaaaacaggcgtagggtcacatcttgccccaaagttatgaggccaacttagagt

SEQ ID NO: 548629 - DNA, 82 bp, Artificial Sequence
  ENSG00000168092_48 (sequence is synthesized)
ggtcacatcttgccccaaagttatgaggccaacttagagtagtggtgcttgcctgtaatccagctactcgagaggctgtggc

SEQ ID NO: 548630 - DNA, 79 bp, Artificial Sequence
  ENSG00000168092_49 (sequence is synthesized)
taggccaagaagtctcacagggaaagaaatatcagtttctttttttattaaaaaaatttttttttggctagatggtggg

SEQ ID NO: 548631 - DNA, 87 bp, Artificial Sequence
  ENSG00000168092_50 (sequence is synthesized)
acatggtaaaacctcgtctctacaatgagcctataatcccagctattcaggtgactgaggtgggaagatgacttgagcccctgaagc

SEQ ID NO: 548632 - DNA, 81 bp, Artificial Sequence
  ENSG00000168092_51 (sequence is synthesized)
tagccaggcatggtggcatgagcctataatcccagctattcaggtgactgaggtgggaagatgacttgagcccctgaagca

SEQ ID NO: 548633 - DNA, 120 bp, Artificial Sequence
  ENSG00000168092_52 (sequence is synthesized)
ctgatctcaaactcctgacctcaagttattctcctgtcctggcctcccaaaatgttgagagttcaagcatgggccaccacacccagccagaagtgccagttaataatttttttttttctt

SEQ ID NO: 548634 - DNA, 120 bp, Artificial Sequence
  ENSG00000168092_53 (sequence is synthesized)
cattgtattggtatgtagtcgttggtgggtagagagtttgttatctttaggtcagctgaggaatctttttagaaatgtgattgctcatgaatattagagaaccttgaggtggaagcagtt

SEQ ID NO: 548635 - DNA, 120 bp, Artificial Sequence
  ENSG00000168092_54 (sequence is synthesized)
tatcatactttcgttgacctcttctttaatgtattttactgtcttactggtttcatcattccccataccagctgtggggccatcttttatccacgcatccttgtttagaagtatggaagc

SEQ ID NO: 548636 - DNA, 120 bp, Artificial Sequence
  ENSG00000168092_55 (sequence is synthesized)
ttgggtaaagcagccgcctccaaatactctatctcagagatagtgagactagaacaagggtcggttaactggtcgatcgggacctatcctgatgacacaccagcaactaccaggccagca

SEQ ID NO: 548637 - DNA, 80 bp, Artificial Sequence
  ENSG00000168096_0 (sequence is synthesized)
agcgtggcggcgagctgtttggggggggttggcgacggcagcccgagggcggcgcaaggcctgaggcccagcacaggtgg

SEQ ID NO: 548638 - DNA, 120 bp, Artificial Sequence
  ENSG00000168096_1 (sequence is synthesized)
gttccgcggcggcccggccccagcacttgccggcacctgcagcccgcctagacccggcgctcgggcgtcccgcgctgcacttgctcgccgcgtgactggaggaccgagcccccacatttt

SEQ ID NO: 548639 - DNA, 120 bp, Artificial Sequence
  ENSG00000168096_2 (sequence is synthesized)
ctttatgtggttgtggtgggggcacagtaatgccctgtgcgccgtagcgttcctgtggggatgtggccggggggcgtcgggaagcgtcactgctgccaggtgcagtggctcacgcctata

SEQ ID NO: 548640 - DNA, 120 bp, Artificial Sequence
  ENSG00000168096_3 (sequence is synthesized)
aggctgaggcgggcggatcacctgagtgatgtccgagctcagcgatgaagccagcgagccggaactcctgaaccgcagcttgtccatgtggcacgggctcgggacacaggtcagcgggga

SEQ ID NO: 548641 - DNA, 120 bp, Artificial Sequence
  ENSG00000168096_4 (sequence is synthesized)
cacaggtcagcggggaggagctggatgtccccctggatcttcacacagctgcttccattggccagtatgaagtggtgaaggagtgtgtgcagcggagagagttagatttgaataagaaga

SEQ ID NO: 548642 - DNA, 120 bp, Artificial Sequence
  ENSG00000168096_5 (sequence is synthesized)
atggtggtggctggaccccgctgatgtatgcctcctacattggccacgacacaatcgtgcacctgctgcttgaggcgggggtgagtgtgaatgtgccgaccccagaagggcagactccac

SEQ ID NO: 548643 - DNA, 120 bp, Artificial Sequence
  ENSG00000168096_6 (sequence is synthesized)
tgatgctggcctccagctgtggcaacgagagcatcgcctactttcttctccagcaaggtgcagagctagaaatgaaagacatccagggctggacagccctcttccactgtaccagcgccg

SEQ ID NO: 548644 - DNA, 120 bp, Artificial Sequence
  ENSG00000168096_7 (sequence is synthesized)
ggcaccagcacatggtcaggttcctcttggacagtggagccaatgccaacgtgagggagccgatatgtggatttactcccttgatggaagcagctgctgctggccatgagataatcgtgc

SEQ ID NO: 548645 - DNA, 120 bp, Artificial Sequence
  ENSG00000168096_8 (sequence is synthesized)
agtattttctgaatcacggagtcaaggtggacgcgagagaccacagtggagccacagcccggatgctggccaagcagtacggacacatgaagatcgtggccttgatggacacttactcgc

SEQ ID NO: 548646 - DNA, 120 bp, Artificial Sequence
  ENSG00000168096_9 (sequence is synthesized)
cctctctgcccaagagcctctatcggagcccagaaaagtacgaagatctgagctcttctgacgagtcctgccctgctcctcagagacagaggccttgccggaagaagggtgtcagcatcc

SEQ ID NO: 548647 - DNA, 120 bp, Artificial Sequence
  ENSG00000168096_10 (sequence is synthesized)
acgagggaccgcgagccctggccaggatcacaggcattggcctgggcggcagagccccacggcctcgctatgagcaggctcctccccgtggctatgtcaccttcaacagcagtggcgaga

SEQ ID NO: 548648 - DNA, 120 bp, Artificial Sequence
  ENSG00000168096_11 (sequence is synthesized)
aagagggcctctgctgccgggatgtcacctcccccatcaatgagcgggatgtggagagcagcagcagcagcagcagtcgggaggaacatgctttctgtgccaacctggggcccgtccaga

SEQ ID NO: 548649 - DNA, 120 bp, Artificial Sequence
  ENSG00000168096_12 (sequence is synthesized)
gcagcagcagcagcgagggcctggccagagcccaggggctcagcagcgaagcttctgtggagagcaacgaggactcggatcatgcctgtaaaagctcagctcgcaaacaagctaaaagtt

SEQ ID NO: 548650 - DNA, 120 bp, Artificial Sequence
  ENSG00000168096_13 (sequence is synthesized)
acatgaagaccaagaatcctgacagccagtggcctccccgcgctgcaactgacagggaaggctttctcgctgagtccagcccccagactcagagggccccctactcaggaccccaggacc

SEQ ID NO: 548651 - DNA, 120 bp, Artificial Sequence
  ENSG00000168096_14 (sequence is synthesized)
ttgccgcactgctggagcagatcgggtgtctgaagtacctgcaggtgtttgaggagcaggacgtggacctccgcatctttctgaccctcactgagagcgacctgaaggaaattggcatca

SEQ ID NO: 548652 - DNA, 120 bp, Artificial Sequence
  ENSG00000168096_15 (sequence is synthesized)
cgctgtttgggcccaagaggaagatgacgtccgccattgcccgctggcacagcagtgcccgcccacccggggatgccctggagctggcctacgccgaccggctggaggctgagatgcagg

SEQ ID NO: 548653 - DNA, 120 bp, Artificial Sequence
  ENSG00000168096_16 (sequence is synthesized)
agctcgccatccagctgcacaagcgctgcgaggaggtagaggccacgcggggccaggtgtgtcaggagcaggagctgcgcgccgtggtggagagctgcctgctggagcaggaccgcgccc

SEQ ID NO: 548654 - DNA, 120 bp, Artificial Sequence
  ENSG00000168096_17 (sequence is synthesized)
gcgaggacctccaggcccggctgcgggagacgtgggccctggcccgggatgctgccctcgtcctggaccagctgcgagcctgtcaagctgagctgtcatctcgagtgaggcaggaccagc

SEQ ID NO: 548655 - DNA, 120 bp, Artificial Sequence
  ENSG00000168096_18 (sequence is synthesized)
cccctggtgcagccactctgggcctagccgtccccccagctgactccaagggctggcaagcgtccctgcaggccatgagcctccccgagctctcgggagccctggaggaccgtgtccgtg

SEQ ID NO: 548656 - DNA, 120 bp, Artificial Sequence
  ENSG00000168096_19 (sequence is synthesized)
agatggggcaagcactgtgcttagtgacccagagcctggagaagctgcaggtgctgaacgggaagaagtggcgggagacctagcctgcgggccgaatctgacgttgggtgattggtccac

SEQ ID NO: 548657 - DNA, 120 bp, Artificial Sequence
  ENSG00000168096_20 (sequence is synthesized)
cctgaagctgtgtgccagggagtgaggaggacagtgagcaggtagctgccatgtgcagcccaggcccagtgggggccagaggatcaggccccgggagcagccggcagacagaggcaagac

SEQ ID NO: 548658 - DNA, 120 bp, Artificial Sequence
  ENSG00000168096_21 (sequence is synthesized)
gggggctgcggccctggctcggcagctcgggccagcactgaggcgggacgagggcctcacccagaacctcgtggtgaggcccagagttcatgggctgccctggcccataccaggcagggc

SEQ ID NO: 548659 - DNA, 120 bp, Artificial Sequence
  ENSG00000168096_22 (sequence is synthesized)
cctggggggaaagtgtatccatatacacgcacaggtgccaactgaggtgggaccttaggaatgaggactggggcacctggaaaatgccattttttggaaaataaaatttaagaacagcta

SEQ ID NO: 548660 - DNA, 120 bp, Artificial Sequence
  ENSG00000168096_23 (sequence is synthesized)
agataatcgtgcagtattttctgaatcacatggagtcgccctctgtcgcccaggctggagtgcagcagcttactgcaatctctgcctcccgtgttgaagcgattctcctgcctcagcctc

SEQ ID NO: 548661 - DNA, 120 bp, Artificial Sequence
  ENSG00000168096_24 (sequence is synthesized)
cgggggcggtgccccggcgagggagcgtggcggcgagctgtttggggggggttggcgacggcagcccgagggcggcgcaaggcctgaggcccagcacagtgatgtccgagctcagcgatg

SEQ ID NO: 548662 - DNA, 120 bp, Artificial Sequence
  ENSG00000168096_25 (sequence is synthesized)
gctccacaggctcacagccggctccatggctggcagccccgctgcagcgcttctactctgttcctctccacggaaaggacctgtctccctgctttccatactggagttggcctccctgag

SEQ ID NO: 548663 - DNA, 120 bp, Artificial Sequence
  ENSG00000168096_26 (sequence is synthesized)
cctggggagaagaaaagcacacttgacctcagagctgcctgcaggagtctgacaagatgtggttgaagcagagacaggaactacacacagtgtgtgcttggtgatggttacagctgccac

SEQ ID NO: 548664 - DNA, 120 bp, Artificial Sequence
  ENSG00000168096_27 (sequence is synthesized)
catcctcctcctttctgtggtccctctgaccacacattaccttagggatcagaggtgtgactcacagctcagctgtctcacctgtgtctgctgagttctcctaccctgtgtgggcagaag

SEQ ID NO: 548665 - DNA, 120 bp, Artificial Sequence
  ENSG00000168096_28 (sequence is synthesized)
tgtgggcagaagaggcacggagaggagaggcagagggaagctctggttggttatttggtttgtttgttcgagacggagtctcgcactgtcatctgggctggagtgcagtggcgcgatctc

SEQ ID NO: 548666 - DNA, 120 bp, Artificial Sequence
  ENSG00000168096_29 (sequence is synthesized)
ggttatttgttaaagcactggctttgctgttcagtagagccttggatttgccggcttctccctgcagcccctggctcagtgagcaggcacacgtctcggtcccttcaacatacgttgagt

SEQ ID NO: 548667 - DNA, 120 bp, Artificial Sequence
  ENSG00000168096_30 (sequence is synthesized)
ggagtctggtcagggtagtgtcctaagtatgtttctttcagaaaatagcttgaagaaaatgtcagagtaacatttgtttgtccattaaaagcaataaactctcaaaagtaggatttctgg

SEQ ID NO: 548668 - DNA, 120 bp, Artificial Sequence
  ENSG00000168096_31 (sequence is synthesized)
agttgaaaagtaaatgaaatgaaaatatcactagacgagctcacagcagaattgagcaggcagaagagtcagacaacttgtgaacacaggtcacctgagatcatctcgcttgaggaacag

SEQ ID NO: 548669 - DNA, 120 bp, Artificial Sequence
  ENSG00000168096_32 (sequence is synthesized)
gcggtgccccggcgagggagcgtggcggcgagctgtttggggggggttggcgacggcagcccgagggcggcgcaaggcctgaggcccagcacaggagagagttagatttgaataagaaga

SEQ ID NO: 548670 - DNA, 120 bp, Artificial Sequence
  ENSG00000168096_33 (sequence is synthesized)
ccacctggcccctgggcccccacacatcctttcctcctgattttgtaactgaggggtggatttcagggtctggagccaccccacccccatttcatcaggcccttccttcctgcaggcaga

SEQ ID NO: 548671 - DNA, 120 bp, Artificial Sequence
  ENSG00000168096_34 (sequence is synthesized)
cccaggcaggagttgggtccgggaatctgcaccggtcgccctcctgctctttagtgcagcctcatggggcactggcccagcccatgagggccagctgcaaggacagggctgagcccctcc

SEQ ID NO: 548672 - DNA, 80 bp, Artificial Sequence
  ENSG00000168096_35 (sequence is synthesized)
atcgtgcagtattttctgaatcactcgccctctgtcgcccaggctggagtgcagcagcttactgcaatctctgcctcccg

SEQ ID NO: 548673 - DNA, 120 bp, Artificial Sequence
  ENSG00000168096_36 (sequence is synthesized)
gggtgccgggggcggtgccccggcgagggagcgtggcggcgagctgtttggggggggttggcgacggcagcccgagggcggcgcaaggcctgaggcccagcacagggagtcaaggtggac

SEQ ID NO: 548674 - DNA, 120 bp, Artificial Sequence
  ENSG00000168096_37 (sequence is synthesized)
cattttgagcagcgcagtgatggcttcgatcccacgtgatggggctttgcacacagttgtggatgtttaatgcgtgtagaataggttaacctgcttatctcaggcagctgtcagtaagta

SEQ ID NO: 548675 - DNA, 120 bp, Artificial Sequence
  ENSG00000168096_38 (sequence is synthesized)
cattctttaaccagactaattttattcactaattgcagaaatgcccaaacaaacaagcaaaataaaaataaagacagaaagtgatggcctggtgcggtggctcacacttgtaattccagc

SEQ ID NO: 548676 - DNA, 120 bp, Artificial Sequence
  ENSG00000168096_39 (sequence is synthesized)
ccgacaccaccccatacagtggcattccagaaggagagcagaaacgatgggtgagaaacagcctgaccatctcagtggatcagaaacacggatcttacatccagggagctcggtgaactc

SEQ ID NO: 548677 - DNA, 120 bp, Artificial Sequence
  ENSG00000168096_40 (sequence is synthesized)
cagacaggtgaactcggagaagagctgcgcttagacaagtggaaatcagaacatccgacactgagactctagaattagagggcagcgctctccgcctacaaagcattgtcgagatcagca

SEQ ID NO: 548678 - DNA, 120 bp, Artificial Sequence
  ENSG00000168096_41 (sequence is synthesized)
gctccatggtcccttcacagaactgagcatgtgtgggaggaggaggccagtttctggtgatgaacatacattgtccccacgtggccgaccatagtgtgaggactcacctgcctgcaacat

SEQ ID NO: 548679 - DNA, 120 bp, Artificial Sequence
  ENSG00000168096_42 (sequence is synthesized)
cctgccctgcctgagccaccagagtaggaggggacagcctgggcgccacacacaaggcactgtcttggttctgagcctggggaagtggtggggctccgagtggaggaaaacgtctctgct

SEQ ID NO: 548680 - DNA, 120 bp, Artificial Sequence
  ENSG00000168096_43 (sequence is synthesized)
gctagtgcagtggtgtagcaggggcaggaccagcctgtttcatgccctggaacaaccagccaggaaagatctaacccttgggccttcctcctcagtgatgtccgagctcagcgatgaagc

SEQ ID NO: 548681 - DNA, 120 bp, Artificial Sequence
  ENSG00000168096_44 (sequence is synthesized)
gcgagactctgtctcaaaaaaacaacaaaaaagtgaatcccgtaaaagggacagatcctggggttcagtcaccagttgttatcccctctgcaggcaagaactggggaagggaaagaaggc

SEQ ID NO: 548682 - DNA, 120 bp, Artificial Sequence
  ENSG00000168096_45 (sequence is synthesized)
ctgtgggcgttaaccatgtaggatcccaggtaaccatgcaagtgggtattattttaaatgtgactcccttgtcccaaccccagagtcgcagctaggaagcccacagttttttcccatggg

SEQ ID NO: 548683 - DNA, 120 bp, Artificial Sequence
  ENSG00000168096_46 (sequence is synthesized)
aaaatgcattgccagaattttaacagcaatcagtgagaaagatgggattctttggtcacagatttttcaagaatgtttctttaaggtgaggtgacaaaggatgaatcagtggcggtggga

SEQ ID NO: 548684 - DNA, 120 bp, Artificial Sequence
  ENSG00000168096_47 (sequence is synthesized)
cttgtccacggtggagtcccttctttcctcactgctcctctccacccagcagtgggctagtagatgccaggcctgtggtggtcagggtttttcaactgtggctgtgttgacaatccaggc

SEQ ID NO: 548685 - DNA, 120 bp, Artificial Sequence
  ENSG00000168096_48 (sequence is synthesized)
tggatcattctttgctgtgggggctgtcctggacactgtgggatgtttagcggcagccttggcctccagcagcccttccctgcccagttgtgagaaccaaaaatgccttcacacattgcc

SEQ ID NO: 548686 - DNA, 120 bp, Artificial Sequence
  ENSG00000168096_49 (sequence is synthesized)
acatattccctggttgagtgccatctgcctatctggtggtgtgaaagagcatagctggccttgggctaggaggatgcgaaatcagagcaaggagacgaaggctcagggcctcacaaggca

SEQ ID NO: 548687 - DNA, 120 bp, Artificial Sequence
  ENSG00000168096_50 (sequence is synthesized)
gtgtacgagcaactgtcagcatttttctgcctgcctgcctccaatccccacaacgtccagggtggcagataacttctgcttcctgtcaactcatcccgcctggcctagcctcgccaccag

SEQ ID NO: 548688 - DNA, 120 bp, Artificial Sequence
  ENSG00000168096_51 (sequence is synthesized)
tgaggtggagatttcagaggtagccagtgggaatagccaacaggtgggacgacaggcagacatctgtctttaggacaaagaccagccctggggacagacaccagaagagtaaatggagct

SEQ ID NO: 548689 - DNA, 120 bp, Artificial Sequence
  ENSG00000168096_52 (sequence is synthesized)
gatgtgttatattcactgttctcatgtcacctgttaattctggaaagggacagtgttctacgcttagggatcggtgactcgtgcactgctcagggtttatcttcagcagggagtttttgc

SEQ ID NO: 548690 - DNA, 120 bp, Artificial Sequence
  ENSG00000168096_53 (sequence is synthesized)
ctgaccggaaggtccgggtgcgggacgtgtgcattccacggcgcccgggagctgtcccggtgccgacccgcgagcttcccggcgtgctccgcgccctcccgcaactacttccggggcggg

SEQ ID NO: 548691 - DNA, 120 bp, Artificial Sequence
  ENSG00000168096_54 (sequence is synthesized)
tgtgcccatccccacttatcccctgggcctggcgctggacacagccatccagcagaggacaggaaaggggtaggtgtggacggccctggttcttgtgaggaatgggagaagcttctggtc

SEQ ID NO: 548692 - DNA, 120 bp, Artificial Sequence
  ENSG00000168096_55 (sequence is synthesized)
cagcatccccgtgcggcttaagggagccgttccacagcaacaggtttagctccttgcttgggagcccctgaggctttcagggcaggccccagtaggaatgtctgttataactgcacctcc

SEQ ID NO: 548693 - DNA, 120 bp, Artificial Sequence
  ENSG00000168096_56 (sequence is synthesized)
gtgcagcagctgtttccatagtgcccaccgtgtgccaagcactgctccgggtgcttgggatttatcagtgaacaaaaaagacagaagccctgcccgtctgtatagaggggagggtttagg

SEQ ID NO: 548694 - DNA, 120 bp, Artificial Sequence
  ENSG00000168096_57 (sequence is synthesized)
ggaggcggctcagcccggggcacgcccatgcgcagcacctcggtgagggctgcaggcggacgccctgtcttcccgccctcagaggaacatgctttctgtgccaacctggggcccgtccag

SEQ ID NO: 548695 - DNA, 120 bp, Artificial Sequence
  ENSG00000168101_0 (sequence is synthesized)
agtggcagcggcggggacggggtcagtgccaagatgtcgacggcggcggttccggagctgaagcagatcagccgggtggaggcgatgcgcctagggccgggctggagccactcgtgccac

SEQ ID NO: 548696 - DNA, 120 bp, Artificial Sequence
  ENSG00000168101_1 (sequence is synthesized)
gccatgctgtacgccgccaaccctgggcagctcttcggccgcatccccatgcgcttctcggtgctgatgcagatgcgtttcgacgggctgctgggcttccccgggggcttcgtggaccgg

SEQ ID NO: 548697 - DNA, 120 bp, Artificial Sequence
  ENSG00000168101_2 (sequence is synthesized)
cgcttctggtcgctggaggacggcctgaaccgggtgctgggcctgggcctgggctgcctgcgcctcaccgaggccgactacctgagctcgcacctgaccgagggcccacaccgcgtcgtg

SEQ ID NO: 548698 - DNA, 120 bp, Artificial Sequence
  ENSG00000168101_3 (sequence is synthesized)
gcgcacctgtacgcgcggcagctgacgctggagcagctgcacgccgtggagatcagcgcggtgcactcgcgcgaccacggcctggaggtgctgggcctcgtgcgggtcccgctgtacacc

SEQ ID NO: 548699 - DNA, 120 bp, Artificial Sequence
  ENSG00000168101_4 (sequence is synthesized)
cagaaggaccgagtcggaggcttccccaacttcctgagcaacgccttcgtgagcacggctaagtgccagctcctctttgccctcaaggtgctcaacatgatgcccgaggagaagctggtt

SEQ ID NO: 548700 - DNA, 120 bp, Artificial Sequence
  ENSG00000168101_5 (sequence is synthesized)
gaagaaggccctggagaagttgctcccggcctcctcttgagggctgcctgagctggtggcaccctcccctgggccggaagactgggaattcctgctaagtgtggcttctagagtgtttgt

SEQ ID NO: 548701 - DNA, 120 bp, Artificial Sequence
  ENSG00000168101_6 (sequence is synthesized)
gtgtaccccgcttctgactgcctagggcgagtgggcatcctgtcatcatctccactgtcccaagcagtcactaggtggcggccgggccagctggaacccagcccatcctctcaggcagag

SEQ ID NO: 548702 - DNA, 120 bp, Artificial Sequence
  ENSG00000168101_7 (sequence is synthesized)
cagggtggtccgggcacactgggcctgcctctccagcctcaggatgctcttgtttattctgggctcagaccctcctcttgtacgtctcatcacagctggtagagacccaggagtgcctga

SEQ ID NO: 548703 - DNA, 120 bp, Artificial Sequence
  ENSG00000168101_8 (sequence is synthesized)
ttgtcccacaggggtggcgcacagctctgggaccactcagaagatgggatgtgtgggtggaggatgccttgtctcggtcagctcattcctgcctccttcctgagccagttcagggcctgg

SEQ ID NO: 548704 - DNA, 120 bp, Artificial Sequence
  ENSG00000168101_9 (sequence is synthesized)
gggagagccagcttggggtaggaagttaataatactgttaatttgggttgttgttggatttactttgctagattttctctttcaccacgtgtgaactgtgggtgaggtttcaaagtagct

SEQ ID NO: 548705 - DNA, 120 bp, Artificial Sequence
  ENSG00000168101_10 (sequence is synthesized)
tcaccccacgtggcttggttcccagggacagtcagggcctcgggggcccagctatgtacaacgaagctgtcgaaggagaagacaataaagtcgctccgcagctgctctgtgtgtttctca

SEQ ID NO: 548706 - DNA, 120 bp, Artificial Sequence
  ENSG00000168101_11 (sequence is synthesized)
aaggcaccgatgggtaacacgtctcctgagggtcccctggccgggctgggtcgggtgtcgctgtctccagcaatggggtggggagaggggtctggggctgggaggccgggaaaggagggg

SEQ ID NO: 548707 - DNA, 120 bp, Artificial Sequence
  ENSG00000168101_12 (sequence is synthesized)
cgggggtgggggccggcgctggggctccctcagggctgtgttacatccgccttgctgcctgccattgccaatcctgggagtgggggagtgggatcggtggggaggaagggatgggggagg

SEQ ID NO: 548708 - DNA, 120 bp, Artificial Sequence
  ENSG00000168101_13 (sequence is synthesized)
agcggggattgcttggggagttgggaaacttgagcacagcgggggttgtaaaacttgggaacctcatgttgggcgtgaaggctcttgggatttgtactttgtggtctggaagggctggac

SEQ ID NO: 548709 - DNA, 120 bp, Artificial Sequence
  ENSG00000168101_14 (sequence is synthesized)
tgcgggtgttcaggcttcgttgggtggacggggggagcatggggtgcggaccccggggtggggtggcctgggtacgaggggggggagtgcatggggtcagcctccacacttgcttgggga

SEQ ID NO: 548710 - DNA, 120 bp, Artificial Sequence
  ENSG00000168101_15 (sequence is synthesized)
ggagggggctgcactgctccgagggagctggctggcttctgccaggccctgcgtgggtctcccattaagtccttggcaaagctggctgctcataccctggcctcatagcttccaggcccc

SEQ ID NO: 548711 - DNA, 120 bp, Artificial Sequence
  ENSG00000168116_0 (sequence is synthesized)
ggtggcggctgcggcagtagggacagcaggagcagtggtgctgtcagcgcggccgtcggagacatgggagacccggggtcggaaataatagaatctgtccctccagctggccctgaggca

SEQ ID NO: 548712 - DNA, 120 bp, Artificial Sequence
  ENSG00000168116_1 (sequence is synthesized)
tctgagtcaacaacggatgaaaatgaagacgacattcagtttgtcagtgaaggaccatcgagacctgttcttgaatacatcgatctggtctgtggtgatgatgaaaaccctagcgcctat

SEQ ID NO: 548713 - DNA, 120 bp, Artificial Sequence
  ENSG00000168116_2 (sequence is synthesized)
tatagtgatattctgtttcctaaaatgccaaaacgacagggtgattttttgcattttttaaatgtgaagaaggtgaaaacagacacagaaaataatgaagtgagcaaaaatcactgcaga

SEQ ID NO: 548714 - DNA, 120 bp, Artificial Sequence
  ENSG00000168116_3 (sequence is synthesized)
ttgtctaaggcaaaggaaccacatttcgagtatattgaacaaccaatcattgaagaaaagccatcactttcatcaaagaaagaaatagataatcttgtgcttccagattgttggaatgaa

SEQ ID NO: 548715 - DNA, 120 bp, Artificial Sequence
  ENSG00000168116_4 (sequence is synthesized)
aaacaagcatttatgtttacagaacaatacaaatggcttgaaataaaagaaggtaaattaggatgtaaggattgttcagcagttcggcatttgggatcgaaagcagaaaagcatgtccat

SEQ ID NO: 548716 - DNA, 120 bp, Artificial Sequence
  ENSG00000168116_5 (sequence is synthesized)
gtgtccaaggaatggattgcatatttagtaacccctaatggcagtaataaaactactaggcaagcttctctacgaaaaaaaattagggaacatgatgtttctaaagcccatggtaaaatt

SEQ ID NO: 548717 - DNA, 120 bp, Artificial Sequence
  ENSG00000168116_6 (sequence is synthesized)
caggatttgttaaaggaatcaactaatgattcaatttgtaatttagtgcataaacaaaataataaaaatattgatgctactgtaaaagttttcaatactgtttacagtttagtaaaacat

SEQ ID NO: 548718 - DNA, 120 bp, Artificial Sequence
  ENSG00000168116_7 (sequence is synthesized)
aacagacctttatctgatattgagggggcaagagaattacaggaaaaaaatggagaggtaaattgtttaaatacacgttacagtgcaacaagaatagcagaacatattgcaaaagaaatg

SEQ ID NO: 548719 - DNA, 120 bp, Artificial Sequence
  ENSG00000168116_8 (sequence is synthesized)
aagatgaagatatttaagaatattatagaagagaatgccaaaatctgtatcataattgatgaggcatctacagtttcaaagaaaaccaccctagtgatttatctccagtgcacaattcag

SEQ ID NO: 548720 - DNA, 120 bp, Artificial Sequence
  ENSG00000168116_9 (sequence is synthesized)
tcagctcctgcacctgttatgttatttgtggctttaaaagaattggtgtcaactatagcagagtgtattgtcaatacattattgactactttaaatgattgtggttttacaaatgaatat

SEQ ID NO: 548721 - DNA, 120 bp, Artificial Sequence
  ENSG00000168116_10 (sequence is synthesized)
ttgaaagcaaatttaattgcattttgttctgatggtgctaatacaatcctgggaagaaagtctggagtagctacaaaattgttagaaaattttcctgaaatcatcatttggaactgttta

SEQ ID NO: 548722 - DNA, 120 bp, Artificial Sequence
  ENSG00000168116_11 (sequence is synthesized)
ttctatatccgaaataaaacaaattaatcatttaaaaatatttattgataaaatttattctatttatcatcaacctaataaaaatcaaaccaagcttctaggaactgtagctaaagaact

SEQ ID NO: 548723 - DNA, 120 bp, Artificial Sequence
  ENSG00000168116_12 (sequence is synthesized)
tgaaactgaaattattaaaattggtcgagtaatgggaccaagatgggcggcatgtagtttacaagctgctactgctgtatggcatgcatatcctatattatatatgcatttttctcattc

SEQ ID NO: 548724 - DNA, 120 bp, Artificial Sequence
  ENSG00000168116_13 (sequence is synthesized)
ttactctggtttggcgaagagattagctaacattaatttcttacaagaccttgctttaatgattgacattcttgaagaattttcagtactttcaactgcattacagtcaagatcaactaa

SEQ ID NO: 548725 - DNA, 120 bp, Artificial Sequence
  ENSG00000168116_14 (sequence is synthesized)
tattaagaaagcacaaaaattgatcaaacgtaccataagagctttggaaaatttaaaaattggtactggaaagtatgaatctcaaattgaagatttgatcaagtcagataagtttaaaga

SEQ ID NO: 548726 - DNA, 120 bp, Artificial Sequence
  ENSG00000168116_15 (sequence is synthesized)
tattccatttaataaaaacaataaatttaatgctcttcctaggagtatattactagacaatataattcagcacatgaacctacgccttttatctgacagaaaccatgaagatatttttaa

SEQ ID NO: 548727 - DNA, 120 bp, Artificial Sequence
  ENSG00000168116_16 (sequence is synthesized)
ttactttgatttgctggaaccttccacatggccttatgaagaaataacttcaccatggatagctggtgaaaaaacattatttcatttgtgtaaaattttaaaatatgaagttgatttgaa

SEQ ID NO: 548728 - DNA, 120 bp, Artificial Sequence
  ENSG00000168116_17 (sequence is synthesized)
tgattttcgggaatttgtaaataataatataaaatcaaacaatgtttcaattcctacaactatatacaaagctaaaaagatagttagcaccattgcaatcaatagtgctgaagctgaaag

SEQ ID NO: 548729 - DNA, 120 bp, Artificial Sequence
  ENSG00000168116_18 (sequence is synthesized)
gggtttcaatttaatgaacataatttgtacaagggtgagaaatagtttaacaatagatcatgtatcagatttaatgacaataaatttactggggaaagaattagcagattgggatgcaac

SEQ ID NO: 548730 - DNA, 120 bp, Artificial Sequence
  ENSG00000168116_19 (sequence is synthesized)
accgtttgtaaaatcttggtcaaattgcaaccacaggttggctacagatacaagagttcggcaaaagtcaacaaaagtcttccatgagaatcaattggctatatggaacttaaaatagaa

SEQ ID NO: 548731 - DNA, 120 bp, Artificial Sequence
  ENSG00000168116_20 (sequence is synthesized)
tattgtatacgttttttgtcatctgtaaattatgtactacacatcctttatatacataaaggtcttttttttttttggaaagccagttaaacttttatcagcatgttgctgtttaaaagg

SEQ ID NO: 548732 - DNA, 120 bp, Artificial Sequence
  ENSG00000168116_21 (sequence is synthesized)
cgttctttaagaagataatcttgaagattggttttagaagctatagttttttagagattggcccatgtttgctagagtgggtcataatacatattccatgaagttctgtacagaacaaac

SEQ ID NO: 548733 - DNA, 120 bp, Artificial Sequence
  ENSG00000168116_22 (sequence is synthesized)
accgtttataattttgtactgttttactttaagtaaggatgcaaaaaatagcaggactcagctaagttctaagccctggaggttatattaaataaaagagaaatggaataaaaactgtaa

SEQ ID NO: 548734 - DNA, 120 bp, Artificial Sequence
  ENSG00000168116_23 (sequence is synthesized)
gtcggagacatgggagacccggggtcggaagtgagtagtcgagtgagggtcctggcgttctcagaggcgaaccgcgaagggtttgtgttttctgcggtctgaggcctggtgctccgtcgc

SEQ ID NO: 548735 - DNA, 120 bp, Artificial Sequence
  ENSG00000168116_24 (sequence is synthesized)
aggaagcccgggaatgagagaaagaggctccggggagatagcggaccagtgagggctgcccctcttttgaagcggttttcgtctctttccgccagtggcctcccagctcacgcaggggcg

SEQ ID NO: 548736 - DNA, 120 bp, Artificial Sequence
  ENSG00000168118_0 (sequence is synthesized)
ctcttcctcctcgcggtcgcggccggacggagggtggagggccctgcgcctgcgcggagctggagtccggctgggccgcagccgctgggagaccggcggttgccgtggggaccggtcggg

SEQ ID NO: 548737 - DNA, 120 bp, Artificial Sequence
  ENSG00000168118_1 (sequence is synthesized)
cccctccctcctccggtcccccgccccaggtccttccccaccgagacgcgccggcggaccgcgggcgagtgcagccggtgacccggcgagaggcggcgccgctcccaagatgtcgcagac

SEQ ID NO: 548738 - DNA, 120 bp, Artificial Sequence
  ENSG00000168118_2 (sequence is synthesized)
ggccatgtccgaaacctacgattttttgtttaagttcttggttattggaaatgcaggaactggcaaatcttgcttacttcatcagtttattgaaaaaaaattcaaagatgactcaaatca

SEQ ID NO: 548739 - DNA, 120 bp, Artificial Sequence
  ENSG00000168118_3 (sequence is synthesized)
tacaataggagtggaatttggttcaaagataataaatgttggtggtaaatatgtaaagttacaaatatgggatacagcaggacaagaacgattcaggtccgtgacgagaagttattaccg

SEQ ID NO: 548740 - DNA, 120 bp, Artificial Sequence
  ENSG00000168118_4 (sequence is synthesized)
aggcgcggccggggctctcctcgtctatgatatcaccagccgagaaacctacaatgcgcttactaattggttaacagatgcccgaatgctagcgagccagaacattgtgatcatcctttg

SEQ ID NO: 548741 - DNA, 120 bp, Artificial Sequence
  ENSG00000168118_5 (sequence is synthesized)
tggaaacaagaaggacctggatgcagatcgtgaagttaccttcttagaagcctccagatttgctcaagaaaatgagctgatgtttttggaaacaagtgcgctcacaggggagaatgtaga

SEQ ID NO: 548742 - DNA, 120 bp, Artificial Sequence
  ENSG00000168118_6 (sequence is synthesized)
agaggcttttgtacagtgtgcaagaaaaatacttaacaaaatcgaatcaggtgagctggacccagaaagaatgggctcaggtattcagtacggagatgctgccttgagacagctgaggtc

SEQ ID NO: 548743 - DNA, 120 bp, Artificial Sequence
  ENSG00000168118_7 (sequence is synthesized)
accgcggcgcgcacaggccccgaacgctcaggagtgtggttgttaggagagcacacaggtgttcatacagtggcatttgggacacaatcgttggaacctgaagaatctgaagtttttttt

SEQ ID NO: 548744 - DNA, 120 bp, Artificial Sequence
  ENSG00000168118_8 (sequence is synthesized)
accaccatctttttctactctgtatggaagtagatctttatggggaaaagagaatttggggtgttctgcaagccagtcaaagtggcacagcaaatcatataaatcgaattaaatggacaa

SEQ ID NO: 548745 - DNA, 120 bp, Artificial Sequence
  ENSG00000168118_9 (sequence is synthesized)
caccgttagatgtgtatgtaaaaattttctgtttcatatttttcctttcactttcggtttaaaacatgctatatgtactgtatgtcctgtagcccagtgcggctccacagcatggaatct

SEQ ID NO: 548746 - DNA, 120 bp, Artificial Sequence
  ENSG00000168118_10 (sequence is synthesized)
gatgtatgatatgatagaatgtggcactaaatgcagtttcagattttattttttttaatcatatgaactaaaattgtcaattgtgaggtgtgcttttctcatcatgttggttatattgca

SEQ ID NO: 548747 - DNA, 120 bp, Artificial Sequence
  ENSG00000168118_11 (sequence is synthesized)
caattggttatatttatgacctgatattcaaagactctggcattgatagccagtgtgttttcttatttaactccgtttactacattctacatggtgtttacgtgatccacacttgaaata

SEQ ID NO: 548748 - DNA, 120 bp, Artificial Sequence
  ENSG00000168118_12 (sequence is synthesized)
gtcagttcaggaagtatatctggagtacctgctctgtttttggctgtgagactagcactaaggattctggtacctttacccaaacctactgggctactaatacttctctcagcagttgat

SEQ ID NO: 548749 - DNA, 120 bp, Artificial Sequence
  ENSG00000168118_13 (sequence is synthesized)
caaatacaatagaccatgtaagctggggccgctcatccacttccagtttgctggtctccctgctagaaaacacattgtactgtgctttttctggaattcagtataatggcatcactgcct

SEQ ID NO: 548750 - DNA, 120 bp, Artificial Sequence
  ENSG00000168118_14 (sequence is synthesized)
gtttttcacatcttttgtttcctgttcattttaaggaaacctactaaatccagttaatattaaatggacaccactcattaagaaatttctttatggcttctgctgaatacttaaatgcct

SEQ ID NO: 548751 - DNA, 120 bp, Artificial Sequence
  ENSG00000168118_15 (sequence is synthesized)
tactacagttatccagttgacatgtttttaattcatataaggtatattgggtatattgaagtatatattgtattacaaagacttgttcttgtattttaaaatgtcagtgcaaaaaatata

SEQ ID NO: 548752 - DNA, 120 bp, Artificial Sequence
  ENSG00000168118_16 (sequence is synthesized)
tggtggaacctttctttaaagttgaaatgcagtattatttaaatctgaaaggttaaaaagctttcttcaccttatatatgttcttccactgtgactttttagttgaagactagtaaatta

SEQ ID NO: 548753 - DNA, 120 bp, Artificial Sequence
  ENSG00000168118_17 (sequence is synthesized)
acttttagttagaagatgcctactgcttttgttgtttattttaatcagcagagcacagagacacataaaaactctgggaaatgactaggataaaaatatcagtatgtatctgttttagat

SEQ ID NO: 548754 - DNA, 120 bp, Artificial Sequence
  ENSG00000168118_18 (sequence is synthesized)
attttgagttttgctttttttatgccttgaatattttatttcaaaaagtatctgaagcaaattctcagactgaactacttcttagacctcactgtaagaatattttattcaatgtctcat

SEQ ID NO: 548755 - DNA, 120 bp, Artificial Sequence
  ENSG00000168118_19 (sequence is synthesized)
ttatgatagatttgcaagctgctcatttttgaacagctttttgcatgggataggagcatgtctattctaacacatcagcttattcaaaagcaagaattttaaaaataagataaatgtaaa

SEQ ID NO: 548756 - DNA, 120 bp, Artificial Sequence
  ENSG00000168118_20 (sequence is synthesized)
gttgttttataaacgatcctgttaattaaaccacagacaccatatatccttctgcatcctttggccaataaaagttgctggagaaccaaaccatggtggttcttaatcaggctttgcctt

SEQ ID NO: 548757 - DNA, 120 bp, Artificial Sequence
  ENSG00000168118_21 (sequence is synthesized)
tagggagaatgaggaggagagataattgggtattgttcaggctagtaataaatgtcatgtttctatttcccgcaactcattaagttttcaggaagctcttaatttagatttctaggaaag

SEQ ID NO: 548758 - DNA, 120 bp, Artificial Sequence
  ENSG00000168118_22 (sequence is synthesized)
taattattcagtcttcctagaaaaagattataaagaccatttaaactggagattgtaatttattcttttacagtccagcatttaagtgaaaatgagaacatcacaatttgggaatctgta

SEQ ID NO: 548759 - DNA, 120 bp, Artificial Sequence
  ENSG00000168118_23 (sequence is synthesized)
atggttttgttgaaaacattacttgtggcttgtataagagtggctgaattcaagaacattgattcttagcagatcaataatagtatttaaagaatctgatgctaaaattagaaacctaaa

SEQ ID NO: 548760 - DNA, 120 bp, Artificial Sequence
  ENSG00000168118_24 (sequence is synthesized)
attcagaaacttcatttttggaaactttgattgacaagacagctaaaatttaggttagctctctgcagcatggattactaaagaatacaggaggatctccgcgcaactgcattataattc

SEQ ID NO: 548761 - DNA, 120 bp, Artificial Sequence
  ENSG00000168118_25 (sequence is synthesized)
ggaggctgacccattctcaggaggatgtggcactgtgtattgtacagtatgtttctagattcaaatcaaagcacaagcttgtttttctgtgttccttttttaaagaagaactttttaaaa

SEQ ID NO: 548762 - DNA, 120 bp, Artificial Sequence
  ENSG00000168124_0 (sequence is synthesized)
atgagcgggacaaaccagtcgagtgtctccgagttcctcctcctgggactctccaggcagccccagcagcagcatctcctctttgtgttcttcctcagcatgtacctggccactgtcctg

SEQ ID NO: 548763 - DNA, 120 bp, Artificial Sequence
  ENSG00000168124_1 (sequence is synthesized)
gggaacctgctcatcatcctgtccgtaagcatagactcctgcctgcacacccccatgtacttcttcctcagcaacctgtcttttgtggacatctgcttctccttcaccaccgtccccaag

SEQ ID NO: 548764 - DNA, 120 bp, Artificial Sequence
  ENSG00000168124_2 (sequence is synthesized)
atgctggccaatcacatactcgagactcagaccatctccttctgtggctgtctcacacagatgtatttcgttttcatgttcgtggacatggacaatttcctcctagctgtgatggcctat

SEQ ID NO: 548765 - DNA, 120 bp, Artificial Sequence
  ENSG00000168124_3 (sequence is synthesized)
aatgtccttctgcacaccctgctgatggctccactctcattctgtgcagacaatgccatcactcacttcttctgcgatgtgactcccctactgaaactctcctgctcagacacacacctc

SEQ ID NO: 548766 - DNA, 120 bp, Artificial Sequence
  ENSG00000168124_4 (sequence is synthesized)
aatgaggtcataatccttagtgagggtgccctggtcatgatcaccccatttctttgcatcctggcttcttatatgcacatcacctgcactgtcctgaaggtcccatccacaaagggaagg

SEQ ID NO: 548767 - DNA, 120 bp, Artificial Sequence
  ENSG00000168124_5 (sequence is synthesized)
tggaaagccttctccacctgtggttctcacctggctgtggttctcctcttctacagcaccatcattgctgtgtattttaaccctctgtcctcccactcagctgagaaagacactatggct

SEQ ID NO: 548768 - DNA, 120 bp, Artificial Sequence
  ENSG00000168124_6 (sequence is synthesized)
actgtgttgtatacagtagtgactcccatgctaaaccctttcatctacagcctgaggaacaggtacttgaaaggggctctgaaaaaagtagttggcagggtggtgttttctgtctgatga

SEQ ID NO: 548769 - DNA, 120 bp, Artificial Sequence
  ENSG00000168131_0 (sequence is synthesized)
gctgacaaaatcaggaagtgtgttgttaacttcctgacttcttatatttcagagaacgaagagttgaaccatttaacatgaattgggtaaataagagtgtcccacaggagttcattctgt

SEQ ID NO: 548770 - DNA, 120 bp, Artificial Sequence
  ENSG00000168131_1 (sequence is synthesized)
tagttttctcagatcaaccatggctagagattccaccctttgtgatgtttctgttttcctatatcttgacaatctttggcaatctgacaataattcttgtgtcacatgtggatttcaaac

SEQ ID NO: 548771 - DNA, 120 bp, Artificial Sequence
  ENSG00000168131_2 (sequence is synthesized)
tccacacccctatgtacttttttcttagcaatctctcactcctggacctttgctataccacaagtacagttccacaaatgctggtaaacatatgcaacaccaggaaagtaatcagttatg

SEQ ID NO: 548772 - DNA, 120 bp, Artificial Sequence
  ENSG00000168131_3 (sequence is synthesized)
gtggctgtgtggcccagcttttcattttcctggccttgggttccacagaatgtcttctcctggccgtcatgtgctttgataggtttgtagctatttgtcggcctctccattactcaatta

SEQ ID NO: 548773 - DNA, 120 bp, Artificial Sequence
  ENSG00000168131_4 (sequence is synthesized)
tcatgcaccagaggctctgcttccagttggcagctgcatcctggattagtggctttagcaattcagtattacagtccacctggacacttaagatgccactgtgtggtcacaaagaagtgg

SEQ ID NO: 548774 - DNA, 120 bp, Artificial Sequence
  ENSG00000168131_5 (sequence is synthesized)
gtgaagtccctgctctgctcaagttgtcctgtgttgacacaacagcaaatgaggctgaactattcttcatcagtgtgctattccttctaatacccgtgacactcatccttatatcgtatg

SEQ ID NO: 548775 - DNA, 120 bp, Artificial Sequence
  ENSG00000168131_6 (sequence is synthesized)
cttttattgtccaagcagtgttgagaatccagtctgctgaaggtcaacgaaaggcatttgggacatgtggctcccatctaattgtggtgtcacttttttatggtacagctatctccatgt

SEQ ID NO: 548776 - DNA, 120 bp, Artificial Sequence
  ENSG00000168131_7 (sequence is synthesized)
acctgcaaccaccttcacccagctccaaagaccggggaaagatggtttctctcttctgtggaatcattgcacccatgctgaatccccttatatatacacttaggaacaaagaggtaaagg

SEQ ID NO: 548777 - DNA, 120 bp, Artificial Sequence
  ENSG00000168131_8 (sequence is synthesized)
aagcctttaaaaggttggttgcaaagagtcttcttaatcaagaaataagaaatatgcaaatgataagctttgctaaagacacagtgcttacttaccttactaacttctccgcaagttgtc

SEQ ID NO: 548778 - DNA, 120 bp, Artificial Sequence
  ENSG00000168131_9 (sequence is synthesized)
ctatttttgtcattactatagaaaactattgtaatctccctcaaagaaaatttccttgacaaaaagctatatttgtttctgttgcctaaacattttcattgaacaagcccccagaattgg

SEQ ID NO: 548779 - DNA, 80 bp, Artificial Sequence
  ENSG00000168135_0 (sequence is synthesized)
gggagcggcgcgggacggccgggacgcgcggagaccccaagacccacgcgcagaccgagcggcagccggggaggggagcg

SEQ ID NO: 548780 - DNA, 120 bp, Artificial Sequence
  ENSG00000168135_1 (sequence is synthesized)
ctcccctttccgcgcccgggacgccgcccgccggatcgcgccttgggatgtagcgcccgctcgccgcctcccggactctcgtcggaccctccgcccagcggccctgcgtcttcccaggtg

SEQ ID NO: 548781 - DNA, 120 bp, Artificial Sequence
  ENSG00000168135_2 (sequence is synthesized)
accacgccggcttcaggacatgcacggacacagccgcaacggccaggcccacgtgccccggcggaagcgccgcaaccgcttcgtcaagaagaacggccaatgcaacgtgtacttcgccaa

SEQ ID NO: 548782 - DNA, 120 bp, Artificial Sequence
  ENSG00000168135_3 (sequence is synthesized)
cctgagcaacaagtcgcagcgctacatggcggacatcttcaccacctgcgtggacacgcgctggcgctacatgctcatgatcttctccgcggccttccttgtctcctggctctttttcgg

SEQ ID NO: 548783 - DNA, 120 bp, Artificial Sequence
  ENSG00000168135_4 (sequence is synthesized)
cctcctcttctggtgtatcgccttcttccacggtgacctggaggccagcccaggggtgcctgcggcggggggcccggcggcgggtggtggcggagcagccccggtggcccccaagccctg

SEQ ID NO: 548784 - DNA, 120 bp, Artificial Sequence
  ENSG00000168135_5 (sequence is synthesized)
catcatgcacgtgaacggcttcctgggtgccttcctgttctcggtggagacgcagacgaccatcggctatgggttccggtgcgtgacagaggagtgcccgctggcagtcatcgctgtggt

SEQ ID NO: 548785 - DNA, 120 bp, Artificial Sequence
  ENSG00000168135_6 (sequence is synthesized)
ggtccagtccatcgtgggctgcgtcatcgactccttcatgattggcaccatcatggccaagatggcgcggcccaagaagcgggcgcagacgttgctgttcagccaccacgcggtcatttc

SEQ ID NO: 548786 - DNA, 120 bp, Artificial Sequence
  ENSG00000168135_7 (sequence is synthesized)
ggtgcgcgacggcaagctctgcctcatgtggcgcgtgggcaacctgcgcaagagccacattgtggaggcccacgtgcgggcccagctcatcaagccctacatgacccaggagggcgagta

SEQ ID NO: 548787 - DNA, 120 bp, Artificial Sequence
  ENSG00000168135_8 (sequence is synthesized)
aacgtgggctatgacatcggcctggaccgcatcttcctggtgtcgcccatcatcattgtccacgagatcgacgaggacagcccgctttatggcatgggcaaggaggagctggagtcggag

SEQ ID NO: 548788 - DNA, 120 bp, Artificial Sequence
  ENSG00000168135_9 (sequence is synthesized)
gactttgagatcgtggtcatcctggagggcatggtggaggccacggccatgaccacccaggcccgcagctcctacctggccagcgagatcctgtggggccaccgctttgagcctgtggtc

SEQ ID NO: 548789 - DNA, 120 bp, Artificial Sequence
  ENSG00000168135_10 (sequence is synthesized)
ttcgaggagaagagccactacaaggtggactactcacgttttcacaagacctacgaggtggccggcacgccctgctgctcggcccgggagctgcaggagagtaagatcaccgtgctgccc

SEQ ID NO: 548790 - DNA, 120 bp, Artificial Sequence
  ENSG00000168135_11 (sequence is synthesized)
gccccaccgccccctcccagtgccttctgctacgagaacgagctggcccttatgagccaggaggaagaggagatggaggaggaggcagctgcggcggccgcggtggccgcaggcctgggc

SEQ ID NO: 548791 - DNA, 120 bp, Artificial Sequence
  ENSG00000168135_12 (sequence is synthesized)
ctggaggcgggttccaaggaggaggcgggcatcatccggatgctggagttcggcagccacctggacctggagcgcatgcaggcttccctcccgctggacaacatctcctaccgcagggag

SEQ ID NO: 548792 - DNA, 120 bp, Artificial Sequence
  ENSG00000168135_13 (sequence is synthesized)
tctgccatctgacctccaggcccggccctcaccactgcccacaagagcctctgccgggggtgggatgccaggacaccccctcccacactcaggacagagccaaccctggctccgtggacc

SEQ ID NO: 548793 - DNA, 120 bp, Artificial Sequence
  ENSG00000168135_14 (sequence is synthesized)
ttctggaggaaggtgggggtttcaaagactgggggaccccttcctcctgactccagcacccaggcctgggaagagctcggccccgatcagcctgagttccgccagcgcctacttctggtg

SEQ ID NO: 548794 - DNA, 120 bp, Artificial Sequence
  ENSG00000168135_15 (sequence is synthesized)
gctctaggtccccggatccaccacccttcccccactgactcttcaaggacgtgccctctttgctctcagaaccttggggaaggtggctggactgctgggcgggggacatctcggggtttc

SEQ ID NO: 548795 - DNA, 120 bp, Artificial Sequence
  ENSG00000168135_16 (sequence is synthesized)
agggtgggcagggggttagtttggggaggggggggtgcgtttcttttgcatgactgtggcctgttgctcatgactttcttttgtaaatatctataaatggagacagatggagacaccaaa

SEQ ID NO: 548796 - DNA, 120 bp, Artificial Sequence
  ENSG00000168137_0 (sequence is synthesized)
gctcagagactcacgcagccccagtcccgccagtccgccaacacagtagtgccggcccccctctttccctggccctgccccccctccccgcctttggctcgctccgcctttctgcccccc

SEQ ID NO: 548797 - DNA, 120 bp, Artificial Sequence
  ENSG00000168137_1 (sequence is synthesized)
acccccacctcacgggtacgggccattcccggccaggaaacgccgtggcgccgcgttgggcctaactcgagtcctgccgcctcccgggagtgccgtgcgccgcagcccgggcccaggccc

SEQ ID NO: 548798 - DNA, 120 bp, Artificial Sequence
  ENSG00000168137_2 (sequence is synthesized)
cggcagcgcctgggacaaggtcttcagaactactagcagataatttggggggacttcatattcagaagtctatataaaggattcctcatgtccataacatgttggatgaggctctgcagc

SEQ ID NO: 548799 - DNA, 120 bp, Artificial Sequence
  ENSG00000168137_3 (sequence is synthesized)
tcacccccactctcagagtggtcagtctccattaattggaccccgtgatttccaatctctgctgtgttggacgtcatgagcattgcaatccctctgggagtcaccacatcagatacatcc

SEQ ID NO: 548800 - DNA, 120 bp, Artificial Sequence
  ENSG00000168137_4 (sequence is synthesized)
tactcagatatggctgctggatcagaccctgaatctgtggaggctagtccagcagttaatgagaagagcgtgtattccactcataattatgggaccactcagaggcatgggtgtcgagga

SEQ ID NO: 548801 - DNA, 120 bp, Artificial Sequence
  ENSG00000168137_5 (sequence is synthesized)
ctgccttatgctacgatcatccctcgttctgacctgaatggcctgccgtcgcctgtagaggaacgctgtggagacagcccgaactctgaaggagaaactgtacctacctggtgtccttgt

SEQ ID NO: 548802 - DNA, 120 bp, Artificial Sequence
  ENSG00000168137_6 (sequence is synthesized)
ggtctttctcaggatggcttccttctcaactgtgacaagtgcaggggaatgagcagggggaaggttattagacttcatcggcggaagcaggacaacatatcaggtggggatagcagtgca

SEQ ID NO: 548803 - DNA, 120 bp, Artificial Sequence
  ENSG00000168137_7 (sequence is synthesized)
acagaaagctgggatgaggagctttctccttccactgtgttgtatacagcaacacagcacacacctacaagcatcaccttaactgttagaagaaccaaacccaagaagcggaaaaagagt

SEQ ID NO: 548804 - DNA, 120 bp, Artificial Sequence
  ENSG00000168137_8 (sequence is synthesized)
ccagaaaagggtcgtgcagcaccaaagacgaagaaaatcaagaattctccctctgaagcacagaatttagatgagaatacaactgagggctgggaaaatcggataagactatggactgac

SEQ ID NO: 548805 - DNA, 120 bp, Artificial Sequence
  ENSG00000168137_9 (sequence is synthesized)
cagtatgaagaagctttcactaatcagtacagtgcagatgtacagaacgcgcttgaacaacacctacattctagcaaggaatttgtgggcaaacctactattttagacactattaataag

SEQ ID NO: 548806 - DNA, 120 bp, Artificial Sequence
  ENSG00000168137_10 (sequence is synthesized)
actgaattggcctgtaataacacagttattggttcccaaatgcagttacagctgggaagagtcactcgtgttcaaaagcaccggaagatcctgagggctgcaagagatttggctttggac

SEQ ID NO: 548807 - DNA, 120 bp, Artificial Sequence
  ENSG00000168137_11 (sequence is synthesized)
actcttataatagagtatcgtgggaaagtcatgttacgacagcaatttgaggtcaatgggcatttcttcaaaaaaccatacccctttgtgctcttctactcaaaattcaatggtgtagag

SEQ ID NO: 548808 - DNA, 120 bp, Artificial Sequence
  ENSG00000168137_12 (sequence is synthesized)
atgtgtgtggatgcccgtactttcggtaatgatgctcggttcatcagaagatcatgtacaccaaatgcagaggtgcgacacatgattgcagatgggatgattcacctgtgcatctatgct

SEQ ID NO: 548809 - DNA, 120 bp, Artificial Sequence
  ENSG00000168137_13 (sequence is synthesized)
gtgtctgccatcaccaaggatgctgaggtcaccatagcatttgattatgagtatagtaactgtaattataaagtggactgtgcctgtcacaagggaaaccggaattgtcctatacaaaaa

SEQ ID NO: 548810 - DNA, 120 bp, Artificial Sequence
  ENSG00000168137_14 (sequence is synthesized)
aggaatcctaatgctacagaactgccactcctaccacctcctccaagcctacccaccattggagcagagactagacgtagaaaagcacgacggaaagagctagagatggagcagcagaat

SEQ ID NO: 548811 - DNA, 120 bp, Artificial Sequence
  ENSG00000168137_15 (sequence is synthesized)
gaggcttcagaggagaataatgaccagcaatcacaagaagttccagaaaaagtaactgtatccagtgatcatgaggaagtagacaatccagaagaaaaaccagaagaagagaaagaagag

SEQ ID NO: 548812 - DNA, 120 bp, Artificial Sequence
  ENSG00000168137_16 (sequence is synthesized)
gttatagatgaccaggagaacctagctcatagcaggaggaccagggaagatagaaaggtagaagccatcatgcatgcttttgaaaacttagagaaaagaaagaagcggcgggatcagccc

SEQ ID NO: 548813 - DNA, 120 bp, Artificial Sequence
  ENSG00000168137_17 (sequence is synthesized)
ttggaacagagcaactctgatgtagagattactacaaccacctcagagactcctgttggtgaagagacaaaaactgaagcccctgaatctgaagttagcaactctgtttcaaatgttacc

SEQ ID NO: 548814 - DNA, 120 bp, Artificial Sequence
  ENSG00000168137_18 (sequence is synthesized)
atcccaagcaccccacagagtgttggtgtgaatacccggaggtcttcccaagcaggggatattgctgcagaaaaactagtccccaagccacctccagcaaagccttctaggccccggccg

SEQ ID NO: 548815 - DNA, 120 bp, Artificial Sequence
  ENSG00000168137_19 (sequence is synthesized)
aagagtcgaatttctcggtacaggaccagttcagcccaaagactaaagcgtcagaagcaggccaatgcacagcaggcagaattgtcacaagctgccttggaagagggaggaagtaacagt

SEQ ID NO: 548816 - DNA, 120 bp, Artificial Sequence
  ENSG00000168137_20 (sequence is synthesized)
ttagtaactcctactgaagctggaagtctagacagttcaggagaaaacaggccattaacagggtctgacccaactgtggtgtcaattactggatcccatgtcaaccgtgctgcatctaaa

SEQ ID NO: 548817 - DNA, 120 bp, Artificial Sequence
  ENSG00000168137_21 (sequence is synthesized)
taccccaaaaccaaaaagtatctagttacagaatggttgaatgacaaagcagagaagcaagagtgccctgttgagtgccctttacgtatcacaacggatccaactgtactggcaacgacc

SEQ ID NO: 548818 - DNA, 120 bp, Artificial Sequence
  ENSG00000168137_22 (sequence is synthesized)
ctaaacatgttaccaggtcttatccattccccgttaatttgcaccacccccaaacactacattcgctttggctcaccctttatccctgagagacgtcgaaggccccttctgcctgatggc

SEQ ID NO: 548819 - DNA, 120 bp, Artificial Sequence
  ENSG00000168137_23 (sequence is synthesized)
acattcagctcctgtaagaagcgctggataaaacaagccttagaagaagggatgactcaaacatcatctgtaccccaagagactagaactcagcacctataccaaagcaatgagaatagt

SEQ ID NO: 548820 - DNA, 120 bp, Artificial Sequence
  ENSG00000168137_24 (sequence is synthesized)
agctcttctagtatctgcaaagacaatgcagacttgttgagcccattaaagaaatggaagtctcgctatctgatggagcagaatgtcaccaagttacttcggcctctgtctccagtcaca

SEQ ID NO: 548821 - DNA, 120 bp, Artificial Sequence
  ENSG00000168137_25 (sequence is synthesized)
ccaccccctcccaattcaggctcaaagagtccccagctggccacacctggctcatctcacccaggagaagaggagtgtcgaaatggatacagcctcatgttttcaccagtcacatctctt

SEQ ID NO: 548822 - DNA, 120 bp, Artificial Sequence
  ENSG00000168137_26 (sequence is synthesized)
actactgctagtcgctgcaacactcctctacagtttgagctttgtcaccgaaaagacctggatttggcaaaagtaggataccttgactccaacactaacagctgtgctgatagaccttcc

SEQ ID NO: 548823 - DNA, 120 bp, Artificial Sequence
  ENSG00000168137_27 (sequence is synthesized)
ctactcaactcaggtcattctgacctggctcctcatccctccctcggacccacttctgagactggtttcccaagcagaagtggagatggacatcagaccctcgtgagaaactcagaccag

SEQ ID NO: 548824 - DNA, 120 bp, Artificial Sequence
  ENSG00000168137_28 (sequence is synthesized)
tttacatttggatgggggatattgttcccctgcagaaggattttccagcagatatgaacatggcttaatgaaagacctctctcgtggatccttgtcacctggtggtgaaagggcctgtga

SEQ ID NO: 548825 - DNA, 120 bp, Artificial Sequence
  ENSG00000168137_29 (sequence is synthesized)
aggagtcccatctgccccccagaacccaccacagaggaaaaaagtatccctgctggagtaccgaaaacggaaacaagaagctaaggaaaattctgctggtgggggaggtgactctgcaca

SEQ ID NO: 548826 - DNA, 120 bp, Artificial Sequence
  ENSG00000168137_30 (sequence is synthesized)
gagcaaaagcaagtctgcaggagctgggcaaggcagcagtaactccgtttccgacactggtgcccatggtgtgcagggatcctcagcccgaactccatcttcccctcacaaaaaattctc

SEQ ID NO: 548827 - DNA, 120 bp, Artificial Sequence
  ENSG00000168137_31 (sequence is synthesized)
cccatctcattcctctatgtcccatttggaggcggtaagcccatcagattccagaggcacttcttcatctcactgcagacctcaagagaatatcagcagtaggtggatggttcccacatc

SEQ ID NO: 548828 - DNA, 120 bp, Artificial Sequence
  ENSG00000168137_32 (sequence is synthesized)
agtagaacgactccgagaaggagggagcatccccaaggtcctccgaagcagcgtgagggtggcccaaaagggagagccctctcccacatgggagagtaacatcacagagaaagactcaga

SEQ ID NO: 548829 - DNA, 120 bp, Artificial Sequence
  ENSG00000168137_33 (sequence is synthesized)
ccctgcagatggagaaggcccagagacattaagctcagcactctctaaaggagcaacagtttacagcccttccagatacagctaccagctcctgcagtgtgatagtcctcggacagaatc

SEQ ID NO: 548830 - DNA, 120 bp, Artificial Sequence
  ENSG00000168137_34 (sequence is synthesized)
acaaagcctccttcagcagagttcctcccccttcagaggacatcctacacagtctccaggatacagttatcgaactactgcactgagacctggaaaccccccctctcacggttcttcaga

SEQ ID NO: 548831 - DNA, 120 bp, Artificial Sequence
  ENSG00000168137_35 (sequence is synthesized)
atcatccctctcttccacgtcctattccagccccgcccaccctgtgtccacagactcgttggccccatttacggggacaccagggtattttagcagccagccacattctggaaacagcac

SEQ ID NO: 548832 - DNA, 120 bp, Artificial Sequence
  ENSG00000168137_36 (sequence is synthesized)
tggcagcaatcttccaaggaggagctgcccttctagtgctgctagccctaccctgcagggaccctcagactcgccaacctcagattcagtttctcagtccagcacaggaactctgagttc

SEQ ID NO: 548833 - DNA, 120 bp, Artificial Sequence
  ENSG00000168137_37 (sequence is synthesized)
cacctcctttcctcagaactctaggtcgtcattgccatcagacttacggactatcagtctgcccagtgctgggcagtcagctgtctaccaggcctccagggtatctgcggtttccaattc

SEQ ID NO: 548834 - DNA, 120 bp, Artificial Sequence
  ENSG00000168137_38 (sequence is synthesized)
acagcactacccacaccgtgggagtgggggtgtgcaccagtaccgactccagccactgcaagggtcaggagtcaagactcagacgggactttcctagggcttctggatttgggcaaacag

SEQ ID NO: 548835 - DNA, 120 bp, Artificial Sequence
  ENSG00000168137_39 (sequence is synthesized)
aactgaatgagcccatagctgcttccttccagctgcctctggaacctaggccgagcatattgctgaggaacggggggtacaaggtgccagaggattgggtctggtggacaagaaacaaga

SEQ ID NO: 548836 - DNA, 120 bp, Artificial Sequence
  ENSG00000168137_40 (sequence is synthesized)
cttgtggtcacaattggcctctggccttggagaaagctgtaaatcttgtctgaagcagagactataaagaagtttctccctgctgtcaagggtacattgttgacaagcaaatggtgtttc

SEQ ID NO: 548837 - DNA, 120 bp, Artificial Sequence
  ENSG00000168137_41 (sequence is synthesized)
ggttagtaacggttctaagtgcaatgagttgtgttgaagcctccgtctcccatccttgcctgtagcccgtagtcacttgtgcagtgaggacatctttttaaatttaaaaaaaaaaaaaaa

SEQ ID NO: 548838 - DNA, 120 bp, Artificial Sequence
  ENSG00000168137_42 (sequence is synthesized)
aaaagttttcaaaggaaaaaaagttaaaagagccaatctcaaagccccaagccatctgagtactgttagggttttatgcacttaagaaaaaaggtaggtatgtaaatgttcatcctaaga

SEQ ID NO: 548839 - DNA, 120 bp, Artificial Sequence
  ENSG00000168137_43 (sequence is synthesized)
caaccattccaaaagcaggtatctggccaatgtgtgtccaccaagaatactgtttatctttgtcttaagatcaccaagaaataggcaaggatagtaaagcttggaacctgcaccaactgg

SEQ ID NO: 548840 - DNA, 120 bp, Artificial Sequence
  ENSG00000168137_44 (sequence is synthesized)
agggtgcctggctctttgaagaaaagctcatggtcagctcttgattattcgggagcagattatttgagtagattgtctgagcctccaactgttaccatcctactcccccttcccaagcta

SEQ ID NO: 548841 - DNA, 120 bp, Artificial Sequence
  ENSG00000168137_45 (sequence is synthesized)
tttcacagctcagtaacccatgaagtaagtagacaagaaaaggaggaatgagacatgatataggccaattgcattgctacttaccagcttttggcaataaatttcattaggaaggatacc

SEQ ID NO: 548842 - DNA, 120 bp, Artificial Sequence
  ENSG00000168137_46 (sequence is synthesized)
gagtggtttgggaatgcttcgaattttattttttctactcccaattaatcaggagttgatgatcccatgagcaggaccgcctccatgattggggagcatgcacttgtgactgcagggtaa

SEQ ID NO: 548843 - DNA, 120 bp, Artificial Sequence
  ENSG00000168137_47 (sequence is synthesized)
gagtgggaagataggtttgtggagtggcaccgacaggactgtgattgtgtgtgggcctgccccacatttctctgggggatgcttatgtgagagtgggcccagtgaaagagttaccaagcc

SEQ ID NO: 548844 - DNA, 120 bp, Artificial Sequence
  ENSG00000168137_48 (sequence is synthesized)
acccacacccctaacactgttctggatgagagatgagagcagaccggcttctccccatcagtgcattgtgcctgttgtacacccctggaggagccctggagccagcccaggtggggtaca

SEQ ID NO: 548845 - DNA, 120 bp, Artificial Sequence
  ENSG00000168137_49 (sequence is synthesized)
caatctttttaaattccatatggttgccagcttatttctttcacttgtttactgtaatatctggcgtgtttttatttatctaattttgtattcagttataaccatggtaggggtagtgaa

SEQ ID NO: 548846 - DNA, 120 bp, Artificial Sequence
  ENSG00000168137_50 (sequence is synthesized)
tatatgacaggtgtaatccctggtgctgcagtggaccttcttttcttttggacaagataatactgtgagtttccctccttccttccctctaatttgttttccttttttccccagcctctt

SEQ ID NO: 548847 - DNA, 120 bp, Artificial Sequence
  ENSG00000168137_51 (sequence is synthesized)
gcatccccttcttttctaccctgtcctacaactatcatatgcacagtcttctctctttgtgtgtgactgttacaaaatttcacttttcaaaatcgaaatcaggtgtttgctcaaatgagg

SEQ ID NO: 548848 - DNA, 120 bp, Artificial Sequence
  ENSG00000168137_52 (sequence is synthesized)
ggagattttttttttttttttttttttaaatgctgagacctcagcagagtacttttctttttgttgtttcccccacaaacccatcagtctgggagagcattgggagtggaaatcatgttg

SEQ ID NO: 548849 - DNA, 120 bp, Artificial Sequence
  ENSG00000168137_53 (sequence is synthesized)
cctgggatgctggtttctttgtatattatataaaacgtatgtaaatgtctctccatttgggctggggtttgcattctccccttggctatttaaccaaggggagaggccagcgggcaggcg

SEQ ID NO: 548850 - DNA, 120 bp, Artificial Sequence
  ENSG00000168137_54 (sequence is synthesized)
gccctcaccctgcctggcacgtgcagagaccccagccactctgtgtgggcagggtgctgtcaagaccagacctcttgggggggtaggggcgggggggtggggggaactcttggaagggaa

SEQ ID NO: 548851 - DNA, 120 bp, Artificial Sequence
  ENSG00000168137_55 (sequence is synthesized)
gaagtatcacttctttctcaagtggagtgtttacaccttgctgtaacatttgaactttcacaagagatgtaataattttgataataaaattcttaaccataataatcataaagttgagaa

SEQ ID NO: 548852 - DNA, 120 bp, Artificial Sequence
  ENSG00000168137_56 (sequence is synthesized)
ggctcaccctttatccctgagagacgtcgaaggccccttctgcctgatggcacattcagctcctgtaagaagatctggattcaggctgccttcctcagtgtctgccattgccctcctcca

SEQ ID NO: 548853 - DNA, 120 bp, Artificial Sequence
  ENSG00000168137_57 (sequence is synthesized)
atcatttgtaccttctcatttcaaatataataccattccaaatgtttctttactatctttcttccccatctcagtaagagaatgggaaacctcagggtcattgtggcctgttacctggta

SEQ ID NO: 548854 - DNA, 120 bp, Artificial Sequence
  ENSG00000168137_58 (sequence is synthesized)
gcctctcatcttggcagcccctatgcttcccaaaataggcatactgctaccacaaatcccattcatgtatcttttgcatgcagtccatcaatctccataagtttaggtagtaagcatgct

SEQ ID NO: 548855 - DNA, 120 bp, Artificial Sequence
  ENSG00000168137_59 (sequence is synthesized)
agcctgagcgacagagcaagactgtatctcaaaaaaaagatgtgaaagtagagattttaccctgatttctaacatctcaaggtttctccacatatttaagaaagtattataaattttcaa

SEQ ID NO: 548856 - DNA, 120 bp, Artificial Sequence
  ENSG00000168137_60 (sequence is synthesized)
gccagtgcagtataatagtttcagatgaaatgaaggggttaaataacagattaccataactccttaaataaataatagattaccataactccaaatggagagaaagtatggtttttttct

SEQ ID NO: 548857 - DNA, 120 bp, Artificial Sequence
  ENSG00000168137_61 (sequence is synthesized)
gttcataaaacactttttgtttgtcttctctgtgagtgaccagggagatcatacaggtcttgtgctttcagcaagtcatatagagaagagactgtcagaatgatgatacagagactgttg

SEQ ID NO: 548858 - DNA, 120 bp, Artificial Sequence
  ENSG00000168137_62 (sequence is synthesized)
gagacccaaggggcctagggggcagcacacccccagaagccaagtctattccaggcagtaccagggattagggtctgggctggaaaaatcctggtgttttgaatatgttcaggtccagtt

SEQ ID NO: 548859 - DNA, 120 bp, Artificial Sequence
  ENSG00000168137_63 (sequence is synthesized)
cccccttcagcaaagcaaagcaactgtaccagatttctgggttgaatgacatccctgattaataagtggttttcttccttaaaacagaatattattaaagagcatgtatatttcttcata

SEQ ID NO: 548860 - DNA, 120 bp, Artificial Sequence
  ENSG00000168137_64 (sequence is synthesized)
aagccacctaatataacttacctgtttactgagttccttaaagaggaagacttaaagctaccctgagaaatagtatataatattctggggtagtctaaaatgaaaagcagtgtttgggct

SEQ ID NO: 548861 - DNA, 120 bp, Artificial Sequence
  ENSG00000168137_65 (sequence is synthesized)
tattcccatataaaaaggagaaaggagggttgggggtggggaagggttgattttgtttcttctagagcttttttcttcttttgtttttgtttgttttgttttgtttgcatgcaaaaggta

SEQ ID NO: 548862 - DNA, 120 bp, Artificial Sequence
  ENSG00000168137_66 (sequence is synthesized)
tttagttatgtcagtaactgagacttacttaaccattttacaactctttccccaaataaagtacttaaaactctccctgcattagtaggtagccagtttgtattgtgtttataggttttt

SEQ ID NO: 548863 - DNA, 120 bp, Artificial Sequence
  ENSG00000168137_67 (sequence is synthesized)
ataaagtcagctactaacctggtactatgtagattgtctaactgtatagatagatagcattaacatttgtgagaaatttcaacaaagaggttaaaccaatacgtttggaattgctggata

SEQ ID NO: 548864 - DNA, 120 bp, Artificial Sequence
  ENSG00000168137_68 (sequence is synthesized)
aaagacccagagcagttaatcttacaattggtgttttccccaaagtatagacatgactgcccgtaaatactgctggggagtctaggactaattccagaaataaaaatacttctggtctac

SEQ ID NO: 548865 - DNA, 120 bp, Artificial Sequence
  ENSG00000168137_69 (sequence is synthesized)
ggtgagtcagtttctgatgcagttgggctccaccgcatgctaggttccagcccacttatgctcatttgggctaccacatttgtaagatctagcattgcttgctctctgtctgctcttttt

SEQ ID NO: 548866 - DNA, 120 bp, Artificial Sequence
  ENSG00000168137_70 (sequence is synthesized)
cataattaaccactcattttgcccttctggcatgctgcactcacccaatttgtcacaaagagagcagtacgggttggtgatggcactggtgatttaaatgaaaaatggctctttcttact

SEQ ID NO: 548867 - DNA, 120 bp, Artificial Sequence
  ENSG00000168137_71 (sequence is synthesized)
atacatttctttctgttttacaaagtcaaaaacatcctttgctggttttgcaccagagaataggggttagttatcatctgtgtttaccatgtggcctcacatgagttaacagtttaaagc

SEQ ID NO: 548868 - DNA, 120 bp, Artificial Sequence
  ENSG00000168137_72 (sequence is synthesized)
actagagattgttatagagagttttaagctaccagaataaaacagattgattttttctcagagcttgagtacagctgaatattgcctctatcttaaaggaagtagacaatccagaagaaa

SEQ ID NO: 548869 - DNA, 120 bp, Artificial Sequence
  ENSG00000168137_73 (sequence is synthesized)
ttggtcaagaaaagtctctgaggagttgacatttaaactgagacttcagtgacaaggaggcagtcctgggacgatgtgagtgaaattcattcttgaacgttgcagactctgtggtagaaa

SEQ ID NO: 548870 - DNA, 120 bp, Artificial Sequence
  ENSG00000168137_74 (sequence is synthesized)
aagcttggttaagatgtaataaatggatggggctgggaaagaggatagaagatcctgtaagagggagataggggacagatcatgtagagcaggagtcggcaaactctttctataaagggc

SEQ ID NO: 548871 - DNA, 120 bp, Artificial Sequence
  ENSG00000168137_75 (sequence is synthesized)
tctttctataaagggccagatagtaaatatttagactttgcaagccatgtatggtctctgtcataactattcagccctttggctgggtgcgaatcatgcctgtaattccagcactttggg

SEQ ID NO: 548872 - DNA, 120 bp, Artificial Sequence
  ENSG00000168137_76 (sequence is synthesized)
tcccacctcagcctcttaaatagcttggactacaggtaaaaggctgtttgtcatggtacagctacggtgattttacttgagatatttgactttgagatggagatgaagataagtatataa

SEQ ID NO: 548873 - DNA, 120 bp, Artificial Sequence
  ENSG00000168137_77 (sequence is synthesized)
tgcagctgccacattcattctcatacaagacactgaaattgaggaagagagattttggcgttctgttggtttatggagagagttgatcagagattgctccttggctgagttgctgtctgc

SEQ ID NO: 548874 - DNA, 120 bp, Artificial Sequence
  ENSG00000168137_78 (sequence is synthesized)
ataggctgttaacaattgtttctctggcagcagatcttgttcatcaggattgcatcatttctgggagaatggccaaggtccacagcctcaatacaaagactgtctgaagcatatgaggcc

SEQ ID NO: 548875 - DNA, 120 bp, Artificial Sequence
  ENSG00000168137_79 (sequence is synthesized)
tgttctctttctgaagcggcactcctcttcctgccagtcctcttcacaggattactgaagcagacttgttctgaatttctttcgttggattggttgtttattggacttttgtctgccagc

SEQ ID NO: 548876 - DNA, 120 bp, Artificial Sequence
  ENSG00000168137_80 (sequence is synthesized)
gagtgtaatccattcttatacattgtgactttcttgaaatgtttatatgcagcatgacgaagttgccccttttgcacttccctgactccagcggacgtctagccctgcatcattgttctt

SEQ ID NO: 548877 - DNA, 120 bp, Artificial Sequence
  ENSG00000168137_81 (sequence is synthesized)
gtttttatgtcccagttgaccttggcattttgttttatcactttcctggttgaagccaaaaaacaaagggtactactttcttctttctttccatatgtaccatactttaggggagagagg

SEQ ID NO: 548878 - DNA, 120 bp, Artificial Sequence
  ENSG00000168137_82 (sequence is synthesized)
ttgagtgagggtatcctgtcttggtagtgaatggaagagggcctggtccctggggcagtgcagaaggcactttgatcatctcactcactgcaaatgtcatgtgaggtttcatggaagtat

SEQ ID NO: 548879 - DNA, 120 bp, Artificial Sequence
  ENSG00000168137_83 (sequence is synthesized)
catatcatcaccactggctcaaagtttcttctactccagtccccatcccaggcatttcgagagggatcccggaagtccttgcggatgaagaattctccctctgaagcacagaatttagat

SEQ ID NO: 548880 - DNA, 120 bp, Artificial Sequence
  ENSG00000168137_84 (sequence is synthesized)
taatatgtagtattttcttaaccagatcctattccactgtaattaacattagacctttccctttacccccattgaaggtggtggaaaaaaggaattagaaggggaaggaagagttttcag

SEQ ID NO: 548881 - DNA, 120 bp, Artificial Sequence
  ENSG00000168137_85 (sequence is synthesized)
aggggtatttctgggcaaataattaatagaaccaaagttgcaaagtaggaattcattttcatttgttttaatgggtggagaaaattggaataaagtaggtgttactacctgcttctgtag

SEQ ID NO: 548882 - DNA, 120 bp, Artificial Sequence
  ENSG00000168137_86 (sequence is synthesized)
gggctggaaaaatcctggtgttttgaatatgttcaggtccagttcagactcttgatcccacagccacttcttgagtgagacttgcacatgaagtgcatatgttcatatttacccgtttgg

SEQ ID NO: 548883 - DNA, 120 bp, Artificial Sequence
  ENSG00000168137_87 (sequence is synthesized)
aagatacaaccagcatagctccatctccatggccatctttgatttcatgcaactttcctttttcctgtccccctcccaccaaaaaaaaatccattcctaataaacagctatcatgtttca

SEQ ID NO: 548884 - DNA, 120 bp, Artificial Sequence
  ENSG00000168137_88 (sequence is synthesized)
acagctaccaggtgagatgagaaattgctggtctctagccataggagtgtgttctgggtcccaaattgtcctggtcatcctttgccattgagatgctgtctttgcatatagtttcagcag

SEQ ID NO: 548885 - DNA, 120 bp, Artificial Sequence
  ENSG00000168140_0 (sequence is synthesized)
gactccggagcccgagcccggggcgggtggacgcggactcgaacgcagttgcttcgggacccaggaccccctcgggcccgacccgccaggaaagactgaggccgcggcctgccccgcccg

SEQ ID NO: 548886 - DNA, 120 bp, Artificial Sequence
  ENSG00000168140_1 (sequence is synthesized)
gctccctgcgccgccgccgcctcccgggacagaagatgtgctccagggtccctctgctgctgccgctgctcctgctactggccctggggcctggggtgcagggctgcccatccggctgcc

SEQ ID NO: 548887 - DNA, 120 bp, Artificial Sequence
  ENSG00000168140_2 (sequence is synthesized)
agtgcagccagccacagacagtcttctgcactgcccgccaggggaccacggtgccccgagacgtgccacccgacacggtggggctgtacgtctttgagaacggcatcaccatgctcgacg

SEQ ID NO: 548888 - DNA, 120 bp, Artificial Sequence
  ENSG00000168140_3 (sequence is synthesized)
caggcagctttgccggcctgccgggcctgcagctcctggacctgtcacagaaccagatcgccagcctgcccagcggggtcttccagccactcgccaacctcagcaacctggacctgacag

SEQ ID NO: 548889 - DNA, 120 bp, Artificial Sequence
  ENSG00000168140_4 (sequence is synthesized)
ccaacaggctgcatgaaatcaccaatgagaccttccgtggcctgcggcgcctcgagcgcctctacctgggcaagaaccgcatccgccacatccagcctggtgccttcgacacgctcgacc

SEQ ID NO: 548890 - DNA, 120 bp, Artificial Sequence
  ENSG00000168140_5 (sequence is synthesized)
gcctcctggagctcaagctgcaggacaacgagctgcgggcactgcccccgctgcgcctgccccgcctgctgctgctggacctcagccacaacagcctcctggccctggagcccggcatcc

SEQ ID NO: 548891 - DNA, 120 bp, Artificial Sequence
  ENSG00000168140_6 (sequence is synthesized)
tggacactgccaacgtggaggcgctgcggctggctggtctggggctgcagcagctggacgaggggctcttcagccgcttgcgcaacctccacgacctggatgtgtccgacaaccagctgg

SEQ ID NO: 548892 - DNA, 120 bp, Artificial Sequence
  ENSG00000168140_7 (sequence is synthesized)
agcgagtgccacctgtgatccgaggcctccggggcctgacgcgcctgcggctggccggcaacacccgcattgcccagctgcggcccgaggacctggccggcctggctgccctgcaggagc

SEQ ID NO: 548893 - DNA, 120 bp, Artificial Sequence
  ENSG00000168140_8 (sequence is synthesized)
tggatgtgagcaacctaagcctgcaggccctgcctggcgacctctcgggcctcttcccccgcctgcggctgctggcagctgcccgcaaccccttcaactgcgtgtgccccctgagctggt

SEQ ID NO: 548894 - DNA, 120 bp, Artificial Sequence
  ENSG00000168140_9 (sequence is synthesized)
ttggcccctgggtgcgcgagagccacgtcacactggccagccctgaggagacgcgctgccacttcccgcccaagaacgctggccggctgctcctggagcttgactacgccgactttggct

SEQ ID NO: 548895 - DNA, 120 bp, Artificial Sequence
  ENSG00000168140_10 (sequence is synthesized)
gcccagccaccaccaccacagccacagtgcccaccacgaggcccgtggtgcgggagcccacagccttgtcttctagcttggctcctacctggcttagccccacagagccggccactgagg

SEQ ID NO: 548896 - DNA, 120 bp, Artificial Sequence
  ENSG00000168140_11 (sequence is synthesized)
gactgcccaccgtccacctgcctcaatgggggcacatgccacctggggacacggcaccacctggcgtgcttgtgccccgaaggcttcacgggcctgtactgtgagagccagatggggcag

SEQ ID NO: 548897 - DNA, 120 bp, Artificial Sequence
  ENSG00000168140_12 (sequence is synthesized)
gggacacggcccagccctacaccagtcacgccgaggccaccacggtccctgaccctgggcatcgagccggtgagccccacctccctgcgcgtggggctgcagcgctacctccaggggagc

SEQ ID NO: 548898 - DNA, 120 bp, Artificial Sequence
  ENSG00000168140_13 (sequence is synthesized)
tccgtgcagctcaggagcctccgtctcacctatcgcaacctatcgggccctgataagcggctggtgacgctgcgactgcctgcctcgctcgctgagtacacggtcacccagctgcggccc

SEQ ID NO: 548899 - DNA, 120 bp, Artificial Sequence
  ENSG00000168140_14 (sequence is synthesized)
aacgccacttactccgtctgtgtcatgcctttggggcccgggcgggtgccggagggcgaggaggcctgcggggaggcccatacacccccagccgtccactccaaccacgccccagtcacc

SEQ ID NO: 548900 - DNA, 120 bp, Artificial Sequence
  ENSG00000168140_15 (sequence is synthesized)
ggcaacctgccgctcctcattgcgcccgccctggccgcggtgctcctggccgcgctggctgcggtgggggcagcctactgtgtgcggcgggggcgggccatggcagcagcggctcaggac

SEQ ID NO: 548901 - DNA, 120 bp, Artificial Sequence
  ENSG00000168140_16 (sequence is synthesized)
gcggctcaggacaaagggcaggtggggccaggggctgggcccctggaactggagggagtgaaggtccccttggagccaggcccgaaggcaacagagggcggtggagaggccctgcccagc

SEQ ID NO: 548902 - DNA, 120 bp, Artificial Sequence
  ENSG00000168140_17 (sequence is synthesized)
gggtctgagtgtgaggtgccactcatgggcttcccagggcctggcctccagtcacccctccacgcaaagccctacatctaagccagagagagacagggcagctggggccgggctctcagc

SEQ ID NO: 548903 - DNA, 120 bp, Artificial Sequence
  ENSG00000168140_18 (sequence is synthesized)
cagtgagatggccagccccctcctgctgccacaccacgtaagttctcagtcccaacctcggggatgtgtgcagacagggctgtgtgaccacagctgggccctgttccctctggacctcgg

SEQ ID NO: 548904 - DNA, 120 bp, Artificial Sequence
  ENSG00000168140_19 (sequence is synthesized)
tctcctcatctgtgagatgctgtggcccagctgacgagccctaacgtccccagaaccgagtgcctatgaggacagtgtccgccctgccctccgcaacgtgcagtccctgggcacggcggg

SEQ ID NO: 548905 - DNA, 120 bp, Artificial Sequence
  ENSG00000168140_20 (sequence is synthesized)
ccctgccatgtgctggtaacgcatgcctgggccctgctgggctctcccactccaggcggaccctgggggccagtgaaggaagctcccggaaagagcagagggagagcgggtaggcggctg

SEQ ID NO: 548906 - DNA, 120 bp, Artificial Sequence
  ENSG00000168140_21 (sequence is synthesized)
tgtgactctagtcttggccccaggaagcgaaggaacaaaagaaactggaaaggaagatgctttaggaacatgttttgcttttttaaaatatatatatatttataagagatcctttcccat

SEQ ID NO: 548907 - DNA, 120 bp, Artificial Sequence
  ENSG00000168140_22 (sequence is synthesized)
ttattctgggaagatgtttttcaaactcagagacaaggactttggtttttgtaagacaaacgatgatatgaaggccttttgtaagaaaaaataaaagatgaagtgtgtttcttgggctca

SEQ ID NO: 548908 - DNA, 120 bp, Artificial Sequence
  ENSG00000168143_0 (sequence is synthesized)
aaaccttcggcggccggcgctgtgcggcgggcgcggttgcgcgcggcttggggcaaatacttctcaccactgcatgaatggacatttgaaagtgccatagccaaacacttgcaagcatgg

SEQ ID NO: 548909 - DNA, 120 bp, Artificial Sequence
  ENSG00000168143_1 (sequence is synthesized)
agacctcatcaatgctttcctcattgaatgatgagtgtaaatctgacaactacattgagcctcactacaaggaatggtatcgagtagccattgatattctgattgaacacgggttagaag

SEQ ID NO: 548910 - DNA, 120 bp, Artificial Sequence
  ENSG00000168143_2 (sequence is synthesized)
cataccaagaatttcttgtccaggaacgagtttcagactttcttgctgaggaagaaattaattatattttgaaaaatgtccagaaagttgcacaaagcacagcacatggtactgatgatt

SEQ ID NO: 548911 - DNA, 120 bp, Artificial Sequence
  ENSG00000168143_3 (sequence is synthesized)
cctgtgatgataccttatcttcagggacctactggcctgttgagtctgatgtggaagctccaaatcttgacttaggctggccatatgtgatgcccggactcttagggggcacccatatag

SEQ ID NO: 548912 - DNA, 120 bp, Artificial Sequence
  ENSG00000168143_4 (sequence is synthesized)
atctcctttttcatccaccaagagcacatctacttacgataaaagaaactattcggaagatgataaaagaagcaagaaaggtcattgctttagtgatggatatatttacagatgtggaca

SEQ ID NO: 548913 - DNA, 120 bp, Artificial Sequence
  ENSG00000168143_5 (sequence is synthesized)
ttttcaaagaaatcgttgaggcatcaactcgaggagtatctgtttacattctgcttgatgagtccaattttaatcattttctaaatatgactgagaaacaaggttgttcagttcagcgtc

SEQ ID NO: 548914 - DNA, 120 bp, Artificial Sequence
  ENSG00000168143_6 (sequence is synthesized)
tcaggaatattcgagtgcgaacagtaaaaggccaagattatctttcaaaaacaggggcaaaattccatggaaaaatggaacagaaatttttgttagttgactgccagaaagtgatgtacg

SEQ ID NO: 548915 - DNA, 120 bp, Artificial Sequence
  ENSG00000168143_7 (sequence is synthesized)
gttcttacagttatatgtggtcatttgagaaagctcacctcagcatggttcagataattacaggacaacttgttgagtcctttgatgaagaatttagaactctctatgccagatcctgtg

SEQ ID NO: 548916 - DNA, 120 bp, Artificial Sequence
  ENSG00000168143_8 (sequence is synthesized)
tccctagttcatttgctcaggaagaatcagcaagggtgaagcatggaaaagccctctgggaaaatggcacttaccagcattcggtgtcttcattagcatctgtttccagccagagaaacc

SEQ ID NO: 548917 - DNA, 120 bp, Artificial Sequence
  ENSG00000168143_9 (sequence is synthesized)
tttttggtagacaagacaagattcataaactagattccagttacttcaaaaacagagggatatatactttaaatgaacatgacaaatataacataagaagtcacggatacaaacctcatt

SEQ ID NO: 548918 - DNA, 120 bp, Artificial Sequence
  ENSG00000168143_10 (sequence is synthesized)
ttgttcctaactttaatggtccaaacgcaatacgtcagtttcaacccaatcagataaatgaaaattggaaaaggcatagttatgctggggaacagccagaaacagtgccatacctcctgc

SEQ ID NO: 548919 - DNA, 120 bp, Artificial Sequence
  ENSG00000168143_11 (sequence is synthesized)
ttaatagggctctgaatagaaccaataatccacctggtaattggaaaaagccatctgatagtctcagtgtggcgtcctcatcacgggaaggctatgtaagccaccacaacacacctgccc

SEQ ID NO: 548920 - DNA, 120 bp, Artificial Sequence
  ENSG00000168143_12 (sequence is synthesized)
agagttttgccaatcggcttgcgcagagaaaaacaacaaatcttgcagacaggaattcaaatgttcggaggtcttttaatgggacagataaccatatccgctttttgcaacaacgaatgc

SEQ ID NO: 548921 - DNA, 120 bp, Artificial Sequence
  ENSG00000168143_13 (sequence is synthesized)
caacccttgaacataccacaaagtcattcctacgtaactggagaattgaatcctacttaaatgatcattcagaagctacaccggactcaaatggatcagctttaggtgaccgatttgagg

SEQ ID NO: 548922 - DNA, 120 bp, Artificial Sequence
  ENSG00000168143_14 (sequence is synthesized)
gctatgataatcctgagaatttgaaggccaatgccctttatactcattctcggcttcgttcctctttagtatttaaacccactttacctgagcaaaaggaagttaacagttgtacaactg

SEQ ID NO: 548923 - DNA, 120 bp, Artificial Sequence
  ENSG00000168143_15 (sequence is synthesized)
gctcctcaaattcaactatcattggttctcagggaagtgagacacctaaagaggtcccagacacccctacgaatgtacagcatttgacagacaaacccttgccagaatcaatccccaagc

SEQ ID NO: 548924 - DNA, 120 bp, Artificial Sequence
  ENSG00000168143_16 (sequence is synthesized)
tcccattgcagtcagaggcaccaaaaatgcacaccttgcaggttcctgaaaaccactcagtagccttaaaccaaactacaaatggccatactgaatcaaataactatatatataaaacct

SEQ ID NO: 548925 - DNA, 120 bp, Artificial Sequence
  ENSG00000168143_17 (sequence is synthesized)
tgggtgtaaataagcagacagaaaatctaaagaatcaacagactgagaatctacttaaaaggcgaagtttcccgttatttgacaactcaaaagccaacttagatcctggaaatagtaagc

SEQ ID NO: 548926 - DNA, 120 bp, Artificial Sequence
  ENSG00000168143_18 (sequence is synthesized)
attatgtatatagtacacttaccaggaatcgagttagacaaccagaaaagcccaaagaagatttgctgaaaagttctaaaagcatgcacaatgtgactcataacttggaggaggatgagg

SEQ ID NO: 548927 - DNA, 120 bp, Artificial Sequence
  ENSG00000168143_19 (sequence is synthesized)
aggaagttaccaagagaaactctccaagtggcactactaccaaatcagtttccattgctgctttacttgatgtgaataaagaggaatctaacaaagaacttgcttcaaagaaggaagtta

SEQ ID NO: 548928 - DNA, 120 bp, Artificial Sequence
  ENSG00000168143_20 (sequence is synthesized)
agggttccccaagttttttgaaaaaggggtctcagaagttaaggtcattacttagccttaccccagataagaaagaaaatctatccaaaaataaagcacctgccttttatagattgtgta

SEQ ID NO: 548929 - DNA, 120 bp, Artificial Sequence
  ENSG00000168143_21 (sequence is synthesized)
gtagctctgacacattagtttctgagggtgaagaaaatcaaaaaccaaagaaatcagacacaaaagttgattcatctcctagaagaaagcattcttcctcatcgaattctcaaggcagca

SEQ ID NO: 548930 - DNA, 120 bp, Artificial Sequence
  ENSG00000168143_22 (sequence is synthesized)
tccacaagagtaaggaagatgtaacagttagcccatctcaagagataaatgctccaccagatgaaaataaaagaacaccttctccaggtccagttgaaagcaagttcttggaaagggcag

SEQ ID NO: 548931 - DNA, 120 bp, Artificial Sequence
  ENSG00000168143_23 (sequence is synthesized)
gagatgcctctgccccaagatttaacactgaacagatccaataccgagattcaagggagattaatgcagttgttacccctgaaagaagacctacttcttctccaaggccaacgtccagtg

SEQ ID NO: 548932 - DNA, 120 bp, Artificial Sequence
  ENSG00000168143_24 (sequence is synthesized)
agcttctacgatctcattcaactgatcggcgtgtttacagtcgttttgagccgttttgtaagattgagagctctattcagccaacaagcaacatgccaaataccagtataaatcgcccag

SEQ ID NO: 548933 - DNA, 120 bp, Artificial Sequence
  ENSG00000168143_25 (sequence is synthesized)
aaataaaatctgcgactatgggcaacagttatggcaggtctagtccattgcttaattacaacactggtgtttatcgctcatatcaacccaatgagaacaagtttcgaggatttatgcaaa

SEQ ID NO: 548934 - DNA, 120 bp, Artificial Sequence
  ENSG00000168143_26 (sequence is synthesized)
tggaaactttatacacaaaaataaatagctattaaaatgcaaaatgaatgaggctatcaatatttgtccaaagaaaattgtggacagtctttgtaacatgccaatagattttcctaagga

SEQ ID NO: 548935 - DNA, 120 bp, Artificial Sequence
  ENSG00000168143_27 (sequence is synthesized)
cagaattatgggtatgatgtatatgttcaccagtgtcctagtataaagttatttttctgtgtgataaagttagggtctgctgtagatagaatttctctgtaaacacattatttgtaagtg

SEQ ID NO: 548936 - DNA, 120 bp, Artificial Sequence
  ENSG00000168143_28 (sequence is synthesized)
gtaatggtaaaaataatagatgtatttaaatcattttctttagactgaagattttaagtctcacttagaaatttttgtggacgatgtatggtgtatggtgtatggtgtatggattttaac

SEQ ID NO: 548937 - DNA, 120 bp, Artificial Sequence
  ENSG00000168143_29 (sequence is synthesized)
catttccttttaaaaaggtcatactaccctcagtaaccctttataacatgtgtttatagtgttttcatatcttcaaaaatataagcaaatgggacaaagcccttttttaagattaacttg

SEQ ID NO: 548938 - DNA, 120 bp, Artificial Sequence
  ENSG00000168143_30 (sequence is synthesized)
ttaacttgaagttctacgggataacttgttatattttattaatattattttttctgtggatcattgtacagctgtttgggcaacagcagtaccttttacattttttattttttatttttt

SEQ ID NO: 548939 - DNA, 120 bp, Artificial Sequence
  ENSG00000168143_31 (sequence is synthesized)
tgaagtgtttgcaaagtatcagcctcatgtagtataatgacattcgtaggaatttattttcctcagcctttgaaaacggtctgggatgtgcttctttctacactggacccagggagctgt

SEQ ID NO: 548940 - DNA, 120 bp, Artificial Sequence
  ENSG00000168143_32 (sequence is synthesized)
ccccctcttacccataggctgctgattttttatagtcattccttacttcacatttaggacaaaccagtaggaatttagaaaatctgaatgattccccctcctttttctattgtataaaag

SEQ ID NO: 548941 - DNA, 120 bp, Artificial Sequence
  ENSG00000168143_33 (sequence is synthesized)
tataaaagcttttagaaatgtaaatttctgcctaaatttttgttagattggcatgacaatgctaaggggtcttgcttgcgaaaattcttgctctttttttttttcttttgagatggagtc

SEQ ID NO: 548942 - DNA, 62 bp, Artificial Sequence
  ENSG00000168143_34 (sequence is synthesized)
ccacacccggctaatttttgtattttcagaagagatgggatttcaccatgttggccagtcta

SEQ ID NO: 548943 - DNA, 120 bp, Artificial Sequence
  ENSG00000168143_35 (sequence is synthesized)
tcttgctcttctttaagttgtgccaaatatgatatgactgcatagtgtttttgtaagaataccattgggaaaatgagaagttttactgggctagttcttccatgatttgaggatgatatt

SEQ ID NO: 548944 - DNA, 120 bp, Artificial Sequence
  ENSG00000168143_36 (sequence is synthesized)
cagattataagataccctttgtctttcttacagtaatgaagtataagctccatatctgttccagagactttaacttgactttgcttcattcacaaagaacagagttcaagaagcagtgca

SEQ ID NO: 548945 - DNA, 120 bp, Artificial Sequence
  ENSG00000168143_37 (sequence is synthesized)
tcctgtgagaagtgtgaagtgtttgtacatcactttaaatatattacttaatatattctaagttgctgtgtggagcagtatactgttgttttaaaaatgcaagattcagacaaattttaa

SEQ ID NO: 548946 - DNA, 120 bp, Artificial Sequence
  ENSG00000168143_38 (sequence is synthesized)
tattgtctcattaaaataatttaaataatggtataaaatatctatatcattaaaataattttccatagtgtttagaaaccatgaaaaagaaaacatagcaggagaaaatatgacaggaaa

SEQ ID NO: 548947 - DNA, 120 bp, Artificial Sequence
  ENSG00000168143_39 (sequence is synthesized)
agaaaacctaacaaagcccagaacccacagttaaccaaactagactgactttgttattacccattctttgttagtattggatagggaattaggataatgagccattaggcagttctgaaa

SEQ ID NO: 548948 - DNA, 120 bp, Artificial Sequence
  ENSG00000168143_40 (sequence is synthesized)
tggaaagccctgaaatttagtgcaatgtaactttaaaactgaaattatataaagagtagaagtttaatcatgtttaattacaaccaaaagcctgttgcctttttgtacagaaatctcctt

SEQ ID NO: 548949 - DNA, 120 bp, Artificial Sequence
  ENSG00000168143_41 (sequence is synthesized)
aatttcaggacatgtagatagcttatagaaacatccttttaaatagtttgtgagctcttcctcttcagtggaattgaggaatacagaatgctttatttcatcatcccctgacaggtgact

SEQ ID NO: 548950 - DNA, 120 bp, Artificial Sequence
  ENSG00000168143_42 (sequence is synthesized)
taggctttgcacagcagatttatttttctctgcgttttttaaaaattgtttttcttgtatcttttttcttcaaaaatatctatatttgagaatatgtacataacaactttccaaagtctc

SEQ ID NO: 548951 - DNA, 120 bp, Artificial Sequence
  ENSG00000168143_43 (sequence is synthesized)
tgtggccaaaacctctccagggataagactgagcaagaatataatacttcaaaaaatgtacagctactgtttaagttttaaacagacaccatcacagtttgtggatgaaatagttttaag

SEQ ID NO: 548952 - DNA, 120 bp, Artificial Sequence
  ENSG00000168143_44 (sequence is synthesized)
ccatatactttctgtctttttttccccatattaatattggggggcggataatatcactttgatgtacattgatattaaagtttggtaatgcagcttttactgtctacatggtactgtaca

SEQ ID NO: 548953 - DNA, 120 bp, Artificial Sequence
  ENSG00000168143_45 (sequence is synthesized)
ttagtttttaagcagaaacacaagaaaaatgggtataatttcaaagtagttcttggcagatggctagagaatactgcaagtgaccctgtatcccgaatacacagatatccctctattaca

SEQ ID NO: 548954 - DNA, 120 bp, Artificial Sequence
  ENSG00000168143_46 (sequence is synthesized)
agtttgggattagccataattctgacatggtgtgttcaggtatgggtatatgttgtcagtctacacttgtggaagcaaatatcttgtttaatcaagatgatgtctagtgtcacctaaata

SEQ ID NO: 548955 - DNA, 120 bp, Artificial Sequence
  ENSG00000168143_47 (sequence is synthesized)
atgcaaaaagtttaattctggatgaattcagctttactcaagatccacatattcaagtatcattccacagatattcacagaacacagaaatatctgtgttctgccttatgcctgtggcta

SEQ ID NO: 548956 - DNA, 120 bp, Artificial Sequence
  ENSG00000168143_48 (sequence is synthesized)
agggatgcaaagtagaattgctttacattgactatatatgtgacatgtacgttgctgttttttttaaaataactttatcatgatattcaggtagatcctgggttctagaatatttaaaac

SEQ ID NO: 548957 - DNA, 120 bp, Artificial Sequence
  ENSG00000168143_49 (sequence is synthesized)
aaaaggataaaatgataaaccaaagagtcaacttgttaacttttcttttttaagagatgggttttcactagtatgcccagtctggactccaagtcctgggctcaaacgatcctccagcct

SEQ ID NO: 548958 - DNA, 120 bp, Artificial Sequence
  ENSG00000168143_50 (sequence is synthesized)
caggttcctgagtagctcaacattttatgtatgtacgatattataaagaaatattcttccaaatgaacttttgtttttagatcaataaatgaataataaataattttgtacaaacatcaa

SEQ ID NO: 548959 - DNA, 120 bp, Artificial Sequence
  ENSG00000168148_0 (sequence is synthesized)
atggcccgaaccaagcagactgcgcgcaagtcaacgggtggcaaggcgccgcgcaagcagctggccaccaaggtggctcgcaagagcgcacctgccactggcggcgtgaagaagccgcac

SEQ ID NO: 548960 - DNA, 120 bp, Artificial Sequence
  ENSG00000168148_1 (sequence is synthesized)
cgctaccggcccggcacggtggcgcttcgcgagatccgccgctaccagaagtccactgagctgctaatccgcaagttgcccttccagcggctgatgcgcgagatcgctcaggactttaag

SEQ ID NO: 548961 - DNA, 120 bp, Artificial Sequence
  ENSG00000168148_2 (sequence is synthesized)
ccgacctgcgcttccagagctcggccgtgatggcgctgcaggaggcgtgcgagtcttacctggtggggctgtttgaggacaccaacctgtgtgtcatccatgccaaacgggtcaccatca

SEQ ID NO: 548962 - DNA, 120 bp, Artificial Sequence
  ENSG00000168148_3 (sequence is synthesized)
tgcctaaggacatccagctggcacgccgtatccgcggggagcgggcctaggagggctatctcgccacctgagaggttgcgcaacgttcaccccaaaggctcttttaagagccacccacct

SEQ ID NO: 548963 - DNA, 120 bp, Artificial Sequence
  ENSG00000168152_0 (sequence is synthesized)
ggagctaaagtggtcgtgattcatgctgtcgcgggaaccccgaaggtggggccccacgtaacaagaagatgacccgaagttgctccgcagtgggctgcagcacccgtgacaccgtgctca

SEQ ID NO: 548964 - DNA, 120 bp, Artificial Sequence
  ENSG00000168152_1 (sequence is synthesized)
gccgggagcgcggcctctccttccaccaatttccaactgataccatacagcgctcaaaatggatcagggctgttaatcgtgtggaccccagaagcaaaaagatttggattccaggaccag

SEQ ID NO: 548965 - DNA, 120 bp, Artificial Sequence
  ENSG00000168152_2 (sequence is synthesized)
gtgctatactgtgttccaaacattttcaagaaagtgactttgagtcatatggcataagaagaaagctgaaaaaaggagctgtgccttctgtttctctatacaagattcctcaaggtgtac

SEQ ID NO: 548966 - DNA, 120 bp, Artificial Sequence
  ENSG00000168152_3 (sequence is synthesized)
atcttaaaggtaaagcaagacaaaaaatcctaaaacaacctcttccagacaattctcaagaagttgctactgaggaccataactatagtttaaagacacctttgacgataggtgcagaga

SEQ ID NO: 548967 - DNA, 120 bp, Artificial Sequence
  ENSG00000168152_4 (sequence is synthesized)
aactggctgaggtgcaacaaatgttacaagtgtccaaaaaaagacttatctccgtaaagaactacaggatgatcaagaagagaaagggtttacgattaattgatgcacttgtagaagaga

SEQ ID NO: 548968 - DNA, 120 bp, Artificial Sequence
  ENSG00000168152_5 (sequence is synthesized)
aactactttctgaagaaacagagtgtctgctacgagctcaattttcagattttaagtgggagttatataattggagagaaacagatgagtactccgcagaaatgaaacaatttgcatgta

SEQ ID NO: 548969 - DNA, 120 bp, Artificial Sequence
  ENSG00000168152_6 (sequence is synthesized)
cactctacttgtgcagtagcaaagtctatgattatgtaagaaagattcttaagctgcctcattcttccatcctcagaacgtggttatccaaatgccaacccagtccaggtttcaacagca

SEQ ID NO: 548970 - DNA, 120 bp, Artificial Sequence
  ENSG00000168152_7 (sequence is synthesized)
acattttttcttttcttcaacgaagagtagagaatggagatcagctctatcaatactgttcattgttaataaaaagtatgcctctcaagcaacagcttcagtgggatcctagcagtcaca

SEQ ID NO: 548971 - DNA, 120 bp, Artificial Sequence
  ENSG00000168152_8 (sequence is synthesized)
gtttgcaggggtttatggactttggtcttggaaaacttgatgctgatgaaacgccacttgcttcagaaactgttttgttaatggcagtgggtatttttggccattggagaacacctcttg

SEQ ID NO: 548972 - DNA, 120 bp, Artificial Sequence
  ENSG00000168152_9 (sequence is synthesized)
gttatttttttgtaaacagagcatctggatatttgcaggctcagctgcttcgtctgactattggtaaactgagtgacataggaatcacagttctggctgttacatctgatgccacagcac

SEQ ID NO: 548973 - DNA, 120 bp, Artificial Sequence
  ENSG00000168152_10 (sequence is synthesized)
atagtgttcagatggcaaaagcattggggatacatattgatggagacgacatgaaatgtacatttcagcatccttcatcttctagtcaacagattgcatacttctttgactcttgccact

SEQ ID NO: 548974 - DNA, 120 bp, Artificial Sequence
  ENSG00000168152_11 (sequence is synthesized)
tgctaagattaataagaaatgcatttcagaattttcaaagcattcagtttattaatggtatagcacattggcagcacctcgtggagttagtagcactggaggaacaggaattatcaaata

SEQ ID NO: 548975 - DNA, 120 bp, Artificial Sequence
  ENSG00000168152_12 (sequence is synthesized)
tggaaagaataccaagtacacttgcaaatttgaaaaatcatgtactgaaagtgaatagtgccacccaactctttagtgagagtgtagccagtgcattagaatatttgttatccttagacc

SEQ ID NO: 548976 - DNA, 120 bp, Artificial Sequence
  ENSG00000168152_13 (sequence is synthesized)
tgccaccttttcaaaactgtattggtaccatccattttttacgtttaattaacaatctgtttgacatctttaatagtaggaactgttatggaaagggacttaaagggcctctgttgcctg

SEQ ID NO: 548977 - DNA, 120 bp, Artificial Sequence
  ENSG00000168152_14 (sequence is synthesized)
aaacttacagtaaaataaaccacgtgttaattgaagccaagactatttttgttacattatctgacactagcaataatcaaataattaaaggtaagcaaaaactaggattcctgggatttt

SEQ ID NO: 548978 - DNA, 120 bp, Artificial Sequence
  ENSG00000168152_15 (sequence is synthesized)
aattatttctaaagatgcttaggcaggtattagtaacaagttctagccctacctgcatggcattccagaaagcttactataatttggagaccagatacaaatttcaagatgaagtttttc

SEQ ID NO: 548979 - DNA, 120 bp, Artificial Sequence
  ENSG00000168152_16 (sequence is synthesized)
taagcaaagtaagcatctttgacatttcaattgctcgaaggaaagacttggcgctttggacagttcaacgtcagtatggtgtcagcgttacaaagactgtctttcacgaagagggtattt

SEQ ID NO: 548980 - DNA, 120 bp, Artificial Sequence
  ENSG00000168152_17 (sequence is synthesized)
gtcaagactggtctcattgttcactaagtgaggcattactagacctgtcagatcataggcgaaatctcatctgttatgctggttatgttgcaaacaagttatcagctcttttaacttgtg

SEQ ID NO: 548981 - DNA, 120 bp, Artificial Sequence
  ENSG00000168152_18 (sequence is synthesized)
aggactgcatcactgcactgtatgcatcggatctcaaagcctctaaaattgggtcactattatttgttaaaaagaagaatggtttgcattttccttcagaaagtctgtgtcgggtcataa

SEQ ID NO: 548982 - DNA, 120 bp, Artificial Sequence
  ENSG00000168152_19 (sequence is synthesized)
atatttgtgagcgagttgtaagaacccattcaagaatggcaatttttgaactagtttctaaacaaagggaattgtatcttcaacagaaaatattatgtgagctttctgggcatattaatc

SEQ ID NO: 548983 - DNA, 120 bp, Artificial Sequence
  ENSG00000168152_20 (sequence is synthesized)
tttttgtagatgtgaataagcatctctttgatggagaagtgtgtgccatcaatcactttgtcaagttgctaaaggatataataatctgtttcttaaatatcagagctaaaaatgttgcac

SEQ ID NO: 548984 - DNA, 120 bp, Artificial Sequence
  ENSG00000168152_21 (sequence is synthesized)
agaatcctttaaaacatcattcagagagaactgatatgaaaactttatcaaggaaacactggtcatctgtacaggattataaatgttcaagttttgctaataccagtagtaaattcaggc

SEQ ID NO: 548985 - DNA, 120 bp, Artificial Sequence
  ENSG00000168152_22 (sequence is synthesized)
atttgctaagtaacgatggatatccattcaaatgagagacctaaaatatattaacattttaattaagaatacttgatcaacattttttgaagttcaatttaccatattttataaattgcg

SEQ ID NO: 548986 - DNA, 120 bp, Artificial Sequence
  ENSG00000168152_23 (sequence is synthesized)
cattctgcacagtggacaagtttgcaattctgacttattaaaatttcaaattctgcatatcacaaaatctccttatacttttggtatggcttgcagcatttatgagttttccaaaatata

SEQ ID NO: 548987 - DNA, 120 bp, Artificial Sequence
  ENSG00000168152_24 (sequence is synthesized)
gaaagcagtaggtcagtaggagcaaactagccaacaggtactgtctttgaatttactactgtaagactaagcagtgttactggacacagttttaacttgttcaatctgcttcaaaaacaa

SEQ ID NO: 548988 - DNA, 120 bp, Artificial Sequence
  ENSG00000168152_25 (sequence is synthesized)
gaaaaacaacaactatgagttatcaaaatattgactccatttatgactagactacatttctgaaagatctttggtttatgattcttaagaatattgacaatacctataaaactttgaaga

SEQ ID NO: 548989 - DNA, 120 bp, Artificial Sequence
  ENSG00000168152_26 (sequence is synthesized)
taacttttacttaaatatgaaaattatagtttgaaaattaggctcaagcaaatatcaaatactgcaaaaatccccttgtcccaggataccctaaaatagaagtgcttaaactttgtcagg

SEQ ID NO: 548990 - DNA, 120 bp, Artificial Sequence
  ENSG00000168152_27 (sequence is synthesized)
cagaaggtaaagtacatgagccatgagattcttccttgtgctgcagccacgctggggagtgcaatctggaaagaacatacctaatgtgtttttcaccatccattatctctgaactttgaa

SEQ ID NO: 548991 - DNA, 120 bp, Artificial Sequence
  ENSG00000168152_28 (sequence is synthesized)
atattacttttgaataataggctggacacttagtttgacttgaaagagctcaatgctcatcggaaaacagggagaaacctaatctgaagatggaagcatactaaggacaattttctccac

SEQ ID NO: 548992 - DNA, 120 bp, Artificial Sequence
  ENSG00000168152_29 (sequence is synthesized)
tcacatccacatttgaaaagagggacagaaaaacataggtaactctactttcacaaatgaggatagtttaacggatagaagaaacaagcacattattcacctgtgttgtaaaacatctac

SEQ ID NO: 548993 - DNA, 120 bp, Artificial Sequence
  ENSG00000168152_30 (sequence is synthesized)
tcttttttgtcactgaataagtgttcccaaagtacagttaatcctaatatgaaaacttagaattgtaaaagattaatgataacgtaaaagtatattgattaaaattccccttacaaagta

SEQ ID NO: 548994 - DNA, 120 bp, Artificial Sequence
  ENSG00000168152_31 (sequence is synthesized)
agctgcctcattcttccatcctcagaacgagcggccagtgaggcaggaggaaaaccaggagattgtgatggcctggaagccaagtgtagaaagtatttcaaggagggagtagtccactat

SEQ ID NO: 548995 - DNA, 120 bp, Artificial Sequence
  ENSG00000168152_32 (sequence is synthesized)
gtcaaatgctgctgggagatcaggtggttatccaaatgccaacccagtccaggtttcaacagcaacattttttcttttcttcaacgaagagtagagaatggagatcagctctatcaatac

SEQ ID NO: 548996 - DNA, 120 bp, Artificial Sequence
  ENSG00000168152_33 (sequence is synthesized)
tggcttggattgaaaaataaataaatgcaagatttccaactgataccatacagcgctcaaaatggatcagggctgttaatcgtgtggaccccagaagcaaaaagatttggattccaggac

SEQ ID NO: 548997 - DNA, 120 bp, Artificial Sequence
  ENSG00000168158_0 (sequence is synthesized)
ttccagcagcttgcgctaaatgaattcatcaagtgactgaagacaaccagtgatggacggggtgaatgatagctccttgcagggctttgttctgatgggcatatcagaccatccccagct

SEQ ID NO: 548998 - DNA, 120 bp, Artificial Sequence
  ENSG00000168158_1 (sequence is synthesized)
ggagatgatcttttttatagccatcctcttctcctatttgctgaccctacttgggaactcaaccatcatcttgctttcccgcctggaggcccggctccatacacccatgtacttcttcct

SEQ ID NO: 548999 - DNA, 120 bp, Artificial Sequence
  ENSG00000168158_2 (sequence is synthesized)
cagcaacctctcctccttggaccttgctttcgctactagttcagtcccccaaatgctgatcaatttatggggaccaggcaagaccatcagctatggtggctgcataacccagctctatgt

SEQ ID NO: 549000 - DNA, 120 bp, Artificial Sequence
  ENSG00000168158_3 (sequence is synthesized)
cttcctttggctgggggccaccgagtgcatcctgctggtggtgatggcatttgaccgctacgtggcagtgtgccggcccctccgctacaccgccatcatgaacccccagctctgctggct

SEQ ID NO: 549001 - DNA, 120 bp, Artificial Sequence
  ENSG00000168158_4 (sequence is synthesized)
gctggctgtgattgcctgcctgggtggcttgggcaactctgtgatccagtcaacattcactctgcagctcccattgtgtgggcaccggagggtggagggattcctctgcgaggtgcctgc

SEQ ID NO: 549002 - DNA, 120 bp, Artificial Sequence
  ENSG00000168158_5 (sequence is synthesized)
tctcctactgcctcattgctcaggcagtgctgaaaatccgctctgcagaggggaggcgaaaggcgttcaatacgtgcctctcccatctgctggtggtgttcctcttctatggctcagcca

SEQ ID NO: 549003 - DNA, 120 bp, Artificial Sequence
  ENSG00000168158_6 (sequence is synthesized)
gctatgggtatctgcttccggccaagaacagcaaacaggaccagggcaagttcatttccctgttctactcgttggtcacacccatggtgaatcccctcatctacacgctgcggaacatgg

SEQ ID NO: 549004 - DNA, 120 bp, Artificial Sequence
  ENSG00000168158_7 (sequence is synthesized)
aagtgaagggcgcactgaggaggttgctggggaaaggaagagaagttggctgagagaacactccttcgttatttattgcgtcttcatctctacatgcgtttctcattaactctctctggc

SEQ ID NO: 549005 - DNA, 120 bp, Artificial Sequence
  ENSG00000168158_8 (sequence is synthesized)
caggtgaacatgaggaatactaattccggtaaaaccaaggcatgttcctgacagccctaagctgacagccctaagctgttgggaacatggttagtgttattcgtaatgttctacacttat

SEQ ID NO: 549006 - DNA, 120 bp, Artificial Sequence
  ENSG00000168158_9 (sequence is synthesized)
ttaccaaaaatcctactgtggactaccgatagcaggggagacatgttgttgagggctcagaggttattgacctgtgacagacctgtctcactgtctctgtctctgttgcccacatgttat

SEQ ID NO: 549007 - DNA, 120 bp, Artificial Sequence
  ENSG00000168158_10 (sequence is synthesized)
ttaatatgccttatatttctgcagaattctgtacttttctaagcaaagcacctccacttgcagtatcttacataatgttactataattccataaaatcaagccatgtattattaacttca

SEQ ID NO: 549008 - DNA, 120 bp, Artificial Sequence
  ENSG00000168159_0 (sequence is synthesized)
gttggcgtcttcgtcctgttgctggtctccgtccggtcgccggccgtctaggtctccggccctccccagccgctcctgcgcccttgccggccccgccgcccgcagccctggcgctccctg

SEQ ID NO: 549009 - DNA, 120 bp, Artificial Sequence
  ENSG00000168159_1 (sequence is synthesized)
ccctgtgccagcgcgcgccccgggaaccggtgcgcgccgactgcggccaccgcttctgtcgggcgtgcgtggtgcgcttctgggccgaggaggacgggcccttcccgtgccccgagtgcg

SEQ ID NO: 549010 - DNA, 120 bp, Artificial Sequence
  ENSG00000168159_2 (sequence is synthesized)
cttctgggccgaggaggacgggcccttcccgtgccccgagtgcgccgacgactgctggcagcgcgccgtggagcccggcaggcccccgctcagccgccgccttctggcgctcgaggaggc

SEQ ID NO: 549011 - DNA, 120 bp, Artificial Sequence
  ENSG00000168159_3 (sequence is synthesized)
tgcagctgctgtgccgcgccgacgccggcccgctctgcgccgcctgccgtatggctgcgggccccgagccgcccgagtgggaaccgcgctggaggaaggcgctgcgcggcaaggagaaca

SEQ ID NO: 549012 - DNA, 120 bp, Artificial Sequence
  ENSG00000168159_4 (sequence is synthesized)
aggcgctgcgcggcaaggagaacaaggggtctgtggaaatcatgagaaaggacttgaatgacgcccgggacctgcatggccaggcagagtcagcagctgcagtgtggaagggacacgtga

SEQ ID NO: 549013 - DNA, 120 bp, Artificial Sequence
  ENSG00000168159_5 (sequence is synthesized)
tggaccgtaggaagaaggcactgaccgactacaagaagctgcgggccttctttgtggaggaggaggagcatttcctgcaggaggctgagaaggaggaggggctccctgaggacgagctgg

SEQ ID NO: 549014 - DNA, 120 bp, Artificial Sequence
  ENSG00000168159_6 (sequence is synthesized)
ctgaccccactgagcggttcaggtcactgctgcaggcggtctcggagctggagaagaagcatcgcaacctgggcctcagcatgctgctgcagtgatggcgccaacccgtggcagtcccag

SEQ ID NO: 549015 - DNA, 120 bp, Artificial Sequence
  ENSG00000168159_7 (sequence is synthesized)
agctggaggcaggaggatggatcctcatctccatgggaagtgtcagcgtgtggctgccagggaagcgtggcaggcgcctggccttgggtccatctacatagttgcgtgtttcaacaatgt

SEQ ID NO: 549016 - DNA, 120 bp, Artificial Sequence
  ENSG00000168159_8 (sequence is synthesized)
ccatttatccttcaccccgaggcgtgttttgggggctgcaaacacctcccggtagaggctggacctgaggacccttcccacctgtgcccgtcccttcctgaagtcctagccacagcccat

SEQ ID NO: 549017 - DNA, 120 bp, Artificial Sequence
  ENSG00000168159_9 (sequence is synthesized)
cctccatgagtcccggcagctctgggtcatgcccttccctggtcacccatctgcccctcacctcgtcatccagggacccagaccctgcaccttccatgtgggcccacagatccttggcag

SEQ ID NO: 549018 - DNA, 120 bp, Artificial Sequence
  ENSG00000168159_10 (sequence is synthesized)
gtacctgaggtgcaccattgagtgtcggatttggggttagcatccagaaagaagaatgcgcatgacgctctgtgaaggctggaactcaggtcttcagggagagaaaggaagactggattg

SEQ ID NO: 549019 - DNA, 120 bp, Artificial Sequence
  ENSG00000168159_11 (sequence is synthesized)
caccttgatgcctcctgaggaggcggcccccctcttgaggtgggcgtgggcccggcccagccttatccaagtcgctctgtccacctcccccttcctggcccccaccccactcctgtgcct

SEQ ID NO: 549020 - DNA, 120 bp, Artificial Sequence
  ENSG00000168159_12 (sequence is synthesized)
cgtgtctcatcttgctgttatctctagctctttccctcctcccatttcctttagtagttgaattttgcaaagcttgtagcagtagctcagttgcctgcagcatccttgtgtgtagataaa

SEQ ID NO: 549021 - DNA, 120 bp, Artificial Sequence
  ENSG00000168159_13 (sequence is synthesized)
ttagtcgacagaaactcagcactggggacaggattgcaaagtcggggacatagatgcagacagttgttgagatttggggatagccgggcttgtgagcggtgcccatttccagatgaagcc

SEQ ID NO: 549022 - DNA, 120 bp, Artificial Sequence
  ENSG00000168159_14 (sequence is synthesized)
tttcagcccttctgagtccccggcccttggtgcgatgtctgtgagtttgacctgcccagcgtgtgggctggctcaatgctgaataaagtgggtttgtgtcagctcgtttgcttcgtctcc

SEQ ID NO: 549023 - DNA, 120 bp, Artificial Sequence
  ENSG00000168159_15 (sequence is synthesized)
gtgtgtccacctggcctcttccccctgccctggccaccctccagtgtcaaaggaaacttcctcgtgacacgtgctaaagcatggtgaggaggactttgattgggaccattgagatgggtg

SEQ ID NO: 549024 - DNA, 120 bp, Artificial Sequence
  ENSG00000168159_16 (sequence is synthesized)
tgggaccctttccttggggcctggggggagatggggctccaccccgacgtagcagggcaggggttggaggagcgaggagcagtatagggtccatgggtgggaatgactgtgaggagacat

SEQ ID NO: 549025 - DNA, 120 bp, Artificial Sequence
  ENSG00000168159_17 (sequence is synthesized)
cagggctgagggggctctggctaaacccacctcacagagtccttgctgcaggcaggcagggcgatcagacattggctgcaaacggtcagagaggaacccagtcaggtaccattgagggtg

SEQ ID NO: 549026 - DNA, 120 bp, Artificial Sequence
  ENSG00000168159_18 (sequence is synthesized)
gtcagatattatggttaaccaaattagggttcttgctaaaactggatttcataagaaagggcaaagagggccctaggagaagattccagagcctggccagagtttggccaagtagagaat

SEQ ID NO: 549027 - DNA, 120 bp, Artificial Sequence
  ENSG00000168159_19 (sequence is synthesized)
ctttgtcagcacgccaacaacatcccgaccctgagacctccagtttgtctttctcactgtctccgcctgctgcagtctgctgtcatccctgagcatccctgcccctgccctgcacacctg

SEQ ID NO: 549028 - DNA, 120 bp, Artificial Sequence
  ENSG00000168159_20 (sequence is synthesized)
tgatgcttgcccggacaggtcctgatggcagagtctcccacaacatcagtgtctccacatcaccaggtccgacagtggcttcaccatcctcacctaacctagctgaccagcaacatccca

SEQ ID NO: 549029 - DNA, 120 bp, Artificial Sequence
  ENSG00000168159_21 (sequence is synthesized)
ccctgtcaatcacaacctctttctatttaagaaaattatatatttatggggcacagtgtgatgttttgatatctatgtacattgtggagtgacagattaatgtatccatctcatgttttt

SEQ ID NO: 549030 - DNA, 120 bp, Artificial Sequence
  ENSG00000168159_22 (sequence is synthesized)
tttggtggtgagaatatttgaaatctacactcagcaatttcaaatacagtcatccctctgtgcctaagggggattggttccaggaccccctcatggataccaaaatctgcagatactcaa

SEQ ID NO: 549031 - DNA, 120 bp, Artificial Sequence
  ENSG00000168159_23 (sequence is synthesized)
gtaccctgcagtcagccctccctctgcacatatgtgggacagtcagatacagagggccaactgcgtacagtacacggttatcagctgaagtcaccatgctgtgcaatagaccttgagttt

SEQ ID NO: 549032 - DNA, 120 bp, Artificial Sequence
  ENSG00000168159_24 (sequence is synthesized)
attcttgtatagcagggactctgtaccctctgactagaatttccccaaatcctcttgtctcagcccctgctaaccaccgttctactctctaattctataaatcaacattttgattccaca

SEQ ID NO: 549033 - DNA, 120 bp, Artificial Sequence
  ENSG00000168159_25 (sequence is synthesized)
actagctgtgccctgtctcgccctcatagaccccctctagttcctacagattgactcctccactcactcttcccttgggggagacatcacgcctcttgcccctctgtattccactgtgtc

SEQ ID NO: 549034 - DNA, 120 bp, Artificial Sequence
  ENSG00000168159_26 (sequence is synthesized)
cacaggcctggcccaccttctcgtctgctccccgggccacccagccctcgcctgcaccccctgtcccctctcccatctttcagaaacccgctctgagagtctggcagcagcgggtccggg

SEQ ID NO: 549035 - DNA, 120 bp, Artificial Sequence
  ENSG00000168159_27 (sequence is synthesized)
agtctggagccttgcccatggcgggagaacaaggggtctgtggaaatcatgagaaaggacttgaatgacgcccgggacctgcatggccaggcagagtcagcagctgcagtgtggaaggca

SEQ ID NO: 549036 - DNA, 120 bp, Artificial Sequence
  ENSG00000168172_0 (sequence is synthesized)
ggagccgctgccagcgctgggcgagagtcggcggccggatccgaggagcaggcgggcctgaggccgagtcagctgcgcgggcccccggatcccccgacagagcggcggcggtgtctggcc

SEQ ID NO: 549037 - DNA, 120 bp, Artificial Sequence
  ENSG00000168172_1 (sequence is synthesized)
aggcggtaggcgctgcctggccgcggcggggaagatgttcagcgtagagtcgctggagcgggcggagctgtgcgagagcctcctcacttggatccagacatttaatgtggatgcaccatg

SEQ ID NO: 549038 - DNA, 120 bp, Artificial Sequence
  ENSG00000168172_2 (sequence is synthesized)
ccagaccgtggaagatttaacgaatggggttgtgatggcccaggttcttcaaaagatagatcctgcatattttgatgaaaattggctaaacagaatcaaaactgaagtaggagataattg

SEQ ID NO: 549039 - DNA, 120 bp, Artificial Sequence
  ENSG00000168172_3 (sequence is synthesized)
gaggctaaagataagcaatttaaagaaaattttaaaaggaatcttggattataatcatgagattttaggacagcaaattaatgactttacccttcctgatgtgaaccttattggggagca

SEQ ID NO: 549040 - DNA, 120 bp, Artificial Sequence
  ENSG00000168172_4 (sequence is synthesized)
ttctgatgcagcagagcttggaaggatgcttcagctcatcttaggctgtgctgtgaactgtgaacagaagcaagagtacatccaagccattatgatgatggaggaatctgttcaacatgt

SEQ ID NO: 549041 - DNA, 120 bp, Artificial Sequence
  ENSG00000168172_5 (sequence is synthesized)
tgtcatgacagccattcaagagctgatgagtaaagaatctcctgtctctgctggaaatgatgcctatgttgaccttgatcgtcagctgaagaaaactacagaggaactaaatgaagcttt

SEQ ID NO: 549042 - DNA, 120 bp, Artificial Sequence
  ENSG00000168172_6 (sequence is synthesized)
gtcagcaaaggaagaaattgctcaaagatgccatgaactggatatgcaggttgcagcattgcaggaagagaaaagtagtttgttggcagagaatcaggtattaatggaaagactcaatca

SEQ ID NO: 549043 - DNA, 120 bp, Artificial Sequence
  ENSG00000168172_7 (sequence is synthesized)
atctgattctatagaagaccctaacagtccagcaggaagaaggcatttgcagctccagactcaattagaacagctccaagaagaaacattcagactagaagcagccaaagatgattatcg

SEQ ID NO: 549044 - DNA, 120 bp, Artificial Sequence
  ENSG00000168172_8 (sequence is synthesized)
aatacgttgtgaagagttagaaaaggagatctctgaacttcggcaacagaatgatgaactgaccactttggcagatgaagctcagtctctgaaagatgagatcgacgtgctgagacattc

SEQ ID NO: 549045 - DNA, 120 bp, Artificial Sequence
  ENSG00000168172_9 (sequence is synthesized)
ttctgataaagtatctaaactagaaggtcaagtagaatcttataaaaagaagctagaagaccttggtgatttaaggcggcaggttaaactcttagaagagaagaataccatgtatatgca

SEQ ID NO: 549046 - DNA, 120 bp, Artificial Sequence
  ENSG00000168172_10 (sequence is synthesized)
gaatactgtcagtctagaggaagagttaagaaaggccaacgcagcgcgaagtcaacttgaaacctacaagagacaggtagtagaactacaaaacagattatccgaagaatcaaagaaagc

SEQ ID NO: 549047 - DNA, 120 bp, Artificial Sequence
  ENSG00000168172_11 (sequence is synthesized)
agataaactagattttgaatataagcggctaaaagaaaaagttgacagtcttcaaaaagaaaaggacaggctgagaacagaaagggattctctgaaggaaaccattgaagagcttcgttg

SEQ ID NO: 549048 - DNA, 120 bp, Artificial Sequence
  ENSG00000168172_12 (sequence is synthesized)
tgtacaagctcaagaagggcagctcacaacacaagggttaatgcctcttggaagtcaggagtcttcagacagtctagctgcagagattgttacacctgaaatcagggagaaacttattcg

SEQ ID NO: 549049 - DNA, 120 bp, Artificial Sequence
  ENSG00000168172_13 (sequence is synthesized)
tcttcagcatgagaataagatgttaaagcttaaccaagaaggttcggacaatgaaaaaatagccttattgcagagccttctagatgatgcaaatctacgcaagaatgaactggagacaga

SEQ ID NO: 549050 - DNA, 120 bp, Artificial Sequence
  ENSG00000168172_14 (sequence is synthesized)
gaataggctggtgaatcaaagacttctggaagtacagtcacaagttgaagaattacaaaaatctttacaggatcaaggctcaaaagcagaagattcagtccttctaaaaaagaagcttga

SEQ ID NO: 549051 - DNA, 120 bp, Artificial Sequence
  ENSG00000168172_15 (sequence is synthesized)
agaacatctagagaagctgcatgaggccaataatgaactacagaagaagagagccattattgaagatctcgagccaagatttaacaacagctccttaaaaattgaagaattacaagaagc

SEQ ID NO: 549052 - DNA, 120 bp, Artificial Sequence
  ENSG00000168172_16 (sequence is synthesized)
tttacgaaagaaagaggaagaaatgaagcaaatggaagaacgatacaaaaaatacttagagaaagccaaaagtgtcatccgtactttagatcctaaacagaatcaaggagcagcaccaga

SEQ ID NO: 549053 - DNA, 120 bp, Artificial Sequence
  ENSG00000168172_17 (sequence is synthesized)
aatacaagctcttaaaaatcagctccaggaacgagaccgactgttccactcattagagaaagaatatgagaaaacaaagagtcagagagagatggaagagaaatatattgttagtgcctg

SEQ ID NO: 549054 - DNA, 120 bp, Artificial Sequence
  ENSG00000168172_18 (sequence is synthesized)
gtacaatatgggaatgaccctgcataaaaaggcagctgaagatagactggcaagcacaggctcagggcagtcatttctggcgaggcagaggcaagcgaccagcagcagaagatcataccc

SEQ ID NO: 549055 - DNA, 120 bp, Artificial Sequence
  ENSG00000168172_19 (sequence is synthesized)
aggccacgtgcagccggccacagcaaggtagagaagttgtgccgctcaatcacagacacctgcacccacaacatacttctgttacacacaagaacatttcaggaaactcagccagcttat

SEQ ID NO: 549056 - DNA, 120 bp, Artificial Sequence
  ENSG00000168172_20 (sequence is synthesized)
tttttgtttctcttctatgtcaatacttagtgtttctcattttgaggactttttctctctcctgtatctttgttttagtttctttggtttttattttgtagtcctttcagttatttttaa

SEQ ID NO: 549057 - DNA, 120 bp, Artificial Sequence
  ENSG00000168172_21 (sequence is synthesized)
tgtgccaaaaatttgtacatgttcaattaaaaatgttgtataatagtgtaatacttttctttgtatgaaaatgtcctcttcttcaaaggtataggctttgtaatgaattagattttctgc

SEQ ID NO: 549058 - DNA, 120 bp, Artificial Sequence
  ENSG00000168172_22 (sequence is synthesized)
caataattgatatacaatttatattctttattgtgcctgtgtgttaccatgctaagaatgtctttgtttaaagggaattaatctttttatgatgtattaatctgtgttttcaattgtttt

SEQ ID NO: 549059 - DNA, 120 bp, Artificial Sequence
  ENSG00000168172_23 (sequence is synthesized)
ccaagtacagttcaaataacttgcatatttactatacaaaatggttgacaagtgttctttttgcaaagacttgaatacattggcagaggtgctaatcacatcttccctaaggcacctgga

SEQ ID NO: 549060 - DNA, 120 bp, Artificial Sequence
  ENSG00000168172_24 (sequence is synthesized)
agaattatttgaggaaaaaatgagttttcacattgttttataggaaattaaatttgtccaaagatttggagactatttttaaaacataaatacataaaatttcattatttcctgctatct

SEQ ID NO: 549061 - DNA, 120 bp, Artificial Sequence
  ENSG00000168172_25 (sequence is synthesized)
tgtttgctggcagaagtgaatgtttggtgaggttattttgggataaattacaaaagaaaaaaaattagacactgcattaatttcttgttcttttggaatatcttagtaactgaggatcat

SEQ ID NO: 549062 - DNA, 120 bp, Artificial Sequence
  ENSG00000168172_26 (sequence is synthesized)
tttctaacaatgtggttgacataccttcagttgctttccacatctaaaagagttatctttcatatatgtacaagttattggtagtcttatttttgggctgtttgttgacttatgccccat

SEQ ID NO: 549063 - DNA, 120 bp, Artificial Sequence
  ENSG00000168172_27 (sequence is synthesized)
ttgttttacttgttctttaatataaacccttccattttttaacaattcctaacacttgatatcttaatatcagtcactaacattagtaacttcttgtatgttatattatggcagatctct

SEQ ID NO: 549064 - DNA, 120 bp, Artificial Sequence
  ENSG00000168172_28 (sequence is synthesized)
ttacgttttttctcacatctatctgctagtccaggaatttgttactaaatagattttcttggatatttggttgcctcaaagtgcttacatttgttaacagattgtaaaccacatttattt

SEQ ID NO: 549065 - DNA, 120 bp, Artificial Sequence
  ENSG00000168172_29 (sequence is synthesized)
acattgatgaatgggctgttgaataatcattgtaaagcactttgtatatataaggtgctatataagtgtgaaatatcattcatttataaatgaaatgccttctaactttccatattgact

SEQ ID NO: 549066 - DNA, 120 bp, Artificial Sequence
  ENSG00000168172_30 (sequence is synthesized)
tatgtatttggtcccaaattatatttaagtcttttttcttgcaacgtagcccattttttgaaagcaaaacatttctgaaattaggtcatggtttttttgtttatttttaggttaggtcac

SEQ ID NO: 549067 - DNA, 120 bp, Artificial Sequence
  ENSG00000168172_31 (sequence is synthesized)
ttaatataggaggatgttttctcatgtacttgctatttgcaagttcaggtttcatttggttctttatgttaaatacgaataagtaacctcaaatcaagctaaatgtaattaagaattttc

SEQ ID NO: 549068 - DNA, 120 bp, Artificial Sequence
  ENSG00000168172_32 (sequence is synthesized)
agcaactatattcaagtgtttgatttttaaattctttctttctttttaataagaaagatgacctaaaaatcagtggtatttgtttgtcctcagaagccgtagttgaagaaagatattaga

SEQ ID NO: 549069 - DNA, 120 bp, Artificial Sequence
  ENSG00000168172_33 (sequence is synthesized)
gtatacacagaactggagccatacattgtgctaattttttacattaagtacagaagtctgagcacagcatgaatgcttctgcctgacaggaccacaaagcagcagaagttagggataaat

SEQ ID NO: 549070 - DNA, 120 bp, Artificial Sequence
  ENSG00000168172_34 (sequence is synthesized)
ggagatagccatgagtagaactgctgtagggcttcaggaggctacgcagacctgatcaactgcaaagtttccaaagtaaaagattaaaaactttcagacggttcttacctctacccgtgt

SEQ ID NO: 549071 - DNA, 120 bp, Artificial Sequence
  ENSG00000168172_35 (sequence is synthesized)
ttcacaaatagcctgaggatccaactatttttaaagcaaattggggccagacgtggtgcctcacgcctgcaatctcaccatttgggagacctaggtgggggtggatcacttgaggtcagg

SEQ ID NO: 549072 - DNA, 71 bp, Artificial Sequence
  ENSG00000168172_36 (sequence is synthesized)
cagtcaatcaatcaatcaatcaaattggaatatgagcactaaccttggtaagttaaaattttgggaaaatt

SEQ ID NO: 549073 - DNA, 120 bp, Artificial Sequence
  ENSG00000168172_37 (sequence is synthesized)
atgagcactaaccttggtaagttaaaattttgggaaaattgtacctgcagaatatgatggatgaaaacaacagccaggtgcagtggctcacgcgtataatcccagcactttgggaggccg

SEQ ID NO: 549074 - DNA, 63 bp, Artificial Sequence
  ENSG00000168172_38 (sequence is synthesized)
cccagcactttgggaggccgagacaggcacatcatctgaggtcaggacttccagaccagcctg

SEQ ID NO: 549075 - DNA, 120 bp, Artificial Sequence
  ENSG00000168172_39 (sequence is synthesized)
aaaaaaaaaaaaaaaaaaaaaacagtctgtgaactactcactgaatgaattttgttctgtgagatgagaggttttcattttcattttctatttacagccccagtcctaatctcctaccca

SEQ ID NO: 549076 - DNA, 120 bp, Artificial Sequence
  ENSG00000168172_40 (sequence is synthesized)
cccatccacctacccagatattttttctctatctgggttggaaaggccccaggcttttagaggggagttttacttctgacttttttttccccccgagacggagcctcgttccgtcaccca

SEQ ID NO: 549077 - DNA, 120 bp, Artificial Sequence
  ENSG00000168172_41 (sequence is synthesized)
gtgctgagattacaggcacgagccaccgcgcccagtcgtacttctgacttttcttcagcatctgttgtatgctattattttgatgtttacatttataattttctttcttttttttttttt

SEQ ID NO: 549078 - DNA, 120 bp, Artificial Sequence
  ENSG00000168172_42 (sequence is synthesized)
cgtgagccaccgcgcccagcctacatttataattttcattctcttttacctataaaattcagtgtattagtttcattacataggagaaattatatttctaaacattttatgatgtttaaa

SEQ ID NO: 549079 - DNA, 120 bp, Artificial Sequence
  ENSG00000168172_43 (sequence is synthesized)
aacaaaacaggctgttgtaaaaaaaaaaaaaaaaaaaacttctgaatatactttaggtatcagaaagccaagaataaaatttagctctaacggtggcaactccatgtccggtgtccagct

SEQ ID NO: 549080 - DNA, 120 bp, Artificial Sequence
  ENSG00000168172_44 (sequence is synthesized)
ttggacagggtttatgacgtttctgtttctctagtaatgattaatgattcctcaggagattcgtgatgttgtctggtctatctggaaatttaaagtcactaggagctttgcctcatcgtg

SEQ ID NO: 549081 - DNA, 120 bp, Artificial Sequence
  ENSG00000168172_45 (sequence is synthesized)
agtgatgctgtgctgtatttttacaaactctcgcatacagcaccttcctggggccacgttggcttgtgcagtggagcttgtccaggcaccagcatggagcaagtacagggttgctgtgtt

SEQ ID NO: 549082 - DNA, 120 bp, Artificial Sequence
  ENSG00000168172_46 (sequence is synthesized)
gggttggagcacactgtcaccacagtgtctgaagtcttataaacaggaagatcattttctgttttccttctaaccagggtgagaaaatacaaagtaaagaactaaagaatattaaaacct

SEQ ID NO: 549083 - DNA, 120 bp, Artificial Sequence
  ENSG00000168172_47 (sequence is synthesized)
agcatttatgttccacagtgtgtatttcagaagtttgtaatccagaaaatatagtagtgtataatatctgaaaagagaatcaagtatacaattgtacatatttttaaagaactttgaaaa

SEQ ID NO: 549084 - DNA, 120 bp, Artificial Sequence
  ENSG00000168172_48 (sequence is synthesized)
actccgtcatatcttttaccatttgtctatttgatagtaatgcagaaaaaagtccctaaagaccctgtgttccaaaatttaccaagattgacatttctattagacatccttaacctaagt

SEQ ID NO: 549085 - DNA, 120 bp, Artificial Sequence
  ENSG00000168172_49 (sequence is synthesized)
gttttaattagattattagactataataaggatgaaattgctgtctgtaattttgttgaggttttattgttaatataataaaagctcaactgtacaaaattaagctaaatgttatccagt

SEQ ID NO: 549086 - DNA, 69 bp, Artificial Sequence
  ENSG00000168172_50 (sequence is synthesized)
cctgtatattccagtagttctcacagaagaatgaaaatccgtgctgtgcaaatagatcagtagtgagtg

SEQ ID NO: 549087 - DNA, 81 bp, Artificial Sequence
  ENSG00000168172_51 (sequence is synthesized)
cagtagtgagtgagtgttaagtgaaagatgagctaggttgaagaaaatatacattttattgatgagccactttgctatctc

SEQ ID NO: 549088 - DNA, 120 bp, Artificial Sequence
  ENSG00000168172_52 (sequence is synthesized)
cttttctccctcctttcttccttcccttcccttcccctcccctcccccaggctggagtgcagaggcacgatcctggctgactgcaaactctgcctaccaggttcaagcgattctcctgcc

SEQ ID NO: 549089 - DNA, 71 bp, Artificial Sequence
  ENSG00000168172_53 (sequence is synthesized)
aagcgattctcctgcctcatcctccctagtagctaaaatacaaagagacggggtttcaccatgttggccag

SEQ ID NO: 549090 - DNA, 120 bp, Artificial Sequence
  ENSG00000168172_54 (sequence is synthesized)
caaagtgctgggattacaggcgtgtgttactgccccagcctcctatttccttttcgaaagtagcagtttggtttattctcgtttgctaagtaattgtttgaaatatttttcagcctctcc

SEQ ID NO: 549091 - DNA, 120 bp, Artificial Sequence
  ENSG00000168172_55 (sequence is synthesized)
tttgaaatatttttcagcctctcctgctccctcacaaaaattcacctgtcattttaatgataacagcatgttaaaaacttggaagtctttatcccaatataagaattatcttgaaacaaa

SEQ ID NO: 549092 - DNA, 120 bp, Artificial Sequence
  ENSG00000168172_56 (sequence is synthesized)
aatctaaattacttttaaaaattctcttaactctgcatttagtctcctattatctagatctctgagtccaggataactccagttatccccagttggatcatgtgtgatttatctgagaaa

SEQ ID NO: 549093 - DNA, 120 bp, Artificial Sequence
  ENSG00000168172_57 (sequence is synthesized)
gcatccacaacccacagctagtggaaaccgagctagtttacagccacgtggataagaacatctttgtttctaaagtgagaggaaagtgcttggtatcttgctttttgctgagggcaaaat

SEQ ID NO: 549094 - DNA, 120 bp, Artificial Sequence
  ENSG00000168172_58 (sequence is synthesized)
aacaacatgaagacaaagtgctttttgttgtctattcatgaaactgtagaagaatattttgagtttttattcttatattatgaagggattctttgcctagcagtggccgtcaaactgatg

SEQ ID NO: 549095 - DNA, 120 bp, Artificial Sequence
  ENSG00000168172_59 (sequence is synthesized)
tagcattgtacttctcaacagtgaagcctgtgtaataccatacagtaggatgaaagactattctgagcaaaatcaaatgggatgtcagaatctttgaaaattattttatcattttttcta

SEQ ID NO: 549096 - DNA, 120 bp, Artificial Sequence
  ENSG00000168172_60 (sequence is synthesized)
ttttttcatttttataaattagaaggattttccattcaataaggataatctctcttcctatcattctgtcaaaatggcagtttcttttggtaattatccaacctagtttcattacattta

SEQ ID NO: 549097 - DNA, 120 bp, Artificial Sequence
  ENSG00000168172_61 (sequence is synthesized)
gaaggaggtttcagagcttattcttgataactataataatgatttgaatgttttatatcatgaagttttttctatgaggaaggctattctcaatgtatctgtcgtctaattttttatttt

SEQ ID NO: 549098 - DNA, 120 bp, Artificial Sequence
  ENSG00000168172_62 (sequence is synthesized)
ctatctataaagaatatttaaataataattggtgtatgttccttttgttgaaaatgttttattgtccagttttaacacagaagtggtctaaagttttgcagcaaatgctgttcagttccc

SEQ ID NO: 549099 - DNA, 120 bp, Artificial Sequence
  ENSG00000168172_63 (sequence is synthesized)
agaagcctaaaaaacataacataatatgctaacagagctaatttccacccaatccctcaaattaccgaagtattaatatttagcttcctttctagaaaacaaggggcagcacaaatgggg

SEQ ID NO: 549100 - DNA, 120 bp, Artificial Sequence
  ENSG00000168172_64 (sequence is synthesized)
tggcatccatctcttttaaatcactgatgattttctggggaagtatatatagatgattttattttttaaatagccttttatcaaaccatttcacatgtattatctatatgactatagaaa

SEQ ID NO: 549101 - DNA, 120 bp, Artificial Sequence
  ENSG00000168172_65 (sequence is synthesized)
cttataaaacatttaattcatgttgacttaaaacatgggcatccttggattctccacattgactgaaatgatagagaaagggacatttgtttgagaaacaagagacctgtacctaattat

SEQ ID NO: 549102 - DNA, 120 bp, Artificial Sequence
  ENSG00000168172_66 (sequence is synthesized)
ggcaagtatatgagttttggtgattgtggggggttataaatgttttcctatgatagataaatatatagatatagatcaggaattacttgatgtctcttcagaagttttctgttttcttat

SEQ ID NO: 549103 - DNA, 120 bp, Artificial Sequence
  ENSG00000168172_67 (sequence is synthesized)
aatttccagtaatactctgtaagactcggtttgcatgctgtgtgtgtttgcatgagtatagaaacctaagaacataatggaaggctattaaggcaaattcattcctagaaagtggagtgg

SEQ ID NO: 549104 - DNA, 120 bp, Artificial Sequence
  ENSG00000168172_68 (sequence is synthesized)
atcattgggataagaaatagcctaattataaacaaatatgcaggcagagggaagtcctaatacaatgaaaacttgcattatctaaacagatgttcccaaagcaatagtttgcctaaaatc

SEQ ID NO: 549105 - DNA, 120 bp, Artificial Sequence
  ENSG00000168172_69 (sequence is synthesized)
ctctgtattacatgattattcagtaaaagagtaaacaaatatctaatttattttctaattgtccttcccttcattgagtattaactaggtgcataatgtagttgtatatgtttactagta

SEQ ID NO: 549106 - DNA, 120 bp, Artificial Sequence
  ENSG00000168172_70 (sequence is synthesized)
aagggaaaaacacttattttcattttgagactgtttggctattactaaagctgagaaagtgattttaggtcgccaaggatactatgatttgatgagatgagaagaaatctgcggtggctg

SEQ ID NO: 549107 - DNA, 120 bp, Artificial Sequence
  ENSG00000168172_71 (sequence is synthesized)
aaaatcgtgaccaacttggtgttatctagatctgctttatctagtttgcaagccataggctcaattttatgtccttcttacttacacacagtagccccacacagttttgttttaaatgaa

SEQ ID NO: 549108 - DNA, 120 bp, Artificial Sequence
  ENSG00000168172_72 (sequence is synthesized)
ggcaaaagtagacatttttaaagtatattcaacattgtgccattatttacctgataaaggtgaaatcagaggtgtccacggcctcaaagtttgggcccatgggactatcaaatccgaatt

SEQ ID NO: 549109 - DNA, 120 bp, Artificial Sequence
  ENSG00000168172_73 (sequence is synthesized)
atatctacttagagcttagaggaagaattaggtatcatgagaaaagcaactcctacttgagagaaagaagactaccaaagcatgttgaggctttaacatgggagacttccaggtaggcgt

SEQ ID NO: 549110 - DNA, 120 bp, Artificial Sequence
  ENSG00000168172_74 (sequence is synthesized)
taacacttgagtggtaactagcttgatgaaggaaaataattactttagcagttatgttgtaaaattaataaaaaggactcatgtttattctggtgtatttgtcaacccatgggtagtgat

SEQ ID NO: 549111 - DNA, 120 bp, Artificial Sequence
  ENSG00000168172_75 (sequence is synthesized)
atgggtagtgattactccgtgtacattctatagtgtgtgtattttatttagtgtcttaatatatagtctttatatagtatcttaatattatttactgttacttctagtcatttatgtagt

SEQ ID NO: 549112 - DNA, 120 bp, Artificial Sequence
  ENSG00000168172_76 (sequence is synthesized)
aaaatttgtagcactttactaatattagatcattattttccctcttcccctctacctttctggcattttctgttatcttagagtcaggaatctaaaggtctaagtctagaaatctgttgg

SEQ ID NO: 549113 - DNA, 120 bp, Artificial Sequence
  ENSG00000168172_77 (sequence is synthesized)
aagctgggttggagctactggatatgagttactttttacatgtctccttaagaagactcttttataatgtaatacttagaagccaaatcctttcaaacgcaaacacccttgaaacttgat

SEQ ID NO: 549114 - DNA, 120 bp, Artificial Sequence
  ENSG00000168172_78 (sequence is synthesized)
gctttctgaagttgtattcataaaaattatcccatcttacagttaatcagaagatgttcttacctttggtttgcctgcctcctgaaacacaaacctgcagattgcccctaacttcagcag

SEQ ID NO: 549115 - DNA, 120 bp, Artificial Sequence
  ENSG00000168172_79 (sequence is synthesized)
tgcctccgtcactgcatgtacctaaaagacaggaaagccaagttctgggagctgtcaagtcggaggatcaggaaaatggtggggaagaggtgactggaaaggcaggcactaaagatggca

SEQ ID NO: 549116 - DNA, 120 bp, Artificial Sequence
  ENSG00000168172_80 (sequence is synthesized)
gaaaggcaggcactaaagatggcaggctgcaaaagcattctgagttcccctgtaacagataggttttatgaactcagctgttttcttttttctttttttttcttttgagatggagtctca

SEQ ID NO: 549117 - DNA, 61 bp, Artificial Sequence
  ENSG00000168172_81 (sequence is synthesized)
ttttgtatttttagtaaagacagggtgtcgccatattggctaggctggttataggcgtgag

SEQ ID NO: 549118 - DNA, 120 bp, Artificial Sequence
  ENSG00000168172_82 (sequence is synthesized)
tgagccaccatgcccagtgaacttggccattttcttacattcatatatagcaaagttttcaacttgtctaccgagagactttctttaggagccaggacttctacatttgtaacttgagta

SEQ ID NO: 549119 - DNA, 120 bp, Artificial Sequence
  ENSG00000168172_83 (sequence is synthesized)
tattaatattcaaatcatagttcaaaaatactgaaatacttgtttattatgttacataaatatggacacaattactgccaaagaatagagagatttgcttatgagaacattctgtcattt

SEQ ID NO: 549120 - DNA, 120 bp, Artificial Sequence
  ENSG00000168172_84 (sequence is synthesized)
gttctgtttgtagatgagagacatgcttttaaagtacaaaacgtttctcttctaccttaccccctgttctactgacgtgctttgcatgagaagctcatctagaagagagcaacgctggaa

SEQ ID NO: 549121 - DNA, 120 bp, Artificial Sequence
  ENSG00000168172_85 (sequence is synthesized)
tagagaagtctagaccctggcctttgagggaaaggactgctttttttctctcccaaattagaaaattaaaagtgaaacataacacataaggacgaaatacaatgttctgaatatcttcca

SEQ ID NO: 549122 - DNA, 120 bp, Artificial Sequence
  ENSG00000168172_86 (sequence is synthesized)
ctaattaattgttgaatgattaagtctctaagtatcttaacttccattgtcttcttgttaacctagacaagagtagattattcagtagccacatgtgacagttaaaattaagtaaaatta

SEQ ID NO: 549123 - DNA, 120 bp, Artificial Sequence
  ENSG00000168172_87 (sequence is synthesized)
aaactatagtttctcagtggcctagccacatttcaagtgttccacagtcacatgtggatagtagttacctatcagacagtacaggtatagaacatttccagtattgccaaaaatgctatt

SEQ ID NO: 549124 - DNA, 120 bp, Artificial Sequence
  ENSG00000168172_88 (sequence is synthesized)
caacagcacttttattgcccagagagaaaataaggacaaaataaaggcagtgaagtaacttaagacaactctgagattttaccaccatacttagagaaagtttttctgttataaaaatta

SEQ ID NO: 549125 - DNA, 120 bp, Artificial Sequence
  ENSG00000168172_89 (sequence is synthesized)
atactaatcctttttaaagaccttggaaaaaatcaaaaccccattcctttaagctagtcttcagtatatatttttctaagaacagattctcaatactttatttttcaagtgataaaatca

SEQ ID NO: 549126 - DNA, 120 bp, Artificial Sequence
  ENSG00000168172_90 (sequence is synthesized)
ttttataaatcatttcttaatatcttcagtgttttttccctttttatgtaaactcttttaaaattgatattagctgggcatggtagctcatgcctgtagtcccagctactccagaggtcg

SEQ ID NO: 549127 - DNA, 120 bp, Artificial Sequence
  ENSG00000168172_91 (sequence is synthesized)
aggcaggagcatcgcttaagcccaggaggttcaggctgcagtaaggtctgatcacacctgactgcactccagcctgggtggcaaagcaagacccctgtctctaaaaaaaaataatataaa

SEQ ID NO: 549128 - DNA, 120 bp, Artificial Sequence
  ENSG00000168172_92 (sequence is synthesized)
ttgatgttatatagttaacatttatcaggcaaattcatatgaatgcttatttcaaataaagattgatagatttaatgatatccttccttttaaatttatatagatctaatgaacattgcc

SEQ ID NO: 549129 - DNA, 120 bp, Artificial Sequence
  ENSG00000168172_93 (sequence is synthesized)
aacagttttttttgtttctgtcccttaaacatttcccctgaaagtccacctcaaaggtacatcaagatgcaaacaatttttttatcttcataacttcctgctcttattaacttgtattat

SEQ ID NO: 549130 - DNA, 120 bp, Artificial Sequence
  ENSG00000168172_94 (sequence is synthesized)
gaatcaaattaagttttatgtataaggcatttactattccagtgacttagctaatgaaaacatttaaaaatatgtattaatttacttggcctgctactaaagtgcttaacataactaaat

SEQ ID NO: 549131 - DNA, 120 bp, Artificial Sequence
  ENSG00000168172_95 (sequence is synthesized)
ggatctatagtaacatgtctaaattttttaatggaaataagggactaaccataatccttttgagtcagcttggtgcttacaattattttgttaggaaatcttgatgctttcttctttctc

SEQ ID NO: 549132 - DNA, 120 bp, Artificial Sequence
  ENSG00000168172_96 (sequence is synthesized)
tttaaatttttgtaatcaagcaacagacttgatccagcagtgtcgaattccaagcaagttatgatgattcttattgtagttcaagtacagatgagtaagtggtgtgacttcagtttatta

SEQ ID NO: 549133 - DNA, 120 bp, Artificial Sequence
  ENSG00000168172_97 (sequence is synthesized)
tcttcttggtgacctactttagtatgtgttctgtagcgattcatattagttaagggacgttttcaatatgcttgaaataagaaatagcattttactctaaatacaagaaatgactgtaca

SEQ ID NO: 549134 - DNA, 88 bp, Artificial Sequence
  ENSG00000168172_98 (sequence is synthesized)
gaaatagcattttactctaaatacaagaaatgactgtacacaaatgctaatcagtgatttggggccttttaatgtctttaacagcaat

SEQ ID NO: 549135 - DNA, 65 bp, Artificial Sequence
  ENSG00000168172_99 (sequence is synthesized)
gttggccaggatgatctcgatctcttgatctcgtgatctgcccgctcttttattttttaacagcc

SEQ ID NO: 549136 - DNA, 120 bp, Artificial Sequence
  ENSG00000168172_100 (sequence is synthesized)
ttattttttaacagccttagttatttataattcaaatgcactaaaatatcatcgctgtcatgaactttgctgtttacaggttctgtgtaattcagaatgctttgtacttagaaaataatt

SEQ ID NO: 549137 - DNA, 120 bp, Artificial Sequence
  ENSG00000168172_101 (sequence is synthesized)
tctaggcttatcttgttttgcagttttcatgttttgacaattgcccaccatttacaatactcaatttttgattatgaaatgaatagtaaaattcaaacatatctaataataatttgcctt

SEQ ID NO: 549138 - DNA, 120 bp, Artificial Sequence
  ENSG00000168172_102 (sequence is synthesized)
agtttgattaataaattatatcaaaaaacttggggatagaaagaggcttttttttccccctgtagtatttttaaaactttttagatgagctggatgaaaccttagtacattggagctgga

SEQ ID NO: 549139 - DNA, 120 bp, Artificial Sequence
  ENSG00000168172_103 (sequence is synthesized)
gttgtattgagtacagccccaactctgaagccttatattcatgtcttaagtaccattgattgttctgtgaattgttgttagtttcatatttgacattgtagtaatccaccttgcatttta

SEQ ID NO: 549140 - DNA, 120 bp, Artificial Sequence
  ENSG00000168172_104 (sequence is synthesized)
gtctttgcaaaaaggatattgctaggtatattcttatttctgattgagtattgaatttacatttttcagaatttcattctttgtcattataatccaaaaacaatgtccacatcagacttg

SEQ ID NO: 549141 - DNA, 120 bp, Artificial Sequence
  ENSG00000168172_105 (sequence is synthesized)
gaacttctcacttcaaaaatgaaatacagatttagcagtgttgtacataatgatgtccaagcatttttccacctgtttactgagttttccaaccatttactatgtgttgagattggtggg

SEQ ID NO: 549142 - DNA, 120 bp, Artificial Sequence
  ENSG00000168172_106 (sequence is synthesized)
ttttctggctgtttttctgaggtgaatgacttgttacagagcctcagtaagaaatttcaactaaaatcacaaaaacataaagtccaggaaaccaccagaagatggatttttagtgttttt

SEQ ID NO: 549143 - DNA, 120 bp, Artificial Sequence
  ENSG00000168172_107 (sequence is synthesized)
gaaatcttgtatttccttttgatatcatttactcattttaattttacgactgccaacttgttacggtattaattatatgtatgtgtttatatgtatgcatataatatatgtatatgtata

SEQ ID NO: 549144 - DNA, 120 bp, Artificial Sequence
  ENSG00000168172_108 (sequence is synthesized)
tgaagaataaagttaagatttggtcaaactatattttcccattcaagtacaaaaatgttttcaaggctgcaaaaagtgtacagttgttaaacaagttgtaaataaagacttgtataaaaa

SEQ ID NO: 549145 - DNA, 120 bp, Artificial Sequence
  ENSG00000168172_109 (sequence is synthesized)
atattaaccatccatttaactatgttactacatatcttctcagagttaaagttttgctagagtctaatcaaaacataagcacagaattaaagtttctaaaatgtatttacattttacccc

SEQ ID NO: 549146 - DNA, 80 bp, Artificial Sequence
  ENSG00000168172_110 (sequence is synthesized)
acagaattaaagtttctaaaatgtatttacattttacccctgtgctaaagaaggaatgagcaataatcgaaagttaatag

SEQ ID NO: 549147 - DNA, 120 bp, Artificial Sequence
  ENSG00000168172_111 (sequence is synthesized)
tcagtttcacaatgttgagaaataacttttattttttatttgatgttttttgtcaaaataatttagtattatattggttatagaaaagaaatagtgttttcctttttactaacattcctt

SEQ ID NO: 549148 - DNA, 120 bp, Artificial Sequence
  ENSG00000168172_112 (sequence is synthesized)
gaccagatagtactttattgtctcttcagattcgctctgctgggaattagaagttcatttctagttaccaactgaagaattaattgaggctttatgttttaaatgtgctcaactcagtgt

SEQ ID NO: 549149 - DNA, 120 bp, Artificial Sequence
  ENSG00000168172_113 (sequence is synthesized)
tcaaagatgaagtgtagggtttttcccctttggccaaaaaaaaaattgctagtgggaatttggagtgttcaagtagaaatttttaatgtaacagtgactttaagaaaatactgccgtccc

SEQ ID NO: 549150 - DNA, 120 bp, Artificial Sequence
  ENSG00000168172_114 (sequence is synthesized)
tagtattgcattttctctaaatctctgaatccctcttactccttctgttccccgacactggcccttttttgcacatcccccagcactctgcatctctgtcacagctctgcacacttgcac

SEQ ID NO: 549151 - DNA, 120 bp, Artificial Sequence
  ENSG00000168175_0 (sequence is synthesized)
gcttcctgttccggcgccaggaggagccgcgcgctgctggtgctgttgccgccgctgctctagctgccgtcagtcaggctgcgcccgcgtcttcagggcccagtccctcggacccatcgc

SEQ ID NO: 549152 - DNA, 120 bp, Artificial Sequence
  ENSG00000168175_1 (sequence is synthesized)
cgcttctagaccctactgcggtctcggatattgccgggaaaatgtctgatgaattttcgttggcagatgcactacctgaacactcccctgccaaaacctctgctgtgagcaatacaaaac

SEQ ID NO: 549153 - DNA, 120 bp, Artificial Sequence
  ENSG00000168175_2 (sequence is synthesized)
ctggccaacctcctcaaggctggccaggctccaacccttggaataatccgagtgctccatcttcagtgccatctggactcccaccaagtgcaacaccctccactgtgccttttggaccag

SEQ ID NO: 549154 - DNA, 120 bp, Artificial Sequence
  ENSG00000168175_3 (sequence is synthesized)
caccaacaggaatgtatccctccgtgcctcccaccggaccacctccaggacccccagcaccctttcctccttccggaccatcatgtcccccacctggtggtccttatccagccccaactg

SEQ ID NO: 549155 - DNA, 120 bp, Artificial Sequence
  ENSG00000168175_4 (sequence is synthesized)
tgccgggccctggccccacagggccatatcctacaccaaatatgccctttccagagctacccagaccatatggtgcacccacagatccagctgcagctggtcctttaggtccatggggat

SEQ ID NO: 549156 - DNA, 120 bp, Artificial Sequence
  ENSG00000168175_5 (sequence is synthesized)
ccatgtcttctggaccttgggcgccaggaatgggagggcagtatcctacccctaatatgccatatccatctccaggcccatatcccgctcctcctcctccccaagcccctggggcagcac

SEQ ID NO: 549157 - DNA, 120 bp, Artificial Sequence
  ENSG00000168175_6 (sequence is synthesized)
cacctgttccatggggcaccgttccaccaggagcctggggaccaccagcaccatatcctgcccctacaggatcgtatcccacaccaggactctatcctactcccagtaatcctttccaag

SEQ ID NO: 549158 - DNA, 120 bp, Artificial Sequence
  ENSG00000168175_7 (sequence is synthesized)
tgccttcaggaccttctggtgctccaccaatgcctggtggcccccattcttaccattaagttaacaatggacgaagagatgacgctttgctttttgaagtacatgtatatgcacatgaat

SEQ ID NO: 549159 - DNA, 120 bp, Artificial Sequence
  ENSG00000168175_8 (sequence is synthesized)
gcatatataaaaattgctggtttcactattagagggcattcatgaaagaacaactcttgcacctctcagagaagataactgcctcttgtacttggatgcgtagtacatcatatgtataca

SEQ ID NO: 549160 - DNA, 120 bp, Artificial Sequence
  ENSG00000168175_9 (sequence is synthesized)
atcagataaaagcatagaagtaaatcattcggatgtgatttttatttggttttcatggaaagttaaagtgataaagtatattgaatagttctttgacagaatttgtttaaactatgaaac

SEQ ID NO: 549161 - DNA, 120 bp, Artificial Sequence
  ENSG00000168175_10 (sequence is synthesized)
tacacacttaaaaatctaagatgtggattattgttagaatctgcaacttcattggcaaattatttcaagtatttttctataatcactttccccttctaaataaataaacttcgagaataa

SEQ ID NO: 549162 - DNA, 120 bp, Artificial Sequence
  ENSG00000168175_11 (sequence is synthesized)
cccatcataatccaaacaaatgatgcctcaacattttgagctgctctgtcggacaaataaacctggtcctcttgaggttatattttggatatacatttttaaactgtcagtaattattgt

SEQ ID NO: 549163 - DNA, 120 bp, Artificial Sequence
  ENSG00000168175_12 (sequence is synthesized)
cagatgtggagttcaatagccagccagtgttcatttttatccttgagcttttagtaaaaacttcctggttttatttttagtcattgggtcatacagcactaaagtctgctatttatggaa

SEQ ID NO: 549164 - DNA, 120 bp, Artificial Sequence
  ENSG00000168175_13 (sequence is synthesized)
actaacttttttgtttttaatccaggccaacatgtatgtaaattaaatttttagataattgattatctctttgtactacttgagatttgattatgagatgtgcatattgctttgggaaga

SEQ ID NO: 549165 - DNA, 120 bp, Artificial Sequence
  ENSG00000168175_14 (sequence is synthesized)
gctcgaggaaggaaataattctctcctttgttttgaacctcaaactagataaaccctaggaattgcttaactgcaacaagtaattttcattcccacaaaaacctgaggcagctcttttgc

SEQ ID NO: 549166 - DNA, 120 bp, Artificial Sequence
  ENSG00000168175_15 (sequence is synthesized)
ccagagcgttccctgtagccacccccaccccacttgcccttggttctttagaaggagcacacacatcccttgattcctccctgatgtggtaaactggcacactccaggggtctaaaacat

SEQ ID NO: 549167 - DNA, 120 bp, Artificial Sequence
  ENSG00000168175_16 (sequence is synthesized)
aaaacagttgtgtttagggaaccttaagtcatgcagacatgactgttctctttgtacaagtgtgaatcaaaatatgtatctctttttcagagtctggttaagctatgtcattgtctactg

SEQ ID NO: 549168 - DNA, 120 bp, Artificial Sequence
  ENSG00000168175_17 (sequence is synthesized)
catagtttcctgagtctgtttgtaaagtgcttatggctaacagttcagttctgtatttgttgacaggtaaataagtggagttgagtgccatctttgaaaaaattaccctctagctctaac

SEQ ID NO: 549169 - DNA, 120 bp, Artificial Sequence
  ENSG00000168175_18 (sequence is synthesized)
actgaaaataataataaattgtagatctctgcaactaagtttaaagcagtgtgactgtgttgcttaaatatcaagtattgtttataaccaccaaaaaaaaaaagccctggtagttttttg

SEQ ID NO: 549170 - DNA, 120 bp, Artificial Sequence
  ENSG00000168175_19 (sequence is synthesized)
gcaccttatgtttaaatcagattcttagatttggagtagacctgaccttgttatttattagataacattttgaatgtatccattggatttctaaaatgtattgtgaatttctcagacaaa

SEQ ID NO: 549171 - DNA, 120 bp, Artificial Sequence
  ENSG00000168175_20 (sequence is synthesized)
caggatttatgctggagctctgttttgcttagaaataaaatatttagtagtttatttctgctctaattaaaatgtcaagaatgccaaatgctgccagttttttggtttgatagctacctc

SEQ ID NO: 549172 - DNA, 120 bp, Artificial Sequence
  ENSG00000168175_21 (sequence is synthesized)
cttctaagaaagcaaaatggttacctttgagaggaacattcagtgtttaatcatcccttatgttaactagatgatagattcaagcttttagaaatgagaaagtagaaactaatttgttaa

SEQ ID NO: 549173 - DNA, 120 bp, Artificial Sequence
  ENSG00000168175_22 (sequence is synthesized)
gatattttcagactgcggaatgttgttagctttttctttcacttctcttcaaggacaggtgttagctgtctacaatactgttgaactctgttgtcaaagtagcccccttagtctacaagg

SEQ ID NO: 549174 - DNA, 120 bp, Artificial Sequence
  ENSG00000168175_23 (sequence is synthesized)
caggtagccttggcttgaattatcaatatcaaaatgtcagttaaccatggagggataaagtaatgtgaaaagtgagatggctgcaaagatagctctccttacagttattttggctgtcct

SEQ ID NO: 549175 - DNA, 120 bp, Artificial Sequence
  ENSG00000168175_24 (sequence is synthesized)
acattgggataagctgacaaattagcagtatttagtttaacactggagcaaatataatttgagtaggaagaagagatagcaggtttgggaatctataattatgaagtccattgattttgg

SEQ ID NO: 549176 - DNA, 120 bp, Artificial Sequence
  ENSG00000168175_25 (sequence is synthesized)
gagaaaatctgttgctaaaggatttgaagggccatgaacacaatttgggattattactccctataagtataataattttgctagtgacccatactgtccagtgtgccctaaatcatactg

SEQ ID NO: 549177 - DNA, 120 bp, Artificial Sequence
  ENSG00000168175_26 (sequence is synthesized)
cgtccggccgatttttttttttttttttaatgtaagaatggagataaaagggataatataatttgcttttatattgttatttttgtaaagcatcttttcttcaattcttgttggcattct

SEQ ID NO: 549178 - DNA, 120 bp, Artificial Sequence
  ENSG00000168175_27 (sequence is synthesized)
gggccaaaatatttcaggttggttcggtgtggagttaagaaaagcaggcgttttagtggagaaatggggaacagcatcaagaaaggcttttttccttttttcttttttttttggagacag

SEQ ID NO: 549179 - DNA, 120 bp, Artificial Sequence
  ENSG00000168175_28 (sequence is synthesized)
ttacaggcgtgagccaccatgcgtgacctttttttctttttaaaagggaacaatgttgctttcaaaacaagacatgctaggctgaaactgatttatggaaaagactgcttgttagcaagt

SEQ ID NO: 549180 - DNA, 120 bp, Artificial Sequence
  ENSG00000168175_29 (sequence is synthesized)
atatttggtcttgagggggatacagattatagaatatgctgacatttgggcttcagaggaagaattttcaaatctaatggaaatagttgaggtgttcaggaatgctgtttcttggagttg

SEQ ID NO: 549181 - DNA, 120 bp, Artificial Sequence
  ENSG00000168175_30 (sequence is synthesized)
gaagcttaggttttgaaatgttgaaaccaaaaagacaaaaattaaaacatagaccttaggtcgtcattcacacccggttctcaagaatcaagtggagcacttcaaagaccttggcttgtc

SEQ ID NO: 549182 - DNA, 120 bp, Artificial Sequence
  ENSG00000168175_31 (sequence is synthesized)
tgtcccatcctgccactttctcatcttttcatgcttttgaagacaccatttacagctctgactcagccctattttgtgtaaagtaatatattgattattcagaaatagacaatacatttt

SEQ ID NO: 549183 - DNA, 120 bp, Artificial Sequence
  ENSG00000168175_32 (sequence is synthesized)
ttaattacccaaggactgactgttttgtgcattttactgttggttgtcttcagtagagaatagtaatagggcagagaaaagtatatattttgcctcagtcagtcccaccaccacaatgga

SEQ ID NO: 549184 - DNA, 120 bp, Artificial Sequence
  ENSG00000168175_33 (sequence is synthesized)
ctattgggatattttctaaaaaaccaatcaatttgcccatgattacctcacaaataattagtgctacctggggtactctcaaatatacagcttttgaaactgtagatgaaaaaagctcta

SEQ ID NO: 549185 - DNA, 120 bp, Artificial Sequence
  ENSG00000168175_34 (sequence is synthesized)
ctcagagtttttgtcaagactgtgcctgggttgaatatcagtcaattgcctacacttctaaacaataagtgccaatgtctcaattttctcaccctgaatgatagaagctagctttatcaa

SEQ ID NO: 549186 - DNA, 120 bp, Artificial Sequence
  ENSG00000168175_35 (sequence is synthesized)
atgccaaggttagaaagcctggaaataaaacttaagcacagacattcaagtttttgaaaagcataagcctaaattcagataaatcacactgatatattgtactatgcatagaaagttgta

SEQ ID NO: 549187 - DNA, 120 bp, Artificial Sequence
  ENSG00000168175_36 (sequence is synthesized)
ggtggcgttcagggaagactttgattttaataaagcaatatttagtattgaagacaaacactttttattttcagatttctgccaagtaaaacagaaattgccaataaaataatcagtatt

SEQ ID NO: 549188 - DNA, 120 bp, Artificial Sequence
  ENSG00000168175_37 (sequence is synthesized)
ttgtaaatggcaggcaagcttctggctgtcgaaaacatctgagtcatttattcagtagacaatatgtccttgatccaggttctttgccagctataagggaatccctgtccttgagaggct

SEQ ID NO: 549189 - DNA, 120 bp, Artificial Sequence
  ENSG00000168175_38 (sequence is synthesized)
catagtctataagtaacattacagaatttgttagcatacccattcattattagttttacctaaacgtgttaggatcactactggtggaaattgtaaccagcctttgggcatcttaaaggg

SEQ ID NO: 549190 - DNA, 120 bp, Artificial Sequence
  ENSG00000168175_39 (sequence is synthesized)
tgacatgtggcatgcctttttttttttttaagaatttaatgtttttcaagattgtagtgttgatcagcgcaacaattcaagtgtgcaaagtaacaggatagtttgcctcttcactttacc

SEQ ID NO: 549191 - DNA, 120 bp, Artificial Sequence
  ENSG00000168175_40 (sequence is synthesized)
cctggataaaggcactttcactgcctgtcactgatcagcagatactgacttgttgccattaagtgaacttgacttcttatgtgtgctctatgagtttgttgtaattttcttcttgaaatt

SEQ ID NO: 549192 - DNA, 120 bp, Artificial Sequence
  ENSG00000168175_41 (sequence is synthesized)
gtgatttttcactgacagtaatgacaaatttaatgtatgtaattgtctatgcattttaagttaaactgcctaaaatgtgatttgagacatatacatatgtttgtattataaattgtaagc

SEQ ID NO: 549193 - DNA, 120 bp, Artificial Sequence
  ENSG00000168175_42 (sequence is synthesized)
aatcagtttgagatactaggttttatcacctgctgctgtatttgtaaacaaagacaaatgttgctttaagaagtaattataattaggaataggctatggatgtgatacttggtatttttt

SEQ ID NO: 549194 - DNA, 120 bp, Artificial Sequence
  ENSG00000168175_43 (sequence is synthesized)
aagataaacttgtttgcttttgtgtattatacctggaaactttttttaaaaaatgtattttcatggtttcacagatttttcatgttattttattctttaggcccaattctgggcttctct

SEQ ID NO: 549195 - DNA, 120 bp, Artificial Sequence
  ENSG00000168175_44 (sequence is synthesized)
gagcaagtccagagcctaattaactgtaaatttgttgtcaaaaaggaagaaaaaagggcctgagatacctctttgcatgtgacctgcattcactaaggatatctggaaaccacccttcct

SEQ ID NO: 549196 - DNA, 120 bp, Artificial Sequence
  ENSG00000168175_45 (sequence is synthesized)
ccgcaaaccctctcagcaacatggtgtccattgtggtgattttctcttcttttaaggctaggctactcttggtaaccagattatccgtatatatgataatatgaagtcagggaactttct

SEQ ID NO: 549197 - DNA, 120 bp, Artificial Sequence
  ENSG00000168175_46 (sequence is synthesized)
ctgtctgtccctactcccctcactcccccactttctgttatgaaagatagttctacttttatcattaactgctacgcatttagtgagggtcacattattaaacttggagtttaccatttt

SEQ ID NO: 549198 - DNA, 120 bp, Artificial Sequence
  ENSG00000168175_47 (sequence is synthesized)
cccacaggagatttcgctggcattccttggaactcccaatttcagtagggcaatgaatgaatgaatactttgcagtgctacttttggaaggaatttctgctttttgccttatgattggac

SEQ ID NO: 549199 - DNA, 120 bp, Artificial Sequence
  ENSG00000168175_48 (sequence is synthesized)
aaaatgcagctgtaaaattttaaattgtttttgatatgttattcaatatcccatgaaagtattcacctaaagtggagttatgaaatggatggtgaaataataagaccattctggagcagg

SEQ ID NO: 549200 - DNA, 120 bp, Artificial Sequence
  ENSG00000168175_49 (sequence is synthesized)
gttgccgccgctgctctagctgccgtcagtcaggctgcgcccgcgtcttcagggcccagtccctcggacccatcgccgcttctagaccctactgcggtctcggatattgccggagacggg

SEQ ID NO: 549201 - DNA, 120 bp, Artificial Sequence
  ENSG00000168175_50 (sequence is synthesized)
tgtgctactgagtaataaaatgatcaaaggcaaagagtacctacagtcttttatttatataaagtcaaagaacaagcaaaattaagtcaaaaattgactgccatgaggcaaggtagttga

SEQ ID NO: 549202 - DNA, 120 bp, Artificial Sequence
  ENSG00000168175_51 (sequence is synthesized)
ttggaaaagagcatgagtaaactttctggagtgagaaatgttctgtatcttggggtggttataggggcgtatacaattatcagagcttgttaatctgaacacttaagatctctgcatttt

SEQ ID NO: 549203 - DNA, 120 bp, Artificial Sequence
  ENSG00000168175_52 (sequence is synthesized)
tcttagttgaggagcctgccttggtcatataaccaaatggaaaagtaccccacttcccctgtgagtcttaccattaagttaacaatggacgaagagatgacgctttgctttttgaagtac

SEQ ID NO: 549204 - DNA, 120 bp, Artificial Sequence
  ENSG00000168209_0 (sequence is synthesized)
gcagcaggccaagggggaggtgcgagcgtggacctgggacgggtctgggcggctctcggtggttggcacgggttcgcacacccattcaagcggcaggacgcacttgtcttagcagttctc

SEQ ID NO: 549205 - DNA, 120 bp, Artificial Sequence
  ENSG00000168209_1 (sequence is synthesized)
gctgaccgcgctagctgcggcttctacgctccggcactctgagttcatcagcaaacgccctggcgtctgtcctcaccatgcctagcctttgggaccgcttctcgtcgtcgtccacctcct

SEQ ID NO: 549206 - DNA, 120 bp, Artificial Sequence
  ENSG00000168209_2 (sequence is synthesized)
cttcgccctcgtccttgccccgaactcccaccccagatcggccgccgcgctcagcctgggggtcggcgacccgggaggaggggtttgaccgctccacgagcctggagagctcggactgcg

SEQ ID NO: 549207 - DNA, 120 bp, Artificial Sequence
  ENSG00000168209_3 (sequence is synthesized)
agtccctggacagcagcaacagtggcttcgggccggaggaagacacggcttacctggatggggtgtcgttgcccgacttcgagctgctcagtgaccctgaggatgaacacttgtgtgcca

SEQ ID NO: 549208 - DNA, 120 bp, Artificial Sequence
  ENSG00000168209_4 (sequence is synthesized)
acctgatgcagctgctgcaggagagcctggcccaggcgcggctgggctctcgacgccctgcgcgcctgctgatgcctagccagttggtaagccaggtgggcaaagaactactgcgcctgg

SEQ ID NO: 549209 - DNA, 120 bp, Artificial Sequence
  ENSG00000168209_5 (sequence is synthesized)
cctacagcgagccgtgcggcctgcggggggcgctgctggacgtctgcgtggagcagggcaagagctgccacagcgtgggccagctggcactcgaccccagcctggtgcccaccttccagc

SEQ ID NO: 549210 - DNA, 120 bp, Artificial Sequence
  ENSG00000168209_6 (sequence is synthesized)
tgaccctcgtgctgcgcctggactcacgactctggcccaagatccaggggctgtttagctccgccaactctcccttcctccctggcttcagccagtccctgacgctgagcactggcttcc

SEQ ID NO: 549211 - DNA, 120 bp, Artificial Sequence
  ENSG00000168209_7 (sequence is synthesized)
ctgagggggccgacagtgccctccaagacagagacgactgaacttttggggtggagactagaggcaggagctgagggactgattcctgtggttggaaaactgaggcagccacctaaggtg

SEQ ID NO: 549212 - DNA, 120 bp, Artificial Sequence
  ENSG00000168209_8 (sequence is synthesized)
gaggtgggggaatagtgtttcccaggaagctcattgagttgtgtgcgggtggctgtgcattggggacacatacccctcagtactgtagcatgaaacaaaggcttaggggccaacaaggct

SEQ ID NO: 549213 - DNA, 120 bp, Artificial Sequence
  ENSG00000168209_9 (sequence is synthesized)
tccagctggatgtgtgtgtagcatgtaccttattatttttgttactgacagttaacagtggtgtgacatccagagagcagctgggctgctcccgccccagcccggcccagggtgaaggaa

SEQ ID NO: 549214 - DNA, 120 bp, Artificial Sequence
  ENSG00000168209_10 (sequence is synthesized)
gaggcacgtgctcctcagagcagccggagggaggggggaggtcggaggtcgtggaggtggtttgtgtatcttactggtctgaagggaccaagtgtgtttgttgtttgttttgtatcttgt

SEQ ID NO: 549215 - DNA, 120 bp, Artificial Sequence
  ENSG00000168209_11 (sequence is synthesized)
ttttctgatcggagcatcactactgacctgttgtaggcagctatcttacagacgcatgaatgtaagagtaggaaggggtgggtgtcagggatcacttgggatctttgacacttgaaaaat

SEQ ID NO: 549216 - DNA, 120 bp, Artificial Sequence
  ENSG00000168209_12 (sequence is synthesized)
tacacctggcagctgcgtttaagccttcccccatcgtgtactgcagagttgagctggcaggggaggggctgagagggtgggggctggaacccctccccgggaggagtgccatctgggtct

SEQ ID NO: 549217 - DNA, 120 bp, Artificial Sequence
  ENSG00000168209_13 (sequence is synthesized)
tccatctagaactgtttacatgaagataagatactcactgttcatgaatacacttgatgttcaagtattaagacctatgcaatattttttacttttctaataaacatgtttgttaaaaca

SEQ ID NO: 549218 - DNA, 120 bp, Artificial Sequence
  ENSG00000168209_14 (sequence is synthesized)
caacagtggcttcgggccggaggaaggtgagcggtgggcgggtgccgacgcgactcgaggggccgggaaggtggggaagccccggtgctggaaggggtcagagccgccttggcttcctat

SEQ ID NO: 549219 - DNA, 120 bp, Artificial Sequence
  ENSG00000168209_15 (sequence is synthesized)
cccatcgggacccagattgcttgggggcagggggaattggagtataaggtgagtgaggcggaaactgaggcacggagtgggaaggagcgttggtttcttaaggaaacagcacctcccccg

SEQ ID NO: 549220 - DNA, 120 bp, Artificial Sequence
  ENSG00000168209_16 (sequence is synthesized)
ctgaccgcgctagctggtgagtgtcccttctgtgtgtgggtcctagagctcgcggtctggtctggtctggtccccagactgacgcctggtcggtccccctcttgtcttacagcggcttct

SEQ ID NO: 549221 - DNA, 120 bp, Artificial Sequence
  ENSG00000168214_0 (sequence is synthesized)
tgtttttaagtcattgaaattatgagactatcattcaaatggaagcattatagttcttcggaaccattatgatctcaaaacgaaaggagaatgatacagatacactggctgaggtgtttt

SEQ ID NO: 549222 - DNA, 120 bp, Artificial Sequence
  ENSG00000168214_1 (sequence is synthesized)
gaggtgcatcgaagtgttccaagctgtgacttaccttaacatgttcttgaagtaccatggcgtggattaaaaggaaatttggtgagcggcctccacctaaacgacttactagggaagcta

SEQ ID NO: 549223 - DNA, 120 bp, Artificial Sequence
  ENSG00000168214_2 (sequence is synthesized)
tgcgaaattatttaaaagagcgaggggatcaaacagtacttattcttcatgcaaaagttgcacagaagtcatatggaaatgaaaaaaggtttttttgcccacctccttgtgtatatctta

SEQ ID NO: 549224 - DNA, 120 bp, Artificial Sequence
  ENSG00000168214_3 (sequence is synthesized)
tgggcagtggatggaagaaaaaaaaagaacaaatggaacgcgatggttgttctgaacaagagtctcaaccgtgtgcatttattgggataggaaatagtgaccaagaaatgcagcagctaa

SEQ ID NO: 549225 - DNA, 120 bp, Artificial Sequence
  ENSG00000168214_4 (sequence is synthesized)
acttggaaggaaagaactattgcacagccaaaacattgtatatatctgactcagacaagcgaaagcacttcatgttgtctgtaaagatgttctatggcaacagtgatgacattggtgtgt

SEQ ID NO: 549226 - DNA, 120 bp, Artificial Sequence
  ENSG00000168214_5 (sequence is synthesized)
tcctcagcaagcggataaaagtcatctccaaaccttccaaaaagaagcagtcattgaaaaatgctgacttatgcattgcctcaggaacaaaggtggctctgtttaatcgactacgatccc

SEQ ID NO: 549227 - DNA, 120 bp, Artificial Sequence
  ENSG00000168214_6 (sequence is synthesized)
agacagttagtaccagatacttgcatgtagaaggaggtaattttcatgccagttcacagcagtggggagccttttttattcatctcttggatgatgatgaatcagaaggagaagaattca

SEQ ID NO: 549228 - DNA, 120 bp, Artificial Sequence
  ENSG00000168214_7 (sequence is synthesized)
cagtccgagatggctacatccattatggacaaacagtcaaacttgtgtgctcagttactggcatggcactcccaagattgataattaggaaagttgataagcagaccgcattattggatg

SEQ ID NO: 549229 - DNA, 120 bp, Artificial Sequence
  ENSG00000168214_8 (sequence is synthesized)
cagatgatcctgtgtcacaactccataaatgtgcattttaccttaaggatacagaaagaatgtatttgtgcctttctcaagaaagaataattcaatttcaggccactccatgtccaaaag

SEQ ID NO: 549230 - DNA, 120 bp, Artificial Sequence
  ENSG00000168214_9 (sequence is synthesized)
aaccaaataaagagatgataaatgatggcgcttcctggacaatcattagcacagataaggcagagtatacattttatgagggaatgggccctgtccttgccccagtcactcctgtgcctg

SEQ ID NO: 549231 - DNA, 120 bp, Artificial Sequence
  ENSG00000168214_10 (sequence is synthesized)
tggtagagagccttcagttgaatggcggtggggacgtagcaatgcttgaacttacaggacagaatttcactccaaatttacgagtgtggtttggggatgtagaagctgaaactatgtaca

SEQ ID NO: 549232 - DNA, 120 bp, Artificial Sequence
  ENSG00000168214_11 (sequence is synthesized)
ggtgtggagagagtatgctctgtgtcgtcccagacatttctgcattccgagaaggttggagatgggtccggcaaccagtccaggttccagtaactttggtccgaaatgatggaatcattt

SEQ ID NO: 549233 - DNA, 120 bp, Artificial Sequence
  ENSG00000168214_12 (sequence is synthesized)
attccaccagccttacctttacctacacaccagaaccagggccgcggccacattgcagtgcagcaggagcaatccttcgagccaattcaagccaggtgccccctaacgaatcaaacacaa

SEQ ID NO: 549234 - DNA, 120 bp, Artificial Sequence
  ENSG00000168214_13 (sequence is synthesized)
acagcgagggaagttacacaaacgccagcacaaattcaaccagtgtcacatcatctacagccacagtggtatcctaactaccgtctttttgctaggacttaaactgacttgagtgtggca

SEQ ID NO: 549235 - DNA, 120 bp, Artificial Sequence
  ENSG00000168214_14 (sequence is synthesized)
aaaagttaacaaaaaaggagaaaaaatgaacaatcgtttgtggtttcttgggaaaacttttcataccaggtgatactattcaaaaaccccgttgtctccctgcaagtgctgatttgaaat

SEQ ID NO: 549236 - DNA, 120 bp, Artificial Sequence
  ENSG00000168214_15 (sequence is synthesized)
aaaaaaaaagaaaaaaaaatcaaaatgtataaatattggaaatcaagtttttcagctgttttgttggttggttggttggtttttgtttggttttgtttaaatgggcaagaagtaaataat

SEQ ID NO: 549237 - DNA, 120 bp, Artificial Sequence
  ENSG00000168214_16 (sequence is synthesized)
ggttttgtttaaatgggcaagaagtaaataatgtggctggaatacaagttgaacaaactagaagacacaaatctaacatagtttttatggaccaaggaacttgtatattgtataagcttt

SEQ ID NO: 549238 - DNA, 120 bp, Artificial Sequence
  ENSG00000168214_17 (sequence is synthesized)
agtaaaaggtacattttcaccatacctttttttatatcacggtattatagtacaccttgttaccaaataggttgttctcttccccacccacctttgagcttttgctctaaaatacattca

SEQ ID NO: 549239 - DNA, 120 bp, Artificial Sequence
  ENSG00000168214_18 (sequence is synthesized)
ggttccaagcctgaccatccttgtttaatctatcatactcttccaggttttttttttttggtctaaggctggaacttttttcttttttttcagctgaagtcttatgacttttcatgagtc

SEQ ID NO: 549240 - DNA, 120 bp, Artificial Sequence
  ENSG00000168214_19 (sequence is synthesized)
aaaattgtttggatttcagcaagtcaaatcttgcaaaggcctgcatattttttttaagattatatgaagtctgtgcaaaagctttaaaaaaatgcctctgccttgcctgcaatacatgca

SEQ ID NO: 549241 - DNA, 120 bp, Artificial Sequence
  ENSG00000168214_20 (sequence is synthesized)
atgtatgttaacttagtctctcttctcagacactgttggtagttatttctgtgttttcctttttttaaaaaaaaatatggacttattgtggttatctgagaggttctaacattcacatgc

SEQ ID NO: 549242 - DNA, 120 bp, Artificial Sequence
  ENSG00000168214_21 (sequence is synthesized)
aatttggtgtggccatttagctattaatgagttaatggcgcagaacttgttgatatttgaagtgttctctccccttttcccatgacgtaaatacataggtgtgttccaggatttgttcag

SEQ ID NO: 549243 - DNA, 120 bp, Artificial Sequence
  ENSG00000168214_22 (sequence is synthesized)
gtttttcccccctcctaatcttgtacataacttgtattatgtgtaagttaaacattttattttgaacttggaatgttcccagtgatttcattcagcagggtattttctgccttgttggca

SEQ ID NO: 549244 - DNA, 120 bp, Artificial Sequence
  ENSG00000168214_23 (sequence is synthesized)
agtgacaaaaaatatgggaagtatttgctaccagttggtagatggtgcccttaatggtagaatgaggaaaatgtccgcaaaagcatgttttattatctttacttttttggggggttggag

SEQ ID NO: 549245 - DNA, 120 bp, Artificial Sequence
  ENSG00000168214_24 (sequence is synthesized)
gggtagcctagccagaacatcattgtaatcttaaaacataagatgcttttattagatgatcaactaaaatagctggaagacagtactttagaaacagatagttgtaagattataaaatgc

SEQ ID NO: 549246 - DNA, 120 bp, Artificial Sequence
  ENSG00000168214_25 (sequence is synthesized)
aaatgtaacttatgttttcatttttttctctgccttttttgtttgtttgttttctcttttccagtactgagcatctccacaaatgtctcctaactcagaaaatgtttcttttcttttcag

SEQ ID NO: 549247 - DNA, 120 bp, Artificial Sequence
  ENSG00000168214_26 (sequence is synthesized)
ttgagatttggttgcattcagggttgtaggttggccttgcttgctaaccccgccggttttaccgtgctttcattcctgaactttgtttatgcctttgtttggtttcttcgaaattgcagc

SEQ ID NO: 549248 - DNA, 120 bp, Artificial Sequence
  ENSG00000168214_27 (sequence is synthesized)
agactcattgggctacatttagtacaggaaccacgtgtgtaatgttatacaacacagtctagtaatacaatcatccctcttagagtaaaaactacctctagattgtggtaagcttttact

SEQ ID NO: 549249 - DNA, 120 bp, Artificial Sequence
  ENSG00000168214_28 (sequence is synthesized)
gtcccataaaacaggagccacagtaccttatgaatgcaaaactgtaacttcctacagtgtttccctacagaacattgtctttctggtgtcctgggctgttttgaaaaagtttccattaat

SEQ ID NO: 549250 - DNA, 120 bp, Artificial Sequence
  ENSG00000168214_29 (sequence is synthesized)
agactttttagaaattattattagtagcattttttttccagctttgctgtcttcatcactcactctatgctcagactatgccactgtaaatattcttcctaacatctttaaatcgccttt

SEQ ID NO: 549251 - DNA, 120 bp, Artificial Sequence
  ENSG00000168214_30 (sequence is synthesized)
tcctcagttttcaaggggaaggtcatttgtaaagcacgttaggtggttaaatcagttattgcggttttctcttactgcaagcctttttaatcacccccaggctgcattttattctatatc

SEQ ID NO: 549252 - DNA, 120 bp, Artificial Sequence
  ENSG00000168214_31 (sequence is synthesized)
gccttttttcttcaaatctgctccaatcactcacttctctcttataagctaatcctgcctcacaccttaaatctgtttcagtgatcaagggcagaactcattgtggccttatctttcttt

SEQ ID NO: 549253 - DNA, 120 bp, Artificial Sequence
  ENSG00000168214_32 (sequence is synthesized)
gttgtaattgttcactgtctctttcttacagaccacttatttctgagtagtagttattcctctctatggagtcatggcaggaatcattacacagtgcttttgttcagagcatggacatgt

SEQ ID NO: 549254 - DNA, 120 bp, Artificial Sequence
  ENSG00000168214_33 (sequence is synthesized)
tcctagtgctgctttgctttaacggccacaagtttcctccacttcctaggtttggtatttagttaaggaatcatattaaattaaccaataacaaaagagatacttttgaagaacaaacta

SEQ ID NO: 549255 - DNA, 120 bp, Artificial Sequence
  ENSG00000168214_34 (sequence is synthesized)
ttccttacccatttttgtagctcaaaaataatttttcaagttcatgaccttattaaaatgaacttgtgtttttttaacaaacatgtatgttttattttgatagtttctttccgtaagata

SEQ ID NO: 549256 - DNA, 120 bp, Artificial Sequence
  ENSG00000168214_35 (sequence is synthesized)
attgaaatattatactgtaaacccttttcttttctttttttgaaaagtccaagaatgtacttatacaggcatttttccccacctatttttggccattctcataccacagactaaagagtg

SEQ ID NO: 549257 - DNA, 120 bp, Artificial Sequence
  ENSG00000168214_36 (sequence is synthesized)
aaatgatttgtccattgtagcttattgtttatcagtagttcttttgtcagctgcttacattttttctttcatggttttgtgaatcattttcagtatgtaatttataggaaccttgtcctc

SEQ ID NO: 549258 - DNA, 120 bp, Artificial Sequence
  ENSG00000168214_37 (sequence is synthesized)
tggttatagtagactgtgtgccctcctccagtgatggcattattagacatgctggtcatttaccctcagaaagactctcttattagaatggtgagtgcttcagttatagtatgtttgaat

SEQ ID NO: 549259 - DNA, 120 bp, Artificial Sequence
  ENSG00000168214_38 (sequence is synthesized)
ttttaaaaaattctgttttagaaatgtatcttatgctctcatgactatgcagtttctaaacatacacatagaagctgagtctctgatccaatatgtttttatttgttccatttaatttat

SEQ ID NO: 549260 - DNA, 120 bp, Artificial Sequence
  ENSG00000168214_39 (sequence is synthesized)
cacatagattgggaaggcaagctaaaagccttaaaaatgccctttatattttgagtgatttcagcgttgaacactagtatactatctaaatttgctgctcactttctttaaactgtggca

SEQ ID NO: 549261 - DNA, 120 bp, Artificial Sequence
  ENSG00000168214_40 (sequence is synthesized)
ctgtggcaattaaaggcatgtttatacatgacttaatcgtgaaatgtttgtcactcttactgcacagacttatctgcaatcataactggttagtttttttgttttgttttgttttattgt

SEQ ID NO: 549262 - DNA, 120 bp, Artificial Sequence
  ENSG00000168214_41 (sequence is synthesized)
aaactggtaccatctgtgctttcacaaaaaacttccaatgccatttttgagaactaacctaactagtcatgctaaccagaaaatccactggggaggaggttccttttgaaacaaaatgct

SEQ ID NO: 549263 - DNA, 120 bp, Artificial Sequence
  ENSG00000168214_42 (sequence is synthesized)
gttcagttagtaaccaagttactttgattgcaaaagcagctgtgtttctgataagtactgaacaaatgtgtgtaattttctgtgccagacttatgactttgttttcaagcactgtaatgt

SEQ ID NO: 549264 - DNA, 120 bp, Artificial Sequence
  ENSG00000168214_43 (sequence is synthesized)
gggatggatggttagaaacaataatatattagggtttctgtttaaccctttcaggactgaactgtatctccttttgttaattttcccctgtgttgtgataaatgtttgccagcattcagt

SEQ ID NO: 549265 - DNA, 120 bp, Artificial Sequence
  ENSG00000168214_44 (sequence is synthesized)
actgtgttggtccagatgtaggtttatatgctcatttttagcttatttcttgtaccttgcagcatgctctacgcattcagtccttaaggggtttattttacaaactgtgcgcctgtaagg

SEQ ID NO: 549266 - DNA, 120 bp, Artificial Sequence
  ENSG00000168214_45 (sequence is synthesized)
tttattagcaataagatagaaaattgagcaagtttataccataattttgtagaaaaaaagaatctgctcagttccatatttcatccgtgaaaaacttgcaatacgagcagtttcaaggaa

SEQ ID NO: 549267 - DNA, 120 bp, Artificial Sequence
  ENSG00000168214_46 (sequence is synthesized)
taaataaaaaggaaatgtaaaccattgtaaaagtcttctgtcgaatgtgcctgatgcatgtattatcgtcttttatttcagaatacttcataaagataaaattaaattctatattatagt

SEQ ID NO: 549268 - DNA, 120 bp, Artificial Sequence
  ENSG00000168214_47 (sequence is synthesized)
tggtgtatttacaatcttaccatgtacatcacatcaaagtgatagctctactaatttaatttccttgtcaatgtttttaactatatagtgctttaaagagattttttttccctgtgtaaa

SEQ ID NO: 549269 - DNA, 120 bp, Artificial Sequence
  ENSG00000168214_48 (sequence is synthesized)
atcgcctgggtaggtttccagggaaggcagcgagcaggatcccctactctgcgggcggcgcgaggcgtctggctcttcgcggcggcggcgaggggaaagggagcgcgggggctgggtgga

SEQ ID NO: 549270 - DNA, 120 bp, Artificial Sequence
  ENSG00000168214_49 (sequence is synthesized)
atcgaggagtgaggaaaaagggaaggggcgggggagagggaccagggaaggcgtcggggggaatctcgcgagggttggagttttggcgagagtttgtggaagatggcgcctgttgtgaca

SEQ ID NO: 549271 - DNA, 120 bp, Artificial Sequence
  ENSG00000168214_50 (sequence is synthesized)
ttagaaggaggctcaagatgtatatatgtgtttttctgttagtgtttgagaatagtttcagatagccacaatggatattcatttggcgtgaaatttggtgagcggcctccacctaaacga

SEQ ID NO: 549272 - DNA, 120 bp, Artificial Sequence
  ENSG00000168214_51 (sequence is synthesized)
gggggccccgtgcatctttgttcctcgcggccgttgtcgccgcttcgccccgctagtgcccccggccccgggcgctttgtctttcaccgctacccgctgcgactctctacccccggccct

SEQ ID NO: 549273 - DNA, 120 bp, Artificial Sequence
  ENSG00000168214_52 (sequence is synthesized)
ttgtttcgccgccttgggcgctttgtccgacccgtggcgtcccgcatcccctctccatctcctcccctccgctgtccttcctcccgtgcccctttgttgtgccacactcttgtcgttagc

SEQ ID NO: 549274 - DNA, 120 bp, Artificial Sequence
  ENSG00000168214_53 (sequence is synthesized)
ccagtgacctgccacagcccgggcaccagatttctgccttaattgttcttccattgtctttctcctgtgggtcccctctcacctttctgtatggtcctggatcaccccccgaggctttgt

SEQ ID NO: 549275 - DNA, 120 bp, Artificial Sequence
  ENSG00000168214_54 (sequence is synthesized)
attgggtacatgcgcagtgccgctcgcgcgggccgcgccaatcctgcagcgccttcaacaggtttcgggcggcgaattccagttctccgggttttggggctccctgcgggaggcagtgct

SEQ ID NO: 549276 - DNA, 120 bp, Artificial Sequence
  ENSG00000168214_55 (sequence is synthesized)
ttgtttcacagcagtggaatttgtacattagttttctacacttgggagttgaaaaatggaagaattatttgccaaaagaggaggacaaaagataatatgcataattcatctttttctgca

SEQ ID NO: 549277 - DNA, 120 bp, Artificial Sequence
  ENSG00000168214_56 (sequence is synthesized)
agttcttggaaatttagtcaaagtacatagttcagttctctgaattgggcatgatatgctcttcagaaatcacgttttgaaattacagaagataaataacctctcccaatcagtgtgtta

SEQ ID NO: 549278 - DNA, 120 bp, Artificial Sequence
  ENSG00000168214_57 (sequence is synthesized)
cttttgctttagtgataatgtgaagtaaaaattaatttcttaaacaggaaaatcacaacattcaaatggaaaaacacacctcagttttatgctttttaattttaaaaggtatgttagtaa

SEQ ID NO: 549279 - DNA, 120 bp, Artificial Sequence
  ENSG00000168214_58 (sequence is synthesized)
tcagtgctgtttataattgacagttatgctctaccttatttcagaaatgctttaaggtaatagccagtttttacaagtacattcttaatgattttttcttaaatgatttccaatatattt

SEQ ID NO: 549280 - DNA, 120 bp, Artificial Sequence
  ENSG00000168214_59 (sequence is synthesized)
gatgtattattatgcagtatatagcttctatgtacttttgatgttttacacaaggaaaatcctttccatgtgtggatgaccttttatttcttaattgttaaatatagataattaggaaag

SEQ ID NO: 549281 - DNA, 120 bp, Artificial Sequence
  ENSG00000168214_60 (sequence is synthesized)
ggccttcagctctttgcagctactctcagctgtgacctggcatcatttcatttcatgggagttttgatttttctccaatcgtctgattaggggatttttatatacaccatttgttgattt

SEQ ID NO: 549282 - DNA, 120 bp, Artificial Sequence
  ENSG00000168214_61 (sequence is synthesized)
gtgtttgttattgtgaatccctaagggtgactgttttttcagcagggcgagttaggacggcacaaactgagagtttctgttctggaaatttggtgagcggcctccacctaaacgacttac

SEQ ID NO: 549283 - DNA, 120 bp, Artificial Sequence
  ENSG00000168214_62 (sequence is synthesized)
gctgactgtatgtatgcttttcttatttatccccaactgccaccatgaattaataagacagactcttttttaaattaaaaattgccttttcaatagccaattaattctttactaatattt

SEQ ID NO: 549284 - DNA, 120 bp, Artificial Sequence
  ENSG00000168214_63 (sequence is synthesized)
ggataaccggagcgctccccatggaccacacggagggctcgcccgcggaggagccgcctgcgcatgctccatcgcctgggaaatttggtgagcggcctccacctaaacgacttactaggg

SEQ ID NO: 549285 - DNA, 120 bp, Artificial Sequence
  ENSG00000168214_64 (sequence is synthesized)
gaggagcgtacttgccagaaaatttaaatgtaaataaacttgtatgttatcttgaaatgtttttagctagctttgtaataaaaaacattttaattgcccttttttaaaaaaaacaaatga

SEQ ID NO: 549286 - DNA, 120 bp, Artificial Sequence
  ENSG00000168214_65 (sequence is synthesized)
tacagatacactggctgaggtgttttgaggtgcatcgaagtgttccaagctgtgacttaccttaacatgttcttgaagtaccatggcgtggattaaaagggtcttgctctgtcatccagg

SEQ ID NO: 549287 - DNA, 120 bp, Artificial Sequence
  ENSG00000168214_66 (sequence is synthesized)
ctagagtggactggtgcgatctcagctcactgcagcctcgacttcctggactcaatcttgcttcaaggtctttttcaagtgctgtgtcttcactgtctcagaagtttacacttcctattt

SEQ ID NO: 549288 - DNA, 120 bp, Artificial Sequence
  ENSG00000168214_67 (sequence is synthesized)
acccattgaggaggtgtttcatctaggcctgtgaaacgcagcccattttcccaggacccctcctcccttctcctcggccccgcctcctgacccctccattcctcgtccccgtagtaatcc

SEQ ID NO: 549289 - DNA, 120 bp, Artificial Sequence
  ENSG00000168214_68 (sequence is synthesized)
ttcattctgacatttttacttcctttgttgccaggcaaagtggccaccagattgggtggaaggggctctttctacggcatttcatgactgagcctccaagaacaacctgtattgagtttc

SEQ ID NO: 549290 - DNA, 120 bp, Artificial Sequence
  ENSG00000168214_69 (sequence is synthesized)
atctgtcttctttcttgccgatcctggttcaggcctttttgaagagttgcaaaggcgtaaggcgtgaggttacctgggggcatgatcacagtcctcttggctgtgtctttttggcataca

SEQ ID NO: 549291 - DNA, 120 bp, Artificial Sequence
  ENSG00000168214_70 (sequence is synthesized)
aaataactccagtttttttgcccacctccttgtgtatatcttatgggcagtggatggaagaaaaaaaaagaacaaatggaacgcgatggttgttctgaacaagagtctcaaccgtgtgca

SEQ ID NO: 549292 - DNA, 120 bp, Artificial Sequence
  ENSG00000168214_71 (sequence is synthesized)
aaaacaaaactacagatttggttgcagatgaacttgcattttgtcttcattttttccaaagtgattcattcttcctggttcttgaacacctgcttaaaaatagggcttacttttctctgt

SEQ ID NO: 549293 - DNA, 120 bp, Artificial Sequence
  ENSG00000168216_0 (sequence is synthesized)
acttgctcctccccctccgcccctttaacctttagggtgcgcgggtgcagtatatctcgcgctctctcccctttccccctcccctttccccaccccgggcgctcaggttggtctggaccg

SEQ ID NO: 549294 - DNA, 120 bp, Artificial Sequence
  ENSG00000168216_1 (sequence is synthesized)
gaagcgaagatggcgacttctggcgcggcctcggcggagctggtgatcggctggtgcatattcggcctcttactactggctattttggcattctgctggatatatgttcgtaaataccaa

SEQ ID NO: 549295 - DNA, 120 bp, Artificial Sequence
  ENSG00000168216_2 (sequence is synthesized)
agtcggcgggaaagtgaagttgtctccaccataacagcaattttttctctagcaattgcacttatcacatcagcacttctaccagtggatatatttttggtttcttacatgaaaaatcaa

SEQ ID NO: 549296 - DNA, 120 bp, Artificial Sequence
  ENSG00000168216_3 (sequence is synthesized)
aatggtacatttaaggactgggctaatgctaatgtcagcagacagattgaggacactgtattatacggttactatactttatattctgttatattgttctgtgtgttcttctggatccct

SEQ ID NO: 549297 - DNA, 120 bp, Artificial Sequence
  ENSG00000168216_4 (sequence is synthesized)
tttgtctacttctattatgaagaaaaggatgatgatgatactagtaaatgtactcaaattaaaacggcactcaagtatactttgggatttgttgtgatttgtgcactgcttcttttagtt

SEQ ID NO: 549298 - DNA, 120 bp, Artificial Sequence
  ENSG00000168216_5 (sequence is synthesized)
ggtgcctttgttccattgaatgttcccaataacaaaaattctacagagtgggaaaaagtgaagtccctatttgaagaacttggaagtagtcatggtttagctgcattgtcattttctatc

SEQ ID NO: 549299 - DNA, 120 bp, Artificial Sequence
  ENSG00000168216_6 (sequence is synthesized)
agttctctgaccttgattggaatgttggcagctataacttacacagcctatggcatgtctgcgttacctttaaatctgataaaaggcactagaagcgctgcttatgaacgtttggaaaac

SEQ ID NO: 549300 - DNA, 120 bp, Artificial Sequence
  ENSG00000168216_7 (sequence is synthesized)
actgaagacattgaagaagtagaacaacacattcaaacgattaaatcaaaaagcaaagatggtcgacctttgccagcaagggataaacgcgccttaaaacaatttgaagaaaggttacga

SEQ ID NO: 549301 - DNA, 120 bp, Artificial Sequence
  ENSG00000168216_8 (sequence is synthesized)
acacttaagaagagagagaggcatttagaattcattgaaaacagctggtggacaaaattttgtggcgctctgcgtcccctgaagatcgtctggggaatatttttcatcttagttgcattg

SEQ ID NO: 549302 - DNA, 120 bp, Artificial Sequence
  ENSG00000168216_9 (sequence is synthesized)
ctgtttgtaatttctctcttcttgtcaaatttagataaagctcttcattcagctggaatagattctggtttcataatttttggagctaacctgagtaatccactgaatatgcttttgcct

SEQ ID NO: 549303 - DNA, 120 bp, Artificial Sequence
  ENSG00000168216_10 (sequence is synthesized)
ttactacaaacagttttccctcttgattatattcttataacaattattattatgtactttatttttacttcaatggcaggaattcgaaatattggcatatggttcttttggattagatta

SEQ ID NO: 549304 - DNA, 120 bp, Artificial Sequence
  ENSG00000168216_11 (sequence is synthesized)
tataaaatcagaagaggtagaaccaggccccaagcactcctttttctctgcatgatacttctgcttattgtccttcacactagctacatgatttatagtcttgctccccaatatgttatg

SEQ ID NO: 549305 - DNA, 120 bp, Artificial Sequence
  ENSG00000168216_12 (sequence is synthesized)
tatggaagccaaaattacttaatagagactaatataacttctgataatcataaaggcaattcaaccctttctgtgccaaagagatgtgatgcagatgctcctgaagatcagtgtactgtt

SEQ ID NO: 549306 - DNA, 120 bp, Artificial Sequence
  ENSG00000168216_13 (sequence is synthesized)
acccggacatacctattccttcacaagttctggttcttcagtgctgcttactattttggtaactgggcctttcttggggtatttttgattggattaattgtatcctgttgtaaagggaag

SEQ ID NO: 549307 - DNA, 120 bp, Artificial Sequence
  ENSG00000168216_14 (sequence is synthesized)
aaatcggttattgaaggagtagatgaagattcagacataagtgatgatgagccctctgtctattctgcttgacagccttctgtcttaaaggttttataatgctgactgaatatctgttat

SEQ ID NO: 549308 - DNA, 120 bp, Artificial Sequence
  ENSG00000168216_15 (sequence is synthesized)
gcatttttaaagtattaaactaacattaggatttgctaactagctttcatcaaaaatgggagcatggctataagacaactatattttattatatgttttctgaagtaacattgtatcata

SEQ ID NO: 549309 - DNA, 120 bp, Artificial Sequence
  ENSG00000168216_16 (sequence is synthesized)
gggaatgtttgtgcaaaattttttcctctaatgtataatagtgttaaattgattaaaaatcttccagaattaatattcccttttgtcactttttgaaaacataataaatcatctgtatct

SEQ ID NO: 549310 - DNA, 120 bp, Artificial Sequence
  ENSG00000168216_17 (sequence is synthesized)
gtgccttaggttctccagagtgatgtggaattttaaagtgtctctctctgattgcctccaaataatatttacaatatagctgatgaatgttactcccatatgcaaattgttttcagtttt

SEQ ID NO: 549311 - DNA, 120 bp, Artificial Sequence
  ENSG00000168216_18 (sequence is synthesized)
ctgcataaaatctttagcaccactcaagtagatttcatgaaaagatttcaaactctagttagtgctctaagagcatggcgttccaagatgtgttatattgttcaaatatcagtccattag

SEQ ID NO: 549312 - DNA, 120 bp, Artificial Sequence
  ENSG00000168216_19 (sequence is synthesized)
ataacttacaacctctacagtatttaaggcatacatattgttataggtagcttttgttttgcatctgacctcaaaatgtgtatttcaatataaataggggtattgtcaagaataattaat

SEQ ID NO: 549313 - DNA, 120 bp, Artificial Sequence
  ENSG00000168216_20 (sequence is synthesized)
cctggaaaaaaaaatcagtttatggattaatttaagatatatggcatcatattttggttttagagataatttttcattctaaagatttgaaatttgcaaaagatgtaatgaaagctgtat

SEQ ID NO: 549314 - DNA, 120 bp, Artificial Sequence
  ENSG00000168216_21 (sequence is synthesized)
gacatcagtagggtattttgaacacattctggatagtgagaaataataaaaaattatattctagtttactaacataagcacattagaactcataaaaaagtatatatcatgatccttgag

SEQ ID NO: 549315 - DNA, 120 bp, Artificial Sequence
  ENSG00000168216_22 (sequence is synthesized)
gtaaaatatcattaagtttctgaaaaaaagtttaggaattaacaactatatctaagttaattattctctcccttaatttttgtgccatttttctctgttctgattcttcatctctcttga

SEQ ID NO: 549316 - DNA, 120 bp, Artificial Sequence
  ENSG00000168216_23 (sequence is synthesized)
taaaccttcacagctttcgtatttggcttctgcttctgcaactaccctttagcattattcaccaggatttcattcccttctgttcttattttacattttcttttttctttttttttaaga

SEQ ID NO: 549317 - DNA, 120 bp, Artificial Sequence
  ENSG00000168216_24 (sequence is synthesized)
tgggattacaggcataagccaccacgctcggccttatattacattttctttgtggacaatctcacatacccttggcttctatctatactacttgttcttaagctctgaactttgagttat

SEQ ID NO: 549318 - DNA, 120 bp, Artificial Sequence
  ENSG00000168216_25 (sequence is synthesized)
ttatcttttagctagaaattactgcttcaactgtaacattttgaaaattgaagtattcacttttgtgggggcaaactaagccttcttctgcattcatttttttgacaaatggcaccgcag

SEQ ID NO: 549319 - DNA, 120 bp, Artificial Sequence
  ENSG00000168216_26 (sequence is synthesized)
acacttgattgcctaaacaaagaatcaggtagatctccatatctcttctgtataactgactcatcaaacaatcatgtcatgttaatttctacttcctatctttccatttgtcccttcttc

SEQ ID NO: 549320 - DNA, 120 bp, Artificial Sequence
  ENSG00000168216_27 (sequence is synthesized)
tccactttctatgttataggctgaattgtgtccccttacaattcatatgttgaaatcttgtcccctggtacttcatagaataatactttatgtggagatagggccttttaaaagtaatta

SEQ ID NO: 549321 - DNA, 120 bp, Artificial Sequence
  ENSG00000168216_28 (sequence is synthesized)
aagtaaaatgaggctattgcgtgaagcccaaatccaatatgactggtgttcttataagaagggggagagacatctagaatgtgtatgtacaaagaagaggccatgtgaggatgcaatgag

SEQ ID NO: 549322 - DNA, 120 bp, Artificial Sequence
  ENSG00000168216_29 (sequence is synthesized)
tgagaaggcagtggtctgcaagccaacaggagaggcctcaggagaatccagtgttgtcaaccctttaatcttgaggttccagcttccagatctgtgagaaaataaatttctgttgtttaa

SEQ ID NO: 549323 - DNA, 120 bp, Artificial Sequence
  ENSG00000168216_30 (sequence is synthesized)
gcccctgacatatgtgtccttctcttccctctctccacctggtttctcttacctttccaaaagctcaatttaatctatatttagcttcttgaagcttttttcaaacgttctgtgactggg

SEQ ID NO: 549324 - DNA, 120 bp, Artificial Sequence
  ENSG00000168216_31 (sequence is synthesized)
cgcacttgggaaaaacacccacatgtggatctgtggaagaagaaagaagaagaatcaaatatgaaactcatgaaatacatccttaataaagcccttaaattccattactctaaacgtctg

SEQ ID NO: 549325 - DNA, 120 bp, Artificial Sequence
  ENSG00000168216_32 (sequence is synthesized)
gaattgacttgaagtactgacaactgtagagcaccatctagttttggcctctagaactgcaaccaagtcttctgattctcaatggctattttggcattctgctggatatatgttcgtaaa

SEQ ID NO: 549326 - DNA, 120 bp, Artificial Sequence
  ENSG00000168216_33 (sequence is synthesized)
ggagtttctacctttatgggtttctttatccaagggacatattcatgaaaattcctggaaaaaagtagagacttcttgaaattgtggtgccacccatttttacatcaaatatgagtggtc

SEQ ID NO: 549327 - DNA, 120 bp, Artificial Sequence
  ENSG00000168216_34 (sequence is synthesized)
ttggaactgccatggtgctggtaggtgtgtgattgagcatgttaatgagcatataatgaggtcctaggtgaaacctaggtcaaatccattgccatgttgggtccagtgggtcttaaccag

SEQ ID NO: 549328 - DNA, 120 bp, Artificial Sequence
  ENSG00000168216_35 (sequence is synthesized)
cttggtccacaccctggtttttcagggtcttattagcccttagcctctagtcatggaaaactgctctctggaattttttagcccttgtgaacatcatgcattattcctgtctcaagggct

SEQ ID NO: 549329 - DNA, 120 bp, Artificial Sequence
  ENSG00000168216_36 (sequence is synthesized)
gggggcagagagaggagttaactacaaagggacaaaggaattttctgagatgatggaattgttcttgtatcttgcttgcggtagaaggatttggaagctgcaaaactagtttggtggttt

SEQ ID NO: 549330 - DNA, 120 bp, Artificial Sequence
  ENSG00000168216_37 (sequence is synthesized)
tattagtttcatttgggccctggaattgtaggatgctcagaaagaaagtaaccgctgttgaaaaagtgaaaggtcaaaacaaggcttttaaaactaccagagctcttatttagaacaatg

SEQ ID NO: 549331 - DNA, 120 bp, Artificial Sequence
  ENSG00000168216_38 (sequence is synthesized)
gttctcaagtttggctcagattgaaatcctcaggcatttaaagtactgatgcctggaggagccttattctccgttgatagaattgattggggaatgtagggaagttataagggtacttaa

SEQ ID NO: 549332 - DNA, 120 bp, Artificial Sequence
  ENSG00000168216_39 (sequence is synthesized)
aagttacccaggtgattctgactcacagtgaaggctgaaataacacagtctctgtctgcaactccctatgagtagagtagaagttctcaaaatacagccctggaccagcagtagcctcac

SEQ ID NO: 549333 - DNA, 120 bp, Artificial Sequence
  ENSG00000168216_40 (sequence is synthesized)
ctggggaagctgttacaaatgcagattttctggctccactccagacttcttgaatctgaaactcagaggatggggcctagcaatctgtgctttaacagttcctccaagtgattccgatgc

SEQ ID NO: 549334 - DNA, 120 bp, Artificial Sequence
  ENSG00000168216_41 (sequence is synthesized)
ctcctaacgttagagaatcattaaagtcctatgctctgtgttagtcactagaatggcattggtaactattaagagtacttggctgactagagatgtcaacctctacctctgagtgaactt

SEQ ID NO: 549335 - DNA, 120 bp, Artificial Sequence
  ENSG00000168216_42 (sequence is synthesized)
ttttcactggaaagctccttgctgtgcacatgtatccattttcagcattgacttttctttgtttaatgctctttaaaatttaaattatagtataatgtgataattgcatggtgattactg

SEQ ID NO: 549336 - DNA, 120 bp, Artificial Sequence
  ENSG00000168216_43 (sequence is synthesized)
gcagttaatctttagctcaatgctattcttgaactgtcagaacaggacagaagttaattttcatccaagttatattttgtaatgcttcagtaataagcctagaatagaacagcttctact

SEQ ID NO: 549337 - DNA, 120 bp, Artificial Sequence
  ENSG00000168216_44 (sequence is synthesized)
catatctcttttaggttggaaaaatctacagggaaaaaaatattcaaagctagttataactgtgatgtgtgaaaccattaacgtttgcactgtgtttaatgaggaaatatgtagctgagc

SEQ ID NO: 549338 - DNA, 120 bp, Artificial Sequence
  ENSG00000168216_45 (sequence is synthesized)
actgttattaatagtattgtgtgtgtatgcatacgtgatgtactgcattcatgaagtaggctttgaaaattatacatcttggacaagtttttaagggatagtgggctttccttacacaac

SEQ ID NO: 549339 - DNA, 120 bp, Artificial Sequence
  ENSG00000168216_46 (sequence is synthesized)
taaaataacctttacttcacataaggtttcctgctagaaactttcaaacacatacaaaaatcagagaaaatacactgggtagtaacaaacatctctttttgttctatttcaggctatttt

SEQ ID NO: 549340 - DNA, 120 bp, Artificial Sequence
  ENSG00000168216_47 (sequence is synthesized)
agaggcgcagtggagtccggacagggctgcggcaccgccgaggagtgagctccctgcgagtggggaagggggacgcatctctgcccttattagtctctcccagtgtgaccctcccactcc

SEQ ID NO: 549341 - DNA, 120 bp, Artificial Sequence
  ENSG00000168216_48 (sequence is synthesized)
gcgaggacagaggactctgcaagaaggcaggaaggaccatcctattttttccctcaggcttccagccggaagtagattataggtagagcataactcatcaccacataatacattggaaaa

SEQ ID NO: 549342 - DNA, 120 bp, Artificial Sequence
  ENSG00000168216_49 (sequence is synthesized)
agatgatggtattttttctcagagttgtttcttgactacatcacagtggtgaaacatgcactcacacccctgtggactcaggctattttggcattctgctggatatatgttcgtaaatac

SEQ ID NO: 549343 - DNA, 120 bp, Artificial Sequence
  ENSG00000168216_50 (sequence is synthesized)
taggtatacgtgtgccatggtggtttgccgcacctgtcaactcatcatctaggttttaagacctgcatgcattagctttatattctgttatattgttctgtgtgttcttctggatccctt

SEQ ID NO: 549344 - DNA, 120 bp, Artificial Sequence
  ENSG00000168216_51 (sequence is synthesized)
tgcagggtcctttttggaagctcttgccgtcatcgctgacttgggcaatggggccggtggggtttgggggcggaagagaccctcggggttgagaagctattttggcattctgctggatat

SEQ ID NO: 549345 - DNA, 120 bp, Artificial Sequence
  ENSG00000168216_52 (sequence is synthesized)
cggaagagaccctcggggttgagaagtatgtggtggcctttcgtcccctgtaaaacattgtcacacggtgtggggcggcagcgctggatctttgcaagttaagtaggcgctggcgttgtt

SEQ ID NO: 549346 - DNA, 120 bp, Artificial Sequence
  ENSG00000168216_53 (sequence is synthesized)
tacttgtcaccttctctgtatgttttttccctcattttccctacccttggggctagtgagtctccaacctctgtgcccattgtgtgattctgccttgatgacgtgagttgctcgttctga

SEQ ID NO: 549347 - DNA, 120 bp, Artificial Sequence
  ENSG00000168216_54 (sequence is synthesized)
cttccaggtgtcacattctcttctaatctttttttgattggtgtagatacctgtggagggcggagctgtagccctctttattaccagtatcggagtatatactactacctgtctgacctc

SEQ ID NO: 549348 - DNA, 120 bp, Artificial Sequence
  ENSG00000168216_55 (sequence is synthesized)
aggtgctttcttttccaacgatcttatttctgcatattcagtgagcaaagtgtagatagaaatgtctcagagtggcctggctattacttccctgttcatattaaaaccctttggtttatt

SEQ ID NO: 549349 - DNA, 120 bp, Artificial Sequence
  ENSG00000168216_56 (sequence is synthesized)
tgggagttcaatttatttcctttcataacttctctaccttctcaaatcttctcttttctcatcgtccgaggctgtagttactttctgttctcacgtattttgacctttttgcattgcaaa

SEQ ID NO: 549350 - DNA, 120 bp, Artificial Sequence
  ENSG00000168216_57 (sequence is synthesized)
acaaaaacctccagttctggaaatcaggcttgtttggttttactttaattgtcagatccagttggtgtctggtacctatgtagtatgttctagtagatttttgcagtagagactaaaaaa

SEQ ID NO: 549351 - DNA, 120 bp, Artificial Sequence
  ENSG00000168216_58 (sequence is synthesized)
agaaaataaaagaaaagaatggtgtgaaaatttaagaaaaggatcctcttgttactgccatcactgtcacagataaaaacactgcctttaccctggaacatgttagtcctctcttggagg

SEQ ID NO: 549352 - DNA, 120 bp, Artificial Sequence
  ENSG00000168216_59 (sequence is synthesized)
aaatgaaaccctaaaggttgactgtggtctctgcagccacccagtcctgtatttggagagccccctggcttttccagtccatcagatttagtttgtttagaaaaaaataaataagcatgt

SEQ ID NO: 549353 - DNA, 120 bp, Artificial Sequence
  ENSG00000168216_60 (sequence is synthesized)
taaattaataaacatttacggtacagaagtggtgtgaattgtaagaggatgtaaaccaaacaaaatacggctttaaagagggcctgaagataagtgagaaaactgaaattcttgaaacat

SEQ ID NO: 549354 - DNA, 120 bp, Artificial Sequence
  ENSG00000168216_61 (sequence is synthesized)
gtattttatggaccgaaagccaaagtgtgactataaataaagcaggacttaagagaatagacaacaatattggaagaaaatgagaattgtggtagagtttggatagatgaagaagagagg

SEQ ID NO: 549355 - DNA, 120 bp, Artificial Sequence
  ENSG00000168216_62 (sequence is synthesized)
ccatttaagttggcaatattacagcaaggacaaataaaatcagaattgaatgttgtcgtggataaaagcattaggaagaaggacttttgtttaaatttctgcaaatctctttaaatcctg

SEQ ID NO: 549356 - DNA, 120 bp, Artificial Sequence
  ENSG00000168216_63 (sequence is synthesized)
gtttattagaagaaaggctggtttcttttgttgccttctacattcagtcttttggggtatgttattttagtcgaagtgtatggagaaaatacagctgcaatgataggtagtcagaaacag

SEQ ID NO: 549357 - DNA, 120 bp, Artificial Sequence
  ENSG00000168216_64 (sequence is synthesized)
aggagcgtttttcagataattgtggatgttttttgacactacaccaaagctcaacaagtggaagattcatgtcagctgcaaggtggaatctgaaaccctatcaatgagcatttcattcat

SEQ ID NO: 549358 - DNA, 120 bp, Artificial Sequence
  ENSG00000168216_65 (sequence is synthesized)
tgttacattaaaatccattagcccatcttgcactttgaaaggctcttttacccatgcatggttttataacatgatgccatggccacttagaaaatgttggtttactgagttatgcacatc

SEQ ID NO: 549359 - DNA, 120 bp, Artificial Sequence
  ENSG00000168216_66 (sequence is synthesized)
ttttaaatatggatacgtttcattacacaatatcaaaatatcacatttcattaaattacaactgatcttgtcagaaatgtctctgaaaattctaagtattgaagagttgtcaagctcata

SEQ ID NO: 549360 - DNA, 120 bp, Artificial Sequence
  ENSG00000168216_67 (sequence is synthesized)
cttgtggatgctattttggcattctgctggatatatgttcgtaaataccaaagtcggcgggaaagtgaagttgtctccaccataacagcaattttttctctagcaattgcacttatcaca

SEQ ID NO: 549361 - DNA, 120 bp, Artificial Sequence
  ENSG00000168216_68 (sequence is synthesized)
ccctttgttcatttgacaaaatctgccaaaaagcgaagtctgaataaccagtttgacaattgttctttcaagtaaaaatggtgttccttgaagagtggttggtttagcttttaactctaa

SEQ ID NO: 549362 - DNA, 120 bp, Artificial Sequence
  ENSG00000168216_69 (sequence is synthesized)
acttttcctggagatagccatcacatcttggtatgcagcaggactttatgtacgcatgcttcatattttaccccacaaagtattaaaaagagtcaagggttgaatttcaataaaatgaat

SEQ ID NO: 549363 - DNA, 120 bp, Artificial Sequence
  ENSG00000168216_70 (sequence is synthesized)
ttatgctgctttgtgaagcacagtcttaatttaaattgtccctttttgaacttgtggtgaagaatacaatgattactggtgcagtttggtgccactgtcttgattcacgctaatgcacca

SEQ ID NO: 549364 - DNA, 120 bp, Artificial Sequence
  ENSG00000168216_71 (sequence is synthesized)
gtagttttacccactgtggctatgaaccatgagtgcaaatgtcagcacagtgaaaaaggcaaatagcatcttagtatttattatgagaatagttttcaacttctgaatctccagaaagga

SEQ ID NO: 549365 - DNA, 120 bp, Artificial Sequence
  ENSG00000168216_72 (sequence is synthesized)
ttctgaatctccagaaaggattctggggactaccagggcctagggatttcacacttggagaacttctgccaatcatctactaaatattcaggacatgggccaggtgtggtggctcacacc

SEQ ID NO: 549366 - DNA, 81 bp, Artificial Sequence
  ENSG00000168216_73 (sequence is synthesized)
aggctgaggcaggtggatcagttgagctcaggagttgagaccagcctgggcagcatggcaaagccccattaatgcctgagg

SEQ ID NO: 549367 - DNA, 69 bp, Artificial Sequence
  ENSG00000168216_74 (sequence is synthesized)
tgtttgtggaggcagttgcagcaagctctgatagtgcctgggcaacagagggaaacttcgtctcaaaaa

SEQ ID NO: 549368 - DNA, 120 bp, Artificial Sequence
  ENSG00000168216_75 (sequence is synthesized)
tcctttgaagtccttctggaaaatacctaaattagagatcatctaaagtgacaactttccaaaaggccaaggctgtcatgttccatgtaaacttcaaacaagtgattattcatccatgca

SEQ ID NO: 549369 - DNA, 120 bp, Artificial Sequence
  ENSG00000168216_76 (sequence is synthesized)
acaaggtactggcagaatgaggaccctggaactgacttctagctcagtgctaccataccaaaggaaatgaaaaatgcatattgcaaaagaaaaggaaacacaggagcttcaggaaagcaa

SEQ ID NO: 549370 - DNA, 120 bp, Artificial Sequence
  ENSG00000168216_77 (sequence is synthesized)
ggattacaggcttgagccactacgcccagctcatttagtgtttcttaaacattaacattcaagtcaaactagaggaagaaagtggatctaggtccacttgcccttctatacagctctctc

SEQ ID NO: 549371 - DNA, 90 bp, Artificial Sequence
  ENSG00000168216_78 (sequence is synthesized)
cttcttgaagcttttttcaaacgttctgtgactgggctaatgctaatgtcagcagacagattgaggacactgtattatacggttactact

SEQ ID NO: 549372 - DNA, 120 bp, Artificial Sequence
  ENSG00000168228_0 (sequence is synthesized)
gtttcgtactgaggctttcgggacggcggcgggaagatggcggcctccaggaatgggtttgaagccgtggaggcagagggcagcgcagggtgccggggaagctcgggaatggaggtggtg

SEQ ID NO: 549373 - DNA, 120 bp, Artificial Sequence
  ENSG00000168228_1 (sequence is synthesized)
cttcctttggatcctgccgtccccgccccgctgtgccctcacggacccactcttctgtttgtaaaggtgacccaagggaaagaagaaactcggaggttttatgcctgttcagcctgtaga

SEQ ID NO: 549374 - DNA, 120 bp, Artificial Sequence
  ENSG00000168228_2 (sequence is synthesized)
gatagaaaagactgtaatttttttcagtgggaagatgaaaagttgtcaggagctagacttgctgcccgagaagctcataaccgaagatgtcagcctcccctgtcccgaacgcagtgtgtg

SEQ ID NO: 549375 - DNA, 120 bp, Artificial Sequence
  ENSG00000168228_3 (sequence is synthesized)
gaaaggtacttgaagtttattgagttgcccttgactcagagaaagttttgtcaaacatgtcagcagttgttgttaccagatgactgggggcaacatagtgagcatcaggttctgggtaat

SEQ ID NO: 549376 - DNA, 120 bp, Artificial Sequence
  ENSG00000168228_4 (sequence is synthesized)
gtgtccattacccagttaagaaggcccagtcaactcctttatccactggaaaacaagaagacaaatgcccagtatctgtttgctgatcggagctgtcagttcttggtagacttactttct

SEQ ID NO: 549377 - DNA, 120 bp, Artificial Sequence
  ENSG00000168228_5 (sequence is synthesized)
gccctcggattcagaagagtactgtgtgttggaacaccaaggttgcatgagctgatcaagttgacagcatcaggtgacaagaagtctaacattaaaagccttttattggatattgatttt

SEQ ID NO: 549378 - DNA, 120 bp, Artificial Sequence
  ENSG00000168228_6 (sequence is synthesized)
cggtattcacagttttatatggaagatagcttttgccattataatatgtttaaccatcatttctttgatggaaagactgcccttgaagtatgcagagcatttttacaggaagataaaggc

SEQ ID NO: 549379 - DNA, 120 bp, Artificial Sequence
  ENSG00000168228_7 (sequence is synthesized)
gaaggaatcattatggtgacggatcctccgtttggtggcttggttgaacctctggctattacattcaagaagttaattgctatgtggaaagaaggtcaaagccaagatgacagtcacaaa

SEQ ID NO: 549380 - DNA, 120 bp, Artificial Sequence
  ENSG00000168228_8 (sequence is synthesized)
gaactacccattttctggattttcccctatttttttgaatcccgaatttgtcagttttttccaagcttccagatgctggattaccaggtagattatgataatcatgcactttataaacac

SEQ ID NO: 549381 - DNA, 120 bp, Artificial Sequence
  ENSG00000168228_9 (sequence is synthesized)
ggaaagacaggtcgaaaacagtctcccgtgcgtattttcaccaacattccgcccaacaaaataatccttcctactgaagaagggtacagattttgctctccgtgtcaacggtatgtttct

SEQ ID NO: 549382 - DNA, 120 bp, Artificial Sequence
  ENSG00000168228_10 (sequence is synthesized)
ctagagaatcaacactgtgagctctgtaattcttgcacatccaaggatggcaggaaatggaaccattgctttctctgtaaaaagtgtgtaaagccttcctggatccactgtagcatctgc

SEQ ID NO: 549383 - DNA, 120 bp, Artificial Sequence
  ENSG00000168228_11 (sequence is synthesized)
ccaaacatggctgctttatttgtggtgaactggatcataaacgcagtacttgtcctaacattgctacatctaagagagctaacaaagctgtcagaaagcagaagcaaagaaaaagtaata

SEQ ID NO: 549384 - DNA, 120 bp, Artificial Sequence
  ENSG00000168228_12 (sequence is synthesized)
agatgaaaatggagaccacgaaaggacaatccatgaatcatacatctgctacaaggagaaagaaaaggagggaaagagcccatcaatatcttggctcttaaatgtccagtgactggagaa

SEQ ID NO: 549385 - DNA, 120 bp, Artificial Sequence
  ENSG00000168228_13 (sequence is synthesized)
taagaaagatttatggtccaacctttgatgccattttctgaaagtgccacactggacttaaattcagctgcttccagaggtgtgcacctttctgagctagataacaggcaggtggcattt

SEQ ID NO: 549386 - DNA, 120 bp, Artificial Sequence
  ENSG00000168228_14 (sequence is synthesized)
gctggtttacagtcccttatctgcctctctggagacatggggagttgttccatcttcagccagtttactagttctttcagcattcatttttcctcactttaagtctctcccagtcacatt

SEQ ID NO: 549387 - DNA, 73 bp, Artificial Sequence
  ENSG00000168228_15 (sequence is synthesized)
cattcatttttcctcactttaagtctctcccagtcacattgttctatttttatgttttcatggcacaacctca

SEQ ID NO: 549388 - DNA, 120 bp, Artificial Sequence
  ENSG00000168228_16 (sequence is synthesized)
gattacaggcatgagccacctcacccagctccggtcacattattctagcctttttatccaaaaaatgggcagaccattcttttgcagaagatgtcagaagaaaatgaaagtgaaaaccta

SEQ ID NO: 549389 - DNA, 120 bp, Artificial Sequence
  ENSG00000168228_17 (sequence is synthesized)
tttgcagaagatgtcagaagaaaatgaaagtgaaaacctatgcagtttgtttaccgtgaacataaaagtatgttaatttaaataggaaaatattttatgttaaatatgaaacaatagttt

SEQ ID NO: 549390 - DNA, 120 bp, Artificial Sequence
  ENSG00000168228_18 (sequence is synthesized)
aaaccccacttgaaaagtatagcgtacaattatttttagactgaatttgaagatgatggaaagggtttttacaaaggcactgtttagatatacagattataattataattacattattat

SEQ ID NO: 549391 - DNA, 120 bp, Artificial Sequence
  ENSG00000168228_19 (sequence is synthesized)
taaatatttattcttcaagtactttttgcagttgtcctctgacggtctagaatcacttaaatgcttgttgaatgagtgagatgtttagaactacgacttgctctgtcattccagtgtcgt

SEQ ID NO: 549392 - DNA, 120 bp, Artificial Sequence
  ENSG00000168228_20 (sequence is synthesized)
ttaacctatgcagtaagattctgtctttgtaaaagtagttcgtagcagaagccaggatagtttggtaattaaacgcccaaactaaactcctcattcctacccttaatatttcctggctgt

SEQ ID NO: 549393 - DNA, 120 bp, Artificial Sequence
  ENSG00000168228_21 (sequence is synthesized)
atgatcttggccaggtcactctctaaaagccccggtttcttcattattatcattattataatggggagaataacagctatacctgaggtttgttttgtgattaaattaaatgagacccaa

SEQ ID NO: 549394 - DNA, 120 bp, Artificial Sequence
  ENSG00000168228_22 (sequence is synthesized)
ctggattaccagggcatatagaaaagtaaatcacctttgtggttggtgaaatgccatgcacactttactgcatcactcttgggatgtcaggagtgtcagagaaggcagagatggctctgt

SEQ ID NO: 549395 - DNA, 120 bp, Artificial Sequence
  ENSG00000168228_23 (sequence is synthesized)
gtgaatgtgttgattccgggaggaagttactggagtgagtaacttcacagcaatgactatggaattttccccctgcctgaaatgagaatgaggctgctgtccacagcagctccacctggt

SEQ ID NO: 549396 - DNA, 120 bp, Artificial Sequence
  ENSG00000168228_24 (sequence is synthesized)
cttttaagttcattctgctttaaactccactttcctgtattttcttcccttgtgtttgaagttaaccctgttgtcgccatcactgtttatggtcttcaggcaggtactgcttcttttttt

SEQ ID NO: 549397 - DNA, 120 bp, Artificial Sequence
  ENSG00000168228_25 (sequence is synthesized)
agtcctcagcttggactggaacctgacacttggcatgacaaatactttaactcatatattggcatcagtttgttcgtttattggttaaagaatcttaatgttgactaatttgagtaaatt

SEQ ID NO: 549398 - DNA, 120 bp, Artificial Sequence
  ENSG00000168228_26 (sequence is synthesized)
agagctaacaagtcagtcgaatactttactagaaaaatgtattccatctgtgttttatacaggataatccacaaaagcatgcaacattcagaggatcttgaagtgccaagttaattgtca

SEQ ID NO: 549399 - DNA, 120 bp, Artificial Sequence
  ENSG00000168228_27 (sequence is synthesized)
ctttcactattaagtactggctgcatagatggatggagggaggagaggaagatgattcaaagagcttgctttcaaagagcttacagttctacagcttagagatgaaaataaccaaaatat

SEQ ID NO: 549400 - DNA, 120 bp, Artificial Sequence
  ENSG00000168228_28 (sequence is synthesized)
gaggtagaaagtggttaattttacctctccttggctttacgtctcatgtgtaaagttatagggggtgacagttcatgctttattgaaggacatgatatttacgtcaggctttgagggaca

SEQ ID NO: 549401 - DNA, 120 bp, Artificial Sequence
  ENSG00000168228_29 (sequence is synthesized)
gatcagatatagacacatgatggcaggaaaggctggagaaggcatttcagattgaatagcaagtaattccacagtaggaaaattgtgagaaagctatttctttgtatcaaattttaagaa

SEQ ID NO: 549402 - DNA, 120 bp, Artificial Sequence
  ENSG00000168228_30 (sequence is synthesized)
aaatatttagacatgcttaatgcttaaatatttgaaatttttattactttttttcctgtgattattttcacatctctcaccaatatttgattggagctatggattacaactcagagtatg

SEQ ID NO: 549403 - DNA, 120 bp, Artificial Sequence
  ENSG00000168228_31 (sequence is synthesized)
gggatacctatgacaatagcttatttagaagaggcactgcttctggaatagttatccccaaaacaaaacaaaaagagaaaaacattgctattttaaccgagctaatttgaatgattatac

SEQ ID NO: 549404 - DNA, 120 bp, Artificial Sequence
  ENSG00000168228_32 (sequence is synthesized)
ttttttcctaactaaaagggatgatagtgattaagtcctcttcctttattgctaagaaaactaatgttacacagttattaattggagattaccagacagctaaatttgacattatatgaa

SEQ ID NO: 549405 - DNA, 120 bp, Artificial Sequence
  ENSG00000168228_33 (sequence is synthesized)
tgaaattatatgacattatatgaaaattcagattgggctaccatgtgactatgacttgtaatttaaaaaaattgatttgtgttagaaatatctgatagtttaataattatttatggtaat

SEQ ID NO: 549406 - DNA, 120 bp, Artificial Sequence
  ENSG00000168229_0 (sequence is synthesized)
gtggcgcagcttctccgcccgagccgcgcgcggagctgccgggggctccttagcacccgggcgccggggccctcgcccttccgcagccttcactccagccctctgctcccgcacgccatg

SEQ ID NO: 549407 - DNA, 120 bp, Artificial Sequence
  ENSG00000168229_1 (sequence is synthesized)
aagtcgccgttctaccgctgccagaacaccacctctgtggaaaaaggcaactcggcggtgatgggcggggtgctcttcagcaccggcctcctgggcaacctgctggccctggggctgctg

SEQ ID NO: 549408 - DNA, 120 bp, Artificial Sequence
  ENSG00000168229_2 (sequence is synthesized)
gcgcgctcggggctggggtggtgctcgcggcgtccactgcgcccgctgccctcggtcttctacatgctggtgtgtggcctgacggtcaccgacttgctgggcaagtgcctcctaagcccg

SEQ ID NO: 549409 - DNA, 120 bp, Artificial Sequence
  ENSG00000168229_3 (sequence is synthesized)
gtggtgctggctgcctacgctcagaaccggagtctgcgggtgcttgcgcccgcattggacaactcgttgtgccaagccttcgccttcttcatgtccttctttgggctctcctcgacactg

SEQ ID NO: 549410 - DNA, 120 bp, Artificial Sequence
  ENSG00000168229_4 (sequence is synthesized)
caactcctggccatggcactggagtgctggctctccctagggcaccctttcttctaccgacggcacatcaccctgcgcctgggcgcactggtggccccggtggtgagcgccttctccctg

SEQ ID NO: 549411 - DNA, 120 bp, Artificial Sequence
  ENSG00000168229_5 (sequence is synthesized)
gctttctgcgcgctacctttcatgggcttcgggaagttcgtgcagtactgccccggcacctggtgctttatccagatggtccacgaggagggctcgctgtcggtgctggggtactctgtg

SEQ ID NO: 549412 - DNA, 120 bp, Artificial Sequence
  ENSG00000168229_6 (sequence is synthesized)
ctctactccagcctcatggcgctgctggtcctcgccaccgtgctgtgcaacctcggcgccatgcgcaacctctatgcgatgcaccggcggctgcagcggcacccgcgctcctgcaccagg

SEQ ID NO: 549413 - DNA, 120 bp, Artificial Sequence
  ENSG00000168229_7 (sequence is synthesized)
gactgtgccgagccgcgcgcggacgggagggaagcgtcccctcagcccctggaggagctggatcacctcctgctgctggcgctgatgaccgtgctcttcactatgtgttctctgcccgta

SEQ ID NO: 549414 - DNA, 120 bp, Artificial Sequence
  ENSG00000168229_8 (sequence is synthesized)
atttatcgcgcttactatggagcatttaaggatgtcaaggagaaaaacaggacctctgaagaagcagaagacctccgagccttgcgatttctatctgtgatttcaattgtggacccttgg

SEQ ID NO: 549415 - DNA, 120 bp, Artificial Sequence
  ENSG00000168229_9 (sequence is synthesized)
atttttatcattttcagatctccagtatttcggatattttttcacaagattttcattagacctcttaggtacaggagccggtgcagcaattccactaacatggaatccagtctgtgacag

SEQ ID NO: 549416 - DNA, 120 bp, Artificial Sequence
  ENSG00000168229_10 (sequence is synthesized)
tgtttttcactctgtggtaagctgaggaatatgtcacattttcagtcaaagaaccatgattaaaaaaaaaaagacaacttacaatttaaatccttaaaagttacctcccataacaaaagc

SEQ ID NO: 549417 - DNA, 120 bp, Artificial Sequence
  ENSG00000168229_11 (sequence is synthesized)
atgtatatgtattttcaaaagtatttgatatcttaacaatgtgttaccattctatagtcatgaaccccttcagtgcattttcatttttttattaacagcaactaaaattttatatattgt

SEQ ID NO: 549418 - DNA, 120 bp, Artificial Sequence
  ENSG00000168229_12 (sequence is synthesized)
ttagagaggccttgagacatacaggtcttttaaaatacagtagaaacaccactgtttacgattatacgatggacattcataaaaagcataatttcttaccctattcattttttggtgaaa

SEQ ID NO: 549419 - DNA, 120 bp, Artificial Sequence
  ENSG00000168229_13 (sequence is synthesized)
cctgattcattgattttatatcattgccgatgtttagttcatttctttgccaattgatctaagcatagcctgaattatgatgttcctcagagaagtgaggtgggaaatatgaccaggtca

SEQ ID NO: 549420 - DNA, 120 bp, Artificial Sequence
  ENSG00000168229_14 (sequence is synthesized)
ggcagttggaggggcttccccagccaccatcggggagtacttgctgcctcaggtggagacctgaagctgtaactagatgcagagcaagatatgactatagcccacaacccaaagaagcaa

SEQ ID NO: 549421 - DNA, 120 bp, Artificial Sequence
  ENSG00000168229_15 (sequence is synthesized)
aaattcgtttttatcttttgaaatccagtttcttttgtattgagtcaagggtgtcagtaggaatcaaaagttgggggtgggttgcaaaatgttctttcagtttttagaacctccatttta

SEQ ID NO: 549422 - DNA, 120 bp, Artificial Sequence
  ENSG00000168229_16 (sequence is synthesized)
taaaagaattatcctatcaatggattctttagtggaaggatttatgcttctttgaaaaccagtgtgtgactcactgtagagccatgtttactgtttgactgtgtggcacaggggggcatt

SEQ ID NO: 549423 - DNA, 120 bp, Artificial Sequence
  ENSG00000168229_17 (sequence is synthesized)
tggcacagcaaaaagcccacccaggacttagcctcagttgacgatagtaacaatggccttaacatctaccttaacagctacctattacagccgtattctgctgtccgtggagacggtaag

SEQ ID NO: 549424 - DNA, 120 bp, Artificial Sequence
  ENSG00000168229_18 (sequence is synthesized)
atcttaggttccaagattttacttcaaattacaccttcaaaactggagcagcatatagccgaaaaggagcacaactgagcactttaatagtaatttaaaagttttcaagggtcagcaata

SEQ ID NO: 549425 - DNA, 120 bp, Artificial Sequence
  ENSG00000168229_19 (sequence is synthesized)
tgatgactgaaagggaaaagtggaggaaacgcagctgcaactgaagcggagactctaaacccagcttgcaggtaagagctttcacctttggtaaaagaacagctggggaggttcaagggg

SEQ ID NO: 549426 - DNA, 120 bp, Artificial Sequence
  ENSG00000168229_20 (sequence is synthesized)
tttcagcatctctggagttcctttgtatctgacaatctcaggactccaaggtgcaaagcctgctgcatttgcgtgatctcaagacctccagccagaagtcccttccaaatataagagtac

SEQ ID NO: 549427 - DNA, 120 bp, Artificial Sequence
  ENSG00000168229_21 (sequence is synthesized)
tcatgtttatttatttccaactgagcagcaacctcctttgtttcacttatgttttttccagtatctgagataatataaagctgggtaattttttatgtaattttttggtatagcaaaact

SEQ ID NO: 549428 - DNA, 120 bp, Artificial Sequence
  ENSG00000168229_22 (sequence is synthesized)
gtgaaaaagccaaattaggcatacaaggagtatgatttaacagtatgacatgatgaaaaaaatacagttgtttttgaaatttaacttttgtttgtaccttcaatgtgtaagtacatgcat

SEQ ID NO: 549429 - DNA, 120 bp, Artificial Sequence
  ENSG00000168229_23 (sequence is synthesized)
gttttattgtcagaggaagaacatgttttttgtattctttttttggagaggtgtgttaggataattgtccagttaatttgaaaaggccccagatgaatcaataaatataattttatagta

SEQ ID NO: 549430 - DNA, 120 bp, Artificial Sequence
  ENSG00000168234_0 (sequence is synthesized)
aatcatgcttacgcatataggttaaccacagttatgtaagcaggttctgagaaaaggtgagaaagagaatggagagttttgctacaacagaggcaggattctgaatttatttccagctgc

SEQ ID NO: 549431 - DNA, 120 bp, Artificial Sequence
  ENSG00000168234_1 (sequence is synthesized)
ccatcttgtccctcctggagacctaacccctccagcacctacacacacagcctctttagaagcaactatcctgccactggctcagaaaggctgagtcctaagaattctaaaatcttgctc

SEQ ID NO: 549432 - DNA, 120 bp, Artificial Sequence
  ENSG00000168234_2 (sequence is synthesized)
ctaagaaatctcaagcttcttttgtgaaatcatagcccactaatgagttttggagccagctttgtcagttttttgaatgccatgatgacatttgaggaagaaaaaatgcagttggcatgt

SEQ ID NO: 549433 - DNA, 120 bp, Artificial Sequence
  ENSG00000168234_3 (sequence is synthesized)
gatgacttaaaaaccacagaaaaactgtgtgaaagtgaagaggctggagtaattgaaacaatcaagaataaaattaagaagaacgttgatgtccgaaaatccgccccctctatggttgat

SEQ ID NO: 549434 - DNA, 120 bp, Artificial Sequence
  ENSG00000168234_4 (sequence is synthesized)
cggcttcagaggcagataatcatagctgactgccaggtttacctggctgtgctttcatttgtaaaacaagaattgtcagcttatatcaaaggtgggtggatccttaggaaagcctggaag

SEQ ID NO: 549435 - DNA, 120 bp, Artificial Sequence
  ENSG00000168234_5 (sequence is synthesized)
atttacaataaatgctatctggacatcaatgcccttcaggagctgtatcagaagaagctaactgaagagtccttgacttctgatgctgcaaatgataatcacattgtggctgaaggggtg

SEQ ID NO: 549436 - DNA, 120 bp, Artificial Sequence
  ENSG00000168234_6 (sequence is synthesized)
tctgaggagtctctgaacagactgaaaggtgctgttagctttggatatggcctttttcacctttgcatatccatggtgcccccaaacctgctcaaaatcatcaacctgctgggttttcct

SEQ ID NO: 549437 - DNA, 120 bp, Artificial Sequence
  ENSG00000168234_7 (sequence is synthesized)
ggagaccgcctacaggggctttcttcactgatgtatgcaagcgaaagtaaggacatgaaggcccctttagctacattagctctgctctggtatcatactgtagtccgcccgttttttgcc

SEQ ID NO: 549438 - DNA, 120 bp, Artificial Sequence
  ENSG00000168234_8 (sequence is synthesized)
ttggatggcagtgataacaaggcaggcctggatgaagctaaggaaattctccttaaaaaagaagctgcttatccaaattcttccctctttatgtttttcaagggacggatacaacgacta

SEQ ID NO: 549439 - DNA, 120 bp, Artificial Sequence
  ENSG00000168234_9 (sequence is synthesized)
acatctttccacactgctttggaacttgcagtagaccagagagaaattcaacatgtctgtctgtatgaaattggttggtgcagcatgatagagctcaatttcaaggatgcatttgattcc

SEQ ID NO: 549440 - DNA, 120 bp, Artificial Sequence
  ENSG00000168234_10 (sequence is synthesized)
tttgagaggctaaaaaatgagtccaggtggtcccagtgctattatgcctacttgactgcagtttgtcagggagccactggtgatgtggatggggcacagattgtctttaaagaagttcag

SEQ ID NO: 549441 - DNA, 120 bp, Artificial Sequence
  ENSG00000168234_11 (sequence is synthesized)
aaactcttcaaaaggaaaaacaatcagattgaacagttctcggtgaaaaaggcagagcgatttcggaagcaaaccccaaccaaagcgctctgtgtgttggcgtctattgaagtgttgtac

SEQ ID NO: 549442 - DNA, 120 bp, Artificial Sequence
  ENSG00000168234_12 (sequence is synthesized)
ttgtggaaagctcttccaaactgttccttccccaacctgcagaggatgagtcaagcttgccatgaagtggatgactcatctgttgttggattaaagtatttgcttcttggtgccatacac

SEQ ID NO: 549443 - DNA, 120 bp, Artificial Sequence
  ENSG00000168234_13 (sequence is synthesized)
aaatgtctaggaaactcagaagatgctgttcagtacttccagcgagctgttaaagatgaattgtgtcgtcagaataacttatatgttcagccgtatgcctgttatgaacttggctgtctt

SEQ ID NO: 549444 - DNA, 120 bp, Artificial Sequence
  ENSG00000168234_14 (sequence is synthesized)
ctattagacaaaccagagactgtaggaagaggcagagctctacttcttcaagcaaaggaggatttctctggctacgactttgaaaacagattgcatgtccgcatccatgctgctctggcc

SEQ ID NO: 549445 - DNA, 120 bp, Artificial Sequence
  ENSG00000168234_15 (sequence is synthesized)
tctctgagggaattggttcctcagtgacagacccggaacacccgctccgtccctccccacccagggtccgcactttaaaataaaagcagaggacaaagctcttgtgaagatgggcttttc

SEQ ID NO: 549446 - DNA, 120 bp, Artificial Sequence
  ENSG00000168234_16 (sequence is synthesized)
ttctgaaaaccacctgtgccagggacacattttcccagttaagctgacatattaaagatctcctcttttaaacatgtagctgaaaagtaataatgatgttgaggaggatgatgatggtaa

SEQ ID NO: 549447 - DNA, 120 bp, Artificial Sequence
  ENSG00000168234_17 (sequence is synthesized)
taataactaaccacctggggagagggttaagtgaccttgctcaaacgttttagttttgtgatttattatttttaaaataaaatcaaacggaacatccaacccaagatcctgtaggaacac

SEQ ID NO: 549448 - DNA, 120 bp, Artificial Sequence
  ENSG00000168234_18 (sequence is synthesized)
ctaccttaagcacatatctgaatgggtaacatgatgaggtacctgtaaaattattaacaatatcatgacatagcatttatatttgtgttttgaaaaaataaaagtgctttctagtgtttt

SEQ ID NO: 549449 - DNA, 80 bp, Artificial Sequence
  ENSG00000168234_19 (sequence is synthesized)
cccctcccctcccggctccgcttggctccgggcaggtagagccgggctccgggcgcgcgcggggccgcagcagctgctcc

SEQ ID NO: 549450 - DNA, 120 bp, Artificial Sequence
  ENSG00000168234_20 (sequence is synthesized)
ggctcggagcagcagcggccgcggcggcgggacgacggagactcggacgcggcagcggcggcggcggcgcccctgcaggacgcggagctggccctggccggcatcaacatgctgctcaac

SEQ ID NO: 549451 - DNA, 120 bp, Artificial Sequence
  ENSG00000168234_21 (sequence is synthesized)
attgtaaaaataattcatgttaataggccagaattccatgttttacttattaaaagaacaaaatcttcagctgaagttatgtcaccagaaatagtcatctccagattgtctacagaatgt

SEQ ID NO: 549452 - DNA, 120 bp, Artificial Sequence
  ENSG00000168234_22 (sequence is synthesized)
ttcaaagcgatggacactctttttcctttgaaagccaaccaagtaagagcaaatattaatagaagataattttacaactaaaagtgtgactcttttgctaatctattagcctagtctata

SEQ ID NO: 549453 - DNA, 120 bp, Artificial Sequence
  ENSG00000168234_23 (sequence is synthesized)
gattagacaaacagtatctacattttaggagtttacctttctttgtgaaaattgtcaaattaccaacttttggaaatcttttgacacattacttgaaaaggttattcgtgaatgaacata

SEQ ID NO: 549454 - DNA, 120 bp, Artificial Sequence
  ENSG00000168234_24 (sequence is synthesized)
gattttggcctcaaaatatttgctggtggaacatttgctgggctacacagtgccaggatttaatcattttccccttagctcaggttatttagatattatacaaggaattcaaagttattt

SEQ ID NO: 549455 - DNA, 120 bp, Artificial Sequence
  ENSG00000168234_25 (sequence is synthesized)
ttttattcttcattgctaatttttgtcatttaatttacctccatgcccggtactgcaaacctgtggttttgaagaatctaaatacctcagtcacttttaagaatctctgccataatttgg

SEQ ID NO: 549456 - DNA, 120 bp, Artificial Sequence
  ENSG00000168234_26 (sequence is synthesized)
ctcaatgtttaaggttagatttttaaagaaatttttattgagctaaaggatatcattttagggtatcgtttatttacaaattcttttggctgaaacatgatctcatattaatattttaat

SEQ ID NO: 549457 - DNA, 120 bp, Artificial Sequence
  ENSG00000168234_27 (sequence is synthesized)
atttcttttcaaaataaaacagaaaagcaagtagaatgttggcaaattttatctgatttgaccttgttttgagggaatagtcataatttctttgaaagaagttatttctcactgattttg

SEQ ID NO: 549458 - DNA, 120 bp, Artificial Sequence
  ENSG00000168234_28 (sequence is synthesized)
gctaaacagtattcatatttcttcatctctgttactgaccacttttcagtagactgtttccaaaatgtgtattcacattgactttctccctgatgtgaattccgtgtgggttttagataa

SEQ ID NO: 549459 - DNA, 120 bp, Artificial Sequence
  ENSG00000168234_29 (sequence is synthesized)
tagtaagagagaagagattgctctcctatattcagtgaatgagaagggaacttttttctgaagagcaaaattggtgcccaaaaatattggacatctgttttttgtttttttttttttttt

SEQ ID NO: 549460 - DNA, 120 bp, Artificial Sequence
  ENSG00000168234_30 (sequence is synthesized)
ttggcctcccaaagagctgggattactggtgtgagccaccgtgcccggcctggacatctggttttaactagatggaagggaagaacattatgaatctttaaaatacggctgttgccattt

SEQ ID NO: 549461 - DNA, 120 bp, Artificial Sequence
  ENSG00000168234_31 (sequence is synthesized)
atttttctctcttcttaacatgcagcataggtgacaagcttttctgtcatcatcatggagcattctgaatcatgacatttttgtttgagagttcattcttgaattttcagttcaaaatat

SEQ ID NO: 549462 - DNA, 120 bp, Artificial Sequence
  ENSG00000168234_32 (sequence is synthesized)
tgtttgaactattattccacattcaaagattatataaggtcctgtgcttttgaatctttttcaaaacatttatttctgcctgcttaaaaaaaatacttttatttccccacagagagttca

SEQ ID NO: 549463 - DNA, 120 bp, Artificial Sequence
  ENSG00000168234_33 (sequence is synthesized)
ggacttcagattagtttgtgttcagctcacttaactggatagacaattttgcgttttgcaacaccatcctgtaggttttctttactagtcaaagtgtaggtctttttaaaatttttaatc

SEQ ID NO: 549464 - DNA, 69 bp, Artificial Sequence
  ENSG00000168234_34 (sequence is synthesized)
tgctcactgcaacctctgtcacccgggtttaagcgattcttctgcctgagcctcccaagtagctgggat

SEQ ID NO: 549465 - DNA, 90 bp, Artificial Sequence
  ENSG00000168234_35 (sequence is synthesized)
cgattcttcaagttcctgccaccgtgcctggctaatttttgcagttttagtagaggcagggttccaccaccttggccaggctggtcttga

SEQ ID NO: 549466 - DNA, 120 bp, Artificial Sequence
  ENSG00000168234_36 (sequence is synthesized)
tccacccaccttgtcctctcaaaatgcttacaggcatgaaccactgtgaccggccaggtctttttttttttaaagagtctatcctaggcttggtacagatggcgcctgtggtaaatctgt

SEQ ID NO: 549467 - DNA, 120 bp, Artificial Sequence
  ENSG00000168234_37 (sequence is synthesized)
gttaacatggtggtagaccatggagaatgggtagatggagcttctagactccaaaacaacaaaaccacagtgtgagtacactgtcccattaggttgactgaagtctgagtacattttctg

SEQ ID NO: 549468 - DNA, 120 bp, Artificial Sequence
  ENSG00000168234_38 (sequence is synthesized)
gcctgcgtgccgtgacttatccaacctgtgaactgattgtgatctgcttggtaacttggtttggtgtaaactgctcttaaccctttgctgatgaagaaaataatcatataagtggaacta

SEQ ID NO: 549469 - DNA, 120 bp, Artificial Sequence
  ENSG00000168234_39 (sequence is synthesized)
atctaagaaattttatgcactgttaatagaaggcagtatatgagtggttggaaaactctctcccagcaacagcagagagatgccccttcaaagatacttctctgtggaaaaagttttttg

SEQ ID NO: 549470 - DNA, 120 bp, Artificial Sequence
  ENSG00000168234_40 (sequence is synthesized)
acttctgagaaaacctcagcgcttcctggagaaactcaaaggcgcttgtaagagatgttgagtcagcaggcctctgagcctcttctctgcctaaaaccatgtcagattcttgggaggact

SEQ ID NO: 549471 - DNA, 120 bp, Artificial Sequence
  ENSG00000168234_41 (sequence is synthesized)
aagaatgtgtctctgccttgctcctggagacgataggagagtccacagatgcagagatgtaagaaaaggagaagaaatgaaaagcagaaatggtttaagggaactggcgggaaagacagg

SEQ ID NO: 549472 - DNA, 120 bp, Artificial Sequence
  ENSG00000168234_42 (sequence is synthesized)
aaactcatctgttgactttttccatcctcttcaactcagtggtgtgttggaaaaaggcatcttttttcccccaactattacactgtctgaaaaggtcctaattaaatattcattaaagat

SEQ ID NO: 549473 - DNA, 90 bp, Artificial Sequence
  ENSG00000168234_43 (sequence is synthesized)
acctcaggtgatccacttgacatgaaccaccatgtccagcccattgtggaatagtctttaaacatatttgctcctgcttttttttttttc

SEQ ID NO: 549474 - DNA, 120 bp, Artificial Sequence
  ENSG00000168234_44 (sequence is synthesized)
atagtctttaaacatatttgctcctgcttttttttttttcaagtatcatcacttcaggtatcccttatggcattttccctgacttgtacttaagaaatataattatggtttcttacagtt

SEQ ID NO: 549475 - DNA, 120 bp, Artificial Sequence
  ENSG00000168234_45 (sequence is synthesized)
gagtcaaggtaaaaaatttaaaaaaacccaaaactgtctactggacacactggcttcttctgtcagtgcggcattcttcagtttcccgtttatttcatgtttatctcatcggagtcaggg

SEQ ID NO: 549476 - DNA, 120 bp, Artificial Sequence
  ENSG00000168234_46 (sequence is synthesized)
gggcgaaggcgcggcttggggacccgggaggggccggggcgcgggggctgcaggaagtggaggcggccgccgctcggggaccggcttggcggggtgagagacacccggaaacggattccg

SEQ ID NO: 549477 - DNA, 120 bp, Artificial Sequence
  ENSG00000168234_47 (sequence is synthesized)
cttggcggggtgagagacacccggaaacggattccgcttcggggcccgcgcgagttgggtgcttcggagggcgcgagaggagcgggcgggtgctgctgagtaatccccgcggcggcggcc

SEQ ID NO: 549478 - DNA, 120 bp, Artificial Sequence
  ENSG00000168234_48 (sequence is synthesized)
acctgagcaaggagaggttctctgtgcttagtgtcaaatcaacagtgccttgacatctttccacactgctttggaacttgcagtagaccagagagaaattcaacatgtctgtctgtatga

SEQ ID NO: 549479 - DNA, 120 bp, Artificial Sequence
  ENSG00000168234_49 (sequence is synthesized)
aattggtaaatatgaaatgtctgtccagcctcttgttaagaagtagtattaatgcagtattttagctttcatgccattcagtgtgtgtctacaaaatgcttggtgccttctgtagtaaga

SEQ ID NO: 549480 - DNA, 120 bp, Artificial Sequence
  ENSG00000168234_50 (sequence is synthesized)
atgatacttctctctgattctcattacgtttttataacattttttctttacagcattttgattttttaggataataggtgatgttaaatgaattgattaaatgaccagaaataccttatt

SEQ ID NO: 549481 - DNA, 120 bp, Artificial Sequence
  ENSG00000168234_51 (sequence is synthesized)
ggactgcattagaattcaaagctctttgttcctccttcccactaatgtttacttgagaagaaaaataggagacaggagatagttggactgaagtcccagtgtttttcaccaactagctct

SEQ ID NO: 549482 - DNA, 120 bp, Artificial Sequence
  ENSG00000168234_52 (sequence is synthesized)
gtgctgaggagaggagcccaggtctgcgggtgggggacccgtcctctgagaagcctgcagcttctcctccaggacccttccagcccacctggctggctgtggggataatgggcacttggg

SEQ ID NO: 549483 - DNA, 120 bp, Artificial Sequence
  ENSG00000168234_53 (sequence is synthesized)
agcattggagggggaggaagcatagagaaagcagcaggagacgcacctggaagcccaggggagggaagtccacctccctgcaagtgtagggcagtgagaggagccctggcaccagcagag

SEQ ID NO: 549484 - DNA, 120 bp, Artificial Sequence
  ENSG00000168234_54 (sequence is synthesized)
ataacatagcacagatattcttaaccccactttgcagacagtgaaactcaggcacaaaaaggcaaattgacttatcccaattaattattcctgttatcagcagagcaatgaatagaaagc

SEQ ID NO: 549485 - DNA, 120 bp, Artificial Sequence
  ENSG00000168237_0 (sequence is synthesized)
agtacttccgttctccagcgctgggcaccgcggccggagctgtgggctggcagccatgggtgccaggcagtgctgagagcagtggggcatggctgcagccctgcaggtcctgccccgctt

SEQ ID NO: 549486 - DNA, 120 bp, Artificial Sequence
  ENSG00000168237_1 (sequence is synthesized)
ggcccgagcccccttgcatccactcctctggcggggctcagtggcccgtctggccagcagcatggccttggcagagcaggccaggcagctgtttgagagtgctgtaggtgcagtgctgcc

SEQ ID NO: 549487 - DNA, 120 bp, Artificial Sequence
  ENSG00000168237_2 (sequence is synthesized)
gggccccatgctgcaccgggcactatccttggaccctggtggcagacagctgaaggtgcgggaccggaactttcagctgaggcaaaacctctacctggtgggctttggcaaggctgtgct

SEQ ID NO: 549488 - DNA, 120 bp, Artificial Sequence
  ENSG00000168237_3 (sequence is synthesized)
gggtatggcagctgcagctgaggaactactgggccagcatcttgtgcagggcgtgatcagcgttcccaaggggatccgtgctgccatggagcgtgccggcaagcaggagatgctgctgaa

SEQ ID NO: 549489 - DNA, 120 bp, Artificial Sequence
  ENSG00000168237_4 (sequence is synthesized)
gccacatagccgtgtccaggtattcgagggtgcggaggacaacctcccggaccgcgatgcgctgcgggctgcactggccatccagcaactggctgagggactcacagctgatgacctgct

SEQ ID NO: 549490 - DNA, 120 bp, Artificial Sequence
  ENSG00000168237_5 (sequence is synthesized)
gctcgtgctgatctcaggtgggggttcagctctgctgcctgcccccatcccacctgtcacactggaggagaagcagacactcactagactgctggcagcccgtggagccaccatccagga

SEQ ID NO: 549491 - DNA, 120 bp, Artificial Sequence
  ENSG00000168237_6 (sequence is synthesized)
gttgaacaccattcggaaggccctgtcccagctcaagggtggggggctggctcaggccgcctaccctgcccaggtggtgagcctcatcctgtcagatgtggtgggggaccctgtggaggt

SEQ ID NO: 549492 - DNA, 120 bp, Artificial Sequence
  ENSG00000168237_7 (sequence is synthesized)
gattgccagtggccccaccgtggccagttcccacaatgtgcaagattgcctgcatatcctcaatcgctacggcctccgtgcagccctgccacgttctgtgaagactgtgctgtctcgggc

SEQ ID NO: 549493 - DNA, 120 bp, Artificial Sequence
  ENSG00000168237_8 (sequence is synthesized)
cgactctgacccccatgggccacacacctgtggccatgtcctgaatgtgatcattggctctaatgtgctggcgctagctgaggcccagcggcaggccgaggcactgggctaccaggctgt

SEQ ID NO: 549494 - DNA, 120 bp, Artificial Sequence
  ENSG00000168237_9 (sequence is synthesized)
ggtgctgagtgcagccatgcaaggtgatgtaaaaagtatggcccagttctacgggctgctggcccatgtggctagaacccgcctcaccccatccatggctggggcttctgtggaggaaga

SEQ ID NO: 549495 - DNA, 120 bp, Artificial Sequence
  ENSG00000168237_10 (sequence is synthesized)
tgcacagctccatgagctggcagctgagcttcagatcccagacctgcagctggaggaggctctggagaccatggcatggggaaggggcccagtctgcctgctggctggtggcgagcccac

SEQ ID NO: 549496 - DNA, 120 bp, Artificial Sequence
  ENSG00000168237_11 (sequence is synthesized)
agtacagctgcagggctcgggcaggggtggccggaaccaggaactggccctgcgtgttggagcagagttgagaaggtggccgctggggccgatagatgtgctgtttttgagcggtggcac

SEQ ID NO: 549497 - DNA, 120 bp, Artificial Sequence
  ENSG00000168237_12 (sequence is synthesized)
cgatgggcaggatgggcccacagaggctgctggggcctgggtcacacctgagcttgccagccaggctgcagctgagggcctggacatagccaccttcctagcccacaatgactcacatac

SEQ ID NO: 549498 - DNA, 120 bp, Artificial Sequence
  ENSG00000168237_13 (sequence is synthesized)
cttcttctgctgcctccagggtggggcacacctgctgcacacagggatgacaggtaccaatgtcatggacacccacctcttgttcctgcggcctcggtgatggcataggtcacattttgg

SEQ ID NO: 549499 - DNA, 120 bp, Artificial Sequence
  ENSG00000168237_14 (sequence is synthesized)
gagttcagaggaggcctacaagggcaaggtcagatggcagagcaaggttggtcctcagggcctctctaagccttagggcccctcctctccttggccttggctgtttggttaactgtcacc

SEQ ID NO: 549500 - DNA, 120 bp, Artificial Sequence
  ENSG00000168237_15 (sequence is synthesized)
cctgaggatgaggacaagcccctcggccagttcagcgttcccgtgcttctcccttgggcagcctctctcttgagcccctcaccctgtttctttctgtgaagcgagaatgtctgaaaataa

SEQ ID NO: 549501 - DNA, 120 bp, Artificial Sequence
  ENSG00000168237_16 (sequence is synthesized)
ataggaccatgccatgggttctcagtgcgccttccctcagagtgaggcctcacgggggagccgctgggaggggagcgtggtacggctgcagccacagtaccagggcctggcaggactctt

SEQ ID NO: 549502 - DNA, 120 bp, Artificial Sequence
  ENSG00000168237_17 (sequence is synthesized)
aacacccctctactgggctgggtacgtgcaggatgtgcctcgcataacgggagcctgtgcccatccctctggagtgtgtgagggttgagcttggctcctgacagctttgatgtgcgtgag

SEQ ID NO: 549503 - DNA, 120 bp, Artificial Sequence
  ENSG00000168237_18 (sequence is synthesized)
cagagaccccagggaggacaggcctaaagactgcagtctggggtgaccagccacccacccacccaaccatgactccaccatggcactgtcaccatggcttctccagcctcagcttgtagg

SEQ ID NO: 549504 - DNA, 120 bp, Artificial Sequence
  ENSG00000168237_19 (sequence is synthesized)
cctcgttggatggatgtcctttctgtctttggacagcccttagccacatactgcacttctggttgagctgaagtttgtcccaccccccagtgctgtttccttgtgacagcccttgtccta

SEQ ID NO: 549505 - DNA, 120 bp, Artificial Sequence
  ENSG00000168237_20 (sequence is synthesized)
ggctgaacatccctagttccttcagccactcctctggggaccaagtccagaccctgaagtcagcccttcagtgggggtcccagcactgggatggtgggtccagccagtgatgaggtccag

SEQ ID NO: 549506 - DNA, 120 bp, Artificial Sequence
  ENSG00000168237_21 (sequence is synthesized)
tgacccacacctcttcctgtgaccactggcgggagaagaggcaagtgggaatagaggaacggctgtgttggcctggccagcagcctgggttgagagagggaggtgccactgtcctgcctc

SEQ ID NO: 549507 - DNA, 120 bp, Artificial Sequence
  ENSG00000168237_22 (sequence is synthesized)
cttttgagcccccttgctcagtgtcagaaccctccgctggctgtccccgccgtgcgccacggctccaatccctatatgagtgagcagtagaatcacataggaataaaaagccatagagaa

SEQ ID NO: 549508 - DNA, 120 bp, Artificial Sequence
  ENSG00000168237_23 (sequence is synthesized)
cagcgaggcctggggctgctcttgcaggcacttcttccaccccaaccctcccctcctccctgagggtgtggaggggccctgggccagggctggcaggactttcccctgggaagggtttcc

SEQ ID NO: 549509 - DNA, 120 bp, Artificial Sequence
  ENSG00000168237_24 (sequence is synthesized)
cttccccacctgggctctgggcagcctagcttgcagacagttcatgacctgggggcctggctcacacagggcaggctggagattgggagggaggtaaacgtggtaagcgggctctgggga

SEQ ID NO: 549510 - DNA, 120 bp, Artificial Sequence
  ENSG00000168237_25 (sequence is synthesized)
ccagggaggtttaggaaaaggggagcttgcaccccactgggatgcgcaggcaccgcttcctttccttctgtgctggcatggagttcctgctgactagggtcacagtctctggggttatgg

SEQ ID NO: 549511 - DNA, 120 bp, Artificial Sequence
  ENSG00000168237_26 (sequence is synthesized)
tgatcctcgcatgatcctgtgccgtggtgctcctctggcagcgtctacatgtagcctgttcctgcctcagtccttgctcttgggagcatgagtattggcactgggttccaagttccaggc

SEQ ID NO: 549512 - DNA, 120 bp, Artificial Sequence
  ENSG00000168237_27 (sequence is synthesized)
aaaagcaggataggagagctggggcaggggctgcaggagctgagggcctggcagccatgtccccagtgtgtgtgtgggtggtaggtgtgtgagtatacagacgttggtgttggcgtactc

SEQ ID NO: 549513 - DNA, 120 bp, Artificial Sequence
  ENSG00000168237_28 (sequence is synthesized)
agagtgggaatgcatctctgagtgtacacatagatacttagtacagggcacatgactccctgcatccctgctgagggctttgggtatggataggatcttgcaggaggttccccctgctct

SEQ ID NO: 549514 - DNA, 120 bp, Artificial Sequence
  ENSG00000168237_29 (sequence is synthesized)
acattgaccccttccctatacttctgtttgtaggggctgggaggccagggcccggattggaccccatagggccaaatggtctgtgagcctaacccgttagatttgctcactggatacccc

SEQ ID NO: 549515 - DNA, 120 bp, Artificial Sequence
  ENSG00000168237_30 (sequence is synthesized)
agagataagaaaggatgtatttggccacagtctaaatgctgagatgagaaaaccctgcacagtgaatgttttgataggattcattacttgctccataaatgtcaattttggatcattgaa

SEQ ID NO: 549516 - DNA, 120 bp, Artificial Sequence
  ENSG00000168237_31 (sequence is synthesized)
ggcatgtggtctgcagaagaggaggacgtggctgggtggcagggctggtctccaaggacgagtaagatcctgcagctgcaggcttcaggaagtctcctggggctatcagatggctccttc

SEQ ID NO: 549517 - DNA, 120 bp, Artificial Sequence
  ENSG00000168237_32 (sequence is synthesized)
ttgtagcagcagctgtggggtccactggccctgagccctcagaggggcggccgtgggggacctcctgtcttttgccttgcaagggcctcagttgtgctttttccctctaggcagccatgg

SEQ ID NO: 549518 - DNA, 120 bp, Artificial Sequence
  ENSG00000168237_33 (sequence is synthesized)
tctcaggtcttcgagagatcaggtctgagcccccggggtcacagggtaaagttaggagcaagggaggtggtgaggagcctggatggtgactcctgggttgccttgggctagtcgtctggc

SEQ ID NO: 549519 - DNA, 120 bp, Artificial Sequence
  ENSG00000168237_34 (sequence is synthesized)
ctcccctgagctgtggagtcctccccctgagctgaccttttcggtgacagtgagagggtgcatggggagcacataatgcagggcctgacacatccgtagagtccttggaaaatgtcactg

SEQ ID NO: 549520 - DNA, 120 bp, Artificial Sequence
  ENSG00000168237_35 (sequence is synthesized)
ctattgctgctgtctgtactaatgtcacctggggctaggccctcagacctcatggagtcctctccttgatcttccattgtgtgccccctgccctgcctcctgttctagtctcttaaggag

SEQ ID NO: 549521 - DNA, 120 bp, Artificial Sequence
  ENSG00000168237_36 (sequence is synthesized)
tagttagttcttccggtgcctactgggacctggggtaccccaaggcaggggcaacctcaggtggccaggatgtggtgactgtacacatattgcatatccacaggggggcaccctaacccc

SEQ ID NO: 549522 - DNA, 120 bp, Artificial Sequence
  ENSG00000168237_37 (sequence is synthesized)
gcagaatggaactcttgctaagccagagctgtatttggtggcccatggtgggagagggaagaacaataataagttgtggaataaaagccatggagaggagcgggaattacttaatctggc

SEQ ID NO: 549523 - DNA, 120 bp, Artificial Sequence
  ENSG00000168243_0 (sequence is synthesized)
ctcatctgacgactgacagctgctgccaccgccagcctctgtcccttgcccaggcctgtcacacggctgcctctcagcaggggcagtagaatgaaagagggcatgtctaataacagcacc

SEQ ID NO: 549524 - DNA, 120 bp, Artificial Sequence
  ENSG00000168243_1 (sequence is synthesized)
actagcatctcccaagccaggaaagctgtggagcagctaaagatggaagcctgtatggacagggtcaaggtctcccaggcagctgcggacctcctggcctactgtgaagctcacgtgcgg

SEQ ID NO: 549525 - DNA, 120 bp, Artificial Sequence
  ENSG00000168243_2 (sequence is synthesized)
gaagatcctctcatcattccagtgcctgcatcagaaaacccctttcgcgagaagaagttcttttgtaccattctctaactccgtgtgtgatgaaaacgcctccttttctgaccttcaaag

SEQ ID NO: 549526 - DNA, 120 bp, Artificial Sequence
  ENSG00000168243_3 (sequence is synthesized)
tcccctgtagagaccatgcatgctctaagccttagggagtgagaccaacacccatccctgcccagccaacagtggccggggcttgtcttatgtttccatctgttttcttcgtggcattca

SEQ ID NO: 549527 - DNA, 120 bp, Artificial Sequence
  ENSG00000168243_4 (sequence is synthesized)
atttcatttttttccttttcattttcatgttattttcattattggcaaagaaaatcaaaatgtttatagccaaataacaaatgtgccatgtaaaagtaagtctggacttaagagtttaaa

SEQ ID NO: 549528 - DNA, 120 bp, Artificial Sequence
  ENSG00000168243_5 (sequence is synthesized)
atttttaaacatcagtttccaagtttatatcatattaatacatttcagtggataatttattttaaaaaaaaaactatgcctaaatatcccttatttgcaatattcagtatcaaattagag

SEQ ID NO: 549529 - DNA, 120 bp, Artificial Sequence
  ENSG00000168243_6 (sequence is synthesized)
tcctttcctggagaaagcagctgcagaggttctgtatttcctgcatttccatcatcctagtaaaaagacaacaacccacaggattggaatggttttcttttgttttttttttgttgttgt

SEQ ID NO: 549530 - DNA, 120 bp, Artificial Sequence
  ENSG00000168243_7 (sequence is synthesized)
acaggcgtgagccaccacacccggccgtggaatggttttcttagcatatcctcctggggccgtggcgccccggctgtgggccgtggtggatgtcccttgtttcagtggtcctacaaaggt

SEQ ID NO: 549531 - DNA, 120 bp, Artificial Sequence
  ENSG00000168243_8 (sequence is synthesized)
ttgtttcagtggtcctacaaaggtagatggtgggcggacaccgaagtcaacttgactgtaaaagtaccccataccgttgacgcgctgtggcagacctgtgggtgcggtctcccctctcca

SEQ ID NO: 549532 - DNA, 120 bp, Artificial Sequence
  ENSG00000168243_9 (sequence is synthesized)
aatgccacctcttcctgctccctcctcttttggctcctactcagtagttccattgtgggctgcagtaatataaggacctgttctggacacagcactgggcccgctggggttttagtaggg

SEQ ID NO: 549533 - DNA, 120 bp, Artificial Sequence
  ENSG00000168243_10 (sequence is synthesized)
cagccccttccctgcaggagtgaggcatggtgacagcagtcccctatgtgcccccaagtcatctgagcattggtgtgcattaaggtactcaatcttccaacaataaataccataagtgca

SEQ ID NO: 549534 - DNA, 120 bp, Artificial Sequence
  ENSG00000168243_11 (sequence is synthesized)
cggtgccacagggacgaggcctggagagcagtcgctcctagaaccggggcgcgaagggcacccccgcctccagcacgcgccctccgccctcccggcctcgctccccccggagtgggggcc

SEQ ID NO: 549535 - DNA, 120 bp, Artificial Sequence
  ENSG00000168243_12 (sequence is synthesized)
tcgccggcccctggtccccgtcactcagcaacgtcgggtcagccttcgccgggttagtggcgacgcggccgcgcgaattcgcacaggggcagtagaatgaaagagggcatgtctaataac

SEQ ID NO: 549536 - DNA, 120 bp, Artificial Sequence
  ENSG00000168243_13 (sequence is synthesized)
cgtttgcacccgagcccggcccgcgccccgatgcggagcgatgccgctcggcctggccgccccccgcgagcaccgcgctgcagacgaagcccgcgcgtgatcccgctccgggtgacctca

SEQ ID NO: 549537 - DNA, 120 bp, Artificial Sequence
  ENSG00000168243_14 (sequence is synthesized)
tggcacaatctcagctcaccgcaacctccactcgcaggttcaagtgatcctcatgtctcagcctccctagtagctgggatgacaagcacacgccaacatgcctggctcatttttgtattt

SEQ ID NO: 549538 - DNA, 62 bp, Artificial Sequence
  ENSG00000168243_15 (sequence is synthesized)
ttcaccatgtcggccaggctggtctccaactactgggtgcacccggccgtatgtcttagagt

SEQ ID NO: 549539 - DNA, 120 bp, Artificial Sequence
  ENSG00000168243_16 (sequence is synthesized)
gtgtgagccagtgcacccggccgtatgtcttagagtgaggggaaactgaggcacaaagcgtttatgtagtttgcccaaggttacacatggtaagcagaaaaactgggatttgagggcagg

SEQ ID NO: 549540 - DNA, 120 bp, Artificial Sequence
  ENSG00000168243_17 (sequence is synthesized)
cagcccggccccagagttcccttagccccctgaactgtgctaccttccaggtctacctgtttgcaggtagggagacccacaaactatcataactgcacaccgtgaagcaaacacctttgt

SEQ ID NO: 549541 - DNA, 120 bp, Artificial Sequence
  ENSG00000168243_18 (sequence is synthesized)
tgcagtaacccgtggcacacttcacttcccacattctccaggaggaagccgtattctggtagtttaaggaaggtgattcatggatgccccaaggaaaggctagacatcgatgaattagct

SEQ ID NO: 549542 - DNA, 120 bp, Artificial Sequence
  ENSG00000168243_19 (sequence is synthesized)
tgtaagtttgttctattctgtttatttggaaactgcctctctccctagttctgaaagagacttgctgtgtgatagagaacaggccatttgtgcctgaaatgttctaacctgcaaattggg

SEQ ID NO: 549543 - DNA, 120 bp, Artificial Sequence
  ENSG00000168243_20 (sequence is synthesized)
tttaatggtaattatcctgcctttctgtctgggaggaaacagagatgctacatagatgaaagctctgattatcatttaaaacaaataaatgtactaaatgccgtggtataatatagggaa

SEQ ID NO: 549544 - DNA, 120 bp, Artificial Sequence
  ENSG00000168243_21 (sequence is synthesized)
gaatggatgacttcaaagagaccatggttccgttggaggcataaaattgcctgcaaagaggcaaatgtaatttccagaccaattaatgacttgctgccctcgtaaatggatttaggacat

SEQ ID NO: 549545 - DNA, 120 bp, Artificial Sequence
  ENSG00000168243_22 (sequence is synthesized)
ctttgttccttgcttcttttgttaaaactcattcttagtttcattatcagctcactaataataccagtgttgttaagatgctcaaactagagcagaattgtatgctggatgtgacgctag

SEQ ID NO: 549546 - DNA, 120 bp, Artificial Sequence
  ENSG00000168243_23 (sequence is synthesized)
gacctcagatcctttgatagtgcagttatgaccaggatctctttattctgtgcttcacgtcaacatcattaacccgatgaagcgaagcacaagtcataaaggcacatcagagaagccgag

SEQ ID NO: 549547 - DNA, 120 bp, Artificial Sequence
  ENSG00000168243_24 (sequence is synthesized)
aaagcggggccgtacagagagcatcaaaatcaggtcagaaaaatgctgctttcctcttccaccaaaccttctccctgttgtttttacatgccccgtccctccagattcagcctccgtttt

SEQ ID NO: 549548 - DNA, 120 bp, Artificial Sequence
  ENSG00000168243_25 (sequence is synthesized)
gttctctctccttttccttttcctcctctcttccttaccttcccctgtgagatgcttttctgtccttttactgcacctcttccagacctatggcatttggggacgggtcacccttcctag

SEQ ID NO: 549549 - DNA, 77 bp, Artificial Sequence
  ENSG00000168243_26 (sequence is synthesized)
tccagacctatggcatttggggacgggtcacccttcctagagtgatcctgaatccagctgcctttctgtcgtccagg

SEQ ID NO: 549550 - DNA, 62 bp, Artificial Sequence
  ENSG00000168243_27 (sequence is synthesized)
tccctcttcttagatggagatttctgcacatgagctgtgagatccacagacatgtcactgag

SEQ ID NO: 549551 - DNA, 120 bp, Artificial Sequence
  ENSG00000168243_28 (sequence is synthesized)
tctgcacatgagctgtgagatccacagacatgtcactgagctcccccactctgtcagtggaagatgaatggaataaagcctgcttgcattgtggagtgcagctgtggggacagttgtcat

SEQ ID NO: 549552 - DNA, 120 bp, Artificial Sequence
  ENSG00000168243_29 (sequence is synthesized)
ttttgtgttttcagcttaactgtccagcatctcccctcccttcctacagcagggacatcatgccttagatataaacttagtggtgtgcagtacccaccgtggaagctgaagaagggaagt

SEQ ID NO: 549553 - DNA, 120 bp, Artificial Sequence
  ENSG00000168243_30 (sequence is synthesized)
atttcctgtctctcaggcacaccccgcttccagccccataccagtcgggaagtggtcattgacctggggtggactacctggacccttgcttggggctatgagcctggagaatgtgacaca

SEQ ID NO: 549554 - DNA, 120 bp, Artificial Sequence
  ENSG00000168243_31 (sequence is synthesized)
aatgaagggatgctgagactcatttcaaggaagccaccgtggtccggggttggtagtcatacagcaaggcaggtgggtagggctggcaggctgcagggatggtgtgtccactggtagcaa

SEQ ID NO: 549555 - DNA, 120 bp, Artificial Sequence
  ENSG00000168243_32 (sequence is synthesized)
tgtccagggatggcagcgtcctgggaatgtcatttctgctccactccttggactcgctgagctgtctccgcctccacctatcttcctacagacctcccttctagttttctgtcaattctt

SEQ ID NO: 549556 - DNA, 120 bp, Artificial Sequence
  ENSG00000168243_33 (sequence is synthesized)
tgagccagcaaactccatccagtacattctttcttctttcatgaaagagcttgagttggatgtaaatatatatgacctaacaattccacccctaggtgtataccctacagaaatgtgtac

SEQ ID NO: 549557 - DNA, 120 bp, Artificial Sequence
  ENSG00000168243_34 (sequence is synthesized)
atgtgttcatccagagacatgctctaaatcttcacaaaaacactctccataataaccccgaacaggaaagcaccccaatgcccatgttggctggataagcacattagggtatattcacac

SEQ ID NO: 549558 - DNA, 120 bp, Artificial Sequence
  ENSG00000168243_35 (sequence is synthesized)
gatggaatcccagactgcaatgggaatgagctgcaactccacccccaacttggagtgtattcaccaaccctagtgttgaacgagataaggcaaaaatgcaccataggattccatttatat

SEQ ID NO: 549559 - DNA, 120 bp, Artificial Sequence
  ENSG00000168243_36 (sequence is synthesized)
aaagtttaaaacccagcaaaattcatccatgcggttgcaagtagagatcagtcctaagaagacagtaaccagaagcgggcatgaggtggtgcttctggggtgttctgtttcttgatctgg

SEQ ID NO: 549560 - DNA, 120 bp, Artificial Sequence
  ENSG00000168243_37 (sequence is synthesized)
ttgccggttacctgggtgctttccgtttgtgaacattcttggagctgtacacttttgatctgggcacttttctgtgtgtatgttatacttcaataaaaagttgggctttgtgactagcaa

SEQ ID NO: 549561 - DNA, 120 bp, Artificial Sequence
  ENSG00000168243_38 (sequence is synthesized)
ggccctgccggcagggcagcaagtcgggagcagctgtgggtggtgtcctacaggctctgctgtggaggaagagctgctgccctgagtggaggggcagtagaatgaaagagggcatgtcta

SEQ ID NO: 549562 - DNA, 120 bp, Artificial Sequence
  ENSG00000168246_0 (sequence is synthesized)
cggcggcggcgggcccggacgagcgtccggaggtggcggacgaggcgccgggggcccccatgggcgggtgtgtgggcgcccagcacgactcctcgggcagcctcaacgagaactcggagg

SEQ ID NO: 549563 - DNA, 120 bp, Artificial Sequence
  ENSG00000168246_1 (sequence is synthesized)
cagcacgactcctcgggcagcctcaacgagaactcggagggcaccggagttgctctaggtcgtaaccagcctttgaaaaaggagaaaccaaaatggaaaagcgattatcctatgacagat

SEQ ID NO: 549564 - DNA, 120 bp, Artificial Sequence
  ENSG00000168246_2 (sequence is synthesized)
ggacaactacgcagcaagagggatgaattttgggatacagcaccagcttttgaaggccggaaagagatttgggatgccttgaaggctgctgcacatgcttttgagagcaatgatcatgaa

SEQ ID NO: 549565 - DNA, 120 bp, Artificial Sequence
  ENSG00000168246_3 (sequence is synthesized)
ctggcacaagcaatcattgatggtgcaaacataacattaccacatggtgcacttacagagtgctacgatgaactggggaacagatatcagcttccagtgtattgcttggcaccgccaatc

SEQ ID NO: 549566 - DNA, 120 bp, Artificial Sequence
  ENSG00000168246_4 (sequence is synthesized)
aacatgatagaggaaaagagcgacatagagactctggatattcctgagccaccacccaattctggatatgaatgtcagcttcgtttgcgcctttccacaggcaaagacctcaagcttgtg

SEQ ID NO: 549567 - DNA, 120 bp, Artificial Sequence
  ENSG00000168246_5 (sequence is synthesized)
gttcgcagcacagacacagtattccacatgaagagacggttgcatgcagcagagggagtggaaccaggtagtcagcggtggtttttttctggcagacctctcactgacaaaatgaagttc

SEQ ID NO: 549568 - DNA, 120 bp, Artificial Sequence
  ENSG00000168246_6 (sequence is synthesized)
gaagagctgaagatcccaaaggactatgttgtacaggttatagtgagccaacctgtgcagaacccaacaccagtggagaactgaactgagccctgttggccagctcccacatccctctgc

SEQ ID NO: 549569 - DNA, 120 bp, Artificial Sequence
  ENSG00000168246_7 (sequence is synthesized)
tcctttttatggttcttgttgtcatttcctactctgcggcgtgaaatctatttcactgctctaaattccctatgaatggatttagttctgaggaattaccagtgaaaaattccatctgtg

SEQ ID NO: 549570 - DNA, 120 bp, Artificial Sequence
  ENSG00000168246_8 (sequence is synthesized)
atggagaccaacaaaaataataaaacacaaagagccaggctttgagactcatgtaattacaatttctaatttgaaaggcagttaagaaatagataaccatttattttagaacactcaaca

SEQ ID NO: 549571 - DNA, 120 bp, Artificial Sequence
  ENSG00000168246_9 (sequence is synthesized)
actatgtaatggctatatttcagtgacttggactgtaaatgaaacattgcatccatgaaggacagcaccaagcacctttttgaatacagaatttttttagaaaaatatatcaaattatat

SEQ ID NO: 549572 - DNA, 73 bp, Artificial Sequence
  ENSG00000168246_10 (sequence is synthesized)
ttaatggaaactgaaaagagcagtatttgaggttgcttctattctggttttttattcttagctcaattaatat

SEQ ID NO: 549573 - DNA, 120 bp, Artificial Sequence
  ENSG00000168246_11 (sequence is synthesized)
tgcttctattctggttttttattcttagctcaattaatatttagccataaatgagtagagactggcaaattgtgctttagtgttgctttcctcatccccacatcttgagctccttattta

SEQ ID NO: 549574 - DNA, 120 bp, Artificial Sequence
  ENSG00000168246_12 (sequence is synthesized)
tactcagttgaaaagtcgctgtcatcttgctgcataagtattttgaaaggtctgtataacgaagccatttttatatccaggcttagaaggtcactactatatagtaccttcattgatcta

SEQ ID NO: 549575 - DNA, 120 bp, Artificial Sequence
  ENSG00000168246_13 (sequence is synthesized)
tctattctgcttggaacttttcatagctaagtataacccccaaatgcatggttcctgggtcaggagacaccaaaatcaattatagctgttcccactcaagttaataaagtaaatgatttc

SEQ ID NO: 549576 - DNA, 120 bp, Artificial Sequence
  ENSG00000168246_14 (sequence is synthesized)
ctccactttgcatggaggggtgtaaggaaagcctattttatctgtgcctgggagaactgtgcctattttcagtcttttagaggaaatttcaactcaaaatttttaagtgtgaaagattta

SEQ ID NO: 549577 - DNA, 120 bp, Artificial Sequence
  ENSG00000168246_15 (sequence is synthesized)
ctggtgtcacataaacattagcagtgagaccaaataatgaaacattgctttataccttagtgctttccagttcactgttacctctagtcatggtagatgacaattttcctccctcatctt

SEQ ID NO: 549578 - DNA, 120 bp, Artificial Sequence
  ENSG00000168246_16 (sequence is synthesized)
ttgtagcaaagaagcaaattaagagccttttgcaagttagattaggggactgaaaaatccagggagataacctgattcttctatactatgactggagtaaagctgccaagagttaggttg

SEQ ID NO: 549579 - DNA, 120 bp, Artificial Sequence
  ENSG00000168246_17 (sequence is synthesized)
aatttggagccttttaaaagttggttccataagtgagaaggggggctaacatgtgaccactgtgcccctgagaatccatgagatggaaaagtacagacaagaaggcacttaacgctgttc

SEQ ID NO: 549580 - DNA, 120 bp, Artificial Sequence
  ENSG00000168246_18 (sequence is synthesized)
tcagttggaaaatgtcagccctccacacctgtttggatgtgaagtgcattattaattttaatgacaaaatgaaactgctaattagtttaaatgtaatgtttaaatggtattgaatttcct

SEQ ID NO: 549581 - DNA, 120 bp, Artificial Sequence
  ENSG00000168246_19 (sequence is synthesized)
attgcctgattaaatatatctgtaattgtaacatcatgtttctgagagctttaactacttccttatttttatgcaatcattttaaagattgtggctatatctaatttaaatttgctgatg

SEQ ID NO: 549582 - DNA, 120 bp, Artificial Sequence
  ENSG00000168246_20 (sequence is synthesized)
attgaatctaaattcaagtgaagaccacagcattaatcccaaaggagattttttttatgtttagaggtggagatattagggtaaatcagtatattgctcctgtcatcaaagtttttgttc

SEQ ID NO: 549583 - DNA, 120 bp, Artificial Sequence
  ENSG00000168246_21 (sequence is synthesized)
atttgtgtgccacatcgaatagcagcacttctcaaagtttgtcaactggaaaaaagtgtttaaaactgtttttttcttaagcagatttggtgatgtcatcaatatctatgatatcgattg

SEQ ID NO: 549584 - DNA, 120 bp, Artificial Sequence
  ENSG00000168246_22 (sequence is synthesized)
gtaaaaggtctttctttgttgaggatttgagctctctttttaagagtttattttattttaaaggaacatatgctttgaataacaattctctgggcatgtttaactaacctaggtgggaaa

SEQ ID NO: 549585 - DNA, 120 bp, Artificial Sequence
  ENSG00000168246_23 (sequence is synthesized)
accatggtgctgtttaattgtaaatagattgatataagattggaccagtacttgatgtgtataattttagtatgtagggtttatgtgctttttttaaaaaaaaaaaaaaggttcaatttt

SEQ ID NO: 549586 - DNA, 120 bp, Artificial Sequence
  ENSG00000168256_0 (sequence is synthesized)
cgccgcgccgcttcccccacctcgcaccagacctctgaaattgccctcggagactcggcctctcctataaggacgatcgtcctctcagctggagaacaaggccatgcctcagctcctacg

SEQ ID NO: 549587 - DNA, 120 bp, Artificial Sequence
  ENSG00000168256_1 (sequence is synthesized)
ccaggcggaagcgggagaggaaggccgacccccaagagcgccccttcagggggtccatccggccttgatctcagatgggggggtgtttgcggagggcggggcatcgcctcaacagctggg

SEQ ID NO: 549588 - DNA, 120 bp, Artificial Sequence
  ENSG00000168256_2 (sequence is synthesized)
ggctgcatcatggcaggaacgagtttccctgagccacggagctgcaggtcgcctcctctactaccctgctacccggttacctcttcgcctcttggtcgtcgagcagctccggctcggtcg

SEQ ID NO: 549589 - DNA, 120 bp, Artificial Sequence
  ENSG00000168256_3 (sequence is synthesized)
ccgccattaccacatcgcactccgcggcagccgccatcttaccgccgggaccagagagctgggtgggaggccggcggtgaagagcacttccggttggagcatagagcagctccgcggcgc

SEQ ID NO: 549590 - DNA, 120 bp, Artificial Sequence
  ENSG00000168256_4 (sequence is synthesized)
cgcgcccagaagggctccctcgggctcgtctaccagagagaggctccgcttggggccagagcggcctcccgcccccggatgtccacggtggtctccgcgccggggcgggagcccaggggc

SEQ ID NO: 549591 - DNA, 120 bp, Artificial Sequence
  ENSG00000168256_5 (sequence is synthesized)
tgtgccggttgaaaactaagcatggggaagagctgcaaggtggtcgtgtgtggccaggcgtctgtgggcaaaacttcaatcctggagcagcttctgtatgggaaccatgtagtgggttcg

SEQ ID NO: 549592 - DNA, 120 bp, Artificial Sequence
  ENSG00000168256_6 (sequence is synthesized)
gagatgatcgagacgcaggaggacatctacgtgggctccattgagacagaccggggggtgcgagagcaggtgcgtttctatgacacccgggggctccgagatggggccgaactgccccga

SEQ ID NO: 549593 - DNA, 120 bp, Artificial Sequence
  ENSG00000168256_7 (sequence is synthesized)
cactgcttctcttgcactgatggctacgtcctggtctatagcacagatagcagagagtcttttcagcgtgtggagctgctcaagaaggagattgacaaatccaaggacaagaaggaggtc

SEQ ID NO: 549594 - DNA, 120 bp, Artificial Sequence
  ENSG00000168256_8 (sequence is synthesized)
accatcgtggtccttggcaacaagtgtgacttacaggagcagcggcgtgtagacccagatgtggctcagcactgggccaagtcagagaaggtgaagctgtgggaggtgtcagtggcggac

SEQ ID NO: 549595 - DNA, 120 bp, Artificial Sequence
  ENSG00000168256_9 (sequence is synthesized)
cggcgctccctcctggagccctttgtctacttggccagcaagatgacgcaaccccagagcaagtctgccttccccctcagccggaagaacaagggcagcggctccttggatggctgaaga

SEQ ID NO: 549596 - DNA, 120 bp, Artificial Sequence
  ENSG00000168256_10 (sequence is synthesized)
gctgccgttcctctttcacgatcccagccccatttcagtgtctggggctctggtagatgtgttgagggcaaagtagaggacaagctgtctttcccagtcagccagggagctccccgccag

SEQ ID NO: 549597 - DNA, 120 bp, Artificial Sequence
  ENSG00000168256_11 (sequence is synthesized)
gccacgccccagccactttgctccctctcacctctgggaagtgcaaatactcttggttgacatccccttcctcagccctcccagcctactccccatcccagcttttagaggatctgctcc

SEQ ID NO: 549598 - DNA, 120 bp, Artificial Sequence
  ENSG00000168256_12 (sequence is synthesized)
cgcagcagtgtcccttcttgggtctgagttcctattataggtaggggccccaccctctgggcttcccatcagcgacacacacacacttatggcaccagcctggactccagaaaaagggtg

SEQ ID NO: 549599 - DNA, 120 bp, Artificial Sequence
  ENSG00000168256_13 (sequence is synthesized)
tccaggtattgtgtgtatgcatttagttgtgcacacacaaatatgctcctatactggcattaggcgtctcctcatccctcaccctgacctttctcctgtccttttcttggctggaagaag

SEQ ID NO: 549600 - DNA, 120 bp, Artificial Sequence
  ENSG00000168256_14 (sequence is synthesized)
accctgacctttctcctgtccttttcttggctggaagaagttggcctcctgggagtgtagttttctgttttaaatcccccacccctggctgggctcagtggctcacccctgtaatcccag

SEQ ID NO: 549601 - DNA, 68 bp, Artificial Sequence
  ENSG00000168256_15 (sequence is synthesized)
ttgggaggccaaggcgggtcgattactgccaaaaatacaaaagttagccgggcgtagtggcacatgcc

SEQ ID NO: 549602 - DNA, 77 bp, Artificial Sequence
  ENSG00000168256_16 (sequence is synthesized)
gatcgtgaagaaaaaaaaaaaaaattccccacccctaccaattgttttacttcctcttcctgctcagggagcagatg

SEQ ID NO: 549603 - DNA, 120 bp, Artificial Sequence
  ENSG00000168256_17 (sequence is synthesized)
ccaattgttttacttcctcttcctgctcagggagcagatgggcctcactggttgagatggaatagaataactgggctatgagtcaccagcccactttgtgacccagcaagacctttcccc

SEQ ID NO: 549604 - DNA, 120 bp, Artificial Sequence
  ENSG00000168256_18 (sequence is synthesized)
tctctgggcatcagtttctcatctgtaagatgaccagagttgcttagatgatctcctagatcctttccagttctcttgatttcgtaaagccaatggcttctccctctttaaggtgctatg

SEQ ID NO: 549605 - DNA, 120 bp, Artificial Sequence
  ENSG00000168256_19 (sequence is synthesized)
ccaaccagccctggaggctgggatctgccgctccctccagccaccagggggcaggagtgcactacctgctgtcagtcaccagagtggccgctcagtgcccagcccgccagcctcgctctt

SEQ ID NO: 549606 - DNA, 120 bp, Artificial Sequence
  ENSG00000168256_20 (sequence is synthesized)
ggaggctgctctttatcctgcctgtggttttcagctcagagctggacttctatttataagttacctgtatttatatttatatgcccgctctcatggtgaaggctggacaaggtgctcctc

SEQ ID NO: 549607 - DNA, 120 bp, Artificial Sequence
  ENSG00000168256_21 (sequence is synthesized)
tggcccctccttcttacctcagatgcctgaacagaacaaggcaaacccgtagcagcctctcaggagctgacaggtcctctttcggggctcaggagggtgggcacacacccagcggcctgc

SEQ ID NO: 549608 - DNA, 120 bp, Artificial Sequence
  ENSG00000168256_22 (sequence is synthesized)
agagtaagcttattacccacaactgtgcccgctttgtgcttctaaggtgcacacctagcctaggtgagacactgcagccaggcaaccaccgacacacgccccttctcaaagccagaggtg

SEQ ID NO: 549609 - DNA, 120 bp, Artificial Sequence
  ENSG00000168256_23 (sequence is synthesized)
agtggggcaggtgcccggggctgggtgagtggaattaggacacacacaggcttgggcttcaagttcatttattgatgcattggttggacacaataaaaccacaattgttatcaaaaagtt

SEQ ID NO: 549610 - DNA, 120 bp, Artificial Sequence
  ENSG00000168256_24 (sequence is synthesized)
agcctacaccgactctggaggaagactggagcctttgcggcggcgctgcccctcccctggtccccgcgagctcggagggcccggctggtgctgcgggggccccgggaggtacggacctgg

SEQ ID NO: 549611 - DNA, 120 bp, Artificial Sequence
  ENSG00000168256_25 (sequence is synthesized)
agcctacaccgactctggaggaagactggagcctttgcggcggcgctgcccctcccctggtccccgcgagctcggagggcccggctggtgctgcgggggccccgggagcgtgcttctgtt

SEQ ID NO: 549612 - DNA, 120 bp, Artificial Sequence
  ENSG00000168256_26 (sequence is synthesized)
ctggaggagcctacaccgactctggaggaagactggagcctttgcggcggcgctgcccctcccctggtccccgcgagctcggagggcccggctggtgctgcgggggccccgggaggttga

SEQ ID NO: 549613 - DNA, 120 bp, Artificial Sequence
  ENSG00000168256_27 (sequence is synthesized)
acttggccctatattttctcaaaattcttgtttctctggcactagttaacatgtggatctgaactaaagcactaagagagaacctttctctgtactctacctttgctccagttatgatta

SEQ ID NO: 549614 - DNA, 120 bp, Artificial Sequence
  ENSG00000168256_28 (sequence is synthesized)
tctactttgccatctgttagtatcagggttcaattaatttgccggtattgagaattctgtattcctaggtttatcccttccttaacttatttctcctcccatctcccatttcttcacatc

SEQ ID NO: 549615 - DNA, 120 bp, Artificial Sequence
  ENSG00000168256_29 (sequence is synthesized)
gctgctcctggtggttttcccccctggaagaataaaacttacattgtaacagatcaactctacaacactgaacaaatacggagggagaaagccctatgtccaagataggaaagagaagct

SEQ ID NO: 549616 - DNA, 120 bp, Artificial Sequence
  ENSG00000168256_30 (sequence is synthesized)
tgtccaagataggaaagagaagctgtcatgtcacacttgtgcttagcatggaattagcataaaattaatgtccattggccgggtgcggtggatcacgcctgtaatccgagcactttggga

SEQ ID NO: 549617 - DNA, 120 bp, Artificial Sequence
  ENSG00000168256_31 (sequence is synthesized)
gaggtttctgttagggaccgtctttgggagtgatctatctctgctctctgggggggatctttgtctggagcttttggggggcttgtgtttggaagtttgccttcggggagatatctgtct

SEQ ID NO: 549618 - DNA, 120 bp, Artificial Sequence
  ENSG00000168256_32 (sequence is synthesized)
gggacctcttagggtttctgtatctgagctttctcttttgtgtctgtcagtccaagggcagcaaaaagtatgtcctttctgaagcctttttttccgtaggtttcttcattcttttctctc

SEQ ID NO: 549619 - DNA, 120 bp, Artificial Sequence
  ENSG00000168256_33 (sequence is synthesized)
tctcttgtcttatgttcattttagccatagacttgactggagtttagagggaattgattgttgtccagatgagtcgtacaggaaagcagattgtctttttttgagacggagtcttgctct

SEQ ID NO: 549620 - DNA, 120 bp, Artificial Sequence
  ENSG00000168256_34 (sequence is synthesized)
tgagccaccgtgccctgccccagattatcctttttatttgctcagtccccccagggagcagatggcttcagacagccacacaaaacactgttcctgcttaattctccatggggtcatggt

SEQ ID NO: 549621 - DNA, 120 bp, Artificial Sequence
  ENSG00000168256_35 (sequence is synthesized)
taaagagaggaagctgggctgagctccctttactaattggtcctctacatcttgcgcacagaagggaacctggcccagtggccagtgactctcctctccctttatggcagcatttccaag

SEQ ID NO: 549622 - DNA, 120 bp, Artificial Sequence
  ENSG00000168256_36 (sequence is synthesized)
cacctgccctgtgacagatactggctaggtactggggataacaaagacgaataaaataacagcttaccatccagtagtagacatggagacatccgtttcctctgactagcattgggatgg

SEQ ID NO: 549623 - DNA, 120 bp, Artificial Sequence
  ENSG00000168256_37 (sequence is synthesized)
tgctgaaaccctggaactatacattcagtttagaactatacattcagtttagaactctcagttatggacgttctgccttctgtttttttggtttttgtttttgtccaccagaaaacatct

SEQ ID NO: 549624 - DNA, 120 bp, Artificial Sequence
  ENSG00000168256_38 (sequence is synthesized)
agaaagaaattaatgttcgttcccctaaacccaaatcatttcagtcctgccaggctgtcaattctctggcctcctcagccccctacattcctttctccccatttggtcagccttaagatg

SEQ ID NO: 549625 - DNA, 120 bp, Artificial Sequence
  ENSG00000168259_0 (sequence is synthesized)
agctctctggtcccggcggtaagatggcggctgccgcggagtgcgatgtggtaatggcggcgaccgagccggagctgctcgacgaccaagaggcgaagagggaagcagagactttcaagg

SEQ ID NO: 549626 - DNA, 120 bp, Artificial Sequence
  ENSG00000168259_1 (sequence is synthesized)
aacaaggaaatgcatactatgccaagaaagattacaatgaagcttataattattatacaaaagccatagatatgtgtcctaaaaatgctagctattatggtaatcgagcagccaccttga

SEQ ID NO: 549627 - DNA, 120 bp, Artificial Sequence
  ENSG00000168259_2 (sequence is synthesized)
tgatgcttggaaggttccgggaagctcttggagatgcacaacagtcagtgaggttggatgacagttttgtccggggacatctacgagagggcaagtgccacctctctctggggaatgcca

SEQ ID NO: 549628 - DNA, 120 bp, Artificial Sequence
  ENSG00000168259_3 (sequence is synthesized)
tggcagcatgtcgcagcttccagagagccctagaactggatcataaaaatgctcaggcacaacaagagttcaagaatgctaatgcagtcatggaatatgagaaaatagcagaaacagatt

SEQ ID NO: 549629 - DNA, 120 bp, Artificial Sequence
  ENSG00000168259_4 (sequence is synthesized)
ttgagaagcgagattttcggaaggttgttttctgcatggaccgtgccctagaatttgcccctgcctgccatcgcttcaaaatcctcaaggcagaatgtttagcaatgctgggtcgttatc

SEQ ID NO: 549630 - DNA, 120 bp, Artificial Sequence
  ENSG00000168259_5 (sequence is synthesized)
cagaagcacagtctgtggctagtgacattctacgaatggattccaccaatgcagatgctctgtatgtacgaggtctttgcctttattacgaagattgtattgagaaggcagttcagtttt

SEQ ID NO: 549631 - DNA, 120 bp, Artificial Sequence
  ENSG00000168259_6 (sequence is synthesized)
tcgtacaggctctcaggatggctcctgaccacgagaaggcctgcattgcctgcagaaatgccaaagcactcaaagcaaagaaagaagatgggaataaagcatttaaggaaggaaattaca

SEQ ID NO: 549632 - DNA, 120 bp, Artificial Sequence
  ENSG00000168259_7 (sequence is synthesized)
catatgaactgtacacagaagccctggggatagaccccaacaatataaaaacaaatgctaaactctactgtaatcggggtacggttaattccaagcttaggaaactagatgatgcaatag

SEQ ID NO: 549633 - DNA, 120 bp, Artificial Sequence
  ENSG00000168259_8 (sequence is synthesized)
aagactgcacaaatgcagtgaagcttgatgacacttacataaaagcctacttgagaagagctcagtgttacatggacacagaacagtatgaagaagcagtacgagactatgaaaaagtat

SEQ ID NO: 549634 - DNA, 120 bp, Artificial Sequence
  ENSG00000168259_9 (sequence is synthesized)
accagacagagaaaacaaaagaacacaaacagctcctaaaaaatgcgcagctggaactgaagaagagtaagaggaaagattactacaagattctaggagtggacaagaatgcctctgagg

SEQ ID NO: 549635 - DNA, 120 bp, Artificial Sequence
  ENSG00000168259_10 (sequence is synthesized)
acgagatcaagaaagcttatcggaaacgggccttgatgcaccatccagatcggcatagtggagccagtgctgaggttcagaaggaggaggagaagaagttcaaggaagttggagaggcct

SEQ ID NO: 549636 - DNA, 120 bp, Artificial Sequence
  ENSG00000168259_11 (sequence is synthesized)
ttactatcctctctgatcccaagaaaaagactcgctatgacagtggacaggacctagatgaggagggcatgaatatgggtgattttgatccaaacaatatcttcaaggcattctttggcg

SEQ ID NO: 549637 - DNA, 120 bp, Artificial Sequence
  ENSG00000168259_12 (sequence is synthesized)
gtcctggcggcttcagctttgaagcatctggtccagggaatttcttttttcaatttggctaatgaagggcaaccacccagaacccagaaaatgcagattcactcagtttaatcttgaatg

SEQ ID NO: 549638 - DNA, 120 bp, Artificial Sequence
  ENSG00000168259_13 (sequence is synthesized)
tggaaacagttcacctcctcccttcatcacgtctccgtgtgcttagagcagtttcgttttctcagttggatgccctgtgtctctgtgagtggggtggagcaaagggaaccaatgccgaag

SEQ ID NO: 549639 - DNA, 120 bp, Artificial Sequence
  ENSG00000168259_14 (sequence is synthesized)
accgagggcaggggagggaggcgggggtggacagggaggcagcttgtgaatttttgttttactgtttaactttattaaaaaagaaaaaaaaaagagaataaaatgttttgacccttcctg

SEQ ID NO: 549640 - DNA, 120 bp, Artificial Sequence
  ENSG00000168259_15 (sequence is synthesized)
gcttccgcctggcgtaggagctgaggcatggccttgttctccagctgagaggacgatcgtccttataggagaggccgagtctccgagggcaatttcagaggtctggtgcgagggaagcag

SEQ ID NO: 549641 - DNA, 120 bp, Artificial Sequence
  ENSG00000168259_16 (sequence is synthesized)
cttcctctcccgcttccgcctggcgtaggagctgaggcatggccttgttctccagctgagaggacgatcgtccttataggagaggccgagtctccgagggcaatttcagagggaagcaga

SEQ ID NO: 549642 - DNA, 120 bp, Artificial Sequence
  ENSG00000168259_17 (sequence is synthesized)
ctttcttaagttaagcaccaaggaagagggcaactgcttgggcgctgttggcactccgaagcagccgcagtggttcgagattgccagtcggactagccaagggagctgctgaggaagcag

SEQ ID NO: 549643 - DNA, 120 bp, Artificial Sequence
  ENSG00000168259_18 (sequence is synthesized)
gcctggcgtaggagctgaggcatggccttgttctccagctgagaggacgatcgtccttataggagaggccgagtctccgagggcaatttcagaggtctggtgcgagtgacaaatgcatga

SEQ ID NO: 549644 - DNA, 120 bp, Artificial Sequence
  ENSG00000168259_19 (sequence is synthesized)
acggttaattccaaggaaactagatgatgcaatagaagactgcacaaatgcagtgaagcttgatgacacttacataaaagcctacttgagaagagctcagtggtgggattgttccagccc

SEQ ID NO: 549645 - DNA, 120 bp, Artificial Sequence
  ENSG00000168259_20 (sequence is synthesized)
acatcgcccccgacccccgcgttctcttgttaacttctgtgcattgttgcctgtctgcactttccgtctccaaaacctttgctctcctcaccccgttttcccttgtaattataccccagc

SEQ ID NO: 549646 - DNA, 120 bp, Artificial Sequence
  ENSG00000168259_21 (sequence is synthesized)
gatcactagtctgggttcgaagtgattgtgtgtctccataattgacctggttgcccccggttatcccagaagtcaaagatgacagagaaaaaaaggaagagcgaggggcttatctcgtgt

SEQ ID NO: 549647 - DNA, 120 bp, Artificial Sequence
  ENSG00000168259_22 (sequence is synthesized)
gttctttcttaagttaagcaccaaggaagagggcaactgcttgggcgctgttggcactccgaagcagccgcagtggttcgagattgccagtcggactagccaagggagctgctgatgaca

SEQ ID NO: 549648 - DNA, 120 bp, Artificial Sequence
  ENSG00000168259_23 (sequence is synthesized)
attgaagtttgtattttaatggttttgaaaagctgagtactgggcacttgcttttttgttcttcgggactttagaagtttggagaacaatagtcagcagttgcctagttgctttgtggcc

SEQ ID NO: 549649 - DNA, 120 bp, Artificial Sequence
  ENSG00000168259_24 (sequence is synthesized)
tgatgcagagtccctctgagagcccatttctcccttactgcactagtctttggtcccctttctccagcactgagtgatgtggaagttactcagaggtctttccagggaagcagagacttt

SEQ ID NO: 549650 - DNA, 120 bp, Artificial Sequence
  ENSG00000168259_25 (sequence is synthesized)
accatcccaatgctagtcagaggaaacggatgtctccatgtctactactggatgtcccacgcctttgacatctcatccttcagtccctttgctgtaaaggcaacttgaacaagcttcagc

SEQ ID NO: 549651 - DNA, 120 bp, Artificial Sequence
  ENSG00000168259_26 (sequence is synthesized)
cctttctcagacttccagggcaggacttgaatggatttgacactggaattgttcctgatgcagccttgttcagttcttgctgctgccatgctggattccaaagatccactctttcctcga

SEQ ID NO: 549652 - DNA, 120 bp, Artificial Sequence
  ENSG00000168259_27 (sequence is synthesized)
aaatgcattcttatcagacttttatgtttctcatatatagcactgttttcgacagacttaaacatagttatttattatataccacttttttgcacaaatcaaaaggaaaattggctgggt

SEQ ID NO: 549653 - DNA, 120 bp, Artificial Sequence
  ENSG00000168259_28 (sequence is synthesized)
ccagcctgggcgacatggtgagactccatttcaaaaaaaaaaaaggaaaataagtgaaataaacaaaaaaatcagtttaactttttgccatatcagacatccttagaagaataaacattg

SEQ ID NO: 549654 - DNA, 67 bp, Artificial Sequence
  ENSG00000168259_29 (sequence is synthesized)
ctttttgccatatcagacatccttagaagaataaacattggcctgatcacctgaggtcgggagtttg

SEQ ID NO: 549655 - DNA, 82 bp, Artificial Sequence
  ENSG00000168259_30 (sequence is synthesized)
actaaaaatagaaaaaaaaaattagccaggcatggcggtgcatgcctgtagccccaccgaggcggaggttgcggtgagccga

SEQ ID NO: 549656 - DNA, 120 bp, Artificial Sequence
  ENSG00000168259_31 (sequence is synthesized)
actctgtctcaaaaaaaagaataaacattaggctctgttagtatgaaaaagccttgtttatgtatgatttttccagtgctgaaaatgggatggagatttagaagctttggagggaggtgg

SEQ ID NO: 549657 - DNA, 120 bp, Artificial Sequence
  ENSG00000168259_32 (sequence is synthesized)
ttttatgtttttcatgtgtcctggattcctcttgtgtggccatagcagagggcagtgataggggcatcccttacaaatgcccttttactgtctggcttggttagagttctttggccaagt

SEQ ID NO: 549658 - DNA, 120 bp, Artificial Sequence
  ENSG00000168259_33 (sequence is synthesized)
tcctgcctctgttgttatggtcctcctaccagttcatttagggatcaagagttaatgagtctctcgggtcgtttttgtgaggtccagctttgtaaggagtccttccttccttacgtcttg

SEQ ID NO: 549659 - DNA, 120 bp, Artificial Sequence
  ENSG00000168259_34 (sequence is synthesized)
gcttaagacatgtcctgctgctgctaagttgtcacagtcccataggggggcaaaatgagaggagcttttaagacggacttcacgattgcagcattttaaatggctacatgttttatttcc

SEQ ID NO: 549660 - DNA, 120 bp, Artificial Sequence
  ENSG00000168259_35 (sequence is synthesized)
ttagctttagtgtttctgtagagaaaagagatggatttcaatttttttgcatgtcactctgacaaagttctgtttcccttacagcagccaagaaactaaaataaggctaggcttagtggc

SEQ ID NO: 549661 - DNA, 89 bp, Artificial Sequence
  ENSG00000168259_36 (sequence is synthesized)
caagaaactaaaataaggctaggctttgaggccaaaatgagaggatcgcttaagcccagtagtttgagaccagcctgggcaacatagtg

SEQ ID NO: 549662 - DNA, 120 bp, Artificial Sequence
  ENSG00000168259_37 (sequence is synthesized)
agaattatgatcctggcaggggaaacagatgaacttggaagaaacaaaagatcttctttgcctgcagctgtccctagtcatggggaggttggggggtgggaagtgaagcactgacgatcc

SEQ ID NO: 549663 - DNA, 120 bp, Artificial Sequence
  ENSG00000168259_38 (sequence is synthesized)
cagagagccctagaactggatcataaaaatgctcaggcacaacaagagcttcattaaaactttcctatgtctgattttccggtgcagttcaagaatgctaatgcagtcatggaatatgag

SEQ ID NO: 549664 - DNA, 120 bp, Artificial Sequence
  ENSG00000168259_39 (sequence is synthesized)
aagatggcggctgccgcggagtgcgatgtggtaatggcggcgaccgagccggagctgctcgacgaccaagaggcgaagagatatgtgtcctaaaaatgctagctattatggtaatcgagc

SEQ ID NO: 549665 - DNA, 120 bp, Artificial Sequence
  ENSG00000168259_40 (sequence is synthesized)
tgggatgaatttgacagctgtagaatgttagaattttttccaaagatgctccagagggagagtctatttgggccaaatctgatccctggtccaaacagtaatagacatggagtcaaacaa

SEQ ID NO: 549666 - DNA, 120 bp, Artificial Sequence
  ENSG00000168259_41 (sequence is synthesized)
atgcagtcaaatgtggcaggttcacagtgtgcagtgagctctgaggaggcgagcactagcaagggaaggcttggaagtgcagaaaagcatggccccatgggtcatgcctgtaatcccagc

SEQ ID NO: 549667 - DNA, 120 bp, Artificial Sequence
  ENSG00000168259_42 (sequence is synthesized)
ccgcttccgcctggcgtaggagctgaggcatggccttgttctccagctgagaggacgatcgtccttataggagaggccgagtctccgagggcaatttcagaggtctggtgcgaggtgggg

SEQ ID NO: 549668 - DNA, 120 bp, Artificial Sequence
  ENSG00000168259_43 (sequence is synthesized)
caacagttaggccagattattggaagtggggttggaacagagttgtgggtagtcatacttgttctaatcctaaagcagaattgacaagaaggttctagaagtttggagccctttccttat

SEQ ID NO: 549669 - DNA, 120 bp, Artificial Sequence
  ENSG00000168259_44 (sequence is synthesized)
cagctgcgggttagtctgacccttttgttcaagatatctacagtgccctcagtctctttgcaacatactttatatcttcataccaagcccgttgtgtcttcaggctgggtaatttgaggc

SEQ ID NO: 549670 - DNA, 120 bp, Artificial Sequence
  ENSG00000168259_45 (sequence is synthesized)
ggtgatgtagaattagttcatgagatctgaaatcaggattctgagatttttactatctaatgagttcgaaatataagaagtactcggacgcaatgaatagttatcaagcttgagggtggt

SEQ ID NO: 549671 - DNA, 120 bp, Artificial Sequence
  ENSG00000168259_46 (sequence is synthesized)
taccacagccagatctcaagttcctgatctgctgggagctgaggggcctgacaaagtgtaataggcccctgggatatcagagaagccaggacaccagagtccagtctctgttcttaattt

SEQ ID NO: 549672 - DNA, 120 bp, Artificial Sequence
  ENSG00000168259_47 (sequence is synthesized)
tgagctttcatgttgttcctacttcttcctagatatttaaagctaagcatcatcaacccttatacatcattaaagagctgcacaatgggaaacaaaattcctcccagtgcagacggagct

SEQ ID NO: 549673 - DNA, 89 bp, Artificial Sequence
  ENSG00000168259_48 (sequence is synthesized)
ttaattgtagagatttacttgtatttggaaagagttcagtggttctttatactgtaaatagggatttggccacaggttatttatttttt

SEQ ID NO: 549674 - DNA, 74 bp, Artificial Sequence
  ENSG00000168259_49 (sequence is synthesized)
ccagttgctgggactacacgtgcccaccaccacatccggctaattgttgttttttttttgtatttttagtagag

SEQ ID NO: 549675 - DNA, 120 bp, Artificial Sequence
  ENSG00000168259_50 (sequence is synthesized)
tttaaaaactcaccctactcattgtaaatctctgatgtagagtgtccctattttggacttcatttcatagcctcctatcttaagcaaatacatttcttcaatcacagccttagaggatag

SEQ ID NO: 549676 - DNA, 120 bp, Artificial Sequence
  ENSG00000168259_51 (sequence is synthesized)
tctatcataaaattggagtaaatgaacctgaagacatataataaaataggttatgctgtaatgtgaccacatcacacaaaacatggtatttgatagcagtacaacaaaataaggtaaact

SEQ ID NO: 549677 - DNA, 68 bp, Artificial Sequence
  ENSG00000168259_52 (sequence is synthesized)
acatggtatttgatagcagtacaacaaaataaggtaaactaccttatttcatggaatttaagtgtcat

SEQ ID NO: 549678 - DNA, 120 bp, Artificial Sequence
  ENSG00000168259_53 (sequence is synthesized)
cactccagcctgggtgacaaagtgagattccatctcaaaaaaaagtcattgattgcagaatgcaaattattttatctgtcactaagaaaatgtaactgtaaattaaacatgacaacatgc

SEQ ID NO: 549679 - DNA, 120 bp, Artificial Sequence
  ENSG00000168259_54 (sequence is synthesized)
actaagaaaatgtaactgtaaattaaacatgacaacatgcattattcctgtagttcaaatagtgacagaaaaaaattaattaaaaaaagaaaaaagactgggcgtggtggctcacacctg

SEQ ID NO: 549680 - DNA, 120 bp, Artificial Sequence
  ENSG00000168259_55 (sequence is synthesized)
cggtaagatggcggctgccgcggagtgcgatgtggtaatggcggcgaccgagccggagctgctcgacgaccaagaggcgaagagtcccacgcctttgacatctcatccttcagtcccttt

SEQ ID NO: 549681 - DNA, 120 bp, Artificial Sequence
  ENSG00000168259_56 (sequence is synthesized)
tagactatctttatagacctccagcggaggagattgcacaagctccctcagtctcccatgcctgtgtctaacgcccctcacggtcagtaagtttcctctgatgcctgacccaaattcctt

SEQ ID NO: 549682 - DNA, 120 bp, Artificial Sequence
  ENSG00000168259_57 (sequence is synthesized)
ttgttaaaaagtttaaatccatttcctttggagattttattttgtgttgtacacttatgctctaccctggcacagtgcttgacacataggtgctcactgaataaatgttttgttgaatga

SEQ ID NO: 549683 - DNA, 120 bp, Artificial Sequence
  ENSG00000168259_58 (sequence is synthesized)
ttttttttttttttttttttaagcaagcccccaacaccatagaaaattcttgatttgctcggaggataattggatgaaggattattttcttctttgtttatgtgcaagaaatgaaaataa

SEQ ID NO: 549684 - DNA, 120 bp, Artificial Sequence
  ENSG00000168259_59 (sequence is synthesized)
ggaattgctttgatcagacaacttcttatctttgtggtagaaacagaactgcccttcttggagtggctctgcctctgagatcactacaggggagacagcatgccctgttcagctggctga

SEQ ID NO: 549685 - DNA, 120 bp, Artificial Sequence
  ENSG00000168259_60 (sequence is synthesized)
atatttggcaacaatctcctgaagcagctggaattgacaagaagtactggagattagctcgggccaaacccttacatctggcctgactactgctgcagtctgcctcaacttacccctaaa

SEQ ID NO: 549686 - DNA, 120 bp, Artificial Sequence
  ENSG00000168259_61 (sequence is synthesized)
gctggggagatgccacccacccacatctttgctacacatgccatcatgagctagagttcaccctttctccttaaagccctatttacttttctacttcaactttaaaacaaaattaaaatg

SEQ ID NO: 549687 - DNA, 120 bp, Artificial Sequence
  ENSG00000168259_62 (sequence is synthesized)
tgaggatatccctgaattttaaaaagcatgaagtaaaaatgcaaattagtatagtttgtttaatacattacatatagacctaaagaaagttcatcagggttaatcatttgtcacatcatt

SEQ ID NO: 549688 - DNA, 120 bp, Artificial Sequence
  ENSG00000168259_63 (sequence is synthesized)
ctatacccagggctatcagctatcaattttccttttttttttttttttaattcaggatccagctctgtcacccaggctggagtgcagtatcaaagtatcatttctcttacttcaaattat

SEQ ID NO: 549689 - DNA, 120 bp, Artificial Sequence
  ENSG00000168259_64 (sequence is synthesized)
tacattttattctgtacattgattctgaactcctaatataatatttatgtcctgtatttgcaggccattggtttttttaaagtcataaatcaaaatgatgccagaaaatcaaagatgccc

SEQ ID NO: 549690 - DNA, 120 bp, Artificial Sequence
  ENSG00000168259_65 (sequence is synthesized)
gcctgggctacagagtgagactctgtgtcaaaaaaaaaaaagaaagaaaatgggcttgtgtggtagcaggtaagaaattgaatctctgttgtacagcagctagctgtactgcatgatcac

SEQ ID NO: 549691 - DNA, 120 bp, Artificial Sequence
  ENSG00000168259_66 (sequence is synthesized)
ttgtacagcagctagctgtactgcatgatcacttcccattccccagctgacagtggctgtctctggaactcctaccacagtcttcaattggtaggccagccctggtgccagtgattttat

SEQ ID NO: 549692 - DNA, 120 bp, Artificial Sequence
  ENSG00000168259_67 (sequence is synthesized)
tggtaggccagccctggtgccagtgattttatctgggcatggaaaatgccacttgcttctgtggaagagacacttaaaagatctggcagtcggccgggtgcggtggctcacgcctataat

SEQ ID NO: 549693 - DNA, 120 bp, Artificial Sequence
  ENSG00000168259_68 (sequence is synthesized)
gtcgctgtggtttcagctccctccacactgggataggcagagtatgagcattggcacatgctgttttcctggaacaaacagtcccacgcctttgacatctcatccttcagtccctttgct

SEQ ID NO: 549694 - DNA, 120 bp, Artificial Sequence
  ENSG00000168263_0 (sequence is synthesized)
agagcagtcaacagctgactgcgttcagaccctgcaggctgggctggcctgcccaggacctgagaaggggcagctccggtggcaatgtctgagcccctagctgtgctggtccgggctggc

SEQ ID NO: 549695 - DNA, 120 bp, Artificial Sequence
  ENSG00000168263_1 (sequence is synthesized)
ctctctaagacagtgcaggccacgtgatccatcctcctagaggcagtgagcaggtgagggacccctaccacagccaggaggaaaaagctaggcgtccactttccgcagccatgctcaaac

SEQ ID NO: 549696 - DNA, 120 bp, Artificial Sequence
  ENSG00000168263_2 (sequence is synthesized)
agagtgagaggagacggtcctggagctacaggccctggaacacgacggagaatgagggcagccaacaccgcaggagcatttgctccctgggtgcccgttccggctcccaggccagcatcc

SEQ ID NO: 549697 - DNA, 120 bp, Artificial Sequence
  ENSG00000168263_3 (sequence is synthesized)
acggctggacagagggcaactataactactacatcgaggaagacgaagacggcgaggaggaggaccagtggaaggacgacctggcagaagaggaccagcaggcaggggaggtcaccaccg

SEQ ID NO: 549698 - DNA, 120 bp, Artificial Sequence
  ENSG00000168263_4 (sequence is synthesized)
ccaagcccgagggccccagcgaccctccggccctgctgtccacgctgaatgtgaacgtgggtggccacagctaccagctggactactgcgagctggccggcttccccaagacgcgcctag

SEQ ID NO: 549699 - DNA, 120 bp, Artificial Sequence
  ENSG00000168263_5 (sequence is synthesized)
gtcgcctggccacctccaccagccgcagccgccagctaagcctgtgcgacgactacgaggagcagacagacgaatacttcttcgaccgcgacccggccgtcttccagctggtctacaatt

SEQ ID NO: 549700 - DNA, 120 bp, Artificial Sequence
  ENSG00000168263_6 (sequence is synthesized)
tctacctgtccggggtgctgctggtgctcgacgggctgtgtccgcgccgcttcctggaggagctgggctactggggcgtgcggctcaagtacacgccacgctgctgccgcatctgcttcg

SEQ ID NO: 549701 - DNA, 120 bp, Artificial Sequence
  ENSG00000168263_7 (sequence is synthesized)
aggagcggcgcgacgagctgagcgaacggctcaagatccagcacgagctgcgcgcgcaggcgcaggtcgaggaggcggaggaactcttccgcgacatgcgcttctacggcccgcagcggc

SEQ ID NO: 549702 - DNA, 120 bp, Artificial Sequence
  ENSG00000168263_8 (sequence is synthesized)
gccgcctctggaacctcatggagaagccattctcctcggtggccgccaaggccatcggggtggcctccagcaccttcgtgctcgtctccgtggtggcgctggcgctcaacaccgtggagg

SEQ ID NO: 549703 - DNA, 120 bp, Artificial Sequence
  ENSG00000168263_9 (sequence is synthesized)
ggcagggcgagggcggcccagacctgcggcccatcctggagcacgtggagatgctgtgcatgggcttcttcacgctcgagtacctgctgcgcctagcctccacgcccgacctgaggcgct

SEQ ID NO: 549704 - DNA, 120 bp, Artificial Sequence
  ENSG00000168263_10 (sequence is synthesized)
tcgcgcgcagcgccctcaacctggtggacctggtggccatcctgccgctctaccttcagctgctgctcgagtgcttcacgggcgagggccaccaacgcggccagacggtgggcagcgtgg

SEQ ID NO: 549705 - DNA, 120 bp, Artificial Sequence
  ENSG00000168263_11 (sequence is synthesized)
gtaaggtgggtcaggtgttgcgcgtcatgcgcctcatgcgcatcttccgcatcctcaagctggcgcgccactccaccggactgcgtgccttcggcttcacgctgcgccagtgctaccagc

SEQ ID NO: 549706 - DNA, 120 bp, Artificial Sequence
  ENSG00000168263_12 (sequence is synthesized)
aggtgggctgcctgctgctcttcatcgccatgggcatcttcactttctctgcggctgtctactctgtggagcacgatgtgcccagcaccaacttcactaccatcccccactcctggtggt

SEQ ID NO: 549707 - DNA, 120 bp, Artificial Sequence
  ENSG00000168263_13 (sequence is synthesized)
gggccgcggtgagcatctccaccgtgggctacggagacatgtacccagagacccacctgggcaggttttttgccttcctctgcattgcttttgggatcattctcaacgggatgcccattt

SEQ ID NO: 549708 - DNA, 120 bp, Artificial Sequence
  ENSG00000168263_14 (sequence is synthesized)
ccatcctctacaacaagttttctgattactacagcaagctgaaggcttatgagtataccaccatacgcagggagaggggagaggtgaacttcatgcagagagccagaaagaagatagctg

SEQ ID NO: 549709 - DNA, 120 bp, Artificial Sequence
  ENSG00000168263_15 (sequence is synthesized)
agtgtttgcttggaagcaacccacagctcaccccaagacaagagaattagtattttataggacatgtggctggtagattccatgaacttcaaggcttcattgctctttttttaatcatta

SEQ ID NO: 549710 - DNA, 120 bp, Artificial Sequence
  ENSG00000168263_16 (sequence is synthesized)
tgattggcagcaaaaggaaatgtgaagcagacatacacaaaggccatttcgttcacaaagtactgcctctagaaatactcattttggcccaaactcagaatgtctcatagttgctctgtg

SEQ ID NO: 549711 - DNA, 120 bp, Artificial Sequence
  ENSG00000168263_17 (sequence is synthesized)
ttgtgtgaaacatctgaccttctcaatgacgttgatattgaaaacctgaggggagcaacagcttagatttttcttgtagcttctcgtggcatctagctcaataaatatttttggacttga

SEQ ID NO: 549712 - DNA, 120 bp, Artificial Sequence
  ENSG00000168264_0 (sequence is synthesized)
ctcctcctccggcgtcgcgggctcctcggacatggccgcggcggtggcggtggcggccgcgtcccggcggcagtcgtgctacctgtgtgacctgccccgcatgccctgggccatgatctg

SEQ ID NO: 549713 - DNA, 120 bp, Artificial Sequence
  ENSG00000168264_1 (sequence is synthesized)
ggacttcaccgaacccgtctgccgcggctgcgtcaactacgagggcgccgaccgcgtcgagttcgtcatcgagacggcgcggcagctcaagcgggcgcacggctgcttcccggagggtcg

SEQ ID NO: 549714 - DNA, 120 bp, Artificial Sequence
  ENSG00000168264_2 (sequence is synthesized)
gcttcccggagggtcgctccccacccggcgccgcggcctcggccgccgccaagccgccgccgctctccgccaaggacatccttttgcagcagcagcagcagcttggccacggcggccccg

SEQ ID NO: 549715 - DNA, 120 bp, Artificial Sequence
  ENSG00000168264_3 (sequence is synthesized)
gagaggcccccgcgcctcggctctgacttcggcagcagccgcccggcagcgagcctggcccagccgccgacgccgcagccgccgcccgtgaacggcatcctggtgcccaacggcttctcc

SEQ ID NO: 549716 - DNA, 120 bp, Artificial Sequence
  ENSG00000168264_4 (sequence is synthesized)
gccgcccgtgaacggcatcctggtgcccaacggcttctccaagctagaggagccgcccgagctgaatcgccagagcccgaacccgcggcgcggccacgcggtgccgcccaccctggtgcc

SEQ ID NO: 549717 - DNA, 80 bp, Artificial Sequence
  ENSG00000168264_5 (sequence is synthesized)
gctcatgaacggctcggccacgccgctgcccaccgcgctcggcctcggcggccgcgctgccgcctccttagccgcggtgt

SEQ ID NO: 549718 - DNA, 120 bp, Artificial Sequence
  ENSG00000168264_6 (sequence is synthesized)
cgatctgggcgcccacaagcggccggcatccgtgtcgagcagcgctgccgtggagcacgagcagcgtgaggcggcagccaaggagaaacaaccgccgccgcctgcgcaccggggcccggc

SEQ ID NO: 549719 - DNA, 120 bp, Artificial Sequence
  ENSG00000168264_7 (sequence is synthesized)
cgacagcctgtccaccgcggccggggccgccgagctgagcgcggaaggtgcgggcaagagccgcgggtctggagagcaggactgggtcaacaggcccaagaccgtgcgcgacacgctgct

SEQ ID NO: 549720 - DNA, 120 bp, Artificial Sequence
  ENSG00000168264_8 (sequence is synthesized)
ggcgctgcaccagcacggccactcggggcccttcgagagcaagtttaagaaggagccggccctgactgcaggcaggttgttgggtttcgaggccaacggggccaacgggtctaaagcagt

SEQ ID NO: 549721 - DNA, 120 bp, Artificial Sequence
  ENSG00000168264_9 (sequence is synthesized)
tgcaagaacagcaaggaaaaggaagccctctccagaaccagaaggtgaagtcgggccccctaagatcaacggagaggcccagccgtggctgtccacatccacagaggggctcaagatccc

SEQ ID NO: 549722 - DNA, 120 bp, Artificial Sequence
  ENSG00000168264_10 (sequence is synthesized)
catgactcctacatcctcttttgtgtctccgccaccacccactgcctcacctcattccaaccggaccacaccgcctgaagcggcccagaatggccagtcccccatggcagccctgatctt

SEQ ID NO: 549723 - DNA, 120 bp, Artificial Sequence
  ENSG00000168264_11 (sequence is synthesized)
agtagcagacaatgcagggggcagtcatgcctcaaaagatgccaaccaggttcactccactaccaggaggaatagcaacagtccgccctctccgtcctctatgaaccaaagaaggctggg

SEQ ID NO: 549724 - DNA, 120 bp, Artificial Sequence
  ENSG00000168264_12 (sequence is synthesized)
ccccagagaggtggggggccagggagcaggcaacacaggaggactggagccagtgcaccctgccagcctcccggactcctctctggcaaccagtgccccgctgtgctgcaccctctgcca

SEQ ID NO: 549725 - DNA, 120 bp, Artificial Sequence
  ENSG00000168264_13 (sequence is synthesized)
cgagcggctggaggacacccattttgtgcagtgcccgtccgtcccttcgcacaagttctgcttcccttgctccagacaaagcatcaaacagcagggagctagtggagaggtctattgtcc

SEQ ID NO: 549726 - DNA, 120 bp, Artificial Sequence
  ENSG00000168264_14 (sequence is synthesized)
cagtggggaaaaatgccctcttgtgggctccaatgtcccctgggcctttatgcaaggggaaattgcaaccatccttgctggagatgtgaaagtgaaaaaagagagagactcgtgactttt

SEQ ID NO: 549727 - DNA, 120 bp, Artificial Sequence
  ENSG00000168264_15 (sequence is synthesized)
ccggtttcagaaaaacccaatgattacccttaattaaaactgcttgaattgtatatatatctccatatatatatatatccaagacaagggaaatgtagacttcataaacatggctgtata

SEQ ID NO: 549728 - DNA, 120 bp, Artificial Sequence
  ENSG00000168264_16 (sequence is synthesized)
attttgattttttttgaatacattgtgtttctatattttttttgacgacaaaaggtatgtacttataaagacatttttttcttttgttaacgttattagcatatctttgtgctttattat

SEQ ID NO: 549729 - DNA, 120 bp, Artificial Sequence
  ENSG00000168264_17 (sequence is synthesized)
cctggtgacagttaccgttctatgtaggctgtgacttgcgctgcttttttagagcacttggcaaatcagaaatgcttctagctgtatttgtatgcacttattttaaaaagaaaaaaaaag

SEQ ID NO: 549730 - DNA, 120 bp, Artificial Sequence
  ENSG00000168264_18 (sequence is synthesized)
ccaaatacattttctgacattgtaagattgccttactgtctgtcattccttattgctggcccctttctcaggccggaggccaagtggtggagaaggaaaggaaatgatcgaacgggcatg

SEQ ID NO: 549731 - DNA, 120 bp, Artificial Sequence
  ENSG00000168264_19 (sequence is synthesized)
ttcagttcctgagatactgatgactgagagtgctgctgggaaattttcaggattgtgtggtcttttggggttttttgtttttttttttttaagacaaagttgaccgctgttcactgtcca

SEQ ID NO: 549732 - DNA, 120 bp, Artificial Sequence
  ENSG00000168264_20 (sequence is synthesized)
cgtgatcagttgtaagattacaatgctgcatgctagttggttacataagatacaattccagtgatggaaggcggttataatggatggtggtgtgtacaagatggcactgccatctttgag

SEQ ID NO: 549733 - DNA, 120 bp, Artificial Sequence
  ENSG00000168264_21 (sequence is synthesized)
cagagcccagctctgcagcgccacttcatctttttaaacaccctagaggtctgtttgttgttgctgttgtcctttattttgaaagagttgcaagagaagttacagtccaggtgaacttgg

SEQ ID NO: 549734 - DNA, 120 bp, Artificial Sequence
  ENSG00000168264_22 (sequence is synthesized)
agattgtgggattggttttgtttctgttttgttttgtttatcatttacctgtagtgctattgctgttgatactatcacctataccctgtttctagtgagtgctgaatacagtatggtaca

SEQ ID NO: 549735 - DNA, 120 bp, Artificial Sequence
  ENSG00000168264_23 (sequence is synthesized)
atgacagtaacagccgcgtggtgctgccaggactgcccttgggcatatcagtgacagcccaaatgtgggtggaggaaacctgtaatttccttcttaacatgtgtttgaaataccaagtga

SEQ ID NO: 549736 - DNA, 120 bp, Artificial Sequence
  ENSG00000168264_24 (sequence is synthesized)
ataatactgttctggaaaaaaatgataaactagtggaaattaaagaaattaagggttttatataatagacaggccccacctctcaaaatatttttagaagtctttttgtaaactaatttc

SEQ ID NO: 549737 - DNA, 120 bp, Artificial Sequence
  ENSG00000168264_25 (sequence is synthesized)
ttttgatcactattttgcatcagtaaaatgatttttttaaaaccaataaatcatcaattattagaaatagttgtctcacagtgatactggtttttcttttgtgctgttatgatttaacat

SEQ ID NO: 549738 - DNA, 120 bp, Artificial Sequence
  ENSG00000168264_26 (sequence is synthesized)
tgacaggaacactattttaaatccttacgttcaggtgtttgtaacttggccttataattaggctgaattatggcttcaaggtctacaatttatgtgtatggttcacagcctagcttctat

SEQ ID NO: 549739 - DNA, 120 bp, Artificial Sequence
  ENSG00000168264_27 (sequence is synthesized)
ttacatttgaaaatacagatttttaccaactttggattcttttttagttatatgtttgtctttcctttttaaattgttcaaaactattttttaatggtcaagttactaacacttgaaaat

SEQ ID NO: 549740 - DNA, 120 bp, Artificial Sequence
  ENSG00000168264_28 (sequence is synthesized)
cagatactgcaccaaatacagtgtttttccgtagtgtttttaatgagtgcacctattactactgtgcgagaattcatgttttaccagtcattgttatattacaaacagacttgcatgatt

SEQ ID NO: 549741 - DNA, 120 bp, Artificial Sequence
  ENSG00000168264_29 (sequence is synthesized)
aaccagttgttacacttactttttcaagttggagtatatatgactcagtgcagactggtctctcttatgtgaatgcacacatgcagaaatgcagagtcaattttacatgcccataaagac

SEQ ID NO: 549742 - DNA, 120 bp, Artificial Sequence
  ENSG00000168264_30 (sequence is synthesized)
atttgtaaagaattcagctcttatggtctgttgtataaatgtgtatctaggcactttggaatttgacctcacagatgttacaacttgatcagtcgtttgacctaatttgtggtagctatc

SEQ ID NO: 549743 - DNA, 120 bp, Artificial Sequence
  ENSG00000168264_31 (sequence is synthesized)
tgtatgttttgcaatcttaatacagacatgctttccaaaaagattaatacagaaccatcctgccgttttggataagtctatccagctgtggaaagggcaacctgtggtttctctgtactg

SEQ ID NO: 549744 - DNA, 120 bp, Artificial Sequence
  ENSG00000168264_32 (sequence is synthesized)
gtgtttaatgggggaagaatatgaacagctttaaagagctgtgtattgtggttactactattaaaaaataagatctgcacgagtctgactggcctttgggtggcctttgtggacggctcg

SEQ ID NO: 549745 - DNA, 120 bp, Artificial Sequence
  ENSG00000168264_33 (sequence is synthesized)
tagctggaaagtgttgatctgggttttctggcattcttttaagttaaaaagttaacatcgggacatgggtttgatcttttgttgtacctgatgacagtgcagagattctccacagctgga

SEQ ID NO: 549746 - DNA, 120 bp, Artificial Sequence
  ENSG00000168264_34 (sequence is synthesized)
taaaaatgtcacaaagctacttactgtacatgggcagtatcagatttcaaatcctaatatttcagctgtgcttttaatactcaaaatattaggggatggggtgttgaagctttccctttt

SEQ ID NO: 549747 - DNA, 120 bp, Artificial Sequence
  ENSG00000168264_35 (sequence is synthesized)
ttgcttttaacaatttatagaatttaacagatgtactgtctttcatgtggcctcacatttaaagttatgagaacatacacatggtttacaacttttactatatacctttccttggccacc

SEQ ID NO: 549748 - DNA, 120 bp, Artificial Sequence
  ENSG00000168264_36 (sequence is synthesized)
aagtattttaaaagtgtgccaccttttaacctttactttttttaagttgaaggtgatactttttctatatatgatgaaactcatgtcaactgaagtgagtgtaatctcagataccaacat

SEQ ID NO: 549749 - DNA, 120 bp, Artificial Sequence
  ENSG00000168264_37 (sequence is synthesized)
tattatattttaaaatcacgctatggaaatatcacctgaattctgtcatttgtcagatttacagtacctttttttctttaacttttagcattaaataaaaataaaattgggagcactgaa

SEQ ID NO: 549750 - DNA, 80 bp, Artificial Sequence
  ENSG00000168267_0 (sequence is synthesized)
ccaggaagtccgccacagccctccccagcgcagcgcgagcgcgggccagagcgcagcggccgcgggcactccagggaggc

SEQ ID NO: 549751 - DNA, 120 bp, Artificial Sequence
  ENSG00000168267_1 (sequence is synthesized)
ccagggccccgggagggaggggctcggacgggccttagaaactcaccaagaactaacacgcgcagcccggcagtcccgctgcccactgcggcggcgagcatggacgcggtgttgctggag

SEQ ID NO: 549752 - DNA, 120 bp, Artificial Sequence
  ENSG00000168267_2 (sequence is synthesized)
cacttccccgggggcctagacgcctttccttcttcgtacttcgacgaggacgacttcttcaccgaccagtcttcacgggaccccctggaggacggcgatgagctgctggcggacgagcag

SEQ ID NO: 549753 - DNA, 120 bp, Artificial Sequence
  ENSG00000168267_3 (sequence is synthesized)
gccgaggtggagttccttagccaccagctccacgagtactgctaccgcgacggggcgtgcctgctgctgcagcccgcgcccccggccgccccgctagcgctcgccccgccgtcctcgggg

SEQ ID NO: 549754 - DNA, 80 bp, Artificial Sequence
  ENSG00000168267_4 (sequence is synthesized)
ggcctcggtgagccagacgacggcggcggcggcggctactgctgcgagacgggggcgcccccaggcggcttcccctactc

SEQ ID NO: 549755 - DNA, 80 bp, Artificial Sequence
  ENSG00000168267_5 (sequence is synthesized)
gcctggcctacccgtgcgccggggcggcagtactgtctcccggggcgcggctgcgcggcctgagcggagcggcggctgcg

SEQ ID NO: 549756 - DNA, 120 bp, Artificial Sequence
  ENSG00000168267_6 (sequence is synthesized)
gacacgctgcgcctggccatcggctacatcaacttcctcagcgagctcgtgcaggccgacctgcccttgcgcggcggtggcgcgggcggctgcggggggccgggcggcggcgggcgcctg

SEQ ID NO: 549757 - DNA, 120 bp, Artificial Sequence
  ENSG00000168267_7 (sequence is synthesized)
ggcggggacagcccgggcagccaggcccagaaggtcatcatctgccatcggggcacccggtccccctcccccagcgaccctgattatggcctccctcccctagcaggacactctctctca

SEQ ID NO: 549758 - DNA, 120 bp, Artificial Sequence
  ENSG00000168267_8 (sequence is synthesized)
tggactgatgaaaaacaactcaaggaacaaaatattatccgaacagccaaagtctggaccccagaggaccccagaaaactcaacagcaaatcttccttcaacaacatagaaaacgaacca

SEQ ID NO: 549759 - DNA, 120 bp, Artificial Sequence
  ENSG00000168267_9 (sequence is synthesized)
ccatttgagtttgtgtcctgagaagtcccagactcggctgaagatctgattatgtctctgtgcatattgtacatgtaaatatctataatgtaaatgtaatttaagaatcaaatttttcga

SEQ ID NO: 549760 - DNA, 120 bp, Artificial Sequence
  ENSG00000168267_10 (sequence is synthesized)
tcgaatggcaatcaactgtttattatttatctatttattatcctgttgagttgatgaaatagatgatttctttttaaatatataatttatataacttatcctgattttctgaaaatatgc

SEQ ID NO: 549761 - DNA, 120 bp, Artificial Sequence
  ENSG00000168267_11 (sequence is synthesized)
gcctatgattttcctgaactctgtgttgttgggagaactctggccagaaaacgtcctgcttatttattgccagatatggtttatttctaagcgttgtcaataaatgctatttacaccttt

SEQ ID NO: 549762 - DNA, 120 bp, Artificial Sequence
  ENSG00000168267_12 (sequence is synthesized)
ggcctagacgcctttccttcttcgtacttcgacgaggacgacttcttcaccgaccagtcttcacgggaccccctggaggacggcgatgagctgctggcggacgagcaggccgagggtccc

SEQ ID NO: 549763 - DNA, 120 bp, Artificial Sequence
  ENSG00000168267_13 (sequence is synthesized)
ccagctcagggagaaggggtcgggcactcgaaggctccggaggggctgggggagctgactgccaagcagacagtcggaccgacggattgtcgggtccccctcccccagcgaccctgatta

SEQ ID NO: 549764 - DNA, 120 bp, Artificial Sequence
  ENSG00000168268_0 (sequence is synthesized)
acacaggcttgatgctcgctcccgtttctacaggaggttttgacggctggatgctgcagggcatcccctcgcctggaggaggttcacttgtggccaggttcccagcacacccacttgctc

SEQ ID NO: 549765 - DNA, 120 bp, Artificial Sequence
  ENSG00000168268_1 (sequence is synthesized)
actggggccctggggacaccgccacactcgagcccatcctacggcctcaatccttaccagtccccaggccatggactgccacactgtaggtcttcaatcaaggttcagtggagtttcgaa

SEQ ID NO: 549766 - DNA, 120 bp, Artificial Sequence
  ENSG00000168268_2 (sequence is synthesized)
tgtacacacaccctgaaagacagcgcggccacctcagaaaacaacgcgcgcccagctggctcccctccgacagggcccacggctactgggtcggcctcctccggaccctgagcacagcct

SEQ ID NO: 549767 - DNA, 120 bp, Artificial Sequence
  ENSG00000168268_3 (sequence is synthesized)
ggtatgcgtgcgggctcggaatacggatctgagcagaagaaatgcgagtggagagcggttctgcgcaggaaagaggaattttgttggaaagcctgtcgacgttgctagaaaagaccacag

SEQ ID NO: 549768 - DNA, 120 bp, Artificial Sequence
  ENSG00000168268_4 (sequence is synthesized)
catctcacgaggggcgtgcgccgggaaaccgggagttgacggacctcctgccccccgaggtctgcagtctcctgaacccagcagccatctacgccaacaacgagatcagcctgcgtgacg

SEQ ID NO: 549769 - DNA, 120 bp, Artificial Sequence
  ENSG00000168268_5 (sequence is synthesized)
ttgaggtctacggctttgactacgactacaccctggcccagtatgcagacgcactgcaccccgagatcttcagtaccgcccgtgacatcctgatcgagcactacaagtacccagaaggga

SEQ ID NO: 549770 - DNA, 120 bp, Artificial Sequence
  ENSG00000168268_6 (sequence is synthesized)
ttcggaagtatgactacaaccccagctttgccatccgtggcctccactatgacattcagaagagccttctgatgaagattgacgccttccactacgtgcagctggggacagcctacaggg

SEQ ID NO: 549771 - DNA, 120 bp, Artificial Sequence
  ENSG00000168268_7 (sequence is synthesized)
gcctccagcctgtgccagacgaggaggtgattgagctgtatgggggtacccagcacatcccactataccagatgagtggcttctatggcaagggtccctccattaagcagttcatggaca

SEQ ID NO: 549772 - DNA, 120 bp, Artificial Sequence
  ENSG00000168268_8 (sequence is synthesized)
gctaccggagatggctctgctgtcctgtgtggtggactactttctgggccacagcctggagtttgaccaagcacatctctacaaggacgtgacggacgccatccgagacgtgcatgtgaa

SEQ ID NO: 549773 - DNA, 120 bp, Artificial Sequence
  ENSG00000168268_9 (sequence is synthesized)
gggcctcatgtaccagtggatcgagcaggacatggagaagtacatcctgagaggggatgagacgtttgctgtcctgagccgcctggtggcccatgggaaacagctgttcctcatcaccaa

SEQ ID NO: 549774 - DNA, 120 bp, Artificial Sequence
  ENSG00000168268_10 (sequence is synthesized)
cagtcctttcagcttcgtagacaaggggatgcggcacatggtgggtcccgattggcgccagctcttcgatgtggtcattgtccaggcagacaagcccagcttcttcactgaccggcgcaa

SEQ ID NO: 549775 - DNA, 120 bp, Artificial Sequence
  ENSG00000168268_11 (sequence is synthesized)
gcctttcagaaaactcgatgagaagggctcacttcagtgggaccggatcacccgcttggaaaagggcaagatctatcggcagggaaacctgtttgacttcttacgcttgacggaatggcg

SEQ ID NO: 549776 - DNA, 120 bp, Artificial Sequence
  ENSG00000168268_12 (sequence is synthesized)
tggcccccgcgtgctctacttcggggaccacctctatagtgatctggcggatctcatgctgcggcacggctggcgcacaggcgccatcatccccgagctggagcgtgagatccgcatcat

SEQ ID NO: 549777 - DNA, 120 bp, Artificial Sequence
  ENSG00000168268_13 (sequence is synthesized)
caacacggagcagtacatgcactcgctgacgtggcagcaggcgctcacggggctgctggagcgcatgcagacctatcaggacgcggagtcgaggcaggtgctggctgcctggatgaaaga

SEQ ID NO: 549778 - DNA, 120 bp, Artificial Sequence
  ENSG00000168268_14 (sequence is synthesized)
gcggcaggagctgaggtgcatcaccaaggccctgttcaatgcgcagttcggcagcatcttccgcaccttccacaaccccacctacttctcaaggcgcctcgtgcgcttctctgacctcta

SEQ ID NO: 549779 - DNA, 120 bp, Artificial Sequence
  ENSG00000168268_15 (sequence is synthesized)
catggcctccctcagctgcctgctcaactaccgcgtggacttcaccttctacccacgccgtacgccgctgcagcacgaggcacccctctggatggaccagctctgcaccggctgcatgaa

SEQ ID NO: 549780 - DNA, 120 bp, Artificial Sequence
  ENSG00000168268_16 (sequence is synthesized)
gacccccttccttggtgacatggcccacatccgctgagggcacctttattgtctgggacaggccctcagcccctcctgccccatccacccagacaagcaataaaagtggtctcctccctg

SEQ ID NO: 549781 - DNA, 80 bp, Artificial Sequence
  ENSG00000168268_17 (sequence is synthesized)
ctcggcgctggctgctgtgcggaggccacggcgggccgcgagccgcctcgtcctcgccctcctgccctgggtgcggcccc

SEQ ID NO: 549782 - DNA, 120 bp, Artificial Sequence
  ENSG00000168268_18 (sequence is synthesized)
gcccactgccccggcgtcccgcgctccgcgcccgcccaggcacccaccagcggcgccgacctcagcgcgcacctatgggctcgctaccaggacatgcggagactggtgcacgacctcctg

SEQ ID NO: 549783 - DNA, 120 bp, Artificial Sequence
  ENSG00000168268_19 (sequence is synthesized)
ctatgagcaggcagtgattaaggtttagccctggctggaatgcggaaatcctggctgagctgggcttcttcaggctaggggttctaaaggccttggggctggaggagggggaagccagca

SEQ ID NO: 549784 - DNA, 120 bp, Artificial Sequence
  ENSG00000168268_20 (sequence is synthesized)
gctggccaggggagcaatgtggaggtggccaatgcccagcctggcctgcaggaaacacccccaccctctcagccctgcccacttctctgcctcccacccttccgcacccaaactctccac

SEQ ID NO: 549785 - DNA, 120 bp, Artificial Sequence
  ENSG00000168268_21 (sequence is synthesized)
agccctcgggcccaggtgcgtcccttcagctctgagggcgctgctctcccctgccttggcatccagcctcagctaaagagggtcatacacctttgtgagaaacacatgactttcttccct

SEQ ID NO: 549786 - DNA, 120 bp, Artificial Sequence
  ENSG00000168268_22 (sequence is synthesized)
ggcagctttcaggcagttctttatgcccagtattctgaagctgctttccactgtgtgttggatcctgcctgtcagtcactaggagtctgtcagtctcctgccctttgagactctttctct

SEQ ID NO: 549787 - DNA, 120 bp, Artificial Sequence
  ENSG00000168268_23 (sequence is synthesized)
tggtctggggcctgcctgggcctctgcccctccacttgaacttagttcagcaattggcttctcccacaccacctgtttcccccagcgcttccacttctgaggcttggaatgcacagactg

SEQ ID NO: 549788 - DNA, 120 bp, Artificial Sequence
  ENSG00000168268_24 (sequence is synthesized)
cttcaagaactgtgcttgctgggtgtcaattattctcgcttttggggtgtggactcctaccctggtggctgctgcctgagcactagtctggtgattcctgctctgggccgctcagtttct

SEQ ID NO: 549789 - DNA, 120 bp, Artificial Sequence
  ENSG00000168268_25 (sequence is synthesized)
gccaccctgtgagcttccccagttacatgtgggcctggctgagtgtctccatctttctctggctccaagatgctggtggccccggtgaggtctgccattggtctgccaggtccctctgca

SEQ ID NO: 549790 - DNA, 120 bp, Artificial Sequence
  ENSG00000168268_26 (sequence is synthesized)
tgcagagccttccctgcagtttctaccttacaaacagggatctaatccctaacctggggtacgtgtgagaccacagggagaaggccctcgaggcatgggcaccatgccaggcctgtaggg

SEQ ID NO: 549791 - DNA, 120 bp, Artificial Sequence
  ENSG00000168268_27 (sequence is synthesized)
caccttcctgcagcaggcagaatccccttcccaagtaggaggggaaagtgacaagaaccagggcccagggagggagcagcaaggccatgggaaagggcagccagcatccggctggatttg

SEQ ID NO: 549792 - DNA, 120 bp, Artificial Sequence
  ENSG00000168268_28 (sequence is synthesized)
ggctgcctctggggattcgggagggaggactggtggaggacaaggcacacttggctcagcagcattcccctcctctccctagggaaacctgtttgacttcttacgcttgacggaatggcg

SEQ ID NO: 549793 - DNA, 120 bp, Artificial Sequence
  ENSG00000168268_29 (sequence is synthesized)
ctgaaagaggctggcttggggccacggtgaaactgcctcctcaccatccgtcctgcctccctggcgcccccagagccttctgatgaagattgacgccttccactacgtgcagctggggac

SEQ ID NO: 549794 - DNA, 120 bp, Artificial Sequence
  ENSG00000168268_30 (sequence is synthesized)
ccgagcccagagaccggggaccaggaccccgggaaaggagagcaccaggactagggggaggagcggaggatctggggtcagaagcatccagaggcgcaggacctcctgccccccgaggtc

SEQ ID NO: 549795 - DNA, 120 bp, Artificial Sequence
  ENSG00000168268_31 (sequence is synthesized)
ccgagctggagcgtgagatccgcatcatcaacacggagcagtacatgcactcgctgacgtggcagcaggcgctcacggggctgctggagcgcatgcaggtgtgggccggggtggctgtgg

SEQ ID NO: 549796 - DNA, 120 bp, Artificial Sequence
  ENSG00000168268_32 (sequence is synthesized)
gcggccagttgccgaggtccgaaccaagcgggcgcagtgaccgtggcccacaaccctgcagcgcacggcccagtcacctggttagcggacgtcggctgccctgcaggcccctcggcctcc

SEQ ID NO: 549797 - DNA, 120 bp, Artificial Sequence
  ENSG00000168268_33 (sequence is synthesized)
actccggctttgtggggtggcggagaatcacttcttgaccagtaaaggcaggatggtaaaggcccctgaggaatggtcattttgaagccttgggcatctgtccaccctcgaggtcccagg

SEQ ID NO: 549798 - DNA, 120 bp, Artificial Sequence
  ENSG00000168268_34 (sequence is synthesized)
ttgagtttgtgtctgtggaggggcggcccagcgttatttaagaagtctttgctctgggcccggagaagaccctcagagtatcctgagaagcctgccttggaggtttcagggaggactacg

SEQ ID NO: 549799 - DNA, 120 bp, Artificial Sequence
  ENSG00000168268_35 (sequence is synthesized)
gacaagcccagcttcttcactgaccggcgcaagtatgggcatggtgggggttgcagggccagggaaggggaatagaggccccaccccaatgaggggactgaagcaggaggccaacctggc

SEQ ID NO: 549800 - DNA, 120 bp, Artificial Sequence
  ENSG00000168268_36 (sequence is synthesized)
ccttgcccactgcccaatgtgcttggggtgagaacacccccttgctggcatgggtccacttgagcaggtgggcctttacggaggagggatgggggttgcccggcccgtggcccagccaca

SEQ ID NO: 549801 - DNA, 120 bp, Artificial Sequence
  ENSG00000168269_0 (sequence is synthesized)
gtcaggggcagctccggggtgcaggtgccaggcaggtggctccggccagcccagccccagcatgagctccttcgacctgccggcgccctccccacctcgctgcagcccccagttccccag

SEQ ID NO: 549802 - DNA, 120 bp, Artificial Sequence
  ENSG00000168269_1 (sequence is synthesized)
catcggccaggagccccccgagatgaacctctactatgagaacttcttccacccacagggcgtgcccagccctcagcggccctccttcgaggggggcggcgagtatggggccacccccaa

SEQ ID NO: 549803 - DNA, 120 bp, Artificial Sequence
  ENSG00000168269_2 (sequence is synthesized)
cccctacctctggttcaacgggcccaccatgaccccgccaccctacctgcccggccccaacgccagccccttcctgccccaggcctatggagtgcagaggccgctgctgcccagcgtgtc

SEQ ID NO: 549804 - DNA, 120 bp, Artificial Sequence
  ENSG00000168269_3 (sequence is synthesized)
ggggcttggggggagcgacctgggctggctgcccatcccctcgcaggaggagctgatgaagctggtgcggccaccctattcctactcggctctcatcgccatggccatccacggggcacc

SEQ ID NO: 549805 - DNA, 120 bp, Artificial Sequence
  ENSG00000168269_4 (sequence is synthesized)
cgacaagcgcctcactctcagccagatctaccagtacgtggccgacaacttccccttctacaacaagagcaaggccggctggcagaactccatccgccacaacctgtcgctcaacgactg

SEQ ID NO: 549806 - DNA, 120 bp, Artificial Sequence
  ENSG00000168269_5 (sequence is synthesized)
cttcaagaaggtgccccgcgacgaggacgacccgggcaaagggaattactggaccctggaccccaactgtgagaaaatgttcgacaatggaaatttccgcaggaaaaggaagagaaaatc

SEQ ID NO: 549807 - DNA, 120 bp, Artificial Sequence
  ENSG00000168269_6 (sequence is synthesized)
agatgtttcctctagcacagcctccttggccttagagaagacagagagcagtctcccggtggacagccccaagaccacggagcctcaggacatcttggatggagcctcaccagggggcac

SEQ ID NO: 549808 - DNA, 120 bp, Artificial Sequence
  ENSG00000168269_7 (sequence is synthesized)
caccagctccccagagaagcggccctcccctcccccatcaggcgccccttgccttaacagcttcctttcctctatgacagcctatgtgagcggggggagccccacgagccaccccttggt

SEQ ID NO: 549809 - DNA, 120 bp, Artificial Sequence
  ENSG00000168269_8 (sequence is synthesized)
cacaccaggactgagccctgagcccagtgacaagacggggcagaactcactgaccttcaactccttctccccgctcaccaacctcagcaaccacagcggtgggggtgactgggcgaaccc

SEQ ID NO: 549810 - DNA, 120 bp, Artificial Sequence
  ENSG00000168269_9 (sequence is synthesized)
gccaattcagccctcacttctacaacagtgtcaacaccagtggtgtcctctaccccagggagggcaccgaggtctaggtacagaacagctcctgagccaggtggacatgccagagagaaa

SEQ ID NO: 549811 - DNA, 120 bp, Artificial Sequence
  ENSG00000168269_10 (sequence is synthesized)
agcagtagaggtcctccatgccagccccacggtggtccatgactgcggaactgcccagacataagcaggagcctccgaggaatccaccctctttctagaacactggttaaggcttctgtt

SEQ ID NO: 549812 - DNA, 120 bp, Artificial Sequence
  ENSG00000168269_11 (sequence is synthesized)
tatcacacataggcccacacacagactcaccaactttgcaatagaaatactggtgcctgcagagcagcactaacagtggcaggtgctgtactaggctctgtactggccacacttactatt

SEQ ID NO: 549813 - DNA, 120 bp, Artificial Sequence
  ENSG00000168269_12 (sequence is synthesized)
gacagtcaccccgtaaggttcacaaaccaccccattgaacagatgaggaactgaggctcaaggaggttaagtaacatttccagggttatataaactagtaaatggcagagctaagagtca

SEQ ID NO: 549814 - DNA, 120 bp, Artificial Sequence
  ENSG00000168269_13 (sequence is synthesized)
aatccaggtctatgtgatcctcagagattggaggccgggatggagaattggttgagtagccaaggaaggtcagtgtgaaaagcttgctatggcaaatatagcgaaatctctccactgcct

SEQ ID NO: 549815 - DNA, 120 bp, Artificial Sequence
  ENSG00000168269_14 (sequence is synthesized)
tctgtccaccaacatttagtgccagcctaggcacaacttgtcctggtccaagtccttattctgcttgccccaacttacctgcagacactccttttgctaccactcaaggaaggaagtcac

SEQ ID NO: 549816 - DNA, 120 bp, Artificial Sequence
  ENSG00000168269_15 (sequence is synthesized)
cagtggccttagtgcaggaaactcagccctggtggccctgcagaacaatgcatctgacatgtgcgatgcatccccatggagagacagcattgctccccagccctccagaaaccttgagca

SEQ ID NO: 549817 - DNA, 120 bp, Artificial Sequence
  ENSG00000168269_16 (sequence is synthesized)
gatccagggatcagtgagaggagtggtgtgtacccctaaatcctcccaccccagcactgcccatctgtaaaatcttgtaaagcccagtttcctgtgtgcatgtcatggaccagtgagctg

SEQ ID NO: 549818 - DNA, 120 bp, Artificial Sequence
  ENSG00000168269_17 (sequence is synthesized)
gagatggctgaatcttccaagagaaacaaggttggataagcgcttccttttttttagcccaggagaggtggatgtttgtctgagaaaacaatggcctcaagggaggggccttgggcccac

SEQ ID NO: 549819 - DNA, 120 bp, Artificial Sequence
  ENSG00000168269_18 (sequence is synthesized)
cctcacagggggtctctgtgtgatctcttgggatttctccttgtttttgtgagtacctgggaagtgttgtttgttttcttattttctttttaattaaaaaacaaacaaacatgtggtgca

SEQ ID NO: 549820 - DNA, 120 bp, Artificial Sequence
  ENSG00000168273_0 (sequence is synthesized)
actcgtgcgcctaccagacagtggcggaggacggcgctcgctagtctcccaggtcgcggtacacggcgagaacgggcggggcggtctcggctgcgtccgggcgatccagtgcttagttcc

SEQ ID NO: 549821 - DNA, 120 bp, Artificial Sequence
  ENSG00000168273_1 (sequence is synthesized)
gtcatatccctctccacgacctcggtcgagcatgttcaccagggcccaggtgagacggattctgcagcgggtgcccgggaagcagcgatttggcatctaccggttcctgcccttcttttt

SEQ ID NO: 549822 - DNA, 120 bp, Artificial Sequence
  ENSG00000168273_2 (sequence is synthesized)
tgtcctgggaggaacgatggagtggatcatgattaaagtgcgcgtgggccaggagaccttctatgatgtctaccgtagaaaagcctcagaaagacagtatcagagaaggctggaagatga

SEQ ID NO: 549823 - DNA, 120 bp, Artificial Sequence
  ENSG00000168273_3 (sequence is synthesized)
atgagactgaacttcagcagtcaataaagtcaatatgaatttttactattggtttcagtgccttttaaaatatacttttcagatctcttgttctgacacagcttgtcctttatcagctgc

SEQ ID NO: 549824 - DNA, 120 bp, Artificial Sequence
  ENSG00000168273_4 (sequence is synthesized)
acaatattccaataactgtttttgcaaagaatttttatagttctgtctctgcttgagtacttcccaagtcactgctggacagcacttgtgggaaaattatttcctcctaaaacactcact

SEQ ID NO: 549825 - DNA, 120 bp, Artificial Sequence
  ENSG00000168273_5 (sequence is synthesized)
cgatgaatctagtccatgaaatatttcttaaacaattcaaggatcaatcaggatgcttttcagtgaagcccgaattgttttcggcaatctttgtttttaggcaactaattataaccttat

SEQ ID NO: 549826 - DNA, 120 bp, Artificial Sequence
  ENSG00000168273_6 (sequence is synthesized)
ttacttttttgcagaattcaaattaaattatggacacattctctattgccagatcatttaaaccaggataattatgcaggttgtatttctgccagctactagactataaactttttgcta

SEQ ID NO: 549827 - DNA, 120 bp, Artificial Sequence
  ENSG00000168273_7 (sequence is synthesized)
aactgcaagggctggatcttcatgaggactgtgggcaacaggtttcacactactctaggatgaagatgttgctgttcgattcagctgctagaaacagttgctccttccatgagaaagtga

SEQ ID NO: 549828 - DNA, 120 bp, Artificial Sequence
  ENSG00000168273_8 (sequence is synthesized)
acctacacagtataaagcatcccagacttgagctaaatcagaggctcagtctattgagtgatttggcaatctgacccagtgtaagtttggatcagcctggtagaaaaagcagataccttt

SEQ ID NO: 549829 - DNA, 120 bp, Artificial Sequence
  ENSG00000168273_9 (sequence is synthesized)
ccatgcttgcatagccacatctaacatcgtttcaagcaaaaaaaaatctacatactaaagactaagtttcagaatagtttctaactattgcatgagaataaagctgatgcttaaggccat

SEQ ID NO: 549830 - DNA, 120 bp, Artificial Sequence
  ENSG00000168273_10 (sequence is synthesized)
agggtatcctcaagttaatgatctctgccacaaacatgtctcctaattttttctagatttttcttctaattttagtccacttatcttagaaccaattcagtaaagaaccattaactaact

SEQ ID NO: 549831 - DNA, 120 bp, Artificial Sequence
  ENSG00000168273_11 (sequence is synthesized)
actcccatctccttaaagcactacctacactacagtgcagcaagcccagagtcacagctgggagatggcttgaatgtgaaaggccagtaatgacctctgccatcagggagaggacggtgg

SEQ ID NO: 549832 - DNA, 120 bp, Artificial Sequence
  ENSG00000168273_12 (sequence is synthesized)
ttcatcgtattctcatgcccagttgtgtcatctaggattcctggtaaacctaacctgataaaccatttttagtgacttgactgctgtataaaaactatagtatgattctcaattatatgg

SEQ ID NO: 549833 - DNA, 120 bp, Artificial Sequence
  ENSG00000168273_13 (sequence is synthesized)
ccatactccatgtttgccctaacccaccttgttttaggagtttagtatttgatacatatagaaaatacgtcataccttttacaaagaataatagtaaacactaataaaaccattggctaa

SEQ ID NO: 549834 - DNA, 120 bp, Artificial Sequence
  ENSG00000168273_14 (sequence is synthesized)
atgttcaccagggcccagatgatgtctaccgtagaaaagcctcagaaagacagtatcagagaaggctggaagatgaatgagactgaacttcagcagtcaataaagtcaatatgaattttt

SEQ ID NO: 549835 - DNA, 120 bp, Artificial Sequence
  ENSG00000168273_15 (sequence is synthesized)
cccttcggccgtcacgccggcgatggcggcgcctttccctggccccagccctggaagtcagcgggcctaagagcggccgtccctgagaggctccggacggccgaggcgccgagaggagac

SEQ ID NO: 549836 - DNA, 120 bp, Artificial Sequence
  ENSG00000168273_16 (sequence is synthesized)
ccatggcctggggactgatgatgtctaccgtagaaaagcctcagaaagacagtatcagagaaggctggaagatgaatgagactgaacttcagcagtcaataaagtcaatatgaattttta

SEQ ID NO: 549837 - DNA, 120 bp, Artificial Sequence
  ENSG00000168273_17 (sequence is synthesized)
gcactgacccgtcaactcccggtttcccggcgcacgcccctcgtgagatgctgtggtcttttctagcaacgtcgacaggctttccaacaaaattcctctttcctgcgcagaaccgctctc

SEQ ID NO: 549838 - DNA, 120 bp, Artificial Sequence
  ENSG00000168273_18 (sequence is synthesized)
cctgtcggaggggagccagctgggcgcgcgttgttttctgaggtggccgcgctgtctttcagggtgtgtgtacattcgaaactccactgaaccttgattgaagacctacagtgtggcagt

SEQ ID NO: 549839 - DNA, 120 bp, Artificial Sequence
  ENSG00000168273_19 (sequence is synthesized)
cgtgggccaggagaccttctattcaacctcatcttccctaattcaatgacactcacctgcccacacgaggacgcaccaggccatgggacttgatgaagacacagtcgccaaccttcagcc

SEQ ID NO: 549840 - DNA, 120 bp, Artificial Sequence
  ENSG00000168273_20 (sequence is synthesized)
acatgtcattgtaatggagctgctcaaagtagtggcaacctggttcaccattggacatttccacagggacatcttctttttcctgttgtaaagaaaactggctgaagaaaggtagttgat

SEQ ID NO: 549841 - DNA, 120 bp, Artificial Sequence
  ENSG00000168275_0 (sequence is synthesized)
gtggggcgcgcgtggactatgggcccgggaggtcccttactgtccccgagccgcgggttcctcttgtgcaaaacggggtggcactccaatcgcctgcttggtgattgtggcccccacaca

SEQ ID NO: 549842 - DNA, 120 bp, Artificial Sequence
  ENSG00000168275_1 (sequence is synthesized)
cctgtttctacagcgcttaggttcgaacagtaaccctgtaaactaggcactgctgtccccgctttactggtgggaaacgggctcggagagaataaatgagctgccctaagcgactgggac

SEQ ID NO: 549843 - DNA, 120 bp, Artificial Sequence
  ENSG00000168275_2 (sequence is synthesized)
agaaccacagttctcagccgggctttctgagcccacgctgccgccccagcagggatcaaatcacacagtgtgagataagcctcaagagcgggtggccttatgctgccactgagaactgat

SEQ ID NO: 549844 - DNA, 83 bp, Artificial Sequence
  ENSG00000168275_3 (sequence is synthesized)
aggaagaggagattgacggttttcctctttccttatcttctcttcagattacaaagttcattgttaatctcaaatattatttt

SEQ ID NO: 549845 - DNA, 120 bp, Artificial Sequence
  ENSG00000168275_4 (sequence is synthesized)
atcgcagtaggaatggcagccccatctatgaaggaaagacaggtctgctggggggcccgggatgagtactggaagtgtttagatgagaacttagaggatgcttctcaatgcaagaagtta

SEQ ID NO: 549846 - DNA, 120 bp, Artificial Sequence
  ENSG00000168275_5 (sequence is synthesized)
agaagctctttcgaatcaagttgtccccaacagtggataaaatattttgataaaagaagagactacttaaaattcaaagaaaaatttgaagcaggacaatttgagccttcagaaacaact

SEQ ID NO: 549847 - DNA, 120 bp, Artificial Sequence
  ENSG00000168275_6 (sequence is synthesized)
gcaaaatcctaggctgttcataaagattgaaagtattctttctggacattgaaaaagctccactgactatggaacagtaatagtttgaatcatagtgaacatcaatacttgttccctata

SEQ ID NO: 549848 - DNA, 120 bp, Artificial Sequence
  ENSG00000168275_7 (sequence is synthesized)
tacgacacttgataattaagatgatcaagaaccagaagatctgtgaagaaatgaaataaaatggtatttagtaagaaatctctattttaagaaaaaaagtaaaacctgttataaacacat

SEQ ID NO: 549849 - DNA, 120 bp, Artificial Sequence
  ENSG00000168275_8 (sequence is synthesized)
tggtagctcggaagggtcaaaagagtccgcggtttcgccgcgtgagttgctttttgcggctggggaggtctacgcttctagagcttgagccagcggggcgaccctgcagtggcaggactc

SEQ ID NO: 549850 - DNA, 120 bp, Artificial Sequence
  ENSG00000168275_9 (sequence is synthesized)
gtttttgttttgtttttaattagaggatgggtagtaggcagatgataaaatttataatatacatagaagtgaaataaatgggagttagcattttaatacaggcaagagctattacaacaa

SEQ ID NO: 549851 - DNA, 120 bp, Artificial Sequence
  ENSG00000168275_10 (sequence is synthesized)
gtgaacttaaaatatacaagtaaaataataaaagccatctataaaaaagcccatagctaatatcaacacttaatgttgggacaggaactggatgtctagctagtccagtgagacaaaaaa

SEQ ID NO: 549852 - DNA, 120 bp, Artificial Sequence
  ENSG00000168275_11 (sequence is synthesized)
gaaaaagcatacacactgggaaggaagaaagaaaactagctctactcacatataataaatactatcttatagaatgtaccaatggatgcacaaaaagagctcctagaactataagtcaat

SEQ ID NO: 549853 - DNA, 120 bp, Artificial Sequence
  ENSG00000168275_12 (sequence is synthesized)
catagaaaggttgcaggaaacaaggtcaatatacacaaggaaaattatattcctatatatcagcaataaacaactggaatttaaaacttaaaaataccatttgtgaatagcaccaaaaaa

SEQ ID NO: 549854 - DNA, 120 bp, Artificial Sequence
  ENSG00000168275_13 (sequence is synthesized)
aattaaaggaatacttaggtataaatctaatatatggaggcctctatgctgagaactagaaaacacttggaagcagactacatcagattaaatggagaggtatacagttggccctctgtg

SEQ ID NO: 549855 - DNA, 120 bp, Artificial Sequence
  ENSG00000168275_14 (sequence is synthesized)
ggttctgcatccatggattcaaccccgaagagaaaatttttgggaaaaggaaaaacgagtaaaaataataaaaatttaaaaatccagtataacacctatttacattgtattaggtattgt

SEQ ID NO: 549856 - DNA, 120 bp, Artificial Sequence
  ENSG00000168275_15 (sequence is synthesized)
aagtcattgagatgatttaaagtataggcatacctcaaagatactgcaggtttggttacagaccactgcattaaagtgaatatcacaatagagtgggttacacaaatgttttggttttcc

SEQ ID NO: 549857 - DNA, 120 bp, Artificial Sequence
  ENSG00000168275_16 (sequence is synthesized)
agtacacatagaagttatgtttatactgttgtctagtaagtgtgcaatagcattatgtctgctcagtatatatgccttcattttaaaatactttttattactaaaaaatgctaaagattc

SEQ ID NO: 549858 - DNA, 120 bp, Artificial Sequence
  ENSG00000168280_0 (sequence is synthesized)
agagcgcgctggtgctgatgcaggatggctgagcgcgcaggagcccgggaggtctgagccgggcgaggctcgctccctgcgcatcgcctcctccgcccgccgcgtggtcgcgggcaggtg

SEQ ID NO: 549859 - DNA, 120 bp, Artificial Sequence
  ENSG00000168280_1 (sequence is synthesized)
cagggccagggcaggccggtctgcagccggaggggccggagcggagaagctgcccaccttcccgggctcggagcggccggggctgctcagccggccgggctcgcgatgacctgctgagaa

SEQ ID NO: 549860 - DNA, 120 bp, Artificial Sequence
  ENSG00000168280_2 (sequence is synthesized)
ggccgggctcgcgatgacctgctgagaagcgtcgtcggaggctgcaggaggcggcctagctgtgggcggtgcagctcgcggcctcctccctcgtcgttcccggccccggccccccaccca

SEQ ID NO: 549861 - DNA, 120 bp, Artificial Sequence
  ENSG00000168280_3 (sequence is synthesized)
tccccgtgccccctccctaccgccggccgagatggcggatccagccgaatgcagcatcaaagtgatgtgccggttccggcccctcaacgaagcggagatcctccgcggggacaaattcat

SEQ ID NO: 549862 - DNA, 120 bp, Artificial Sequence
  ENSG00000168280_4 (sequence is synthesized)
ccccaaatttaaaggcgatgagaccgtggtgatcgggcaagggaagccatatgtcttcgacagagtgctacctcccaacacgacccaagagcaggtttacaatgcatgtgcgaagcaaat

SEQ ID NO: 549863 - DNA, 120 bp, Artificial Sequence
  ENSG00000168280_5 (sequence is synthesized)
tgtcaaagatgtccttgaaggttataacgggacgatttttgcgtatgggcagacttcatcaggaaaaacccacaccatggaggggaagctgcatgacccccagctcatggggatcatccc

SEQ ID NO: 549864 - DNA, 120 bp, Artificial Sequence
  ENSG00000168280_6 (sequence is synthesized)
acgaattgcccatgatatctttgaccatatctactccatggatgagaacctggagtttcacataaaggtttcctattttgagatctacttggacaaaataagggacttacttgatgtatc

SEQ ID NO: 549865 - DNA, 120 bp, Artificial Sequence
  ENSG00000168280_7 (sequence is synthesized)
caagaccaacttggctgttcatgaagataaaaacagagtcccgtatgtaaaggggtgcactgagcggtttgtgtcgagccctgaggaagtcatggatgtaatagatgaaggcaaagcaaa

SEQ ID NO: 549866 - DNA, 120 bp, Artificial Sequence
  ENSG00000168280_8 (sequence is synthesized)
ccgacacgtggctgtgacaaacatgaatgaacacagctctagaagtcacagtatcttcctgataaatattaaacaagagaatgtagagactgaaaaaaaactcagtgggaaactttattt

SEQ ID NO: 549867 - DNA, 120 bp, Artificial Sequence
  ENSG00000168280_9 (sequence is synthesized)
ggttgatttggctgggagcgaaaaggtcagcaaaactggtgccgagggagctgttcttgacgaagctaaaaatatcaataagtctttgtctgctcttggaaatgtgatctctgctttggc

SEQ ID NO: 549868 - DNA, 120 bp, Artificial Sequence
  ENSG00000168280_10 (sequence is synthesized)
agaagggacaaaaacacatgtgccataccgggacagcaagatgactcggattcttcaggactctttgggtgggaactgcagaaccaccatcgtcatttgctgttctccttctgtcttcaa

SEQ ID NO: 549869 - DNA, 120 bp, Artificial Sequence
  ENSG00000168280_11 (sequence is synthesized)
tgaggctgagaccaagtccacactgatgttcggacagagagctaagaccatcaagaatacagtctctgtgaacctagaactgacagcagaagaatggaagaagaaatatgaaaaagagaa

SEQ ID NO: 549870 - DNA, 120 bp, Artificial Sequence
  ENSG00000168280_12 (sequence is synthesized)
agagaaaaacaagactttgaagaatgttatccagcatctggagatggagctaaacaggtggaggaatggagaagctgtgcctgaggatgaacagatcagtgccaaggaccagaagaacct

SEQ ID NO: 549871 - DNA, 120 bp, Artificial Sequence
  ENSG00000168280_13 (sequence is synthesized)
ggagccttgtgataacacccccatcatagacaatattgctcctgttgttgctggcatctctacagaggagaaagagaagtacgatgaggagatctccagtctctacagacaactggatga

SEQ ID NO: 549872 - DNA, 120 bp, Artificial Sequence
  ENSG00000168280_14 (sequence is synthesized)
caaggatgatgaaattaaccagcagagccagctggctgaaaagctgaagcaacagatgttggatcaggatgagcttttagcttccacaagaagagactatgagaagatacaggaggagct

SEQ ID NO: 549873 - DNA, 120 bp, Artificial Sequence
  ENSG00000168280_15 (sequence is synthesized)
gacacgtctccagattgaaaatgaggcagccaaggatgaggtgaaagaagttctccaggccctggaggagctggctgtcaattatgaccagaaatcacaggaagtggaggataagacccg

SEQ ID NO: 549874 - DNA, 120 bp, Artificial Sequence
  ENSG00000168280_16 (sequence is synthesized)
ggccaatgagcagctgacagacgagctggcccagaaaacgactacattgacaaccacacagagagagctgagccagctacaagagcttagcaaccaccagaagaaaagggcaactgagat

SEQ ID NO: 549875 - DNA, 120 bp, Artificial Sequence
  ENSG00000168280_17 (sequence is synthesized)
cctgaatttgctgttgaaagatctgggggagataggtggaattattggcaccaatgatgtgaaaactttggcagatgtgaatggagtcattgaggaggagtttaccatggcccgcctgta

SEQ ID NO: 549876 - DNA, 120 bp, Artificial Sequence
  ENSG00000168280_18 (sequence is synthesized)
catcagcaagatgaagtcagaggtcaagtccctggtgaaccgcagcaaacagctcgagagcgcccagatggactccaacaggaagatgaatgccagcgagcgggagctggcagcctgcca

SEQ ID NO: 549877 - DNA, 120 bp, Artificial Sequence
  ENSG00000168280_19 (sequence is synthesized)
gctgctcatctcccagcacgaagccaagatcaagtctctgacagactacatgcagaacatggaacagaagaggaggcagctagaagagtcccaggactcgctcagcgaagagctggcaaa

SEQ ID NO: 549878 - DNA, 120 bp, Artificial Sequence
  ENSG00000168280_20 (sequence is synthesized)
gctccgagcccaggaaaaaatgcacgaagtcagcttccaggataaggagaaggaacatctgacgcggttgcaggatgctgaagaaatgaagaaggcgctggagcagcagatggagagcca

SEQ ID NO: 549879 - DNA, 120 bp, Artificial Sequence
  ENSG00000168280_21 (sequence is synthesized)
ccgggaagctcaccagaagcagctgtccagactccgagacgaaattgaggagaagcagaaaatcattgatgagattcgggatttgaatcagaaactgcaactggaacaggagaagcttag

SEQ ID NO: 549880 - DNA, 120 bp, Artificial Sequence
  ENSG00000168280_22 (sequence is synthesized)
ttctgattataacaagctgaaaatagaggaccaagagagagaaatgaagctggaaaagctcttattgctcaacgataaaagggaacaagccagagaagacctcaaagggctggaggagac

SEQ ID NO: 549881 - DNA, 120 bp, Artificial Sequence
  ENSG00000168280_23 (sequence is synthesized)
agtgtctagagaattgcagacactgcacaaccttcggaaactctttgtccaggatctgaccacccgagttaaaaaaagtgtggagttggacaacgatgatggagggggcagtgctgccca

SEQ ID NO: 549882 - DNA, 120 bp, Artificial Sequence
  ENSG00000168280_24 (sequence is synthesized)
gaagcagaaaatttccttcttggagaataacctggagcagctcaccaaagttcacaagcagctggtccgggacaacgcagacctgcgctgtgaactgcccaagctggagaagcggctgcg

SEQ ID NO: 549883 - DNA, 120 bp, Artificial Sequence
  ENSG00000168280_25 (sequence is synthesized)
tgccacggcggagcgcgtcaaggctctggagagcgcgctgaaggaggccaaggagaacgccatgcgggaccgtaagcgctaccagcaggaggtggatcgtatcaaggaggccgtgcgggc

SEQ ID NO: 549884 - DNA, 120 bp, Artificial Sequence
  ENSG00000168280_26 (sequence is synthesized)
caagaacatggccagaagggcccattcagcccagatcgccaagcccatccgccccggacactacccggcctcatctccaacggccgtccatgccattcgagggggaggaggcagctcttc

SEQ ID NO: 549885 - DNA, 120 bp, Artificial Sequence
  ENSG00000168280_27 (sequence is synthesized)
aaattccactcactaccagaaataaatacaaaatatgactccacgtagcatgtcaaggactacattaatcaccaattcctttatttttccccccctacagtttccattttttttttatac

SEQ ID NO: 549886 - DNA, 120 bp, Artificial Sequence
  ENSG00000168280_28 (sequence is synthesized)
atggttgcagaagatccacttactactgagaaccattaccaccgactcggcctccggggtgttgggtggtttctgggtggttcctggagcctcctctgggcagtgcactgtcccatctgt

SEQ ID NO: 549887 - DNA, 120 bp, Artificial Sequence
  ENSG00000168280_29 (sequence is synthesized)
acgccctaatgtgccattccctagaggggaacaaccaagtgccgtggaggcagatgatcatggtctgcctcaactgtctggtttcctgtaaaataaacacattgttttatatttttaggg

SEQ ID NO: 549888 - DNA, 120 bp, Artificial Sequence
  ENSG00000168280_30 (sequence is synthesized)
aacaaaaagtgctgctatagggttcaaagttttccttctgaacacttttccgaaacaaattaccccaaagacacattttgaatatcctggtcacatctttggatctgtaaaatatacctt

SEQ ID NO: 549889 - DNA, 120 bp, Artificial Sequence
  ENSG00000168280_31 (sequence is synthesized)
ttagtatggcacctgttaaaatgcaaagcaaatttctttggggcagaaaaacaatctgacagtagcagtgtagaatttgttcattcaaatacatctgtgtaaatgcaaaaagtcataaaa

SEQ ID NO: 549890 - DNA, 120 bp, Artificial Sequence
  ENSG00000168280_32 (sequence is synthesized)
ttcacctccgagctgcttgcttttgaacctgcagcaactagtcttagccggcccggtttgaacatcgttctttcagaagtgctgaaaatgctgcaaagttggataagtggaaatgtggct

SEQ ID NO: 549891 - DNA, 120 bp, Artificial Sequence
  ENSG00000168280_33 (sequence is synthesized)
gcccctctcctcactacttcctctctgatcgttctgaagcttgcattgggaatggctgctttctctaaccattttcagcttgagtgggtattgctgaagaaatccaacatcattccagca

SEQ ID NO: 549892 - DNA, 120 bp, Artificial Sequence
  ENSG00000168280_34 (sequence is synthesized)
gttgaaaaaggaagccttcgggagaaagtgcttgtcaaaattttgttctttgtgcttgtgtatgagtaagttgccatgaataagttattattttaacccataattggcgactgtttatat

SEQ ID NO: 549893 - DNA, 120 bp, Artificial Sequence
  ENSG00000168280_35 (sequence is synthesized)
gaattctttctttggcaccaaataggtttcatcttcttaggcacaattagaaaaaatccacatagatggatattttacatttagttattgctttatccaaatacatgaatctaaagctga

SEQ ID NO: 549894 - DNA, 120 bp, Artificial Sequence
  ENSG00000168280_36 (sequence is synthesized)
atcaacccttacttccagttgtgcttattaagaagatcaatttccaagtagtaaagttttcagggaaactgactgtgctgctatttgttttgacaaatttgggggtaagtcaatgacaac

SEQ ID NO: 549895 - DNA, 120 bp, Artificial Sequence
  ENSG00000168280_37 (sequence is synthesized)
caaaccaatctcggtggaaactcctatcctatcatgttgtgtgcccaagatgagtgagctggcactgtgccctgaagctttcaccactgtaatgaaatatatgccaggggagactttggg

SEQ ID NO: 549896 - DNA, 71 bp, Artificial Sequence
  ENSG00000168280_38 (sequence is synthesized)
tcaccactgtaatgaaatatatgccaggggagactttgggcttttctcatgactgtgtgggtcgaaggtag

SEQ ID NO: 549897 - DNA, 120 bp, Artificial Sequence
  ENSG00000168280_39 (sequence is synthesized)
aacatttcttgtacaaaatttccctagcaaagcaaacctgctttgacttaatttatttgttaaatgttgcactttgtttatgtatgttttgtttttggtggggaataaggagagagagga

SEQ ID NO: 549898 - DNA, 120 bp, Artificial Sequence
  ENSG00000168280_40 (sequence is synthesized)
cgacaaattctattgaagtatttattttgtgaagatggcaattttgcatttgtttaaatttttttcattctttaattttgttatcagtgccagcccaatatacctgctctaccattattt

SEQ ID NO: 549899 - DNA, 120 bp, Artificial Sequence
  ENSG00000168280_41 (sequence is synthesized)
gcggtctgataaaagggtccttgtggggcaggttttgcaaagcttatcaggtaataacatatgccacataaccttgttgatatgtttgcttctgatttgggaagctaaacattggtgttt

SEQ ID NO: 549900 - DNA, 120 bp, Artificial Sequence
  ENSG00000168280_42 (sequence is synthesized)
gagaggattgccaattattaattgtcattaccactactctccattactttttgtttggaaattgaacaaaggtcagtaatggtttttggctcttgttaatatccatcataaaatagattg

SEQ ID NO: 549901 - DNA, 120 bp, Artificial Sequence
  ENSG00000168280_43 (sequence is synthesized)
ttttagattctttccagggtgatttttccctgggtaccccgtttctacttctaaagaattgcttggcactttcatgtttcaaagggaaacattcgcttgtagttccattttacttgatct

SEQ ID NO: 549902 - DNA, 120 bp, Artificial Sequence
  ENSG00000168280_44 (sequence is synthesized)
ctacaagggactgacaacatttgctttacttttattcacagagaaagttggctttgatgtctcttaaagataattctgctagttgctgatcagccagtcagttcacctagcttcaatctt

SEQ ID NO: 549903 - DNA, 120 bp, Artificial Sequence
  ENSG00000168280_45 (sequence is synthesized)
tataggacttctaatctaattttcctatagtgtgactaaaagggaggcaaattattggaacggattattcaaatggatccttaaatattgctatgtataataagccagttattatatcag

SEQ ID NO: 549904 - DNA, 120 bp, Artificial Sequence
  ENSG00000168280_46 (sequence is synthesized)
gaccatgttctctgtaggccactttctaaaaaagccacatatgtgcaattttcaggtttttagactattgctccctgtactttaaatgtaaaaaccacacttctgaacaactaagctcat

SEQ ID NO: 549905 - DNA, 120 bp, Artificial Sequence
  ENSG00000168280_47 (sequence is synthesized)
gaatatgattttggttatatgcagcttttgactagcatgtattgtgtctttttctcctctatgaataattttatatttcatgctacttcttgaaagtttactctttgatgctctaagaga

SEQ ID NO: 549906 - DNA, 120 bp, Artificial Sequence
  ENSG00000168280_48 (sequence is synthesized)
acagccagatggtttatatgaataatctttatctgcaggatggtggattggtaaattaggagaatgttgtttgagatatcaagatttatgtctgggaactaaaatatataatgccaaatg

SEQ ID NO: 549907 - DNA, 120 bp, Artificial Sequence
  ENSG00000168280_49 (sequence is synthesized)
tgtttttgtcaattactagagaattctgtgcaaacatatcatctcttcaaatgctgcacactttgcttttgttaaacagcaggtagtagacagaacaataacagtttcgcgttaagactt

SEQ ID NO: 549908 - DNA, 120 bp, Artificial Sequence
  ENSG00000168280_50 (sequence is synthesized)
ttaaaggaaatagaatcgtgattaagaaatcagaatttatagatatattgggataaatgaagaaataaaaatgtttgtctagaatgtagcatctagtgactttttaaagccctaacgttt

SEQ ID NO: 549909 - DNA, 120 bp, Artificial Sequence
  ENSG00000168280_51 (sequence is synthesized)
acataaagaagctctagttcttatagaaataacaaagcaaataaaagttcttaacaatcccctctttcgaagtgcatttttttaaagcagggcaggagacatttggactctagctatatg

SEQ ID NO: 549910 - DNA, 120 bp, Artificial Sequence
  ENSG00000168280_52 (sequence is synthesized)
acatactgggaaaggcagagggtggagggaagatttcacttcattgtctagcccagaatcttgagcaagctaaagaaaccatcataatctaaaattgcttcatttaacactaacaattta

SEQ ID NO: 549911 - DNA, 120 bp, Artificial Sequence
  ENSG00000168280_53 (sequence is synthesized)
gactttttaaaccaagcattgaataatggctggataactgccgaagtaagcgccgctccatgaagtctgcttacttatttaaaaattgtgtatcagttttaaatactgttcattgtgtgc

SEQ ID NO: 549912 - DNA, 120 bp, Artificial Sequence
  ENSG00000168280_54 (sequence is synthesized)
agatataaggggaatagggcattctgtagaattatacatgtctagtttgtaaagtgtgtcctgtgtactgcagatgtgtgttctctgggctttatgtatctgtacagtagctttcacatt

SEQ ID NO: 549913 - DNA, 120 bp, Artificial Sequence
  ENSG00000168280_55 (sequence is synthesized)
aaaaaaattgtggacaaacttgtccggggggtttgaggggagaatggtggtttatatcaataacgatgctgtactatagtccatgtaacaaaagatctggaagtcaccctcctctggccc

SEQ ID NO: 549914 - DNA, 120 bp, Artificial Sequence
  ENSG00000168280_56 (sequence is synthesized)
acggaaaattttggtaatcttctaggttctaaaatgaagatgtatgggtactctggcagactgcatgttgtataatttgaaaaatactaaaagtggaaaataaaattgaattaaactttg

SEQ ID NO: 549915 - DNA, 120 bp, Artificial Sequence
  ENSG00000168280_57 (sequence is synthesized)
gatgcatttggattggaaatgcttgttctaggaaaatctgtcaccttcagatccgtatatggcaagggacaggggaggggctgttgttgggcattcagagtcgatctcagagtatagcct

SEQ ID NO: 549916 - DNA, 120 bp, Artificial Sequence
  ENSG00000168280_58 (sequence is synthesized)
ggcttagaaatgaacaagtccagaaaccccaagatgtctgtagagaatggttaagttgcgttaatacctttgtcttcaccattcctgatgaagagggaaagggtagcacccccaatcact

SEQ ID NO: 549917 - DNA, 120 bp, Artificial Sequence
  ENSG00000168280_59 (sequence is synthesized)
tcggagttaacttctaaggatttcttcctccaacctttacgcagaacacaccaaatttgagtttctatctcaaacatagagatttttcttttggtcacattttaaactgtaaaggaaaat

SEQ ID NO: 549918 - DNA, 120 bp, Artificial Sequence
  ENSG00000168280_60 (sequence is synthesized)
tgattgtggagtaagacttttaggtgaataaaatgagacaggagaagatgtaggattttgattagttgtaggcaaactatgagcctcattgagtcaaggtccacagttaaagacgtccac

SEQ ID NO: 549919 - DNA, 120 bp, Artificial Sequence
  ENSG00000168280_61 (sequence is synthesized)
ggcatgcccttgctccagccagcagaataaaatcatgcgtcgtgggagtccctttcctgttttcagagtgctgttgccaaaaggtctcctttggacatcatcataaatctgtgcagtggg

SEQ ID NO: 549920 - DNA, 120 bp, Artificial Sequence
  ENSG00000168280_62 (sequence is synthesized)
cagggcaggggcttttatctcagttttacatgtgagggagtgcagctcacacaggttacaggcttatctggaggttacgtggatagggagaggttggtgccctctgactgacctggctgg

SEQ ID NO: 549921 - DNA, 120 bp, Artificial Sequence
  ENSG00000168280_63 (sequence is synthesized)
agaagctcaggctgggctgtaaaaggtcaagggaacactttttatttagttggtgggctaattggcttctagggccaacttggtttgataacagatcttgggttttgttatcccaataaa

SEQ ID NO: 549922 - DNA, 120 bp, Artificial Sequence
  ENSG00000168280_64 (sequence is synthesized)
gcaaggccgggtcctgggggcaaaacagccagaaatgcccccagttttgggatctgacatctgagggacacagggaaggaggtaggtccagatccagggcttgtcacagagtgggctgag

SEQ ID NO: 549923 - DNA, 120 bp, Artificial Sequence
  ENSG00000168280_65 (sequence is synthesized)
tgccaacgagtagatgacatgtttctcttggcctgggatgcagaaggcgctggagcagcagatggagagccaccgggaagctcaccagaagcagctgtccagactccgagacgaaattga

SEQ ID NO: 549924 - DNA, 120 bp, Artificial Sequence
  ENSG00000168280_66 (sequence is synthesized)
ggagaagcagaaaatcattgatgagattcgggagtgagtcggcccagggcaccaggggtgtgggggtggtcatgcctcggtcctcttggggaagcctggaaggatgtggctcttagtcga

SEQ ID NO: 549925 - DNA, 120 bp, Artificial Sequence
  ENSG00000168280_67 (sequence is synthesized)
gggccctgctcaccttgccctgtgggcactgccctggtgacacagcaggctgggcgggctgcttccaaggtctgttctccgatctggagctgagcctcctggagccctggcatggcaggt

SEQ ID NO: 549926 - DNA, 120 bp, Artificial Sequence
  ENSG00000168280_68 (sequence is synthesized)
ggcaggcgggcccagctgcctctcctagtccccgagggccagggtcacataggtgattccgctggatggacgcatgccccagtagatgggggggagcatctgtaatgaaagcaccaaaaa

SEQ ID NO: 549927 - DNA, 120 bp, Artificial Sequence
  ENSG00000168280_69 (sequence is synthesized)
tcctgctggaatccatgtttcttgggcctgctggaaagacttctcagcagacaggcctgtagagatccttaactggggatgaagaggaacgctgcatcctagtaaagaaaggacccttca

SEQ ID NO: 549928 - DNA, 120 bp, Artificial Sequence
  ENSG00000168280_70 (sequence is synthesized)
tctctctgtgcccactcctcgagggcaggaactgtccctgtatcagtgaggcattcggacttgggagatgtttttagaacatcagaccagaaatgagggaaggtggaaatggccaaatca

SEQ ID NO: 549929 - DNA, 120 bp, Artificial Sequence
  ENSG00000168280_71 (sequence is synthesized)
ggttccccaagtgactgcatgccatccgaggggccgaggaagcagagttcttctgacatgggctctctgttttaaaatatcagcccttctcccatctcattatttttcccctgaagctct

SEQ ID NO: 549930 - DNA, 120 bp, Artificial Sequence
  ENSG00000168280_72 (sequence is synthesized)
tgcacaagcaaactataaatacatcctcaaagccttatgtttcatgactcttagatgcaccccagaaattagttttcacttgggcacggaggaagctgtgaggctgttctgtgatccctc

SEQ ID NO: 549931 - DNA, 120 bp, Artificial Sequence
  ENSG00000168280_73 (sequence is synthesized)
caaatcctgcagaattactgcctttattgtacagagctaatagggttggaacagaaccacggttttagcctgatgactcagaatttcagactgatgtggaatatattgctttttcctctc

SEQ ID NO: 549932 - DNA, 120 bp, Artificial Sequence
  ENSG00000168280_74 (sequence is synthesized)
gacttagcctgtggcagaggcagctgcacacatgtgggagggatatgaacttctgagaaaagagaaaatcccatgttgtacccgactctaataggccaggaacgagctttgccattggaa

SEQ ID NO: 549933 - DNA, 120 bp, Artificial Sequence
  ENSG00000168282_0 (sequence is synthesized)
gcagttgcgggttgtcataacggtccccgccggagtgaggcgaggccgcgtcgctcagttctggccgtctagggcccctgtaaggatgagagcgcagaggacgcagggccgctggaggcg

SEQ ID NO: 549934 - DNA, 120 bp, Artificial Sequence
  ENSG00000168282_1 (sequence is synthesized)
caggtaacgaagctagggtgcggttgggaccgcggctgagctttttccgggacccgtggtgctgaatggagaggacggagacgaagccgagccgcggctcctagcggcggcgccgatgct

SEQ ID NO: 549935 - DNA, 120 bp, Artificial Sequence
  ENSG00000168282_2 (sequence is synthesized)
cgagctgtagctgccaggcgaggatgtgtggagcgcaggcggcgcggggtaaatgagaggtctcgggccccaggacccccggggcccgggatgagttagcgagggcagccgcgggggcca

SEQ ID NO: 549936 - DNA, 120 bp, Artificial Sequence
  ENSG00000168282_3 (sequence is synthesized)
gttccgaccgtgacaggccaaggcgacggccgccgcccgcccgccccttccgtgcagaagcagctgctcctttccgcgcccgcccgcctgcgctcccggccctggagaccatgaggttcc

SEQ ID NO: 549937 - DNA, 120 bp, Artificial Sequence
  ENSG00000168282_4 (sequence is synthesized)
gcatctacaaacggaaggtgctaatcctgacgctcgtggtggccgcctgcggcttcgtcctctggagcagcaatgggcgacaaaggaagaacgaggccctcgccccaccgttgctggacg

SEQ ID NO: 549938 - DNA, 120 bp, Artificial Sequence
  ENSG00000168282_5 (sequence is synthesized)
ccgaacccgcgcggggtgccggcggccgcggtggggaccacccctctgtggctgtgggcatccgcagggtctccaacgtgtcggcggcttccctggtcccggcggtcccccagcccgagg

SEQ ID NO: 549939 - DNA, 120 bp, Artificial Sequence
  ENSG00000168282_6 (sequence is synthesized)
cggacaacctgacgctgcggtaccggtccctggtgtaccagctgaactttgatcagaccctgaggaatgtagataaggctggcacctgggccccccgggagctggtgctggtggtccagg

SEQ ID NO: 549940 - DNA, 120 bp, Artificial Sequence
  ENSG00000168282_7 (sequence is synthesized)
tgcataaccggcccgaatacctcagactgctgctggactcacttcgaaaagcccagggaattgacaacgtcctcgtcatctttagccatgacttctggtcgaccgagatcaatcagctga

SEQ ID NO: 549941 - DNA, 120 bp, Artificial Sequence
  ENSG00000168282_8 (sequence is synthesized)
tcgccggggtgaatttctgtccggttctgcaggtgttctttcctttcagcattcagttgtaccctaacgagtttccaggtagtgaccctagagattgtcccagagacctgccgaagaatg

SEQ ID NO: 549942 - DNA, 120 bp, Artificial Sequence
  ENSG00000168282_9 (sequence is synthesized)
ccgctttgaaattggggtgcatcaatgctgagtatcccgactccttcggccattatagagaggccaaattctcccagaccaaacatcactggtggtggaagctgcattttgtgtgggaaa

SEQ ID NO: 549943 - DNA, 120 bp, Artificial Sequence
  ENSG00000168282_10 (sequence is synthesized)
gagtgaaaattcttcgagattatgctggccttatacttttcctagaagaggatcactacttagccccagacttttaccatgtcttcaaaaagatgtggaaactgaagcagcaagagtgcc

SEQ ID NO: 549944 - DNA, 120 bp, Artificial Sequence
  ENSG00000168282_11 (sequence is synthesized)
cagtttctatggcatggctgacaaggtagatgtgaaaacttggaaatccacagagcacaatatgggtctagccttgacccggaatgcctatcagaagctgatcgagtgcacagacacttt

SEQ ID NO: 549945 - DNA, 120 bp, Artificial Sequence
  ENSG00000168282_12 (sequence is synthesized)
ctgtacttatgatgattataactgggactggactcttcaatacttgactgtatcttgtcttccaaaattctggaaagtgctggttcctcaaattcctaggatctttcatgctggagactg

SEQ ID NO: 549946 - DNA, 120 bp, Artificial Sequence
  ENSG00000168282_13 (sequence is synthesized)
tggtatgcatcacaagaaaacctgtagaccatccactcagagtgcccaaattgagtcactcttaaataataacaaacaatacatgtttccagaaactctaactatcagtgaaaagtttac

SEQ ID NO: 549947 - DNA, 120 bp, Artificial Sequence
  ENSG00000168282_14 (sequence is synthesized)
tgtggtagccatttccccacctagaaaaaatggagggtggggagatattagggaccatgaactctgtaaaagttatagaagactgcagtgaaaatcacagttacaaaagcgacagtcttc

SEQ ID NO: 549948 - DNA, 120 bp, Artificial Sequence
  ENSG00000168282_15 (sequence is synthesized)
tatttttgatatttgtccaaacaggacatacaattgaataaaagagtttaggaactggtttctgctttaatacaaaaacaaaatcttgtaaaaggtgtccaaatacatagtaatcttttc

SEQ ID NO: 549949 - DNA, 120 bp, Artificial Sequence
  ENSG00000168282_16 (sequence is synthesized)
cagttatgtctgattaagatttaaaactgaaggtttcattttgggagtagggttttaaagctcaatctgttatctgctaaaattgattattgttgatatgagagaagaggggaaatttta

SEQ ID NO: 549950 - DNA, 120 bp, Artificial Sequence
  ENSG00000168282_17 (sequence is synthesized)
tttaaattgcatttattaatctttttatctgaaactttgtacacttttccactttcaaaacctattttaagtacagcaaaatttatttaaaactgtcatagcagtaaaaagtattacgat

SEQ ID NO: 549951 - DNA, 120 bp, Artificial Sequence
  ENSG00000168282_18 (sequence is synthesized)
gaaattgttagggtattaatggaacaaacccagtttcactctcttgacacacttattaggaagggattgcttcactggtttaataatttaaaagttatgtttgttaaacaccctgtcaga

SEQ ID NO: 549952 - DNA, 120 bp, Artificial Sequence
  ENSG00000168282_19 (sequence is synthesized)
acagtcattttcagtattagattcctgtactattgtgttttgagtgtgttttggaaccttcatagaacacactttcttttggaatgtatttgattgataagaaagtttaaacattgtttt

SEQ ID NO: 549953 - DNA, 120 bp, Artificial Sequence
  ENSG00000168282_20 (sequence is synthesized)
cacctcaatgtagaaatacagtggttttgtttttttttttcttttagtgctgacaaaataaaatactcatttttgcataaaaaggttcctaatccttttgcagaataagttttgtttact

SEQ ID NO: 549954 - DNA, 120 bp, Artificial Sequence
  ENSG00000168282_21 (sequence is synthesized)
ctttataccaaaattcagtgaaggcattctacaagttttgagttagcattacattttaatatttactattgctacattgtataattgagtttgaaataaaacccagcttatgacaatgca

SEQ ID NO: 549955 - DNA, 120 bp, Artificial Sequence
  ENSG00000168283_0 (sequence is synthesized)
agtttccactctgccttcagcggtgcatttttttccaccctcccctccccctcctcccctccccccgctcgcacgcacacacacggcgccccccgcccgcccgcctcccccacagcaact

SEQ ID NO: 549956 - DNA, 120 bp, Artificial Sequence
  ENSG00000168283_1 (sequence is synthesized)
atgaaataatcgtagtatgagaggcagagatcggggcgagacaatggggatgtgggcgcgggagccccgttccggcttagcagcacctcccagccccgcagaataaaaccgatcgcgccc

SEQ ID NO: 549957 - DNA, 120 bp, Artificial Sequence
  ENSG00000168283_2 (sequence is synthesized)
cctccgcgcgcgccctcccccgagtgcggagcgggaggaggcggcggcggccgaggaggaggaggaggaggccccggaggaggaggcgttggaggtcgaggcggaggcggaggaggagga

SEQ ID NO: 549958 - DNA, 120 bp, Artificial Sequence
  ENSG00000168283_3 (sequence is synthesized)
aggaggccgaggcgccggaggaggccgaggcgccggagcaggaggaggccggccggaggcggcatgagacgagcgtggcggccgcggctgctcggggccgcgctggttgcccattgacag

SEQ ID NO: 549959 - DNA, 120 bp, Artificial Sequence
  ENSG00000168283_4 (sequence is synthesized)
gtctgcagctcgcttcaagatggccgcttggctcgcattcattttctgctgaacgacttttaactttcattgtcttttccgcccgcttcgatcgcctcgcgccggctgctctttccggga

SEQ ID NO: 549960 - DNA, 120 bp, Artificial Sequence
  ENSG00000168283_5 (sequence is synthesized)
ttttttatcaagcagaaatgcatcgaacaacgagaatcaagatcactgagctaaatccccacctgatgtgtgtgctttgtggagggtacttcattgatgccacaaccataatagaatgtc

SEQ ID NO: 549961 - DNA, 120 bp, Artificial Sequence
  ENSG00000168283_6 (sequence is synthesized)
tacattccttctgtaaaacgtgtattgttcgttacctggagaccagcaagtattgtcctatttgtgatgtccaagttcacaagaccagaccactactgaatataaggtcagataaaactc

SEQ ID NO: 549962 - DNA, 120 bp, Artificial Sequence
  ENSG00000168283_7 (sequence is synthesized)
tccaagatattgtatacaaattagttccagggcttttcaaaaatgaaatgaagagaagaagggatttttatgcagctcatccttctgctgatgctgccaatggctctaatgaagatagag

SEQ ID NO: 549963 - DNA, 120 bp, Artificial Sequence
  ENSG00000168283_8 (sequence is synthesized)
gagaggttgcagatgaagataagagaattataactgatgatgagataataagcttatccattgaattctttgaccagaacagattggatcggaaagtaaacaaagacaaagagaaatcta

SEQ ID NO: 549964 - DNA, 120 bp, Artificial Sequence
  ENSG00000168283_9 (sequence is synthesized)
aggaggaggtgaatgataaaagatacttacgatgcccagcagcaatgactgtgatgcacttaagaaagtttctcagaagtaaaatggacatacctaatactttccagattgatgtcatgt

SEQ ID NO: 549965 - DNA, 120 bp, Artificial Sequence
  ENSG00000168283_10 (sequence is synthesized)
atgaggaggaacctttaaaggattattatacactaatggatattgcctacatttatacctggagaaggaatggtccacttccattgaaatacagagttcgacctacttgtaaaagaatga

SEQ ID NO: 549966 - DNA, 120 bp, Artificial Sequence
  ENSG00000168283_11 (sequence is synthesized)
agatcagtcaccagagagatggactgacaaatgctggagaactggaaagtgactctgggagtgacaaggccaacagcccagcaggaggtattccctccacctcttcttgtttgcctagcc

SEQ ID NO: 549967 - DNA, 120 bp, Artificial Sequence
  ENSG00000168283_12 (sequence is synthesized)
ccagtactccagtgcagtctcctcatccacagtttcctcacatttccagtactatgaatggaaccagcaacagccccagcggtaaccaccaatcttcttttgccaatagacctcgaaaat

SEQ ID NO: 549968 - DNA, 120 bp, Artificial Sequence
  ENSG00000168283_13 (sequence is synthesized)
catcagtaaatgggtcatcagcaacttcttctggttgatacctgagactgttaaggaaaaaaattttaaacccctgatttatatagatatcttcatgccattacagctttctagatgcta

SEQ ID NO: 549969 - DNA, 120 bp, Artificial Sequence
  ENSG00000168283_14 (sequence is synthesized)
agatggactacatgtgatactcctatggacgttaattgaaaagaaagattgttgttataaagaattggtttcttggaaagcaggcaagactttttctctgtgttaggaaagatgggaaat

SEQ ID NO: 549970 - DNA, 120 bp, Artificial Sequence
  ENSG00000168283_15 (sequence is synthesized)
ggtttctgtaaccattgtttggatttggaagtactctgcagtggacataagcattgggccatagtttgttaatctcaactaacgcctacattacattctccttgatcgttcttgttatta

SEQ ID NO: 549971 - DNA, 120 bp, Artificial Sequence
  ENSG00000168283_16 (sequence is synthesized)
cgctgttttgtgaacctgtagaaaacaagtgctttttatcttgaaattcaaccaacggaaagaatatgcatagaataatgcattctatgtagccatgtcactgtgaataacgatttcttg

SEQ ID NO: 549972 - DNA, 120 bp, Artificial Sequence
  ENSG00000168283_17 (sequence is synthesized)
catatttagccattttgattcctgtttgatttatacttctctgttgctacgcaaaaccgatcaaagaaaagtgaacttcagttttacaatctgtatgcctaaaagcgggtactaccgttt

SEQ ID NO: 549973 - DNA, 120 bp, Artificial Sequence
  ENSG00000168283_18 (sequence is synthesized)
attttactgacttgtttaaatgattcgcttttgtaagaatcagatggcattatgcttgttgtacaatgccatattggtatatgacataacaggaaacagtattgtatgatatatttataa

SEQ ID NO: 549974 - DNA, 120 bp, Artificial Sequence
  ENSG00000168283_19 (sequence is synthesized)
atgctataaagaaatattgtgtttcatgcattcagaaatgattgttaaaattctcccaactggttcgacctttgcagatacccataacctatgttgagccttgcttaccagcaaagaata

SEQ ID NO: 549975 - DNA, 120 bp, Artificial Sequence
  ENSG00000168283_20 (sequence is synthesized)
tttttaatgtggatatctaattctaaagtctgttccattagaagcaattggcacatctttctatactttatatacttttctccagtaatacatgtttactttaaagattgttgcagtgaa

SEQ ID NO: 549976 - DNA, 120 bp, Artificial Sequence
  ENSG00000168283_21 (sequence is synthesized)
gaaaaacctttaactgagaaatatggaaaccgtcttaattttccattggctatgatggaattaatattgtattttaaaaatgcatattgatcactataattctaaaacaattttttaaat

SEQ ID NO: 549977 - DNA, 120 bp, Artificial Sequence
  ENSG00000168283_22 (sequence is synthesized)
aaaccagcaggttgctaaaagaaggcattttatctaaagttattttaataggtggtatagcagtaattttaaatttaagagttgcttttacagttaacaatggaatatgccttctctgct

SEQ ID NO: 549978 - DNA, 120 bp, Artificial Sequence
  ENSG00000168283_23 (sequence is synthesized)
atgtctgaaaatagaagctatttattatgagcttctacaggtatttttaaatagagcaagcatgttgaatttaaaatatgaataaccccacccaacaattttcagtttattttttgcttt

SEQ ID NO: 549979 - DNA, 120 bp, Artificial Sequence
  ENSG00000168283_24 (sequence is synthesized)
ggtcgaacttggtgtgtgttcatcacccatcagttatttgtgagggtgtttattctatatgaatattgtttcatgtttgtatgggaaaattgtagctaaacatttcattgtccccagtct

SEQ ID NO: 549980 - DNA, 120 bp, Artificial Sequence
  ENSG00000168283_25 (sequence is synthesized)
gcaaaagaagcacaattctattgctttgtcttgcttatagtcattaaatcattacttttacatatattgctgttacttctgctttctttaaaaatatagtaaaggatgttttatgaagtc

SEQ ID NO: 549981 - DNA, 120 bp, Artificial Sequence
  ENSG00000168283_26 (sequence is synthesized)
acaagatacatatatttttattttgacctaaatttgtacagtcccattgtaagtgttgtttctaattatagatgtaaaatgaaatttcatttgtaattggaaaaaatccaataaaaagga

SEQ ID NO: 549982 - DNA, 120 bp, Artificial Sequence
  ENSG00000168283_27 (sequence is synthesized)
tattcatttagaaaatagctaagatctttaataaaaatttgatatgaaaagcacaatgtgcagaagttatggaaaacctatagaggattacaacaggtaaacgttaaagagaatacattg

SEQ ID NO: 549983 - DNA, 120 bp, Artificial Sequence
  ENSG00000168283_28 (sequence is synthesized)
ctgacttatagtgatgtggctaagaagtacatgctttgttgtaaaattgcttgaaagcccattgaaagatgtatctgtttatttacagtctttgaagtaaaagttaccaatgtttgccaa

SEQ ID NO: 549984 - DNA, 120 bp, Artificial Sequence
  ENSG00000168283_29 (sequence is synthesized)
gaatttgaaaactgttaatgattcctgcaatctgtggaaatgttggtacaaagtggtgaaggcattttcttctcttgcatctaatgactttttgttaatatgtattgattgtattacaag

SEQ ID NO: 549985 - DNA, 120 bp, Artificial Sequence
  ENSG00000168283_30 (sequence is synthesized)
attattcattagttctttgtgttatgccaaatgtttacatcttttttccccattcagatgaaatgaagagaagaagggatttttatgcagctcatccttctgctgatggtaaacctttta

SEQ ID NO: 549986 - DNA, 120 bp, Artificial Sequence
  ENSG00000168283_31 (sequence is synthesized)
gttttccctgcgcgtcgcgtaaaaacgtgccaggttctgcttgctggaaccgtctaaaacaaccggaaccccggattttcacttgcagattcttgaggaagttttataataaattcggag

SEQ ID NO: 549987 - DNA, 120 bp, Artificial Sequence
  ENSG00000168283_32 (sequence is synthesized)
atagctgccaatggctctaatgaagatagaggagaggttgcagatgaagataagagaattataactgatgatgagataataagcttatccattgaattctttgaccagaacaggtaaaat

SEQ ID NO: 549988 - DNA, 80 bp, Artificial Sequence
  ENSG00000168286_0 (sequence is synthesized)
ggggcccactcccgagcgcaggcgggcagccaggcgggcggcgcggcgcgggccggcaggaagcgtattctgggcacggg

SEQ ID NO: 549989 - DNA, 120 bp, Artificial Sequence
  ENSG00000168286_1 (sequence is synthesized)
cgaggggcgggcggcggcgtagccactgggccgtcgaagagcgcaggaggccggtgggccgggccgggccgcgcggcgcagccatgcctggctttacgtgctgcgtgccaggctgctaca

SEQ ID NO: 549990 - DNA, 120 bp, Artificial Sequence
  ENSG00000168286_2 (sequence is synthesized)
tggctttacgtgctgcgtgccaggctgctacaacaactcgcaccgggacaaggcgctgcacttctacacgtttccaaaggacgctgagttgcggcgcctctggctcaagaacgtgtcgcg

SEQ ID NO: 549991 - DNA, 120 bp, Artificial Sequence
  ENSG00000168286_3 (sequence is synthesized)
tgccggcgtcagtgggtgcttctccaccttccagcccaccacaggccaccgtctctgcagcgttcacttccagggcggccgcaagacctacacggtacgcgtccccaccatcttcccgct

SEQ ID NO: 549992 - DNA, 120 bp, Artificial Sequence
  ENSG00000168286_4 (sequence is synthesized)
gcgcggcgtcaatgagcgcaaagtagcgcgcagacccgctggggccgcggccgcccgccgcaggcagcagcagcaacagcagcagcagcagcaacagcagcaacagcagcagcagcagca

SEQ ID NO: 549993 - DNA, 120 bp, Artificial Sequence
  ENSG00000168286_5 (sequence is synthesized)
cagcagcagcagcagcagcagcagcagtcctcaccctctgcctccactgcccagactgcccagctgcagccgaacctggtatctgcttccgcggccgtgcttctcacccttcaggccact

SEQ ID NO: 549994 - DNA, 120 bp, Artificial Sequence
  ENSG00000168286_6 (sequence is synthesized)
cactgtagacagcagtcaggctccgggatccgtacagccggcgcccatcactcccactggagaagacgtgaagcccatcgatctcacagtgcaagtggagtttgcagccgcagagggcgc

SEQ ID NO: 549995 - DNA, 120 bp, Artificial Sequence
  ENSG00000168286_7 (sequence is synthesized)
cagttggtggtggtaggggaagagggcttccctgatactggctccgaccattcgtactccttgtcgtcaggcaccacggaggaggagctcctgcgcaagctgaatgagcagcgggacatc

SEQ ID NO: 549996 - DNA, 120 bp, Artificial Sequence
  ENSG00000168286_8 (sequence is synthesized)
ctggctctgatggaagtgaagatgaaagagatgaaaggcagcattcgccacctgcgtctcactgaggccaagctgcgcgaagaactgcgtgagaaggatcggctgcttgccatggctgtc

SEQ ID NO: 549997 - DNA, 120 bp, Artificial Sequence
  ENSG00000168286_9 (sequence is synthesized)
atccgcaagaagcacggaatgtgaactggtgccccggcagcctgctggactcccagaccccatccagccaggggaccgcaggccattgttgaactcctctatactcctgggcactggttg

SEQ ID NO: 549998 - DNA, 120 bp, Artificial Sequence
  ENSG00000168286_10 (sequence is synthesized)
acagtactgaggcttaaggcagctggactctcttgctggtgacctggcatcctcaattgtttcctcctgaagtggaagctggggccttagactctgccctggtgacaccagcaattatga

SEQ ID NO: 549999 - DNA, 120 bp, Artificial Sequence
  ENSG00000168286_11 (sequence is synthesized)
ctttgtctacccttcctccccagttattgttgcagattctggttaagcagaggcttcagaaccactgaacttgaaacttaccctctagggatgcaggtgggatgtccagggactataggt

SEQ ID NO: 550000 - DNA, 120 bp, Artificial Sequence
  ENSG00000168286_12 (sequence is synthesized)
ttgggaaaaccataccttaaggttggtcagcagtcagacaactctaatgtgtgtagtgataagagattcaagtaacatcagttctcctccttttcatgcttttccttcccaggtgcagcc

SEQ ID NO: 550001 - DNA, 120 bp, Artificial Sequence
  ENSG00000168286_13 (sequence is synthesized)
tgtgattctgatggggactggtaaatctgtgcctctgcctcctaggacttattttcccaggaggccatttacaaggggatctggatgacctgctgatggagatccagcttgccagggact

SEQ ID NO: 550002 - DNA, 120 bp, Artificial Sequence
  ENSG00000168286_14 (sequence is synthesized)
taggtttatcctgttttgtttgctactggttacaaattctattttctgtacaattagtcagactaaagttttcactgtgtttgtttggcaaaacaaattaaacaaaaagtaaggttttta

SEQ ID NO: 550003 - DNA, 120 bp, Artificial Sequence
  ENSG00000168288_0 (sequence is synthesized)
cctttgcctgctcaccgccagcgtaggtgctaccaccgctgccgtcgccgccgccattttgatggcaggaagagtccggttctgggacagctggagacagtggtggtgactgaaataact

SEQ ID NO: 550004 - DNA, 120 bp, Artificial Sequence
  ENSG00000168288_1 (sequence is synthesized)
ttaccaaaggaaagctattttgcgaactatcttctccagcggagatggccaatgtgctttgtaacagagccagactggtttcctatctcccaggattttgctctttagttaaaagggttg

SEQ ID NO: 550005 - DNA, 120 bp, Artificial Sequence
  ENSG00000168288_2 (sequence is synthesized)
tcaatcccaaagccttttcgactgcaggatcatcaggttcggatgagtctcatgtggctgctgcacctccagatatatgctctcgaacagtgtggcctgatgaaactatgggaccctttg

SEQ ID NO: 550006 - DNA, 120 bp, Artificial Sequence
  ENSG00000168288_3 (sequence is synthesized)
gacctcaagatcagaggttccagcttcctgggaacataggttttgattgtcacctcaatgggactgcttcacagaagaaaagcctggttcataaaactttgcctgatgttctagcagaac

SEQ ID NO: 550007 - DNA, 120 bp, Artificial Sequence
  ENSG00000168288_4 (sequence is synthesized)
ctttatcaagtgaaagacatgagtttgtgatggcacaatatgtgaatgaatttcagggtaatgatgcacctgttgaacaagaaattaacagtgcagaaacttactttgaaagtgccagag

SEQ ID NO: 550008 - DNA, 120 bp, Artificial Sequence
  ENSG00000168288_5 (sequence is synthesized)
atggcaaactaatgattctgactgtaacacaaaaaactaagaatgatatgactgtttggagtgaagaagtagaaattgaaagagaagtgctcttagaaaagttcatcaatggtgctaagg

SEQ ID NO: 550009 - DNA, 120 bp, Artificial Sequence
  ENSG00000168288_6 (sequence is synthesized)
aaatttgctatgctcttcgagctgagggttattgggctgactttattgacccatcatctggtttggcattttttggaccatatacaaacaacactctttttgaaactgatgaacgctacc

SEQ ID NO: 550010 - DNA, 120 bp, Artificial Sequence
  ENSG00000168288_7 (sequence is synthesized)
gacatttaggattctctgttgatgaccttggatgctgtaaagtgattcgtcatagtctctggggtacccatgtagttgtagggagtatcttcactaatgcaacaccagacagccatatta

SEQ ID NO: 550011 - DNA, 120 bp, Artificial Sequence
  ENSG00000168288_8 (sequence is synthesized)
tgaagaaattaagtggaaattagcagaaatatccattcatttgctgtactatttgtatgtaatatttgggttgatctataaacactgtcagactaaagtttttaaaatatatttatttct

SEQ ID NO: 550012 - DNA, 120 bp, Artificial Sequence
  ENSG00000168288_9 (sequence is synthesized)
aagtatttatttcagcatttatgaatttacaacattggcaagtgatttgggattttaaaattgcaaatgttcatttattcatatcattgaatacacgttgaacacatccacattgtatag

SEQ ID NO: 550013 - DNA, 120 bp, Artificial Sequence
  ENSG00000168288_10 (sequence is synthesized)
gatgtggtaattagcttgtaaccagggtatgatctgctattgttatttctcctctttattggaaaaaggcctcagttttaattattttcttcccaaaataaatcacacatttggttacaa

SEQ ID NO: 550014 - DNA, 120 bp, Artificial Sequence
  ENSG00000168288_11 (sequence is synthesized)
tcggtattgcccgtattttcactgggtccctgtcgttgtccccagccatcctgtccgtctgtctttagtctcttttctgcttcctcatctttccgatcagcctgaagctttgcttggagc

SEQ ID NO: 550015 - DNA, 120 bp, Artificial Sequence
  ENSG00000168288_12 (sequence is synthesized)
tgttgttacgcagccccaacttctgttaaagcagccgcttcgatcctctggactgaattttggccacccagcccccattcccctcccggatctggtccgagttgtttttccgcggctgta

SEQ ID NO: 550016 - DNA, 120 bp, Artificial Sequence
  ENSG00000168288_13 (sequence is synthesized)
aaccggaagggctctgagctgcactgccggctccgggctgggggatctgtgcctggcatgggggcgagttctggcctccttagggtacggggagagcttggactttggtcctgacgtggt

SEQ ID NO: 550017 - DNA, 120 bp, Artificial Sequence
  ENSG00000168288_14 (sequence is synthesized)
tggcattgggtggtatagtgttagatataatgtatcaaaaatgtcaagggaagcaagtggtgtgaaattatgttatgctttgaagatggtagcattctttgcactgcaaatacacttatt

SEQ ID NO: 550018 - DNA, 120 bp, Artificial Sequence
  ENSG00000168291_0 (sequence is synthesized)
agcggatagaggacacgaccaagatggcggcggtgtctggcttggtgcggagaccccttcgggaggtctccgggctgctgaagaggcgctttcactggaccgcgccggctgcgctgcagg

SEQ ID NO: 550019 - DNA, 120 bp, Artificial Sequence
  ENSG00000168291_1 (sequence is synthesized)
tgacagttcgtgatgctataaatcagggtatggatgaggagctggaaagagatgagaaggtatttctgcttggagaagaagttgcccagtatgatggggcatacaaggttagtcgagggc

SEQ ID NO: 550020 - DNA, 120 bp, Artificial Sequence
  ENSG00000168291_2 (sequence is synthesized)
tgtggaagaaatatggagacaagaggattattgacactcccatatcagagatgggctttgctggaattgctgtaggtgcagctatggctgggttgcggcccatttgtgaatttatgacct

SEQ ID NO: 550021 - DNA, 120 bp, Artificial Sequence
  ENSG00000168291_3 (sequence is synthesized)
tcaatttctccatgcaagccattgaccaggttataaactcagctgccaagacctactacatgtctggtggccttcagcctgtgcctatagtcttcagagggcccaatggtgcctcagcag

SEQ ID NO: 550022 - DNA, 120 bp, Artificial Sequence
  ENSG00000168291_4 (sequence is synthesized)
gtgtagctgcccagcactcacagtgctttgctgcctggtatgggcactgcccaggcttaaaggtggtcagtccctggaattcagaggatgctaaaggacttattaaatcagccattcggg

SEQ ID NO: 550023 - DNA, 120 bp, Artificial Sequence
  ENSG00000168291_5 (sequence is synthesized)
ataacaatccagtggtggtgctagagaatgaattgatgtatggggttccttttgaatttcctccggaagctcagtcaaaagattttctgattcctattggaaaagccaaaatagaaaggc

SEQ ID NO: 550024 - DNA, 120 bp, Artificial Sequence
  ENSG00000168291_6 (sequence is synthesized)
gctatctaaagaaggagttgaatgtgaggtgataaatatgcgtaccattagaccaatggacatggaaaccatagaagccagtgtcatgaagacaaatcatcttgtaactgtggaaggagg

SEQ ID NO: 550025 - DNA, 120 bp, Artificial Sequence
  ENSG00000168291_7 (sequence is synthesized)
ctggccacagtttggagtaggagctgaaatctgtgccaggatcatggaaggtcctgcgttcaatttcctggatgctcctgctgttcgtgtcactggtgctgatgtccctatgccttatgc

SEQ ID NO: 550026 - DNA, 120 bp, Artificial Sequence
  ENSG00000168291_8 (sequence is synthesized)
aaagattctagaggacaactctatacctcaggtcaaagacatcatatttgcaataaagaaaacattaaatatttagtttggacttgaatatcaagtcgttgaaatttatttgaaatactt

SEQ ID NO: 550027 - DNA, 120 bp, Artificial Sequence
  ENSG00000168291_9 (sequence is synthesized)
gctggcactgcacctggatttgtactgcaagacctgactattcataacggaaaacgatttctaaagcaacagcaggtatttttgtacagggaagtttaaatgtgtttgtgtatggaaaac

SEQ ID NO: 550028 - DNA, 120 bp, Artificial Sequence
  ENSG00000168291_10 (sequence is synthesized)
tctccactctcctcccctagatgccatgcttccttttgtctgttacggttgccatgttctttgaataacaaattatataacattttatcctctctcaccacaaggacaaagtatggatgt

SEQ ID NO: 550029 - DNA, 120 bp, Artificial Sequence
  ENSG00000168291_11 (sequence is synthesized)
ggcagagtcctcatgaaagatgtatccaaacaagataacttatatgtataaaattaaagcatataatatacatttactgttagtttgttttgataaggaataaaggaatttctaacatga

SEQ ID NO: 550030 - DNA, 120 bp, Artificial Sequence
  ENSG00000168291_12 (sequence is synthesized)
gtttggcagcggatagaggacacgaccaagatggcggcggtgtctggcttggtgcggagaccccttcgggaggtaggcagcagcgcgcggcctgtattcccacgcgacccctgcccaccc

SEQ ID NO: 550031 - DNA, 120 bp, Artificial Sequence
  ENSG00000168291_13 (sequence is synthesized)
agccacagctggcggcacagtggtgtagcatcttcagtttcaacctgatctctgatctgtgaccactctgttttcaggaacacatataactgtggtttcccattcaagacctgtgggcca

SEQ ID NO: 550032 - DNA, 89 bp, Artificial Sequence
  ENSG00000168291_14 (sequence is synthesized)
attgctgtaggtgcagctatggtatgtaatactctttatgaaacttatccaaagacatttcttgttttctttttttttccctggagtgc

SEQ ID NO: 550033 - DNA, 82 bp, Artificial Sequence
  ENSG00000168291_15 (sequence is synthesized)
actggcaccatctcagagtggctggggttacaggtcgcgccactgtgcctagccaatttttgtgtttttagtagagatgggg

SEQ ID NO: 550034 - DNA, 120 bp, Artificial Sequence
  ENSG00000168291_16 (sequence is synthesized)
gaccaagatggcggcggtgtctggcttggtgcggagaccccttcgggaggtctccgggctgctgaagaggcgctttcactggaccgcgccggctgcgctgcaggtaacaggcgcgggtgc

SEQ ID NO: 550035 - DNA, 120 bp, Artificial Sequence
  ENSG00000168291_17 (sequence is synthesized)
tcgtcggacgagggcggggagggtccccccttctctcgggaaggaggccggagtcgcgcctgcgctgtggccttccggcgccgtgggccttgggtttgcggagccagcatcctccgtgga

SEQ ID NO: 550036 - DNA, 120 bp, Artificial Sequence
  ENSG00000168291_18 (sequence is synthesized)
gctcctgctgcctctgtcgccgcctggcaattagcacaccggcgagtcaccacctcacagctggctgggcaatgggggaaaactaagactaggcgtttcctccctcactccatgtttttt

SEQ ID NO: 550037 - DNA, 120 bp, Artificial Sequence
  ENSG00000168291_19 (sequence is synthesized)
tctttaaattgcagcaaaatagacctaacttaaaatgtactttttagaagtgtataattcagtggcattaagtacattcaccatgttgtacaaccattaaccaccatccatttccagaac

SEQ ID NO: 550038 - DNA, 120 bp, Artificial Sequence
  ENSG00000168291_20 (sequence is synthesized)
tttttaatcatcccaagcagaaactgtccattactcggtaactcctcatttcccttccccaaacccctggtaacccctgttgtacttttctgtctttatgaggttgcctattctagaact

SEQ ID NO: 550039 - DNA, 89 bp, Artificial Sequence
  ENSG00000168291_21 (sequence is synthesized)
tgtacttttctgtctttatgaggttgcctattctagaacttcttataagtggcatcatttgtccttttgtgtctggcttatctcagcgt

SEQ ID NO: 550040 - DNA, 61 bp, Artificial Sequence
  ENSG00000168291_22 (sequence is synthesized)
ggattctcgcgcctcacactcctgagtagctgtgattagatgccggtgccaccacaccggg

SEQ ID NO: 550041 - DNA, 76 bp, Artificial Sequence
  ENSG00000168291_23 (sequence is synthesized)
tccacctcctgggctcaagggattctcgcgcctcacactcctgagtagctgtgattagatgccggtgctcaccata

SEQ ID NO: 550042 - DNA, 120 bp, Artificial Sequence
  ENSG00000168291_24 (sequence is synthesized)
tgttttgtctattgtgagtaatgctgctgtgaacattgatgtgcaagtatatgcttgaatccctgctttcaattatttggggcatatacatagaagtggaattgatggattgtatgttaa

SEQ ID NO: 550043 - DNA, 120 bp, Artificial Sequence
  ENSG00000168291_25 (sequence is synthesized)
ttctcctctccttcctttttttaactagattttaccattcattatattaaaagagcaactcctacattctggatgcaaagtatttggcagtacttggcacctagtgagcactcagtacat

SEQ ID NO: 550044 - DNA, 120 bp, Artificial Sequence
  ENSG00000168291_26 (sequence is synthesized)
taacacatgcaaagaccaactatgtgtaatagaaatgttacttttagaattctttgagtttttagagagaagcttgttctagtgtttttatattgtatgctgtgggcagcctaggtaaat

SEQ ID NO: 550045 - DNA, 120 bp, Artificial Sequence
  ENSG00000168291_27 (sequence is synthesized)
gtaagccttccagtgggaagcagaccctggagggcatgtctgttagtgtccattatcctcatttttatggattttcacttatgtttatattttactttatagatgggctttgctggaatt

SEQ ID NO: 550046 - DNA, 120 bp, Artificial Sequence
  ENSG00000168291_28 (sequence is synthesized)
tttgggaaaaaaaaaaaataccaagtaggtagatgtggtggtgcttgcctgcagtcccagctactcgggatgctgaggaaggattacttgagcctaggagttagaggctgcagtgagcta

SEQ ID NO: 550047 - DNA, 120 bp, Artificial Sequence
  ENSG00000168291_29 (sequence is synthesized)
tgatgtgtgccactgcactccagcatgggtgacagtgagaccctgtccataaaaaataaaaataaaaaataaaaacattatttgaatgttggaagacttggagtgatttgtttgctactg

SEQ ID NO: 550048 - DNA, 120 bp, Artificial Sequence
  ENSG00000168291_30 (sequence is synthesized)
atccagcccctcaattttggtaaaatttaatctagaagttactgtcatttactttgactgaaaaattataggatgagctcaagatgccccaatttctcattcagttgtgcttttctagat

SEQ ID NO: 550049 - DNA, 120 bp, Artificial Sequence
  ENSG00000168291_31 (sequence is synthesized)
ggccacagtttggagtaggagctgaaatctgtgccaggatcatggaaggtatttcaaagaaactggttctagaatacagtcaagctatagtaaacatcatgtacctgaatacgtacagga

SEQ ID NO: 550050 - DNA, 120 bp, Artificial Sequence
  ENSG00000168291_32 (sequence is synthesized)
taaagagattgaaagctaggagtggccaaacgacttcaactttaaacttgtaagtttggcatttctcttcaggcagatatttttaaaagcaaatccagaaagcggttccccataattagc

SEQ ID NO: 550051 - DNA, 120 bp, Artificial Sequence
  ENSG00000168291_33 (sequence is synthesized)
attccttacattttctcttcctggtcagccacacctctgtgccaaggtggtagtgcccagctggcatttgcactctctcagttgagccttccttctcctaggtcctgcgttcaatttcct

SEQ ID NO: 550052 - DNA, 120 bp, Artificial Sequence
  ENSG00000168297_0 (sequence is synthesized)
gttgacagcggcggcggtggaaccgggcgggcggcgggagtcggcgcctcgggttcctacctcgcgtccctaggcggcggcggccgggcgtcccgggatggccttcatggagaagccgcc

SEQ ID NO: 550053 - DNA, 120 bp, Artificial Sequence
  ENSG00000168297_1 (sequence is synthesized)
agccggcaaggtgctgctggacgacacggtgccgctgacagcagccatcgaggcgagccagagcctgcagtcccacacggaatatattattcgagtgcaaagaggaatttctgtggaaaa

SEQ ID NO: 550054 - DNA, 120 bp, Artificial Sequence
  ENSG00000168297_2 (sequence is synthesized)
cagctggcagattgttagaagatacagtgactttgatttgcttaacaacagcttacagattgcaggcctaagtctacctcttcctcccaaaaaattgattggtaacatggatcgtgaatt

SEQ ID NO: 550055 - DNA, 120 bp, Artificial Sequence
  ENSG00000168297_3 (sequence is synthesized)
catagctgaaaggcagaaaggtcttcagaactatctcaacgtgatcacaacaaatcatatcttgtctaattgtgagctggttaagaagtttttagatccaaacaactattccgcaaacta

SEQ ID NO: 550056 - DNA, 120 bp, Artificial Sequence
  ENSG00000168297_4 (sequence is synthesized)
tactgagattgccttgcaacaggtttccatgttcttccgatcagaaccaaagtgggaggtggtggaacctttgaaagacataggttggagaataaggaagaaatatttcttgatgaagat

SEQ ID NO: 550057 - DNA, 120 bp, Artificial Sequence
  ENSG00000168297_5 (sequence is synthesized)
taaaaatcagccaaaggaacggctagtgttaagctgggctgaccttggcccagacaagtatttgtcagataaagattttcagtgtctaatcaaacttctgccttcttgtttgcaccctta

SEQ ID NO: 550058 - DNA, 120 bp, Artificial Sequence
  ENSG00000168297_6 (sequence is synthesized)
catctatcgggttacctttgccacagctaatgaatcctcagcgttgctaattaggatgtttaacgaaaagggaacattgaaggatctgatctacaaggcaaaaccaaaagacccatttct

SEQ ID NO: 550059 - DNA, 120 bp, Artificial Sequence
  ENSG00000168297_7 (sequence is synthesized)
aaagaagtactgcaaccctaagaagattcagggcctggaactccagcaaataaaaacatatggacggcaaatattagaggtactgaagtttcttcatgacaagggattcccttatgggca

SEQ ID NO: 550060 - DNA, 120 bp, Artificial Sequence
  ENSG00000168297_8 (sequence is synthesized)
tcttcacgcctccaatgtgatgctcgatggggacacttgccggctgctggaccttgagaattccttattgggcctgccttccttctaccgatcttatttttcacaattcaggaaaatcaa

SEQ ID NO: 550061 - DNA, 120 bp, Artificial Sequence
  ENSG00000168297_9 (sequence is synthesized)
tacattggaaagtgtggatgtccactgctttggccacttactgtatgaaatgacttatggacgaccgccagactcggtgcctgtggactccttccctcctgccccgtccatggctgtggt

SEQ ID NO: 550062 - DNA, 120 bp, Artificial Sequence
  ENSG00000168297_10 (sequence is synthesized)
ggccgtgttggagtctacgctgtcttgtgaagcctgtaaaaatggcatgcctaccatctcccggctcttacagatgccattattcagcgatgttttactaaccacttctgaaaaaccaca

SEQ ID NO: 550063 - DNA, 120 bp, Artificial Sequence
  ENSG00000168297_11 (sequence is synthesized)
gtttaagatccctacaaagttaaaagaggcattgagaattgccaaagaatgtatagagaagagactaattgaggaacagaaacagattcaccagcatcgaagactgacaagagctcagtc

SEQ ID NO: 550064 - DNA, 120 bp, Artificial Sequence
  ENSG00000168297_12 (sequence is synthesized)
caccatggatctgaggaggaaagaaaaaaaagaaagattttagctcgaaagaagtcaaaacgatctgctcttgaaaatagtgaagagcattcagcgaagtacagcaactccaataattca

SEQ ID NO: 550065 - DNA, 120 bp, Artificial Sequence
  ENSG00000168297_13 (sequence is synthesized)
gcaggatctggggccagctcacctctcacgtccccgtcatcgccaactccaccctctacatcagggatatctgcattacctccacctcctccacctccaccaccaccagcagctcccttg

SEQ ID NO: 550066 - DNA, 120 bp, Artificial Sequence
  ENSG00000168297_14 (sequence is synthesized)
cctcctgcgagcaccgaggcacctgcccagctctcgtctcaggctgtgaatggcatgagccgaggggccttgctcagctccatccagaatttccaaaaaggaactttgaggaaagccaaa

SEQ ID NO: 550067 - DNA, 120 bp, Artificial Sequence
  ENSG00000168297_15 (sequence is synthesized)
acctgtgatcacagtgctccgaagatcggctgaagcttcctgtttacacttggagggaaaagttcttttttattcctactcacccctaccccccaaactaccctcttcctgggaaagtaa

SEQ ID NO: 550068 - DNA, 120 bp, Artificial Sequence
  ENSG00000168297_16 (sequence is synthesized)
ttgctgagccagtacagccacaaacagtactattttgcagatgctcatgtaagcagcttttcgagagaaataattctttaagcagaataaagttaggctggcattgctcccttaagatct

SEQ ID NO: 550069 - DNA, 120 bp, Artificial Sequence
  ENSG00000168297_17 (sequence is synthesized)
tgctcctttattaaccctgtaaaggagtcttgtttatcctctaatggccaggcttttgggacagcagcatattgaaatattttcaccaactaaaggaaatagacagaaaaacaatgacaa

SEQ ID NO: 550070 - DNA, 120 bp, Artificial Sequence
  ENSG00000168297_18 (sequence is synthesized)
tattcaatcacagcagtaaatggcctttgtgttgcaatcccttctaccccatcagacagctcctagaaacattcctcttacagttcatttctctaaagcattttctgattcttagataac

SEQ ID NO: 550071 - DNA, 120 bp, Artificial Sequence
  ENSG00000168297_19 (sequence is synthesized)
tccaatttttgctacctttatcttagacattaacactatagcccaaagcatagttactttgctaaatcagaaagcaactgagttctttgttttctcctcaaatagaatggggaacgttca

SEQ ID NO: 550072 - DNA, 120 bp, Artificial Sequence
  ENSG00000168297_20 (sequence is synthesized)
caacattctcttaagttctaacaggaataccattgtggttatagaactcagggctgctaaagcaactactctagacccatagttctttttagttagatgtattgaaacagacaaaaatat

SEQ ID NO: 550073 - DNA, 120 bp, Artificial Sequence
  ENSG00000168297_21 (sequence is synthesized)
taacatcagaaaaagctcttgccaattagaggatcttcttaatcctcagcaattaagtttggggtttgaggggggcaggtcattgttacaacagaagtaaatttggcatctatagaaatc

SEQ ID NO: 550074 - DNA, 120 bp, Artificial Sequence
  ENSG00000168297_22 (sequence is synthesized)
aattatgatttttgaaagatttatctaaatatatcaatatagcatctctttaatgttagtcatttattagaaagatcctttatcctgatttgcttaaacctttcaataaattgcacttta

SEQ ID NO: 550075 - DNA, 120 bp, Artificial Sequence
  ENSG00000168297_23 (sequence is synthesized)
aaggattataaataatccatttaaaaattcaagtacacacatcagtgttggttactatgcagagaatgtcattgtgtatagtttcatgtaatctgttatgtcagctgtattttttattaa

SEQ ID NO: 550076 - DNA, 120 bp, Artificial Sequence
  ENSG00000168297_24 (sequence is synthesized)
aatcatgtcaagaaaacgtgttgtctgtagcttgacaagatatttcaaatgagaactttttgtagcgtctgttgttagcaaagaatagattcacacagtctaaggtttccttcctaccta

SEQ ID NO: 550077 - DNA, 120 bp, Artificial Sequence
  ENSG00000168297_25 (sequence is synthesized)
acatcaggttagtgatggagtaaagtgacatgccaccttcctgtccgccaacaggaggagcgggctgtgcctcttcctgccttggcccaacaatttcaggggttagatagcagcagcttt

SEQ ID NO: 550078 - DNA, 120 bp, Artificial Sequence
  ENSG00000168297_26 (sequence is synthesized)
ctcaagagaaatcagtgggagtgcaaattagcagtgtcatttgggagagctgaggggctagatttccaagctcggctttcacagggaatggaccggtttcagggccactagccacccccg

SEQ ID NO: 550079 - DNA, 120 bp, Artificial Sequence
  ENSG00000168297_27 (sequence is synthesized)
ggctccagcttgctgtctttgctgaaaagcttcatgcagagcttctcagattggagcctgtcttggtacatgcttagctgaacaacacaaatgcgccgtggcccaggggtcccgtcctgc

SEQ ID NO: 550080 - DNA, 120 bp, Artificial Sequence
  ENSG00000168297_28 (sequence is synthesized)
caggcctctctcctcagggagcccgtccatagggtcagttttgtcacagagcacaactggtaagatgcctaggtggaggagtgaaagagtcactgcgtttctgattttctggcaacgatt

SEQ ID NO: 550081 - DNA, 120 bp, Artificial Sequence
  ENSG00000168297_29 (sequence is synthesized)
tgctctgtaatgtatttaattatctgaatatttttctgttattagcctttgcttcacttttgtaaattagatactagttttgattgaaaaatgtaaaaagaatttatcttggagactgct

SEQ ID NO: 550082 - DNA, 120 bp, Artificial Sequence
  ENSG00000168297_30 (sequence is synthesized)
tataaaaataatccccaattttgttgagtagccccataatactatcttttatttttgaaccaagatgtctctcctaaagtcttttgcaagcccaataaaaacaattgggacaccagtatc

SEQ ID NO: 550083 - DNA, 120 bp, Artificial Sequence
  ENSG00000168297_31 (sequence is synthesized)
tccttttgcttcttaaatgaaccagttgttccagatgtgcgaggagctgcttctgccactcagagcttgctggctgtgcctggaagggttcctacaagctgtgtgaagggagaatcattg

SEQ ID NO: 550084 - DNA, 120 bp, Artificial Sequence
  ENSG00000168297_32 (sequence is synthesized)
gcagggagttggtatatgagttgatcccatattcattattaataactaacacagcacccaggagctgccaagagcattcttcagctccactcaaatgcttctaactgaccctcctaagaa

SEQ ID NO: 550085 - DNA, 120 bp, Artificial Sequence
  ENSG00000168297_33 (sequence is synthesized)
aatgagagcaaggggactagtgtgaatgacttacttctggctgagggtggctactggtgccttactgctgaatgttctagggcctgttttgggtagcaaagtacctggtccatgggagga

SEQ ID NO: 550086 - DNA, 120 bp, Artificial Sequence
  ENSG00000168297_34 (sequence is synthesized)
tattcttgtccttatctttgtcagcagatttcccaagaaagcccccaaatgttgatcaagacagaaaataggccttttttgtcttttatggagatacactgtttaggctgatcagaaatg

SEQ ID NO: 550087 - DNA, 120 bp, Artificial Sequence
  ENSG00000168297_35 (sequence is synthesized)
tctggtgatctactgcccggactatattaagccattttctagaagataggatattaatttaacaccacttgggcatattaagaaaattggagaaaattagtagtgagaatccagaaatcc

SEQ ID NO: 550088 - DNA, 120 bp, Artificial Sequence
  ENSG00000168297_36 (sequence is synthesized)
tcctttaacaagcaaggcacttgaggcgtctgtttaagggttcacagcccctgtctgtgtggttagatctgcccctgctcacttgactgccggttcttatctctaaatgcctttgggaat

SEQ ID NO: 550089 - DNA, 120 bp, Artificial Sequence
  ENSG00000168297_37 (sequence is synthesized)
ttacaatttatttggacttttggggggaattctctaatttatctgtgtttaaatgggtgctgtctcatacagtagtaagtttgcgtgagataaggtaacttttagaatgagagaaaaaaa

SEQ ID NO: 550090 - DNA, 120 bp, Artificial Sequence
  ENSG00000168297_38 (sequence is synthesized)
cccgtcatcgccaactccaccctctacatcagtagagcatgcaccattttgaacgtgaattttcgggatatctgcattacctccacctcctccacctccaccaccaccagcagctccctt

SEQ ID NO: 550091 - DNA, 120 bp, Artificial Sequence
  ENSG00000168297_39 (sequence is synthesized)
tctgtttctgtgtgtgaaataggacccaaagtgtctcgattgctgaagtgatgaacaagtgggaaagcagatttgagactatttccttatctgaatatttaaatgaaatacagcatcttt

SEQ ID NO: 550092 - DNA, 120 bp, Artificial Sequence
  ENSG00000168297_40 (sequence is synthesized)
aactgcatggcattttggtatattttaattttggaaaccataactctcaaagtcccgttgctgcaaaaatgttgattcctagttactctgatgaagaggaaagagtgttaggcacttgag

SEQ ID NO: 550093 - DNA, 120 bp, Artificial Sequence
  ENSG00000168297_41 (sequence is synthesized)
accgcagctcccggcgccgcggggtggaaggagctcggcggcgaccaggaaagcgactccgagttggggggcgggggcgggggctgcgggattcccgggctcaccttggactaggggagc

SEQ ID NO: 550094 - DNA, 120 bp, Artificial Sequence
  ENSG00000168297_42 (sequence is synthesized)
aggaacgagaccgctcaggaccatccacttctgcccgccgccagccttttcctttttgaggccgtgtaatttcctccttgcagctgagggtctgggtgatggggatgagggtgtgccggg

SEQ ID NO: 550095 - DNA, 120 bp, Artificial Sequence
  ENSG00000168298_0 (sequence is synthesized)
ccggctcgaattgctctcgctcacgcttgccttcaacatgtccgagactgcgcctgccgcgcccgctgctccggcccctgccgagaagactcccgtgaagaagaaggcccgcaagtctgc

SEQ ID NO: 550096 - DNA, 120 bp, Artificial Sequence
  ENSG00000168298_1 (sequence is synthesized)
aggtgcggccaagcgcaaagcgtctgggcccccggtgtccgagctcattactaaagctgttgccgcctccaaggagcgcagcggcgtatctttggccgctctcaagaaagcgctggcagc

SEQ ID NO: 550097 - DNA, 120 bp, Artificial Sequence
  ENSG00000168298_2 (sequence is synthesized)
cgctggctatgacgtggagaagaacaacagccgcatcaagctgggtctcaagagcctggtgagcaagggcaccctggtgcagaccaagggcaccggcgcgtcgggttccttcaaactcaa

SEQ ID NO: 550098 - DNA, 120 bp, Artificial Sequence
  ENSG00000168298_3 (sequence is synthesized)
gctaaaaaggcaggcgcggccaaggccaagaagccagcaggagcggcgaagaagcccaagaaggcgacgggggcggccacccccaagaagagcgccaagaagaccccaaagaaggcgaag

SEQ ID NO: 550099 - DNA, 120 bp, Artificial Sequence
  ENSG00000168298_4 (sequence is synthesized)
aagccggctgcagctgctggagccaaaaaagcgaaaagcccgaaaaaggcgaaagcagccaagccaaaaaaggcgcccaagagcccagcgaaggccaaagcagttaaacccaaggcggct

SEQ ID NO: 550100 - DNA, 120 bp, Artificial Sequence
  ENSG00000168298_5 (sequence is synthesized)
aaaccaaagaccgccaagcccaaggcagccaagccaaagaaggcggcagccaagaaaaagtagaaagttcctttggccaactgcttagaagcccaacacaacccaaaggctcttttcaga

SEQ ID NO: 550101 - DNA, 120 bp, Artificial Sequence
  ENSG00000168300_0 (sequence is synthesized)
ggcggctccggagtccgggaggctctggctgctccagtcgcgggtccgggccccgcctctccactcggcggtggcgtccgtgttgttattgtggtggtagcggcgtctggctgctgcgga

SEQ ID NO: 550102 - DNA, 120 bp, Artificial Sequence
  ENSG00000168300_1 (sequence is synthesized)
ccccgccgagtcctagcgcctggcctgcgcgccgctgcccgcgccacagccccatcactgagaagaattttttcactgtatagttgcctctgcacttaaagcaggcttggtccatgaatc

SEQ ID NO: 550103 - DNA, 120 bp, Artificial Sequence
  ENSG00000168300_2 (sequence is synthesized)
ccatgacaagagctttgaggacatgaggagcattctttgttcaaacatactgtgttttcctttggatcactggattaatttatttttggaaatcaagtgcaatattggaagccatttcta

SEQ ID NO: 550104 - DNA, 120 bp, Artificial Sequence
  ENSG00000168300_3 (sequence is synthesized)
ctaattttatttcacttttaaatttatgatttgatttgaatactatcatgggaggagctgtgagtgctggggaagataatgatgacttaattgataatttaaaagaagctcagtatattc

SEQ ID NO: 550105 - DNA, 120 bp, Artificial Sequence
  ENSG00000168300_4 (sequence is synthesized)
gtactgaaagagtggagcaagccttcagagcgattgatcgtggagattactatttggaaggctacagagacaatgcttacaaagacttagcctggaagcatggaaacatccacttgtcag

SEQ ID NO: 550106 - DNA, 120 bp, Artificial Sequence
  ENSG00000168300_5 (sequence is synthesized)
caccttgcatttattctgaagttatggaagcattgaaacttcaaccaggattgtcttttcttaacctgggaagtggaaccggatatttaagtacaatggtgggcttaattttaggtcctt

SEQ ID NO: 550107 - DNA, 120 bp, Artificial Sequence
  ENSG00000168300_6 (sequence is synthesized)
ttggaataaatcatgggattgagcttcattcagatgtggtggaatatgccaaggaaaaactggagagcttcatcaaaaatagtgatagctttgataaatttgagttctgtgaacctgcat

SEQ ID NO: 550108 - DNA, 120 bp, Artificial Sequence
  ENSG00000168300_7 (sequence is synthesized)
ttgttgttggtaattgcctccagatagcttctgacagtcatcagtatgatcgaatttattgtggagctggagtgcagaaagaccatgaaaactacatgaaaatattactaaaagttggag

SEQ ID NO: 550109 - DNA, 120 bp, Artificial Sequence
  ENSG00000168300_8 (sequence is synthesized)
gcatattagtcatgcctatagaggatcagttaacacagattatgcgaactggacagaacacttgggaaagtaaaaatatccttgctgtttcatttgctccacttgtgcaaccaagtaaga

SEQ ID NO: 550110 - DNA, 120 bp, Artificial Sequence
  ENSG00000168300_9 (sequence is synthesized)
atgataatggcaaaccagattctgtgggactccctccctgtgctgtcaggaatctacaggacttggctcgtatttacattcgacgcacacttagaaatttcataaatgatgagatgcagg

SEQ ID NO: 550111 - DNA, 120 bp, Artificial Sequence
  ENSG00000168300_10 (sequence is synthesized)
ccaaggggattcctcaaagggctccacccaaaaggaaaagaaagagagttaaacagagaattaacacttacgtatttgtgggtaatcagcttattcctcagcctctagacagtgaagagg

SEQ ID NO: 550112 - DNA, 120 bp, Artificial Sequence
  ENSG00000168300_11 (sequence is synthesized)
atgaaaaaatggaagaggataacaaagaagaggaggaaaaagatcacaatgaagcaatgaagccagaggagccacctcaaaatttactgagagaaaaaatcatgaagctgcccctccctg

SEQ ID NO: 550113 - DNA, 120 bp, Artificial Sequence
  ENSG00000168300_12 (sequence is synthesized)
aatctttaaaagcttacttgacatattttagagacaaataacttagatcaagaagaaaaatgcctactgataattcctttagtcttgaaaatgtagcatttgttaggagttaaaagagag

SEQ ID NO: 550114 - DNA, 120 bp, Artificial Sequence
  ENSG00000168300_13 (sequence is synthesized)
aattatttctttcatcagagcaaattatagtggaaaaaaaatcacttgtttctgtcagtaacacaaatgatgtattcagtgaataaaagaatcccttttataaaatctatttttctttaa

SEQ ID NO: 550115 - DNA, 120 bp, Artificial Sequence
  ENSG00000168300_14 (sequence is synthesized)
atcttggaaaaatgttgttttagctcagagtgatttcaaagtggaatgcaacagtagtcaagacttgtgtactataaatccttttctgattccttacagatttgtagtgatgaggtttag

SEQ ID NO: 550116 - DNA, 120 bp, Artificial Sequence
  ENSG00000168300_15 (sequence is synthesized)
atttaattttatatatggtttaaataattgttaagcttatataacctgatctgaattgcagttgtttgcatttcctctatgaaaacttcatttatctaataaggaagtcaaatgctttgt

SEQ ID NO: 550117 - DNA, 120 bp, Artificial Sequence
  ENSG00000168300_16 (sequence is synthesized)
agactatttaccttacttttgttgcaatcactgttgttgggttgctgtatatatattccgggcaatatatgagtgcaataacaatacaagatattgaataatttagctttaaaaaatccc

SEQ ID NO: 550118 - DNA, 120 bp, Artificial Sequence
  ENSG00000168300_17 (sequence is synthesized)
ccaaaagacatgggtaaaatatctgcctctctcatagagattttaagagcacagcaagtgaattattaaaacaaagtctatacttaatacaactctttatatggaccctttacattttca

SEQ ID NO: 550119 - DNA, 120 bp, Artificial Sequence
  ENSG00000168300_18 (sequence is synthesized)
ttcagtatttaaaaaaatgaggttatcttaactctatagaattttaaaagtatatttagaattgttttttctgtagttcactgtataaagtatttggttttttaaaaaaagcaaaaccat

SEQ ID NO: 550120 - DNA, 120 bp, Artificial Sequence
  ENSG00000168300_19 (sequence is synthesized)
atgtgtgactcttgataggacacagaacgagtgaatgagcatgagtgaggccactttcttggatggctgtaagtagcagggccagggtagacctggtcagcggatgcactttagcagatg

SEQ ID NO: 550121 - DNA, 120 bp, Artificial Sequence
  ENSG00000168300_20 (sequence is synthesized)
gaacttctagtttatctgaatatttatctttgacaaggtagggctgagcctacatttgcttttgatctatctagtataagaaatattcacagaaattgtatgtagataccctttgttttg

SEQ ID NO: 550122 - DNA, 120 bp, Artificial Sequence
  ENSG00000168300_21 (sequence is synthesized)
aaaatgctgttcagaatcatagtgtaatctttgggacctatgccatgttcatttcactccttcccatattttttgtgtttcttttggtaaaactataatggttttcattttttacttaat

SEQ ID NO: 550123 - DNA, 120 bp, Artificial Sequence
  ENSG00000168300_22 (sequence is synthesized)
atcacacagttaaactgtccatatttgagctttattttagcttatcagtgataaaaaacaggtagtaactgccattgtttgtttgttttcctaataaggcctgaaaacagccattccttg

SEQ ID NO: 550124 - DNA, 120 bp, Artificial Sequence
  ENSG00000168300_23 (sequence is synthesized)
ttaagaaagtgtacaatgtaacatatttgctagagttacatggattatatatttcttaaagggaaaaatttgagagtatcatggactaccaccagcattattattacagtagttactcag

SEQ ID NO: 550125 - DNA, 120 bp, Artificial Sequence
  ENSG00000168300_24 (sequence is synthesized)
atttggttaaggaagcccaagcaatgtatagtgaaaggattattatctctctgctaagattcagatattgtttcagaaatctcagctccagtaattccacaacatctaaaaacaaatgtt

SEQ ID NO: 550126 - DNA, 120 bp, Artificial Sequence
  ENSG00000168300_25 (sequence is synthesized)
tgtgatcatgtgtaagcatgaaattgttccaagtaagtgaggatattttagttatgtgaaagacagtttcatggaaggtatttgttttataccagtggctgggatggtggaattggggtt

SEQ ID NO: 550127 - DNA, 120 bp, Artificial Sequence
  ENSG00000168300_26 (sequence is synthesized)
atttctacaattattcttagacgattactaaactgttaagaaatgccccatatcatttttgtatctaggaaagaaaaaaatcagtttcatactgttgtcatctgtcagaaatgctcattt

SEQ ID NO: 550128 - DNA, 120 bp, Artificial Sequence
  ENSG00000168300_27 (sequence is synthesized)
tattttgaattaaatgtggcttttgaagtacctagttaccttgaattcctggtgaccacatgtttttatctggaaaacctggagaaagttatctgtcccatctcccctgcttgttttttt

SEQ ID NO: 550129 - DNA, 120 bp, Artificial Sequence
  ENSG00000168300_28 (sequence is synthesized)
ttttttttttggttggagctgctgtttagatgatgcttttactatgcaggagagagtttttgttaaggatatatttgaagattggcttttccatattgtccttcattctttgaccatggc

SEQ ID NO: 550130 - DNA, 120 bp, Artificial Sequence
  ENSG00000168300_29 (sequence is synthesized)
aaagtgtacagtagattttcatgatcattgcatatttcttgtcattgaaatgtatcttttatgtttttaaatgcattcattttacacttgtgagtttatcattgactttaagaggtagaa

SEQ ID NO: 550131 - DNA, 120 bp, Artificial Sequence
  ENSG00000168300_30 (sequence is synthesized)
agaaatgaaaaatgaaaattaaagctaaagcctttttatctattaatgcagatatattagaataagaatattttgggtttgtgtttattttttaatgaatttatgtttacttgatatgga

SEQ ID NO: 550132 - DNA, 120 bp, Artificial Sequence
  ENSG00000168300_31 (sequence is synthesized)
tacgctttataggtggaaaagtagcaaataaagattaagtaaaagtaagtgaaaatgatggggaatatagtattggaattttatagctagttaaaacagtaagtatcatctaatttgggt

SEQ ID NO: 550133 - DNA, 120 bp, Artificial Sequence
  ENSG00000168300_32 (sequence is synthesized)
gtttattttgcagatgagaaaacagacctagaaccgtggcatgttttgcctgaaacatacagtgagttagagacagggcctaagatagcttctagcatcagatcaatcccaagaatccat

SEQ ID NO: 550134 - DNA, 120 bp, Artificial Sequence
  ENSG00000168300_33 (sequence is synthesized)
cagcaacctcagaccaacccaagaagataatttaaatctatactgcttattggtcaatatatttggttctagtattaataaagaaaaatgttattaaaatagcatacatagtagtaaaat

SEQ ID NO: 550135 - DNA, 120 bp, Artificial Sequence
  ENSG00000168300_34 (sequence is synthesized)
aaaatacaaaaagtgtgttgatttatagctgtttgagatgataaaagtgaagcaaagcctgttaaatcattggaagacttggaaaattattttaaataaacaattacatgtaattaagca

SEQ ID NO: 550136 - DNA, 120 bp, Artificial Sequence
  ENSG00000168300_35 (sequence is synthesized)
agtcctagcgcctggcctgcgcgccgctgcccgcgccacaggtccttttggaataaatcatgggattgagcttcattcagatgtggtggaatatgccaaggaaaaactggagagcttcat

SEQ ID NO: 550137 - DNA, 120 bp, Artificial Sequence
  ENSG00000168300_36 (sequence is synthesized)
caaaaatagtgatagctttgataatcagctcctagacctagactatccgtctaagagggaagctacagggcaaggctaggtcaccctgatctcctagcagcttatcaaaagaattatatg

SEQ ID NO: 550138 - DNA, 120 bp, Artificial Sequence
  ENSG00000168300_37 (sequence is synthesized)
ggtaattttatttttgtaaaattctattttaaaaaataagccattttgtattatggtttatgatttataggagttgtaactttgtgtacagtatgtttgaatgtgtatacacagtgtagg

SEQ ID NO: 550139 - DNA, 120 bp, Artificial Sequence
  ENSG00000168300_38 (sequence is synthesized)
tatcttccttacttagatgtgaaaacacaaagtagtagtaatcttttttcattccgagtccttacctcaacctacagtagctctggaaactaactgttctctgttagtcattgtctgtac

SEQ ID NO: 550140 - DNA, 120 bp, Artificial Sequence
  ENSG00000168300_39 (sequence is synthesized)
ttaaagtcaagcgctggtgggcaggaaactcaggagtaatatttaatctatttcagatagagtgttctgtcttctggcatataaagtttgatggttatctaagagcattgtgccaggttt

SEQ ID NO: 550141 - DNA, 120 bp, Artificial Sequence
  ENSG00000168300_40 (sequence is synthesized)
attctacaataaggagaaaagtcatcagtaaccaacagtaacttataaaaataagtcaggaattatgtgaatttctaaaaaataaaagcttcatatagtaatattcagagcatgaaaata

SEQ ID NO: 550142 - DNA, 120 bp, Artificial Sequence
  ENSG00000168300_41 (sequence is synthesized)
gttttgaaaattgatatttgccaaaatttaataggatgtatggagaataagtttttgtgggtgtgtagaagtaagttaaaatagctttctgttgagaggacattattccttaattgcagg

SEQ ID NO: 550143 - DNA, 120 bp, Artificial Sequence
  ENSG00000168300_42 (sequence is synthesized)
aaattaaaatatgaaagaacgcgactccaaaaatcccaaaaataatatatatataaattatttgccaaatgtatcttgtagtaatcaagttgctcatattaaacaacttactaaagtgga

SEQ ID NO: 550144 - DNA, 120 bp, Artificial Sequence
  ENSG00000168300_43 (sequence is synthesized)
gatggatcttgaattatttcatcttcagaactttatgtattgtgaagtactttttgcctgtggctatgttctgtaagttagctttacacaaaatactaaaggcacagtgaacttcattca

SEQ ID NO: 550145 - DNA, 120 bp, Artificial Sequence
  ENSG00000168300_44 (sequence is synthesized)
aatgcagtgtggaactctcaggtttccttggtctgcctcagtcttctactcatcagcaccacactgtcaaaatgttggacattacaaggggcgaacatagacataaataaaaaatattgg

SEQ ID NO: 550146 - DNA, 120 bp, Artificial Sequence
  ENSG00000168300_45 (sequence is synthesized)
aattattaacttttatgtgcaagcttgggttcttgactaattggtaaatgataaatgaactagattagatccaattattagaaaagcactcttaagagtgcaatgaatgtgatttgaaaa

SEQ ID NO: 550147 - DNA, 120 bp, Artificial Sequence
  ENSG00000168300_46 (sequence is synthesized)
cttgaaagcagcctagattttactatatttgttattgttatcaatgggggtttgtcaaccttaaaaattattttttatgtaaagatacctaggaatttctaataactgtatttgttttaa

SEQ ID NO: 550148 - DNA, 120 bp, Artificial Sequence
  ENSG00000168300_47 (sequence is synthesized)
taaactttgactttgctgtatgtttctatgttctctttaatatttagctattaaaggtcaatattttctttttttaaaaaaaaagttacaaaaattaagcccttgtttcatagaaacatc

SEQ ID NO: 550149 - DNA, 120 bp, Artificial Sequence
  ENSG00000168300_48 (sequence is synthesized)
tttacattggcgaatacaaaataacattggaattcagagtcaaattcatgcctcagttggcctgttaatatcatcatcttttggataccatttcacttttttccattgacaacttgtacc

SEQ ID NO: 550150 - DNA, 120 bp, Artificial Sequence
  ENSG00000168300_49 (sequence is synthesized)
tattagctatatattacttgtttatttatttgaacatttatgttttttttaatctttcagtagcccattgttttttaattgaaaaagttatacacgcaaatggttaaaacaaattttata

SEQ ID NO: 550151 - DNA, 120 bp, Artificial Sequence
  ENSG00000168300_50 (sequence is synthesized)
caagagcatataatgataaaaatgtttccttaccaccctagatctcttagtcccctttctcagaagcagctatgtatgctttttcagttttctgttttattttcctgttgttctatttaa

SEQ ID NO: 550152 - DNA, 120 bp, Artificial Sequence
  ENSG00000168300_51 (sequence is synthesized)
tacagataccaaatgtgagttgtaataatcagcattgcattacatttttatacacttaatgcattcaaggtgtatatcacattctaaataaatgagatattggtgacattgctatttaaa

SEQ ID NO: 550153 - DNA, 120 bp, Artificial Sequence
  ENSG00000168300_52 (sequence is synthesized)
aaaaatagtgatagctttgataagtaagtattcatatctatagttttggtttaaaatcacttaatagatacatgcaacatgtctattcttgaacactattattgatcctgactggctcaa

SEQ ID NO: 550154 - DNA, 120 bp, Artificial Sequence
  ENSG00000168300_53 (sequence is synthesized)
ttgaatgcagcaaaaatcagtgcaccataaaatgagaaaaagttaagattattctgtggtataacttttactatatgtaattctatagtaaattataaataatgtgattttttgctacta

SEQ ID NO: 550155 - DNA, 120 bp, Artificial Sequence
  ENSG00000168300_54 (sequence is synthesized)
caactttattagtaatgttgaattcattaaacattcagctatcttttctggagatacagtgtaataatgctgtgattgcaatatttgtctggaactggttttttaccttttggatagtaa

SEQ ID NO: 550156 - DNA, 120 bp, Artificial Sequence
  ENSG00000168300_55 (sequence is synthesized)
ggtaccagtcagtatacaaaggactttaacatattcagctactttgtaatatatccagaagaaatgatcatagaaatacattgatatatcttgtgataggattgttaataagaaattggt

SEQ ID NO: 550157 - DNA, 120 bp, Artificial Sequence
  ENSG00000168300_56 (sequence is synthesized)
ttataaaaccattgttttgaactcacaatataactcctcttagaagaaacattgcacgggctttggtccttgggctggcaggaaaagtccatttggtgtgtaatcctaaaattctgcatt

SEQ ID NO: 550158 - DNA, 120 bp, Artificial Sequence
  ENSG00000168300_57 (sequence is synthesized)
gctatagagcaagagcacttacgctgaaatccatgagctctttgaaattgtgtaaaatttggagagcttttacatctctcatttcactgtgtatctgattttcaaagagaaaaagtgtta

SEQ ID NO: 550159 - DNA, 120 bp, Artificial Sequence
  ENSG00000168300_58 (sequence is synthesized)
aaaaggatagaaaacacaagcttagaacagtcactttaaagaacaaagttttaggcaaaaacactgagaatttcaactcggcttgttgggagttggccctcatttatatccagcccttgg

SEQ ID NO: 550160 - DNA, 120 bp, Artificial Sequence
  ENSG00000168301_0 (sequence is synthesized)
tgtacaaagagaaatacatcattatttaaaagcatcatcttttttttttatattgtaagataaataccattctgatgtatttctcttggaaagggatgctggtatcctgggaggtttatg

SEQ ID NO: 550161 - DNA, 120 bp, Artificial Sequence
  ENSG00000168301_1 (sequence is synthesized)
ggtatcctgggaggtttatgatttttgatgtttttactcaggtgattggcttgtatagctgaaatgctgatgaaaaggagttttcccttctccctttttcttttcttttctttttttttt

SEQ ID NO: 550162 - DNA, 120 bp, Artificial Sequence
  ENSG00000168301_2 (sequence is synthesized)
ttataggcatgagccactgcgcccagcctgtccctttttcttaaatgacctttttggtgaggaccattataggtttgtaccaggataaggttgtagagttaatcataatattctcttata

SEQ ID NO: 550163 - DNA, 120 bp, Artificial Sequence
  ENSG00000168301_3 (sequence is synthesized)
taaattctaaaaattgatgttctaagaagagaggtagaatttgaatgactgggttacttcctagactcttcctccttctcttaagtacagtatagttctttctctgaaaatcttcagtct

SEQ ID NO: 550164 - DNA, 120 bp, Artificial Sequence
  ENSG00000168301_4 (sequence is synthesized)
cttagttccagatgggttctctatggtaagaatacaggacatgtagaaggccctaggggaatgctttcttccccagatctttgccctgtagtaggtttcagctgagcaaggacgagtagt

SEQ ID NO: 550165 - DNA, 120 bp, Artificial Sequence
  ENSG00000168301_5 (sequence is synthesized)
ttttctggtgtttggcctcctctgttgggtggaaaaagactttcttctctattttcctagttatatatgctatcatatgtctgtttttctcctcttgaagtttccctgaaacctgggctc

SEQ ID NO: 550166 - DNA, 120 bp, Artificial Sequence
  ENSG00000168301_6 (sequence is synthesized)
ttgaagacgcatcactggagcagatggataatggagactggggctatatgatgactgacccagtcacattaaatgtaggtggacacttgtatacaacgtctctcaccacattgacgcgtt

SEQ ID NO: 550167 - DNA, 120 bp, Artificial Sequence
  ENSG00000168301_7 (sequence is synthesized)
acccggattccatgcttggagctatgtttgggggggacttccccacagctcgagaccctcaaggcaattactttattgatcgagatggacctcttttccgatatgtcctcaacttcttaa

SEQ ID NO: 550168 - DNA, 120 bp, Artificial Sequence
  ENSG00000168301_8 (sequence is synthesized)
ggattttaaggaatttgatctgcttcggaaagaagcagatttttaccagattgagcccttgattcagtgtctcaatgatcctaagcctttgtatcccatggatacttttgaagaagttgt

SEQ ID NO: 550169 - DNA, 120 bp, Artificial Sequence
  ENSG00000168301_9 (sequence is synthesized)
ggagctgtctagtactcggaagctttctaagtactccaacccagtggctgtcatcataacgcaactaaccatcaccactaaggtccattccttactagaaggcatctcaaattattttac

SEQ ID NO: 550170 - DNA, 120 bp, Artificial Sequence
  ENSG00000168301_10 (sequence is synthesized)
caagtggaataagcacatgatggacaccagagactgccaggtttcctttacttttggaccctgtgattatcaccaggaagtttctcttagggtccacctgatggaatacattacaaaaca

SEQ ID NO: 550171 - DNA, 120 bp, Artificial Sequence
  ENSG00000168301_11 (sequence is synthesized)
aggtttcacgatccgcaacacccgggtgcatcacatgagtgagcgggccaatgaaaacacagtggagcacaactggactttctgtaggctagcccggaagacagacgactgatctccgac

SEQ ID NO: 550172 - DNA, 120 bp, Artificial Sequence
  ENSG00000168301_12 (sequence is synthesized)
cctgccacaggttcctggaaagactctccaggaaatggaagatactgatttttttttttaaatcacagtgtgagatattttttttcttttaaatagttgtatttatttgaaggcagtgag

SEQ ID NO: 550173 - DNA, 120 bp, Artificial Sequence
  ENSG00000168301_13 (sequence is synthesized)
gaccagaaggaagttttgtgctttggcagactcctccatgttttgttcccttccccctgagtatgcatgtgcctgttcagagtctccagataccttttttataaaaagaagtctgaaaat

SEQ ID NO: 550174 - DNA, 120 bp, Artificial Sequence
  ENSG00000168301_14 (sequence is synthesized)
cattatggtatataatctacccttaacagagcttttcttattacagtgctaaaatgatttctgataaaatggtccctaactcaactagaaggctaaaaatacaagaatgaaagaataagc

SEQ ID NO: 550175 - DNA, 120 bp, Artificial Sequence
  ENSG00000168301_15 (sequence is synthesized)
agagtactcatgatgcctttgagaaaaatcaaaacatcatgtagggtgacctagtttccaaaccaataaataagtagtattgtaatattaaaggaaaactgttccaatcatttaaaagta

SEQ ID NO: 550176 - DNA, 120 bp, Artificial Sequence
  ENSG00000168301_16 (sequence is synthesized)
cttattaagtactgctttttacagttatgacaactgtttctttctatgcatataaatcaaggaaccaaatatctgtagccatggaaatgtctgactagaaatatttatattgaattctga

SEQ ID NO: 550177 - DNA, 120 bp, Artificial Sequence
  ENSG00000168301_17 (sequence is synthesized)
atacaaaatgtccctgtggtagaaaacttactctttatgcctggtgcagtataattcccaagtgtactgtctaccagaaaaaaaaaacaaaactaataaaaaatgaaatatgaaaattaa

SEQ ID NO: 550178 - DNA, 120 bp, Artificial Sequence
  ENSG00000168301_18 (sequence is synthesized)
ccggccgcgggcatctcccggcccggccgcagcagccgccgccgccgcgcaaccacatggttgagaaaggagaaagagaaaatgattacttgtagagaaaaatccatttctgcagtggta

SEQ ID NO: 550179 - DNA, 120 bp, Artificial Sequence
  ENSG00000168301_19 (sequence is synthesized)
tggttaaggataatctaaccataatcacattatccttgtatgcctggctacttatgctggcctgtatgtgaatgttaaccccaaagactcctttagatgtcgctgaactagttactataa

SEQ ID NO: 550180 - DNA, 120 bp, Artificial Sequence
  ENSG00000168301_20 (sequence is synthesized)
gcagcagccgccgccgccgcgcatttccctgaaacctgggctcttgaagacgcatcactggagcagatggataatggagactggggctatatgagatggggtcttgccatgttgcccagg

SEQ ID NO: 550181 - DNA, 120 bp, Artificial Sequence
  ENSG00000168301_21 (sequence is synthesized)
ctacaggacctccctgggaacctgttctctttccttgtcctgatgtgttactcttataggccaatttttgcctttgtgttgtgcctaaatggtgtaattaccccgttttgggaaggtggt

SEQ ID NO: 550182 - DNA, 120 bp, Artificial Sequence
  ENSG00000168301_22 (sequence is synthesized)
attatcccgttttatcttgcggaaactgagggttaagaggaatgttatgattttgtgactatttgtgacagctttttaatattaggtcacttttaaacctatagcttctctcttctagac

SEQ ID NO: 550183 - DNA, 120 bp, Artificial Sequence
  ENSG00000168303_0 (sequence is synthesized)
gatacagttccggtgggagaacgcggctgcgaggttttcggctttggctcctgatatgcagcgacagaattttcggcccccaactcctccttaccctggtccgggtggaggaggttgggg

SEQ ID NO: 550184 - DNA, 120 bp, Artificial Sequence
  ENSG00000168303_1 (sequence is synthesized)
tagcggaagcagcttccggggaaccccgggcgggggcggaccacggccgccctcccctcgagacgggtacgggagtccgcaccacacgccgccgtacgggccccggtctaggccgtacgg

SEQ ID NO: 550185 - DNA, 120 bp, Artificial Sequence
  ENSG00000168303_2 (sequence is synthesized)
gagcagtcactctccgcgacacggcggcagcttcccggggggccggttcgggtctccgtcccctggcggctaccctggctcctactccaggtcccccgcggggtcccagcagcaattcgg

SEQ ID NO: 550186 - DNA, 120 bp, Artificial Sequence
  ENSG00000168303_3 (sequence is synthesized)
ctactccccagggcagcagcagacccacccccagggttctccaaggacatctacaccatttggatcagggcgtgttagagaaaaaagaatgtctaatgagttggaaaattatttcaagcc

SEQ ID NO: 550187 - DNA, 120 bp, Artificial Sequence
  ENSG00000168303_4 (sequence is synthesized)
ttcaatgcttgaagatccttgggctggcctagaaccagtatctgtagtggatataagccaacaatacagcaatactcaaacattcacaggcaaaaaaggaagatacttttgttaacattt

SEQ ID NO: 550188 - DNA, 120 bp, Artificial Sequence
  ENSG00000168303_5 (sequence is synthesized)
ctgaaattcaactggaagcttcatgtgtcaggaacatcttggacaaaactttaagttgtgttgatataaatttacccaaagatgatgactttgattggataattagtaaggtctttttgt

SEQ ID NO: 550189 - DNA, 120 bp, Artificial Sequence
  ENSG00000168303_6 (sequence is synthesized)
tatttttcatcgtatcaggtattgttgatattagagaaaaaagtaggataacttgcaacatttagctctggaagtacctaccacattttagagatttaccgtttccatatatttaacatt

SEQ ID NO: 550190 - DNA, 120 bp, Artificial Sequence
  ENSG00000168303_7 (sequence is synthesized)
cctggttacataatggacatttgtcttttaatgttttttcaatgttttaaaataaaacattttgtcttctagctattgtggttttgtggtatgataaagaagtagacttactacagtaat

SEQ ID NO: 550191 - DNA, 120 bp, Artificial Sequence
  ENSG00000168303_8 (sequence is synthesized)
gctttgtagtcacttagagttcataggtaaatgttttgcaaattatttttgaaaatgaaataggtaaaccatcctttgagctgtagacagctctgtatttgttcgtaaataatgaggatg

SEQ ID NO: 550192 - DNA, 120 bp, Artificial Sequence
  ENSG00000168303_9 (sequence is synthesized)
agaataacagagttctgttcatactcattttatctaatgcttctgttaaaatgcattaaaacttgaagccccagaaacccatttaagcataactttatactcatttaactggaaaaggca

SEQ ID NO: 550193 - DNA, 120 bp, Artificial Sequence
  ENSG00000168303_10 (sequence is synthesized)
agaatagaccatgcattgctaaatcaaagtgttctatctgaatttctctatacctcttagcattatggagttagtttctcttgaggccaaagaagatagctaccagcagcctcaaatcac

SEQ ID NO: 550194 - DNA, 120 bp, Artificial Sequence
  ENSG00000168303_11 (sequence is synthesized)
ttccattgcaaaaagaacatctctcatctccatcaatccaagagaagacaaatttgccatacttagatcatgtttctgtattattgaaccaattaactgtggccaaggccacagtgagac

SEQ ID NO: 550195 - DNA, 120 bp, Artificial Sequence
  ENSG00000168303_12 (sequence is synthesized)
ctaattaacttgaatcatggacacatcaccataatgagacaggattctgtgaccttgaacaccactgggcctacctggagtagagaagtggttttccaaattaagggatgctatggatat

SEQ ID NO: 550196 - DNA, 120 bp, Artificial Sequence
  ENSG00000168303_13 (sequence is synthesized)
atacctatagttctggagagaaaaatatggaagaattgttaccccaactattttttaaaaatcaagtggttttttgtttgttttttgagatggagtctgttgcccaagctggagtgcagt

SEQ ID NO: 550197 - DNA, 62 bp, Artificial Sequence
  ENSG00000168303_14 (sequence is synthesized)
tacgagtctcccgcctcgacctcctgagtagctgggaatacaggcacgcgcctggctcattt

SEQ ID NO: 550198 - DNA, 89 bp, Artificial Sequence
  ENSG00000168303_15 (sequence is synthesized)
gtccgcctcccaggttcatacgagtctcccgcctcgacctcctgagtagctgggaatacaggcacgcgcctggctcatttttgtatttt

SEQ ID NO: 550199 - DNA, 85 bp, Artificial Sequence
  ENSG00000168303_16 (sequence is synthesized)
tgggatttcaggcatgagccaccgtgcccagcccagaacatgtatttttagtatttttagtatttttatgatctcaaatgatcca

SEQ ID NO: 550200 - DNA, 90 bp, Artificial Sequence
  ENSG00000168303_17 (sequence is synthesized)
tgctgagtaatcaggtgttttaacatgtaacacagactctaggcattttgaagttacaaaatacgaagatagagctagtaaaacttttgt

SEQ ID NO: 550201 - DNA, 120 bp, Artificial Sequence
  ENSG00000168303_18 (sequence is synthesized)
aagttacaaaatacgaagatagagctagtaaaacttttgtttcaacattcccagaaagaaacgtgtaaaaacaaaatggtcacacctcctatttgaaccatacccacagaaatttgttca

SEQ ID NO: 550202 - DNA, 120 bp, Artificial Sequence
  ENSG00000168303_19 (sequence is synthesized)
ttaggtatttcacagagactagaaaataagaatggaaggcttttagattaataaaagctccatgaaagccaggattttggaaatgctgtttctacaagttactagctggatgagttcact

SEQ ID NO: 550203 - DNA, 120 bp, Artificial Sequence
  ENSG00000168303_20 (sequence is synthesized)
tctctatgcctcaattttctcatgtgtaagatgagaaaattaatagtacctgtgtcatagaggtgttgtgttggaggattaaatgaatttatgtatgaaactcttaagccagagcctggc

SEQ ID NO: 550204 - DNA, 120 bp, Artificial Sequence
  ENSG00000168303_21 (sequence is synthesized)
acatagtaagcactcaataagtggtagctgttactttctcatttacccccatttccttagtttttagaatagtgtctgcaagatagtaggtacttaagtgataaatggatgtagaaattc

SEQ ID NO: 550205 - DNA, 120 bp, Artificial Sequence
  ENSG00000168303_22 (sequence is synthesized)
tgattgtaactactatattgttctacctacaccctgtatataaaagggataacttagtaatttttccccagtattttaaagaaaaagtccttattcccaacattatgtctttccagatat

SEQ ID NO: 550206 - DNA, 120 bp, Artificial Sequence
  ENSG00000168303_23 (sequence is synthesized)
gttgaggtcatgatgtataatggaaattaaagcaaagggaatacttttttaaatactttattgaactttataggtaagaaatgttgtctttaggaaatgacatttggagataatttactg

SEQ ID NO: 550207 - DNA, 120 bp, Artificial Sequence
  ENSG00000168303_24 (sequence is synthesized)
aagcatctcttagatcattgggttattagtaaagacgaaaacagaagttaggattttgtgccagtgtatttatatcatatttggaagacattcaaactgtaactcttctaatggtctacg

SEQ ID NO: 550208 - DNA, 120 bp, Artificial Sequence
  ENSG00000168303_25 (sequence is synthesized)
tacattttatttcactgtaagtgtaacataaaacaaaggtaaaatttcttgctaacgcttaccaacatctacttctagagacctggcctgagttttttaagaaaaatttttgtcctcagg

SEQ ID NO: 550209 - DNA, 120 bp, Artificial Sequence
  ENSG00000168303_26 (sequence is synthesized)
aaagatgcatacactgtaagtagtgtattcagttatcaaaattcttgtggcattggccatttggtttgttaccgttactctatttttatttatctgagtaaaaggaattgattattcttt

SEQ ID NO: 550210 - DNA, 120 bp, Artificial Sequence
  ENSG00000168303_27 (sequence is synthesized)
aaaatgaaagggattgttttttaatgttctaggatacacattttacctctataaaaatgctgaataactttttagaaaaacttacaattaagtatacatcttaaaaattcatatgcttaa

SEQ ID NO: 550211 - DNA, 120 bp, Artificial Sequence
  ENSG00000168303_28 (sequence is synthesized)
aggatggaagtgtagtctatagtagagtcttcaaacaagggtctacatactcctgggaatattaaactttctaagggatatgcaggcataaatagctttaagggaatgcaaattcagatc

SEQ ID NO: 550212 - DNA, 120 bp, Artificial Sequence
  ENSG00000168303_29 (sequence is synthesized)
gcagtgcccatgtaaatcctttattaaaattgacctacataaaaacatatccatatcaagggatcatgccagttctttttccctgctgccttttggtaatcactggtctcccattttaca

SEQ ID NO: 550213 - DNA, 120 bp, Artificial Sequence
  ENSG00000168303_30 (sequence is synthesized)
ctcgaaccttgccactacccttatcaagatgtggagttacgtcccttccctttgaacattaacagactttttttttttttcaaagagttagagggtctccttataggggcctccctgtat

SEQ ID NO: 550214 - DNA, 76 bp, Artificial Sequence
  ENSG00000168303_31 (sequence is synthesized)
caaagagttagagggtctccttataggggcctccctgtattacccaggctggtctctaactcttaggcttaagggg

SEQ ID NO: 550215 - DNA, 120 bp, Artificial Sequence
  ENSG00000168303_32 (sequence is synthesized)
aacttctgactgccataattaagagaatatgatggaagttaatctattttcattgtgggtaaagtgtggtgttaaaaatgagttataggccaggcactatggctcacacctgtaatccca

SEQ ID NO: 550216 - DNA, 86 bp, Artificial Sequence
  ENSG00000168303_33 (sequence is synthesized)
acttgaggttgcctcgtctccactaaaaacacaaaaataagctgggcatggtggcgcgcgcctgtaataccagctactggggaggc

SEQ ID NO: 550217 - DNA, 120 bp, Artificial Sequence
  ENSG00000168303_34 (sequence is synthesized)
aaaaaaataagttatattggcccgtgtggagatgttcagaattcagatgtattatcaagttgggaaataatgatgaaagtgttcagtgaccttgcctttttgtttctggactattcaaaa

SEQ ID NO: 550218 - DNA, 120 bp, Artificial Sequence
  ENSG00000168303_35 (sequence is synthesized)
aatcatttcctttgtgggtacattgtgtgaaaggaaagcaaagagcatgagtttaacatgaaggaaaagataccttatttttaggcaaaaagcaaatggtgaggctctttgcctcatcta

SEQ ID NO: 550219 - DNA, 120 bp, Artificial Sequence
  ENSG00000168303_36 (sequence is synthesized)
ctcatctacctaagaattaaaatattcaagattagtaaaaaagcatgattagttttggtgaatctcctgtgaagcaaactctgtatttccaccattcttttttttttttttttttttttg

SEQ ID NO: 550220 - DNA, 120 bp, Artificial Sequence
  ENSG00000168303_37 (sequence is synthesized)
cgtgagccaccgcgcccggccctccaccattcttgataattataaagagcctgatgaagatatctcaattcctgtctcagtagcatagtttgcatgatatcaaggaggaggaagttaaaa

SEQ ID NO: 550221 - DNA, 120 bp, Artificial Sequence
  ENSG00000168303_38 (sequence is synthesized)
aggaagttaaaagtttcatgtttacttctgacatactaacattacatcttcaagttaaaaacattttagaagtaagttcatgaatttatattttctgaaacattttcagattcttaagag

SEQ ID NO: 550222 - DNA, 120 bp, Artificial Sequence
  ENSG00000168303_39 (sequence is synthesized)
aaacattttcattaacccttgccagtacatttattattaggttctataaattccatattaattgttttacataggccaaagtctcctgctattgtcactcaaccatttctctgtatcatt

SEQ ID NO: 550223 - DNA, 120 bp, Artificial Sequence
  ENSG00000168303_40 (sequence is synthesized)
cattcctaccatatacttaggtttaagttaacagaaatatgttgtagtttttactgtaaataagacacataatcgcctggttggaaggtagtgagttatcttaattgattgttcagtcag

SEQ ID NO: 550224 - DNA, 120 bp, Artificial Sequence
  ENSG00000168303_41 (sequence is synthesized)
ttacagatcgaactctttgttctcgtcttccccccgcttctcactgctgcacttgactagtctgaaaaaaaaaaatacatagtagtcatcagtacacctgatataagccctgaacttcct

SEQ ID NO: 550225 - DNA, 77 bp, Artificial Sequence
  ENSG00000168303_42 (sequence is synthesized)
agtagtcatcagtacacctgatataagccctgaacttcctaatgacctctttttttgtgtgtgtgtgacagagtctt

SEQ ID NO: 550226 - DNA, 120 bp, Artificial Sequence
  ENSG00000168303_43 (sequence is synthesized)
tcagcctcccaaagtgctgggcttacatgggtgaggcagtgcacccagcctgaattacctcttttattttgctcataatttccataatttatcatctaatttaagatgctttgagattca

SEQ ID NO: 550227 - DNA, 120 bp, Artificial Sequence
  ENSG00000168303_44 (sequence is synthesized)
gatgctttgagattcactattattttatatgccacttagtaaaaatactgccagttaagctgtgacatgtcattgattataagatacatcttaatttcagagatgttaaatacatgtctt

SEQ ID NO: 550228 - DNA, 89 bp, Artificial Sequence
  ENSG00000168303_45 (sequence is synthesized)
aagatacatcttaatttcagagatgttaaatacatgtcttagtttgataaaataccatacaatacttttcttttttttgagaccgatcc

SEQ ID NO: 550229 - DNA, 61 bp, Artificial Sequence
  ENSG00000168303_46 (sequence is synthesized)
ccaagtagctgggattacaggtgtgtgacactacacccagctcacatacaatacagtgcag

SEQ ID NO: 550230 - DNA, 78 bp, Artificial Sequence
  ENSG00000168303_47 (sequence is synthesized)
tctgcctcagcctcccaagtaactgggacaacaggcacgcaccaccacaccctgctaattttttatatttggtagaga

SEQ ID NO: 550231 - DNA, 86 bp, Artificial Sequence
  ENSG00000168303_48 (sequence is synthesized)
aagccaccgttcctggcctatagtactcttaaaagcagaacatatacttagatataagtaggtatatagaagtaaatgtctccaaa

SEQ ID NO: 550232 - DNA, 120 bp, Artificial Sequence
  ENSG00000168303_49 (sequence is synthesized)
aaaagcagaacatatacttagatataagtaggtatatagaagtaaatgtctccaaaaggtagtgtaggacaatacatttgaaaattggctttaacccatcctggctaacacagtgaaacc

SEQ ID NO: 550233 - DNA, 120 bp, Artificial Sequence
  ENSG00000168303_50 (sequence is synthesized)
agagcgagactctgtctcaaaataaaaaaaaaaaaaagaaaatcggctttatttaattagggttaactcttctcagatacttgtatttgttcaaattcattaaaaaccataattgaggct

SEQ ID NO: 550234 - DNA, 120 bp, Artificial Sequence
  ENSG00000168303_51 (sequence is synthesized)
accactgcactccagcctgggcaacacagggagatcctgtctcaaaaaagaaaaaaatttttacagttgaaagattgccaacaatctaaatgaccataggagaaaggataaataagttgc

SEQ ID NO: 550235 - DNA, 120 bp, Artificial Sequence
  ENSG00000168303_52 (sequence is synthesized)
taaataagttgcatatttgcacagtataacaagatagttgattaaattagagccatttgatacaacatgaataaatctaaaattgtgtacaaacaaaagccaaagcaaaacttatgtgat

SEQ ID NO: 550236 - DNA, 120 bp, Artificial Sequence
  ENSG00000168303_53 (sequence is synthesized)
attctttacgtcaaatttaaaagtctgcaaaacaatatgctgtactctctataaatggtaaatataaggtcatagtgtaaatacaaatgaaggtaacatgctttagatatagtaattatt

SEQ ID NO: 550237 - DNA, 120 bp, Artificial Sequence
  ENSG00000168303_54 (sequence is synthesized)
ttggggtgggttcagggagatacaagcttcagatggacatggatgtgtgagtggatatgtatttcaagtcaaccaaatttggaaaatgttaaaatttattaaacctcaccatggaataca

SEQ ID NO: 550238 - DNA, 120 bp, Artificial Sequence
  ENSG00000168306_0 (sequence is synthesized)
agaggctgcggcctacagccggggagaggccagcccggcctacagtgcggacacaggacagaggggagccaggttctttgcactgaccaatgctgagagcagaccctcggagcagccggg

SEQ ID NO: 550239 - DNA, 120 bp, Artificial Sequence
  ENSG00000168306_1 (sequence is synthesized)
ttggaagtgtctctccatagtcaccagacagatccaggataggatgggcagcccagtgcaccgagtgtcattgggggatacctggagcaggcaaatgcaccccgacatagagagcgagag

SEQ ID NO: 550240 - DNA, 120 bp, Artificial Sequence
  ENSG00000168306_2 (sequence is synthesized)
gtatatgcagtcctttgacgtggaacggctcaccaacatccttgatggaggtgcccagaacactgcactccgcaggaaagttgagagcatcatccacagttacccggagtttagctgtaa

SEQ ID NO: 550241 - DNA, 120 bp, Artificial Sequence
  ENSG00000168306_3 (sequence is synthesized)
ggacaattatttcatgacccagaatgagcgttataaggctgccatgcggagggcattccacatccggttgatagctcggcgcctgggttggttagaagatggtcgtgaattaggctacgc

SEQ ID NO: 550242 - DNA, 120 bp, Artificial Sequence
  ENSG00000168306_4 (sequence is synthesized)
ttacagagccctttctggagacgtggccttaaatatacacagagtcttcgtgagagccctcaggagcctgggctcagaggagcagattgccaaatgggacccactctgcaaaaacatcca

SEQ ID NO: 550243 - DNA, 120 bp, Artificial Sequence
  ENSG00000168306_5 (sequence is synthesized)
gatcatcgcaacgtatgcacagacagagttgggacatgggacatatcttcagggcctggagactgaagccacctatgacgcagccacccaggagtttgtgatacacagccccacgctgac

SEQ ID NO: 550244 - DNA, 120 bp, Artificial Sequence
  ENSG00000168306_6 (sequence is synthesized)
tgccaccaaatggtggcctggagacttgggacggtcagccacccatgccctggtccaggcccagctgatctgctcaggagccaggcggggcatgcacgcttttattgtgccaatccggag

SEQ ID NO: 550245 - DNA, 120 bp, Artificial Sequence
  ENSG00000168306_7 (sequence is synthesized)
tcttcaggaccacaccccactgccaggaatcatcattggggacatcggacccaagatggactttgatcaaacagacaatggcttcctgcagctgaaccatgtgcgggtccccagggagaa

SEQ ID NO: 550246 - DNA, 120 bp, Artificial Sequence
  ENSG00000168306_8 (sequence is synthesized)
catgctgagtcgctttgcacaggtcttgccagatggcacctacgtcaaactcggtacagcacagagcaactaccttcccatggtggtggtgcgggtggagctgctgtcaggggagatcct

SEQ ID NO: 550247 - DNA, 120 bp, Artificial Sequence
  ENSG00000168306_9 (sequence is synthesized)
cctgtgtcatcgccatgcgctactcggtcatccgccgccaatcccggctccggcccagtgacccagaggcaaaggtcctggactaccagacacaacagcagaaactctttcctcagctgg

SEQ ID NO: 550248 - DNA, 120 bp, Artificial Sequence
  ENSG00000168306_10 (sequence is synthesized)
ccatcagttatgccttccatttcctggcagtcagcctcttggagttcttccagcactcctacactgccattctgaaccaagacttcagcttcctgcctgagctccacgcactgagcacgg

SEQ ID NO: 550249 - DNA, 120 bp, Artificial Sequence
  ENSG00000168306_11 (sequence is synthesized)
gcatgaaggccatgatgtcagaattctgcacccagggagctgagatgtgccgcagggcctgtggcggacatggctactcaaagctgagtggcctgccatcactggtcaccaaattgtcgg

SEQ ID NO: 550250 - DNA, 120 bp, Artificial Sequence
  ENSG00000168306_12 (sequence is synthesized)
cctcctgtacctacgagggtgagaacacagtgctctacctgcaggtggccaggttcctggtgaagagctacctgcagactcagatgtcccctggctccacgccacagagatctctctctc

SEQ ID NO: 550251 - DNA, 120 bp, Artificial Sequence
  ENSG00000168306_13 (sequence is synthesized)
catctgtcgcatatctcaccgcacctgacctggccaggtgtccagcccagagggcagccgacttcctctgcccggagctctacaccacggcctgggcacatgtggcagtaaggctcataa

SEQ ID NO: 550252 - DNA, 120 bp, Artificial Sequence
  ENSG00000168306_14 (sequence is synthesized)
aggactcagtgcagcatttacagaccctgacgcaatccggagctgaccagcacgaggcttggaaccagaccactgtcatacacctccaggctgctaaggtgcactgctactatgtcactg

SEQ ID NO: 550253 - DNA, 120 bp, Artificial Sequence
  ENSG00000168306_15 (sequence is synthesized)
tgaagggttttacagaagctctggagaaactagaaaatgaaccagcgattcagcaggtgctcaagcgcctctgtgacctccatgccatacatggaatcttgactaactcgggtgactttc

SEQ ID NO: 550254 - DNA, 120 bp, Artificial Sequence
  ENSG00000168306_16 (sequence is synthesized)
tccatgacgccttcctgtctggtgcccaagtggacatggcaagaacagcctacctggacctgctccgcctgatccggaaggatgccatcctgttaactgatgcttttgacttcaccgatc

SEQ ID NO: 550255 - DNA, 120 bp, Artificial Sequence
  ENSG00000168306_17 (sequence is synthesized)
agtgtttaaattcagcacttggctgttatgatggaaacgtctacgaacgcctgttccagtgggctcagaagtcaccaaccaatactcaggagaaccctgcctatgaggaatatataagac

SEQ ID NO: 550256 - DNA, 120 bp, Artificial Sequence
  ENSG00000168306_18 (sequence is synthesized)
cacttttacaaagttggagatccaagctatgaaataaccaacagtattcaagaagcaaccagcaccatcatgtgataatggtactatggcatatatgcaacattaaaattttaaattaga

SEQ ID NO: 550257 - DNA, 120 bp, Artificial Sequence
  ENSG00000168306_19 (sequence is synthesized)
gtgcccagaacactgcactccgcaggaaagttgatccatgaagcaagtgggtgagaagatttcaaggtgccagaaacctcacccaggtccctaagccctctgttctctgtcctctgcaga

SEQ ID NO: 550258 - DNA, 120 bp, Artificial Sequence
  ENSG00000168306_20 (sequence is synthesized)
tggaattctataagcctcccttaacaaggggcagtacccaccaacaaatgtgtcagtattcctgcagtgaaatgtgtggatgttcatgttagatgggatttttaaaggattatcaatggc

SEQ ID NO: 550259 - DNA, 120 bp, Artificial Sequence
  ENSG00000168306_21 (sequence is synthesized)
ctcatgtcagttcaagttttgcaatgagttctaaggaactgtctgtttttaaggtttttatggtgtcggggataggggaaggtggacacaacaggtagtgatctaaatcttctggttctt

SEQ ID NO: 550260 - DNA, 120 bp, Artificial Sequence
  ENSG00000168306_22 (sequence is synthesized)
ctacagccggggagaggccagcccggcctacagtgcggacacaggacagaggggagccagccctggctgacacccagccctaggcagttcctcttgcacacaggttctttgcactgacca

SEQ ID NO: 550261 - DNA, 120 bp, Artificial Sequence
  ENSG00000168306_23 (sequence is synthesized)
ctaatttgcacgtattgtatgagctcccagtggggcaagtcattccttctggaaacatcagcagccaccccttctcatggactggctataggggactgtgtgtcccacacacagcccaca

SEQ ID NO: 550262 - DNA, 120 bp, Artificial Sequence
  ENSG00000168306_24 (sequence is synthesized)
gatgaaaggggagaactgcctgcaagtacagctgggagctgggccccactccatactgcgctgatgcctaagagttcagacccacctagaagcagcttcacaggtaagaaccccacctca

SEQ ID NO: 550263 - DNA, 120 bp, Artificial Sequence
  ENSG00000168306_25 (sequence is synthesized)
gctggggaatgggacatctgttttatgccccatgcttctcttgtaagaagagtccttcattagcagttctgcttccaaataacaaactttgcccttgaaattccactgttagagattcat

SEQ ID NO: 550264 - DNA, 120 bp, Artificial Sequence
  ENSG00000168306_26 (sequence is synthesized)
tccttcgaactgtaaagacaatcttcacatgtcaatattgcctgagcccacctaggggatagaagagtcctaggcagcagaagacctggattctggtcctaaaattctgccactgcatag

SEQ ID NO: 550265 - DNA, 120 bp, Artificial Sequence
  ENSG00000168306_27 (sequence is synthesized)
ctttgtaaccttgggcaattcactttcccaccttggtcctcagttttgtcatctgtaaaataacaataatgtctgacttcctttccagatccatgaagcaagtgggtgagaagatttcaa

SEQ ID NO: 550266 - DNA, 120 bp, Artificial Sequence
  ENSG00000168306_28 (sequence is synthesized)
tccatgaagcaagtgggtgagaagatttcaagagccctttctggagacgtggccttaaatatacacagagtcttcgtgagagccctcaggagcctgggctcagaggagcagattgccaaa

SEQ ID NO: 550267 - DNA, 120 bp, Artificial Sequence
  ENSG00000168306_29 (sequence is synthesized)
gctcactcctcgagcagccccactagagagggatctacctgggatcacctggaaaccccctagccccatgagccatttcccccaacaaagggaagacttgttgggaaaccaggatgctag

SEQ ID NO: 550268 - DNA, 120 bp, Artificial Sequence
  ENSG00000168306_30 (sequence is synthesized)
gtgccctttatctcctgtactctgctcaggcagggggtacctgggcccctgtctccaataagctactcaactacagcatctctccccaacagagccctttctggagacgtggccttaaat

SEQ ID NO: 550269 - DNA, 120 bp, Artificial Sequence
  ENSG00000168306_31 (sequence is synthesized)
tccatctccttcaaggaatcatcattggggacatcggacccaagatggactttgatcaaacagacaatggcttcctgcagctgaaccatgtgcgggtccccagggagaacatgctgagtc

SEQ ID NO: 550270 - DNA, 120 bp, Artificial Sequence
  ENSG00000168309_0 (sequence is synthesized)
cttgctagtctgggacttcccggtggagtgaggaacccagcaacacgctcctgacttcccttcccaaggactcgacctgagaaccgccatgtactcggagatccagagggagcgggcaga

SEQ ID NO: 550271 - DNA, 120 bp, Artificial Sequence
  ENSG00000168309_1 (sequence is synthesized)
cattgggggcctgatggcccggccagaatacagagagtggaatccggagctcatcaagcccaagaagctgctgaaccccgtgaaggcctctcggagtcaccaggagctccaccgggagct

SEQ ID NO: 550272 - DNA, 120 bp, Artificial Sequence
  ENSG00000168309_2 (sequence is synthesized)
gctcatgaaccacagaaggggccttggtgtggacagcaagccagagctgcagcgtgtcctagagcaccgccggcggaaccagctcatcaagaagaagaaggaggagctggaagccaagcg

SEQ ID NO: 550273 - DNA, 120 bp, Artificial Sequence
  ENSG00000168309_3 (sequence is synthesized)
gctgcagtgcccctttgagcaggagctgctgagacggcagcagaggctgaaccagctggaaaaaccaccagagaaggaagaggatcacgcccccgagtttattaaagtcagggaaaacct

SEQ ID NO: 550274 - DNA, 120 bp, Artificial Sequence
  ENSG00000168309_4 (sequence is synthesized)
gcggagaattgccacactgaccagcgaagagagagagctgtagggccagctgccgggctcaggccactgcccaccctggcctggacagcctccttcagcccttctgtacctggcagccct

SEQ ID NO: 550275 - DNA, 120 bp, Artificial Sequence
  ENSG00000168309_5 (sequence is synthesized)
gggccccaggccctgggacgtctgtgatgttcccacctgcttctgtagaaatgtgtcaccccagagggcctggctctccctgggaggctggggcccctaagctcctaggttttccttcca

SEQ ID NO: 550276 - DNA, 120 bp, Artificial Sequence
  ENSG00000168309_6 (sequence is synthesized)
agcacccagccctcctgctccaagagggataacctgcacccctccctgcaaggggttcagagcccagcacaggagctttctctggcagaattgaggaggaagaggtggccctctgacttg

SEQ ID NO: 550277 - DNA, 120 bp, Artificial Sequence
  ENSG00000168309_7 (sequence is synthesized)
acaagccttctgttctgcccaggccttcccaccaggaatctccgaggctccccagggccccgcttctccgtacaccccagctcctaggtctcagagaactcccccacctgtggttttacc

SEQ ID NO: 550278 - DNA, 120 bp, Artificial Sequence
  ENSG00000168309_8 (sequence is synthesized)
tgcagccagcagagcttagcttcaaggacacctgccttcaaagccactgaggggaggaagggcagggcagactgcagatggccttgttgctggcatcccggccaggtgggcggggactaa

SEQ ID NO: 550279 - DNA, 120 bp, Artificial Sequence
  ENSG00000168309_9 (sequence is synthesized)
caaagacagctgtttagggtcttctcccctcacccatgctttcatcatcccctccgcacagcctccccgtccaggccttctaaccacacctacccagggctgccgcattcctgcactcag

SEQ ID NO: 550280 - DNA, 120 bp, Artificial Sequence
  ENSG00000168309_10 (sequence is synthesized)
aagtctgcagcggtgcctcacaaacttgattgtgcataaaaatcactggggatcttgttaatacagcttctaactcaatagatctgggagatcctgcatttctaacaagctcccaggtaa

SEQ ID NO: 550281 - DNA, 120 bp, Artificial Sequence
  ENSG00000168309_11 (sequence is synthesized)
ggcggaggctgctggtgtgaggaccatgctgtgagcagcagggcgagagtgcccagggctgatatatattggaaatatcacccctgaagccatcgctggcccccacctcctgtggactga

SEQ ID NO: 550282 - DNA, 120 bp, Artificial Sequence
  ENSG00000168309_12 (sequence is synthesized)
tgtgttggttatgtgagtgttgttttaatcagagatgtacatgattgccaatctgcatttcttaccagtgtgaccacactgttacgatgcaattctagccaaaaaaaaaaaaaaaaaaaa

SEQ ID NO: 550283 - DNA, 120 bp, Artificial Sequence
  ENSG00000168309_13 (sequence is synthesized)
attttttttttttactttttcctagtcttatggaaagcaaatatacaatgattttcagtaggcttctggaatagaaacagtggtttgaagaccccactgccacctttatggactggcccc

SEQ ID NO: 550284 - DNA, 120 bp, Artificial Sequence
  ENSG00000168309_14 (sequence is synthesized)
tttgagtctgaatccccggcctctgtcacctgagacccaacccctagctgggccaactccagtgaattcacccatttttcttcttcagaaggcctttcctgtgtgagacccacatatttt

SEQ ID NO: 550285 - DNA, 120 bp, Artificial Sequence
  ENSG00000168309_15 (sequence is synthesized)
aaccttttgctcctatcccatttttaaagaattagagaataaaccaggcctgtttcttttcccctgaaatccctgcctctggcttcctaaacccatcatctaaggtgacagagcagtgct

SEQ ID NO: 550286 - DNA, 120 bp, Artificial Sequence
  ENSG00000168309_16 (sequence is synthesized)
ggaatagcatctcctttcactttcccaaaactgccacagatagctgccactggcatgctctttgattcctggaagcaaacgtgggactgtcggaggaaagggattgttctggtcttactc

SEQ ID NO: 550287 - DNA, 120 bp, Artificial Sequence
  ENSG00000168309_17 (sequence is synthesized)
ataactgggtggtttgagggtgactgaagtcgtgcttttcctgtgtgtgctgccagcacagggctgtaaatgcagatattgcgcctgtgtgcgtgtgtataagtcaagctccaagaggct

SEQ ID NO: 550288 - DNA, 120 bp, Artificial Sequence
  ENSG00000168309_18 (sequence is synthesized)
cctgaatgtgactggcgtgctgagaatgtgtttacgctgtttaatgtctgccaggtgagggttacactgaagatgcacaatccctaaaataaagatcaccacttccccaaagaagcagcc

SEQ ID NO: 550289 - DNA, 120 bp, Artificial Sequence
  ENSG00000168309_19 (sequence is synthesized)
ctcgggtccatgtgttgttcagacatgtgaagagaagcaagacagagggtctcagatggacgagggctctccaagggaatgcctggggattcacccagtggtccccagaggtgctccatg

SEQ ID NO: 550290 - DNA, 120 bp, Artificial Sequence
  ENSG00000168309_20 (sequence is synthesized)
gaggcaacaagtcattccatgaagccccagaggtagaagggacctcaagcaccacgccctccagggcagccgtgcagacgaccttggttcacttttcaggggtcgtcccaactctgtatc

SEQ ID NO: 550291 - DNA, 120 bp, Artificial Sequence
  ENSG00000168309_21 (sequence is synthesized)
tccagccactccaactgtggaggctgtaaatccagattttcactgttccagtctcctttgcagcttaggatggctatgtgatcaggtgtggccaatgaaattgaagaggaagtctacctg

SEQ ID NO: 550292 - DNA, 120 bp, Artificial Sequence
  ENSG00000168309_22 (sequence is synthesized)
ggcttctgggaaagcttttccaataaaagacacaggcatggctaacacctccctgggcctcttcttcctaccttgattgagggtgtgatgcctggagccacagcagccactttgctacca

SEQ ID NO: 550293 - DNA, 120 bp, Artificial Sequence
  ENSG00000168309_23 (sequence is synthesized)
tgacaaaaaggccaagagaatcacagagtcattgaccctatcattatttcaccaagccaataccagccgccatccttctccagaattcttgtaaataaaataaatccctctttgtttaaa

SEQ ID NO: 550294 - DNA, 120 bp, Artificial Sequence
  ENSG00000168309_24 (sequence is synthesized)
ctgcctcaggaagcttggcttcccctcccatggggaagtgctggaatccactcttgcctgaccctcccataagaaacaagggaaattcctttacgtgagccgccttgctcagaacaaagc

SEQ ID NO: 550295 - DNA, 120 bp, Artificial Sequence
  ENSG00000168309_25 (sequence is synthesized)
ttggcgtgtttcttattcctcatcaatctgacaaaatgggtatttatttgtgcctctcaagcgtgtggcttggacatgatgttccgcatcgtggaagtggccgtgcaccaagtggaatat

SEQ ID NO: 550296 - DNA, 120 bp, Artificial Sequence
  ENSG00000168309_26 (sequence is synthesized)
ctgttactatagtaacagttcctttttattgataccagaataaacaggaatgcaaaggctgtctcacttgttggcacatttcagcagcctccgttcccaggggtttaagaaccgccctct

SEQ ID NO: 550297 - DNA, 120 bp, Artificial Sequence
  ENSG00000168309_27 (sequence is synthesized)
agaggcagccctccttgctagtctgggacttcccggtggagtgaggaacccagcaacacgctcctgacttcccttcccaaggactcgacctgagaaggacacagcagtctctgaatttca

SEQ ID NO: 550298 - DNA, 120 bp, Artificial Sequence
  ENSG00000168309_28 (sequence is synthesized)
gctgtgggagagccccggaccccaagcatcttcaaaggtctattattaatggggctgtccagctgaagctgacatccgcacgcagccctcccagagctctgcacctcagccagcccacgg

SEQ ID NO: 550299 - DNA, 120 bp, Artificial Sequence
  ENSG00000168309_29 (sequence is synthesized)
cctccaccgtctggccctgtcggctgagtggtgcccagcaaggtgagaaggccaagtcctgcccgctgggccaggcagaggtcacccgccgcgcctgagctaccggtgtgtgatgagagg

SEQ ID NO: 550300 - DNA, 120 bp, Artificial Sequence
  ENSG00000168309_30 (sequence is synthesized)
actgccccacgtcttccctcatttcccagctgcctcagtttcccttcctgagagaggcagggttctgggaggtgaggagctgcagggacccaagaagggcatagaagccgcctggggaca

SEQ ID NO: 550301 - DNA, 120 bp, Artificial Sequence
  ENSG00000168309_31 (sequence is synthesized)
ctggcccctctgtcaggatcaatcgccctaagcctgtctgaggcgctccgggcttaggagcagctgtgaaagccgcctttgtgcctgggagaatgagccgcaagaggacagggggccctc

SEQ ID NO: 550302 - DNA, 120 bp, Artificial Sequence
  ENSG00000168309_32 (sequence is synthesized)
gccccgggagccccttgggtcctggctcctgagatcaacgccagcagggaggaccccagcctggcccctgcagcccacccaggcctggtgcccacttcgtgccatgggagcagcccaggg

SEQ ID NO: 550303 - DNA, 120 bp, Artificial Sequence
  ENSG00000168309_33 (sequence is synthesized)
ttcccccggcggcgtctcctcgcccgcccctccggccgccgccgtaacttgaccctcagcggggtttgggacttggggccgcgtcaccgtcgcggaggcgcttcggctccggactacgct

SEQ ID NO: 550304 - DNA, 120 bp, Artificial Sequence
  ENSG00000168309_34 (sequence is synthesized)
cctgctgtgcgctcgcggggccagcagtgctggctctgcagtaggaggcgcgggggcatggcgcagaggctgggcgagtgggcccgggggccctccgatgccaccgggctctaccgggct

SEQ ID NO: 550305 - DNA, 120 bp, Artificial Sequence
  ENSG00000168309_35 (sequence is synthesized)
gttacgccatttgcccaagaccacacagccagaagagagtggctgggatggacctatacctgccatctcttcacctgcatctgctgggaaccccatccctcagcactggggccatttcca

SEQ ID NO: 550306 - DNA, 120 bp, Artificial Sequence
  ENSG00000168309_36 (sequence is synthesized)
gctcctgcatcatggggcctccttgtcccctttcccatgaccaggccctgaaaatgctcccaccccaatcctgccagctcccccaactcctgagaaagtcccctctgagagccaagagtc

SEQ ID NO: 550307 - DNA, 120 bp, Artificial Sequence
  ENSG00000168309_37 (sequence is synthesized)
cctgcagatctcaggaaggtgtccaggggaaagagatgcatgcaaagccccattccagctctgccaactcactgcttattcattaataaaagaatgcccaggctattttgggcacctgta

SEQ ID NO: 550308 - DNA, 120 bp, Artificial Sequence
  ENSG00000168309_38 (sequence is synthesized)
gcagtgcccctttgagcaggagctgctgagacggcagcagaggctgaaccaggtgggtgatgggcacccagcagggaccacgcatcctccagggctgtcctccagggaggagctctgctg

SEQ ID NO: 550309 - DNA, 120 bp, Artificial Sequence
  ENSG00000168309_39 (sequence is synthesized)
tggccacagctagtaagagggaagaggatcagcagacagagcactggactaagagtccactcctggcctgagtcctccctctgccattcactttgctaggtccttagggcgagtggcttc

SEQ ID NO: 550310 - DNA, 120 bp, Artificial Sequence
  ENSG00000168309_40 (sequence is synthesized)
cctgaacctcagcttcctcactggcccagtgtactgcatgctgattctgatttcattcttataactgtcttgtgagccaggtggcattcccattttagagatggggaagctgaggcccag

SEQ ID NO: 550311 - DNA, 120 bp, Artificial Sequence
  ENSG00000168309_41 (sequence is synthesized)
agggggtgagtgatttgaaccaggctgcacaaggagaactcagtctcatgctctgtgccccagctaccaggctgatagcaaaactcatccccaggttggttctgtttccccactgagtgg

SEQ ID NO: 550312 - DNA, 120 bp, Artificial Sequence
  ENSG00000168309_42 (sequence is synthesized)
gcccttggtccaaactccacaggttttcagagtaggaatccccctagctccacccacttcactctctgcttctccctccttcagctggaaaaaccaccagagaaggaagaggatcacgcc

SEQ ID NO: 550313 - DNA, 120 bp, Artificial Sequence
  ENSG00000168310_0 (sequence is synthesized)
ctctccttgttttgctttcgatctggactgttctcaggcaagccggggagtaacttttagttttgctcctgcgattattcaactgacgggctttcatttccatttcacataccctagcaa

SEQ ID NO: 550314 - DNA, 120 bp, Artificial Sequence
  ENSG00000168310_1 (sequence is synthesized)
cacttataccttgcggaattgtattggtagcgtgaaaaaagcacactgagagggcaccatgccggtggaaaggatgcgcatgcgcccgtggctggaggagcagataaactccaacacgat

SEQ ID NO: 550315 - DNA, 120 bp, Artificial Sequence
  ENSG00000168310_2 (sequence is synthesized)
cccggggctcaagtggcttaacaaggaaaagaagatttttcagatcccctggatgcatgcggctagacatgggtgggatgtggaaaaagatgcaccactctttagaaactgggcaatcca

SEQ ID NO: 550316 - DNA, 120 bp, Artificial Sequence
  ENSG00000168310_3 (sequence is synthesized)
tacaggaaagcatcaaccaggagtagataaacctgatcccaaaacatggaaggcgaatttcagatgcgccatgaattccttgcctgatattgaagaagtcaaggataaaagcataaagaa

SEQ ID NO: 550317 - DNA, 120 bp, Artificial Sequence
  ENSG00000168310_4 (sequence is synthesized)
aggaaataatgccttcagggtctaccgaatgctgcccctatcagaacggccttctaagaaaggaaagaaaccaaagacagaaaaagaagacaaagttaagcacatcaagcaagaaccagt

SEQ ID NO: 550318 - DNA, 120 bp, Artificial Sequence
  ENSG00000168310_5 (sequence is synthesized)
tgagtcatctctggggcttagtaatggagtaagtgatctttctcctgagtatgcggtcctgacttcaactataaaaaatgaagtggatagtacggtgaacatcatagttgtaggacagtc

SEQ ID NO: 550319 - DNA, 120 bp, Artificial Sequence
  ENSG00000168310_6 (sequence is synthesized)
ccatctggacagcaacattgagaatcaagagattgtcaccaatccgccagacatttgccaagttgtagaggtgaccactgagagcgacgagcagccggtcagcatgagcgagctctaccc

SEQ ID NO: 550320 - DNA, 120 bp, Artificial Sequence
  ENSG00000168310_7 (sequence is synthesized)
tctgcagatctcccccgtgtcttcctatgcagaaagcgaaacgactgatagtgtgcccagcgatgaagagagtgccgaggggcggccacactggcggaagaggaatattgaaggcaaaca

SEQ ID NO: 550321 - DNA, 120 bp, Artificial Sequence
  ENSG00000168310_8 (sequence is synthesized)
gtacctcagcaacatggggactcgaggctcctacctgctgcccggcatggcgtccttcgtcacttccaacaaaccggacctccaggtcaccatcaaagaggagagcaatccggtgcctta

SEQ ID NO: 550322 - DNA, 120 bp, Artificial Sequence
  ENSG00000168310_9 (sequence is synthesized)
gtcatcaagaaaacatcggatatcacccaggcccgcgtcaagagctgttaagcctctgactctccgcggtggttgttggggcttcttggctttgttttgttgtttgtttgtattttattt

SEQ ID NO: 550323 - DNA, 120 bp, Artificial Sequence
  ENSG00000168310_10 (sequence is synthesized)
ttttctctctgacacctattttagacaaatctaagggaaaaagccttgacaatagaacattgattgctgtgtccaactccagtactggagcttctctttaactcaggactccagcccatt

SEQ ID NO: 550324 - DNA, 120 bp, Artificial Sequence
  ENSG00000168310_11 (sequence is synthesized)
ggtagacgtgtgtttctagagcctgctggatctcccagggctactcactcaagttcaaggaccaacaagggcagtggaggtgctgcattgcctgcggtcaaggccagcaaggtggagtgg

SEQ ID NO: 550325 - DNA, 120 bp, Artificial Sequence
  ENSG00000168310_12 (sequence is synthesized)
atgcctcagaacggacgagataatgtgaactagctggaattttttattcttgtgaatatgtacataggcagcactagcgacattgcagtctgcttctgcaccttatcttaaagcacttac

SEQ ID NO: 550326 - DNA, 120 bp, Artificial Sequence
  ENSG00000168310_13 (sequence is synthesized)
taaagcacttacagataggccttcttgtgatcttgctctatctcacagcacactcagcacccccttctctgcccattccccagcctctcttcctatcccatcccatcccatcccatccca

SEQ ID NO: 550327 - DNA, 120 bp, Artificial Sequence
  ENSG00000168310_14 (sequence is synthesized)
ccgctcttttcctacttttccttccctcaaagcttccattccacatccggaggagaagaaggaaatgaatttctctacagatgtcccattttcagactgctttaaaaaaaatccttctaa

SEQ ID NO: 550328 - DNA, 120 bp, Artificial Sequence
  ENSG00000168310_15 (sequence is synthesized)
tctgctatgcttgaatgccacgcggtacaaaggaaaaagtatcatggaaatattatgcaaattcccagatttgaagacaaaaatactctaattctaaccagagcaagcttttttattttt

SEQ ID NO: 550329 - DNA, 120 bp, Artificial Sequence
  ENSG00000168310_16 (sequence is synthesized)
tatacaggggaatattttattcaaggtaaaattctaaataaaatataattgttttttatcttttctacagcaaatttataattttaagattccttttcttgtttatcagcagttgttatt

SEQ ID NO: 550330 - DNA, 120 bp, Artificial Sequence
  ENSG00000168310_17 (sequence is synthesized)
acatccttgtggcacatttttttttttaattttgtaaaggtgaaaaaagcttttatgagctcatgtagcaatcagattttcctgtggattgataataaatgaatatgatatatagttaaa

SEQ ID NO: 550331 - DNA, 120 bp, Artificial Sequence
  ENSG00000168310_18 (sequence is synthesized)
cttataccttgcggaattgtattggtagcgtgaaaaaagcacactgagagtgtgggagctgttcttggacagtgctgtgtgctcttctccggagtccgaggccaggggagtaactgcagt

SEQ ID NO: 550332 - DNA, 120 bp, Artificial Sequence
  ENSG00000168310_19 (sequence is synthesized)
aaaaagcaaagcccttactcctagtgggtcttccctgagccaagtgcttgaaaagctgtgggagtgggaactgttgtcatgatcgaaaatgaaactattctgggaatgccagatttgggg

SEQ ID NO: 550333 - DNA, 120 bp, Artificial Sequence
  ENSG00000168310_20 (sequence is synthesized)
cgctgggaaccctgaagtgtcctgcagagaactggtggtggaggggcctctggaggacaaacatctacaatttgcaaatctatcagtgacccagcgatggcacttctggcggtttttctt

SEQ ID NO: 550334 - DNA, 120 bp, Artificial Sequence
  ENSG00000168310_21 (sequence is synthesized)
ttcagggtctaccgaatgctgcccctatcagaacggccttctaagaaaggtaaaggcatttacagactaaaataaggaaagaaaccaaagacagaaaaagaagacaaagttaagcacatc

SEQ ID NO: 550335 - DNA, 120 bp, Artificial Sequence
  ENSG00000168310_22 (sequence is synthesized)
gattttaggggaagcaggttctgctgctgttgctgctgctactggggctgctgaggctgcgaggaggaggaggaggaggagggcaccatgccggtggaaaggatgcgcatgcgcccgtgg

SEQ ID NO: 550336 - DNA, 120 bp, Artificial Sequence
  ENSG00000168310_23 (sequence is synthesized)
cagatgcggagaggtggctccatggacacagacctgctgtgtgtgcttctgcgccccaggtgttgtgtgtgggggtgcagggcaccatgccggtggaaaggatgcgcatgcgcccgtggc

SEQ ID NO: 550337 - DNA, 120 bp, Artificial Sequence
  ENSG00000168310_24 (sequence is synthesized)
cacgatcccggggctcaagtggcttaacaagagacagggtctcactatatggcccacgctggagtgcagtggtgcagtcataactcactgcagcctcgacctcttgggttcaagtgatcc

SEQ ID NO: 550338 - DNA, 120 bp, Artificial Sequence
  ENSG00000168314_0 (sequence is synthesized)
aaaaacaccttgtgtaatgaaaaacccagatctataacctctccctatatattctgcatgcattgaagtaggctcaaaccctcagggacctggtatagacgcagaatctgtttcacacaa

SEQ ID NO: 550339 - DNA, 120 bp, Artificial Sequence
  ENSG00000168314_1 (sequence is synthesized)
caactgctatttgaaggaaaaaaaaaaaaagaagcaaatgataccaagacaagctcataacagagatccaatcagcagatgtgtacggatgaaaatacagtgagatgagtcagaaaccgg

SEQ ID NO: 550340 - DNA, 120 bp, Artificial Sequence
  ENSG00000168314_2 (sequence is synthesized)
ccaaggagggtcccagactctccaaaaaccagaagtactccgaacacttcagcatacactgctgcccgccgttcaccttcctcaattccaagaaggagatagtggatcggaaatacagca

SEQ ID NO: 550341 - DNA, 120 bp, Artificial Sequence
  ENSG00000168314_3 (sequence is synthesized)
gcccaagcaacagccagctgcgccccccgcggtggtcagagcgccagccaagccacggtcccctccgaggtctgagcgtcagccacggtcccctccgaggtctgagcgtcagccacggtc

SEQ ID NO: 550342 - DNA, 120 bp, Artificial Sequence
  ENSG00000168314_4 (sequence is synthesized)
ccctccgaggtctgagcgtcagccacggtcccctccgaggtctgagcgtcagccacgtccccgcccagaggtccgaccaccgccagccaagcagcgtccccctcagaagtccaagcaaca

SEQ ID NO: 550343 - DNA, 120 bp, Artificial Sequence
  ENSG00000168314_5 (sequence is synthesized)
gccgcgcagcagccccctcagagggccaggcgccagccgtggggggtcccccgtcaaagcttctaggttctggtaacaccatctcttcccttttgttccccagccctaagattgaaaagg

SEQ ID NO: 550344 - DNA, 120 bp, Artificial Sequence
  ENSG00000168314_6 (sequence is synthesized)
aagatcaggccaaccccaaagaagaagtgaccaaggaggagtttaaactgaatgaacaacctcggctcctggactcattgcttcacaacccatctacccctggatgaagttatctggctt

SEQ ID NO: 550345 - DNA, 120 bp, Artificial Sequence
  ENSG00000168314_7 (sequence is synthesized)
ccctaaggttagtagttgcttcctgtgtttactaacaccgggctgtctccatggccctcttcagccttattacccaacctgtgtaatcagctccctccattaaatcccctctgtttgaaa

SEQ ID NO: 550346 - DNA, 120 bp, Artificial Sequence
  ENSG00000168314_8 (sequence is synthesized)
tggcatgggggcctcagggcagcctgcctggaggtgagcagggctatctctgtgtgttgtactccagtcagggggttccagcagcacccgcaggctctagagctcaatgcacagttcttt

SEQ ID NO: 550347 - DNA, 120 bp, Artificial Sequence
  ENSG00000168314_9 (sequence is synthesized)
ttgtttcacctgcagtcctttcttctccaggatatgcacaggcctccagggtctttcatggctcagggtcagggtggctcaagtgccaacccacatgttgtcctccaaatattcccttct

SEQ ID NO: 550348 - DNA, 120 bp, Artificial Sequence
  ENSG00000168314_10 (sequence is synthesized)
atccctggcatgctgttgctgagctcaacttttaatttttgactttctcctttgtaattaatctctatctgggtttctctctttctctgtgccatttggtttccttaattagttccctgt

SEQ ID NO: 550349 - DNA, 120 bp, Artificial Sequence
  ENSG00000168314_11 (sequence is synthesized)
gccagcccatagtcagagccataattggctctggggaagatccaagttattttctgagtaagatattaggcttccatatgatccagagatgcaaagaaatccctagagagtgtaggagtt

SEQ ID NO: 550350 - DNA, 120 bp, Artificial Sequence
  ENSG00000168314_12 (sequence is synthesized)
gtctaaatccatgtgtcagatgtagccaacgaattatgtcagaagcagagagaaaaggcctgaaaagcagctctctcccactcctcaggcccttgtctccaaccttacatgaggcttttt

SEQ ID NO: 550351 - DNA, 120 bp, Artificial Sequence
  ENSG00000168314_13 (sequence is synthesized)
gaacatctcctcctggcccagctggggtgagagcaagtcctcgaaggcactgcctttgagccttgctcagcccatctgaactatcccaactctagaattgactgctttcgaattgtgtga

SEQ ID NO: 550352 - DNA, 120 bp, Artificial Sequence
  ENSG00000168314_14 (sequence is synthesized)
caatgccctacccccagctcctctcccaaatgatcctagatacagggctgcttccccccgaccctaccccacctcgggacacaggctcatggcctcatggcacttcaccaccagaagtgg

SEQ ID NO: 550353 - DNA, 120 bp, Artificial Sequence
  ENSG00000168314_15 (sequence is synthesized)
tgctcagagttcctatttccacatctaaccccctaattcctgggaaagtctgaggcctggtccccccagtgctttccctggctggcctctccacattttcatctgatggtggagtgagat

SEQ ID NO: 550354 - DNA, 120 bp, Artificial Sequence
  ENSG00000168314_16 (sequence is synthesized)
caggaaaaataggacaggagctttgccttgggggagaagagagttaagtgtggaaaggggtgagttataggaggttaagcagtccaagatttctctctctgtgtaggaggccatttcctg

SEQ ID NO: 550355 - DNA, 120 bp, Artificial Sequence
  ENSG00000168314_17 (sequence is synthesized)
atgtgaggggtctgaacccaattatgatgggacagggttgggcattgacttcccatctcttctctctgtttttctcccactatctgtagcccaaaactcttatggaggactttgatcttt

SEQ ID NO: 550356 - DNA, 120 bp, Artificial Sequence
  ENSG00000168314_18 (sequence is synthesized)
agtataggctattggtcagggccataggaactaaccccgatcctcactccaccaggatctaccacatcccctacacacaaacacatgctgtggggagggagttttcccctgggtcaagtt

SEQ ID NO: 550357 - DNA, 74 bp, Artificial Sequence
  ENSG00000168314_19 (sequence is synthesized)
acacatgctgtggggagggagttttcccctgggtcaagttgaggatccttagatcaccttgtgctcctgtggac

SEQ ID NO: 550358 - DNA, 120 bp, Artificial Sequence
  ENSG00000168314_20 (sequence is synthesized)
atgtctatgggctctcattttctctctcacacaaaaatactcgggacttctccaagtccctgaggagcctgaccactgaagctgatcatgagatgactgtatgctgacacacccccttca

SEQ ID NO: 550359 - DNA, 120 bp, Artificial Sequence
  ENSG00000168314_21 (sequence is synthesized)
ggggcctggccttgacttagggctgcactgtatcctcagcaacggccttgcaggagccccttttggactgctttccctattcagcccagagttggggtggtgggagaagaggggttggag

SEQ ID NO: 550360 - DNA, 120 bp, Artificial Sequence
  ENSG00000168314_22 (sequence is synthesized)
tgaatccatctctattcaaattccagctgggattactctaggagtcttcctggcttgttttgggcccaaacttagctacattgtttattggctcccaaagtcgggattgaagagtgaaaa

SEQ ID NO: 550361 - DNA, 120 bp, Artificial Sequence
  ENSG00000168314_23 (sequence is synthesized)
gatgcaggcaatgaatccttctgcacactcctccccaacctttccagcgcttttctacttaggaggccagtggaagggaggagaggccatgccctagcccacaggggacaaggttcattg

SEQ ID NO: 550362 - DNA, 120 bp, Artificial Sequence
  ENSG00000168314_24 (sequence is synthesized)
ttcttccaggcttggttcactctgcttttgattcagaagctctttccctacccagcaagactacactttcttgccttctttctattttttctttttgtgcgtataaatggtatgttgtga

SEQ ID NO: 550363 - DNA, 120 bp, Artificial Sequence
  ENSG00000168314_25 (sequence is synthesized)
tatattctcagtgcttgtgcccaccttggaactctgttcttgctcttcattccgcatgtgatactctggtccaagatcttggccaggtgccttctgctcaaatatcgtctcagaggtgct

SEQ ID NO: 550364 - DNA, 120 bp, Artificial Sequence
  ENSG00000168314_26 (sequence is synthesized)
tcccttgaaaactcggtgctgtttccatagttactctatttgatcactctaagtttggttgtcttcatagcacttgtcaccctctggaactattctattcatttatttacttgtttaatg

SEQ ID NO: 550365 - DNA, 120 bp, Artificial Sequence
  ENSG00000168314_27 (sequence is synthesized)
cttggctcttttcccctcctaacgtaaactccatgattgccaacacctgtttacttactacagttccccctccccccacattcctgacactagtaagaaccaataaacacttgttgacgg

SEQ ID NO: 550366 - DNA, 120 bp, Artificial Sequence
  ENSG00000168314_28 (sequence is synthesized)
gtggtttggtagggtgagctggtgtgtggtgtggttggacctggcatggaacttaactggagtttatgtggaatgaaccttgagggccttttgtttaaactttgtgtggcctttttgtag

SEQ ID NO: 550367 - DNA, 120 bp, Artificial Sequence
  ENSG00000168314_29 (sequence is synthesized)
tgctttgactttgatcaactgactgggtttatccaaagtacagtactttgaagatgtcatcccattgtcttctgacctctataattgccactgagagatctgctgtcagtctgcttatcc

SEQ ID NO: 550368 - DNA, 120 bp, Artificial Sequence
  ENSG00000168314_30 (sequence is synthesized)
ttccacggactcaagtttcttcaatctgaagatacatgtctttctccagggacatgtggaaaaaaaaaagatgttatacaaccatcaaagtggcaaaaataaaaaaaatcaagtattggc

SEQ ID NO: 550369 - DNA, 120 bp, Artificial Sequence
  ENSG00000168314_31 (sequence is synthesized)
caaagcagaaaattgtacaacctgtgatcaagcaataataattttaggcacccatcctagagaaaacttgaattcatagaaaaagtaggtacacgtaaatctgttcaaggaatcattgtt

SEQ ID NO: 550370 - DNA, 120 bp, Artificial Sequence
  ENSG00000168314_32 (sequence is synthesized)
tggcattgaaaataggagagagatcatgagaaattaccaaaatgtccaccaatagaatgagtgaatcacctgtggtatatttataaataaaaatattaaatagaaggtaaaacaaatcag

SEQ ID NO: 550371 - DNA, 120 bp, Artificial Sequence
  ENSG00000168314_33 (sequence is synthesized)
atacacacattagatagataaatttagaggacaaaataaggaacatgaaaagcaaatagtagatggcaaatgtaatataatatactatgcataaattttaacaacacacaatattatatt

SEQ ID NO: 550372 - DNA, 120 bp, Artificial Sequence
  ENSG00000168314_34 (sequence is synthesized)
gcatattgcccaataagcagaagccataaggtctcacacttttcttataatgcaatagaataaaaatgacaacaaagtaaaagggtatcccaaaaataaaactatccttttggaaaaaaa

SEQ ID NO: 550373 - DNA, 120 bp, Artificial Sequence
  ENSG00000168314_35 (sequence is synthesized)
aagatttaaaataattcctggtttgaagaaataacaaattaaaagctatatataaacggttaacaatattaggtggacatatttgtttgaagagataggtgaaagatagttgaaaagcct

SEQ ID NO: 550374 - DNA, 120 bp, Artificial Sequence
  ENSG00000168314_36 (sequence is synthesized)
gggggtatattcaaggttatatgtcttagaaaacaaaaatacttgtttgggttcagttttggatctgggcttgttcttgtggcttctgatgatttctgacttggggaaaaatggggaaga

SEQ ID NO: 550375 - DNA, 120 bp, Artificial Sequence
  ENSG00000168314_37 (sequence is synthesized)
gttgaaatacgtccttccacccaaacctttgtttagtaataggtaggaaaatgaagaagaaaatagaatgttgcagaatgtggagggatgtaaaatggacagtactagggtagaggggaa

SEQ ID NO: 550376 - DNA, 120 bp, Artificial Sequence
  ENSG00000168314_38 (sequence is synthesized)
gtcagattagaggaaagaaagagcatcaggaacagtcttgtgctaggagctggtgtggccaagcacagtcggatgcccaaagatccaacaaggccatggctctgtgtccttgagtgggca

SEQ ID NO: 550377 - DNA, 120 bp, Artificial Sequence
  ENSG00000168314_39 (sequence is synthesized)
caaccattcctagccaagtttaagaggcaagtaaaaatataggggcaatgtcagatgaagtcttgttcagggtatggggctaggatgagagagaatgccacagagtatgaaggaagagtg

SEQ ID NO: 550378 - DNA, 120 bp, Artificial Sequence
  ENSG00000168314_40 (sequence is synthesized)
atagatccagatgagatacagctcagagtgccacgcccccagaaagaggaatcaggcaagtactgtcccaaggcagctggagggtgagggctgagtgccctggcttcctcacttggggag

SEQ ID NO: 550379 - DNA, 120 bp, Artificial Sequence
  ENSG00000168314_41 (sequence is synthesized)
accatgggtctctgtagaaattccaatataaaggcagggaaatttgactgcatggagtcttcaggtagaaatgtttctcttgcctaaattcaggtgctaaataaacaacaaaatggtaac

SEQ ID NO: 550380 - DNA, 120 bp, Artificial Sequence
  ENSG00000168314_42 (sequence is synthesized)
ctctactatgaagtgtttccaatgatgggatatctgaggccattacattcctgggaataacatggtgaggtgcagggtggtggtggtggtgaaacatacgacagaccactgtaagtgaga

SEQ ID NO: 550381 - DNA, 120 bp, Artificial Sequence
  ENSG00000168314_43 (sequence is synthesized)
acaaattactggcccagcccaacccacaccaaataagaaatttaatatccctttggcctgttttagattttggcaaagccaggcccatagtgcttgctgggctctctcttccacatcatc

SEQ ID NO: 550382 - DNA, 120 bp, Artificial Sequence
  ENSG00000168314_44 (sequence is synthesized)
cagaagacacacatttgctatggaatgattgtggaggtgagagtatagtgcatattaattcatgcaaaaagttagatattagcccagaaatgttagtaacaagaaactactgaattctct

SEQ ID NO: 550383 - DNA, 120 bp, Artificial Sequence
  ENSG00000168314_45 (sequence is synthesized)
gtttgtctgttgtggaaataaaaccttctggggatgaatcaaaactatctgacaattacttgaaatgggtgaatagctaaatgtaatgtgccttggatattataactaaaaggtgctata

SEQ ID NO: 550384 - DNA, 120 bp, Artificial Sequence
  ENSG00000168314_46 (sequence is synthesized)
atccagttatattttttatcttttaaggattggttctgaggagcactaccagtaaatattgcaaaaattacataaagctccaaaagctactctgtgtaaacttcttgagtgggaattctc

SEQ ID NO: 550385 - DNA, 120 bp, Artificial Sequence
  ENSG00000168314_47 (sequence is synthesized)
atgttaactgattttatgttctgatgttttgactggttttgggaaaaattttgggaaaaaagagttttcctcgtaaatacccaacaactgggtctctgggtaaaaaggcctaatttatag

SEQ ID NO: 550386 - DNA, 90 bp, Artificial Sequence
  ENSG00000168314_48 (sequence is synthesized)
ccaacaactgggtctctgggtaaaaaggcctaatttatagagattgctaatttccatggtgtaaatatttccacaatgcagattccttcc

SEQ ID NO: 550387 - DNA, 62 bp, Artificial Sequence
  ENSG00000168314_49 (sequence is synthesized)
gagtttcactcttgttacccagactggagtgcaaaggtgcgaccttggctcactgcaatctt

SEQ ID NO: 550388 - DNA, 77 bp, Artificial Sequence
  ENSG00000168314_50 (sequence is synthesized)
tctagattacaggcatgagccaccacgcccggaccatgatgcagatttcaagctatgaacatgattctctggagttt

SEQ ID NO: 550389 - DNA, 120 bp, Artificial Sequence
  ENSG00000168314_51 (sequence is synthesized)
gatgcagatttcaagctatgaacatgattctctggagtttaccatttgtcttttaattggcaaatttgatgcagaattgggaagagaagcacacaattgactctcgtcagctggcacaag

SEQ ID NO: 550390 - DNA, 120 bp, Artificial Sequence
  ENSG00000168314_52 (sequence is synthesized)
ctggtgccagtgcaccactgtatatatccatggccctctgtgaagctagagtttactactaaaatttgtgctccataaatatacaaaggcactagtaagagaaaaaatataaagagaata

SEQ ID NO: 550391 - DNA, 120 bp, Artificial Sequence
  ENSG00000168314_53 (sequence is synthesized)
taaactaaattcaaattagggagctcaaatggagaaaattgacagataatatttttgaaactttgaaaagtagtatttgtctagattcaccttttattaccttttcctttttttcttttc

SEQ ID NO: 550392 - DNA, 87 bp, Artificial Sequence
  ENSG00000168314_54 (sequence is synthesized)
acggagtttctcaatctcagctcattgcaacctcggctcactgtaaccttcaccttccgtgttcaaatgattctcctgcctcagcct

SEQ ID NO: 550393 - DNA, 77 bp, Artificial Sequence
  ENSG00000168314_55 (sequence is synthesized)
attatcttttattaagcaaacagcgtatctatgtatcatactgagtgttctgagctgttagtttctttggtgttcat

SEQ ID NO: 550394 - DNA, 120 bp, Artificial Sequence
  ENSG00000168314_56 (sequence is synthesized)
atactgagtgttctgagctgttagtttctttggtgttcatctagatggaagctggggcttccttcctttcagatattggtgctaacatgaagctgaccaaagaattgatgggatctgcac

SEQ ID NO: 550395 - DNA, 120 bp, Artificial Sequence
  ENSG00000168314_57 (sequence is synthesized)
actgtaaagccggtttcaggatggctgagctgacggtcaagaaagaagagaagatatgagccgcctgcattttggggtggtggcagtgaaatttagacttgtgatttggtatgacaatat

SEQ ID NO: 550396 - DNA, 120 bp, Artificial Sequence
  ENSG00000168314_58 (sequence is synthesized)
atggctttttgtgattgttaacattaatgaaaacaagaaaaattagttgctcaaaagttgaaaaatggattcataaactttttattagagtaaggcaaaagaacatattaaaatagaggt

SEQ ID NO: 550397 - DNA, 120 bp, Artificial Sequence
  ENSG00000168314_59 (sequence is synthesized)
aaattagaaatgtcaataagaacccatggacattttttataaggagactttatctgttctgtccctacagtgatttatgctcttggatatttttgctgtcatcctgacaaattctagttg

SEQ ID NO: 550398 - DNA, 120 bp, Artificial Sequence
  ENSG00000168314_60 (sequence is synthesized)
gaatatggaacaagcttatttgtagacctagtgcctgtggcttctaaagcaattttctgaaaagagaaaccactgcctgttggaagaatagttgattccatacctcaagctagggaaaaa

SEQ ID NO: 550399 - DNA, 120 bp, Artificial Sequence
  ENSG00000168314_61 (sequence is synthesized)
aaatcagaattagtctgtgaattctagatgttgagagaaagcagggtttcattagggcatcggagagtcacaagtccataggatgcaaaaaggaagatgaaataaaattgcctgaaaaac

SEQ ID NO: 550400 - DNA, 120 bp, Artificial Sequence
  ENSG00000168314_62 (sequence is synthesized)
gcacctgaatttctggcattgtttactgaaaaggctgtgtattgatgaaccccaattatgtgaggtctacatttaagagtttataatcaacagtttgaaaatgcagggtgttgtttcttt

SEQ ID NO: 550401 - DNA, 120 bp, Artificial Sequence
  ENSG00000168314_63 (sequence is synthesized)
ctataaggagacaaaacagtcagaagggagtgtcacaggacattatcacaaaatcaaagttctccatgaaatgtggttcatttgctagaaaataatgcaagcctattggagagaatcagg

SEQ ID NO: 550402 - DNA, 120 bp, Artificial Sequence
  ENSG00000168314_64 (sequence is synthesized)
gcttctagtgatgctagggatgaccttaagcattgtttgtaaatcacactttttcctagtctttcagcagcagctgcacagagtaggcctgcttcttcccatgaaagccacactgagttt

SEQ ID NO: 550403 - DNA, 120 bp, Artificial Sequence
  ENSG00000168314_65 (sequence is synthesized)
tatcaactagtagtgtgtgggcactattgcaagttatgttgtgttgtttatggccatttatccaacagtgctttcctctgtgcggggctctgcagcctcgttctatgttatttttattac

SEQ ID NO: 550404 - DNA, 120 bp, Artificial Sequence
  ENSG00000168314_66 (sequence is synthesized)
cacgtgtctgtgcgcctcaggtggcaaagcagaatcagcttctctaccctcagcagggctcactatgactcactataagggaagaaaatcttacagatgtcagaaaatgttaggtaagtg

SEQ ID NO: 550405 - DNA, 120 bp, Artificial Sequence
  ENSG00000168314_67 (sequence is synthesized)
gacagtgataaacacaaaacagcaagtggtcagtatcaaagagaaaaacagtatgttggtgaaggagaagtatcaaagctagttaaaaaagtaacaggagaaatgtaaagggacaatact

SEQ ID NO: 550406 - DNA, 120 bp, Artificial Sequence
  ENSG00000168314_68 (sequence is synthesized)
ccacaaaaatttagattgtaactgagcttcttctcctaaagagatttaaaaataaagtataggaaatacatgaagaaacaaagtaaaatgccaaggtgtaagtttgaccatgaatatcta

SEQ ID NO: 550407 - DNA, 120 bp, Artificial Sequence
  ENSG00000168314_69 (sequence is synthesized)
gggaaaaacatacttgcactaaaacaaccaaatatgcaaaaatcaagtggaaaaacaggtcaaaataatgccagttgatgtctgtaagaactaaatgtataataaaatgagcaaaaaaaa

SEQ ID NO: 550408 - DNA, 120 bp, Artificial Sequence
  ENSG00000168329_0 (sequence is synthesized)
aatactcgtctctggtaaagtctgagcaggacagggtggctgactggcagatccagaggttcccttggcagtccacgccaggccttcaccatggatcagttccctgaatcagtgacagaa

SEQ ID NO: 550409 - DNA, 120 bp, Artificial Sequence
  ENSG00000168329_1 (sequence is synthesized)
aactttgagtacgatgatttggctgaggcctgttatattggggacatcgtggtctttgggactgtgttcctgtccatattctactccgtcatctttgccattggcctggtgggaaatttg

SEQ ID NO: 550410 - DNA, 120 bp, Artificial Sequence
  ENSG00000168329_2 (sequence is synthesized)
ttggtagtgtttgccctcaccaacagcaagaagcccaagagtgtcaccgacatttacctcctgaacctggccttgtctgatctgctgtttgtagccactttgcccttctggactcactat

SEQ ID NO: 550411 - DNA, 120 bp, Artificial Sequence
  ENSG00000168329_3 (sequence is synthesized)
ttgataaatgaaaagggcctccacaatgccatgtgcaaattcactaccgccttcttcttcatcggcttttttggaagcatattcttcatcaccgtcatcagcattgataggtacctggcc

SEQ ID NO: 550412 - DNA, 120 bp, Artificial Sequence
  ENSG00000168329_4 (sequence is synthesized)
atcgtcctggccgccaactccatgaacaaccggaccgtgcagcatggcgtcaccatcagcctaggcgtctgggcagcagccattttggtggcagcaccccagttcatgttcacaaagcag

SEQ ID NO: 550413 - DNA, 120 bp, Artificial Sequence
  ENSG00000168329_5 (sequence is synthesized)
aaagaaaatgaatgccttggtgactaccccgaggtcctccaggaaatctggcccgtgctccgcaatgtggaaacaaattttcttggcttcctactccccctgctcattatgagttattgc

SEQ ID NO: 550414 - DNA, 120 bp, Artificial Sequence
  ENSG00000168329_6 (sequence is synthesized)
tacttcagaatcatccagacgctgttttcctgcaagaaccacaagaaagccaaagccattaaactgatccttctggtggtcatcgtgtttttcctcttctggacaccctacaacgttatg

SEQ ID NO: 550415 - DNA, 120 bp, Artificial Sequence
  ENSG00000168329_7 (sequence is synthesized)
attttcctggagacgcttaagctctatgacttctttcccagttgtgacatgaggaaggatctgaggctggccctcagtgtgactgagacggttgcatttagccattgttgcctgaatcct

SEQ ID NO: 550416 - DNA, 120 bp, Artificial Sequence
  ENSG00000168329_8 (sequence is synthesized)
ctcatctatgcatttgctggggagaagttcagaagatacctttaccacctgtatgggaaatgcctggctgtcctgtgtgggcgctcagtccacgttgatttctcctcatctgaatcacaa

SEQ ID NO: 550417 - DNA, 120 bp, Artificial Sequence
  ENSG00000168329_9 (sequence is synthesized)
aggagcaggcatggaagtgttctgagcagcaattttacttaccacacgagtgatggagatgcattgctccttctctgaagggaatcccaaagccttgtgtctacagagaacctggagttc

SEQ ID NO: 550418 - DNA, 120 bp, Artificial Sequence
  ENSG00000168329_10 (sequence is synthesized)
ctgaacctgatgctgactagtgaggaaagatttttgttgttatttcttacaggcacaaaatgatggacccaatgcacacaaaacaaccctagagtgttgttgagaattgtgctcaaaatt

SEQ ID NO: 550419 - DNA, 120 bp, Artificial Sequence
  ENSG00000168329_11 (sequence is synthesized)
tgaagaatgaacaaattgaactctttgaatgacaaagagtagacatttctcttactgcaaatgtcatcagaactttttggtttgcagatgacaaaaattcaactcagactagtttagtta

SEQ ID NO: 550420 - DNA, 120 bp, Artificial Sequence
  ENSG00000168329_12 (sequence is synthesized)
ctgactctcaaatcttttagtcattatagatcccccagactttacatgacacagctttatcaccagagagggactgacacccatgtttctctggccccaagggcaaaattcccagggaag

SEQ ID NO: 550421 - DNA, 120 bp, Artificial Sequence
  ENSG00000168329_13 (sequence is synthesized)
tgctctgataggccaagtttgtatcaggtgcccatccctggaaggtgctgttatccatggggaagggatatataagatggaagcttccagtccaatctcatggagaagcagaaatacata

SEQ ID NO: 550422 - DNA, 120 bp, Artificial Sequence
  ENSG00000168329_14 (sequence is synthesized)
tttccaagaagttggatgggtgggtactattctgattacacaaaacaaatgccacacatcacccttaccatgtgcctgatccagcctctcccctgattacaccagcctcgtcttcattaa

SEQ ID NO: 550423 - DNA, 120 bp, Artificial Sequence
  ENSG00000168329_15 (sequence is synthesized)
gccctcttccatcatgtccccaaacctgcaagggctccccactgcctactgcatcgagtcaaaactcaaatgcttggcttctcatacgtccaccatggggtcctaccaatagattcccca

SEQ ID NO: 550424 - DNA, 120 bp, Artificial Sequence
  ENSG00000168329_16 (sequence is synthesized)
ttgcctcctccttcccaaaggactccacccatcctatcagcctgtctcttccatatgacctcatgcatctccacctgctcccaggccagtaagggaaatagaaaaaccctgcccccaaat

SEQ ID NO: 550425 - DNA, 120 bp, Artificial Sequence
  ENSG00000168329_17 (sequence is synthesized)
aagaagggatggattccaaccccaactccagtagcttgggacaaatcaagcttcagtttcctggtctgtagaagagggataaggtacctttcacatagagatcatcctttccagcatgag

SEQ ID NO: 550426 - DNA, 120 bp, Artificial Sequence
  ENSG00000168329_18 (sequence is synthesized)
gaactagccaccaactcttgcaggtctcaacccttttgtctgcctcttagacttctgctttccacacctggcactgctgtgctgtgcccaagttgtggtgctgacaaagcttggaagagc

SEQ ID NO: 550427 - DNA, 120 bp, Artificial Sequence
  ENSG00000168329_19 (sequence is synthesized)
ctgcaggtgctgctgcgtggcatagcccagacacagaagaggctggttcttacgatggcacccagtgagcactcccaagtctacagagtgatagccttccgtaacccaactctcctggac

SEQ ID NO: 550428 - DNA, 120 bp, Artificial Sequence
  ENSG00000168329_20 (sequence is synthesized)
tgccttgaatatcccctcccagtcaccttgtggcaagcccctgcccatctgggaaaataccccatcattcatgctactgccaacctggggagccagggctatgggagcagcttttttttc

SEQ ID NO: 550429 - DNA, 120 bp, Artificial Sequence
  ENSG00000168329_21 (sequence is synthesized)
ccccctagaaacgtttggaacaatctaaaagtttaaagctcgaaaacaattgtaataatgctaaagaaaaagtcatccaatctaaccacatcaatattgtcattcctgtattcacccgtc

SEQ ID NO: 550430 - DNA, 120 bp, Artificial Sequence
  ENSG00000168329_22 (sequence is synthesized)
cagaccttgttcacactctcacatgtttagagttgcaatcgtaatgtacagatggttttataatctgatttgttttcctcttaacgttagaccacaaatagtgctcgctttctatgtagt

SEQ ID NO: 550431 - DNA, 120 bp, Artificial Sequence
  ENSG00000168329_23 (sequence is synthesized)
ttggtaattatcattttagaagactctaccagactgtgtattcattgaagtcagatgtggtaactgttaaattgctgtgtatctgatagctctttggcagtctatatgtttgtataatga

SEQ ID NO: 550432 - DNA, 120 bp, Artificial Sequence
  ENSG00000168329_24 (sequence is synthesized)
atgagagaataagtcatgttccttcaagatcatgtaccccaatttacttgccattactcaattgataaacatttaacttgtttccaatgtttagcaaatacatattttatagaacttcca

SEQ ID NO: 550433 - DNA, 120 bp, Artificial Sequence
  ENSG00000168329_25 (sequence is synthesized)
gcttttgtcctgtggccttctggccaaaggcagggaaaggtggccaaacactgagaccaagaacaaagaaagaaaactgctggtggacttcttccaccatgagcaggccaccaagcccgc

SEQ ID NO: 550434 - DNA, 120 bp, Artificial Sequence
  ENSG00000168329_26 (sequence is synthesized)
agcactgcactgcagcccccagctctgtcctggggttgggggaggtgaggaggggcaaggtggggagcacacagagcacccgctgtcctcggaacaccacagcgactagaggccttcacc

SEQ ID NO: 550435 - DNA, 120 bp, Artificial Sequence
  ENSG00000168329_27 (sequence is synthesized)
actttgaggagaagagctgtgtgtgccccagtgtggtccagtgagtactctgggctccctctcgtgggcagggaagctgagggccccatgagctctcccagcttcctgaaggctccccat

SEQ ID NO: 550436 - DNA, 120 bp, Artificial Sequence
  ENSG00000168329_28 (sequence is synthesized)
ggggcgggccgtgcttaccaggccgtggacttaaaccaggatgagagaacccctggaggcgtttaagttggcagacttggatttcaggaagagctctctggcttctgggtggagaatggc

SEQ ID NO: 550437 - DNA, 120 bp, Artificial Sequence
  ENSG00000168333_0 (sequence is synthesized)
acggacctaccactggccctgcgtatgtggtgcagcctctcttcaatccctaagaactggttctttcaaagcatgtattttctgaagaaactttagaaccacgtttattttaaaagaacg

SEQ ID NO: 550438 - DNA, 120 bp, Artificial Sequence
  ENSG00000168333_1 (sequence is synthesized)
aattggagaaaacaaatcgattaatgctcacagcttcttgggtgctttctcacgggtaaagccatggcatccgtaccttccattggttgccttctagccagaaatcagtattatcgaaag

SEQ ID NO: 550439 - DNA, 120 bp, Artificial Sequence
  ENSG00000168333_2 (sequence is synthesized)
tccagtgtttcttcagttagttctttaactagctctgattctgttaacttcatagatgacgacaaaccacagcaagggttgcctgaagtggcagaatccacctggtggtttaaatcgttt

SEQ ID NO: 550440 - DNA, 120 bp, Artificial Sequence
  ENSG00000168333_3 (sequence is synthesized)
ttccattctgaacctgtgctttcaaatgtgagaataaaagatctgtctgctactggcatgaacagttgattctgacaatcaagatcctctgcctgctgcagtggtccatacatgaacagc

SEQ ID NO: 550441 - DNA, 120 bp, Artificial Sequence
  ENSG00000168333_4 (sequence is synthesized)
tccccttcagcgccccagctattccaggactcttctccattgtaagaagacagaaatgtgtctgagatctcatttatgagacaagatcacagcagccactgatataaaaaaagtttaggc

SEQ ID NO: 550442 - DNA, 120 bp, Artificial Sequence
  ENSG00000168333_5 (sequence is synthesized)
tagaaacaagacacccttttaaagtaatatgtcttcaaatgttgtgacttacataaagtagctctttcattttttatatcatttttattaaaaaaacttaagttagactctttttctgtc

SEQ ID NO: 550443 - DNA, 120 bp, Artificial Sequence
  ENSG00000168333_6 (sequence is synthesized)
tgttgagtgatttatttattatgccttaaaactgacttgtcaatgtttcacataatggtttaaagggcattgaattcgaaattttagaaaataattgtaaaaattcaatttttttaaaag

SEQ ID NO: 550444 - DNA, 120 bp, Artificial Sequence
  ENSG00000168333_7 (sequence is synthesized)
agagctaatcaattggtcattgtatagactttaaaatttatgactttaaataatatttaataacatggaaaattatattatggcattaaaaattagcataatacaccatatatggtacaa

SEQ ID NO: 550445 - DNA, 120 bp, Artificial Sequence
  ENSG00000168333_8 (sequence is synthesized)
tggcattaaaaattagcataatacaccatatatggtacaatcgtagttgtattaaaaagttacatatgcataaagatagactggaaggaactgtaccaaaatgctgacagggctatttct

SEQ ID NO: 550446 - DNA, 120 bp, Artificial Sequence
  ENSG00000168333_9 (sequence is synthesized)
ggagatgggattatgggcgtttttcattctctttttaatatatttttccatatctcccaatttttctaatatgacaagtattgtgcgtaattagaaaataataaatgttaatataaaaaa

SEQ ID NO: 550447 - DNA, 120 bp, Artificial Sequence
  ENSG00000168333_10 (sequence is synthesized)
aacctgtgctttcaaatgtgagaataaaagatctgtctgctactgggtcgctgtcaggaagatcatagcaccctttccagttcaatcactcaagagtggtggagaagtcatatgccaaac

SEQ ID NO: 550448 - DNA, 120 bp, Artificial Sequence
  ENSG00000168333_11 (sequence is synthesized)
tgtgtcattgtttggcgggggatggactgagaatcagaggaaagggtctaaatttgttttgctcataccttcaggaaaagaataaccattgtctagttgttgtcttaaataaccttagga

SEQ ID NO: 550449 - DNA, 120 bp, Artificial Sequence
  ENSG00000168333_12 (sequence is synthesized)
taacactgctgattttgattagcttctgtgtggtgcaaattactagacaggttgaattgggagtttgtgtgcagttgttttcagacattttgaactcaaacacactgactagcacagttg

SEQ ID NO: 550450 - DNA, 120 bp, Artificial Sequence
  ENSG00000168333_13 (sequence is synthesized)
aaatggaatagaaagaatctataataaagggattcatagatgccaatgttgaaatatagtgattctgatgaatttcctatctaagacaaatttagaatcattatttaaaattagaatcat

SEQ ID NO: 550451 - DNA, 120 bp, Artificial Sequence
  ENSG00000168333_14 (sequence is synthesized)
tatttaaagtatttttaaaagccaatgcaagattgattgttggaaagatgttttcttgacactctttatcaagtttattcatttgaattatctggacagtgtttcatttatttatcccct

SEQ ID NO: 550452 - DNA, 120 bp, Artificial Sequence
  ENSG00000168333_15 (sequence is synthesized)
cctctctgactactataaaatcaacccagattacagatgagcactttgtagctgatcatctttgcactgccatttgatgaacatgttggtaacggttgcctgccttatgtagcatgaaca

SEQ ID NO: 550453 - DNA, 120 bp, Artificial Sequence
  ENSG00000168334_0 (sequence is synthesized)
acagagacctggagccagggcagcaagaaggtgtctgttggagccagcagaacagaaccaatttgaacaagaacctccagaggaacgacgaaccctgagaccacagctgctacagaccac

SEQ ID NO: 550454 - DNA, 120 bp, Artificial Sequence
  ENSG00000168334_1 (sequence is synthesized)
aaacaccccatcagccaagagagacccttgcatccagcctctaccctgctgaacatctagatctaaggctcccaatcccatcctcatctctgccccttcttctcagaaggatggccgaca

SEQ ID NO: 550455 - DNA, 120 bp, Artificial Sequence
  ENSG00000168334_2 (sequence is synthesized)
cccagacacaggtggcccccacaccaaccatgaggatggcaactgcagaggacctgcccctccctccacccccagccctggaggacctgccactgccgccacccaaggaatccttctcca

SEQ ID NO: 550456 - DNA, 120 bp, Artificial Sequence
  ENSG00000168334_3 (sequence is synthesized)
agttccatcagcagcggcaagctagtgagctccgccgcctctacaggcacatccaccctgagctccgcaagaatctggctgaggctgtggccgaggatctggctgaggtcctgggctctg

SEQ ID NO: 550457 - DNA, 120 bp, Artificial Sequence
  ENSG00000168334_4 (sequence is synthesized)
aggaacccaccgagggtgacgttcagtgcatgcgctggatctttgagaactggagactggatgccattggagaacacgagaggccagctgccaaggagcccgtgctgtgtggtgacgtcc

SEQ ID NO: 550458 - DNA, 120 bp, Artificial Sequence
  ENSG00000168334_5 (sequence is synthesized)
aggccacctcccgcaagtttgaggaaggctcctttgccaacagcacagaccaggagccaaccaggccccagccaggtggaggagacgttcgtgcagcccgctggctatttgagacaaagc

SEQ ID NO: 550459 - DNA, 120 bp, Artificial Sequence
  ENSG00000168334_6 (sequence is synthesized)
cactggacgagctgacagggcaagccaaggaactggaggccactgtgagggagcctgcagccagcggagatgtgcagggtaccaggatgctctttgagacgcggccgctggaccgcctgg

SEQ ID NO: 550460 - DNA, 120 bp, Artificial Sequence
  ENSG00000168334_7 (sequence is synthesized)
gctcccgcccctccctgcaggagcagagccccttggaactgcgctcagagatccaggagctgaagggtgatgtgaaaaagacagtgaagctcttccaaacggagcccctgtgtgccatcc

SEQ ID NO: 550461 - DNA, 120 bp, Artificial Sequence
  ENSG00000168334_8 (sequence is synthesized)
aggatgcagagggcgccatccatgaggtcaaggccgcatgccgggaggagatccaaagcaacgcggtgaggtctgcccgctggctctttgagacccggcctctggacgccatcaaccagg

SEQ ID NO: 550462 - DNA, 120 bp, Artificial Sequence
  ENSG00000168334_9 (sequence is synthesized)
accccagccaggtgcgggtgatccgggggatttccctggaggagggggcccggcccgacgtcagtgcaactcgctggatctttgagacacagcccctggatgccatccgggagatcttgg

SEQ ID NO: 550463 - DNA, 120 bp, Artificial Sequence
  ENSG00000168334_10 (sequence is synthesized)
tagatgagaaggacttccagccatccccagaccttatcccacctggtccagatgttcagcagcagcagcatctgtttgagacccgagcgctggacactctgaagggggacgaagaggctg

SEQ ID NO: 550464 - DNA, 120 bp, Artificial Sequence
  ENSG00000168334_11 (sequence is synthesized)
gagcagaggccccacccaaggaggaagtggtccctggtgatgtccgctccaccctgtggctatttgaaacaaagcccctggatgctttcagagacaaggtccaagtgggtcacctacagc

SEQ ID NO: 550465 - DNA, 120 bp, Artificial Sequence
  ENSG00000168334_12 (sequence is synthesized)
gagtggatccccaggacggtgaggggcatctatccagtgacagctcctcagcactgcccttctctcagagtgccccccagagggatgagctaaagggggatgtgaagacttttaagaacc

SEQ ID NO: 550466 - DNA, 120 bp, Artificial Sequence
  ENSG00000168334_13 (sequence is synthesized)
tttttgagacccttcccttggacagcattggacagggtgaggttctggcccatgggagtccaagcagagaagaaggaactgattctgctgggcaggcccagggcatagggtccccagtgt

SEQ ID NO: 550467 - DNA, 120 bp, Artificial Sequence
  ENSG00000168334_14 (sequence is synthesized)
atgccatgcaggacagcaagggccgcctccatgccctgacctctgttagcagagagcagatagtcggaggtgatgtgcagggctacaggtggatgtttgagacacagcccctagaccagc

SEQ ID NO: 550468 - DNA, 120 bp, Artificial Sequence
  ENSG00000168334_15 (sequence is synthesized)
tcggccgaagccccagtaccatcgacgtggtgcggggcatcacccggcaggaagtggtggctggggacgttggcacagctcggtggctttttgagacccagcccctggagatgatccacc

SEQ ID NO: 550469 - DNA, 120 bp, Artificial Sequence
  ENSG00000168334_16 (sequence is synthesized)
aacgggagcagcaggaacgacagaaagaagaagggaagagtcagggagacccccagcctgaggcacccccaaagggcgatgtgcagaccatccggtggttgttcgagacttgcccaatga

SEQ ID NO: 550470 - DNA, 120 bp, Artificial Sequence
  ENSG00000168334_17 (sequence is synthesized)
gtgagttggccgaaaagcaggggtcagaggtcacagatcccacagccaaggctgaggcacagtcctgcacctggatgttcaagccccaacctgtggacaggccagtgggctccagggagc

SEQ ID NO: 550471 - DNA, 120 bp, Artificial Sequence
  ENSG00000168334_18 (sequence is synthesized)
agcacctgcaggttagccaggtcccggctggggaaagacagacagacagacacgtctttgagaccgagcctcttcaggcctcaggccgtccctgtggaagacggcctgtgagatactgca

SEQ ID NO: 550472 - DNA, 120 bp, Artificial Sequence
  ENSG00000168334_19 (sequence is synthesized)
gccgcgtggagatcccttcagggcaggtgtctcgtcagaaagaggtttttcaggccctggaggcaggcaagaaggaagaacaggagccccgggtaatcgctgggtccatccccgcgggtt

SEQ ID NO: 550473 - DNA, 120 bp, Artificial Sequence
  ENSG00000168334_20 (sequence is synthesized)
ctgtccacaagttcacttggctttttgagaattgtcccatgggctccctggcagctgagagcatccaagggggcaacctcctggaagagcagcccatgagcccctcaggcaacaggatgc

SEQ ID NO: 550474 - DNA, 120 bp, Artificial Sequence
  ENSG00000168334_21 (sequence is synthesized)
aagagagccaggagactgcagctgaggggaccctgcggactctgcatgccacacctggcatcctgcaccatggaggcatcctcatggaggcccgagggccaggggagctctgtcttgcca

SEQ ID NO: 550475 - DNA, 120 bp, Artificial Sequence
  ENSG00000168334_22 (sequence is synthesized)
agtatgtgctctcgggcacagggcaggggcacccttatatacgaaaggaggagctggtgtcaggtgaacttcccaggatcatctgccaagtcctgcgccggccagatgtggaccagcagg

SEQ ID NO: 550476 - DNA, 120 bp, Artificial Sequence
  ENSG00000168334_23 (sequence is synthesized)
ggctgctggtgcaggaagacccaactggccagctccaactcaagccgctgaggctgccaactccaggcagcagtgggaatattgaagacatggaccctgagctccagcagctgctggctt

SEQ ID NO: 550477 - DNA, 120 bp, Artificial Sequence
  ENSG00000168334_24 (sequence is synthesized)
gcggtcttgggacctccgtggcaaggactgggctggtgatgcaggagacagagcagggcctggtcgcactgactgcctactctctgcagccccggctaactagcaaggcctctgagagga

SEQ ID NO: 550478 - DNA, 120 bp, Artificial Sequence
  ENSG00000168334_25 (sequence is synthesized)
gcagcgtgcagctgttggccagctgcatagataaaggagacctgagtggcctgcacagtctgcggtgggagcccccggctgacccgagtccagtgccagccagcgagggggcccagagcc

SEQ ID NO: 550479 - DNA, 120 bp, Artificial Sequence
  ENSG00000168334_26 (sequence is synthesized)
attggaaaggcagtccctctggctggggaagctgcagcaccagcccaattgcaaaacacagaaaagcaggaagacagtcactctggacagaaagggatggcagtcttgggaaagtcagaa

SEQ ID NO: 550480 - DNA, 120 bp, Artificial Sequence
  ENSG00000168334_27 (sequence is synthesized)
ggagccacgactacccctccggggcctggggccccagacctcctggccgccatgcagagtctgcggatggcaacagctgaagcccagagcctgcaccagcaagttctgaacaagcacaag

SEQ ID NO: 550481 - DNA, 120 bp, Artificial Sequence
  ENSG00000168334_28 (sequence is synthesized)
cagggccccaccccaacagccacttccaaccccatccaggacggtcttcggaaagctggggctacccaaagcaacataaggcctgggggtggaagtgatccccggatcccagcagccccc

SEQ ID NO: 550482 - DNA, 120 bp, Artificial Sequence
  ENSG00000168334_29 (sequence is synthesized)
agaaaggtcagtagggaagagcaagcactacccagagggctgcctggggggtgggtgacaattcaggatggcatctacaccgctcatcccgtgaggacctttgacccacctgggggtgtc

SEQ ID NO: 550483 - DNA, 120 bp, Artificial Sequence
  ENSG00000168334_30 (sequence is synthesized)
cagctttctcagagggaaccccagtcaaggcacagggagactgccctctcagtccaggctccccgcccactccagggaggcccaggtcagagtactgggccagggcgggaggagcctggg

SEQ ID NO: 550484 - DNA, 120 bp, Artificial Sequence
  ENSG00000168334_31 (sequence is synthesized)
ggctgcacacagatggcctgggggccaccagggaaggcgatggcagaagtctgcccagggggcctccaagctgcagagaccaccctgaagactgcccctctaggccgccacattctggcc

SEQ ID NO: 550485 - DNA, 120 bp, Artificial Sequence
  ENSG00000168334_32 (sequence is synthesized)
tctgggccccaagctgcaggtgccagcccgcacccccataatgcctttgttcctcctcctcctactctcccagctgctgtgacaggacctgactttccagctggagcccaccgtgctgag

SEQ ID NO: 550486 - DNA, 120 bp, Artificial Sequence
  ENSG00000168334_33 (sequence is synthesized)
gactccatccagcaagcctctgagcccctgaaggacccccttcttcactcccacagcagccctgctggccagagaacccctggagggtcacagacaaagaccccaaaactggaccccacc

SEQ ID NO: 550487 - DNA, 120 bp, Artificial Sequence
  ENSG00000168334_34 (sequence is synthesized)
atgcccccaaagaagaagccgcagctgccccctaaacctgcacacctaacccagagccaccctcctcagaggctgcccaagcccttgcctctatctcccagcttttcctcggaggtgggg

SEQ ID NO: 550488 - DNA, 120 bp, Artificial Sequence
  ENSG00000168334_35 (sequence is synthesized)
caaagagaacaccaacgaggtgagagagatacagccatccctcagccagccaaggttcccactactgtagaccagggccacatacctctggccagatgtcccagtggacatagccagccc

SEQ ID NO: 550489 - DNA, 120 bp, Artificial Sequence
  ENSG00000168334_36 (sequence is synthesized)
agcttacaacatggcctcagcaccacggcccccaggcccaccaagaatcaggctacaggcagcaatgcccagagctctgagccccccaagctcaatgccctcaaccatgatcccacctca

SEQ ID NO: 550490 - DNA, 120 bp, Artificial Sequence
  ENSG00000168334_37 (sequence is synthesized)
ccacagtggggccccggcccctcaggagagcagcccatggaaggttcccaccaaggggcccctgagagccctgacagtctgcaaagaaaccagaaagagctccagggcctcctgaaccag

SEQ ID NO: 550491 - DNA, 120 bp, Artificial Sequence
  ENSG00000168334_38 (sequence is synthesized)
gtgcaagccctggagaaggaggccgcaagcagtgtggacgtgcaggccctgcggaggctctttgaggccgtgccccagctgggaggggctgctcctcaggctcctgctgcccaccaaaag

SEQ ID NO: 550492 - DNA, 120 bp, Artificial Sequence
  ENSG00000168334_39 (sequence is synthesized)
cccgaggcctcagtggagcaggcctttggggagctgacacgggtcagcacggaagttgctcaactgaaggaacagaccttggcaaggctgctggacattgaagaggctgtgcacaaggca

SEQ ID NO: 550493 - DNA, 120 bp, Artificial Sequence
  ENSG00000168334_40 (sequence is synthesized)
ctcagctccatgtctagcctccagcctgaggccagtgccagaggccatttccagggacctccaaaagaccacagtgcccacaagatcagtgtcacagtcagcagtagcgccaggcccagt

SEQ ID NO: 550494 - DNA, 120 bp, Artificial Sequence
  ENSG00000168334_41 (sequence is synthesized)
ggctcaggccaggaggtcggaggtcaaactgcagtcaagaaccaagccaaggttgaatgccacactgaggcccagagtcaagtcaagatcagaaatcacacagaggccagaggtcacaca

SEQ ID NO: 550495 - DNA, 120 bp, Artificial Sequence
  ENSG00000168334_42 (sequence is synthesized)
gcctcaactgccccttccaccaggaggcaggagacatcaagagagtatttgtgccctcctcgggttttaccttccagccgagattctccctcctccccaacatttatctccatccagtcg

SEQ ID NO: 550496 - DNA, 120 bp, Artificial Sequence
  ENSG00000168334_43 (sequence is synthesized)
gccacaaggaagcctctagagactcccagctttaagggcaaccctgatgtctcagtgaaaagcacacaactggctcaggacataggccaggccctgctccaccagaaaggtgtccaagac

SEQ ID NO: 550497 - DNA, 120 bp, Artificial Sequence
  ENSG00000168334_44 (sequence is synthesized)
aaaactgggaagaaggacatcacccagtgctctgtgcaacctgaacctgcccctccctcagccagtcccctgcccagagggtggcaaaagagtgttctggagctacagacggggccaggg

SEQ ID NO: 550498 - DNA, 120 bp, Artificial Sequence
  ENSG00000168334_45 (sequence is synthesized)
agctcacaacactatggagccatgagaaccgtgactgaacagtatgaggaggtggaccagtttgggaacacagtcctcatgtcttccaccacagtcaccgagcaggcagagccacccagg

SEQ ID NO: 550499 - DNA, 120 bp, Artificial Sequence
  ENSG00000168334_46 (sequence is synthesized)
aacccaggctcccacctcgggctccacgcctcccccttgctgaggcagttcctgcacagcccagctgggttcagcagtgacctgacagaagctgagacggtgcaggtgtcctgcagctac

SEQ ID NO: 550500 - DNA, 120 bp, Artificial Sequence
  ENSG00000168334_47 (sequence is synthesized)
tcccagccagctgcccagtgaggcccaccgcctcccaccacacctgccacctgttcctggcctccactgccccaggactgaagtgggtacctgcctcctgtacactggagcaaggaccaa

SEQ ID NO: 550501 - DNA, 120 bp, Artificial Sequence
  ENSG00000168334_48 (sequence is synthesized)
gaggaaatggcatcttcagaggattactgtgggccatttccctttcgcagttctttcaataggcccagttcttccaaatggaaaaagaaaggtctggaagaggcccacagagttgcacag

SEQ ID NO: 550502 - DNA, 120 bp, Artificial Sequence
  ENSG00000168334_49 (sequence is synthesized)
gcgtgggggtaggatgggggctcccagctgcttgtggaggatgtaatatatacagacacacacatgtttttcacacaggcctggcccacgcatcgacatgtgtgaatttgcacaccactg

SEQ ID NO: 550503 - DNA, 120 bp, Artificial Sequence
  ENSG00000168334_50 (sequence is synthesized)
cctgaattggagccccccagagtgtccctctacccagagtttttatttctttaattagtctgagtgttcccagccatctgctccttaatccctggagaggaacagagccaactggacaca

SEQ ID NO: 550504 - DNA, 120 bp, Artificial Sequence
  ENSG00000168334_51 (sequence is synthesized)
gcgttggtctctgtttggaatcactgtgaggtctccagaaggacctggccgccagccccttcatcaccatctccatcattcagctggtcatctggtggcccaaaggtcacccaaagagtc

SEQ ID NO: 550505 - DNA, 120 bp, Artificial Sequence
  ENSG00000168334_52 (sequence is synthesized)
agcaatcagcatgtccctagaagccaaatgcactgcctttctctgtccccatgactgtcccccactctgcaccccaaatgggaagcatacggtctgaataaatccaagttttattctcta

SEQ ID NO: 550506 - DNA, 120 bp, Artificial Sequence
  ENSG00000168348_0 (sequence is synthesized)
ggcgaagctcttctagttcatctgctggccggctctcagtccccgtggcgccccctttcctcttgtcccagagcgctctcgactccaccatgccaaggggattcctggtgaagcgaacta

SEQ ID NO: 550507 - DNA, 120 bp, Artificial Sequence
  ENSG00000168348_1 (sequence is synthesized)
aacggacaggcggcttgtaccgagttcgccttgcggagcgtgtcttccctctgctggggccccagggggcgccgcccttcttggaggaggctcccagcgcctccttgcccggcgcggagc

SEQ ID NO: 550508 - DNA, 120 bp, Artificial Sequence
  ENSG00000168348_2 (sequence is synthesized)
gggcgacaccccccacccgagaggaaccaggaaaggggttgacggcggaggcggcccgggaacagtcggggtcgccatgtcgggcggctggggtgagcccggggacgggcgggcgggaag

SEQ ID NO: 550509 - DNA, 120 bp, Artificial Sequence
  ENSG00000168348_3 (sequence is synthesized)
gcgcggagtggcgggcgggtggcagggaaggtcccgggcccagccccagccccagccccagtccagcgaagccggcaggcgcagagctgcgtcgggcgttcctggagcgctgcctcagct

SEQ ID NO: 550510 - DNA, 120 bp, Artificial Sequence
  ENSG00000168348_4 (sequence is synthesized)
cgcccgtctccgccgagtctttccccgggggcgccgccgccgtggccgctttctcctgctccgtggcgccagcagccgcaccgaccccgggggagcagtttctgctgccgcttcgggcgc

SEQ ID NO: 550511 - DNA, 120 bp, Artificial Sequence
  ENSG00000168348_5 (sequence is synthesized)
cgttcccagagcccgcgcttcagccggaccctgcgcccctctcggccgcccttcagagtctgaagcgggcggccggcggcgagcgccgcggcaaggcacccacggactgcgcgtctggac

SEQ ID NO: 550512 - DNA, 120 bp, Artificial Sequence
  ENSG00000168348_6 (sequence is synthesized)
ccgcggccgcgggaatcaagaagccaaaggccatgaggaagttgagctttgccgatgaggtgaccacatcccctgtcctgggcctgaagatcaaggaggaggagcccggagcgccgtccc

SEQ ID NO: 550513 - DNA, 120 bp, Artificial Sequence
  ENSG00000168348_7 (sequence is synthesized)
ggggcttggggggcagccgcacgccactgggggagttcatctgccagctgtgcaaggagcagtacgcagaccccttcgcgctggcccagcaccgctgctcccgcatcgtgcgcgtagagt

SEQ ID NO: 550514 - DNA, 120 bp, Artificial Sequence
  ENSG00000168348_8 (sequence is synthesized)
accgctgccctgagtgcgacaaggtgttcagctgtcctgcgaacctggcctcccatcgccgctggcataagccgcgtcctgcggctgcaaacgccgccacagtctcctccgccgacggga

SEQ ID NO: 550515 - DNA, 120 bp, Artificial Sequence
  ENSG00000168348_9 (sequence is synthesized)
agccgccttcttcgtcgtcttcgtcctcccgggactccggggccattgcatcttttctggcggagggaaaggagaacagccgaatagagcggactgcggatcagcacccgcaggccaggg

SEQ ID NO: 550516 - DNA, 120 bp, Artificial Sequence
  ENSG00000168348_10 (sequence is synthesized)
acagctccggggcggatcagcacccggacagcgccccgaggcagggcctccaggtgctgacgcatccagagccaccgctgcctcagggcccctacacggagggggtgttggggcgccggg

SEQ ID NO: 550517 - DNA, 120 bp, Artificial Sequence
  ENSG00000168348_11 (sequence is synthesized)
tacctgtgccgggcagtaccagtggtggcaggggatccgagattttcgtgtgcccatattgccacaaaaagtttcgtcgccaagcctatctgcgcaagcacctgagcactcacgaggcgg

SEQ ID NO: 550518 - DNA, 120 bp, Artificial Sequence
  ENSG00000168348_12 (sequence is synthesized)
gcgctagcgccgggctttggctccgaacgcggtgccccacttgccttcgcttgcccattgtgcggagcgcacttccctacagcagatatcagggagaagcaccggctgtggcatgctgtc

SEQ ID NO: 550519 - DNA, 120 bp, Artificial Sequence
  ENSG00000168348_13 (sequence is synthesized)
cgcgaggagctgctcctgcccgctctggcgggggctcctcccgaaacgtcgggccctagcgggccatctgacgggagtgcccagcaaattttctcgtgcaagcactgcccgtccactttt

SEQ ID NO: 550520 - DNA, 120 bp, Artificial Sequence
  ENSG00000168348_14 (sequence is synthesized)
tttagctctccagggctgacccggcacatcaataagtgccacccctcagaaagccggcaagtgctgctgctgcagatgccactgcggcctggctgctgagggacgagagaccaggatgat

SEQ ID NO: 550521 - DNA, 120 bp, Artificial Sequence
  ENSG00000168348_15 (sequence is synthesized)
ttcgaggttggccttagaggaaacagatcatgggaatttctgtggggctttcttcaacttgcaagtttactttcattccttcctatgttttaatcccctaaaattctccctgtagtcaat

SEQ ID NO: 550522 - DNA, 120 bp, Artificial Sequence
  ENSG00000168348_16 (sequence is synthesized)
gttccaccagaggagcggacagtgaaatgtaatatccctctctagagcaggtatgtatatggtataaaccttgagatcaaagactgtcagctttaaatccttctcactttccccactaaa

SEQ ID NO: 550523 - DNA, 120 bp, Artificial Sequence
  ENSG00000168348_17 (sequence is synthesized)
ataggatttttccccttaaaactctggagaccctaacgaatcctatatgatttgtaattcctatggaaagtcgcggtgaatgcgtgcatgtctcaatgtccacaaaggattctggctacc

SEQ ID NO: 550524 - DNA, 120 bp, Artificial Sequence
  ENSG00000168348_18 (sequence is synthesized)
ctttggtagccaatgttttttttgtcttgtcatcacaggcgcctatacagcttctgtctcaatagggtcagatattttgcactgtatattctgtgaattaaaagttatgtgattggtgtc

SEQ ID NO: 550525 - DNA, 120 bp, Artificial Sequence
  ENSG00000168348_19 (sequence is synthesized)
aaacttaaggagattcaagacctggcagaaaatgtaagaggatttttgctgcttttggggtgcatggggatctcccctgtaaactttcctttgcccaattatatgtacatgtccattctt

SEQ ID NO: 550526 - DNA, 120 bp, Artificial Sequence
  ENSG00000168348_20 (sequence is synthesized)
aagttggtgtttggaggtggggaggatgctactttactggagttgagacaccccctaaaattctcaccctcagctattttgtgggcagtattcaggaagagctacttcaaacctttcttt

SEQ ID NO: 550527 - DNA, 120 bp, Artificial Sequence
  ENSG00000168348_21 (sequence is synthesized)
aaatggctttttggaaatacagaagtcgtttcctcaagtttgactgttttaatggggtttcacccaaattgtttaatgcttctgctgtaaatgtcatactgtgtattcattatgaaaata

SEQ ID NO: 550528 - DNA, 120 bp, Artificial Sequence
  ENSG00000168348_22 (sequence is synthesized)
tgtacagcttaaggaagatgttaacacctgtaatccactaaggaactgaatggcaatttgctcaatattcagtattttcttttcagcggcaacttgtttttgatttttttaaaaaaccat

SEQ ID NO: 550529 - DNA, 120 bp, Artificial Sequence
  ENSG00000168348_23 (sequence is synthesized)
ttcagtgtacattgtgtactaattccctactagccagtttgggacattggctgagcactgcctgacagaaagcccgtatttgtaagatgcttaccaccaaataaatgtacatagactgtg

SEQ ID NO: 550530 - DNA, 120 bp, Artificial Sequence
  ENSG00000168350_0 (sequence is synthesized)
gcgacaggtgcagcagagccgagccggccgcgctccgaacggcgcctcccgccccaccatgggcaacagcgcgagccgcagcgacttcgagtgggtctacaccgaccagccgcacacgca

SEQ ID NO: 550531 - DNA, 120 bp, Artificial Sequence
  ENSG00000168350_1 (sequence is synthesized)
gcggcgcaaggagatactggccaagtacccggccatcaaggccctgatgcggccagacccgcgcctcaagtgggcggtgctggtgctggtgctggtgcagatgctggcctgctggctggt

SEQ ID NO: 550532 - DNA, 120 bp, Artificial Sequence
  ENSG00000168350_2 (sequence is synthesized)
gcgcgggctggcctggcgctggctgctgttctgggcctacgcctttggtggctgcgtgaaccactcgctgacgctggccatccacgacatctcgcacaacgcggccttcggcacgggccg

SEQ ID NO: 550533 - DNA, 120 bp, Artificial Sequence
  ENSG00000168350_3 (sequence is synthesized)
tgcggcacgcaaccgctggctggccgtgttcgccaacctgcccgtgggtgtgccctacgccgcctccttcaagaagtaccacgtggaccaccaccgctacctgggcggcgacgggctgga

SEQ ID NO: 550534 - DNA, 120 bp, Artificial Sequence
  ENSG00000168350_4 (sequence is synthesized)
cgtggacgtgcccacgcgtctggagggctggttcttctgcacacccgcccgcaagctgctctggctggtgctgcagcccttcttctactcactacggccgctctgcgtccaccccaaggc

SEQ ID NO: 550535 - DNA, 120 bp, Artificial Sequence
  ENSG00000168350_5 (sequence is synthesized)
cgtgacccgcatggaggtgctcaacacgctggtgcagctggcggccgacctggccatctttgccctttgggggctcaagcccgtggtctacctgctggccagctccttcctgggcctggg

SEQ ID NO: 550536 - DNA, 120 bp, Artificial Sequence
  ENSG00000168350_6 (sequence is synthesized)
cctgcaccccatctcgggccacttcgtggccgagcactacatgttcctcaagggccacgagacctactcctactatgggcctctcaactggatcaccttcaatgtgggctaccacgtgga

SEQ ID NO: 550537 - DNA, 120 bp, Artificial Sequence
  ENSG00000168350_7 (sequence is synthesized)
gcaccacgacttccccagcatcccgggctacaacctgccgctggtgcggaagatcgcgcccgagtactacgaccacctgccgcagcaccactcctgggtgaaggtgctctgggattttgt

SEQ ID NO: 550538 - DNA, 120 bp, Artificial Sequence
  ENSG00000168350_8 (sequence is synthesized)
gtttgaggactccctggggccctatgccagggtgaagcgggtgtacaggctggcaaaagatggtctgtgagcccgggctgcctcctggtggtggccattgtcccccatcggcccctcagc

SEQ ID NO: 550539 - DNA, 120 bp, Artificial Sequence
  ENSG00000168350_9 (sequence is synthesized)
cttgcaccccagcactgagaagctacatttccttcctgtgctctggactgctgcccttgtccccgaggagtgtcccgcgcagccacacctggcaacagcagtgtgggctgcagggctccg

SEQ ID NO: 550540 - DNA, 120 bp, Artificial Sequence
  ENSG00000168350_10 (sequence is synthesized)
tctgcacgtggacttgccctggaccttgagtgtggccctccctttctgggcctccccaggtgaggcctggccctgccccaccatgacctgggtgctctgagcccacggttcccacggagc

SEQ ID NO: 550541 - DNA, 120 bp, Artificial Sequence
  ENSG00000168350_11 (sequence is synthesized)
tgacttctccggggtgcctgtgccctacattaaacccggcgtttgtttcacagcccatggattgtgcttctgagggggtggtctgggcttgagcctggccccagggaatggggcgctggg

SEQ ID NO: 550542 - DNA, 120 bp, Artificial Sequence
  ENSG00000168350_12 (sequence is synthesized)
ccgccccgatgagtggagcttgaggcctgagtgccgcttcgtccaggccaggcccaggtcctgccatgcactcctggctctttgtgggacggtggctgctgctggcagtgctccctcagg

SEQ ID NO: 550543 - DNA, 120 bp, Artificial Sequence
  ENSG00000168350_13 (sequence is synthesized)
gcctgccactgtggtgtgcacacacactgaggtgtggacagcagaaagctcactttggtcatctgtgtggctccaaatccctcctagcagcccggggatcccacggctcccttgcctggc

SEQ ID NO: 550544 - DNA, 120 bp, Artificial Sequence
  ENSG00000168350_14 (sequence is synthesized)
tgagccacgcagaggctggctcccccatccccctgagcccacaccacctgccttgcccccaccccttgggcctgctcacctcctgctctctgtatgccctcccgcggcagggagcgtccc

SEQ ID NO: 550545 - DNA, 120 bp, Artificial Sequence
  ENSG00000168350_15 (sequence is synthesized)
gccacagctcagatgggatgcgggtcgggcagcgtcctgggagtgtgcgtgacgtgagacgtgtcggtcctttctacagaagggctgagggtgcagctgcgacctaggaggttgtcttct

SEQ ID NO: 550546 - DNA, 120 bp, Artificial Sequence
  ENSG00000168350_16 (sequence is synthesized)
cctggagggcagggctgggttgggtcctgatgtcccagaggtgggcaggcagcaggaggggtgcctgagcgaggaggccctccctgccagagagggatggagcgggcccactgcaatcca

SEQ ID NO: 550547 - DNA, 120 bp, Artificial Sequence
  ENSG00000168350_17 (sequence is synthesized)
gcagtggatgcagctcccaccactgccttggggaaggcggcctcagcctccaggacttaggaatggagactgaggctacagtcagggcttgaaggcctctccatgagtggggtgccaggg

SEQ ID NO: 550548 - DNA, 120 bp, Artificial Sequence
  ENSG00000168350_18 (sequence is synthesized)
gctgtccctgctgacctgggagatgcaggtctccccctatacctgggagtggccccgcacagcgccggcctcccatgtccgagtgggcagcctgctgagtggcgcagggaagaggcctga

SEQ ID NO: 550549 - DNA, 120 bp, Artificial Sequence
  ENSG00000168350_19 (sequence is synthesized)
gcccaggacttgttctgcaaaggaagtgctgctggccccggcaccaggactttgagccgggcggcccctccctgtgcacacaggcccgcccacaggctgaggggaacccagagcacccgc

SEQ ID NO: 550550 - DNA, 120 bp, Artificial Sequence
  ENSG00000168350_20 (sequence is synthesized)
tcctcctgctgtgcctgagggggtgcctcgttcagcacacttttctgcagacagcgcaaaggggcatgtccaggcctcacccacaaactgaaggccaggcccagggtcagagggtggctc

SEQ ID NO: 550551 - DNA, 120 bp, Artificial Sequence
  ENSG00000168350_21 (sequence is synthesized)
cgaagacagacagtcctttgagcgctcctggggagactcctggccttggggggagccctcctggcctggggggcggcagggaagcgggagagagcagctctgagctgtggtctgcaggcc

SEQ ID NO: 550552 - DNA, 120 bp, Artificial Sequence
  ENSG00000168350_22 (sequence is synthesized)
ctgggttaaaagtgccaccagacctaggtgaagcctaggcgaagccactcagagagtggagcctcctaaggggcagagcagtcatattcctgttgctagggctgccgggaagcccaacaa

SEQ ID NO: 550553 - DNA, 120 bp, Artificial Sequence
  ENSG00000168350_23 (sequence is synthesized)
cgtgcagtgtgctaggagccggcccttgagatcagccactgggtcccagcaggcagtgccggctccctcccctgccatggcccttgggggctgctgggcacactgctctgtggctgcagg

SEQ ID NO: 550554 - DNA, 120 bp, Artificial Sequence
  ENSG00000168350_24 (sequence is synthesized)
aggtcatgtgggagaactgggggcatgagtggtcacaggatctcaaggcctgcctgttggtggccctggttccttgaagctgagggtcagaacctctgtctctggctgctgcctcagggc

SEQ ID NO: 550555 - DNA, 120 bp, Artificial Sequence
  ENSG00000168350_25 (sequence is synthesized)
aggggcctgggacagcccattgcaggccaggtggtcctcccaggagactttgtggggccgaggagaaggcaaagctgccttgcatttgcctggtgcctgctaagccccaagtccatccct

SEQ ID NO: 550556 - DNA, 120 bp, Artificial Sequence
  ENSG00000168350_26 (sequence is synthesized)
cccctgaacaggacgctcgcagggccctgcccgtcagaatgcacgtggagtcctctgaggttcgggggtgtgggttgcacttgagggaccatcttcctggagatcccgtagggagttccc

SEQ ID NO: 550557 - DNA, 120 bp, Artificial Sequence
  ENSG00000168350_27 (sequence is synthesized)
tacaggcaggacctgaggcccagccccaggacaccaccccaccttcccggggcttgggaatgttctgagcccagcttcctgtcgaagaccgccatcttgctcctacgactcctggtcacc

SEQ ID NO: 550558 - DNA, 120 bp, Artificial Sequence
  ENSG00000168350_28 (sequence is synthesized)
gtggtcccgggcccttctctgaaaaggggcatccccagcccggagcgtgatggaccaatgcgagggcctgagcccgagggtgcggacagtaaaccgtttattactgtgtggacacagaca

SEQ ID NO: 550559 - DNA, 120 bp, Artificial Sequence
  ENSG00000168350_29 (sequence is synthesized)
ccgtggtgcatgacagacagtttcaacaccatgagcgctggggacggagctgtgcctggacagctctgcggtgtgtggtggcgccacgctgggccggctgtcaccgccagctgaggcgct

SEQ ID NO: 550560 - DNA, 120 bp, Artificial Sequence
  ENSG00000168350_30 (sequence is synthesized)
aacagcgtcacctgggagaaaacctggaaaccgtctaatgaagcaggtgacttaggggcgtctctagaaacccaaagaaatgtaccttaaataagcaaatataaaacacaaaaaagacga

SEQ ID NO: 550561 - DNA, 120 bp, Artificial Sequence
  ENSG00000168350_31 (sequence is synthesized)
ggccggggctgaggctctgtcagtggtaactggtaaaatccaggaccaaactgccagagccacaaggggatcctggggctccatctcccagccacagagctgcccggctgcaggccaagt

SEQ ID NO: 550562 - DNA, 120 bp, Artificial Sequence
  ENSG00000168350_32 (sequence is synthesized)
gccccaccatgggcaacagcgcgagccgcagcgacttcgagtgggtctacaccgaccagccgcacacgcagcggcgcaaggagatactgggtgcggaagatcgcgcccgagtactacgac

SEQ ID NO: 550563 - DNA, 120 bp, Artificial Sequence
  ENSG00000168356_0 (sequence is synthesized)
tcctgctatacccacagtggtggtcatctcttctgatcttcacagccaatcagctcccaaggcccctgacctcagctcagcttttgtagatccttatgacaccatcctttaagactggaa

SEQ ID NO: 550564 - DNA, 120 bp, Artificial Sequence
  ENSG00000168356_1 (sequence is synthesized)
tcctagggcaggctgttttattcccgcctcctgaggcctttctgaggatctgtggcttgtctctgtcctgagggtgaagatggatgacagatgctacccagtaatctttccagatgagcg

SEQ ID NO: 550565 - DNA, 120 bp, Artificial Sequence
  ENSG00000168356_2 (sequence is synthesized)
gaatttccgccccttcacttccgactctctggctgcaattgagaagcggattgccatccaaaaggagaaaaagaagtctaaagaccagacaggagaagtaccccagcctcggcctcagct

SEQ ID NO: 550566 - DNA, 120 bp, Artificial Sequence
  ENSG00000168356_3 (sequence is synthesized)
tgacctaaaggcctccaggaagttgcccaagctctatggcgacattcctcgtgagctcataggaaagcctctggaagacttggacccattctaccgaaatcataagacatttatggtgtt

SEQ ID NO: 550567 - DNA, 120 bp, Artificial Sequence
  ENSG00000168356_4 (sequence is synthesized)
aaacagaaagaggacaatctaccgcttcagtgccaagcatgccttgttcatttttgggcctttcaattcaatcagaagtttagccattagagtctcagtccattcattgttcagcatgtt

SEQ ID NO: 550568 - DNA, 120 bp, Artificial Sequence
  ENSG00000168356_5 (sequence is synthesized)
cattatcggcaccgttatcatcaactgcgtgttcatggctacagggcctgctaaaaacagcaacagtaacaatactgacattgcagagtgtgtcttcactgggatttatatttttgaagc

SEQ ID NO: 550569 - DNA, 120 bp, Artificial Sequence
  ENSG00000168356_6 (sequence is synthesized)
tttgattaaaatattggcaagaggtttcattctggatgagttttctttccttcgagatccatggaactggctggactccattgtcattggaatagcgattgtgtcatatattccaggaat

SEQ ID NO: 550570 - DNA, 120 bp, Artificial Sequence
  ENSG00000168356_7 (sequence is synthesized)
caccatcaaactattgcccctgcgtaccttccgtgtgttcagagctttgaaagcaatttcagtagtttcacgtctgaaggtcatcgtgggggccttgctacgctctgtgaagaagctggt

SEQ ID NO: 550571 - DNA, 120 bp, Artificial Sequence
  ENSG00000168356_8 (sequence is synthesized)
caacgtgattatcctcaccttcttttgcctcagcatctttgccctggtaggtcagcagctcttcatgggaagtctgaacctgaaatgcatctcgagggactgtaaaaatatcagtaaccc

SEQ ID NO: 550572 - DNA, 120 bp, Artificial Sequence
  ENSG00000168356_9 (sequence is synthesized)
ggaagcttatgaccattgctttgaaaagaaagaaaattcacctgaattcaaaatgtgtggcatctggatgggtaacagtgcctgttccatacaatatgaatgtaagcacaccaaaattaa

SEQ ID NO: 550573 - DNA, 120 bp, Artificial Sequence
  ENSG00000168356_10 (sequence is synthesized)
tcctgactataattatacgaattttgacaactttggctggtcttttcttgccatgttccggctgatgacccaagattcctgggagaagctttatcaacagaccctgcgtactactgggct

SEQ ID NO: 550574 - DNA, 120 bp, Artificial Sequence
  ENSG00000168356_11 (sequence is synthesized)
ctactcagtcttcttcttcattgtggtcattttcctgggctccttctacctgattaacttaaccctggctgttgttaccatggcatatgaggagcagaacaagaatgtagctgcagagat

SEQ ID NO: 550575 - DNA, 120 bp, Artificial Sequence
  ENSG00000168356_12 (sequence is synthesized)
agaggccaaggaaaagatgtttcaggaagcccagcagctgttaaaggaggaaaaggaggctctggttgccatgggaattgacagaagttcacttacttcccttgaaacatcatattttac

SEQ ID NO: 550576 - DNA, 120 bp, Artificial Sequence
  ENSG00000168356_13 (sequence is synthesized)
cccaaaaaagagaaagctctttggtaataagaaaaggaagtccttctttttgagagagtctgggaaagaccagcctcctgggtcagattctgatgaagattgccaaaaaaagccacagct

SEQ ID NO: 550577 - DNA, 120 bp, Artificial Sequence
  ENSG00000168356_14 (sequence is synthesized)
cctagagcaaaccaaacgactgtcccagaatctatcactggaccactttgatgagcatggagatcctctccaaaggcagagagcactgagtgctgtcagcatcctcaccatcaccatgaa

SEQ ID NO: 550578 - DNA, 120 bp, Artificial Sequence
  ENSG00000168356_15 (sequence is synthesized)
ggaacaagaaaaatcacaagagccttgtctcccttgtggagaaaacctggcatccaagtacctcgtgtggaactgttgcccccagtggctgtgcgttaagaaggtcctgagaactgtgat

SEQ ID NO: 550579 - DNA, 120 bp, Artificial Sequence
  ENSG00000168356_16 (sequence is synthesized)
gactgacccgtttactgagctggccatcaccatctgcatcatcatcaacactgtcttcttggccatggagcatcacaagatggaggccagttttgagaagatgttgaatatagggaattt

SEQ ID NO: 550580 - DNA, 120 bp, Artificial Sequence
  ENSG00000168356_17 (sequence is synthesized)
ggttttcactagcatttttatagcagaaatgtgcctaaaaatcattgcgctcgatccctaccactactttcgccgaggctggaacatttttgacagcattgttgctcttctgagttttgc

SEQ ID NO: 550581 - DNA, 120 bp, Artificial Sequence
  ENSG00000168356_18 (sequence is synthesized)
agatgtaatgaactgtgtacttcaaaagagaagctggccattcttgcgttccttcagagtgctcagggtcttcaagttagccaaatcctggccaactttgaacacactaattaagataat

SEQ ID NO: 550582 - DNA, 120 bp, Artificial Sequence
  ENSG00000168356_19 (sequence is synthesized)
cggcaactctgtcggagcccttggaagcctgactgtggtcctggtcattgtgatctttattttctcagtagttggcatgcagctttttggccgtagcttcaattcccaaaagagtccaaa

SEQ ID NO: 550583 - DNA, 120 bp, Artificial Sequence
  ENSG00000168356_20 (sequence is synthesized)
actctgtaacccgacaggcccgacagtctcatgtttacggcactggcacatgggggatttctggcactccttcctagtggtattccgcatcctctgcggggaatggatcgaaaatatgtg

SEQ ID NO: 550584 - DNA, 120 bp, Artificial Sequence
  ENSG00000168356_21 (sequence is synthesized)
ggaatgtatgcaagaagcgaatgcatcatcatcattgtgtgttattgtcttcatattgatcacggtgataggaaaacttgtggtgctcaacctcttcattgccttactgctcaattcctt

SEQ ID NO: 550585 - DNA, 120 bp, Artificial Sequence
  ENSG00000168356_22 (sequence is synthesized)
tagcaatgaggaaagaaatggaaacttagaaggagaggccaggaaaactaaagtccagttagcactggatcgattccgccgggctttttgttttgtgagacacactcttgagcatttctg

SEQ ID NO: 550586 - DNA, 120 bp, Artificial Sequence
  ENSG00000168356_23 (sequence is synthesized)
tcacaagtggtgcaggaagcaaaacttaccacagcaaaaagaggtggcaggaggctgtgctgcacaaagcaaagacatcattcccctggtcatggagatgaaaaggggctcagagaccca

SEQ ID NO: 550587 - DNA, 120 bp, Artificial Sequence
  ENSG00000168356_24 (sequence is synthesized)
ggaggagcttggtatactaacctctgtaccaaagaccctgggcgtcaggcatgattggacttggttggcaccacttgcggaggaggaagatgacgttgaattttctggtgaagataatgc

SEQ ID NO: 550588 - DNA, 120 bp, Artificial Sequence
  ENSG00000168356_25 (sequence is synthesized)
acagcgcatcacacaacctgagcctgaacaacaggcctatgagctccatcaggagaacaagaagcccacgagccagagagttcaaagtgtggaaattgacatgttctctgaagatgagcc

SEQ ID NO: 550589 - DNA, 120 bp, Artificial Sequence
  ENSG00000168356_26 (sequence is synthesized)
tcatctgaccatacaggatccccgaaagaagtctgatgttaccagtatactatcagaatgtagcaccattgatcttcaggatggctttggatggttacctgagatggttcccaaaaagca

SEQ ID NO: 550590 - DNA, 120 bp, Artificial Sequence
  ENSG00000168356_27 (sequence is synthesized)
ggctttggttgctgctttccatgctgtagcgtggacaagagaaagcctccctgggtcatttggtggaacctgcggaaaacctgctaccaaatagtgaaacacagctggtttgagagcttt

SEQ ID NO: 550591 - DNA, 120 bp, Artificial Sequence
  ENSG00000168356_28 (sequence is synthesized)
attatctttgtgattctgctgagcagtggggcactgatatttgaagatgttcaccttgagaaccaacccaaaatccaagaattactaaattgtactgacattatttttacacatattttt

SEQ ID NO: 550592 - DNA, 120 bp, Artificial Sequence
  ENSG00000168356_29 (sequence is synthesized)
atcctggagatggtactaaaatgggtagccttcggatttggaaagtatttcaccagtgcctggtgctgccttgatttcatcattgtgattgtctctgtgaccaccctcattaacttaatg

SEQ ID NO: 550593 - DNA, 120 bp, Artificial Sequence
  ENSG00000168356_30 (sequence is synthesized)
gaattgaagtccttccggactctacgagcactgaggcctcttcgtgcgctgtcccagtttgaaggaatgaaggtggtggtcaatgctctcataggtgccatacctgccattctgaatgtt

SEQ ID NO: 550594 - DNA, 120 bp, Artificial Sequence
  ENSG00000168356_31 (sequence is synthesized)
ttgcttgtctgcctcattttctggctcgtattttgtattctgggagtatacttcttttctggaaaatttgggaaatgcattaatggaacagactcagttataaattataccatcattaca

SEQ ID NO: 550595 - DNA, 120 bp, Artificial Sequence
  ENSG00000168356_32 (sequence is synthesized)
aataaaagtcaatgtgaaagtggcaatttctcttggatcaaccagaaagtcaactttgacaatgtgggaaatgcttacctcgctctgctgcaagtggcaacatttaagggctggatggat

SEQ ID NO: 550596 - DNA, 120 bp, Artificial Sequence
  ENSG00000168356_33 (sequence is synthesized)
attatatatgcagctgttgattccacagagaaagaacaacagccagagtttgagagcaattcactcggttacatttacttcgtagtctttatcatctttggctcattcttcactctgaat

SEQ ID NO: 550597 - DNA, 120 bp, Artificial Sequence
  ENSG00000168356_34 (sequence is synthesized)
ctcttcattggcgttatcattgacaacttcaaccaacagcagaaaaagttaggtggccaagacatttttatgacagaagaacagaagaaatactataatgcaatgaaaaaattaggatcc

SEQ ID NO: 550598 - DNA, 120 bp, Artificial Sequence
  ENSG00000168356_35 (sequence is synthesized)
aaaaaacctcaaaaacccattccacggcctctgaacaaatgtcaaggtctcgtgttcgacatagtcacaagccagatctttgacatcatcatcataagtctcattatcctaaacatgatt

SEQ ID NO: 550599 - DNA, 120 bp, Artificial Sequence
  ENSG00000168356_36 (sequence is synthesized)
agcatgatggctgaatcatacaaccaacccaaagccatgaaatccatccttgaccatctcaactgggtctttgtggtcatctttacgttagaatgtctcatcaaaatctttgctttgagg

SEQ ID NO: 550600 - DNA, 120 bp, Artificial Sequence
  ENSG00000168356_37 (sequence is synthesized)
caatactacttcaccaatggctggaatttatttgactgtgtggtcgtgcttctttccattgttagtacaatgatttctaccttggaaaatcaggagcacattcctttccctccgacgctc

SEQ ID NO: 550601 - DNA, 120 bp, Artificial Sequence
  ENSG00000168356_38 (sequence is synthesized)
ttcagaattgtccgcttggctcggattggccgaatcctgaggcttgtccgggctgcacgaggaatcaggactctcctctttgctctgatgatgtcgcttccttctctgttcaacattggt

SEQ ID NO: 550602 - DNA, 120 bp, Artificial Sequence
  ENSG00000168356_39 (sequence is synthesized)
cttctactctttctgattatgtttatctatgccattctgggtatgaactggttttccaaagtgaatccagagtctggaatcgatgacatattcaacttcaagacttttgccagcagcatg

SEQ ID NO: 550603 - DNA, 120 bp, Artificial Sequence
  ENSG00000168356_40 (sequence is synthesized)
ctctgtctcttccagataagcacatcagcaggttgggattccctgctcagccccatgctgcgatcaaaagaatcatgtaactcttcctcagaaaactgccacctccctggcatagccaca

SEQ ID NO: 550604 - DNA, 120 bp, Artificial Sequence
  ENSG00000168356_41 (sequence is synthesized)
tcctactttgtcagttacattatcatctcctttctcattgttgtcaacatgtacattgctgtgattttagagaacttcaatacagccactgaagaaagtgaggaccctttgggtgaagat

SEQ ID NO: 550605 - DNA, 120 bp, Artificial Sequence
  ENSG00000168356_42 (sequence is synthesized)
gactttgacatattttatgaagtgtgggaaaagtttgacccagaagcaacacaatttatcaaatattctgccctttctgactttgctgatgccttgcctgagcctttgcgtgtcgcaaag

SEQ ID NO: 550606 - DNA, 120 bp, Artificial Sequence
  ENSG00000168356_43 (sequence is synthesized)
ccaaataaatatcaatttctagtaatggacttgcccatggtgagtgaagatcgcctccactgcatggatattcttttcgccttcaccgctagggtactcggtggctctgatggcctagat

SEQ ID NO: 550607 - DNA, 120 bp, Artificial Sequence
  ENSG00000168356_44 (sequence is synthesized)
agtatgaaagcaatgatggaagagaagttcatggaagccaatcctctcaagaagttgtatgaacccatagtcaccaccaccaagagaaaggaagaggaaagaggtgctgctattattcaa

SEQ ID NO: 550608 - DNA, 120 bp, Artificial Sequence
  ENSG00000168356_45 (sequence is synthesized)
aaggcctttcgaaagtacatgatgaaggtgaccaagggtgaccaaggtgaccaaaatgacttggaaaacgggcctcattcaccactccagactctttgcaatggagacttgtctagcttt

SEQ ID NO: 550609 - DNA, 120 bp, Artificial Sequence
  ENSG00000168356_46 (sequence is synthesized)
ggggtggccaagggcaaggtccactgtgactgagccctcacctccacgcctacctcatagcttcacagccttgccttcagcctctgagctccaggggtcagcagcttagtgtatcaacag

SEQ ID NO: 550610 - DNA, 120 bp, Artificial Sequence
  ENSG00000168356_47 (sequence is synthesized)
ggagtggattcaccaaattagccattccattttcttttctggctaaaataaatgatatttcaatttcattttaaataatacttacagagatataagataaggctacttgacaaccagtgg

SEQ ID NO: 550611 - DNA, 120 bp, Artificial Sequence
  ENSG00000168356_48 (sequence is synthesized)
ataaggctacttgacaaccagtggtactattataataaggaagaagacaccaggaaggactgtaaaaggacataccaattttaggattgaaatagttcaggccgggcgcagtggctcatg

SEQ ID NO: 550612 - DNA, 120 bp, Artificial Sequence
  ENSG00000168356_49 (sequence is synthesized)
aaaagaaaagaaaagaaacatggttcaaattatatctaaacaaaaaagaataagaaacaaaaaacacattaaaattttaagttgtattttctatgtttctagatacatcatttttgtttg

SEQ ID NO: 550613 - DNA, 120 bp, Artificial Sequence
  ENSG00000168356_50 (sequence is synthesized)
tttcctgatgcaagtatgtggtttatcacatgtagctcttttgcatgctaaatgaaaattcaaaacttgccaataaatgaatagcttattgcagacattttttaccaacattaattattt

SEQ ID NO: 550614 - DNA, 120 bp, Artificial Sequence
  ENSG00000168356_51 (sequence is synthesized)
tgggtttgtttaaaacctagaggcacaatcttgacttgtcaattactaccctttcacaagctaccatctcagatatatatatatatataaattcaataaagctttctgtttgtgttcctt

SEQ ID NO: 550615 - DNA, 120 bp, Artificial Sequence
  ENSG00000168356_52 (sequence is synthesized)
agtaaaatcagcagtcagagggactttaagaaccagaagtaagtttgtaaatcttatcattttttgaagtttgttcaaactatccacaaagcagaaaactgggccaagtgtactttctga

SEQ ID NO: 550616 - DNA, 120 bp, Artificial Sequence
  ENSG00000168356_53 (sequence is synthesized)
aagaatagacaggggtactaatgccattctctactgggaagttgctaggagatagagagtaatttctgttcccttaactcactacacaactgaaatagagttcaataatcatgcagctaa

SEQ ID NO: 550617 - DNA, 120 bp, Artificial Sequence
  ENSG00000168356_54 (sequence is synthesized)
tgtattcaatggaaatagacaaaattaaaatgactcagaagtttttgtggtggtaacctgatttattcagataattgagtcaaagttctacctttcctgtgcaactataagccctatgag

SEQ ID NO: 550618 - DNA, 120 bp, Artificial Sequence
  ENSG00000168356_55 (sequence is synthesized)
cattttttagttttaaggatttactgcccatgttttttcctttgttcaaaatccacatgggtgccagatcacaattattgtgcccctgtggcactgctgtgccccctttcaacccctata

SEQ ID NO: 550619 - DNA, 120 bp, Artificial Sequence
  ENSG00000168356_56 (sequence is synthesized)
caaggccccatggcccactctagattgggctttcaagagtatatcattcagacaatcaaagctttttttctattctatatcccatgttaacttaaaccacagtgtgaactgtgcttgtct

SEQ ID NO: 550620 - DNA, 120 bp, Artificial Sequence
  ENSG00000168356_57 (sequence is synthesized)
cagattctttgaccccgcttaccaaccagcctcattctctaatcagtatatttttcctaatcacacgcagggttaactaaaaggcttataaaagaatacaaaagaaagaaggttattacc

SEQ ID NO: 550621 - DNA, 120 bp, Artificial Sequence
  ENSG00000168356_58 (sequence is synthesized)
atactccttcttataaaacacacacatacacacatcaactttaaaattaaattcttcatggctaaaccataagtgcttactctgggtttttgaagtctggttttaattaaactgttaact

SEQ ID NO: 550622 - DNA, 120 bp, Artificial Sequence
  ENSG00000168356_59 (sequence is synthesized)
tgacattttataattatgtaaaactgtccaggagcccttctcatagttcaaaacacaatgaagacaaagaaaactgattttccaaatggaagcttttttgcgatctcagaaagaatgcat

SEQ ID NO: 550623 - DNA, 120 bp, Artificial Sequence
  ENSG00000168356_60 (sequence is synthesized)
caaacagatatattggatcaagatattttggttcctaatgctactgcagcattgcagatgtttcagagaacaacaacaaatatgctacagttcatagtgtgttctggtttctaagccatg

SEQ ID NO: 550624 - DNA, 120 bp, Artificial Sequence
  ENSG00000168356_61 (sequence is synthesized)
atgttaatgtagataaagcttatcaatagattcttccatgagtttacagttaagtagacctttaatttttattagtcaattccaatcacaagtcttggtgaaattgacagcagcaaaaaa

SEQ ID NO: 550625 - DNA, 120 bp, Artificial Sequence
  ENSG00000168356_62 (sequence is synthesized)
agtggcggggctgaaggtaaacaggctgttgtgtttcctcggtgctgttagttgctgtgtggccggtagccatgtgatgagattgtcccagtgcttcgcatgtttttggctccatgttca

SEQ ID NO: 550626 - DNA, 120 bp, Artificial Sequence
  ENSG00000168356_63 (sequence is synthesized)
atccatttgctgaacacagtgaaagtatccagtatgtctttccaccgtaccctagagttggcatcttgtttaccagaggggagcggtctgaaccccaaggttaatggcacaagagaagag

SEQ ID NO: 550627 - DNA, 120 bp, Artificial Sequence
  ENSG00000168356_64 (sequence is synthesized)
aaaggaggagatgccaaatggacaccctcctccaagccgctcctcccagaagggctccaggcagctgccaggagcagaagctcgaactctgctgagagacttgctctgtggagagcttca

SEQ ID NO: 550628 - DNA, 120 bp, Artificial Sequence
  ENSG00000168356_65 (sequence is synthesized)
agaagtatcgctgggattgctgtctggagccaccttaccaagaagtcagattggaagaccctggaaggctggtgctttatatccctttgcatccccagtgcccagcacatgaatgaatga

SEQ ID NO: 550629 - DNA, 120 bp, Artificial Sequence
  ENSG00000168356_66 (sequence is synthesized)
accatgggaggtcaggcctaagtgcttctataaagcttgcagctttggaaagtgaggccttagtcctctctcctagctactattttccggaaccaagaactgtactatatttggacccat

SEQ ID NO: 550630 - DNA, 120 bp, Artificial Sequence
  ENSG00000168356_67 (sequence is synthesized)
aataaaggttccccaggcagcttcagcttcgtgtgttgcaaaccaaatttattccctcgcagtgccctccttttcttgcactctctgtctcagtgagtggccacactgtcctctcatctg

SEQ ID NO: 550631 - DNA, 120 bp, Artificial Sequence
  ENSG00000168356_68 (sequence is synthesized)
gtccagatcatttgaaaagtgcacgtgccccacggtgttcatgttattggatggaagcaaatagctaattctttctacaaatactggctgagtgcctactgctgcaggcagggactgtgc

SEQ ID NO: 550632 - DNA, 120 bp, Artificial Sequence
  ENSG00000168356_69 (sequence is synthesized)
tggatgtgagcaagatgtcgtctccttctctggggtcctatggcctcagaagggcatagactaaaaggcaggcaacttctttagtgagattggtcgtgtgaaagtggtagcagggagagg

SEQ ID NO: 550633 - DNA, 120 bp, Artificial Sequence
  ENSG00000168356_70 (sequence is synthesized)
tatattgagttgataatgtgttgtgttggacctacacagtatttaaaactttgaaaaacactttctaacatgaatactccagatttccagcttttcttgaaagatggaaactggcaaggg

SEQ ID NO: 550634 - DNA, 120 bp, Artificial Sequence
  ENSG00000168356_71 (sequence is synthesized)
taggttcccatttctgttaatacctgacaaaaatgggtagagtaaggaattgctgcctctttggagggggcatgtaagctctgtctcaccacctctgcacccctcttgtggctgaacacc

SEQ ID NO: 550635 - DNA, 120 bp, Artificial Sequence
  ENSG00000168356_72 (sequence is synthesized)
agcccattttacccatttatatgccttttcaggctcttaaaacttagggtttgcaatgtcagtcttaaaatgtaaaggcaggtaggaattattaagcatttctgctgtatgccagggttg

SEQ ID NO: 550636 - DNA, 120 bp, Artificial Sequence
  ENSG00000168356_73 (sequence is synthesized)
ggggagacactaggaagttttagacagggaaatgagaaaaagatatgggttggtagatttagtaaaatattgaggagaatggcaatgaataactatttgggtttggttccctagaagcag

SEQ ID NO: 550637 - DNA, 120 bp, Artificial Sequence
  ENSG00000168356_74 (sequence is synthesized)
agcctgatatgggcattcttatttaagtgatttaacagaggagtgctttctggagaaggagaaagggaagcagaaggggggaaaacaaagagccaagcaaggatatggtctcagctgagt

SEQ ID NO: 550638 - DNA, 120 bp, Artificial Sequence
  ENSG00000168356_75 (sequence is synthesized)
caccttcattctgatcccacgaagaactctggagcatgaattgcaccacagaattgtcccactttgaagcaagggcctaagtcagtcagacatgtagaagggggtgtgtagctctccaag

SEQ ID NO: 550639 - DNA, 120 bp, Artificial Sequence
  ENSG00000168356_76 (sequence is synthesized)
tgaggaggctgccattcagcaggggacaattctccacaggaggggacagttgtgagttgttctcatccaacattcacagtcagaagatagatgcacctgcagaaaaggggaccatcaggg

SEQ ID NO: 550640 - DNA, 120 bp, Artificial Sequence
  ENSG00000168356_77 (sequence is synthesized)
gcacccccagtcttacccagtagctaatgatgcatgccatcctgcaacatatctgccttaatggatgctggccacattgttcagcatgttcattatcggcaccgttatcatcaactgcgt

SEQ ID NO: 550641 - DNA, 120 bp, Artificial Sequence
  ENSG00000168356_78 (sequence is synthesized)
gttcatggctacagggcctgctaaaaacagcaacagtaacaatactgacattgcagagtaagtatttttccttcactcacctgtcctaagtttttaaacaaatatacctaagacagttaa

SEQ ID NO: 550642 - DNA, 120 bp, Artificial Sequence
  ENSG00000168356_79 (sequence is synthesized)
tgattacactggagagaaagaaaaagtcactaataattctaacacatatgttggcagaatcagttttatttttgacctttatttttttacaatttgtaatgaacagcacacatatgttca

SEQ ID NO: 550643 - DNA, 120 bp, Artificial Sequence
  ENSG00000168356_80 (sequence is synthesized)
cattttaagtggttttctttgtgtttacataagttttataggtatccattttgatggttatataatattttatcaggtgaataaaccataatgtacttcaccactctagcattttagtag

SEQ ID NO: 550644 - DNA, 120 bp, Artificial Sequence
  ENSG00000168374_0 (sequence is synthesized)
agtcgcctagcaggtcctctaccggcttattcctgtgccggatcttcatcggcacaggggccactgagacgtttctgcctccctctttcttcctccgctctttctcttccctctcgttta

SEQ ID NO: 550645 - DNA, 120 bp, Artificial Sequence
  ENSG00000168374_1 (sequence is synthesized)
gtttgcctgggagcttgaaaggagaaagcacggggtcgccccaaaccccttctgcttctgcccatcacaagtgccactaccgccatgggcctcactatctcctccctcttctcccgacta

SEQ ID NO: 550646 - DNA, 120 bp, Artificial Sequence
  ENSG00000168374_2 (sequence is synthesized)
tttggcaagaagcagatgcgcattttgatggttggattggatgctgctggcaagacaaccattctgtataaactgaagttaggggagatagtcaccaccattcctaccattggttttaat

SEQ ID NO: 550647 - DNA, 120 bp, Artificial Sequence
  ENSG00000168374_3 (sequence is synthesized)
gtggaaacagtagaatataagaacatttgtttcacagtatgggatgttggtggtcaagatagaattaggcctctctggaagcattacttccagaatacccagggtcttatttttgtggta

SEQ ID NO: 550648 - DNA, 120 bp, Artificial Sequence
  ENSG00000168374_4 (sequence is synthesized)
gatagcaacgatcgtgaaagaattcaggaagtagcagatgagctgcagaaaatgcttctggtagatgaattgagagatgcagtgctgctactttttgcaaacaaacaggatttgccaaat

SEQ ID NO: 550649 - DNA, 120 bp, Artificial Sequence
  ENSG00000168374_5 (sequence is synthesized)
gctatggccatcagtgaaatgacagataaactagggcttcagtctcttcgtaacagaacatggtatgttcaagccacttgtgcaacacaaggaactggtctgtatgaaggacttgactgg

SEQ ID NO: 550650 - DNA, 120 bp, Artificial Sequence
  ENSG00000168374_6 (sequence is synthesized)
gatatctaaccaaggacatgtttgataaaattggtctaggcttgttacaacaaaattagtttgtatcttggttattaaacagtatctgggactggtttgggcagaatattaaacttattt

SEQ ID NO: 550651 - DNA, 120 bp, Artificial Sequence
  ENSG00000168374_7 (sequence is synthesized)
tgttgccaattattgtttaccgagtataatgttgctatttagcaatgtgcttggttttaaagaaattctccttgggaaaaaagtatcctcttttaattttacttcccataagcgtaaatg

SEQ ID NO: 550652 - DNA, 120 bp, Artificial Sequence
  ENSG00000168374_8 (sequence is synthesized)
cctggacatagctcttgtgcaacctttaaataaattgttttgagtgttttttgagccccagacaaataatgttttaaagttatccccttgctactttactgatacctttatcattcctga

SEQ ID NO: 550653 - DNA, 120 bp, Artificial Sequence
  ENSG00000168374_9 (sequence is synthesized)
gacagtttgctaatttaaaaatgtagcattccatttgtatttatttctctcccttgccaaaaagattttctaatactgcttgtaccagccagagaaagatccaaaacactactcagctct

SEQ ID NO: 550654 - DNA, 120 bp, Artificial Sequence
  ENSG00000168374_10 (sequence is synthesized)
cttgcactgaggaaatttttccccctacattgactcctggcctacatcagccaaacttaaccttggtggggtttggatttgatagccaattagttctgtgctggttgcaaagaattgata

SEQ ID NO: 550655 - DNA, 120 bp, Artificial Sequence
  ENSG00000168374_11 (sequence is synthesized)
tttagatggtttttaatactcagcagattgtcttcctttatattgtgtcttttttatgttgcatgttgcttttgttatcagcctgattttttgctcagtatatgatagttctgctgatgt

SEQ ID NO: 550656 - DNA, 120 bp, Artificial Sequence
  ENSG00000168374_12 (sequence is synthesized)
tttgtttattgggcagacatatcttcattaagagtttttggaaaactcatcaaattcgatgaatacattttcttcataacccatttggaattattcctaataaaatgataaaatacgtaa

SEQ ID NO: 550657 - DNA, 120 bp, Artificial Sequence
  ENSG00000168374_13 (sequence is synthesized)
gacgctgcacagcggtcatttttgtttttctttgtaggttttaatgtggaaacagtagaatataagaacatttgtttcacagtatgggatgttggtggtcaagatagaattaggcctctc

SEQ ID NO: 550658 - DNA, 120 bp, Artificial Sequence
  ENSG00000168374_14 (sequence is synthesized)
tctgcataccttcttgcccgggtgtggacagcggtcaggagggaggcagagcaactccagccttttccctccccttctgcgtttcgtgtacagtccctgcatactccattggtatgtaag

SEQ ID NO: 550659 - DNA, 120 bp, Artificial Sequence
  ENSG00000168374_15 (sequence is synthesized)
gcgcaagcgcagtggctcgggcgcaccggaagcgcagggggatggggcggcggtgacgcgattctgtccgcgttggaggggccgggccgctgctggagtcgccgcggccgccgcgtgacg

SEQ ID NO: 550660 - DNA, 120 bp, Artificial Sequence
  ENSG00000168374_16 (sequence is synthesized)
ctgtgaattttaaaaggtgtagcaggccgggcgcggtgagtcaccgcgccaggcccgatcataaacacttttaaagtgaagaggctttccgcttcctcaacataaggagtaaatctttaa

SEQ ID NO: 550661 - DNA, 120 bp, Artificial Sequence
  ENSG00000168374_17 (sequence is synthesized)
tgctgcttctaggaaaaaaagtacaagaaaagcaagacttcctccttgccttctctttaaaaagcaacagccgatgaacacgtgttggagcgctctcgccttgacagaattagagatctt

SEQ ID NO: 550662 - DNA, 120 bp, Artificial Sequence
  ENSG00000168374_18 (sequence is synthesized)
cagaatcacttggcgtggtggtcgaagcgtctagccctagctcattagggtgccacagtttctcggcccacaagtcagcttttaaccacttttctccgcaaaagaccggaccggtcttca

SEQ ID NO: 550663 - DNA, 120 bp, Artificial Sequence
  ENSG00000168374_19 (sequence is synthesized)
agcaagcgtctggtcccgtgtgtgaaacgtgtaagttcatggcatcagggaatacccatcgcgcgtaccgtaatagaagagggcgaggttcctcacctaacccataatgctcagctcgcc

SEQ ID NO: 550664 - DNA, 120 bp, Artificial Sequence
  ENSG00000168385_0 (sequence is synthesized)
gatcatcgagacggcggcggtggtgggctagacgagtttcgcgcggccgctcgccgtcccccgcccagtcgtactcggcgccccagctcggtgctgccgccatcttcttggaggacagga

SEQ ID NO: 550665 - DNA, 120 bp, Artificial Sequence
  ENSG00000168385_1 (sequence is synthesized)
ggagaggcgaaggctccccctccccgtgatcgctccgcactcccgccaccacctgccctcccgcgaccgcctctctcctcctcagtgggcacttgtctccttctaacaaacggccttccc

SEQ ID NO: 550666 - DNA, 120 bp, Artificial Sequence
  ENSG00000168385_2 (sequence is synthesized)
cccactccagttacccaccgcaaggcgaagattctcattacctgttccactcttataagcataagaaaaccgagctcataagcatacagaaactgctgtaaaagaagaagttgtgggtat

SEQ ID NO: 550667 - DNA, 120 bp, Artificial Sequence
  ENSG00000168385_3 (sequence is synthesized)
ttttttttttttttttgtctggaggaatggggacaccaaaactcatttggcagcagaggtgagacgaagcttcacaaaagatgtctaagcaacagccaactcagtttataaatccagaaa

SEQ ID NO: 550668 - DNA, 120 bp, Artificial Sequence
  ENSG00000168385_4 (sequence is synthesized)
cacctggctatgttggatttgcaaacctccccaatcaagttcaccgaaaatcagtgaaaaaaggttttgagttcacactgatggtggtcggtgaatcaggtctaggaaaatcgactctca

SEQ ID NO: 550669 - DNA, 120 bp, Artificial Sequence
  ENSG00000168385_5 (sequence is synthesized)
taaacagcctattcctaactgatctgtacccagaaagagtcatacctggagcagcagaaaaaattgaaagaactgtccagattgaggcttcaactgttgaaattgaagagcgaggggtca

SEQ ID NO: 550670 - DNA, 120 bp, Artificial Sequence
  ENSG00000168385_6 (sequence is synthesized)
agctacgcctgacagtggtagatacccctggctatggtgacgctatcaactgcagagattgttttaagacaattatctcctatattgatgagcaatttgagaggtacctgcatgacgaga

SEQ ID NO: 550671 - DNA, 120 bp, Artificial Sequence
  ENSG00000168385_7 (sequence is synthesized)
gcggcttgaacaggcggcacatcattgataatagggtgcattgttgcttttactttatttcaccttttggacatggacttaagcccttagatgtggcgtttatgaaggcaatacacaaca

SEQ ID NO: 550672 - DNA, 120 bp, Artificial Sequence
  ENSG00000168385_8 (sequence is synthesized)
aggtgaatattgtgcctgtcattgcaaaagctgacactctcaccctgaaggaacgggagcggctgaagaaaaggattctggatgaaattgaagaacataacatcaaaatctatcacttac

SEQ ID NO: 550673 - DNA, 120 bp, Artificial Sequence
  ENSG00000168385_9 (sequence is synthesized)
ctgatgcagaatcagatgaagatgaagattttaaagagcagactagacttctcaaggctagcatcccattctctgtggttggatccaatcagttgattgaagccaaaggaaagaaggtca

SEQ ID NO: 550674 - DNA, 120 bp, Artificial Sequence
  ENSG00000168385_10 (sequence is synthesized)
gaggccgcctctacccctggggtgttgtggaagtggagaacccagagcacaatgactttctgaagctgagaaccatgctcatcacccacatgcaggatctccaggaggtgacccaggacc

SEQ ID NO: 550675 - DNA, 120 bp, Artificial Sequence
  ENSG00000168385_11 (sequence is synthesized)
ttcattatgaaaacttccgttctgagagactcaagagaggcggcaggaaagtggagaatgaggacatgaataaagaccagatcttgctggaaaaagaagctgagctccgccgcatgcaag

SEQ ID NO: 550676 - DNA, 120 bp, Artificial Sequence
  ENSG00000168385_12 (sequence is synthesized)
agatgattgcaaggatgcaggcgcagatgcagatgcagatgcagggcggggatggcgatggcggggctctcgggcaccacgtgtaaggtgatgtgcacatatcaagaagtcagagaaaac

SEQ ID NO: 550677 - DNA, 120 bp, Artificial Sequence
  ENSG00000168385_13 (sequence is synthesized)
actttcctggataaaaaagaaaacattccagatgcatgatccagctgtgtgttttcaatccttgggagggtgccatccacattttaacagtacctgtgcctgagaatttaatttttaaaa

SEQ ID NO: 550678 - DNA, 120 bp, Artificial Sequence
  ENSG00000168385_14 (sequence is synthesized)
gactttgatgtgtttttgtatgaagtacttttaacgtatgtatttcattgctgtgtcacactctgtgttttgtgaggtgaatgtcttccttttctttctccctaaccactaatgttagaa

SEQ ID NO: 550679 - DNA, 120 bp, Artificial Sequence
  ENSG00000168385_15 (sequence is synthesized)
atcggcatgtatacttaatactgaatttctttgatttaactgacttaacaactgactaaccattgatgagcactcctgatttttatctagaacattcagatttaccataatgttccttag

SEQ ID NO: 550680 - DNA, 120 bp, Artificial Sequence
  ENSG00000168385_16 (sequence is synthesized)
tggtagaggtgtgtgcctagtgatgtagaaagatacactgacttggtgcaaggccatctgcttaccacatcacaccacttggagatctttgcttccttgcttttatgtttgtacacaaca

SEQ ID NO: 550681 - DNA, 120 bp, Artificial Sequence
  ENSG00000168385_17 (sequence is synthesized)
cctaaaaccagttttgctgctataattctatactgttgattcgtctgcgattttatctgttaaccaaataaaacataatagaatttcctaatgagatatatctttatacttaaacagctt

SEQ ID NO: 550682 - DNA, 120 bp, Artificial Sequence
  ENSG00000168385_18 (sequence is synthesized)
ttttagaggtgagttttaaagaagtctcttaattctgatgctaggttgtttttaaaaccactatgcaaagaactcaccacaagccaccttttgtagtgttctccactaatactggttatc

SEQ ID NO: 550683 - DNA, 120 bp, Artificial Sequence
  ENSG00000168385_19 (sequence is synthesized)
ctgtgctacagagaaaatcaaagcagtcataagctccagttttcgtattgcaaataagactcttacctacaaaatgagattcagtgaactaatttggtttttactcaaccaaattaaaaa

SEQ ID NO: 550684 - DNA, 120 bp, Artificial Sequence
  ENSG00000168385_20 (sequence is synthesized)
tttttttaaggaaaattagcagttggtctattcagaatcaaacctttttatattttatactgcactttagtgtattttctgtcactgtaggtatagaagatctgcctcccctgtggaaat

SEQ ID NO: 550685 - DNA, 120 bp, Artificial Sequence
  ENSG00000168385_21 (sequence is synthesized)
tggggtctgttggtgggcgtgcccctgaagcctggcttgggttgaaaagtgttcccgccctaaggccttggtgccctgaacctctgatgcctaccgggttctcctgatttgagtttcctt

SEQ ID NO: 550686 - DNA, 120 bp, Artificial Sequence
  ENSG00000168385_22 (sequence is synthesized)
taaatactccctttttgagtaattttctgatgggaggaaagtagcagtcatcatctttttgtgtgcaggctgtctcatttatttttagccattgtcgtttcattcattttgtgtaatata

SEQ ID NO: 550687 - DNA, 120 bp, Artificial Sequence
  ENSG00000168385_23 (sequence is synthesized)
aaccgtgtgtcatgtcaaagtgaaagacatttcaaatctgtagcataggctagtgggcaggtccgcacagtcgaagccacacctggtctgttttctgtgcactgtagccttagtgtcacc

SEQ ID NO: 550688 - DNA, 120 bp, Artificial Sequence
  ENSG00000168385_24 (sequence is synthesized)
tttcttcttgtgtctccttatggtacactccagcggttgccttttttatcatttctactgaagttgggaaattcaaccccagaaattgacagatgaaaggagacaatggttgtgtaggga

SEQ ID NO: 550689 - DNA, 120 bp, Artificial Sequence
  ENSG00000168385_25 (sequence is synthesized)
gatggagaaaatgcttaatctgaggatgagacagggttttttcatttttgtgggggctagaaaaaacataaaatgaggcagttaaataataatagttaatgaaggtgtgctacagaaaat

SEQ ID NO: 550690 - DNA, 120 bp, Artificial Sequence
  ENSG00000168385_26 (sequence is synthesized)
aatctggtgttcttgctaactttgcccttcactgttgcttaattgtgaacagccaaaagctatatgttatggcttattgtgtgaaggtaactaagaagtggtgttccatgacttcagagt

SEQ ID NO: 550691 - DNA, 120 bp, Artificial Sequence
  ENSG00000168385_27 (sequence is synthesized)
acatccatgcggagtccattatttgagtttgacatttaataactttgctggaaaatctgtaaaaaagaaaaacaagtttgctagtgactaagccccgcatatgtgagtgaaagtacttca

SEQ ID NO: 550692 - DNA, 120 bp, Artificial Sequence
  ENSG00000168385_28 (sequence is synthesized)
ggcacgctgcctcctggtaacagctatgcagggagggaggacccacactgctacacttctgatcccctttggttttactacccaaatctaaatagatacttttgataatagataactgct

SEQ ID NO: 550693 - DNA, 120 bp, Artificial Sequence
  ENSG00000168385_29 (sequence is synthesized)
cttttactaagacatagtctctacctatagaaatgtattttgaaaacacttattttacacagcaattttgtatccatttaaactaaccttttatcaataaagcactattgtttagatatt

SEQ ID NO: 550694 - DNA, 120 bp, Artificial Sequence
  ENSG00000168385_30 (sequence is synthesized)
ccccacaccagaaggagaaagctaggggccgcgccagctccgccctcccccgcggggcggcgggccccagcccgggcacaggaaggccacgtccccggggagggacgcccgactcgatgg

SEQ ID NO: 550695 - DNA, 120 bp, Artificial Sequence
  ENSG00000168385_31 (sequence is synthesized)
gctgggcgggtccgcggcgcggtcggtcggcgcctgttctcgggctgtttggcggaggcttggaatagttaaatgactttggtcttgtccaaggttagatggagttcaactctaacgtca

SEQ ID NO: 550696 - DNA, 120 bp, Artificial Sequence
  ENSG00000168385_32 (sequence is synthesized)
tcaagcgattcccctggctcagcctccggagtagctgggactgcagacacgtgccaccacgctggctaattttttggattttagtaaattcggggtttcaccgtgttggccaggatggcc

SEQ ID NO: 550697 - DNA, 120 bp, Artificial Sequence
  ENSG00000168385_33 (sequence is synthesized)
ggggcgggctgtgagcggaccgcgagcgctgggcgggtccgcggcgcggtcggtcggcgcctgttctcgggctgtttggcggacgaagcttcacaaaagatgtctaagcaacagccaact

SEQ ID NO: 550698 - DNA, 120 bp, Artificial Sequence
  ENSG00000168385_34 (sequence is synthesized)
tgtaattctacatgaaagatgctgaagactgcctaattaatattttatgtcttagctgtgtgttttgtttgttcttgttcagctttgaacacaaggaaaacacttttatggggtaggtgt

SEQ ID NO: 550699 - DNA, 120 bp, Artificial Sequence
  ENSG00000168385_35 (sequence is synthesized)
gctgcaccgaggtccttggatttgggttgtagactttctttgacacgtatccatggatccatcctctcttgagtttgtctgtaaaatgtaataagtagtttctgcctatattaaatattt

SEQ ID NO: 550700 - DNA, 120 bp, Artificial Sequence
  ENSG00000168385_36 (sequence is synthesized)
gatggaaggattaagtgagaatgttttacatcaaaaatgctgtgtaactagaagattactaggatagatgttcgaattcatctactgtcagaaagttccagcacaggacaccagcatcca

SEQ ID NO: 550701 - DNA, 120 bp, Artificial Sequence
  ENSG00000168385_37 (sequence is synthesized)
agagatgattgcaaggatgcaggcgcagatgcagatgcagatgcagggcggggatggcgatggcggggctctcgggcaccacgtgtaaggtgatgtgcacatatcaagaagtcagagtgt

SEQ ID NO: 550702 - DNA, 120 bp, Artificial Sequence
  ENSG00000168385_38 (sequence is synthesized)
ttttccctttgaagtcagggaccccctgttttataccctatgattattgttaatgtttctgtttctctcagttttaagacaattatctcctatattgatgagcaatttgagaggtacctg

SEQ ID NO: 550703 - DNA, 120 bp, Artificial Sequence
  ENSG00000168385_39 (sequence is synthesized)
gcgggctggggcgggctgtgagcggaccgcgagcgctgggcgggtccgcggcgcggtcggtcggcgcctgttctcgggctgtttggcgggactggccagcccccaaacctccaagcccat

SEQ ID NO: 550704 - DNA, 120 bp, Artificial Sequence
  ENSG00000168385_40 (sequence is synthesized)
aggtgtgagccaccgtgcctggcctaattgtcatcttaaaagcttggagctttctcttttttcaggcttctactttcttttctctacacacatcagtaacagtccttttggcccccttag

SEQ ID NO: 550705 - DNA, 120 bp, Artificial Sequence
  ENSG00000168385_41 (sequence is synthesized)
cttttggcccccttagttcattcccagcagaccagataatttagaattctgataatttattatgatgaaattgatggggctcttagacttgataaattggtttaaatcagcctttgcaag

SEQ ID NO: 550706 - DNA, 120 bp, Artificial Sequence
  ENSG00000168385_42 (sequence is synthesized)
ttagttcagagataaattagtgctaaagaacatattctgagaaaagcagaacttgtggttaacattgcaagattattatttctgttttttttttatctttgaatcctgtgggtgttcatt

SEQ ID NO: 550707 - DNA, 120 bp, Artificial Sequence
  ENSG00000168385_43 (sequence is synthesized)
actgtccaatgcaaaatcatcataccagtttttgcattttataccagtgttagcatggaacacagataagcaaaaaaaaaagtcattatttcaccactcaggaataaccactgttaatat

SEQ ID NO: 550708 - DNA, 120 bp, Artificial Sequence
  ENSG00000168385_44 (sequence is synthesized)
gttacatatattctttttcacctgtgtgtgcatttgactatacatttacaaaatgtaatcctaaaggaaatactattttgtatcttgcctttttcaattaataaattgatttttaaaatt

SEQ ID NO: 550709 - DNA, 120 bp, Artificial Sequence
  ENSG00000168385_45 (sequence is synthesized)
ccccgcacaagttgtgggccggccctcccgaggagctgcgggggacgcgccgctcgtcccatactctcgggcggtggtcggctggctctggggtgccggcggggcggtgtgggggagggg

SEQ ID NO: 550710 - DNA, 120 bp, Artificial Sequence
  ENSG00000168385_46 (sequence is synthesized)
cggccgagcccaggctcttcggcacttatcgtgggctcccccgtcccgggcggtcctagtgccggcgacagtggctccgacacgggcaggcccgggcgcgggagtggggattccggtgac

SEQ ID NO: 550711 - DNA, 120 bp, Artificial Sequence
  ENSG00000168385_47 (sequence is synthesized)
cccttgttgaccctgcgggaattcctctgcactgtcgtcggtgctgggcctcggggcgtcgagtgcggtcgaggtcgggaggtttggtgcttggagggaggatacaggtttaggcccgac

SEQ ID NO: 550712 - DNA, 120 bp, Artificial Sequence
  ENSG00000168385_48 (sequence is synthesized)
acttagagcttgtgtggccatcttgtctttctaacggtgccatttcctccctgaggcgtggaggactggccagcccccaaacctccaagcccatcggctggatgccgtggataagcgagg

SEQ ID NO: 550713 - DNA, 120 bp, Artificial Sequence
  ENSG00000168385_49 (sequence is synthesized)
gggcggggcggggcgggctggggcgggctgtgagcggaccgcgagcgctgggcgggtccgcggcgcggtcggtcggcgcctgttctcgggctgtttggcgggtgaatcaggtctaggaaa

SEQ ID NO: 550714 - DNA, 120 bp, Artificial Sequence
  ENSG00000168385_50 (sequence is synthesized)
ctaggccctgtctgcgggtaccttcggcgaggagaggcgacgaaggtctgcaccagcgaggcacggacaggcagcaggggcatacagaaactgctgtaaaagaagaagttgtgggtattt

SEQ ID NO: 550715 - DNA, 120 bp, Artificial Sequence
  ENSG00000168385_51 (sequence is synthesized)
gaggggagagcgactaggccctgtctgcgggtaccttcggcgaggagaggcgacgaaggtctgcaccaacgaagcttcacaaaagatgtctaaggtgaatcaggtctaggaaaatcgact

SEQ ID NO: 550716 - DNA, 120 bp, Artificial Sequence
  ENSG00000168385_52 (sequence is synthesized)
atacttcataaatttatagatagtgttaatgagtgattattaagtttgggattgctgtatataataaaacacctagacaatttaaagcgtgttaaatgttgactttttaaataaggaatt

SEQ ID NO: 550717 - DNA, 120 bp, Artificial Sequence
  ENSG00000168385_53 (sequence is synthesized)
ttatagagagtaatttttttctggtactctactgtaatttgagatcgcaaagccagtcatccatagactgctagtataaatgaaacacctggatttgagccgtggttggtgaccgagata

SEQ ID NO: 550718 - DNA, 120 bp, Artificial Sequence
  ENSG00000168385_54 (sequence is synthesized)
ggtcaagctacgcctgacagtggtagatacccctggctatggtgacgctatcaactgcagagattgtcacgttcctgaaaagaattggcagccctggctgggtgcgatggctcatgcctg

SEQ ID NO: 550719 - DNA, 120 bp, Artificial Sequence
  ENSG00000168385_55 (sequence is synthesized)
aggtgctctatggtatttctatgttgcactgtgtgggtttgaaatcagatacatgtaataggtgataagacgaagcttcacaaaagatgtctaagcaacagccaactcagtttataaatc

SEQ ID NO: 550720 - DNA, 120 bp, Artificial Sequence
  ENSG00000168385_56 (sequence is synthesized)
gcggcaggtcatcacactgtgcccctttctctgtattgtgtcaccctgagccacaatgttcctcctcctctatgtgttcagctcagccttcttgaccattaagcaacatggtttggtttc

SEQ ID NO: 550721 - DNA, 120 bp, Artificial Sequence
  ENSG00000168385_57 (sequence is synthesized)
ctactcaaaagttattataaaagagttgttaatttaatcaaattatgctcttttagcctttttaagaaaaagtacatttaatgatatgcacgtaaaaactttaggccaggcacggtggct

SEQ ID NO: 550722 - DNA, 120 bp, Artificial Sequence
  ENSG00000168385_58 (sequence is synthesized)
catgcctgtaatcccagcaccttgggagaccaaggcaaggtagattgcctgagcgcaggagttttgagaccatgagattacatggtgaagtcccatctctacaaaaatttaaaaaaaaaa

SEQ ID NO: 550723 - DNA, 120 bp, Artificial Sequence
  ENSG00000168385_59 (sequence is synthesized)
ggcggggcggggcgggctggggcgggctgtgagcggaccgcgagcgctgggcgggtccgcggcgcggtcggtcggcgcctgttctcgggctgtttggcggcaacagccaactcagtttat

SEQ ID NO: 550724 - DNA, 120 bp, Artificial Sequence
  ENSG00000168385_60 (sequence is synthesized)
aatccccatggtatctttggagaacctacctctgtagagaggcagtagactctgaagtcacctgtcgtaagaacgtgagctttcctcttcacatgctgcttatattccctattaagtttg

SEQ ID NO: 550725 - DNA, 120 bp, Artificial Sequence
  ENSG00000168386_0 (sequence is synthesized)
acacacacacacacacacagacgtgctcacggagcctgtgcctgcctctacttgtctgctctgcgcagatggttcctggcttttgggtcacctcatcctgcagcccagtccagttagaac

SEQ ID NO: 550726 - DNA, 120 bp, Artificial Sequence
  ENSG00000168386_1 (sequence is synthesized)
ctttcttccacagagactggcaagctgtggggtaagagttttggtaaggctgcctgtcttcagagcatgaaggacactgcccggagagggaagagggcaatatttagtgtttgggcctac

SEQ ID NO: 550727 - DNA, 120 bp, Artificial Sequence
  ENSG00000168386_2 (sequence is synthesized)
ttgttgttgggctccccactgcctctcctttgcagagctatcactggcccctggttgcaaactctcggtggctttcaagcctacaaaacaaaaactgagagggtgtccaaaaagagaaga

SEQ ID NO: 550728 - DNA, 120 bp, Artificial Sequence
  ENSG00000168386_3 (sequence is synthesized)
agaaaacgttgttgttggtcctggattccactgttggattttggtggggatgagaagaaggaattaccaggtgtgatcaacacctgcacggtacctgcacggctttaaagaatgcgttcc

SEQ ID NO: 550729 - DNA, 120 bp, Artificial Sequence
  ENSG00000168386_4 (sequence is synthesized)
agaggcagtgataccgagggctcagcccaaaagaaatttccaagacatactaaaggccacagtttccaagggcctaaaaacatgaagcatagacagcaagacaaagactcccccagtgag

SEQ ID NO: 550730 - DNA, 120 bp, Artificial Sequence
  ENSG00000168386_5 (sequence is synthesized)
tcggatgtaatacttccgtgtcccaaggcagagaagccacacagtggtaatggccaccaagcagaagacctctcaagagatgacctgttatttctcctcagcattctggagggagaactg

SEQ ID NO: 550731 - DNA, 120 bp, Artificial Sequence
  ENSG00000168386_6 (sequence is synthesized)
caggctcgagatgaggtcataggcattttaaaggctgaaaaaatggacctggctttgctggaagctcagtatgggtttgtcactccaaaaaaggtgttagaggctctccagagagatgct

SEQ ID NO: 550732 - DNA, 120 bp, Artificial Sequence
  ENSG00000168386_7 (sequence is synthesized)
tttcaagcgaaatctaccccttggcaggaggacatctatgagaaaccaatgaatgagttggacaaagttgtggaaaaacataaagaatcttacagacgaatcctgggacagcttttagtg

SEQ ID NO: 550733 - DNA, 120 bp, Artificial Sequence
  ENSG00000168386_8 (sequence is synthesized)
gcagaaaaatcccgtaggcaaaccatattggagttggaggaagaaaagagaaaacataaagaatacatggagaagagtgatgaattcatatgcctactagaacaggaatgtgaaagatta

SEQ ID NO: 550734 - DNA, 120 bp, Artificial Sequence
  ENSG00000168386_9 (sequence is synthesized)
aagaagctaattgatcaagaaatcaagtctcaggaggagaaggagcaagaaaaggagaaaagggtcaccaccctgaaagaggagctgaccaagctgaagtcttttgctttgatggtggtg

SEQ ID NO: 550735 - DNA, 120 bp, Artificial Sequence
  ENSG00000168386_10 (sequence is synthesized)
gatgaacagcaaaggctgacggcacagctcacccttcaaagacagaaaatccaagagctgaccacaaatgcaaaggaaacacataccaaactagcccttgctgaagccagagttcaggag

SEQ ID NO: 550736 - DNA, 120 bp, Artificial Sequence
  ENSG00000168386_11 (sequence is synthesized)
gaagagcagaaggcaaccagactagagaaggaactgcaaacgcagaccacaaagtttcaccaagaccaagacacaattatggcgaagctcaccaatgaggacagtcaaaatcgccagctt

SEQ ID NO: 550737 - DNA, 120 bp, Artificial Sequence
  ENSG00000168386_12 (sequence is synthesized)
caacaaaagctggcagcactcagccggcagattgatgagttagaagagacaaacaggtctttacgaaaagcagaagaggagctgcaagatataaaagaaaaaatcagtaagggagaatat

SEQ ID NO: 550738 - DNA, 120 bp, Artificial Sequence
  ENSG00000168386_13 (sequence is synthesized)
ggaaacgctggtatcatggctgaagtggaagagctcaggaaacgtgtgctagatatggaagggaaagatgaagagctcataaaaatggaggagcagtgcagagatctcaataagaggctt

SEQ ID NO: 550739 - DNA, 120 bp, Artificial Sequence
  ENSG00000168386_14 (sequence is synthesized)
gaaagggagacgttacagagtaaagactttaaactagaggttgaaaaactcagtaaaagaattatggctctggaaaagttagaagacgctttcaacaaaagcaaacaagaatgctactct

SEQ ID NO: 550740 - DNA, 120 bp, Artificial Sequence
  ENSG00000168386_15 (sequence is synthesized)
ctgaaatgcaatttagaaaaagaaaggatgaccacaaagcagttgtctcaagaactggagagtttaaaagtaaggatcaaagagctagaagccattgaaagtcggctagaaaagacagaa

SEQ ID NO: 550741 - DNA, 120 bp, Artificial Sequence
  ENSG00000168386_16 (sequence is synthesized)
aagaggatttaactaaactgaaaacattaactgtgatgtttgtagatgaacggaaaacaatgagtgaaaaattaaagaaaactgaagataaattacaagctgcttcttctcagcttcaag

SEQ ID NO: 550742 - DNA, 120 bp, Artificial Sequence
  ENSG00000168386_17 (sequence is synthesized)
tggagcaaaataaagtaacaacagttactgagaagttaattgaggaaactaaaagggcgctcaagtccaaaaccgatgtagaagaaaagatgtacagcgtaaccaaggagagagatgatt

SEQ ID NO: 550743 - DNA, 120 bp, Artificial Sequence
  ENSG00000168386_18 (sequence is synthesized)
taaaaaacaaattgaaagcggaagaagagaaaggaaatgatctcctgtcaagagttaatatgttgaaaaataggcttcaatcattggaagcaattgagaaagatttcctaaaaaacaaat

SEQ ID NO: 550744 - DNA, 120 bp, Artificial Sequence
  ENSG00000168386_19 (sequence is synthesized)
taaatcaagactctgggaaatccacaacagcattacaccaagaaaacaataagattaaggagctctctcaagaagtggaaagactgaaactgaagctaaaggacatgaaagccattgagg

SEQ ID NO: 550745 - DNA, 120 bp, Artificial Sequence
  ENSG00000168386_20 (sequence is synthesized)
atgacctcatgaaaacagaagatgaatatgagactctagaacgaaggtatgctaatgaacgagacaaagctcaatttttatctaaagagctagaacatgttaaaatggaacttgctaagt

SEQ ID NO: 550746 - DNA, 120 bp, Artificial Sequence
  ENSG00000168386_21 (sequence is synthesized)
acaagttagcagaaaagacagagaccagccatgaacaatggcttttcaaaaggcttcaagaagaagaagctaagtcagggcacctctcaagagaagtggatgcattaaaagagaaaattc

SEQ ID NO: 550747 - DNA, 120 bp, Artificial Sequence
  ENSG00000168386_22 (sequence is synthesized)
atgaatacatggcaactgaagacctaatatgtcacctccagggagatcactcagtcctgcaaaaaaaactaaatcaacaagaaaacaggaacagagatttaggaagagagattgaaaacc

SEQ ID NO: 550748 - DNA, 120 bp, Artificial Sequence
  ENSG00000168386_23 (sequence is synthesized)
tcactaaggagttagagaggtaccggcatttcagtaagagcctcaggcctagtctcaatggaagaagaatttccgatcctcaagtattttctaaagaagttcagacagaagcagtagaca

SEQ ID NO: 550749 - DNA, 120 bp, Artificial Sequence
  ENSG00000168386_24 (sequence is synthesized)
atgaaccacctgattacaagagcctcattcctctggaacgtgcagtcatcaatggtcagttatatgaggagagtgagaatcaagacgaggaccctaatgatgagggatctgtgctgtcct

SEQ ID NO: 550750 - DNA, 120 bp, Artificial Sequence
  ENSG00000168386_25 (sequence is synthesized)
tcaaatgcagccagtctactccatgtcctgttaacagaaagctatggattccctggatgaaatccaaggagggccatcttcagaatggaaaaatgcaaactaaacccaatgccaactttg

SEQ ID NO: 550751 - DNA, 120 bp, Artificial Sequence
  ENSG00000168386_26 (sequence is synthesized)
tgcaacctggagatctagtcctaagccacacacctgggcagccacttcatataaaggttactccagaccatgtacaaaacacagccactcttgaaatcacaagtccaaccacagagagtc

SEQ ID NO: 550752 - DNA, 120 bp, Artificial Sequence
  ENSG00000168386_27 (sequence is synthesized)
ctcactcttacacgagtactgcagtgataccgaactgtggcacgccaaagcaaaggataaccatcctccaaaacgcctccataacaccagtaaagtccaaaacctctaccgaagacctca

SEQ ID NO: 550753 - DNA, 120 bp, Artificial Sequence
  ENSG00000168386_28 (sequence is synthesized)
tgaatttagaacaaggcatgtccccaattaccatggcaacctttgccagagcacagaccccagagtcttgtggttctctaactccagaaaggacaatgtcccctattcaggttttggctg

SEQ ID NO: 550754 - DNA, 120 bp, Artificial Sequence
  ENSG00000168386_29 (sequence is synthesized)
tgactggttcagctagctctcctgagcagggacgctccccagaaccaacagaaatcagtgccaagcatgcgatattcagagtctccccagaccggcagtcatcatggcagtttcagcgtt

SEQ ID NO: 550755 - DNA, 120 bp, Artificial Sequence
  ENSG00000168386_30 (sequence is synthesized)
caaacagcaatagctcaagtgtgataactactgaggataataaaatccacattcacttaggaagtccttacatgcaagctgtagccagccctgtgagacctgccagcccttcagcaccac

SEQ ID NO: 550756 - DNA, 120 bp, Artificial Sequence
  ENSG00000168386_31 (sequence is synthesized)
tgcaggataaccgaactcaaggcttaattaacggggcactaaacaaaacaaccaataaagtcaccagcagtattactatcacaccaacagccacacctcttcctcgacaatcacaaatta

SEQ ID NO: 550757 - DNA, 120 bp, Artificial Sequence
  ENSG00000168386_32 (sequence is synthesized)
cagtggaaccacttcttctgcctcattgaactcaacatccttcagacttttaaggcattccaaatcccagtcttcatgttgaactgggttaagcatttattaaaaaatcgttttcttcta

SEQ ID NO: 550758 - DNA, 120 bp, Artificial Sequence
  ENSG00000168386_33 (sequence is synthesized)
atatatataactgaccacgctcaccctcatccagtccatactgatatttttgcaaggaactcaatccttttttaatcatccctccatatcccccaagactgactgaactcgtactttggg

SEQ ID NO: 550759 - DNA, 120 bp, Artificial Sequence
  ENSG00000168386_34 (sequence is synthesized)
aaggtttgtgcatgaactatacaagagtatctgaaactaactgttgcctgcatagtcatatcgagtgtgcacttactgtatatcttttcatttacatacttgtatggaaaatatttagtc

SEQ ID NO: 550760 - DNA, 120 bp, Artificial Sequence
  ENSG00000168386_35 (sequence is synthesized)
tgcacttgtataaatacatctttatgtatttcattttccataactcactttaatttgactgcaacttgtcttggtgaaatactttaacattataaaacagtaaataatttgttattttta

SEQ ID NO: 550761 - DNA, 120 bp, Artificial Sequence
  ENSG00000168386_36 (sequence is synthesized)
cttgcacatatatttttaatgtgtgagtgggtgcatgtcataattccagatggaaatttgtcaccacaaaacataatttttatttagctgatctttccaggtttctatttataatggaat

SEQ ID NO: 550762 - DNA, 120 bp, Artificial Sequence
  ENSG00000168386_37 (sequence is synthesized)
gaaaagatgaagttgggcttatgaatcaagacaaacacaggccctggtcattgtgtaattccatatagtataatttgtttgcaatctttcattccatacacctacaatacagctctaaaa

SEQ ID NO: 550763 - DNA, 120 bp, Artificial Sequence
  ENSG00000168386_38 (sequence is synthesized)
ataatgctacctacaatataaagatatactttttttccaaataaccttcaaaaatgtcaaaatatgcaacaaaaatattgtatcatatctaaaccctcaaataagctacatttaaaccaa

SEQ ID NO: 550764 - DNA, 120 bp, Artificial Sequence
  ENSG00000168386_39 (sequence is synthesized)
tcagcgccccgctcgcattgttcgggcgactctcggagcgcgcacagtcggctcgcagcgcggcactacagcggccccggcccggcccccgcccggccccggcgcaggcagttcagatta

SEQ ID NO: 550765 - DNA, 120 bp, Artificial Sequence
  ENSG00000168386_40 (sequence is synthesized)
gcattgttcgggcgactctcggagcgcgcacagtcggctcgcagcgcggcactacagcggccccggcccggcccccgcccggccccggcgcaggcagttcagatcaaggaggtatgcaag

SEQ ID NO: 550766 - DNA, 120 bp, Artificial Sequence
  ENSG00000168386_41 (sequence is synthesized)
cagagaatcccagcacggatccctaaaccgaaatctacaggcatcaccaagatttccactaaagcccccacagtgcctatggataagcctatttaccaaaatggctgtgggaagctacac

SEQ ID NO: 550767 - DNA, 120 bp, Artificial Sequence
  ENSG00000168386_42 (sequence is synthesized)
tacagaaatatgtggaaagctaaaattaccactatgaaaggccaaaggaccatctctccaggaaatggtgaagcagctttgtggacctgatgaagatcatcccccaaaaagcagcacgtc

SEQ ID NO: 550768 - DNA, 120 bp, Artificial Sequence
  ENSG00000168386_43 (sequence is synthesized)
tacaattattttacttctatatgtgtatatgcacacacaaacactcgcaggcctagacccacacccaaatctacccatttcctcatccgacatataatctaacccaaagatgaactatct

SEQ ID NO: 550769 - DNA, 120 bp, Artificial Sequence
  ENSG00000168386_44 (sequence is synthesized)
acagtcggctcgcagcgcggcactacagcggccccggcccggcccccgcccggccccggcgcaggcagttcagggaagcccaccataatgagaagagcggggccaacacccatgtcactg

SEQ ID NO: 550770 - DNA, 120 bp, Artificial Sequence
  ENSG00000168386_45 (sequence is synthesized)
tggagaagtacagaatatgcaatggaagagttgtttatctgatataagcggtaattggaaactgaaaaattcctgctctggaaaaaagatattctgctcttctgaatctaacagaggaag

SEQ ID NO: 550771 - DNA, 120 bp, Artificial Sequence
  ENSG00000168386_46 (sequence is synthesized)
catctcctaatctttcttcttcgaacaagaaaaaaaatggttgccaacagtttgaagggaaaagaagataaaagaaaacagagtctgccatcagtgggtataggagacagttaaaaaaaa

SEQ ID NO: 550772 - DNA, 120 bp, Artificial Sequence
  ENSG00000168389_0 (sequence is synthesized)
gagggggcgtgcagcagagtgcgttcctcgtctgccagccggcttggctagcgcgcggcggccgtggctaaggctgctacgaagcgagcttgggaggagcagcggcctgcggggcagagg

SEQ ID NO: 550773 - DNA, 120 bp, Artificial Sequence
  ENSG00000168389_1 (sequence is synthesized)
agcatcccgtctaccaggtcccaagcggcgtggcccgcgggtcatggccaaaggagaaggcgccgagagcggctccgcggcggggctgctacccaccagcatcctccaaagcactgaacg

SEQ ID NO: 550774 - DNA, 120 bp, Artificial Sequence
  ENSG00000168389_2 (sequence is synthesized)
cccggcccaggtgaagaaagaaccgaaaaagaagaaacaacagttgtctgtttgcaacaagctttgctatgcacttgggggagccccctaccaggtgacgggctgtgccctgggtttctt

SEQ ID NO: 550775 - DNA, 120 bp, Artificial Sequence
  ENSG00000168389_3 (sequence is synthesized)
ccttcagatctacctattggatgtggctcaggtgggccctttctctgcctccatcatcctgtttgtgggccgagcctgggatgccatcacagaccccctggtgggcctctgcatcagcaa

SEQ ID NO: 550776 - DNA, 120 bp, Artificial Sequence
  ENSG00000168389_4 (sequence is synthesized)
atccccctggacctgcctgggtcgccttatgccctggatcatcttctccacgcccctggccgtcattgcctacttcctcatctggttcgtgcccgacttcccacacggccagacctattg

SEQ ID NO: 550777 - DNA, 120 bp, Artificial Sequence
  ENSG00000168389_5 (sequence is synthesized)
gtacctgcttttctattgcctctttgaaacaatggtcacgtgtttccatgttccctactcggctctcaccatgttcatcagcaccgagcagactgagcgggattctgccaccgcctatcg

SEQ ID NO: 550778 - DNA, 120 bp, Artificial Sequence
  ENSG00000168389_6 (sequence is synthesized)
gatgactgtggaagtgctgggcacagtgctgggcacggcgatccagggacaaatcgtgggccaagcagacacgccttgtttccaggacctcaatagctctacagtagcttcacaaagtgc

SEQ ID NO: 550779 - DNA, 120 bp, Artificial Sequence
  ENSG00000168389_7 (sequence is synthesized)
caaccatacacatggcaccacctcacacagggaaacgcaaaaggcatacctgctggcagcgggggtcattgtctgtatctatataatctgtgctgtcatcctgatcctgggcgtgcggga

SEQ ID NO: 550780 - DNA, 120 bp, Artificial Sequence
  ENSG00000168389_8 (sequence is synthesized)
ctccttggctttcatgctggtggaggggaactttgtcttgttttgcacctacaccttgggcttccgcaatgaattccagaatctactcctggccatcatgctctcggccactttaaccat

SEQ ID NO: 550781 - DNA, 120 bp, Artificial Sequence
  ENSG00000168389_9 (sequence is synthesized)
tcccatctggcagtggttcttgacccggtttggcaagaagacagctgtatatgttgggatctcatcagcagtgccatttctcatcttggtggccctcatggagagtaacctcatcattac

SEQ ID NO: 550782 - DNA, 120 bp, Artificial Sequence
  ENSG00000168389_10 (sequence is synthesized)
atatgcggtagctgtggcagctggcatcagtgtggcagctgccttcttactaccctggtccatgctgcctgatgtcattgacgacttccatctgaagcagccccacttccatggaaccga

SEQ ID NO: 550783 - DNA, 120 bp, Artificial Sequence
  ENSG00000168389_11 (sequence is synthesized)
gcccatcttcttctccttctatgtcttcttcaccaagtttgcctctggagtgtcactgggcatttctaccctcagtctggactttgcagggtaccagacccgtggctgctcgcagccgga

SEQ ID NO: 550784 - DNA, 120 bp, Artificial Sequence
  ENSG00000168389_12 (sequence is synthesized)
acgtgtcaagtttacactgaacatgctcgtgaccatggctcccatagttctcatcctgctgggcctgctgctcttcaaaatgtaccccattgatgaggagaggcggcggcagaataagaa

SEQ ID NO: 550785 - DNA, 120 bp, Artificial Sequence
  ENSG00000168389_13 (sequence is synthesized)
ggccctgcaggcactgagggacgaggccagcagctctggctgctcagaaacagactccacagagctggctagcatcctctagggcccgccacgttgcccgaagccaccatgcagaaggcc

SEQ ID NO: 550786 - DNA, 120 bp, Artificial Sequence
  ENSG00000168389_14 (sequence is synthesized)
acagaagggatcaggacctgtctgccggcttgctgagcagctggactgcaggtgctaggaagggaactgaagactcaaggaggtggcccaggacacttgctgtgctcactgtggggccgg

SEQ ID NO: 550787 - DNA, 120 bp, Artificial Sequence
  ENSG00000168389_15 (sequence is synthesized)
ctgctctgtggcctcctgcctcccctctgcctgcctgtggggccaagccctggggctgccactgtgaatatgccaaggactgatcgggcctagcccggaacactaatgtagaaacctttt

SEQ ID NO: 550788 - DNA, 120 bp, Artificial Sequence
  ENSG00000168389_16 (sequence is synthesized)
tttttacagagcctaattaataacttaatgactgtgtacatagcaatgtgtgtgtatgtatatgtctgtgagctattaatgttattaattttcataaaagctggaaagcagctgcctgtt

SEQ ID NO: 550789 - DNA, 120 bp, Artificial Sequence
  ENSG00000168389_17 (sequence is synthesized)
ggtatatataacttttaaattatgtcaacttttctgtttgccaactagtatgtaagttccacaagggcaatgattttttatctgttctctagttatcctaagtaattagaatagcgccca

SEQ ID NO: 550790 - DNA, 120 bp, Artificial Sequence
  ENSG00000168389_18 (sequence is synthesized)
gcccatagctggaacttatgaggaaatgaggaaacgagcttcagataatttaaataacttcccaagactaagttttatagttagttggtggagctagaatggaatccctgaagagtggct

SEQ ID NO: 550791 - DNA, 120 bp, Artificial Sequence
  ENSG00000168389_19 (sequence is synthesized)
caaaggcctttctctttaccatggcctgtgctgccttgctatactgatgccatgaagttagtccatcctgaggtctaaccccttttgatggtgtggaactcacatggggaaggcggacat

SEQ ID NO: 550792 - DNA, 120 bp, Artificial Sequence
  ENSG00000168389_20 (sequence is synthesized)
ttgcccacctgggccttcaactccttcacttggagctggcctctccccatcatgccagcttccctgtgtgtgaatgggtgtgtgtgtgtgtgtgaatggggtgtgtgaagtgtgtatgtg

SEQ ID NO: 550793 - DNA, 120 bp, Artificial Sequence
  ENSG00000168389_21 (sequence is synthesized)
aatgggggtgtgtgtgaatggggtgtgtgtgtgtgaatgatgtgtgtgtgaatgaggtgtgtgtgaatggggtgtgtgtgtgtgtgaatgaggtgtgtgtgtgaatggggtgtgtgtgtg

SEQ ID NO: 550794 - DNA, 120 bp, Artificial Sequence
  ENSG00000168389_22 (sequence is synthesized)
aatggggtgtgtgtgtgcggttgatgactatccgtgtgagaacacgggagttggggctgctccttctctttgcctccttgcccaggcacctgaggtcttggactcctgtcctaactctca

SEQ ID NO: 550795 - DNA, 120 bp, Artificial Sequence
  ENSG00000168389_23 (sequence is synthesized)
gcccattagaggctgctgcctctggactagactcaggctctgacctcacactccatgcctaggatttcagtctggggtcccagttcccatctgccattccgggcttggtcatcagcctct

SEQ ID NO: 550796 - DNA, 120 bp, Artificial Sequence
  ENSG00000168389_24 (sequence is synthesized)
tcccagaggcccaggatgggtggatttggcaggagtatggggaaggaaggaagagcttagcttccttccctgtggggaccctgtgaggcacagcagactgggctgggcctggtcctgggc

SEQ ID NO: 550797 - DNA, 120 bp, Artificial Sequence
  ENSG00000168389_25 (sequence is synthesized)
gtgcctgtcatcttcgttgctgcccacatgatgtcatctggctgctcttgggcagggctgggagccactttggggttctgggaagggcaggaggggctctgtggctctaaagcacctccc

SEQ ID NO: 550798 - DNA, 120 bp, Artificial Sequence
  ENSG00000168389_26 (sequence is synthesized)
ggttgagttgggatgtctggtgggaacctcccagctgattcatcttcctgcacccccttccctagtcagcagtgccatttctcatcttggtggccctcatggagagtaacctcatcatta

SEQ ID NO: 550799 - DNA, 120 bp, Artificial Sequence
  ENSG00000168389_27 (sequence is synthesized)
catatgcggtagctgtggcagctggcatcagtgtggcagctgccttcttactaccctggtaggtatatacaggcccccctcctcgggtatctccagcccctagtccccagttttgaagct

SEQ ID NO: 550800 - DNA, 120 bp, Artificial Sequence
  ENSG00000168389_28 (sequence is synthesized)
ggaggtctgtcctgtacagttgtacaggtagtgagctttgcaagaacacctagtcagagtgaaaaatgggggctgtaatctggcctgggctccacttgccacgctgagcacctccaggca

SEQ ID NO: 550801 - DNA, 120 bp, Artificial Sequence
  ENSG00000168389_29 (sequence is synthesized)
gggttacttcctcttagagcaagaggccttttcttattcatgtgaaggtcccatatcctcactgagctgtgtacccatggtactgcaagcttccagagggccacctcttctcattaacac

SEQ ID NO: 550802 - DNA, 120 bp, Artificial Sequence
  ENSG00000168389_30 (sequence is synthesized)
tgactaccggggctcctgcaccagctgtcttctctgtgtagcatctaacttggcaagcatcgcatcttagttgtatccatttacagagggggaacactgaactccagaaggaacaaaaaa

SEQ ID NO: 550803 - DNA, 120 bp, Artificial Sequence
  ENSG00000168393_0 (sequence is synthesized)
gtggagacgccagcggcgggcggtggacagtcatggcggcccggcgcggggctctcatagtgctggagggcgtggaccgcgccgggaagagcacgcagagccgcaagctggtggaagcgc

SEQ ID NO: 550804 - DNA, 120 bp, Artificial Sequence
  ENSG00000168393_1 (sequence is synthesized)
tgtgcgccgcgggccaccgcgccgaactgctccggttcccggaaagatcaactgaaatcggcaaacttctgagttcctacttgcaaaagaaaagtgacgtggaggatcactcggtgcacc

SEQ ID NO: 550805 - DNA, 120 bp, Artificial Sequence
  ENSG00000168393_2 (sequence is synthesized)
tgcttttttctgcaaatcgctgggaacaagtgccgttaattaaggaaaagttgagccagggcgtgaccctcgtcgtggacagatacgcattttctggtgtggccttcaccggtgccaagg

SEQ ID NO: 550806 - DNA, 120 bp, Artificial Sequence
  ENSG00000168393_3 (sequence is synthesized)
agaatttttccctagattggtgtaaacagccagacgtgggccttcccaaacccgacctggtcctgttcctccagttacagctggcggatgctgccaagcggggagcgtttggccatgagc

SEQ ID NO: 550807 - DNA, 120 bp, Artificial Sequence
  ENSG00000168393_4 (sequence is synthesized)
ttccaaaagcatcgaagctgtccatgaggacatccgcgtgctctctgaggacgccatccgcactgccacagagaagccgctgggggagctatggaagtgacccaaggctgcccactggag

SEQ ID NO: 550808 - DNA, 120 bp, Artificial Sequence
  ENSG00000168393_5 (sequence is synthesized)
acgcctctccctgcagtcccccgagaggtgggagactcgcggaaggccccgtccccagcagagtccagaccccacaacttcaggagctctttcccggcagcagagatctgcaggctgcct

SEQ ID NO: 550809 - DNA, 120 bp, Artificial Sequence
  ENSG00000168393_6 (sequence is synthesized)
cttctgccccggagctggggtgcactggggacccccgtggtggggaccttggcagtgtggacatgagcagagcgatggagcagtctcctgccctctcccctgtcctgatggcactctgtt

SEQ ID NO: 550810 - DNA, 120 bp, Artificial Sequence
  ENSG00000168393_7 (sequence is synthesized)
gtattttcttactgaagttcagtgataactctgagcagtttcattgtgatcactgtaaatggtaatcagttggaattctcctaaatgtcttccagacactagtaaaaaacgacctgaaaa

SEQ ID NO: 550811 - DNA, 82 bp, Artificial Sequence
  ENSG00000168393_8 (sequence is synthesized)
cgacctcccgggcaactataggcacgttaacacacctggctaatttttgtaaaattttttgtagcgatggagtctcactatt

SEQ ID NO: 550812 - DNA, 120 bp, Artificial Sequence
  ENSG00000168393_9 (sequence is synthesized)
aaagatcaactgaaatcggcaaacttctgagttcctacttgcaaaagaaaagtgacgtggaggatcactcggtgcacctgcttttttctgcaaatcgctgggaacaagttttcattcttg

SEQ ID NO: 550813 - DNA, 89 bp, Artificial Sequence
  ENSG00000168393_10 (sequence is synthesized)
cttttttctgcaaatcgctgggaacaagttttcattcttgtcgcccagactggagtgcaatggggcgatcttggctcactgcaacctac

SEQ ID NO: 550814 - DNA, 120 bp, Artificial Sequence
  ENSG00000168393_11 (sequence is synthesized)
attagaggcatgagccaccctgcctggccttatttttttttaggagaaatgtcttgctctgttgcccaggctggaatgttgtggcatgatcacagcttactgcagccttaaactcctggg

SEQ ID NO: 550815 - DNA, 120 bp, Artificial Sequence
  ENSG00000168393_12 (sequence is synthesized)
tcggtcccaccgcgcgtcgtcctcgccccggccccggccaatcccttcgaatttggccgaggccgggaaatactagctaatcacggcgcgcgctgttgacgccggccaatgggagctccg

SEQ ID NO: 550816 - DNA, 120 bp, Artificial Sequence
  ENSG00000168393_13 (sequence is synthesized)
aaaaccattgcacactgctccctctgcccttgccactttccttcctcctgagattcagtgaacgcagcactcgattctgaatgacagtgacagtagtgctgggcctgatgttcttctgtt

SEQ ID NO: 550817 - DNA, 120 bp, Artificial Sequence
  ENSG00000168393_14 (sequence is synthesized)
ctaatgaatgctgtttcgtcctcctgctccccacaccccataactaatagacttcagtttttcgggtttttttagacggagttccgctctgtcgccaggcagaggtgtgatctcggctca

SEQ ID NO: 550818 - DNA, 90 bp, Artificial Sequence
  ENSG00000168393_15 (sequence is synthesized)
ccatgttggccaggatggtctctcttgaccttgtgatccactgcaggtgtgagccaccgtacctggcccttttttttttatttttaagac

SEQ ID NO: 550819 - DNA, 86 bp, Artificial Sequence
  ENSG00000168393_16 (sequence is synthesized)
cctcggcctcccaaagttctgggattacgcaggtgtgagccaccgtacctggcccttttttttttatttttaagacaaggtaccga

SEQ ID NO: 550820 - DNA, 120 bp, Artificial Sequence
  ENSG00000168394_0 (sequence is synthesized)
gagaagggtgtgcgtgatggagaaaattgggcaccagggctgctcccgagattctcagatctgatttccacgcttgctaccaaaatagtctgggcaggccacttttggaagtaggcgtta

SEQ ID NO: 550821 - DNA, 120 bp, Artificial Sequence
  ENSG00000168394_1 (sequence is synthesized)
tctagtgagcaggcggccgctttcgatttcgctttcccctaaatggctgagcttctcgccagcgcaggatcagcctgttcctgggactttccgagagccccgccctcgttccctccccca

SEQ ID NO: 550822 - DNA, 120 bp, Artificial Sequence
  ENSG00000168394_2 (sequence is synthesized)
gccgccagtaggggaggactcggcggtacccggagcttcaggccccaccggggcgcggagagtcccaggcccggccgggaccgggacggcgtccgagtgccaatggctagctctaggtgt

SEQ ID NO: 550823 - DNA, 120 bp, Artificial Sequence
  ENSG00000168394_3 (sequence is synthesized)
cccgctccccgcgggtgccgctgcctccccggagcttctctcgcatggctggggacagtactgctacttctcgccgactgggtgctgctccggaccgcgctgccccgcatattctccctg

SEQ ID NO: 550824 - DNA, 120 bp, Artificial Sequence
  ENSG00000168394_4 (sequence is synthesized)
ctggtgcccaccgcgctgccactgctccgggtctgggcggtgggcctgagccgctgggccgtgctctggctgggggcctgcggggtcctcagggcaacggttggctccaagagcgaaaac

SEQ ID NO: 550825 - DNA, 120 bp, Artificial Sequence
  ENSG00000168394_5 (sequence is synthesized)
gcaggtgcccagggctggctggctgctttgaagccattagctgcggcactgggcttggccctgccgggacttgccttgttccgagagctgatctcatggggagcccccgggtccgcggat

SEQ ID NO: 550826 - DNA, 120 bp, Artificial Sequence
  ENSG00000168394_6 (sequence is synthesized)
agcaccaggctactgcactggggaagtcaccctaccgccttcgttgtcagttatgcagcggcactgcccgcagcagccctgtggcacaaactcgggagcctctgggtgcccggcggtcag

SEQ ID NO: 550827 - DNA, 120 bp, Artificial Sequence
  ENSG00000168394_7 (sequence is synthesized)
ggcggctctggaaaccctgtgcgtcggcttctaggctgcctgggctcggagacgcgccgcctctcgctgttcctggtcctggtggtcctctcctctcttggggagatggccattccattc

SEQ ID NO: 550828 - DNA, 120 bp, Artificial Sequence
  ENSG00000168394_8 (sequence is synthesized)
tttacgggccgcctcactgactggattctacaagatggctcagccgataccttcactcgaaacttaactctcatgtccattctcaccatagccagtgcagtgctggagttcgtgggtgac

SEQ ID NO: 550829 - DNA, 120 bp, Artificial Sequence
  ENSG00000168394_9 (sequence is synthesized)
gggatctataacaacaccatgggccacgtgcacagccacttgcagggagaggtgtttggggctgtcctgcgccaggagacggagtttttccaacagaaccagacaggtaacatcatgtct

SEQ ID NO: 550830 - DNA, 120 bp, Artificial Sequence
  ENSG00000168394_10 (sequence is synthesized)
cgggtaacagaggacacgtccaccctgagtgattctctgagtgagaatctgagcttatttctgtggtacctggtgcgaggcctatgtctcttggggatcatgctctggggatcagtgtcc

SEQ ID NO: 550831 - DNA, 120 bp, Artificial Sequence
  ENSG00000168394_11 (sequence is synthesized)
ctcaccatggtcaccctgatcaccctgcctctgcttttccttctgcccaagaaggtgggaaaatggtaccagttgctggaagtgcaggtgcgggaatctctggcaaagtccagccaggtg

SEQ ID NO: 550832 - DNA, 120 bp, Artificial Sequence
  ENSG00000168394_12 (sequence is synthesized)
agctgcaagaaataaagacactcaaccagaaggaggctgtggcctatgcagtcaactcctggaccactagtatttcaggtatgctgctgaaagtgggaatcctctacattggtgggcagc

SEQ ID NO: 550833 - DNA, 120 bp, Artificial Sequence
  ENSG00000168394_13 (sequence is synthesized)
tggtgaccagtggggctgtaagcagtgggaaccttgtcacatttgttctctaccagatgcagttcacccaggctgtggaggtactgctctccatctaccccagagtacagaaggctgtgg

SEQ ID NO: 550834 - DNA, 120 bp, Artificial Sequence
  ENSG00000168394_14 (sequence is synthesized)
gctcctcagagaaaatatttgagtacctggaccgcacccctcgctgcccacccagtggtctgttgactcccttacacttggagggccttgtccagttccaagatgtctcctttgcctacc

SEQ ID NO: 550835 - DNA, 120 bp, Artificial Sequence
  ENSG00000168394_15 (sequence is synthesized)
caaaccgcccagatgtcttagtgctacaggggctgacattcaccctacgccctggcgaggtgacggcgctggtgggacccaatgggtctgggaagagcacagtggctgccctgctgcaga

SEQ ID NO: 550836 - DNA, 120 bp, Artificial Sequence
  ENSG00000168394_16 (sequence is synthesized)
atctgtaccagcccaccgggggacagctgctgttggatgggaagccccttccccaatatgagcaccgctacctgcacaggcaggtggctgcagtgggacaagagccacaggtatttggaa

SEQ ID NO: 550837 - DNA, 120 bp, Artificial Sequence
  ENSG00000168394_17 (sequence is synthesized)
gaagtcttcaagaaaatattgcctatggcctgacccagaagccaactatggaggaaatcacagctgctgcagtaaagtctggggcccatagtttcatctctggactccctcagggctatg

SEQ ID NO: 550838 - DNA, 120 bp, Artificial Sequence
  ENSG00000168394_18 (sequence is synthesized)
acacagaggtagacgaggctgggagccagctgtcagggggtcagcgacaggcagtggcgttggcccgagcattgatccggaaaccgtgtgtacttatcctggatgatgccaccagtgccc

SEQ ID NO: 550839 - DNA, 120 bp, Artificial Sequence
  ENSG00000168394_19 (sequence is synthesized)
tggatgcaaacagccagttacaggtggagcagctcctgtacgaaagccctgagcggtactcccgctcagtgcttctcatcacccagcacctcagcctggtggagcaggctgaccacatcc

SEQ ID NO: 550840 - DNA, 120 bp, Artificial Sequence
  ENSG00000168394_20 (sequence is synthesized)
tctttctggaaggaggcgctatccgggaggggggaacccaccagcagctcatggagaaaaaggggtgctactgggccatggtgcaggctcctgcagatgctccagaatgaaagccttctc

SEQ ID NO: 550841 - DNA, 120 bp, Artificial Sequence
  ENSG00000168394_21 (sequence is synthesized)
agacctgcgcactccatctccctcccttttcttctctctgtggtggagaaccacagctgcagagtaggcagctgcctccaggatgagttacttgaaatttgccttgagtgtgttacctcc

SEQ ID NO: 550842 - DNA, 120 bp, Artificial Sequence
  ENSG00000168394_22 (sequence is synthesized)
tttccaagctcctcgtgataatgcagacttcctggagtacaaacacaggatttgtaattccttactgtaacggagtttagagccagggctgatgctttggtgtggccagcactctgaaac

SEQ ID NO: 550843 - DNA, 120 bp, Artificial Sequence
  ENSG00000168394_23 (sequence is synthesized)
tgagaaatgttcagaatgtacggaaagatgatcagctattttcaacataactgaaggcatatgctggcccataaacaccctgtaggttcttgatatttataataaaattggtgttttgta

SEQ ID NO: 550844 - DNA, 120 bp, Artificial Sequence
  ENSG00000168394_24 (sequence is synthesized)
gctctggggccgaagggcggggcatcctcatctctaacaggaggcttttctacttcatgatctccagccttcctaataaaatcctgaaagttctggtagagcaaccacagggtagtgagt

SEQ ID NO: 550845 - DNA, 120 bp, Artificial Sequence
  ENSG00000168394_25 (sequence is synthesized)
tgcatgtgggagggtaggagtttctatatttccctgtttttcttctggggtaagacatcatgctatgtaacaaggcaatgacactctcaaggttagaggccttggtagcctcttatcgtg

SEQ ID NO: 550846 - DNA, 120 bp, Artificial Sequence
  ENSG00000168394_26 (sequence is synthesized)
agttcctccttactcatggacatcaatttgaagttgtaagatcatgctcctatggcttcttcatcctgacatcctcaggattctgttcatcttcccagaatctcccctatccagctacaa

SEQ ID NO: 550847 - DNA, 120 bp, Artificial Sequence
  ENSG00000168394_27 (sequence is synthesized)
ttaaagatgctaggtggcttcctttcagtatggtacataaaatccacccaaccatgtggattggagagatgcgtgtcttccagtcctagggccttcctttgcctctcaggggaagtgcag

SEQ ID NO: 550848 - DNA, 120 bp, Artificial Sequence
  ENSG00000168394_28 (sequence is synthesized)
ggcgccataaattcttgcacctgggactgcttcatgctggtaccttgtagatttgttagtgagagtgatgggaatagtggaagccagggatgagggacatctgtgatgcactggaaagag

SEQ ID NO: 550849 - DNA, 120 bp, Artificial Sequence
  ENSG00000168394_29 (sequence is synthesized)
agctacgccagtgatccgaagatcctggcttgatgatgcaatttacttgtcttgtgatcatgacaacaaatttaccttctctgagactgtttcctctttatttatttatttgtttgtttg

SEQ ID NO: 550850 - DNA, 88 bp, Artificial Sequence
  ENSG00000168394_30 (sequence is synthesized)
tgcgcccgactggttgtttcctcatttttcaaaaatggagtgatataaccttctttataaggctcttcatgtattagctgacatcaca

SEQ ID NO: 550851 - DNA, 120 bp, Artificial Sequence
  ENSG00000168394_31 (sequence is synthesized)
ccttctttataaggctcttcatgtattagctgacatcacatgaatgaaagccttttgtgaagagtaaaatgctccccagacaaggtgatagtggtgatggtggtgaagataactgtgact

SEQ ID NO: 550852 - DNA, 120 bp, Artificial Sequence
  ENSG00000168394_32 (sequence is synthesized)
tgcatgatgtgcattgagtcagactccatggggtctctggttcattctcctgtctgcctattgagcctgccgatgtcacttaggagacagggacttgatatttccttcaggttaatgact

SEQ ID NO: 550853 - DNA, 120 bp, Artificial Sequence
  ENSG00000168394_33 (sequence is synthesized)
cttccattctttacccttcttgcttcacataatgctggcaagcagactacctcactttcactattcttacctccctctaggtactgctctccatctaccccagagtacagaaggctgtgg

SEQ ID NO: 550854 - DNA, 120 bp, Artificial Sequence
  ENSG00000168395_0 (sequence is synthesized)
gaccccgagcgcggccgcggacgaagatggcgaccgccatgtacttggagcactatctggacagtatcgagaaccttccctgcgaacttcagaggaacttccagctgatgcgagagctgg

SEQ ID NO: 550855 - DNA, 120 bp, Artificial Sequence
  ENSG00000168395_1 (sequence is synthesized)
accagaggacggaagataagaaagcagagattgacatcctggctgcagagtacatctccacggtgaagacgctgtctccagaccagcgcgtggagcgcctgcagaagatccagaacgcct

SEQ ID NO: 550856 - DNA, 120 bp, Artificial Sequence
  ENSG00000168395_2 (sequence is synthesized)
acagcaagtgcaaggaatacagtgacgacaaagtgcagctggccatgcagacctacgagatggtggataaacacattcgaaggcttgatgcagacctggcgcgctttgaagcagatctga

SEQ ID NO: 550857 - DNA, 120 bp, Artificial Sequence
  ENSG00000168395_3 (sequence is synthesized)
aggacaagatggagggcagtgattttgaaagctccggagggcgagggttaaaaaaaggccggggtcagaaagaaaaaagagggtcccggggccgaggcaggaggacatcagaggaagaca

SEQ ID NO: 550858 - DNA, 120 bp, Artificial Sequence
  ENSG00000168395_4 (sequence is synthesized)
caccaaagaaaaagaagcacaaaggagggtctgagttcactgacaccatcctgtccgtgcacccctctgatgtgctggacatgcccgtggacccaaacgaacccacgtactgcctgtgcc

SEQ ID NO: 550859 - DNA, 120 bp, Artificial Sequence
  ENSG00000168395_5 (sequence is synthesized)
accaggtctcctatggggagatgattggctgtgacaatccagactgtccaattgagtggtttcactttgcctgcgtggaccttaccacgaaacccaaaggaaaatggttctgtccacggt

SEQ ID NO: 550860 - DNA, 120 bp, Artificial Sequence
  ENSG00000168395_6 (sequence is synthesized)
gtgtccaggaaaagaggaagaagaagtaggaggagctgtgtgcccggatccgaggagcaagttaatctgtcccttcattcgtgtcgcaatatttcccttccttttaaaactaccttgttc

SEQ ID NO: 550861 - DNA, 120 bp, Artificial Sequence
  ENSG00000168395_7 (sequence is synthesized)
ggttgatacttagtaactccgtggccagttgaagcgctggatgtttcctagaacaagaaccaccaaagcctgttcgcacagaagggcgaccttgcagggactcgccgccgcgacctcagt

SEQ ID NO: 550862 - DNA, 120 bp, Artificial Sequence
  ENSG00000168395_8 (sequence is synthesized)
gtggcttttacaggactccccccgagcatcagcagggaccccggcggacgtgggcgggcgcgcgtgagctcgggctgcccggccgggcgtgcgggcggggacatggtaacctggtccacg

SEQ ID NO: 550863 - DNA, 120 bp, Artificial Sequence
  ENSG00000168395_9 (sequence is synthesized)
gagggcggccgccaccctcgcgtagctttcctgtggttttccaggactgtccggtacagcccgggctccgcgtgccccgcccgctggagcacctgccaccgaggcgcgcgtggggccact

SEQ ID NO: 550864 - DNA, 120 bp, Artificial Sequence
  ENSG00000168395_10 (sequence is synthesized)
gctgccctcctcacactcggctccgcgccgcctccggccaccgtgcgctcccgcgtggggcgcctcggatgggcccgggagggctgggggctcttccctggaggaagcggcctccgcttc

SEQ ID NO: 550865 - DNA, 120 bp, Artificial Sequence
  ENSG00000168395_11 (sequence is synthesized)
ggcctccgcttcgctggcgccgcctttttagcttggacttcagtcctccctcggggactcacctccggagtaaacggctcttcattagcttggagtggccgcaggtcccgtgaccagcac

SEQ ID NO: 550866 - DNA, 120 bp, Artificial Sequence
  ENSG00000168395_12 (sequence is synthesized)
ccgcgagaccctgtgcgacagctgggctgatgctccgtttctctgggaattggtgattttttactgtgaagatgaaattaccctaatagcatgaagatcgtgggtctgtgtgtccgtgaa

SEQ ID NO: 550867 - DNA, 120 bp, Artificial Sequence
  ENSG00000168395_13 (sequence is synthesized)
gtgagtcccgtctgccaggagctgacgaaccacgaatgcttctgcctgtgctgtgcattcccaggcccgcagctcccggtcgaggggactccgatgtgaatttgttgtgaatttgttgtg

SEQ ID NO: 550868 - DNA, 120 bp, Artificial Sequence
  ENSG00000168395_14 (sequence is synthesized)
ccacaatagcagttctggaatgaagctaggaaactcgagtgtgctttttgtttaatgagcgttcaccaagctgagccggagccatcctttcggtggtagttggggaaggctatgcagatt

SEQ ID NO: 550869 - DNA, 120 bp, Artificial Sequence
  ENSG00000168395_15 (sequence is synthesized)
tgctctgttgtgacgcgttggtgacggtgcccagcctgcggttccccacagcatcgcaggcgctcggaaatcctctcccgtgcctttagaggaaggagaggattgctgaggaatgcaggg

SEQ ID NO: 550870 - DNA, 120 bp, Artificial Sequence
  ENSG00000168395_16 (sequence is synthesized)
acgcctgtttctgtcctcacaccacagaaagaaacctgagggaaaactgagacgtgaggttcctgatttaagaagcctgggtttcttcatggtggggggccatttggaatgacagcctca

SEQ ID NO: 550871 - DNA, 120 bp, Artificial Sequence
  ENSG00000168395_17 (sequence is synthesized)
cttccttctgatggctacatctgtatcttttcctcctgtgtttaatgtttcactagggagaggaaataaagcagaaggaacgtgtgaagctctgtgtctcagacggggccctcccgtcga

SEQ ID NO: 550872 - DNA, 120 bp, Artificial Sequence
  ENSG00000168395_18 (sequence is synthesized)
gaagctggtagtcagtgagtgagaacaagagaacaagaacaccctgaacagtcctggttgggatggtgtccacattcatgttctgcggttcttgaacacacggatgcctctgggccacct

SEQ ID NO: 550873 - DNA, 120 bp, Artificial Sequence
  ENSG00000168395_19 (sequence is synthesized)
gtccttttccgagggtgtgggtgggagtggatcctccgggcgcaggtgccaggcaggtgcaggcgggcggtcggccactgctgctgctcgtccctgccagtgtctgggcctgaaggggct

SEQ ID NO: 550874 - DNA, 120 bp, Artificial Sequence
  ENSG00000168395_20 (sequence is synthesized)
ccctccaagcggtgccttcctgcggcttagaagggaaagcgccagagagggcaggctacagtgcttcacacccttcgccacggctgtgaaactggagatgggtgggttttgtatgttaat

SEQ ID NO: 550875 - DNA, 74 bp, Artificial Sequence
  ENSG00000168395_21 (sequence is synthesized)
ttgtatttttgttgggtcaaatgatccgcctgcgtcggcttcccagagtgctgggattacaggtgtcagccact

SEQ ID NO: 550876 - DNA, 90 bp, Artificial Sequence
  ENSG00000168395_22 (sequence is synthesized)
ccaggctcagctgggagatgaattttcatttaatgacttaactttttgttagcacaggttttgtgtgtgtgtgtgtgtgtgtgttttgtt

SEQ ID NO: 550877 - DNA, 62 bp, Artificial Sequence
  ENSG00000168395_23 (sequence is synthesized)
gctggaattgccttagcctcccgagcagctgggattataggcgtccaccaccacgcccagct

SEQ ID NO: 550878 - DNA, 120 bp, Artificial Sequence
  ENSG00000168395_24 (sequence is synthesized)
tgacaggcatgagccaccgcacccggccaacacagatgtttattgatcgtggaggatacattgtggaaaatgtttttctctcttttaccatttttgggaagagggataggtaagtgcagg

SEQ ID NO: 550879 - DNA, 120 bp, Artificial Sequence
  ENSG00000168395_25 (sequence is synthesized)
tttgggaagagggataggtaagtgcagggagtttgtgctgaaacagcgcctggcaatttttcagaaatgaatttgatattgcgctccacctttgagctgttcacacctgtggctacccct

SEQ ID NO: 550880 - DNA, 120 bp, Artificial Sequence
  ENSG00000168395_26 (sequence is synthesized)
ggaaagcgctggggttgttgatgcttttggctgcccggcttcctgaggtctcgctgctttttggggaaagatgactggcttccctgtgggacgcttttgtctgacacgtgatgatgtggt

SEQ ID NO: 550881 - DNA, 120 bp, Artificial Sequence
  ENSG00000168395_27 (sequence is synthesized)
cctgcctgccactgtgcaccatcccaggtattgaattttgaccttttcttttcaagtttctgtgcttagtgtttttaatgtttacttttgccacttacaataatatcaccaaaataatat

SEQ ID NO: 550882 - DNA, 120 bp, Artificial Sequence
  ENSG00000168395_28 (sequence is synthesized)
gcatagagttttggaagaaacatagaaaacatgagcagaatgagacaattccttgggctgtagtttggacccaactgaatcctgagtgctctgtggctgacgctgtctacccgtgggaga

SEQ ID NO: 550883 - DNA, 120 bp, Artificial Sequence
  ENSG00000168395_29 (sequence is synthesized)
gacacactcaggagtggccgtttggccagaaaagaaggtcatggcccctggcctggcccccgccctgcagggacacagaagccacaccatttgcaccatccacgccttgctccagaaggc

SEQ ID NO: 550884 - DNA, 120 bp, Artificial Sequence
  ENSG00000168395_30 (sequence is synthesized)
ctggccgccttctccctgggggtgattcaaggatttggtctcggaccagacccccctccacagctgcccggccccagacccatctcttggattgagggtgtgtgggctggaaccagtggg

SEQ ID NO: 550885 - DNA, 120 bp, Artificial Sequence
  ENSG00000168395_31 (sequence is synthesized)
tcactgtggcagcttcatctgagccgaaggtgtgggtcctctgtggctgtgcgattgacctcgatgggaaggagcgttctacccattttccttgttttcagtgctgcggtatcagtcagt

SEQ ID NO: 550886 - DNA, 120 bp, Artificial Sequence
  ENSG00000168395_32 (sequence is synthesized)
gatctgaggaaatcctgtaggggaaggcaggctgcagtgaaaacaggagctggtgaaaccgagccctctgcatctgcgaatgtgccctaggtgctgctgctggggacatggatgccaagc

SEQ ID NO: 550887 - DNA, 120 bp, Artificial Sequence
  ENSG00000168395_33 (sequence is synthesized)
ggaggcctgcgtggcctcctgagcagcagctgaccgcccgtctcatgctggacgggacccctgggcgggtggacatgagaccactgttggccagggacgccgtgcggaggcctacgtggc

SEQ ID NO: 550888 - DNA, 120 bp, Artificial Sequence
  ENSG00000168395_34 (sequence is synthesized)
tgcctgagcagcagctgaccgcccgtctcactgttggccagggctttgtggcgtgggtgttttccagtctgcctggagcagcgagaagcagctgtgcagactggtggcggtgggagggtt

SEQ ID NO: 550889 - DNA, 120 bp, Artificial Sequence
  ENSG00000168395_35 (sequence is synthesized)
tgctgggactgatggggacaccggccagcttgtctggtgtccagcagccctgccggacttggcctcctgtcctgtcgttgggagccctggctggggctgctttgagcaatgacgctggcc

SEQ ID NO: 550890 - DNA, 120 bp, Artificial Sequence
  ENSG00000168395_36 (sequence is synthesized)
cagagcagcttcccacatgaccccagagccgagggtctgccctgtcctaggttaggtcttcatggtttagagtaaaaccgtgagggatgttaattatgggcattgaagacttaaggtttt

SEQ ID NO: 550891 - DNA, 120 bp, Artificial Sequence
  ENSG00000168395_37 (sequence is synthesized)
cttaaatttttagtgagcagtgattggccttcaatacttgtgctgagaggaattttaagccaggggaagtgtaagaaaatgttcccattcaggagagattgtgttggagtttctttcttc

SEQ ID NO: 550892 - DNA, 120 bp, Artificial Sequence
  ENSG00000168395_38 (sequence is synthesized)
ctctgtatgtattttgtggtgtccacctttaaccacgtttcatccaaaacgatgatgcagctttaacatgaatgttacatttttattttcaaggaattattatctatgttccctttgtaa

SEQ ID NO: 550893 - DNA, 120 bp, Artificial Sequence
  ENSG00000168395_39 (sequence is synthesized)
ggaattattatctatgttccctttgtaaaggaaagataatgttgtaaatctttttattagataatgtaaagatgtatatcagtatttttggatcatgttatagattatggatatattgtt

SEQ ID NO: 550894 - DNA, 120 bp, Artificial Sequence
  ENSG00000168395_40 (sequence is synthesized)
tattactgttaactatggagttttgaagagttttgtcacggtaaatcattaaagtatgatcactaggaaggccggggtcagaaagaaaaaagagggtcccggggccgaggcaggaggaca

SEQ ID NO: 550895 - DNA, 83 bp, Artificial Sequence
  ENSG00000168395_41 (sequence is synthesized)
gcgtggaccttaccacgaaacccaaaggaaaatgatttcatttaaataaaaacctgtagtctgggcaacatcgggagacccca

SEQ ID NO: 550896 - DNA, 70 bp, Artificial Sequence
  ENSG00000168395_42 (sequence is synthesized)
gtgcgtgcctgtggtcccaactacctgggaggcggaggcgggaggatggcttgagcctggaagtccgagg

SEQ ID NO: 550897 - DNA, 80 bp, Artificial Sequence
  ENSG00000168395_43 (sequence is synthesized)
ggcgcgggctggacggccggagacgcggggtcagggcgcggacgaggggagcgcagggtcggaggggctcccggacgctg

SEQ ID NO: 550898 - DNA, 120 bp, Artificial Sequence
  ENSG00000168395_44 (sequence is synthesized)
agcgggcccgactctcagggccctgcggtgcccgctgccagcgtgagggctccggtcacgcggcgcgcgagacgaacgagcgagatgcttcccgaagcgcggggcccagtgcaggggctc

SEQ ID NO: 550899 - DNA, 120 bp, Artificial Sequence
  ENSG00000168395_45 (sequence is synthesized)
agccggggctcctcccaaagctcacctggagcccagcacgactgcgttctggaaacgctgtgtttgacagcaggggcaggatggggggctgtgtagacgctggccacgtggcaattgtag

SEQ ID NO: 550900 - DNA, 120 bp, Artificial Sequence
  ENSG00000168395_46 (sequence is synthesized)
gtaggagaaccatgggatcgataaatgttcactgttgtccctgaagcgcaaaactgcagggctctggaaagtccgtgtgtgtgtttttgttgtttttgtttgtttgagacagagtctcgc

SEQ ID NO: 550901 - DNA, 120 bp, Artificial Sequence
  ENSG00000168395_47 (sequence is synthesized)
tgagccaccgcgcctggccgaaaagtccgttttaaaagatgatgtatacaaattatagcacggagagggaacgggcaagttgtttcctctttccatgcctccaactcctctgaaatgtgg

SEQ ID NO: 550902 - DNA, 120 bp, Artificial Sequence
  ENSG00000168395_48 (sequence is synthesized)
gtcatgatgataataggaaaaactgtctctgccatagagaggtggaaaaagtcccgcgaagtgtccccggtatctagaaagcgctcagtagtgtttgctgttatcttagggatatcaggc

SEQ ID NO: 550903 - DNA, 120 bp, Artificial Sequence
  ENSG00000168395_49 (sequence is synthesized)
tgcctggacatttctcagaggatgaaggggattgtagtaaggaagaccaccttccagaggatgaaggggattgtagtaaggaagaccaccttccagaggatgaaggggattgtaggaagg

SEQ ID NO: 550904 - DNA, 120 bp, Artificial Sequence
  ENSG00000168395_50 (sequence is synthesized)
aagaccaccttccagaggatgaaggggattgtaggaaggaagaccaccttcccggggctgggcaaggctgcggtactgtctctcatcaggtccaggaggactcagcaggctgatgcagag

SEQ ID NO: 550905 - DNA, 120 bp, Artificial Sequence
  ENSG00000168395_51 (sequence is synthesized)
ggacacagcgcatccgccttggtggatgcatggctttcctggctcccctgggacgggggaggagggtgaagatggagggaatctggctggctgggccttgtgtactggggggtggagggc

SEQ ID NO: 550906 - DNA, 120 bp, Artificial Sequence
  ENSG00000168395_52 (sequence is synthesized)
ccatttgactgcaggaattgctcaagcacataagcaccttgaagtgtgttactaagatacaagaaacaggtttgcttttgcctattccagcatggtgtacctctcttaggatacctttta

SEQ ID NO: 550907 - DNA, 120 bp, Artificial Sequence
  ENSG00000168395_53 (sequence is synthesized)
gcacaggtagcagaataccagccagcctcctgtggctcacagcattaagatatttaatcatctgacattacatgaagtccagtgttaggcaggcaggagctgctcccgtgactcagtgac

SEQ ID NO: 550908 - DNA, 120 bp, Artificial Sequence
  ENSG00000168395_54 (sequence is synthesized)
atcaggttggtccacatcctagcagttctcttggtgttcctgcgtgatcaaaggatgactgccacaccccagcctgctgacctcagccctggcgtgggcataggagggtctgcgtggctg

SEQ ID NO: 550909 - DNA, 120 bp, Artificial Sequence
  ENSG00000168395_55 (sequence is synthesized)
agcatccagtgtccttcgtactgccactgacagcctcaggcctgatttccagcactgtctgtccaggagcaatgggagcaagagtcactccacgagactctggaggcctgataggtatcg

SEQ ID NO: 550910 - DNA, 120 bp, Artificial Sequence
  ENSG00000168395_56 (sequence is synthesized)
gaacctgaaggccctgtcccgaccgtgccttttctgcgtgaaagtgggactcctcctggtctcttcctcacccagtgctgtttctcaaggtggcagtgctgctcctgtcccattgcaaga

SEQ ID NO: 550911 - DNA, 120 bp, Artificial Sequence
  ENSG00000168395_57 (sequence is synthesized)
cgtcgagacaggctggtaaggccagctctgaagctgggctctgacgtccaaggcgccaaggaggccccttccagagggacaggaggatggtgcaggtgggcagacgggtcatcctgagga

SEQ ID NO: 550912 - DNA, 120 bp, Artificial Sequence
  ENSG00000168395_58 (sequence is synthesized)
ccagtcggttggacccaaagcctggcctgccggggcgggagtgtgcactcgggtgcctccaagggcatcatcctgggtgtgtgcaggagcccgcctgcccctgggctctggagttctgtg

SEQ ID NO: 550913 - DNA, 120 bp, Artificial Sequence
  ENSG00000168395_59 (sequence is synthesized)
gtgcgcgtccctgacccatcagcacagtgggtattcacgcccctcgtggtcacgctgtggtgccaggccgctctgcctcaaggcaggtcctgttccctgctggggacccaggcgcacgca

SEQ ID NO: 550914 - DNA, 120 bp, Artificial Sequence
  ENSG00000168395_60 (sequence is synthesized)
ccatcctgtccctgtggactgccctcttcaggcctgttccccacgtgcccggggctcttcctggaatgcagtgttcctagactgcacagatgctccgtgtctcgtctgagatcccgtgac

SEQ ID NO: 550915 - DNA, 120 bp, Artificial Sequence
  ENSG00000168395_61 (sequence is synthesized)
ctgaggctgccccctgcactgttgctgccctgtggccttgctctggcgaggcagaacctgtgtgtgtggatgaagggcagtgtcacctgtagcacctggaatcccggggcttggacaggc

SEQ ID NO: 550916 - DNA, 120 bp, Artificial Sequence
  ENSG00000168395_62 (sequence is synthesized)
agccagccccctgctaggagccacgtggagtgctgggaagccatcggggccgggcgcggaagggctcgctggcaccgtctggcgaggggtgcctgccacaccctggggagttagcacaga

SEQ ID NO: 550917 - DNA, 120 bp, Artificial Sequence
  ENSG00000168395_63 (sequence is synthesized)
gggtgcctcttgtggcagtggtgctgaagggagtcagcagccgctgacagttggggtcaccctggcctgtgcaagggacagggctccccatggcctcctggttgcctccctcagggctga

SEQ ID NO: 550918 - DNA, 120 bp, Artificial Sequence
  ENSG00000168395_64 (sequence is synthesized)
tagcagcactccctggccacacgccatggcgctccctcaggcgagactgagaggccagtgaggcctgcacggtggcctcagcttctggggtgcccttgctgggcggtcccctcaggcccc

SEQ ID NO: 550919 - DNA, 120 bp, Artificial Sequence
  ENSG00000168395_65 (sequence is synthesized)
cggccctctcccacagccatcaaatctggccagcgccctcgaacctggtgatgctgagacacaggtcaagtggcagctcaagatgtcaggtcgggctttgtggacagaattggactcggc

SEQ ID NO: 550920 - DNA, 120 bp, Artificial Sequence
  ENSG00000168395_66 (sequence is synthesized)
gcagaagaggagggcgtcagcgtttcggggacggttggcagcagagggtgctgccctgctctccgcgggtgagaggtgactcgaggagaccgcaggagccccttggaggtgaagccacag

SEQ ID NO: 550921 - DNA, 120 bp, Artificial Sequence
  ENSG00000168395_67 (sequence is synthesized)
gtggcatcccggaatcggcaggaggctgagacgtagacccttgcgtgctgctgtcagaggagagacccgaagactacttgagactgttgcttgaaagcagtgtcggcagcacctggacct

SEQ ID NO: 550922 - DNA, 120 bp, Artificial Sequence
  ENSG00000168395_68 (sequence is synthesized)
ggacttgtgacgctgatggatttcagctctaaagagaaacccctgtctattcccagacagagagaaagagcagaagagcagattacctgcaaaggacagacttaggtgggcgcccctgtg

SEQ ID NO: 550923 - DNA, 120 bp, Artificial Sequence
  ENSG00000168395_69 (sequence is synthesized)
ccagagggcagcggggaggccgggtgcatgctgagcccgagtgtgtgtgtatgtgtacaggcaattgcaaaggcgtagaaaagctttagacaggtatccaaggaaaagctgagtgttgat

SEQ ID NO: 550924 - DNA, 120 bp, Artificial Sequence
  ENSG00000168395_70 (sequence is synthesized)
tccctctgggacccagacttctgctccttggctttccctgatcgtgactgtttttctcacggccacgttcctcctgctaacctgctgtgtttacataccaactagatattcgtgggttgg

SEQ ID NO: 550925 - DNA, 120 bp, Artificial Sequence
  ENSG00000168395_71 (sequence is synthesized)
agggtgggatagggaagatactttttctttctgtactaatgggaatacactgtctatagtacctgcagcttgtaagtttatttgaaaaatactgaaatataaaagcgtaaatttccccct

SEQ ID NO: 550926 - DNA, 120 bp, Artificial Sequence
  ENSG00000168395_72 (sequence is synthesized)
tgcaccatcccagtgctgcggtatcagtcagtgatctgaggaaatcctgtaggggaaggcaggctgcagtgaaaacaggagctggtgaaaccgagccctctgcatctgcgaatgtgccct

SEQ ID NO: 550927 - DNA, 120 bp, Artificial Sequence
  ENSG00000168395_73 (sequence is synthesized)
cacagcgtgagttcatgtcagcctacatctttgccacaacttggcgttggctgactttagttgttgccagtctggtgagcacatcatggtgtcttgtgcagggctagcttttcccccatt

SEQ ID NO: 550928 - DNA, 120 bp, Artificial Sequence
  ENSG00000168395_74 (sequence is synthesized)
gttggggtcggggcttcctccctgagggctctgcccagcttcagagacctcaggaacagccagcacctctgcaaacacaggaagatccactgtggcctcatggcttttcctgtcctgaca

SEQ ID NO: 550929 - DNA, 120 bp, Artificial Sequence
  ENSG00000168395_75 (sequence is synthesized)
gtgcgctgaccagcactgtttagtagcaatgcggagcctgggagctcagcgctgcctgccgtgcaggtcccagtagtgacagatgagaagggtgatcaccgatggcgacagttgcggggc

SEQ ID NO: 550930 - DNA, 120 bp, Artificial Sequence
  ENSG00000168395_76 (sequence is synthesized)
ctgatggaagctgacccgagtgaagtgcaccccgtgtgccgggtggtattctgattcttacgctgcgcgcctgtcgtcagcctgtcctcaccgcagcctttgagggggtgccgttgtcag

SEQ ID NO: 550931 - DNA, 120 bp, Artificial Sequence
  ENSG00000168395_77 (sequence is synthesized)
gggcattttcagtgtcgcagggacctgcccaggctttagggctgctgtggtgcggctgggctgcacctggagtctgactccagtgcctgtcctcttagccacagtgtgtgctgccccact

SEQ ID NO: 550932 - DNA, 120 bp, Artificial Sequence
  ENSG00000168397_0 (sequence is synthesized)
agtcggcggccggactgggaagatggacgcagctactctgacctacgacactctccggtttgctgagtttgaagattttcctgagacctcagagcccgtttggatactgggtagaaaata

SEQ ID NO: 550933 - DNA, 120 bp, Artificial Sequence
  ENSG00000168397_1 (sequence is synthesized)
cagcattttcacagaaaaggacgagatcttgtctgatgtggcatctagactttggtttacatacaggaaaaactttccagccattggggggacaggccccacctcggacacaggctgggg

SEQ ID NO: 550934 - DNA, 120 bp, Artificial Sequence
  ENSG00000168397_2 (sequence is synthesized)
ctgcatgctgcggtgtggacagatgatctttgcccaagccctggtgtgccggcacctaggccgagattggaggtggacacaaaggaagaggcagccagacagctacttcagcgtcctcaa

SEQ ID NO: 550935 - DNA, 120 bp, Artificial Sequence
  ENSG00000168397_3 (sequence is synthesized)
cgcattcatcgacaggaaggacagttactactccattcaccagatagcgcaaatgggagttggcgaaggcaagtccataggccagtggtacgggcccaacactgtcgcccaggtcctgaa

SEQ ID NO: 550936 - DNA, 120 bp, Artificial Sequence
  ENSG00000168397_4 (sequence is synthesized)
gaagcttgctgtcttcgatacgtggagctccttggcggtccacattgcaatggacaacactgttgtgatggaggaaatcagaaggttgtgcaggaccagcgttccctgtgcaggcgccac

SEQ ID NO: 550937 - DNA, 120 bp, Artificial Sequence
  ENSG00000168397_5 (sequence is synthesized)
tgcgtttcctgcagattccgaccggcactgcaacggattccctgccggagctgaggtcaccaacaggccgtcgccatggagacccctggtacttctcattcccctgcgcctggggctcac

SEQ ID NO: 550938 - DNA, 120 bp, Artificial Sequence
  ENSG00000168397_6 (sequence is synthesized)
ggacatcaacgaggcctacgtggagacgctgaagcactgcttcatgatgccccagtccctgggcgtcatcggagggaagcccaacagcgcccactacttcatcggctacgttggtgagga

SEQ ID NO: 550939 - DNA, 120 bp, Artificial Sequence
  ENSG00000168397_7 (sequence is synthesized)
gctcatctacctggacccccacaccacgcagccagccgtggagcccactgatggctgcttcatcccggacgagagcttccactgccagcacccgccgtgccgcatgagcatcgcggagct

SEQ ID NO: 550940 - DNA, 120 bp, Artificial Sequence
  ENSG00000168397_8 (sequence is synthesized)
tgacccgtccatcgctgtggggtttttctgtaagactgaagatgacttcaatgattggtgccagcaagtcaaaaagctgtctctgcttggaggtgccctgcccatgtttgagctggtgga

SEQ ID NO: 550941 - DNA, 120 bp, Artificial Sequence
  ENSG00000168397_9 (sequence is synthesized)
gctgcagccttcacatctggcctgccccgacgtcctgaacctgtccctagattcttctgatgtagagcgactggaaagattcttcgactcagaagatgaagactttgaaatcctgtccct

SEQ ID NO: 550942 - DNA, 120 bp, Artificial Sequence
  ENSG00000168397_10 (sequence is synthesized)
ttgaaaatcctggggtcgggggtggcacctgtgagagcctggggctcctggtgccgctgcgtttcatccatcccgcccgctcgcctgccgagggctgcgccccgtgctgcctccccccag

SEQ ID NO: 550943 - DNA, 120 bp, Artificial Sequence
  ENSG00000168397_11 (sequence is synthesized)
gcccgggaggccttactgcttggtgtcagactgcccagctcagagtgcccgtcagggcctgtgcatccgcacgcggagccgtctgttaggagcttccagagtgttctctcgacactgcca

SEQ ID NO: 550944 - DNA, 120 bp, Artificial Sequence
  ENSG00000168397_12 (sequence is synthesized)
gccccgtgttagcacctgggcctcagtcccacttgctcccaggcgccggttctgtggttggtttggaattaaagtcctgtttgaagttgtcagacacagacatgaatttctgggcgctcc

SEQ ID NO: 550945 - DNA, 120 bp, Artificial Sequence
  ENSG00000168397_13 (sequence is synthesized)
ctgagtcagagtctcagaagacctgtgcaggctggcgtgagaggagcggcagccacactgcggccccacgcccaaggactgggctgctctcgaggggggcgcgcccaccgctgtgtcctc

SEQ ID NO: 550946 - DNA, 120 bp, Artificial Sequence
  ENSG00000168397_14 (sequence is synthesized)
tctgcccagcctggcttaccaagggctacctcagtgggagatgaggttggaggaacgaaggcgaggttcctccttgctttggggagaaaagtattcaggaagtgggtgtgtgggaaacct

SEQ ID NO: 550947 - DNA, 120 bp, Artificial Sequence
  ENSG00000168397_15 (sequence is synthesized)
gaagatggcgtgcacaggacacagcgtgggcggcctgggcagaagggcggctggctgtcctggagctgctgctggagcctgccctcagagtgtccctttccagtgctgtggcattctgtg

SEQ ID NO: 550948 - DNA, 120 bp, Artificial Sequence
  ENSG00000168397_16 (sequence is synthesized)
gcagcttccccaggtgtggtgacggggggggggcggggcctccacctgtgacagccaggcttgagggtggacggcgtgcctctcccaggagccttccccatgtccttgccttgctgagaa

SEQ ID NO: 550949 - DNA, 120 bp, Artificial Sequence
  ENSG00000168397_17 (sequence is synthesized)
ttgccctcccatgccgctgaggtgttaggtggtttagggccaaaaggggaaaaccacttgagtcttgtggtgtgtggtgggcagacaccacagggtggcatcacctggtggcatttccag

SEQ ID NO: 550950 - DNA, 120 bp, Artificial Sequence
  ENSG00000168397_18 (sequence is synthesized)
aacctcagccccgattccagcacccaccaccgcctgaccctgtgtaacctgctgtcccgggtcccagagtgcactctgccccgctgctctgctgcctgtcctgggaaagtatctttgccc

SEQ ID NO: 550951 - DNA, 120 bp, Artificial Sequence
  ENSG00000168397_19 (sequence is synthesized)
cactaggaaatgtaaacaggagggcttggggagcgtgggcacttttctcatgagcagctactgcggcgttggcaggactcgctgctgctgctgctgcttgtgtaggtcggggagccagag

SEQ ID NO: 550952 - DNA, 120 bp, Artificial Sequence
  ENSG00000168397_20 (sequence is synthesized)
atccccgaggacgcgcgccggacagtcggcactgaccggcccacctggtagcagaggacacccccagccccccaagcattgaagacatagtgtatttcctcgtatcctttctcccttggg

SEQ ID NO: 550953 - DNA, 120 bp, Artificial Sequence
  ENSG00000168397_21 (sequence is synthesized)
tgtagttggggtggggaagcagggaaggctggtgcgatctccattccttgggctccacgtccgagttcatggtgcgccgctgtgctgggagctgcagtggtaatgtgtgggacaccttga

SEQ ID NO: 550954 - DNA, 120 bp, Artificial Sequence
  ENSG00000168397_22 (sequence is synthesized)
ccaaaggggagctttgtctcgtgtgttttgaaaaaggcttaatgaagagaatgttgttcattcttagtagtatagtttgcaattcttaatggcaaataataagtttcagtagaaaacaaa

SEQ ID NO: 550955 - DNA, 120 bp, Artificial Sequence
  ENSG00000168397_23 (sequence is synthesized)
agccattgccattcatcattgttgtataccctggagctggaaggagatggggactggttctcagccttgcctctcaccggcggagaactgaggccggaggggggacaggccccacctcgg

SEQ ID NO: 550956 - DNA, 120 bp, Artificial Sequence
  ENSG00000168397_24 (sequence is synthesized)
tccctcggaggtacgatctgtgcccttgcttccccagtcctggcccccttggttttgaccattaaggtgtgtgtgagcctgagccgtgagcacttggcagtggttcgcctgtgagaccag

SEQ ID NO: 550957 - DNA, 120 bp, Artificial Sequence
  ENSG00000168397_25 (sequence is synthesized)
gtatggagtggagcgtcccctcctccaagcttgcgcccagcagcccaggacccacctcgtcttccccaccagcgctgcctgcccgggcgctgtggagctgggcgtgctaccatggagtcc

SEQ ID NO: 550958 - DNA, 120 bp, Artificial Sequence
  ENSG00000168397_26 (sequence is synthesized)
tcaggggtctggagcagacagaacatgcaggctctgtggtgacgcagtcctgggtgggggactggttcacttgggcaccactggccatgggtggcgtagacccctcggaccatggccagc

SEQ ID NO: 550959 - DNA, 120 bp, Artificial Sequence
  ENSG00000168397_27 (sequence is synthesized)
gtgccgcaggagccggcctgggctcgtgcagtgaagtgagtggccgtgagcgcgtcctcctcatctctgtctccctgtgggaaactctacaaacaaggcaatggcaatggaaccactcct

SEQ ID NO: 550960 - DNA, 120 bp, Artificial Sequence
  ENSG00000168397_28 (sequence is synthesized)
gatgaccacgagggtcagacgcgggacagaggcccctcaggcctgagattgtgccggccgccccctgccctcctcaccctgccctgctcctcttctctgctccctccccccatattcgca

SEQ ID NO: 550961 - DNA, 120 bp, Artificial Sequence
  ENSG00000168397_29 (sequence is synthesized)
ggtctgcacaacccccggacctgttcacacccgcatggggacagctgtctgtgggctgcagagcaggcactgctcagtctgccccacgccaagggcccttgactcacacccaggtggccc

SEQ ID NO: 550962 - DNA, 120 bp, Artificial Sequence
  ENSG00000168397_30 (sequence is synthesized)
gataggtgggaggctgcagaatgtgccaggccccacccgggctgtctggagagggtggagtggtcggtttcccctcagagcttttctggtgtcgtgggatgtggagcaggaggctgtaaa

SEQ ID NO: 550963 - DNA, 120 bp, Artificial Sequence
  ENSG00000168397_31 (sequence is synthesized)
cctgtaaacactgacctctgaccatctgtgcgctgctgtcacatcacccccgtgtcatcccacatcacccccgtcccacccaggcccagaccctgggccttgcccttcctgctgtccatg

SEQ ID NO: 550964 - DNA, 120 bp, Artificial Sequence
  ENSG00000168397_32 (sequence is synthesized)
cggcttgcagtgcctggtgctcggcacagtctggggaaattggcctcgccccatcagtgaatctgaatgctcagattgaagtggagtgagtaaagaagagttggcctttcttgcaagcaa

SEQ ID NO: 550965 - DNA, 120 bp, Artificial Sequence
  ENSG00000168397_33 (sequence is synthesized)
attttcacaggtatcggccatgctggagcccaccctggtctgaccgcttggcctgcagaagcattttgtgatcactgttctctgctaactctgccataacttgtgacttgcaaacttaag

SEQ ID NO: 550966 - DNA, 120 bp, Artificial Sequence
  ENSG00000168397_34 (sequence is synthesized)
ctcggagctccgttcctggccacaggagccaaggcaggctggaatgtccagcacctgcatgctgggggcctctgctgcgccactggcagtgggaatggaagcccccacctcttagccgac

SEQ ID NO: 550967 - DNA, 120 bp, Artificial Sequence
  ENSG00000168397_35 (sequence is synthesized)
acaggaaaaactttccagccattggaggttgtcgggacatttcactctccagtaaatgtggcccttggcgttactgagtcctaagaggggggacaggccccacctcggacacaggctggg

SEQ ID NO: 550968 - DNA, 120 bp, Artificial Sequence
  ENSG00000168397_36 (sequence is synthesized)
tgacgaggaaaactttcggatttttgcgttttttttttcagcatgttgggataagtactgtgttcacgtggttgggaatctgaagggtataagagccggaactgtgtccttgcaccctca

SEQ ID NO: 550969 - DNA, 120 bp, Artificial Sequence
  ENSG00000168397_37 (sequence is synthesized)
tgatggaggaaatcagtaagtggctcagagtttccatggacaagaaagttgaaatcacgggcaacatacacacttcctcgcctgagtccccacgggagcctcggcgagtgttgtcagtcg

SEQ ID NO: 550970 - DNA, 120 bp, Artificial Sequence
  ENSG00000168397_38 (sequence is synthesized)
ccccatgccgtgcaggtgctccgtggggcctgtgcgccaagccagatgcacggtggcctcgctctcctatcccggcggtcataccaagagaggagagcccaggctgtctggaggccgcga

SEQ ID NO: 550971 - DNA, 120 bp, Artificial Sequence
  ENSG00000168397_39 (sequence is synthesized)
cttggtatctcacgtcgtgttttgtgtcttggttacaaatcgtttatgaaggccctgctgtgcttaggcgccctcgtgtgggaattctggtgaagttattttgcgtgccttgatgtgcga

SEQ ID NO: 550972 - DNA, 120 bp, Artificial Sequence
  ENSG00000168397_40 (sequence is synthesized)
cagagagatgtagcaaccatctctagctgcaccatctcgagcaaaggcacgtcgtgaaggcagagctcttttcagctttctggaagaaaggtctgctgcaaccctgaaggaacctgggcg

SEQ ID NO: 550973 - DNA, 120 bp, Artificial Sequence
  ENSG00000168397_41 (sequence is synthesized)
tggcaacatttacatctaggaggaaaactgtggctcagttttaacaaatgggctcattgagtgagttccaaattcatgtttcaccttccatgatgtagccaagctgagaactcttaaaaa

SEQ ID NO: 550974 - DNA, 120 bp, Artificial Sequence
  ENSG00000168397_42 (sequence is synthesized)
ggccttttaagggcattccatgagcaggtaccacaccccaggtgaccacttgaggccactggtggaaaagcagcatgccctggggttcattttcagcctggtcgcgggcggcctcctgtg

SEQ ID NO: 550975 - DNA, 120 bp, Artificial Sequence
  ENSG00000168397_43 (sequence is synthesized)
tgcccctttccctgatggtctggtgccctcggctccctccccacctcctgcccactgcttctcagtgtgatgtgggtgcagtgggtctgaaatgcggcctcctctgtccctttcctctgc

SEQ ID NO: 550976 - DNA, 120 bp, Artificial Sequence
  ENSG00000168397_44 (sequence is synthesized)
agtcggcggccggactgggaagatggacgcagtaaccagtagattctccaagctgcttttccgtgacgagaaagagaaacagtgaatttgtatcatcgggtcttagtttcttggggtcct

SEQ ID NO: 550977 - DNA, 120 bp, Artificial Sequence
  ENSG00000168397_45 (sequence is synthesized)
gcttctgccctgtcaggtcaaagcactcagcagggccacctcccgcacccctgctcacatctcctgccaggccccctcactcccggcctccccaaagcccacctctgacatgaagcttcc

SEQ ID NO: 550978 - DNA, 120 bp, Artificial Sequence
  ENSG00000168397_46 (sequence is synthesized)
ctgagctgagcctgcagattgggtttcttgtgcctgtgggatgtcctgtggtctttcctggacagtaagctctttggtaccatgtcccctcctgtcccctcttgtgtcacccagttgggc

SEQ ID NO: 550979 - DNA, 120 bp, Artificial Sequence
  ENSG00000168397_47 (sequence is synthesized)
ctcagcaggcccttgggccccctatggcagtgggtggggggaccgtctgctcccacctgggacctgtgctcagtcccccgcccctccacagcactgcttcatgatgccccagtccctggg

SEQ ID NO: 550980 - DNA, 120 bp, Artificial Sequence
  ENSG00000168397_48 (sequence is synthesized)
cgccgcaggcccctcgcagcgtccgtcggcaggcgggcagacgggcgggggagtcgccccggcggggcaagtccgtaccgcgacatgggcgcgccgagcacgtccgtaccgcaagatggc

SEQ ID NO: 550981 - DNA, 120 bp, Artificial Sequence
  ENSG00000168397_49 (sequence is synthesized)
cgacatgggcgcgccgagcacgtccgtaccgcaagatggctgctcggacggggacagagctcgcctctgccgcctcgacaactgctcctgggtcctctaagaggaggaagcgccacccat

SEQ ID NO: 550982 - DNA, 120 bp, Artificial Sequence
  ENSG00000168397_50 (sequence is synthesized)
ggcacacagtgtcccgtcggacagcagaaccagccgtcgtcccacgacacgaccccatgccgcccgcagggcgccccggggctcgcgtcggcccggccgtacgccaaaatggcggctccc

SEQ ID NO: 550983 - DNA, 120 bp, Artificial Sequence
  ENSG00000168397_51 (sequence is synthesized)
gcgtatttccgctcgcgcgccgtatcgtcttcgccgcctgcgccggcacacctattggcccccgcggcgtcccgtcgccgcgtcgcgttgctggcccgtcggagcgacgccgctcgggtc

SEQ ID NO: 550984 - DNA, 120 bp, Artificial Sequence
  ENSG00000168398_0 (sequence is synthesized)
gacatcactacccagcccttgaaagatgagctgttcccgccgccactccagctctggcttctgggctccgaggaggggtggggacggtggggacggtggggacatcaggctgccccgcag

SEQ ID NO: 550985 - DNA, 120 bp, Artificial Sequence
  ENSG00000168398_1 (sequence is synthesized)
taccagggagcgactgaagtgcccatgccgcttgctccggagaagcccaggtgtggcctcactcacatcccactctgagtccaaatgttctctccctggaagatatcaatgtttctgtct

SEQ ID NO: 550986 - DNA, 120 bp, Artificial Sequence
  ENSG00000168398_2 (sequence is synthesized)
gttcgtgaggactccgtgcccaccacggcctctttcagcgccgacatgctcaatgtcaccttgcaagggcccactcttaacgggacctttgcccagagcaaatgcccccaagtggagtgg

SEQ ID NO: 550987 - DNA, 120 bp, Artificial Sequence
  ENSG00000168398_3 (sequence is synthesized)
ctgggctggctcaacaccatccagccccccttcctctgggtgctgttcgtgctggccaccctagagaacatctttgtcctcagcgtcttctgcctgcacaagagcagctgcacggtggca

SEQ ID NO: 550988 - DNA, 120 bp, Artificial Sequence
  ENSG00000168398_4 (sequence is synthesized)
gagatctacctggggaacctggccgcagcagacctgatcctggcctgcgggctgcccttctgggccatcaccatctccaacaacttcgactggctctttggggagacgctctgccgcgtg

SEQ ID NO: 550989 - DNA, 120 bp, Artificial Sequence
  ENSG00000168398_5 (sequence is synthesized)
gtgaatgccattatctccatgaacctgtacagcagcatctgtttcctgatgctggtgagcatcgaccgctacctggccctggtgaaaaccatgtccatgggccggatgcgcggcgtgcgc

SEQ ID NO: 550990 - DNA, 120 bp, Artificial Sequence
  ENSG00000168398_6 (sequence is synthesized)
tgggccaagctctacagcttggtgatctgggggtgtacgctgctcctgagctcacccatgctggtgttccggaccatgaaggagtacagcgatgagggccacaacgtcaccgcttgtgtc

SEQ ID NO: 550991 - DNA, 120 bp, Artificial Sequence
  ENSG00000168398_7 (sequence is synthesized)
atcagctacccatccctcatctgggaagtgttcaccaacatgctcctgaatgtcgtgggcttcctgctgcccctgagtgtcatcaccttctgcacgatgcagatcatgcaggtgctgcgg

SEQ ID NO: 550992 - DNA, 120 bp, Artificial Sequence
  ENSG00000168398_8 (sequence is synthesized)
aacaacgagatgcagaagttcaaggagatccagacagagaggagggccacggtgctagtcctggttgtgctgctgctattcatcatctgctggctgcccttccagatcagcaccttcctg

SEQ ID NO: 550993 - DNA, 120 bp, Artificial Sequence
  ENSG00000168398_9 (sequence is synthesized)
gatacgctgcatcgcctcggcatcctctccagctgccaggacgagcgcatcatcgatgtaatcacacagatcgcctccttcatggcctacagcaacagctgcctcaacccactggtgtac

SEQ ID NO: 550994 - DNA, 120 bp, Artificial Sequence
  ENSG00000168398_10 (sequence is synthesized)
gtgatcgtgggcaagcgcttccgaaagaagtcttgggaggtgtaccagggagtgtgccagaaagggggctgcaggtcagaacccattcagatggagaactccatgggcacactgcggacc

SEQ ID NO: 550995 - DNA, 120 bp, Artificial Sequence
  ENSG00000168398_11 (sequence is synthesized)
tccatctccgtggaacgccagattcacaaactgcaggactgggcagggagcagacagtgagcaaacgccagcagggctgctgtgaatttgtgtaaggattgagggacagttgcttttcag

SEQ ID NO: 550996 - DNA, 120 bp, Artificial Sequence
  ENSG00000168398_12 (sequence is synthesized)
catgggcccaggaatgccaaggagacatctatgcacgaccttgggaaatgagttgatgtctccggtaaaacaccggagactaattcctgccctgcccaattttgcagggagcatggctgt

SEQ ID NO: 550997 - DNA, 120 bp, Artificial Sequence
  ENSG00000168398_13 (sequence is synthesized)
gaggatggggtgaactcacgcacagccaaggactccaaaatcacaacagcattactgttcttatttgctgccacacctgagccagcctgctccttcccaggagtggaggaggcctggggg

SEQ ID NO: 550998 - DNA, 120 bp, Artificial Sequence
  ENSG00000168398_14 (sequence is synthesized)
cagggagaggagtgactgagcttccctcccgtgtgttctccgtccctgccccagcaagacaacttagatctccaggagaactgccatccagctttggtgcaatggctgagtgcacaagtg

SEQ ID NO: 550999 - DNA, 120 bp, Artificial Sequence
  ENSG00000168398_15 (sequence is synthesized)
agttgttgccctgggtttctttaatctattcagctagaactttgaaggacaatttcttgcattaataaaggttaagccctgaggggtccctgataacaacctggagaccaggattttatg

SEQ ID NO: 551000 - DNA, 120 bp, Artificial Sequence
  ENSG00000168398_16 (sequence is synthesized)
gtattgagcactgtaggcaagagggaagaaagagaaggagccatctccatcttgaaggaactcaaagactcaagtgggaacgactgggcactgccaccaccagaaagctgttcgacgaga

SEQ ID NO: 551001 - DNA, 120 bp, Artificial Sequence
  ENSG00000168398_17 (sequence is synthesized)
cggtcgagcagggtgctgtgggtgatatggacagcagaagggggagaccaaggttccagctcaaccaataactattgcacaaccatctgtccctgcctcagttccctcttctgtaacatg

SEQ ID NO: 551002 - DNA, 120 bp, Artificial Sequence
  ENSG00000168398_18 (sequence is synthesized)
aagtcgttgtgagggttaaaggcagtaacaggtataaagtacttagaaaagcaaagggtgctacgtacatgtgaggcatcattacgcagacgtaactgggatatgtttactataaggaaa

SEQ ID NO: 551003 - DNA, 120 bp, Artificial Sequence
  ENSG00000168398_19 (sequence is synthesized)
agacactgaggtctagaaatagctccgtggagcagaatcagtattgggagccggtggcggtgtgaagcaccagtgtctggcacacagtaggtgctcattggctcccttccacctgtcatt

SEQ ID NO: 551004 - DNA, 120 bp, Artificial Sequence
  ENSG00000168398_20 (sequence is synthesized)
cccaccaccctgaggccccaaccgccacacacacaggagcatttggagagaaggccatgtcttcaaagtctgatttgtgatgaggcagaggaagatatttctaatcggtcttgcccagag

SEQ ID NO: 551005 - DNA, 120 bp, Artificial Sequence
  ENSG00000168398_21 (sequence is synthesized)
gatcacagtgctgagaccccccaccaccagccggtacctgggaagggggagagtgcaggcctgctcagggactgttcctgtctcagcaaccaagggattgttcctgtcaatcaatggttt

SEQ ID NO: 551006 - DNA, 120 bp, Artificial Sequence
  ENSG00000168398_22 (sequence is synthesized)
attggaaggtggcccagtatgagccctagaagagtgtgaaaaggaatggcaatggtgttcaccatcggcagtgccagggcagcactcattcacttgataaatgaatatttattagctggt

SEQ ID NO: 551007 - DNA, 120 bp, Artificial Sequence
  ENSG00000168398_23 (sequence is synthesized)
tggagagctagaacctggagagctagaacctggagaactagaacctggagggctagaactggagaggctagaaccaagaagggctagaacctggaggggctagaacctagagaagctaaa

SEQ ID NO: 551008 - DNA, 120 bp, Artificial Sequence
  ENSG00000168398_24 (sequence is synthesized)
gggctagaacctggaggggctagaacctagagaagctaaaacctgagctagaagctggaggactagaacctggagggctggaatctggagagctagaacctggagggctagaacctggag

SEQ ID NO: 551009 - DNA, 86 bp, Artificial Sequence
  ENSG00000168398_25 (sequence is synthesized)
ggctagaatctggagagctagaacctggagggctagaatctggagagctagaacctggagggctagaacctggagaggaatctgga

SEQ ID NO: 551010 - DNA, 120 bp, Artificial Sequence
  ENSG00000168398_26 (sequence is synthesized)
acctagaagggctagaacctggagagccagaacctggagggctagaacctggaagggctagaacctgtagagctagaacatggagagctagaacccggcaggctagaacctggcaagcta

SEQ ID NO: 551011 - DNA, 120 bp, Artificial Sequence
  ENSG00000168398_27 (sequence is synthesized)
gaacctggagggaatgaacctggagggctagaacctggagaatgagaaaaatttacatggcaaagagcccataaatcctgaccaatccaactctgaattttaaagcaaaagcgtcaaaaa

SEQ ID NO: 551012 - DNA, 120 bp, Artificial Sequence
  ENSG00000168398_28 (sequence is synthesized)
aaagattccctccttacccccaacccactcttttttcccaccacccactctcctctgcctcagtaagtatctggaggaagaaaacaggtgaaagaagaagtaaaaaccatttagtattag

SEQ ID NO: 551013 - DNA, 120 bp, Artificial Sequence
  ENSG00000168398_29 (sequence is synthesized)
tattagaatgaagtcaaactgtgccacacatggtgaatgaaaaaaaaaaaaagaggctgtgttttgtcacacagggcagtcattcagcaccagagcacgtgatggtctgagactctctta

SEQ ID NO: 551014 - DNA, 120 bp, Artificial Sequence
  ENSG00000168398_30 (sequence is synthesized)
ggagcagagctctgccgcaatggccatgtggggatccacacctggtctgaggggcaactgagtctgcgggagaagagcggccctatgcatggtgtagatgccctgataaagaacatctgt

SEQ ID NO: 551015 - DNA, 120 bp, Artificial Sequence
  ENSG00000168398_31 (sequence is synthesized)
cctgtgaaagactcaatgagctgttatgttgtaaacaggaagcatttcacatccaaacgagaaaatcatgtaaacatgtgtcttttctgtagagcataataaatggatgaggtttttgca

SEQ ID NO: 551016 - DNA, 120 bp, Artificial Sequence
  ENSG00000168398_32 (sequence is synthesized)
ggtgtggcctcactcacatcccactctgagtccaaatgttctctccctggaagatatcaatgtttctgtctgttcgtgaggactccgtgcccaccacggcctctttcaggtgaggtcatt

SEQ ID NO: 551017 - DNA, 120 bp, Artificial Sequence
  ENSG00000168398_33 (sequence is synthesized)
gtggttcaaggacgttaagtaacttccccagcgtcacacggcttataagtaaggcagccaggatgtgaacccagtaggactatctggctgcaaagtccccaccctccctcgccatctgta

SEQ ID NO: 551018 - DNA, 120 bp, Artificial Sequence
  ENSG00000168398_34 (sequence is synthesized)
gtgaggactccgtgcccaccacggcctctttcaggtgctgcctatgatgaagatgagcagatggccatctcagctggggccacagtgcactggacctatagtttccaattccgcactcag

SEQ ID NO: 551019 - DNA, 120 bp, Artificial Sequence
  ENSG00000168398_35 (sequence is synthesized)
caggcatctttctgatgatccgatggcttctcagagccagggatgggccaggatccatccccttggctactgtcttgctgagaaattaataagcagcatctggtgctatactttggtctc

SEQ ID NO: 551020 - DNA, 120 bp, Artificial Sequence
  ENSG00000168398_36 (sequence is synthesized)
tagtgagttagctcatgaaagatgacagactctccaagccaggggtatgcaggaaatgggttttctgtagctacagaaatggggttgagggttggaccaaggggactacccaggggaagt

SEQ ID NO: 551021 - DNA, 120 bp, Artificial Sequence
  ENSG00000168398_37 (sequence is synthesized)
cttaccttcagaggactctggaaaggaggctgcaagttttcatgggtcaagaattcagagcccagtagagacagcttatctctgttccaagatgtctggggccttggttggaagattcaa

SEQ ID NO: 551022 - DNA, 120 bp, Artificial Sequence
  ENSG00000168398_38 (sequence is synthesized)
aggctaggaaaccaggagccaccaaaagcgtaactggggccagaggatccactttcaaggtggcaagttggttccccccatgtggctgcttgagtatcctcacatggcggctcacatcct

SEQ ID NO: 551023 - DNA, 120 bp, Artificial Sequence
  ENSG00000168398_39 (sequence is synthesized)
tccaagtaagcaatgcaaaaggccaagaaagatgctgcaaagcatgttatgacctagcctcagaaatcacacaccatccctgccaccattagtaagaagtccagcccacgtccaggagaa

SEQ ID NO: 551024 - DNA, 120 bp, Artificial Sequence
  ENSG00000168398_40 (sequence is synthesized)
gaggaagcagattcctccttttgaaatgaagaatatcaagtaattcggggggcatatgaaagccaccacacaccacagggatctttttagagcatacttcttataccatcactgtagttc

SEQ ID NO: 551025 - DNA, 120 bp, Artificial Sequence
  ENSG00000168398_41 (sequence is synthesized)
cttaagactcaggggcaaagcctcacttccttagcacccagtgaagaccacgcttactccctcactcaacctcttgctacttcccacctctcctgtccaacatctagtgtcactttccag

SEQ ID NO: 551026 - DNA, 120 bp, Artificial Sequence
  ENSG00000168398_42 (sequence is synthesized)
aacataccaacagcttccccagttctgtgcctctgctcaggctgttccccctgcctggtccacttgtcctccttcttgtcccgtcaaaatgcttcttatccttcaagacccagctctaga

SEQ ID NO: 551027 - DNA, 120 bp, Artificial Sequence
  ENSG00000168398_43 (sequence is synthesized)
gtcacctccaaccccttacccaccagccccctctccaagtctgtgtcccacaacccccctgctccctccagggcaccctccaccctctgggccacagttgtcaggagtcaggcagggcag

SEQ ID NO: 551028 - DNA, 120 bp, Artificial Sequence
  ENSG00000168398_44 (sequence is synthesized)
gggccgggtggtgtcttctttgtgttcttgcactcagggcagagctcagcacagagcagacgctcaaaaaacatttaaaggatagaagcattgatttgtgggtcccccagtctggctcca

SEQ ID NO: 551029 - DNA, 120 bp, Artificial Sequence
  ENSG00000168398_45 (sequence is synthesized)
ggatgccagccagctgctcctagaagcaaacggacttttcctgggaaatcccagaggtgatgatcagtatctctcccgtgactcgtagttcagctcttcctccatgagcctgactatcag

SEQ ID NO: 551030 - DNA, 120 bp, Artificial Sequence
  ENSG00000168398_46 (sequence is synthesized)
tggaccttccagaaagagccccttttccttctctcacccacagcacagggcactgggaaaatgcccaatgagtcctgccctctgggttgtgctttggacttttcagtgtgtcttcgcatc

SEQ ID NO: 551031 - DNA, 120 bp, Artificial Sequence
  ENSG00000168398_47 (sequence is synthesized)
cactcttcagcttgaatgttgcaacagccatgaaaaaagaaatgcaaagcgattcaggatgagagcaataccctactccaaagaaggcaaaatagaagctcagagaggtcaagcattttg

SEQ ID NO: 551032 - DNA, 120 bp, Artificial Sequence
  ENSG00000168398_48 (sequence is synthesized)
cccaagaccacacagctaggagtggaactcatggctgtccaagccccacgcctctgctgaaggtagagatgaattacagcaacaagtctagaaaggtgcctgccctatggtctgtgagtc

SEQ ID NO: 551033 - DNA, 120 bp, Artificial Sequence
  ENSG00000168398_49 (sequence is synthesized)
ttgcctaagaatgaaagaggagccagtgggttaaagatgaggtcaccaacaaacggtggtgttggagtttaccactggttattttaatgggtttgcaagaattgttaattactaatgttt

SEQ ID NO: 551034 - DNA, 120 bp, Artificial Sequence
  ENSG00000168398_50 (sequence is synthesized)
cagtgctttgctgatagaaggtacggaaatacgatgccacagactgtccaggaagacagaaactaggcagatgggctggccatggtctccaagccagactggaatctccaggtctggaat

SEQ ID NO: 551035 - DNA, 120 bp, Artificial Sequence
  ENSG00000168398_51 (sequence is synthesized)
gatatcatttttctcttttaataaattaactcacccaccacacggctttgagaggctcaaaggtgaccaactcccttgggagggccccggttgataaggaaggaatgtgaatcctcccat

SEQ ID NO: 551036 - DNA, 120 bp, Artificial Sequence
  ENSG00000168398_52 (sequence is synthesized)
cacggaagcttcaaggaggtcaagggtccaacacttgagattgttagtgctgttggtggatactggccaaggaaatatcccagtggagcctcgagatgaagaacatgaggcccccgttta

SEQ ID NO: 551037 - DNA, 120 bp, Artificial Sequence
  ENSG00000168398_53 (sequence is synthesized)
gatccaaggatcagagggggctctgtaagacccaggggagtcaggtgcactggagcgcgggctgcagaaaacagcctgagctccacctcggcttctccttgccctggctggttgtcctta

SEQ ID NO: 551038 - DNA, 120 bp, Artificial Sequence
  ENSG00000168404_0 (sequence is synthesized)
gtgagcctggtggttggcagctggagccacgtcggagggggaagtgtcgcagcattctctgcaggcatcacagacctgaggcagtggcctccggagggcactggacagaaacagccatcc

SEQ ID NO: 551039 - DNA, 120 bp, Artificial Sequence
  ENSG00000168404_1 (sequence is synthesized)
aagtggctgagtggagggaccctgctcaagtgcagctgcagtggccggggtttccctcaggtagggatcggggcgccttgtcgccgccagccacgtgtggcgtccggtacagtcagcaga

SEQ ID NO: 551040 - DNA, 120 bp, Artificial Sequence
  ENSG00000168404_2 (sequence is synthesized)
gtgcagggtgcgggcaccaggaaagggggcgcaggggaactcccgcgggcctcgcgtttgcaaacttctcgcctgggcaggaggcggtcgtgggaaagaaggtggaagagcgagcttttt

SEQ ID NO: 551041 - DNA, 120 bp, Artificial Sequence
  ENSG00000168404_3 (sequence is synthesized)
ggaactgtgcacgggacagattggacgcacacccctcgggaggcgcgaaggcatggaaaatttgaagcatattatcacccttggccaggtcatccacaaacggtgtgaagagatgaaata

SEQ ID NO: 551042 - DNA, 120 bp, Artificial Sequence
  ENSG00000168404_4 (sequence is synthesized)
ctgcaagaaacagtgccggcgcctgggccaccgcgtcctcggcctgatcaagcctctggagatgctccaggaccaaggaaagaggagcgtgccctctgagaagttaaccacagccatgaa

SEQ ID NO: 551043 - DNA, 120 bp, Artificial Sequence
  ENSG00000168404_5 (sequence is synthesized)
ccgcttcaaggctgccctggaggaggctaatggggagatagaaaagttcagcaatagatccaatatctgcaggtttctaacagcaagccaggacaaaatactcttcaaggacgtgaacag

SEQ ID NO: 551044 - DNA, 120 bp, Artificial Sequence
  ENSG00000168404_6 (sequence is synthesized)
gaagctgagtgatgtctggaaggagctctcgctgttacttcaggttgagcaacgcatgcctgtttcacccataagccaaggagcgtcctgggcacaggaagatcagcaggatgcagacga

SEQ ID NO: 551045 - DNA, 120 bp, Artificial Sequence
  ENSG00000168404_7 (sequence is synthesized)
agacaggcgagctttccagatgctaagaagagataatgaaaaaatagaagcttcactgagacgattagaaatcaacatgaaagaaatcaaggaaactttgaggcagtatttaccaccaaa

SEQ ID NO: 551046 - DNA, 120 bp, Artificial Sequence
  ENSG00000168404_8 (sequence is synthesized)
atgcatgcaggagatcccgcaagagcaaatcaaggagatcaagaaggagcagctttcaggatccccgtggattctgctaagggaaaatgaagtcagcacactttataaaggagaatacca

SEQ ID NO: 551047 - DNA, 120 bp, Artificial Sequence
  ENSG00000168404_9 (sequence is synthesized)
cagagctccagtggccataaaagtattcaaaaaactccaggctggcagcattgcaatagtgaggcagactttcaataaggagatcaaaaccatgaagaaattcgaatctcccaacatcct

SEQ ID NO: 551048 - DNA, 120 bp, Artificial Sequence
  ENSG00000168404_10 (sequence is synthesized)
ggaccctgagggagctgttggatagggaaaaagacctcacacttggcaagcgcatggtcctagtcctgggggcagcccgaggcctataccggctacaccattcagaagcacctgaactcc

SEQ ID NO: 551049 - DNA, 120 bp, Artificial Sequence
  ENSG00000168404_11 (sequence is synthesized)
acggaaaaatcagaagctcaaacttcctggtaactcaaggctaccaagtgaagcttgcaggatttgagttgaggaaaacacagacttccatgagtttgggaactacgagagaaaagacag

SEQ ID NO: 551050 - DNA, 120 bp, Artificial Sequence
  ENSG00000168404_12 (sequence is synthesized)
acagagtcaaatctacagcatatctctcacctcaggaactggaagatgtattttatcaatatgatgtaaagtctgaaatatacagctttggaatcgtcctctgggaaatcgccactggag

SEQ ID NO: 551051 - DNA, 120 bp, Artificial Sequence
  ENSG00000168404_13 (sequence is synthesized)
atatcccgtttcaaggctgtaattctgagaagatccgcaagctggtggctgtgaagcggcagcaggagccactgggtgaagactgcccttcagagctgcgggagatcattgatgagtgcc

SEQ ID NO: 551052 - DNA, 120 bp, Artificial Sequence
  ENSG00000168404_14 (sequence is synthesized)
gggcccatgatccctctgtgcggccctctgtggatgaaatcttaaagaaactctccaccttttctaagtagtgtatcaaaatctaaaccaaggagtctctggacaagaagctgggagagg

SEQ ID NO: 551053 - DNA, 120 bp, Artificial Sequence
  ENSG00000168404_15 (sequence is synthesized)
cacaaactggacatctctctctctcatatccttcggcattgggttatctatgggtgcaaggagtgggcacgcttctctgttacaaatagaaaacgattccagtcatacaggacacatccc

SEQ ID NO: 551054 - DNA, 120 bp, Artificial Sequence
  ENSG00000168404_16 (sequence is synthesized)
actccaaatgatatttccaaaaacatacctctgacagtaactttgatagatggtttgtcaaatgtatctttctgggtatccacacctcttggcaatgaaatttgcagctcctcccttcca

SEQ ID NO: 551055 - DNA, 120 bp, Artificial Sequence
  ENSG00000168404_17 (sequence is synthesized)
taaatgaagtctctttccccaccatttgaatctgggctggcactgtgacttgatttgatcaatagaatgtggaagaagtgactgtatgccagttccaagcctaggtttcaagaggcctta

SEQ ID NO: 551056 - DNA, 120 bp, Artificial Sequence
  ENSG00000168404_18 (sequence is synthesized)
taaatgtctgttggaaccttacccagccatgaacatgttgagtgagcatgctggagaatgagagaccacatgaagcagaaacatgctttcctagctgaagtcatactagcccaaccaaca

SEQ ID NO: 551057 - DNA, 120 bp, Artificial Sequence
  ENSG00000168404_19 (sequence is synthesized)
tggcagctaacacatgaatgaggccaatcaagaccagaagaaccactcaagcagatcccagcccaaattgcccattcacacaatcaggagctaaataaattactgttgtcttaacactaa

SEQ ID NO: 551058 - DNA, 120 bp, Artificial Sequence
  ENSG00000168404_20 (sequence is synthesized)
aaataaataagaaaaatttgctacaaagcattcccatcagctgtttactgtgtagtcctgttacccccttgatcctgcccagaagcaatctaacaatcagcagtcatttttattttcatc

SEQ ID NO: 551059 - DNA, 120 bp, Artificial Sequence
  ENSG00000168404_21 (sequence is synthesized)
atcagcaatgttactaagagccataggtgacagtctacctgtatcagatttccaggggaacagagctaagaagttcactggaagtcagattttcatacagaagaggaaaagattttgtga

SEQ ID NO: 551060 - DNA, 120 bp, Artificial Sequence
  ENSG00000168404_22 (sequence is synthesized)
actcagtgtccacaattcccaaatgctaaaagaattttagcagttttctttgtcatccatagacggttttctttcttccagtcctacgagtgtcagagacagccctcaaataatagcaga

SEQ ID NO: 551061 - DNA, 120 bp, Artificial Sequence
  ENSG00000168404_23 (sequence is synthesized)
caggccttttttgcctttcagatgcctttccccctctgcgatggtgatataagtactcccaaaacactgtttctactactctcacgctcttcatgcagcctgactataagatgcgctatt

SEQ ID NO: 551062 - DNA, 120 bp, Artificial Sequence
  ENSG00000168404_24 (sequence is synthesized)
ccacctttcatccctggtatcccatacggcgctagatgtaagagaatgtcagtgctcaggaaacgtgtgagcaaatgaatgaatgaatgaatgaaagggggatgagccatctaagtgcct

SEQ ID NO: 551063 - DNA, 120 bp, Artificial Sequence
  ENSG00000168404_25 (sequence is synthesized)
tatcccttttctcacattgcccctagatttgggtacctggctgagtttggggctggcagccttcagcacaccaatggtgtcaatggcaggtgtgcatgggacaagaacatatgctgtcat

SEQ ID NO: 551064 - DNA, 120 bp, Artificial Sequence
  ENSG00000168404_26 (sequence is synthesized)
gattgtgctacagtttctttaagaacaccaggtgaccgcgcaggcctggggggatgactcacactcgtcacgccaaagccaaaggatcaggctgaccccccataaagtcagatagcacag

SEQ ID NO: 551065 - DNA, 120 bp, Artificial Sequence
  ENSG00000168404_27 (sequence is synthesized)
aggggatgcccccatgccatttttccatctgcttctttgggaaaaggcgagccaggcagtggctctatgacccctctccactctcactgagtggagttcagtcctcaactgagaaacccc

SEQ ID NO: 551066 - DNA, 120 bp, Artificial Sequence
  ENSG00000168404_28 (sequence is synthesized)
tacattttaacatagtcatactggcaacaactacaacttagcaggtcttactggtgctttataaccattatctcaagtaatcccccctgtcatcgccccattttatacagaagaaatctc

SEQ ID NO: 551067 - DNA, 120 bp, Artificial Sequence
  ENSG00000168404_29 (sequence is synthesized)
tttgtgtttctcttggtcactgcactgtgataagttgaacccataatgttaaccaataaagtagccacacagacagaagtcacgacaggaaataaatccctaaggtaaaagacaattccc

SEQ ID NO: 551068 - DNA, 120 bp, Artificial Sequence
  ENSG00000168404_30 (sequence is synthesized)
aaggtgaagaatgtgaagactggctcagccagtggtgaggttgggtccccttccagtagaccagaaattccccatcagtgctgcccctggcaatttgttgtttaatgtgggaactgcctg

SEQ ID NO: 551069 - DNA, 120 bp, Artificial Sequence
  ENSG00000168404_31 (sequence is synthesized)
ggctggtcagtggaatcgttggaagttcttgttgtttccatactcagagtccctagttctgatgccagccatcagcatccagagagatgtacgagtagcggagcaattttttgaggctct

SEQ ID NO: 551070 - DNA, 120 bp, Artificial Sequence
  ENSG00000168404_32 (sequence is synthesized)
gaaaaatcagaagctcaaacttcctggtaactcaaggctaccaagtgaagctttggaatcgtcctctgggaaatcgccactggagatatcccgtttcaaggtgaagaatgtgaagactgg

SEQ ID NO: 551071 - DNA, 120 bp, Artificial Sequence
  ENSG00000168404_33 (sequence is synthesized)
ccatctatgccgcctgttctgatgactgccttccctcactgcccatttagcagggatgggctacaagtcatttccccttagatgcctggacaccacttctatgtccctacaacatacaat

SEQ ID NO: 551072 - DNA, 120 bp, Artificial Sequence
  ENSG00000168404_34 (sequence is synthesized)
gggggatcttgttaggtttaaggactcagactcacaggacaggtctaggccacacttgtcattcagttacttagaaggatgtcagcagcgccaaacctttccctccagggtgagtcctcg

SEQ ID NO: 551073 - DNA, 120 bp, Artificial Sequence
  ENSG00000168404_35 (sequence is synthesized)
cagtcatccaggagatactctctttgtcagagccacaggtgctggagaaagaggctcccattaggtgggtgtgggtcatccaggcttagaagcccatgacctgcaggagtcagcatctct

SEQ ID NO: 551074 - DNA, 120 bp, Artificial Sequence
  ENSG00000168404_36 (sequence is synthesized)
aggagtcagcatctctggtaacaactctgcaggcatgccttccagtgtttctgcaagtgacatgtgagttgctgttttaagagctgccacatctgggtatggtggctcacgcctgtaatc

SEQ ID NO: 551075 - DNA, 120 bp, Artificial Sequence
  ENSG00000168404_37 (sequence is synthesized)
aatcacttgaacccgggaggcagaggtttgcagtgagccgagatcgcgtggttgaactccagcccgggcaacaacagcaaaactccatctccaaaaaaaaagaaaaaagaaaagaaaaga

SEQ ID NO: 551076 - DNA, 90 bp, Artificial Sequence
  ENSG00000168404_38 (sequence is synthesized)
cgcactttggaagggaaggcaggaggatcactttgagcccaagagttcaagaccagccttggcaacacagtgagacctccccctcttcaa

SEQ ID NO: 551077 - DNA, 120 bp, Artificial Sequence
  ENSG00000168404_39 (sequence is synthesized)
gcaggaggatcactttgagcccaagagttcaagaccagccttggcaacacagtgagacctccccctcttcaaaaaatttaaaaatcagccagtcatggtggtgcacacctgtaattccag

SEQ ID NO: 551078 - DNA, 120 bp, Artificial Sequence
  ENSG00000168404_40 (sequence is synthesized)
ccagctactcaggagagtgaggcaggaggaggatgcctagagcccaggaggtcaaggctgcagggagctatgtttacgccactgtataccctagcctgggcaacagaatgagaccctgtc

SEQ ID NO: 551079 - DNA, 120 bp, Artificial Sequence
  ENSG00000168404_41 (sequence is synthesized)
tggcaattgtgtgtagcaacaatccctgccctttactcctctacccaagatcttgcttgtttctttctaagttgcctctctatctagcttgcaggatttgagttgaggaaaacacagact

SEQ ID NO: 551080 - DNA, 120 bp, Artificial Sequence
  ENSG00000168404_42 (sequence is synthesized)
tacactcacgttctggtacagattctaactcagatgtgcataataggaaaacccaaatcaaactcctccaaggaccacctaaactcaactctgttgaatgaaattgggtagtaatcaaaa

SEQ ID NO: 551081 - DNA, 120 bp, Artificial Sequence
  ENSG00000168404_43 (sequence is synthesized)
aattcactgagttttctggcagtggctagagggacaggggaaaggggagactagttatggttgttcagtttcttggttttcttttagctttggaatcgtcctctgggaaatcgccactgg

SEQ ID NO: 551082 - DNA, 120 bp, Artificial Sequence
  ENSG00000168411_0 (sequence is synthesized)
ggcagttggcgtaggtgcattcggagtgcggccgaggtaactaccgagtcttcggcgggctcgcgagcccggccgcggcctgctggtttcagtgatggctcatgaagcaatggaatatga

SEQ ID NO: 551083 - DNA, 120 bp, Artificial Sequence
  ENSG00000168411_1 (sequence is synthesized)
tgttcaggtgcagttaaatcatgccgaacaacagccagctcctgctggcatggccagcagccaagggggaccagccctcctccagcctgttcctgctgatgtggtcagcagccagggggt

SEQ ID NO: 551084 - DNA, 120 bp, Artificial Sequence
  ENSG00000168411_2 (sequence is synthesized)
accatccatcctccagccagctcctgctgaggtgatcagcagccaagcgacaccacccctgctccagcctgctccgcaactgtctgttgacctgacagaagtggaggtcttgggagaaga

SEQ ID NO: 551085 - DNA, 120 bp, Artificial Sequence
  ENSG00000168411_3 (sequence is synthesized)
cactgtggagaacatcaatccaagaacttcagaacaacataggcagggatctgatggtaatcacaccatcccagcatcttcgttgcattcaatgaccaacttcatcagcggactgcagag

SEQ ID NO: 551086 - DNA, 120 bp, Artificial Sequence
  ENSG00000168411_4 (sequence is synthesized)
acttcatggcatgctggaattcctgagaccttcatcttcaaaccacagtgtagggccaatgagaacaagaaggagggtatctgcttcacggagggcaagagccggagggtctcagaggac

SEQ ID NO: 551087 - DNA, 120 bp, Artificial Sequence
  ENSG00000168411_5 (sequence is synthesized)
agacagtgccaggttgagagcaccattggatgcttactttcaggtgagcaggacccagcctgacttgccagctaccacttatgattcagagactaggaatcctgtatctgaagagttgca

SEQ ID NO: 551088 - DNA, 120 bp, Artificial Sequence
  ENSG00000168411_6 (sequence is synthesized)
ggtgtctagtagttctgattctgacagtgacagctctgcagagtatggaggggttgttgaccaggcagaggaatctggagctgtcattttagaagagcaactagcaggtgtctcagcaga

SEQ ID NO: 551089 - DNA, 120 bp, Artificial Sequence
  ENSG00000168411_7 (sequence is synthesized)
gcaagaagttacatgtatcgatggaggcaagaccctccccaaacagccatctccccagaagtctgagcctctgctaccttctgcttctatggatgaggaagaaggggacacttgtacaat

SEQ ID NO: 551090 - DNA, 120 bp, Artificial Sequence
  ENSG00000168411_8 (sequence is synthesized)
atgtctggaacagtggaccaatgctggggaccaccggctctcagcattacgctgtgggcatctctttgggtataggtgcatttccacgtggcttaaaggacaagtacgaaaatgtcccca

SEQ ID NO: 551091 - DNA, 120 bp, Artificial Sequence
  ENSG00000168411_9 (sequence is synthesized)
gtgcaacaagaaagccaggcacagtgacattgtcgtcctttatgcccgaaccctgagagctttggacactagtgaacaggagcgcatgaaaagttccctactgaaggaacagatgctaag

SEQ ID NO: 551092 - DNA, 120 bp, Artificial Sequence
  ENSG00000168411_10 (sequence is synthesized)
gaaacaggccgagttagaatcagcacagtgccgactccaactgcaggtcctcactgataagtgcactaggcttcaaaggcgtgttcaggacttgcaaaaacttacgtcacatcaaagtca

SEQ ID NO: 551093 - DNA, 120 bp, Artificial Sequence
  ENSG00000168411_11 (sequence is synthesized)
gaatttacagcaacccaggggctcccaagcatgggtcctgagctgctcaccctccagccagggccagcacaagcacaagtaccacttccaaaagaccttcacagtatctcaggcaggaaa

SEQ ID NO: 551094 - DNA, 120 bp, Artificial Sequence
  ENSG00000168411_12 (sequence is synthesized)
ctgccggatcatggcatactgtgatgctctgagctgcctggtgatatcacagccttctcctcaggcctcttttcttccaggctttggtgttaagatgttgagtactgccaacatgaagag

SEQ ID NO: 551095 - DNA, 120 bp, Artificial Sequence
  ENSG00000168411_13 (sequence is synthesized)
cagtcagtacattccgatgcatggcaaacagatccgtggactggcgtttagcagttacctcagaggcttgctactctctgcttccctagacaacactattaaactgaccagcctggagac

SEQ ID NO: 551096 - DNA, 120 bp, Artificial Sequence
  ENSG00000168411_14 (sequence is synthesized)
aaataccgtggtccagacttataatgctggacgtcctgtctggagctgttgctggtgtcttgatgaggctaactacatctatgctggactggccaatggttcaattctggtatatgacgt

SEQ ID NO: 551097 - DNA, 120 bp, Artificial Sequence
  ENSG00000168411_15 (sequence is synthesized)
gcgaaacacgagcagtcatgtgcaggagttagtagctcagaaagccagatgcccactggtctccctgtcatacatgcccagagctgcctcagctgcatttccatatggtggggtgctggc

SEQ ID NO: 551098 - DNA, 120 bp, Artificial Sequence
  ENSG00000168411_16 (sequence is synthesized)
tggaaccttggaggatgcttcattctgggaacagaaaatggacttttctcattggcctcatgtgctgcccttggagccagggggctgcatagactttcagacagagaacagctcccggca

SEQ ID NO: 551099 - DNA, 120 bp, Artificial Sequence
  ENSG00000168411_17 (sequence is synthesized)
ctgtcttgtgacctacaggcctgataaaaatcacaccaccatacgaagtgtgctgatggaaatgtcctaccgactggatgacactggaaatccaatctgctcctgccagcctgtacatac

SEQ ID NO: 551100 - DNA, 120 bp, Artificial Sequence
  ENSG00000168411_18 (sequence is synthesized)
attttttggaggacctacttgcaaactattgaccaaaaatgccattttccaaagcccagagaatgatggcaacatcctggtgtgtactggggatgaagcagcaaattctgccctgctgtg

SEQ ID NO: 551101 - DNA, 120 bp, Artificial Sequence
  ENSG00000168411_19 (sequence is synthesized)
ggatgctgccagtggctcgttgctccaggacctacagaccgatcagcctgtgttggacatctgcccatttgaggtgaaccgtaacagctacttggctaccttaacagagaagatggtcca

SEQ ID NO: 551102 - DNA, 120 bp, Artificial Sequence
  ENSG00000168411_20 (sequence is synthesized)
cgaaaccttgaaggcatgctgctggttagatgttgtttgctagcgcctagcagccccaagcaagatccctgtttattgtctgcagtctagaacattgggaatcatggtttgtttgcatta

SEQ ID NO: 551103 - DNA, 120 bp, Artificial Sequence
  ENSG00000168411_21 (sequence is synthesized)
gtatgattctaggaccctaggtcactgagacactacagattgtgtatctgttatgtccactaaaagagtaattgatgggtactttatctacattatccatttcttgggtttaaagccttc

SEQ ID NO: 551104 - DNA, 120 bp, Artificial Sequence
  ENSG00000168411_22 (sequence is synthesized)
attaaccattattgtatgttggaaattcttattttctttattttctgtgtgactttctggaccttagagagtgtcctctcatcatctaggatgtgagtgggcatcaagcattttctgggg

SEQ ID NO: 551105 - DNA, 120 bp, Artificial Sequence
  ENSG00000168411_23 (sequence is synthesized)
aatatgacatcccatctgagttgtcctgtcacttaagtatccttgaagggactaaccatcgtcttggtactgatttgatgcaacgtagatgtaaaagagtattattcagttgaacacaag

SEQ ID NO: 551106 - DNA, 120 bp, Artificial Sequence
  ENSG00000168411_24 (sequence is synthesized)
agggcactgtagaaccttgtgtccggtttatttctgaccttgaaggctgacaatcttttagtaacttgtctcatctccacacaagtgtgtgatagcacacctgggtgtgctttgtggcaa

SEQ ID NO: 551107 - DNA, 120 bp, Artificial Sequence
  ENSG00000168411_25 (sequence is synthesized)
taacacttgtgttccaggtgtgaagtgctgggacattggcaggcccagtgatggaagcagctagtgaacgattccctttgctaatgcctagtgcattaagttcattgctttgcgaaaggt

SEQ ID NO: 551108 - DNA, 120 bp, Artificial Sequence
  ENSG00000168411_26 (sequence is synthesized)
aaggaaagaggccagttgtttgagcggtggggaagattttgttttttctagccagcttaggatctcaggattggttttatccaagctagtgctttgaagaacactatctcttgccaggaa

SEQ ID NO: 551109 - DNA, 120 bp, Artificial Sequence
  ENSG00000168411_27 (sequence is synthesized)
aagatgagtgataggtcaaagcttttacttgagtctcccctagtgtcagagatcaggagaaaagacataagagaatttacaaaagctattcagactgctattgaaaacatgagaagaact

SEQ ID NO: 551110 - DNA, 120 bp, Artificial Sequence
  ENSG00000168411_28 (sequence is synthesized)
tgtctcccattttgagagttcctatctaaataaagccaattcctcagactgaggggctgttcttaagtgttctttatacattccagttatccagttaaagccttccccatgtgaagctga

SEQ ID NO: 551111 - DNA, 120 bp, Artificial Sequence
  ENSG00000168411_29 (sequence is synthesized)
tgtttgattccagtttcctttgatttgcctccctaaccttttctagggctcagtttgtatttctttgccttgcctcagactactttgccaacccacttccacaacagaatatgcttcaag

SEQ ID NO: 551112 - DNA, 120 bp, Artificial Sequence
  ENSG00000168411_30 (sequence is synthesized)
atgtgggcaggtcagtgtcctgttcatgggagaaaatggcttaacagtctgattttctcaaatgattattgaagagttgttatcgtttttattataaaacacttctgacctgtcaattca

SEQ ID NO: 551113 - DNA, 120 bp, Artificial Sequence
  ENSG00000168411_31 (sequence is synthesized)
agagctgtttctaggatctttctctccggcaaggggttgttgcactagatttccccagagttccaagttctagttgtgccttttaatgaccctttaatattttaggacataattttttcc

SEQ ID NO: 551114 - DNA, 90 bp, Artificial Sequence
  ENSG00000168411_32 (sequence is synthesized)
ttttaatgaccctttaatattttaggacataattttttccttttttaaatttttttgtagaaatagatgtttcactacgttgtcaatcct

SEQ ID NO: 551115 - DNA, 120 bp, Artificial Sequence
  ENSG00000168411_33 (sequence is synthesized)
gccactgcacccggcccctatttgaagacgtcttttgtaaaagctagcttctagaacctgagaaaagctcttttctcagaggagatactccttttgatatgttaatgattaagagtggtt

SEQ ID NO: 551116 - DNA, 120 bp, Artificial Sequence
  ENSG00000168411_34 (sequence is synthesized)
gcccaggcctagtttcagtggcagaataggattggaattaaaaagcagaactcatctggcttcagcagattgccaccaagaggatacaggtggtcaggtcctggctggctttgtctttgg

SEQ ID NO: 551117 - DNA, 120 bp, Artificial Sequence
  ENSG00000168411_35 (sequence is synthesized)
gcctgggcaggcttaggatttgactttctttgaagtacctgatgctgattgattccactaatagtaggaagcaagagacttaactatgagggacgttatgtgaatcttaagtcttaccag

SEQ ID NO: 551118 - DNA, 120 bp, Artificial Sequence
  ENSG00000168411_36 (sequence is synthesized)
cttaccagtccttgcattagtacattaaatttggatgttttggaagcaaattcatacgatcgtgagtgatttctccaaagaaaaaaagccttgtccagcctgaccaacatggtgaaaccc

SEQ ID NO: 551119 - DNA, 120 bp, Artificial Sequence
  ENSG00000168411_37 (sequence is synthesized)
gcaagactccatctcaaaaaaaacaaacaaacaaaaaaaaaccctgatgccattcccagtccccgttgtaggacatcacatttataaatccaggctttagtcttctgggctccaccagtc

SEQ ID NO: 551120 - DNA, 120 bp, Artificial Sequence
  ENSG00000168411_38 (sequence is synthesized)
tccaggctttagtcttctgggctccaccagtctctgccccaccatattcctttgtcactacctctaagtttttttccccacttgaggatttggagttaaacgaactcaaaatgtcttgtc

SEQ ID NO: 551121 - DNA, 120 bp, Artificial Sequence
  ENSG00000168411_39 (sequence is synthesized)
attgtatgtattcttgcccctgctttgaaaacagggccatgggaactctgtttatgccctgttttaatgtttctgttttatgttttactgttaatatgaaaataaagaatttgctatgta

SEQ ID NO: 551122 - DNA, 120 bp, Artificial Sequence
  ENSG00000168411_40 (sequence is synthesized)
ggcgtaggtgcattcggagtgcggccgaggtaactaccgagtcttcggcgggctcgcgagcccggccgcggcctgctggtttcagacggagtcttactctctctcccggtctggagtgca

SEQ ID NO: 551123 - DNA, 120 bp, Artificial Sequence
  ENSG00000168411_41 (sequence is synthesized)
tacactgttatttataattcatgtctgatcatcttcttaaggaagtctgcatcgtttgccttatgtagagcattaaacacaaggatctggcacattacttctgttgccatttttgcttct

SEQ ID NO: 551124 - DNA, 120 bp, Artificial Sequence
  ENSG00000168411_42 (sequence is synthesized)
catatccctgaccaccccccgccacagcagttctccatacagaaaactcataagtgaagctttgcacatgcagtgcaatgtaaaaaattaccaggatttcggaagcacaaaacagttgct

SEQ ID NO: 551125 - DNA, 120 bp, Artificial Sequence
  ENSG00000168411_43 (sequence is synthesized)
tggcaagtcaggtaacttctgacccccagttcctcataggtggaaataaaagtgcttgccttacttcacaaagtaatgaagggataagttaaactgttgtgccttgaaaactaggtggta

SEQ ID NO: 551126 - DNA, 120 bp, Artificial Sequence
  ENSG00000168411_44 (sequence is synthesized)
gtttgttggcaatctctgtagagattggctgttgttcagattgtgtcttgtacaccaaaaattctttcttcacttgcaagtctctactcacccaaattcattattcactggcattccacc

SEQ ID NO: 551127 - DNA, 120 bp, Artificial Sequence
  ENSG00000168411_45 (sequence is synthesized)
gatcactgaaggagccgagttcgctgctgcggggcctgccctggccggggtgggaggtcgcccggcccttcccccgagagcctagcctcgggctcctcagcggcgttgcctgcgcccgct

SEQ ID NO: 551128 - DNA, 120 bp, Artificial Sequence
  ENSG00000168411_46 (sequence is synthesized)
ctgagcgccgattacttcatcactttaaagttgatggaagaacttcatttttaatttcatcacggaaactgtggagtaaagacttgtattatccctgttttacaggagaacaaacggagt

SEQ ID NO: 551129 - DNA, 74 bp, Artificial Sequence
  ENSG00000168411_47 (sequence is synthesized)
tctccagctagctcctggccgaatttgatttttatttaatttaaataaccatatgggagtagacagtgcggccc

SEQ ID NO: 551130 - DNA, 120 bp, Artificial Sequence
  ENSG00000168411_48 (sequence is synthesized)
tttaatttaaataaccatatgggagtagacagtgcggccccctagattctgctctttttagtccatttctcccctttgtcttcctgaaggctgagttgcttaatgtctcttgagtacatc

SEQ ID NO: 551131 - DNA, 120 bp, Artificial Sequence
  ENSG00000168411_49 (sequence is synthesized)
aactaccgagtcttcggcgggctcgcgagcccggccgcggcctgctggtttcagagatgggaatttcactgtgttgcccaagctggtctggaacaccagagcacggagtcttactctctc

SEQ ID NO: 551132 - DNA, 80 bp, Artificial Sequence
  ENSG00000168412_0 (sequence is synthesized)
gggaatccaagcgggctcgcggcggacaccaggtgtcacctggccgtggcgtccggcgcggcgtgggcgtccgggggcgc

SEQ ID NO: 551133 - DNA, 120 bp, Artificial Sequence
  ENSG00000168412_1 (sequence is synthesized)
gcgccgggcggagccttaacaagtggtcgggcgggcggacgaggcgggcgatggccccgcggccgggacgcgcacagggaccatgcagggcaacggcagcgcgctgcccaacgcctccca

SEQ ID NO: 551134 - DNA, 120 bp, Artificial Sequence
  ENSG00000168412_2 (sequence is synthesized)
gcccgtgctccgcggggacggcgcgcggccctcgtggctggcgtccgccctggcctgcgtcctcatcttcaccatcgtggtggacatcctgggcaacctcctggtcatcctgtcggtgta

SEQ ID NO: 551135 - DNA, 120 bp, Artificial Sequence
  ENSG00000168412_3 (sequence is synthesized)
tcggaacaagaagctcaggaacgcaggaaacatctttgtggtgagcttagcggtggcagacctggtggtggccatttatccgtacccgttggtgctgatgtcgatatttaacaacgggtg

SEQ ID NO: 551136 - DNA, 120 bp, Artificial Sequence
  ENSG00000168412_4 (sequence is synthesized)
gaacctgggctatctgcactgccaagtcagtgggttcctgatgggcctgagcgtcatcggctccatattcaacatcaccggcatcgccatcaaccgctactgctacatctgccacagtct

SEQ ID NO: 551137 - DNA, 120 bp, Artificial Sequence
  ENSG00000168412_5 (sequence is synthesized)
tccgtgcagggactctccagtacgacccgaggatctactcgtgcaccttcgcccagtccgtcagctccgcctacaccatcgccgtggtggttttccacttcctcgtccccatgatcatag

SEQ ID NO: 551138 - DNA, 120 bp, Artificial Sequence
  ENSG00000168412_6 (sequence is synthesized)
tcatcttctgttacctgagaatatggatcctggttctccaggtcagacagagggtgaaacctgaccgcaaacccaaactgaaaccacaggacttcaggaattttgtcaccatgtttgtgg

SEQ ID NO: 551139 - DNA, 120 bp, Artificial Sequence
  ENSG00000168412_7 (sequence is synthesized)
tttttgtcctttttgccatttgctgggctcctctgaacttcattggcctggccgtggcctctgaccccgccagcatggtgcctaggatcccagagtggctgtttgtggccagttactaca

SEQ ID NO: 551140 - DNA, 120 bp, Artificial Sequence
  ENSG00000168412_8 (sequence is synthesized)
tggcgtatttcaacagctgcctcaatgccattatatacgggctactgaaccaaaatttcaggaaggaatacaggagaattatagtctcgctctgtacagccagggtgttctttgtggaca

SEQ ID NO: 551141 - DNA, 120 bp, Artificial Sequence
  ENSG00000168412_9 (sequence is synthesized)
gctctaacgacgtggccgatagggttaaatggaaaccgtctccactgatgaccaacaataatgtagtaaaggtggactccgtttaaaaaagcaccacgttccgggtgagatggacacgct

SEQ ID NO: 551142 - DNA, 120 bp, Artificial Sequence
  ENSG00000168418_0 (sequence is synthesized)
gctggaaactggctccctgagacaagaagactggtaaacccagcgcttcctacctggtggtcttcagcaatgcccatgccttccagagacgggggcctgcatcccagacaccaccactat

SEQ ID NO: 551143 - DNA, 120 bp, Artificial Sequence
  ENSG00000168418_1 (sequence is synthesized)
ggttcccacagcccttggagtcagctcctgtccagccccatggagacgccgtccatcaagggcctttactaccggagggtgcggaaggtgggtgccctggacgcctccccagtggacctg

SEQ ID NO: 551144 - DNA, 120 bp, Artificial Sequence
  ENSG00000168418_2 (sequence is synthesized)
aagaaggagatcctgatcaacgtggggggcaggaggtatctcctcccctggagcacactggaccggttcccgctgagccgcctgagcaaactcaggctctgtcggagctacgaggagatc

SEQ ID NO: 551145 - DNA, 120 bp, Artificial Sequence
  ENSG00000168418_3 (sequence is synthesized)
gtgcagctctgcgatgattacgacgaggacagccaggagttcttcttcgacaggagccccagcgccttcggggtgatcgtgagcttcctggcggccgggaagctggtgcttctgcaggag

SEQ ID NO: 551146 - DNA, 120 bp, Artificial Sequence
  ENSG00000168418_4 (sequence is synthesized)
atgtgcgcgctgtccttccaggaggagctggcctactggggcatcgaggaggcccacctggagaggtgctgcctgcggaagctgctgaggaagctggaggagctggaggagctggccaag

SEQ ID NO: 551147 - DNA, 120 bp, Artificial Sequence
  ENSG00000168418_5 (sequence is synthesized)
ctgcacagggaggacgtactgaggcagcagagggagacccgccgccccgcctcgcactcctcgcgctggggcctgtgcatgaaccggctgcgcgagatggtggaaaacccgcagtccggg

SEQ ID NO: 551148 - DNA, 120 bp, Artificial Sequence
  ENSG00000168418_6 (sequence is synthesized)
ctgcccgggaaggtcttcgcttgcctctccatcctcttcgtggccaccacagccgtcagcctgtgtgtcagcaccatgcccgacctcagggcagaggaggaccagggcgaatgctctcgg

SEQ ID NO: 551149 - DNA, 120 bp, Artificial Sequence
  ENSG00000168418_7 (sequence is synthesized)
aagtgctactatattttcatcgtggagaccatctgcgtggcctggttctccctggagttctgcctgcggtttgtccaggcccaagacaagtgtcagttcttccaggggcccctgaacatc

SEQ ID NO: 551150 - DNA, 120 bp, Artificial Sequence
  ENSG00000168418_8 (sequence is synthesized)
atcgacatcctggccatctccccatactacgtgtcgctggcggtgtctgaggagcccccggaggacggcgagaggccgagcgggagctcctacctggagaaggtggggctggtcctgcgt

SEQ ID NO: 551151 - DNA, 120 bp, Artificial Sequence
  ENSG00000168418_9 (sequence is synthesized)
gtgctgcgagcgctgcgcatcctctacgtgatgcgcctggctcgccactcgctggggctgcagacgctggggctcaccgtgcgccgttgcacacgtgagttcggcctgctccttctcttc

SEQ ID NO: 551152 - DNA, 120 bp, Artificial Sequence
  ENSG00000168418_10 (sequence is synthesized)
ctggccgtggccatcaccctcttctcccctttggtctacgtggccgagaaggagtccgggcgggtgctggagttcaccagcatccccgcctcctattggtgggccatcatctccatgaca

SEQ ID NO: 551153 - DNA, 120 bp, Artificial Sequence
  ENSG00000168418_11 (sequence is synthesized)
acggtgggctacggggacatggtgccccgcagtgtgccaggccagatggtggccctcagcagcatcctgagcgggatcctcatcatggccttcccggccacgtctatcttccacaccttc

SEQ ID NO: 551154 - DNA, 120 bp, Artificial Sequence
  ENSG00000168418_12 (sequence is synthesized)
tcccactcctacctggagctcaagaaggagcaggagcagcttcaggcccgcctccgccacctccaaaacaccggtccagccagtgaatgtgaactcctggacccccatgtggccagtgaa

SEQ ID NO: 551155 - DNA, 120 bp, Artificial Sequence
  ENSG00000168418_13 (sequence is synthesized)
catgagctcatgaacgatgtcaatgacctaatcctggagggcccagccttgcctatcatgcacatgtaactcagcaccccccatgactacatggtaacctcaacccatcaccctgcctga

SEQ ID NO: 551156 - DNA, 120 bp, Artificial Sequence
  ENSG00000168418_14 (sequence is synthesized)
aacacactcaagggtaccccgcatagaccacctggtggtgtttctagagcccagggaagactttcaaagctggaggggcataaggccacagaggctgtgtgtctgtgatccttgtccctc

SEQ ID NO: 551157 - DNA, 120 bp, Artificial Sequence
  ENSG00000168418_15 (sequence is synthesized)
ggggccccgatgtcccaggctgactgtgtccagcctgcttgccttttcctctctctgcccatctactgagcatgtccaatcttgctggagtagctcagtctcctttcattctcttttcct

SEQ ID NO: 551158 - DNA, 120 bp, Artificial Sequence
  ENSG00000168418_16 (sequence is synthesized)
tcccagcagaggctttaacatcccaggctgggttctggatgcccatagaactggtaaccattggtatttgcatactgagcctatgtaatttcatgatttccctaagaccctccttcctgg

SEQ ID NO: 551159 - DNA, 120 bp, Artificial Sequence
  ENSG00000168418_17 (sequence is synthesized)
gccatgccaccactggaaatcaaaggtccagtcactgcaaacccctctaatcagatctccccacccaacctttccacgggttccagagggatcaatatgttctccttctgctcaccacca

SEQ ID NO: 551160 - DNA, 120 bp, Artificial Sequence
  ENSG00000168418_18 (sequence is synthesized)
ccagtgatatttccctaatgctgctacctcccgccagctctgaacacttgtagctaagaaggcagaatcagcctttttgcagtaaatctcatgttgaggctgatgcccccaagcctgcca

SEQ ID NO: 551161 - DNA, 120 bp, Artificial Sequence
  ENSG00000168418_19 (sequence is synthesized)
tcctttacctggagctcaagaaggagcaggcatccccaggcatgcctgggatctgtgacctgggacctgggacctgggacctgggcagaaactccactttccagcacagccaggccctcc

SEQ ID NO: 551162 - DNA, 120 bp, Artificial Sequence
  ENSG00000168418_20 (sequence is synthesized)
ctggccgcctggactcttggtgtggtgttctccagttatccagtccttagccttgacagagacaaactctttcagggtccatgttgtcccttgagaggatcgttcctgctgctggttgct

SEQ ID NO: 551163 - DNA, 120 bp, Artificial Sequence
  ENSG00000168418_21 (sequence is synthesized)
agcttttcatccacagctgagcccccatggactcaatgtagctttggcacagaaacaaggggaattgtaggtgctgtcccttgctggcttcccagactagtcatctccatgctggaggat

SEQ ID NO: 551164 - DNA, 120 bp, Artificial Sequence
  ENSG00000168418_22 (sequence is synthesized)
agacattcttagctcacatttcaatgtattcatttctgcattcatctgtgaacagagtctgtcctttgcatccaggggaggaggcagatggaggtctgagtcactggagataaaccagca

SEQ ID NO: 551165 - DNA, 120 bp, Artificial Sequence
  ENSG00000168418_23 (sequence is synthesized)
tattctgagagcaggcaggaaggagcaatgacttccaagcagtgggctcccaaaggcctcacagagacatgggcagggctggagagtagaggtgtattttaggagatgaagctgaacagc

SEQ ID NO: 551166 - DNA, 120 bp, Artificial Sequence
  ENSG00000168418_24 (sequence is synthesized)
tgggttgggttgagaaggcgtgggccttgaatgctttatggagggcagagtgatgtgcacaggctgtgggttagggagatgatgaggctggattgggcatgagaagcccagtttgggatg

SEQ ID NO: 551167 - DNA, 120 bp, Artificial Sequence
  ENSG00000168418_25 (sequence is synthesized)
aggagccattgagccattcaggcaagacagccctccctccttcacgggcttaatcctgcaagattctgtcaaatcctggcttctcccagcaggacacaccttggagacatcctgatggca

SEQ ID NO: 551168 - DNA, 120 bp, Artificial Sequence
  ENSG00000168418_26 (sequence is synthesized)
cttccccagagtggcatggcccacataggagtttgctgttggctctaggactcttgaagaaagtgcacaagatcaaaacaggtgacagtgaagtggtttcggccctgccaatctgatatc

SEQ ID NO: 551169 - DNA, 120 bp, Artificial Sequence
  ENSG00000168418_27 (sequence is synthesized)
gtgtacgtatgagagtggtcagcattttaccactggtaacaagttccttgctgttcattcattctgctagttttttgcgatttcccgctgtgtgccaggcatagtcctccactgatggca

SEQ ID NO: 551170 - DNA, 120 bp, Artificial Sequence
  ENSG00000168418_28 (sequence is synthesized)
atgccagacagcagcgtggcagagggctctggcccaggaagcaccctgcaccagcacctagcgtccagggagccttggcctcctggcgagcctgcctttccttggagtcctccaggtgtc

SEQ ID NO: 551171 - DNA, 120 bp, Artificial Sequence
  ENSG00000168418_29 (sequence is synthesized)
cccccaactatacaggcacatgtccccattcttttagaccccaatctttcccaagctgacatgtcaccaggtgacatagtggttcagtggccatgacacaaggaaagccccttcacccta

SEQ ID NO: 551172 - DNA, 120 bp, Artificial Sequence
  ENSG00000168418_30 (sequence is synthesized)
taaaatccccagcctggatggccactccactccacaaagtgacaggcagattcccataagcgttgcgtagaaattccatgtcacaggcaccttggacagtagccatagaagtgtttctgt

SEQ ID NO: 551173 - DNA, 120 bp, Artificial Sequence
  ENSG00000168418_31 (sequence is synthesized)
ctgttccagagtaacattttatttattacttatttatttatttatttattgacagagtctctctctgtccgccaggctggagtgcagtggcttgatcccagctcactgcaacctccgcct

SEQ ID NO: 551174 - DNA, 120 bp, Artificial Sequence
  ENSG00000168418_32 (sequence is synthesized)
tctcctgcctcagcctcccaaatagcggggattacaggcacccaccacctgtaatcccagctatttggagatcaaatgctcagctaatttgatatttttagtagagacaaggtttcacca

SEQ ID NO: 551175 - DNA, 120 bp, Artificial Sequence
  ENSG00000168418_33 (sequence is synthesized)
ttacaggcgtgagccaccgtgcccaagcctgactaacattttaataactacgcttaggcaaaatagtaaaaggacaaagtctcccacttactctctttctggggactgactggcttgggc

SEQ ID NO: 551176 - DNA, 120 bp, Artificial Sequence
  ENSG00000168418_34 (sequence is synthesized)
tactctctttctggggactgactggcttgggcgctggctgaaacccagtgtcttcactccctgtgtgacctcgggcaggccccttccccctcagttagctgcaggcaggtgttggactag

SEQ ID NO: 551177 - DNA, 120 bp, Artificial Sequence
  ENSG00000168418_35 (sequence is synthesized)
atctgtggttttctgacctgggttccacaaagcaagctcagggactgtcctgcggatgaagaagaccagcagcaaagcaggcagagctctgcctcctggggcaaaacatttgcaattaat

SEQ ID NO: 551178 - DNA, 120 bp, Artificial Sequence
  ENSG00000168418_36 (sequence is synthesized)
gacactgaaaagaatgtgcaaatccccagtctcctctccttcccgtcagtgtccagcccagccctttgaactgagtggtaagctcattctggaaccagagacaaagcctaaacagccact

SEQ ID NO: 551179 - DNA, 120 bp, Artificial Sequence
  ENSG00000168418_37 (sequence is synthesized)
ggaaggtctgggacccacatcagcccccacatctgccctgccttctcatcgaagacatattttgtgcgcatgcctggtgaaaacttcttaatgacagctctgcccatccctgtaactggc

SEQ ID NO: 551180 - DNA, 120 bp, Artificial Sequence
  ENSG00000168418_38 (sequence is synthesized)
ttctacccaggcatatcccttctcctctgcttcacctaccagacctcttcaccaaagtgtgccagcactaaaagaaacatttaaaatcaaaattaggtgaagcaccaccaccattatgag

SEQ ID NO: 551181 - DNA, 120 bp, Artificial Sequence
  ENSG00000168418_39 (sequence is synthesized)
attctatagtgtcttaatgttcacccagttgagattctctgctaaattagacatggaaaattggaattgattgctcgcatgtggggcttaattaaacgctctattttttctccctggtaa

SEQ ID NO: 551182 - DNA, 120 bp, Artificial Sequence
  ENSG00000168418_40 (sequence is synthesized)
ttcagatcttaaaataagaagaaaaaaatgaatattatccaacatgggttatattcattattaggccatcagtcataaaagataattttccatcttttttttttttattggagtcctgca

SEQ ID NO: 551183 - DNA, 120 bp, Artificial Sequence
  ENSG00000168418_41 (sequence is synthesized)
gtggccctcagccatgcgtggactcagtgggccacacagacacagtgtcacctctcccagctctcccgagtctgtgactacaggcaaatcacgccacctcctctctgagcctgtctccca

SEQ ID NO: 551184 - DNA, 120 bp, Artificial Sequence
  ENSG00000168418_42 (sequence is synthesized)
ctccgtgaaatgggtaacatcacctcgaaggtttactcacccagtgaactcaacatgtgtttactgaacaccactctgtgctaagccctagagcaggtcaaaaacataaaatccctgcct

SEQ ID NO: 551185 - DNA, 120 bp, Artificial Sequence
  ENSG00000168418_43 (sequence is synthesized)
tcttgagctaacattctcctgggcatccccactccattttcagatgaggaaactgaggcatgggccatttattttcctcggagctccacagtaaggatgccaatgatgcaaaggtccccg

SEQ ID NO: 551186 - DNA, 120 bp, Artificial Sequence
  ENSG00000168418_44 (sequence is synthesized)
gcctcagtttccctgcagtgctcagtgtctgggccagtctcactggatgggaaactcacagatgagctgatctgtaagtcactctgccccaggaggccagagtaaaaagtgctgcttgcc

SEQ ID NO: 551187 - DNA, 120 bp, Artificial Sequence
  ENSG00000168418_45 (sequence is synthesized)
cacaccttcgtcccctttgcagggagttacaggagaccccgagacaccctccctccactcgggagccagatggtctgagaagtgaaataagaacctagcatttggttgagagggttattg

SEQ ID NO: 551188 - DNA, 120 bp, Artificial Sequence
  ENSG00000168418_46 (sequence is synthesized)
gaaagcttcaaacagagaattagattgtttcctgatttaaaaaatcactcctctccagcaccgagctcccccagggctgcccatcatcttaatgtttggagcttgccttgtaatcaacag

SEQ ID NO: 551189 - DNA, 120 bp, Artificial Sequence
  ENSG00000168418_47 (sequence is synthesized)
agagagaaactaaacacatacgtaagatggtgcttgctctatttggctcctaacagttgccagcccacctaagttctcttcgcttaaagatatgtcccagggcaagacaacaggatcaga

SEQ ID NO: 551190 - DNA, 120 bp, Artificial Sequence
  ENSG00000168418_48 (sequence is synthesized)
gaacttgccagatagaaaagacttaaatggagaaccagcccatgcctcacagacagtaggatcccagtaaatatgggttgaataaaatgtgtcttgtccaacctacaaaagtttggccct

SEQ ID NO: 551191 - DNA, 120 bp, Artificial Sequence
  ENSG00000168418_49 (sequence is synthesized)
aaaaaaacccacaaaatatttggacctttaaacagcttgttttcccatggagaagatgacaatgccaatcataggcattttttcattctacagcataaaaacatgagatttaagagcctg

SEQ ID NO: 551192 - DNA, 120 bp, Artificial Sequence
  ENSG00000168421_0 (sequence is synthesized)
gtcacattcggattgctcctgctgccccacacacactaacccaaccatcttggggtggactccctgccagcccaactgttgtattttcagttcttccagtgtgaatcagttaatattctc

SEQ ID NO: 551193 - DNA, 120 bp, Artificial Sequence
  ENSG00000168421_1 (sequence is synthesized)
gggaacgagggagaggttgatcctatgaggaaatcaaccacagtgaaaaggcttgggccgcttttgttttcacctgcttttgttgaacaaatttgatttccggagtcagtcattttactg

SEQ ID NO: 551194 - DNA, 120 bp, Artificial Sequence
  ENSG00000168421_2 (sequence is synthesized)
tcaagacatttcttcggcattctgcaacagtttccaacatggctagatccatcagaaactgaagccgtggagaacgctctcggggcctttgccacttcttggagtagaagccgacagaga

SEQ ID NO: 551195 - DNA, 120 bp, Artificial Sequence
  ENSG00000168421_3 (sequence is synthesized)
gctgtttggaaacttctccttcacacaccagttgaagactaggctttggaggttttcaaagcagacggtgcttggatgggcagggagaagtaacattctgcaaatcgccgtcagaggtcc

SEQ ID NO: 551196 - DNA, 120 bp, Artificial Sequence
  ENSG00000168421_4 (sequence is synthesized)
tgaggacacagacctacctggcttgcattccccttgctgaatggcgtgtgctgcagctgcccactgagggctcttttccctgggattctggacttcagagtaggacagcaggctgggaag

SEQ ID NO: 551197 - DNA, 120 bp, Artificial Sequence
  ENSG00000168421_5 (sequence is synthesized)
atgctgagttccatcaagtgcgtgttggtgggcgactctgctgtggggaaaacctctctgttggtgcgcttcacctccgagaccttcccggaggcctacaagcccacagtgtacgagaac

SEQ ID NO: 551198 - DNA, 120 bp, Artificial Sequence
  ENSG00000168421_6 (sequence is synthesized)
acaggggtggacgtcttcatggatggcatccagatcagcctgggcctctgggacacagccggcaatgacgccttcagaagcatccggcccctgtcctaccagcaggcagacgtggtgctg

SEQ ID NO: 551199 - DNA, 120 bp, Artificial Sequence
  ENSG00000168421_7 (sequence is synthesized)
atgtgctactctgtggccaaccataactcattcctgaacttgaagaacaagtggattggtgaaattaggagcaacttgccctgtacccctgtgctggtggtggccacccagactgaccag

SEQ ID NO: 551200 - DNA, 120 bp, Artificial Sequence
  ENSG00000168421_8 (sequence is synthesized)
cgggagatggggccccacagggcctcctgcgtcaatgccatggaagggaagaaactggcccaggatgtcagagccaagggctacctggagtgctcagcccttagcaatcggggagtacag

SEQ ID NO: 551201 - DNA, 120 bp, Artificial Sequence
  ENSG00000168421_9 (sequence is synthesized)
caggtgtttgagtgcgccgtccgaactgccgtcaaccaggccaggagacgaaacagaaggaggctcttctccatcaatgagtgcaagatcttctaaaccccaagagacttcacacaacac

SEQ ID NO: 551202 - DNA, 120 bp, Artificial Sequence
  ENSG00000168421_10 (sequence is synthesized)
ttatgtatgcaccccaaagactaatggggagagggagggccgggaagccaggaaagcttggtgttttctctgggtacaccccaagcagcgtctccttttggatacagttattgatgaggc

SEQ ID NO: 551203 - DNA, 120 bp, Artificial Sequence
  ENSG00000168421_11 (sequence is synthesized)
ttggccactggatgttttcactaactacactctacaagtgaactccttgcccaggccagttagaaaatcccttggggaactgtgatgaatattccatctttgattaaaaaagtgaaatag

SEQ ID NO: 551204 - DNA, 120 bp, Artificial Sequence
  ENSG00000168421_12 (sequence is synthesized)
tctccataattttggacgatgaagtgagtttttcaaagaattccatatttaaagacacattttatttaactaataacaaaatgtattgcttttgtatatatttagttttcacacttggaa

SEQ ID NO: 551205 - DNA, 120 bp, Artificial Sequence
  ENSG00000168421_13 (sequence is synthesized)
aatcttttcctacatcctcgaaaacataaactcctctgtgagtgaaatgcttgtacgaagctctgccatatgtttgtagtgttattattttcacctcaagtagaaagtctgttgaaacca

SEQ ID NO: 551206 - DNA, 120 bp, Artificial Sequence
  ENSG00000168421_14 (sequence is synthesized)
cttggctgctggatttaaatgggtaatcaaatttaaaaatgaccataaatgaatctttgcaatttgttttctacttacctgttattcacagttggatataaaatacagttccataagata

SEQ ID NO: 551207 - DNA, 120 bp, Artificial Sequence
  ENSG00000168421_15 (sequence is synthesized)
tcctaatactgcctaatgattttaaagttatcactatatttttctgaaatgataaaacatcattcatttatttactatattgtctttcactcaactccagttatgcactaaatattctcc

SEQ ID NO: 551208 - DNA, 120 bp, Artificial Sequence
  ENSG00000168421_16 (sequence is synthesized)
tctcattcaccaagattgattgaaacaccatctttcaggtagagaatcagactgctccaagcaatggcaacagaacttggaacagaagcaagagagtgtcactttcacttctggtagggt

SEQ ID NO: 551209 - DNA, 120 bp, Artificial Sequence
  ENSG00000168421_17 (sequence is synthesized)
acataatttatgaatcgtaaggtctagttaggcttattggggggatatctacatatatatgtgtatgtaagggaaaaaaggtagaatttacagccttcaaaaaagaaaaatcaaattcca

SEQ ID NO: 551210 - DNA, 120 bp, Artificial Sequence
  ENSG00000168421_18 (sequence is synthesized)
agcacaggaataagaaagctatatagcaactgctcagagaacagaaagttatcaggggaaatactgaataaatagacacacacatactcgcacacaacctgctctcacacacacaactca

SEQ ID NO: 551211 - DNA, 120 bp, Artificial Sequence
  ENSG00000168421_19 (sequence is synthesized)
aacctcattctatcgaatagtttaaaagcaatggtgttgctcatctgttaaagtggagaacagaggactacataacttaaggtagaaattgcaaaggctgggttgggcagggcgtggtgg

SEQ ID NO: 551212 - DNA, 66 bp, Artificial Sequence
  ENSG00000168421_20 (sequence is synthesized)
agctgggtgtggtggcacatgcctgtagttctagctactcaagaggctgaggcaaaagaattgctc

SEQ ID NO: 551213 - DNA, 120 bp, Artificial Sequence
  ENSG00000168421_21 (sequence is synthesized)
aaaaagaaaagaaaaaaaagaaagaaattgcaaaggctggcacctagatagatcaatcaattactgccctaatcaaaacttagaaacactctgaaccacctttatgaaggtacatcattg

SEQ ID NO: 551214 - DNA, 120 bp, Artificial Sequence
  ENSG00000168421_22 (sequence is synthesized)
tttatgaaggtacatcattgttatggggtaacgtgactattacacacaaaaggtaaggtggctggcataaatgactttgattagaattatgttgacatagccaaaccagtttctctgttc

SEQ ID NO: 551215 - DNA, 120 bp, Artificial Sequence
  ENSG00000168421_23 (sequence is synthesized)
ccttgtgtggtcaattccttacagctataatcagtatcaaaaaccaaatgtgtgctcattcacacattgctttctccttctctctctcctcctatccacagccagtaaaaggcctgggac

SEQ ID NO: 551216 - DNA, 120 bp, Artificial Sequence
  ENSG00000168421_24 (sequence is synthesized)
cggggtcttgatctctggtgggaggattgcctcggttccctggggctgacacagctgccttcactcagacttctctgctctccaggcggtggcttgtactcacctctaagtcacccgcct

SEQ ID NO: 551217 - DNA, 120 bp, Artificial Sequence
  ENSG00000168421_25 (sequence is synthesized)
cccttgattggagagcccgtgtctctagttctcagctcagggttggggggcttgaaagatgaccgggcaggggaggggaagggatctcatatcctctgatatccctgggattctcttctt

SEQ ID NO: 551218 - DNA, 120 bp, Artificial Sequence
  ENSG00000168421_26 (sequence is synthesized)
ctccctcaacccacagagtcttaaatcacggatgcgggtgttcagggccagcctttgccatgagaggtatttaacatgtcagtgggaaggaatttctattcactgcagtgggctgtcccc

SEQ ID NO: 551219 - DNA, 120 bp, Artificial Sequence
  ENSG00000168421_27 (sequence is synthesized)
caggcttttctttctctcttgttgaagagagatgggggtgggtatctgaaagtgggaagggccaccatacatgatcctaagtgaaggaagaggaggtggttccacggtggcagcagagca

SEQ ID NO: 551220 - DNA, 120 bp, Artificial Sequence
  ENSG00000168421_28 (sequence is synthesized)
ggaagggaaggccagagagggcacactcaaatggctttgctgtcacctgggcaaagacacacaggtgagacctccacctgttggcgggagccaagcttaacagctccgtctgggaactct

SEQ ID NO: 551221 - DNA, 120 bp, Artificial Sequence
  ENSG00000168421_29 (sequence is synthesized)
catacctgagaccaggaatctatgtgtaaaccctttccagtggcagaatctggcagaaatggagccgataagtgtctgtcttcctgctagactgctgttcttgaaggtagcactgcctcc

SEQ ID NO: 551222 - DNA, 120 bp, Artificial Sequence
  ENSG00000168421_30 (sequence is synthesized)
tggtctcctcagtgtccccagggctcagcacagggaaggcaatggaggtaaagttgtgttaaactgaaatggagagaaagacagtaattgggcttctgtgccacacagtggttatagaaa

SEQ ID NO: 551223 - DNA, 120 bp, Artificial Sequence
  ENSG00000168421_31 (sequence is synthesized)
gcaagcagaccctcaccagccttgtaggggtaagaagaaaaataggtcatatgggtagaatccgtgtgttgtgtgttctacataagcacatacttacttttgcctgcctagatgcagaca

SEQ ID NO: 551224 - DNA, 120 bp, Artificial Sequence
  ENSG00000168421_32 (sequence is synthesized)
caggtttcttatacttcaaaatttgtggtacctttttgtagactattgcatatcgattcttaactattccaagtagcagcattaaatatgttcttgatgacattaaagagttaattttca

SEQ ID NO: 551225 - DNA, 120 bp, Artificial Sequence
  ENSG00000168421_33 (sequence is synthesized)
agtttgagaagaagcagtgatcaccttcttcttcactcttcacgctgatgaatttctacatcactgtgcatgtcctgtgctttgcagtcattccctaggagctcgggcccttgacccaaa

SEQ ID NO: 551226 - DNA, 120 bp, Artificial Sequence
  ENSG00000168421_34 (sequence is synthesized)
gatactgctcttactaacactacattttaaactcctcctctggactcactctcagagcctgccgcacaatctttaaaaactttgtcaatgattgcaaaatctttttccttttagagtgga

SEQ ID NO: 551227 - DNA, 120 bp, Artificial Sequence
  ENSG00000168421_35 (sequence is synthesized)
tattctaatggagagaaacgcacgtgcacacacacccccctaaacccacacaaatgaaaccccctctgcggagaagccggctacaggaaattgacttaggcacaggaacttgctaatctc

SEQ ID NO: 551228 - DNA, 120 bp, Artificial Sequence
  ENSG00000168421_36 (sequence is synthesized)
aagtgtttaccataaagggcagctgtgaggctgtgagatgggagaatcaatctatttattggtcagaaagtggttgttcagtaccttggatttctgagtgggcaaggctggaccctgagc

SEQ ID NO: 551229 - DNA, 120 bp, Artificial Sequence
  ENSG00000168421_37 (sequence is synthesized)
aacaccacgtgggtatacagcttggtggattttcacaaactgcacacacttgtggaaccagcatccagatcaggaagcaacagatgtcctttaaaacatcaagaactgggccggacatgg

SEQ ID NO: 551230 - DNA, 120 bp, Artificial Sequence
  ENSG00000168421_38 (sequence is synthesized)
actgtgtgaagattagaggcgtgtaggtcaggagcaggaggaagcccaacgctggactgtaccagatcatctaaaactggcaattccaggcacagaaaaccagttcttcagaagcagaag

SEQ ID NO: 551231 - DNA, 85 bp, Artificial Sequence
  ENSG00000168421_39 (sequence is synthesized)
tggatgagaaagagaaacgcacttcatcttcatccctccggagaaaaagaatgtgaaattgactaaatacatgtgagacaggatg

SEQ ID NO: 551232 - DNA, 120 bp, Artificial Sequence
  ENSG00000168421_40 (sequence is synthesized)
tcactgcaccttccacctcctggggtcaggtgattctcccacctcagcctcccgaattgctgggactacaggaatgcaccaccatgccggctaagttttgtatttttttgtagagatggg

SEQ ID NO: 551233 - DNA, 120 bp, Artificial Sequence
  ENSG00000168421_41 (sequence is synthesized)
aattccaacactttgggaggctgaggcgagaagatcacttgagcccaggagttcgggaccagcctcagcaacatagtgagaccttgtctctacacaaactaaacaaaattagctgatctt

SEQ ID NO: 551234 - DNA, 120 bp, Artificial Sequence
  ENSG00000168421_42 (sequence is synthesized)
cacaaactaaacaaaattagctgatcttggtgtttccaacatggctagatccatcagaaactgaagccgtggagaacgctctcggggcctttgccacttcttggagtagaagccgacaga

SEQ ID NO: 551235 - DNA, 120 bp, Artificial Sequence
  ENSG00000168421_43 (sequence is synthesized)
actgtggaatagtggtttctaaagctggctggacagcaaaaccacctggggagcttttaagaaactgaaattccatgtctcataccccagccctcacgtgaggtccaggaatctgtgtga

SEQ ID NO: 551236 - DNA, 120 bp, Artificial Sequence
  ENSG00000168421_44 (sequence is synthesized)
ttaaaaaatacaagccccaaaacaacttggaaagtggtcgttttgcaggtggggatttaggaaccaagaatccagaactctcctaccagggccccagaaacctttccaacatggctagat

SEQ ID NO: 551237 - DNA, 120 bp, Artificial Sequence
  ENSG00000168421_45 (sequence is synthesized)
gcatttcaacaaagtaccaaacctcaagagaaagggctgctccaaggatggaagatatatttggtagggagaggactttttatcacccttgattcactccatgtatggagtgctttgtac

SEQ ID NO: 551238 - DNA, 120 bp, Artificial Sequence
  ENSG00000168421_46 (sequence is synthesized)
aaggtacaaaacttctgtccttggtatgaacatttgggaggcaagtgagtgataatgacccacggctgcctttttgtccggcaaagcacgaggatgctttggagaacggaaggatttcat

SEQ ID NO: 551239 - DNA, 120 bp, Artificial Sequence
  ENSG00000168421_47 (sequence is synthesized)
tgtgtgtgtgtgtgtgtgtgttgggggaagacagatctaagctctccctgtgaggggaagagtggattgcacaagcggggttggatggctacactgagattaccccacatttaatcagtt

SEQ ID NO: 551240 - DNA, 120 bp, Artificial Sequence
  ENSG00000168421_48 (sequence is synthesized)
actgagattaccccacatttaatcagtttgccaatgaggaagccccttatcttcaaaaaaggcaagaaagaaagaaagacttcattttcccccttctctttctgttccagttgaagacta

SEQ ID NO: 551241 - DNA, 120 bp, Artificial Sequence
  ENSG00000168427_0 (sequence is synthesized)
ctgcaggcctccgtgtcccctggctgccggctaggcagtcctgctctctcgggtctgtgttctcagcttcgaggtccaggctgagtgagaggagctcgggcggctccaggcacttcttcc

SEQ ID NO: 551242 - DNA, 120 bp, Artificial Sequence
  ENSG00000168427_1 (sequence is synthesized)
cttgagtgggtggactactgaggtcccctgggcacggcgtcatggtgcggaacgtggatgacctggatttccacctgccctcgcatgcccaggacatgctggatggcctgcagcgcctgc

SEQ ID NO: 551243 - DNA, 120 bp, Artificial Sequence
  ENSG00000168427_2 (sequence is synthesized)
gctctcagcccaagctggccgacgtcacactgctggtgggcggccgggagctgccatgccaccgcggcctcctggcgctcagcagcccctacttccatgccatgtttgcgggtgacttcg

SEQ ID NO: 551244 - DNA, 120 bp, Artificial Sequence
  ENSG00000168427_3 (sequence is synthesized)
ccgagagcttctctgcgcgcgtggagctgcgggacgtggagcccgccgtggtgggacaactggtggacttcgtgtacacaggccggctgaccatcacgcagggcaacgtggaggcgctga

SEQ ID NO: 551245 - DNA, 120 bp, Artificial Sequence
  ENSG00000168427_4 (sequence is synthesized)
cacgcacggctgcgcgcctgcacttcccctcggtgcagaaggtctgcggccgctacctgcagcagcaactggatgccgccaactgcctgggcatctgtgagttcggggagcagcaagggc

SEQ ID NO: 551246 - DNA, 120 bp, Artificial Sequence
  ENSG00000168427_5 (sequence is synthesized)
tgctgggcgtggctgccaaggcctgggccttcctgcgagagaactttgaggctgtggcacgtgaggacgagttcctgcagcttccccgagagcggctggtcacttgtctggccggcgacc

SEQ ID NO: 551247 - DNA, 120 bp, Artificial Sequence
  ENSG00000168427_6 (sequence is synthesized)
tgctgcaggtacagccggagcaaagccgactcgaggccctgatgcgctgggtgcgccatgacccgcaggcccgggccgcccacctgcccgagctgctcagcctagtgcacctggacgccg

SEQ ID NO: 551248 - DNA, 120 bp, Artificial Sequence
  ENSG00000168427_7 (sequence is synthesized)
tgcccaggccctgcgtgcagcaactgctggcctcagagcccctgatccaggagtcagaggcatgccgggcagccctgtcccagggccatgatggggcaccactcgccctccagcagaagc

SEQ ID NO: 551249 - DNA, 120 bp, Artificial Sequence
  ENSG00000168427_8 (sequence is synthesized)
tggaggaggtcctggtggtggtgggcgggcaggcgctggaggaggaggaggcaggtgaggagcccacccccggccttgggaactttgccttctacaacagcaaggccaagaggtggatgg

SEQ ID NO: 551250 - DNA, 120 bp, Artificial Sequence
  ENSG00000168427_9 (sequence is synthesized)
cacttccagacttccccgactatcacaagtggggtttctccctggcggccctgaacaacaacatctatgtcacaggtggctctcggggcacaaagacagacacctggtcaaccacccagg

SEQ ID NO: 551251 - DNA, 120 bp, Artificial Sequence
  ENSG00000168427_10 (sequence is synthesized)
cctggtgcttccccctgaaggaggcctcctggaagcccgtggcgcccatgctgaagccccgcaccaaccacgccagcgcggccctcaatggggagatctacgttatcggcggcaccaccc

SEQ ID NO: 551252 - DNA, 120 bp, Artificial Sequence
  ENSG00000168427_11 (sequence is synthesized)
tggacgtggtggaggtggagagctatgacccctacacggacagctggacgcccgtcagcccggccctcaaatacgtcagcaacttctcggctgccggctgccggggccggctctacctgg

SEQ ID NO: 551253 - DNA, 120 bp, Artificial Sequence
  ENSG00000168427_12 (sequence is synthesized)
tgggctccagcgcctgcaagtacaacgccctggccctgcagtgctacaaccctgtcacagatgcgtggagtgtgatcgcctcgcccttcctgcccaagtacctgtcctcgcctcgctgtg

SEQ ID NO: 551254 - DNA, 120 bp, Artificial Sequence
  ENSG00000168427_13 (sequence is synthesized)
ctgcactgcacggggagctctacctcattggggacaacaccaagaaggtctacgtgtacgaccccggggccaacctgtggcagaaggtgcagtcacagcacagcctgcatgagaatggcg

SEQ ID NO: 551255 - DNA, 120 bp, Artificial Sequence
  ENSG00000168427_14 (sequence is synthesized)
cgctggtgccactgggtgatgcgctgtacgtgacgggcggccgctggcagggcatggaaggtgactaccacgtggagatggaggcctacgacacggttcgggacacctggacccgccacg

SEQ ID NO: 551256 - DNA, 120 bp, Artificial Sequence
  ENSG00000168427_15 (sequence is synthesized)
agtggacccagccctccggccccacccaggagcactaaaccagggccagggtccccggggaggagtccccacagcggcccctcatcagcctgtggaacggcccctttcattttcgcttat

SEQ ID NO: 551257 - DNA, 120 bp, Artificial Sequence
  ENSG00000168427_16 (sequence is synthesized)
ttgttcactcggagctaccattccttccaagctgcgctcaggccaccaggggtgatcagacggcatggcttggaggacacagccttggtctctgtggccaccacactaaactctgagctg

SEQ ID NO: 551258 - DNA, 120 bp, Artificial Sequence
  ENSG00000168427_17 (sequence is synthesized)
agcagtgacaagggcctgagtgccagacgctggcataacagggacaggaagctctgctgcccctggggttcccgagacctcagagaggggagccgggggccgggccagcattcccagagc

SEQ ID NO: 551259 - DNA, 120 bp, Artificial Sequence
  ENSG00000168427_18 (sequence is synthesized)
ttgcgagccccactcctgcccctggaccccagcaggggcttttggagcagttgcatgaatgtggggtgaacacggagcgtcccagaaagctgaggctgctggggaaggcaggccccggag

SEQ ID NO: 551260 - DNA, 120 bp, Artificial Sequence
  ENSG00000168427_19 (sequence is synthesized)
atgggatcagcaccaggtcctcgtgggcctgcttctgcccagctcacggcagcgtaactgtggccagccacctcccctctctgggcttcaagctccgcgtccaccacacacggggctggc

SEQ ID NO: 551261 - DNA, 120 bp, Artificial Sequence
  ENSG00000168427_20 (sequence is synthesized)
tgtgtgggctttgggtccccactcaggctttgcatgttggtgctgtgtttctgcttctgtggacaaaggaggcccccacccatctcttgcacccagagggcggtgcccacagaggcacca

SEQ ID NO: 551262 - DNA, 120 bp, Artificial Sequence
  ENSG00000168427_21 (sequence is synthesized)
ggaaggagggaggcagggcgtggggcggggctggagggtcccagggaggtgagcagttttgctctcagaagggattgcctccgtctctgtgtgtcagaacaaaggctcttcattagaatg

SEQ ID NO: 551263 - DNA, 120 bp, Artificial Sequence
  ENSG00000168427_22 (sequence is synthesized)
gaatttcccaccaggggacgactcttgggtgcattggtggcagcctcctgagggtgaggggtagcatccgatgggcccctgccagcatgcagcccgactccggctggctcaggctccgag

SEQ ID NO: 551264 - DNA, 120 bp, Artificial Sequence
  ENSG00000168427_23 (sequence is synthesized)
tggcttctccctcatcctgaatgaggcacccacctttgcagctaaggagacaatgaaggactctccctgggtgcccaatggcgtgtccctcctgtcacaggctccgccctgggacatggg

SEQ ID NO: 551265 - DNA, 120 bp, Artificial Sequence
  ENSG00000168427_24 (sequence is synthesized)
gctagaagtcaggagtcgggcccggccaggcacaggccctggtgttgccccagaggccctgggcagctccggtctcccgccggatccaggcttcctctccaggaccagcccctgggttcc

SEQ ID NO: 551266 - DNA, 120 bp, Artificial Sequence
  ENSG00000168427_25 (sequence is synthesized)
tccttaacaccccccgcccctggggaccagaggggcctctgacatccttgggttctgaggacggaaacccctgagcctcttgagcttctgtaggtagggatctgctttgctcccagacct

SEQ ID NO: 551267 - DNA, 65 bp, Artificial Sequence
  ENSG00000168427_26 (sequence is synthesized)
gctcccagacctgcctcgtccaggctggagtgcaatgctgagatcttggctcactgcaacctcca

SEQ ID NO: 551268 - DNA, 120 bp, Artificial Sequence
  ENSG00000168427_27 (sequence is synthesized)
cagcctcccaaagtgctgggattacaaggtgtgggagaagtgagttgaccctggagggccagacagagtggggcctctgggtgctaccaaaggaacaagagcccagagctgaggagacct

SEQ ID NO: 551269 - DNA, 120 bp, Artificial Sequence
  ENSG00000168427_28 (sequence is synthesized)
aaaggaacaagagcccagagctgaggagaccttcggtggcagatggattggatgaagcaagggtgagggtttctggggccctgggctctgtttccatgtggaaatctgaaatgttttcta

SEQ ID NO: 551270 - DNA, 120 bp, Artificial Sequence
  ENSG00000168427_29 (sequence is synthesized)
gacagtgatggaaggaggtcagccaaagggctgtttaaaaacaaagcctccatgtaaaccatttctgcaagaatattttaaaataaataaaaataaaactgaagacatgaaatgtcaaaa

SEQ ID NO: 551271 - DNA, 120 bp, Artificial Sequence
  ENSG00000168434_0 (sequence is synthesized)
gagggtcattcccagccgcaaactgagtgcgctgagcggggaagcgcaaaggggcaagttacccgtcctggcgtttctggggttcgcctcggaggctagcctcggtgctctcgcaggctc

SEQ ID NO: 551272 - DNA, 120 bp, Artificial Sequence
  ENSG00000168434_1 (sequence is synthesized)
gctcgcttctgcatccccgttgccgcccggagccaactcttaagttctggacgccaggcctgaggcagttccgccatggacttctccaagttcctggcagacgacttcgacgtgaaggag

SEQ ID NO: 551273 - DNA, 120 bp, Artificial Sequence
  ENSG00000168434_2 (sequence is synthesized)
tggatcaatgcggccttcagggccggctccaaggaggcggcgtccgggaaggcggatggccacgcagccaccctggtgatgaagctgcagctgttcatccaagaggtgaaccacgccgtg

SEQ ID NO: 551274 - DNA, 120 bp, Artificial Sequence
  ENSG00000168434_3 (sequence is synthesized)
gaggaaacaagtcaccaagctctccagaacatgcccaaagtgctccgtgatgttgaagccctaaaacaggaggcatctttcctgaaagaacagatgattcttgtcaaggaggacattaaa

SEQ ID NO: 551275 - DNA, 120 bp, Artificial Sequence
  ENSG00000168434_4 (sequence is synthesized)
aaatttgaacaggacacatctcaatccatgcaggtgttggtagaaattgaccaagtgaagtccagaatgcaacttgctgccgaatctcttcaggaagcagataagtggagcacgttgagc

SEQ ID NO: 551276 - DNA, 120 bp, Artificial Sequence
  ENSG00000168434_5 (sequence is synthesized)
gccgatattgaggagacatttaagactcaggacatagctgtgatttctgccaagctaacaggtatgcagaacagcttaatgatgcttgttgatacaccagactactcagaaaagtgtgtg

SEQ ID NO: 551277 - DNA, 120 bp, Artificial Sequence
  ENSG00000168434_6 (sequence is synthesized)
cacttggaggcactgaagaacaggctggaggccctagccagtccacagattgtagcggcattcacctctcaggctgtagatcagtccaaagtgtttgtgaaggtgtttactgaaattgac

SEQ ID NO: 551278 - DNA, 120 bp, Artificial Sequence
  ENSG00000168434_7 (sequence is synthesized)
cggatgccccagctcctggcctactactacaagtgtcacaaggtgcagcttttagcagcctggcaagagctgtgtcaaagtgacctatccctggaccggcagcttaccggactctatgat

SEQ ID NO: 551279 - DNA, 120 bp, Artificial Sequence
  ENSG00000168434_8 (sequence is synthesized)
gccttgcttggtgcttggcacacacaaatccagtgggctacacaggttttccagaagccccacgaggtggtaatggtgctgctgattcagaccctgggggccctcatgccctcgctgccc

SEQ ID NO: 551280 - DNA, 120 bp, Artificial Sequence
  ENSG00000168434_9 (sequence is synthesized)
tcctgcctcagcaacggcgtggagagggcagggcccgagcaggagctcaccaggctgctggagttctacgacgccaccgcccacttcgccaagggcttggagatggcactgctcccccac

SEQ ID NO: 551281 - DNA, 120 bp, Artificial Sequence
  ENSG00000168434_10 (sequence is synthesized)
ctacatgaacacaatctggtaaaagtcacggagctggtggatgctgtgtatgatccatacaaaccctaccagctgaagtatggcgacatggaagagagcaacctcctcatccagatgagt

SEQ ID NO: 551282 - DNA, 120 bp, Artificial Sequence
  ENSG00000168434_11 (sequence is synthesized)
gctgtgcctctggagcatggggaagtgattgactgtgtgcaggagctgagccactccgtgaacaagctgtttggtctggcgtctgcagccgttgacagatgcgtcagattcaccaatggc

SEQ ID NO: 551283 - DNA, 120 bp, Artificial Sequence
  ENSG00000168434_12 (sequence is synthesized)
ctgatttcaccagcactctccagtccatacgaaagaagtgcaaactggaccacattcctcccaactccctcttccaggaagattggacggcttttcagaactccattaggataatagcca

SEQ ID NO: 551284 - DNA, 120 bp, Artificial Sequence
  ENSG00000168434_13 (sequence is synthesized)
cctgtggagagcttttgcggcattgtggggacttcgagcagcagctagccaacaggattttgtccacagctgggaagtatctatctgattcctgcagcccccggagcctggctggttttc

SEQ ID NO: 551285 - DNA, 120 bp, Artificial Sequence
  ENSG00000168434_14 (sequence is synthesized)
aggagagcatcttgacagacaagaagaactctgccaagaacccatggcaagaatataattacctccagaaagataaccctgctgaatatgccagtttaatggaaatactttataccctta

SEQ ID NO: 551286 - DNA, 120 bp, Artificial Sequence
  ENSG00000168434_15 (sequence is synthesized)
aggaaaaagggtcaagcaaccacaacctgctggctgcacctcgagcagcgctgactcggcttaaccagcaggcccaccagctggctttcgattccgtgttcctgcgcatcaaacaacagc

SEQ ID NO: 551287 - DNA, 120 bp, Artificial Sequence
  ENSG00000168434_16 (sequence is synthesized)
tgttgcttatttcgaagatggacagctggaatacggctggcatcggagaaaccctcacagatgaactgcccgcctttagtctcacccctctcgagtacatcagcaacatcgggcagtaca

SEQ ID NO: 551288 - DNA, 120 bp, Artificial Sequence
  ENSG00000168434_17 (sequence is synthesized)
tcatgtccctccccctgaatcttgagccatttgtgactcaggaggactctgccttagagttggcattgcacgctggaaagctgccatttcctcctgagcagggggatgaattgcccgagc

SEQ ID NO: 551289 - DNA, 120 bp, Artificial Sequence
  ENSG00000168434_18 (sequence is synthesized)
tggacaacatggctgacaactggctgggctcgatcgccagagccacaatgcagacctactgtgatgcgatcctacagatccctgagctgagcccacactctgccaagcagctggccactg

SEQ ID NO: 551290 - DNA, 120 bp, Artificial Sequence
  ENSG00000168434_19 (sequence is synthesized)
acatcgactatctgatcaacgtgatggatgccctgggcctgcagccgtcccgcaccctccagcacatcgtgacgctactgaagaccaggcctgaggactatagacaggtcagcaaaggcc

SEQ ID NO: 551291 - DNA, 120 bp, Artificial Sequence
  ENSG00000168434_20 (sequence is synthesized)
tgccccgtcgcctggccaccaccgtggccaccatgcggagtgtgaattactgaccccaccacacaccggaccaccaagagagccagggctgctgtttcgcgactcaccagcacagatttg

SEQ ID NO: 551292 - DNA, 120 bp, Artificial Sequence
  ENSG00000168434_21 (sequence is synthesized)
agccagggctgctgtttcgcgactcaccagcacagatttgctcagaaactctgcccaagattgggcagaagttactttaaaaagacttggttcagctggtcacggtggctcacgcctgta

SEQ ID NO: 551293 - DNA, 120 bp, Artificial Sequence
  ENSG00000168434_22 (sequence is synthesized)
ttgtataatcaaaaagagttgtaaattaaagatgtattatttatcagagaagactttttagataatttttttaaaggatcagatcttgaaaatggaataaataactactgtgaaatgcaa

SEQ ID NO: 551294 - DNA, 120 bp, Artificial Sequence
  ENSG00000168434_23 (sequence is synthesized)
tcttgcctgctgcatctgtcagtttctcctttgccctccaggaatctcatcccaagtcttcccttagcttcagctgtggatttggctctgaagctggttgaaaattcaggttctccaggc

SEQ ID NO: 551295 - DNA, 120 bp, Artificial Sequence
  ENSG00000168434_24 (sequence is synthesized)
tagcaagaccgggctgaagctcagacatctatgttttcgaagaggacttgagaaccgttgaggggagcttcagtgagataagattcagcgagtcctgcagcctggccccacctggcccgc

SEQ ID NO: 551296 - DNA, 120 bp, Artificial Sequence
  ENSG00000168434_25 (sequence is synthesized)
tccatttgtgccataattcccaaccagtgtttaatgagctcttactgcataccaggcatgcctggcgctggaccaagcactcgcacccatcgtcttatgtaattccaaactcccctgtga

SEQ ID NO: 551297 - DNA, 120 bp, Artificial Sequence
  ENSG00000168434_26 (sequence is synthesized)
ggtgggtgctctcttctccatcataccgatagggaacggaggcccagggcagttccataacaaggccatgtggccagggtcactttgtggtctccatccagatagcatcctgcctgccaa

SEQ ID NO: 551298 - DNA, 120 bp, Artificial Sequence
  ENSG00000168434_27 (sequence is synthesized)
gcttcccttgggttgggttgcactgcccaggcaggagggaaaggcagcattgatatattgatcacctgcgacacatcaggtgctctcatgttcgtttcccgcttcatcccctatccatgc

SEQ ID NO: 551299 - DNA, 120 bp, Artificial Sequence
  ENSG00000168434_28 (sequence is synthesized)
tgccggatgggtggtaactgtggacagatggaagcagagactcagggaggtagaagggcttctctgaggtcacacctggctgcacctggtttgctcccccatgctgtctgttttgcccaa

SEQ ID NO: 551300 - DNA, 120 bp, Artificial Sequence
  ENSG00000168434_29 (sequence is synthesized)
agactgttctcccttgattcaggctctagagaagcattcaaacgttgggactatatttctgacatcgttattaagtgattttactacagatgagaaggcttggaggtcttcccctatctc

SEQ ID NO: 551301 - DNA, 120 bp, Artificial Sequence
  ENSG00000168434_30 (sequence is synthesized)
aatattgaggtcattataagaaggatgaatctataatctatatgcaagctaccagtgattcttttttagggtactgccataacaagcatcgccacatactagaaagatcagacttgggat

SEQ ID NO: 551302 - DNA, 120 bp, Artificial Sequence
  ENSG00000168434_31 (sequence is synthesized)
cacccgaggtctagcaattttgtctctctgccgtttgccttcacacaaatgtacccataaagtaataacccgtatgtgtcaatgtcaggctaacagcgctttcttttgtttcagatcggg

SEQ ID NO: 551303 - DNA, 120 bp, Artificial Sequence
  ENSG00000168438_0 (sequence is synthesized)
agaagatttgttgccgtcatgtcggctgcgattgcagctctggccgcttcctatggttcgggttcagggtccgaatcggactcggacagtgagagcagtcggtgtccgctgccagccgcc

SEQ ID NO: 551304 - DNA, 120 bp, Artificial Sequence
  ENSG00000168438_1 (sequence is synthesized)
gactccctcatgcacttgactaaatcgccttcatcaaagccgtctctagcagtggcagtggactcggctccggaggtggcagttaaggaagatttggagactggagttcaccttgaccct

SEQ ID NO: 551305 - DNA, 120 bp, Artificial Sequence
  ENSG00000168438_2 (sequence is synthesized)
gccgtcaaagaagttcagtataatcctacctatgagaccatgtttgctcctgagtttggaccagaaaatccctttaggacacagcaaatggctgcccctagaaatatgctttctggatat

SEQ ID NO: 551306 - DNA, 120 bp, Artificial Sequence
  ENSG00000168438_3 (sequence is synthesized)
gccgaaccagctcatatcaatgatttcatgtttgagcagcaaaggagaacttttgcaacatatggttatgcattagacccttcattagataatcatcaagtgtctgctaaatatattggt

SEQ ID NO: 551307 - DNA, 120 bp, Artificial Sequence
  ENSG00000168438_4 (sequence is synthesized)
tctgtagaagaagctgaaaaaaatcaaggtttaactgtatttgaaactggtcagaagaaaacagaaaagaggaaaaagtttaaagaaaatgatgcatccaatattgatggttttttggga

SEQ ID NO: 551308 - DNA, 120 bp, Artificial Sequence
  ENSG00000168438_5 (sequence is synthesized)
ccatgggcaaaatatgtggatgaaaaagatgtagccaaaccttcagaagaagagcaaaaagaattggatgaaatcacagcaaagaggcagaaaaaaggaaaacaggaagaagagaaacct

SEQ ID NO: 551309 - DNA, 120 bp, Artificial Sequence
  ENSG00000168438_6 (sequence is synthesized)
ggggaggagaagacaatcttacatgttaaagaaatgtatgactatcaaggcaggtcctatcttcacatacctcaggatgttggtgttaatctacggtcaactatgccacctgagaagtgt

SEQ ID NO: 551310 - DNA, 120 bp, Artificial Sequence
  ENSG00000168438_7 (sequence is synthesized)
tatcttcccaaaaaacaaattcatgtgtggtctggacacacaaagggcgtcagtgcagtcagattgtttcctctctctggccatttattgctgtcttgttccatggactgtaaaattaag

SEQ ID NO: 551311 - DNA, 120 bp, Artificial Sequence
  ENSG00000168438_8 (sequence is synthesized)
ctatgggaggtttatggagaacggcgctgtctgagaacatttattggtcacagtaaggctgttagggatatctgcttcaatactgcaggaacacagttcctcagtgcagcctatgacagg

SEQ ID NO: 551312 - DNA, 120 bp, Artificial Sequence
  ENSG00000168438_9 (sequence is synthesized)
tatcttaagctctgggacactgagacaggacagtgtatatcaagatttacaaaccgaaaagtaccttattgtgtcaaattcaatcctgatgaagataagcaaaatctctttgtggctggg

SEQ ID NO: 551313 - DNA, 120 bp, Artificial Sequence
  ENSG00000168438_10 (sequence is synthesized)
atgtctgataagaagattgtgcaatgggacattcgaagtggagaaattgtgcaggaatatgatcggcatttgggagctgtcaacaccattgtttttgtggatgagaataggagatttgtg

SEQ ID NO: 551314 - DNA, 120 bp, Artificial Sequence
  ENSG00000168438_11 (sequence is synthesized)
agcacatctgatgataaaagcctaagagtttgggaatgggatatccctgtggatttcaagtacatagcagaacccagtatgcactcaatgcctgcagtgactttgtctccaaatggaaaa

SEQ ID NO: 551315 - DNA, 120 bp, Artificial Sequence
  ENSG00000168438_12 (sequence is synthesized)
tggctagcatgccaatcaatggacaaccaaatcttaatttttggagcacagaacagatttagattaaataagaaaaaaatttttaagggccatatggtagcaggctatgcttgtcaggtg

SEQ ID NO: 551316 - DNA, 120 bp, Artificial Sequence
  ENSG00000168438_13 (sequence is synthesized)
gacttttcaccagacatgagttatgtgatttcaggagatggaaatggaaaattaaacatttgggactggaagaccacaaaactctacagtcgatttaaagctcatgataaagtgtgtata

SEQ ID NO: 551317 - DNA, 120 bp, Artificial Sequence
  ENSG00000168438_14 (sequence is synthesized)
ggtgcagtgtggcatcctcatgaaacttctaaggtcataacatgtggttgggatggtctcattaaattgtgggattaatgagattaatccttaaactagctgggatcatttttgatccat

SEQ ID NO: 551318 - DNA, 120 bp, Artificial Sequence
  ENSG00000168438_15 (sequence is synthesized)
tgtcatatttatatttaattattaaatgtatctgatgataacttgatttacagataatgttgatgacattgaccctttgtttaaaaaaagaaactgtaaatttgacataatttcatttgc

SEQ ID NO: 551319 - DNA, 120 bp, Artificial Sequence
  ENSG00000168438_16 (sequence is synthesized)
taaatgttatttatacagaaagtggctattgactttctatttgacaagtagttataattggcaagcagtttgagtttatactcatgacatactgaaagcatctctttggggtcaagaaag

SEQ ID NO: 551320 - DNA, 120 bp, Artificial Sequence
  ENSG00000168438_17 (sequence is synthesized)
aatccctagtggatttgggattctagaggaggtgttataattaattattcagaaaaatgcatgtatttacctcttcaaccaaaagggcagtaaagaatagggataatatattttaatgta

SEQ ID NO: 551321 - DNA, 120 bp, Artificial Sequence
  ENSG00000168438_18 (sequence is synthesized)
aatttggaagaaggataaaatcacccacagttactctccctattattttcactgggtcaagttttaatcttttggcttcatgagttccactccctttgatgatatatgttgtatattttt

SEQ ID NO: 551322 - DNA, 120 bp, Artificial Sequence
  ENSG00000168438_19 (sequence is synthesized)
agttgtaaagcagtaatctttaactgtagcattcctctaattataaacagtgaaaaatcaaaatcagtccagagttcttttgttgacttaattcctgatcagtatagacaggactatata

SEQ ID NO: 551323 - DNA, 120 bp, Artificial Sequence
  ENSG00000168438_20 (sequence is synthesized)
tatttaatcagagaattacattatatctgaagatggagctcaggagaatgcaccaagactttgaattgtatttacattcactgtcagtaaagacctggctacgctttgagaaatcaggat

SEQ ID NO: 551324 - DNA, 120 bp, Artificial Sequence
  ENSG00000168438_21 (sequence is synthesized)
ctcctaggtcattgcttcgcagctgtgattactgaaatcctcctcataggagataaagtacgaggggtagagtccaagatgtcaacttgtaatttctttgaagtcatatgttttatcttt

SEQ ID NO: 551325 - DNA, 120 bp, Artificial Sequence
  ENSG00000168438_22 (sequence is synthesized)
aaaattattcttattttacctgtgaatatatacaacagaactttttaagattaaaaaatttttaaacctctatgtctgaaaaaaaaaatgacactcctggaagatggctagggttcccca

SEQ ID NO: 551326 - DNA, 120 bp, Artificial Sequence
  ENSG00000168438_23 (sequence is synthesized)
aagatggctagggttccccagtttgagaagcagtggccatggtgaaaaatagtttttgaaaacatcagattataaaatcaagatagtccggacgcggtggcacatgcctgtaatcccagc

SEQ ID NO: 551327 - DNA, 120 bp, Artificial Sequence
  ENSG00000168438_24 (sequence is synthesized)
aagataacctcttgaatgtaatagctcatagcactttaatttggcaagccatttttcctgttttattataaatctatattagatgtttgaatatggtttgaaatatttcactaccgtgct

SEQ ID NO: 551328 - DNA, 120 bp, Artificial Sequence
  ENSG00000168438_25 (sequence is synthesized)
gaaaaaggttggttgatagcagcttggagtgctaactggaagatcaaaatcatgtctcttgctgataacctaagagcattaagctctgagtccagtgaggtcatagcagtgtatgctcct

SEQ ID NO: 551329 - DNA, 120 bp, Artificial Sequence
  ENSG00000168438_26 (sequence is synthesized)
tgcccttacggagtgtctgtttttagaaatttagattttaaaaggcgtgggacatacgaccaggccctatagccacataaatataaatttcatagaaaaagaataaaagcggagatatat

SEQ ID NO: 551330 - DNA, 120 bp, Artificial Sequence
  ENSG00000168438_27 (sequence is synthesized)
tttttgacacagaggcacccaaagaaatacaaacattgcctagctgctgccatttctgtaactgcccagaagggtgacagatttctgaaggggaaaggattcagatatgaccttttcttt

SEQ ID NO: 551331 - DNA, 120 bp, Artificial Sequence
  ENSG00000168438_28 (sequence is synthesized)
agtcccaaccactagttttaacaaatgtgaattattgaaatgtgaagggacaaaaagaatcatacatttaaactgtcttgttcagcataccaatattgtatgttacaaatcatcatttct

SEQ ID NO: 551332 - DNA, 120 bp, Artificial Sequence
  ENSG00000168438_29 (sequence is synthesized)
aaatctggattgattctgttgtgtttttgactgtttctaaagtaagtgtgtataaaagtctcctttttaaaaagatcatatttttaaataaagcattttttgtagaaagtgctatcaaaa

SEQ ID NO: 551333 - DNA, 120 bp, Artificial Sequence
  ENSG00000168438_30 (sequence is synthesized)
ttgtacatcttcatttttatgaaaaaccttcatatttactctgttcgctgttcatacaatatcaattacccttactatcagctgtaataaaatcattatgttaagtataattgtgttgga

SEQ ID NO: 551334 - DNA, 120 bp, Artificial Sequence
  ENSG00000168438_31 (sequence is synthesized)
caatttgtatcccaaggaaattacagcagacttctgtatactgataaaggagaaaaaatagcatgattaatgatagccacagataatttttttccaagtgtgaatgaattttattaaatg

SEQ ID NO: 551335 - DNA, 120 bp, Artificial Sequence
  ENSG00000168438_32 (sequence is synthesized)
gtagataaaaagaaacttgaatagtccacaatctattctttcgtaagataaagttgactcttttggtgtattaatagtgccccagtcattttaaatgtttttaatgaagccaaatactca

SEQ ID NO: 551336 - DNA, 120 bp, Artificial Sequence
  ENSG00000168438_33 (sequence is synthesized)
ggtatcctcacagttcataatcgttattcagctatattcagaataaacttggattttcgtgtgaaaagatggagcttaaggctctcatacttattttgacttgtagaaggaaatgcatat

SEQ ID NO: 551337 - DNA, 120 bp, Artificial Sequence
  ENSG00000168438_34 (sequence is synthesized)
tcaccaaaacaaatcgtaagtattctagaatgtacctgttaataattagttatatttaggaaaatacatagtgattatctaaaactgtaaagaatagcttagcatttacagtgttgctta

SEQ ID NO: 551338 - DNA, 120 bp, Artificial Sequence
  ENSG00000168438_35 (sequence is synthesized)
ttctaatgttatattacatcagatatttaggtttgatgaagccatatttggttcttcaagcttcagttttatctccaaggagtctatttagtactatggtacttaaaactataataacaa

SEQ ID NO: 551339 - DNA, 120 bp, Artificial Sequence
  ENSG00000168438_36 (sequence is synthesized)
taatataaaaataacatttattgagtacttactctgtgccaggcatgctgctaattgctgtatatatactatgtcatttaattctcacaggtgactttattgtaaaatttgtgatgaaag

SEQ ID NO: 551340 - DNA, 120 bp, Artificial Sequence
  ENSG00000168438_37 (sequence is synthesized)
aatgaaaaggaactggaagggcataagagaggaaagcaggggaaaaggatagttgatatattttgttttgttttaacttccttcttaacctgttttatttctgcttctttaccagtgact

SEQ ID NO: 551341 - DNA, 120 bp, Artificial Sequence
  ENSG00000168438_38 (sequence is synthesized)
aacaaggcccaagtattatcttcccttgctataattatgccacagtgaagtctttatagatcactaagatgtgtaagtgatgaaaagaagtatagatattatctaaaggtctataatctc

SEQ ID NO: 551342 - DNA, 120 bp, Artificial Sequence
  ENSG00000168438_39 (sequence is synthesized)
tggatatttaggaatttcgaaatactacctctagttgtaaatgatagcagttattttaagcacttaaatcttagctgactcatgatcttgacatcattggagtgttattacctaaacctt

SEQ ID NO: 551343 - DNA, 120 bp, Artificial Sequence
  ENSG00000168438_40 (sequence is synthesized)
aatatggaatgatatacctgtgaataaaatgttattttaagaatgttaggtttcatgactatgggttgtatttgtttattgattttctttgcctttttgtttcagttaaagaaatgtatg

SEQ ID NO: 551344 - DNA, 120 bp, Artificial Sequence
  ENSG00000168438_41 (sequence is synthesized)
gaaaaagatgtagccaaaccttcagaagtaagctttgatgtttttaattgtcaattcaggtatacgctgtatctctatgaaggatatctacattaataaacttgagatttctttagagaa

SEQ ID NO: 551345 - DNA, 120 bp, Artificial Sequence
  ENSG00000168438_42 (sequence is synthesized)
gtgactgcaggtccccaggaggggtgaggaggatggcaagtgggtgaaggtccagacctcaactcaagagcagctcccctttgatctccttgacatatttggaatccctcacaaatttgc

SEQ ID NO: 551346 - DNA, 120 bp, Artificial Sequence
  ENSG00000168438_43 (sequence is synthesized)
atttgggaaaagagctctcctgcttaaaaaaaatatgaaagcctctatcaataatttattcttaacagcttttgtaatgatttaatttatttaatcagtcctccttctggtggccatata

SEQ ID NO: 551347 - DNA, 120 bp, Artificial Sequence
  ENSG00000168438_44 (sequence is synthesized)
gatattttcccaaatggatgatgttacaaactgatgttatcaacaaactgggcaactaagtttgtgtgtgtgttctgtcattttgtaaaacagaattctgaaaagaagtgttgtaaatga

SEQ ID NO: 551348 - DNA, 120 bp, Artificial Sequence
  ENSG00000168438_45 (sequence is synthesized)
ttaaactggagattatttgcaagatatgagttactagcttattatactgaattacagtatccaattagtgctgtgtttgtttgtttgtttatttatttatttttgtgatggagtcttgct

SEQ ID NO: 551349 - DNA, 120 bp, Artificial Sequence
  ENSG00000168439_0 (sequence is synthesized)
ctagaagaactcgaccagtgagcaggcgaggaaggggcgggagccggggtcccggtagcttctagtaggttccagaaggcggcgcgtgcggttgggaacgcggagcggacggattcgatt

SEQ ID NO: 551350 - DNA, 120 bp, Artificial Sequence
  ENSG00000168439_1 (sequence is synthesized)
caacggggttccggaccgcgctgcgctatggagcaggtcaatgagctgaaggagaaaggcaacaaggccctgagcgtgggtaacatcgatgatgccttacagtgctactccgaagctatt

SEQ ID NO: 551351 - DNA, 120 bp, Artificial Sequence
  ENSG00000168439_2 (sequence is synthesized)
aagctggatccccacaaccacgtgctgtacagcaaccgttctgctgcctatgccaagaaaggagactaccagaaggcttatgaggatggctgcaagactgtcgacctaaagcctgactgg

SEQ ID NO: 551352 - DNA, 120 bp, Artificial Sequence
  ENSG00000168439_3 (sequence is synthesized)
ggcaagggctattcacgaaaagcagcagctctagagttcttaaaccgctttgaagaagccaagcgaacctatgaggagggcttaaaacacgaggcaaataaccctcaactgaaagagggt

SEQ ID NO: 551353 - DNA, 120 bp, Artificial Sequence
  ENSG00000168439_4 (sequence is synthesized)
ttacagaatatggaggccaggttggcagagagaaaattcatgaaccctttcaacatgcctaatctgtatcagaagttggagagtgatcccaggacaaggacactactcagtgatcctacc

SEQ ID NO: 551354 - DNA, 120 bp, Artificial Sequence
  ENSG00000168439_5 (sequence is synthesized)
taccgggagctgatagagcagctacgaaacaagccttctgacctgggcacgaaactacaagatccccggatcatgaccactctcagcgtcctccttggggtcgatctgggcagtatggat

SEQ ID NO: 551355 - DNA, 120 bp, Artificial Sequence
  ENSG00000168439_6 (sequence is synthesized)
gaggaggaagagattgcaacacctccaccaccaccccctcccaaaaaggagaccaagccagagccaatggaagaagatcttccagagaataagaagcaggcactgaaagaaaaagagctg

SEQ ID NO: 551356 - DNA, 120 bp, Artificial Sequence
  ENSG00000168439_7 (sequence is synthesized)
gggaacgatgcctacaagaagaaagactttgacacagccttgaagcattacgacaaagccaaggagctggaccccactaacatgacttacattaccaatcaagcagcggtatactttgaa

SEQ ID NO: 551357 - DNA, 120 bp, Artificial Sequence
  ENSG00000168439_8 (sequence is synthesized)
aagggcgactacaataagtgccgggagctttgtgagaaggccattgaagtggggagagaaaaccgagaagactatcgacagattgccaaagcatatgctcgaattggcaactcctacttc

SEQ ID NO: 551358 - DNA, 120 bp, Artificial Sequence
  ENSG00000168439_9 (sequence is synthesized)
aacaagtctctggcagagcaccgaaccccagatgtgctcaagaaatgccagcaggcagagaaaatcctgaaggagcaagagcggctggcctacataaaccccgacctggctttggaggag

SEQ ID NO: 551359 - DNA, 120 bp, Artificial Sequence
  ENSG00000168439_10 (sequence is synthesized)
aagaacaaaggcaacgagtgttttcagaaaggggactatccccaggccatgaagcattatacagaagccatcaaaaggaacccgaaagatgccaaattatacagcaatcgagctgcctgc

SEQ ID NO: 551360 - DNA, 120 bp, Artificial Sequence
  ENSG00000168439_11 (sequence is synthesized)
tacaccaaactcctggagttccagctggcactcaaggactgtgaggaatgtatccagctggagccgaccttcatcaagggttatacacggaaagccgctgcgctggaagcgatgaaggac

SEQ ID NO: 551361 - DNA, 120 bp, Artificial Sequence
  ENSG00000168439_12 (sequence is synthesized)
tacaccaaagccatggatgtgtaccagaaggcgctagacctggactccagctgtaaggaggcggcagacggctaccagcgctgtatgatggcgcagtacaaccggcacgacagccccgaa

SEQ ID NO: 551362 - DNA, 120 bp, Artificial Sequence
  ENSG00000168439_13 (sequence is synthesized)
gatgtgaagcgacgagccatggccgaccctgaggtgcagcagatcatgagtgacccagccatgcgccttatcctggaacagatgcagaaggacccccaggcactcagcgaacacttaaag

SEQ ID NO: 551363 - DNA, 120 bp, Artificial Sequence
  ENSG00000168439_14 (sequence is synthesized)
aatcctgtaatagcacagaagatccagaagctgatggatgtgggtctgattgcaattcggtgatgacttgttcatccccccttcccttcgccctcatgtggaaagaggagctgggaccgc

SEQ ID NO: 551364 - DNA, 120 bp, Artificial Sequence
  ENSG00000168439_15 (sequence is synthesized)
ggcgagcagcacggagcggaagggagagcaggggagagaaggcctcatctctctatatttatacataaccccggggaagacacagagactcgtacctgcgctgtttgtgccgccgctgcc

SEQ ID NO: 551365 - DNA, 120 bp, Artificial Sequence
  ENSG00000168439_16 (sequence is synthesized)
tctgggccctcccagcacacgcatggtctcttcaccgctgccctcgagttccatgtctctttcccctgcccctagttgctgtctcggctgctctcccatagttggttttttttttatttg

SEQ ID NO: 551366 - DNA, 120 bp, Artificial Sequence
  ENSG00000168439_17 (sequence is synthesized)
gggcagtgggcatgttatggggaggggagggggttcttccagcctcaggtcccagctgtctcacgttgtttattctgcgtccccttctccaataaaacaagccagttgggcgtggttata

SEQ ID NO: 551367 - DNA, 120 bp, Artificial Sequence
  ENSG00000168439_18 (sequence is synthesized)
atttcctctcccctaaagaagcgctctgcttcctgacaaagatctaggagagtaggtggaaaagggggagtttcagagcaagcaaagatgaagttagttttcattctaacggctgatact

SEQ ID NO: 551368 - DNA, 120 bp, Artificial Sequence
  ENSG00000168439_19 (sequence is synthesized)
actcagccgcttctcatcctctcaccaccccctctgctatggttccctgacaactaagaccctgaggcaaccacaagactgacaccagatctgctgcagcctcagaataaagcctggtcc

SEQ ID NO: 551369 - DNA, 120 bp, Artificial Sequence
  ENSG00000168439_20 (sequence is synthesized)
ttcagacccttccagaaatgccttttggtggcctgaggtttacctgtcctgatacactgatagttacctacccacctccctgtttgagtatcctcctcagaaatggcatttttcatcaaa

SEQ ID NO: 551370 - DNA, 120 bp, Artificial Sequence
  ENSG00000168439_21 (sequence is synthesized)
ggcggcgggcgggagcgggatctttagcgaggccggccgcggggagcgcccatcgccccctggttgggcgaggagggcccggcggaggccacagcttgggtcaatgagctgaaggagaaa

SEQ ID NO: 551371 - DNA, 120 bp, Artificial Sequence
  ENSG00000168439_22 (sequence is synthesized)
gaattcccctcggccctacaggaccaaacgaccggcgcgctgagaaagggtgtgcggttccactgaggacgcccaagcgggacagccgggcccgccgcggtgagatccccggcctgtcca

SEQ ID NO: 551372 - DNA, 120 bp, Artificial Sequence
  ENSG00000168439_23 (sequence is synthesized)
gcccaagcccaagcgccctcgcggtcacgtggcatttccggaacattcagaacctaacagccaggaggcaggagggccgggccgaggccggagcgctggacaacgcgggtagctggcgct

SEQ ID NO: 551373 - DNA, 120 bp, Artificial Sequence
  ENSG00000168439_24 (sequence is synthesized)
cgagggacaggcagctcccaccggctaggacccccatcccgatgcgcgggcgaagggctggggccctgtgccgctggcgatcccggggaccgcctggaactcgcggcactcgggagcgag

SEQ ID NO: 551374 - DNA, 120 bp, Artificial Sequence
  ENSG00000168439_25 (sequence is synthesized)
agggaaagcaacccagaggccccgcagccgccggcgacacagctacagaccccgactgcagccggtactcccatatatcaggggcggggcgaaacccggccttttgaagggcagcgattt

SEQ ID NO: 551375 - DNA, 120 bp, Artificial Sequence
  ENSG00000168439_26 (sequence is synthesized)
aaaccaatcagcgcaaagagttggcaaccctccgcccaattggaatcgctctcattctgaaggcggttccgacatggagtccggcagcccaatgggagaggtggaaatttccagaacgat

SEQ ID NO: 551376 - DNA, 120 bp, Artificial Sequence
  ENSG00000168439_27 (sequence is synthesized)
cagaaccaatgggcgcggccagcgcggctacgattggcagtgcaaaagaccaatccgtgtcgcagaagttcgctcctccctccattcgtggagcctgagatgggtcaatgagctgaagga

SEQ ID NO: 551377 - DNA, 120 bp, Artificial Sequence
  ENSG00000168439_28 (sequence is synthesized)
caaaagcaggcagatgagtgcacgcggctggggggtggtatgctcagtctgcgaggaagaggaattctgtcattcttcctaaacttaaggagattggcagtgggtggcgagctggaaggg

SEQ ID NO: 551378 - DNA, 120 bp, Artificial Sequence
  ENSG00000168439_29 (sequence is synthesized)
ctttgttagtcgtgatagcttaagcagtcatttggaaaggcccatttagctgggagaaaggtcttgactggaagctgtgtcgtgggctcaagagtaggactggcaagttctgcgaagtgg

SEQ ID NO: 551379 - DNA, 120 bp, Artificial Sequence
  ENSG00000168439_30 (sequence is synthesized)
agcaggcctctgcagctcggcgccccgggcctcgccaggacccctccctgccggggccttctgtagagggggttgaattggggcttgctctgagagcaagtaagactttaaaggttgtct

SEQ ID NO: 551380 - DNA, 120 bp, Artificial Sequence
  ENSG00000168439_31 (sequence is synthesized)
catttcaagtaactgcgtcttcctctgtagacacttaaagaatcctgtaatagcacagaagatccagaagctgatggatgtgggtctgattgcaattcggtgatgacttgttcatccccc

SEQ ID NO: 551381 - DNA, 120 bp, Artificial Sequence
  ENSG00000168439_32 (sequence is synthesized)
ggcatgagccaccgcacccagcgttgttttgttttttagtcagcaatggttttggattccaaagctctcaggaccaaggcccacgcattttgtctagttgtcatgtactcttcagtttct

SEQ ID NO: 551382 - DNA, 120 bp, Artificial Sequence
  ENSG00000168439_33 (sequence is synthesized)
tgcagagtccaggcagtttgtcttgtgtgggatgatccatcatctggagttgtctttcctgatgttgtcccctctgtttggtgctgggtgaggcattagagttggaagtccacatgcttg

SEQ ID NO: 551383 - DNA, 120 bp, Artificial Sequence
  ENSG00000168439_34 (sequence is synthesized)
agttgcctgtactgagcttgtccaagggaatgagcctaatttctttctgttgcttcattctaggactgtgaggaatgtatccagctggagccgaccttcatcaagggttatacacggaaa

SEQ ID NO: 551384 - DNA, 120 bp, Artificial Sequence
  ENSG00000168447_0 (sequence is synthesized)
agtcggtctcgccgcgctcgccgggtgtcccagtgtcaccaacactcggccgccgccgccagcttggcgcgcaccgccgcctccgccaccgccgacagcgcgcatcctccgtgtccccgc

SEQ ID NO: 551385 - DNA, 120 bp, Artificial Sequence
  ENSG00000168447_1 (sequence is synthesized)
tccgccgcccgagcaggtgccactatgcacgtgaagaagtacctgctgaagggcctgcatcggctgcagaagggccccggctacacgtacaaggagctgctggtgtggtactgcgacaac

SEQ ID NO: 551386 - DNA, 120 bp, Artificial Sequence
  ENSG00000168447_2 (sequence is synthesized)
accaacacccacggccccaagcgcatcatctgtgaggggcccaagaagaaagccatgtggttcctgctcaccctgctcttcgccgccctcgtctgctggcagtggggcatcttcatcagg

SEQ ID NO: 551387 - DNA, 120 bp, Artificial Sequence
  ENSG00000168447_3 (sequence is synthesized)
acctacttgagctgggaggtcagcgtctccctctccgtaggcttcaagaccatggacttccctgccgtcaccatctgcaatgctagccccttcaagtattccaaaatcaagcatttgctg

SEQ ID NO: 551388 - DNA, 120 bp, Artificial Sequence
  ENSG00000168447_4 (sequence is synthesized)
aaggacctggatgagctgatggaagctgtcctggagagaatcctggctcctgagctaagccatgccaatgccaccaggaacctgaacttctccatctggaaccacacacccctggtcctt

SEQ ID NO: 551389 - DNA, 120 bp, Artificial Sequence
  ENSG00000168447_5 (sequence is synthesized)
attgatgaacggaacccccaccaccccatggtccttgatctctttggagacaaccacaatggcttaacaagcagctcagcatcagaaaagatctgtaatgcccacgggtgcaaaatggcc

SEQ ID NO: 551390 - DNA, 120 bp, Artificial Sequence
  ENSG00000168447_6 (sequence is synthesized)
atgagactatgtagcctcaacaggacccagtgtaccttccggaacttcaccagtgctacccaggcattgacagagtggtacatcctgcaggccaccaacatctttgcacaggtgccacag

SEQ ID NO: 551391 - DNA, 120 bp, Artificial Sequence
  ENSG00000168447_7 (sequence is synthesized)
caggagctagtagagatgagctaccccggcgagcagatgatcctggcctgcctattcggagctgagccctgcaactaccggaacttcacgtccatcttctaccctcactatggcaactgt

SEQ ID NO: 551392 - DNA, 120 bp, Artificial Sequence
  ENSG00000168447_8 (sequence is synthesized)
tacatcttcaactggggcatgacagagaaggcacttccttcggccaaccctggaactgaattcggcctgaagttgatcctggacataggccaggaagactacgtccccttccttgcgtcc

SEQ ID NO: 551393 - DNA, 120 bp, Artificial Sequence
  ENSG00000168447_9 (sequence is synthesized)
acggccggggtcaggctgatgcttcacgagcagaggtcataccccttcatcagagatgagggcatctacgccatgtcggggacagagacgtccatcggggtactcgtggacaagcttcag

SEQ ID NO: 551394 - DNA, 120 bp, Artificial Sequence
  ENSG00000168447_10 (sequence is synthesized)
ctgaggtccccgtccaaaacttctacagtgactacaacacgacctactccatccaggcctgtcttcgctcctgcttccaagaccacatgatccgtaactgcaactgtggccactacctgt

SEQ ID NO: 551395 - DNA, 120 bp, Artificial Sequence
  ENSG00000168447_11 (sequence is synthesized)
acccactgccccgtggggagaaatactgcaacaaccgggacttcccagactgggcccattgctactcagatctacagatgagcgtggcgcagagagagacctgcattggcatgtgcaagg

SEQ ID NO: 551396 - DNA, 120 bp, Artificial Sequence
  ENSG00000168447_12 (sequence is synthesized)
agtcctgcaatgacacccagtacaagatgaccatctccatggctgactggccttctgaggcctccgaggactggattttccacgtcttgtctcaggagcgggaccaaagcaccaatatca

SEQ ID NO: 551397 - DNA, 120 bp, Artificial Sequence
  ENSG00000168447_13 (sequence is synthesized)
ccctgagcaggaagggaattgtcaagctcaacatctacttccaagaatttaactatcgcaccattgaagaatcagcagccaataacatcgtctggctgctctcgaatctgggtggccagt

SEQ ID NO: 551398 - DNA, 120 bp, Artificial Sequence
  ENSG00000168447_14 (sequence is synthesized)
ttggcttctggatggggggctctgtgctgtgcctcatcgagtttggggagatcatcatcgactttgtgtggatcaccatcatcaagctggtggccttggccaagagcctacggcagcggc

SEQ ID NO: 551399 - DNA, 120 bp, Artificial Sequence
  ENSG00000168447_15 (sequence is synthesized)
gagcccaagccagctacgctggcccaccgcccaccgtggccgagctggtggaggcccacaccaactttggcttccagcctgacacggccccccgcagccccaacactgggccctacccca

SEQ ID NO: 551400 - DNA, 120 bp, Artificial Sequence
  ENSG00000168447_16 (sequence is synthesized)
gtgagcaggccctgcccatcccaggcaccccgccccccaactatgactccctgcgtctgcagccgctggacgtcatcgagtctgacagtgagggtgatgccatctaaccctgcccctgcc

SEQ ID NO: 551401 - DNA, 120 bp, Artificial Sequence
  ENSG00000168447_17 (sequence is synthesized)
caccccgggcggctgaaactcactgagcagccaagactgttgcccgaggcctcactgtatggtgccctctccaaagggtcgggagggtagctctccaggccagagcttgtgtccttcaac

SEQ ID NO: 551402 - DNA, 120 bp, Artificial Sequence
  ENSG00000168447_18 (sequence is synthesized)
agagaggccagcggcaactggtccgttactggccaagggctctgtagaatcacggtgctggtacaggatgcaggaataaattgtatcttcacctggttcctaccctcgtccctacctgtc

SEQ ID NO: 551403 - DNA, 120 bp, Artificial Sequence
  ENSG00000168447_19 (sequence is synthesized)
ctgatcctggtcctgaagacccctcggaacaccctctcctggtggcaggccacttccctcccagtgccagtctccatccaccccagagaggaacaggcgggtgggccatgtggttttctc

SEQ ID NO: 551404 - DNA, 120 bp, Artificial Sequence
  ENSG00000168447_20 (sequence is synthesized)
cttcctggccttggctggcctctggggcaggggtggtggagagatggaagggcatcaggtgtagggaccctgccaagtggcacctgatttactctagaaaataaaagtagaaaatactga

SEQ ID NO: 551405 - DNA, 120 bp, Artificial Sequence
  ENSG00000168447_21 (sequence is synthesized)
gggctgagggtgagggacgggtggtcccccaagggaagctaaagaactgttagcagaaacagggaaaatagctggctgatgggccactaaaacccccaaatattggccacataacttctg

SEQ ID NO: 551406 - DNA, 120 bp, Artificial Sequence
  ENSG00000168447_22 (sequence is synthesized)
ccatgtgcgaggggtagggggtaagtgtaatgaaagggtcaaggcttggggtctggggttagaccacctagactcaaatcctggctccatcttacaagctgtgtgaccttgaacaagttt

SEQ ID NO: 551407 - DNA, 120 bp, Artificial Sequence
  ENSG00000168447_23 (sequence is synthesized)
taggggagagaacaatacctaccctacatggttactttgaatattaagtgaattaatatgcatgaccaccgcgcccagccttccccatcattttatagttgctgtaacctgcccagagag

SEQ ID NO: 551408 - DNA, 120 bp, Artificial Sequence
  ENSG00000168447_24 (sequence is synthesized)
gttaagtaacatctctgaagtcacacagttggtgagtggcagagctagcagtctgggccaggcccaccccgcatcactctattgcctcatcagaaagggtgatcgtcatcttccctccct

SEQ ID NO: 551409 - DNA, 120 bp, Artificial Sequence
  ENSG00000168447_25 (sequence is synthesized)
tgatgggtgtttcttttctgtagtaatttgagtctcgctgggggaaagacaagatggaagccagagcctgttttgcttgtttgcagagattttttaaaaatagaaatttttggcatgtta

SEQ ID NO: 551410 - DNA, 120 bp, Artificial Sequence
  ENSG00000168447_26 (sequence is synthesized)
gatacaggctaaaacatgcttgaacctcaaaacacttggctaagtggaagaagtcaggtcctctaagttgttgccaagaaggacaacaacctcggctatttgggagtgggctgagaagcc

SEQ ID NO: 551411 - DNA, 120 bp, Artificial Sequence
  ENSG00000168447_27 (sequence is synthesized)
ggttctgaggtccccgtccaaaacttctacagtgactacaacacgacctactccatccaggtgggaaggtggtgcacgcctcatgccccggggcccctgtccgggtttatggggccaagg

SEQ ID NO: 551412 - DNA, 120 bp, Artificial Sequence
  ENSG00000168447_28 (sequence is synthesized)
cctcagtactccgggagagctggccccagcaagtctggctctgctgggcctttgtaggttgccacggggcaccccgggcctgtgggaccagtcactttcctgggctctctcaccagggcc

SEQ ID NO: 551413 - DNA, 120 bp, Artificial Sequence
  ENSG00000168447_29 (sequence is synthesized)
tagggttggccacttctcatccccacattggcaggtgtacccctggggaagcccaggggattatggggatcttactctggggtttcccaagatgaaaacaaaaaatagcagctaacacca

SEQ ID NO: 551414 - DNA, 120 bp, Artificial Sequence
  ENSG00000168447_30 (sequence is synthesized)
cttgagccctctcatcaccagttatccatgctgctgcatataaacccagcttatttatttaaactgctgcatggattcccgccgtggataatgcctaccgatgggaatttaggtgacaaa

SEQ ID NO: 551415 - DNA, 120 bp, Artificial Sequence
  ENSG00000168453_0 (sequence is synthesized)
agttgcgcttctggcgatggcgatcagaggtcctgctgcgctctccgccgcgctctacctccattagccgcgctgcgcggtgctgcgccctcgccggtgcctctctcctgggtcccagga

SEQ ID NO: 551416 - DNA, 120 bp, Artificial Sequence
  ENSG00000168453_1 (sequence is synthesized)
tcggcccccaccatccaggcacgacccccttccccggcccctcggcctttcccccaactcggccatctccgacccggggcgcgtgttccccccggcccggcgccttctctccctccgggg

SEQ ID NO: 551417 - DNA, 120 bp, Artificial Sequence
  ENSG00000168453_2 (sequence is synthesized)
gcacccgctccctagccccggcccggccctccccgcggcgcagcacggagtctcggcgtcccatggcgcaacctacggcctcggcccagaagctggtgcggccgatccgcgccgtgtgcc

SEQ ID NO: 551418 - DNA, 120 bp, Artificial Sequence
  ENSG00000168453_3 (sequence is synthesized)
gcatcctgcagatcccggagtccgacccctccaacctgcggccctagagcgcccccgccgccccgggggaaggagagcgcgagcgcgctgagcagacagagcgggagaacgcgtcctcgc

SEQ ID NO: 551419 - DNA, 120 bp, Artificial Sequence
  ENSG00000168453_4 (sequence is synthesized)
ccatggggagcaggcgcccggtgccggccacgacgaccgccaccgcccgcgccgcgaccggccggtgaagcccagggacccccctctgggagagccccatgagggcaggagagtgatgga

SEQ ID NO: 551420 - DNA, 120 bp, Artificial Sequence
  ENSG00000168453_5 (sequence is synthesized)
agccccatgagggcaggagagtgatggagagtacgcccagcttcctgaagggcaccccaacctgggagaagacggccccagagaacggcatcgtgagacaggagcccggcagcccgcctc

SEQ ID NO: 551421 - DNA, 120 bp, Artificial Sequence
  ENSG00000168453_6 (sequence is synthesized)
gagatggactgcaccatgggccgctgtgcctgggagagcctgctcccttttggaggggcgtcctgagcaccccagactcctggcttccccctggcttcccccagggccccaaggacatgc

SEQ ID NO: 551422 - DNA, 120 bp, Artificial Sequence
  ENSG00000168453_7 (sequence is synthesized)
tcccacttgtggagggcgagggcccccagaatggggagaggaaggtcaactggctgggcagcaaagagggactgcgctggaaggaggccatgcttacccatccgctggcattctgcgggc

SEQ ID NO: 551423 - DNA, 120 bp, Artificial Sequence
  ENSG00000168453_8 (sequence is synthesized)
cagcgtgcccacctcgctgtggccccctgatgcctgagcatagtggtggccatctcaagagtgaccctgtggccttccggccctggcactgccctttccttctggagaccaagatcctgg

SEQ ID NO: 551424 - DNA, 120 bp, Artificial Sequence
  ENSG00000168453_9 (sequence is synthesized)
agcgagctcccttctgggtgcccacctgcttgccaccctacctagtgtctggcctgcccccagagcatccatgtgactggcccctgaccccgcacccctgggtatactccgggggccagc

SEQ ID NO: 551425 - DNA, 120 bp, Artificial Sequence
  ENSG00000168453_10 (sequence is synthesized)
ccaaagtgccctctgccttcagcttaggcagcaagggcttttactacaaggatccgagcattcccaggttggcaaaggagcccttggcagctgcggaacctgggttgtttggcttaaact

SEQ ID NO: 551426 - DNA, 120 bp, Artificial Sequence
  ENSG00000168453_11 (sequence is synthesized)
ctggtgggcacctgcagagagccggggaggccgaacgcccttcactgcaccagagggatggagagatgggagctggccggcagcagaatccttgcccgctcttcctggggcagccagaca

SEQ ID NO: 551427 - DNA, 120 bp, Artificial Sequence
  ENSG00000168453_12 (sequence is synthesized)
ctgtgccctggacctcctggcccgcttgtcccccaggccttgttcatactcttggcaacgtctgggctgggccaggcgatgggaaccttgggtaccagctggggccaccagcaacaccaa

SEQ ID NO: 551428 - DNA, 120 bp, Artificial Sequence
  ENSG00000168453_13 (sequence is synthesized)
ggtgcccctctcctgagccgcctgtcacccagcggggctgctgttcatcctacccacccactaaaggtgggggtcttggcccttgtgggaagtgccaggagggcctggaggggggtgcca

SEQ ID NO: 551429 - DNA, 120 bp, Artificial Sequence
  ENSG00000168453_14 (sequence is synthesized)
gtggagccagcgaacccagcgaggaagtgaacaaggcctctggccccagggcctgtccccccagccaccacaccaagctgaagaagacatggctcacacggcactcggagcagtttgaat

SEQ ID NO: 551430 - DNA, 120 bp, Artificial Sequence
  ENSG00000168453_15 (sequence is synthesized)
gtccacgcggctgccctgaggtcgaggagaggccggttgctcggctccgggccctcaaaagggcaggcagccccgaggtccagggagcaatgggcagtccagcccccaagcggccaccgg

SEQ ID NO: 551431 - DNA, 120 bp, Artificial Sequence
  ENSG00000168453_16 (sequence is synthesized)
acccttttccaggcactgcagaacagggggctgggggttggcaggaggtgcgggacacatcgatagggaacaaggatgtggactcgggacagcatgatgagcagaaaggaccccaagatg

SEQ ID NO: 551432 - DNA, 120 bp, Artificial Sequence
  ENSG00000168453_17 (sequence is synthesized)
gccaggccagtctccaggacccgggacttcaggacataccatgcctggctctccctgcaaaactggctcaatgccaaagttgtgcccaggcagctggagagggaggagggcacgcctgcc

SEQ ID NO: 551433 - DNA, 120 bp, Artificial Sequence
  ENSG00000168453_18 (sequence is synthesized)
actctcagcaagtgcggagatcgcctctgggaggggagctgcagcaggaggaagacacagccaccaactccagctctgaggaaggcccagggtccggccctgacagccggctcagcacag

SEQ ID NO: 551434 - DNA, 120 bp, Artificial Sequence
  ENSG00000168453_19 (sequence is synthesized)
gcctcgccaagcacctgctcagtggtttgggggaccgactgtgccgcctgctgcggagggagcgggaggccctggcttgggcccagcgggaaggccaagggccagccgtgacagaggaca

SEQ ID NO: 551435 - DNA, 120 bp, Artificial Sequence
  ENSG00000168453_20 (sequence is synthesized)
gcccaggcattccacgctgctgcagccgttgccaccatggactcttcaacacccactggcgatgtccccgctgcagccaccggctgtgtgtggcctgtggtcgtgtggcaggcactgggc

SEQ ID NO: 551436 - DNA, 120 bp, Artificial Sequence
  ENSG00000168453_21 (sequence is synthesized)
gggccagggagaaagcaggctttcaggagcagtccgcggaggagtgcacgcaggaggccgggcacgctgcctgttccctgatgctgacccagtttgtctccagccaggctttggcagagc

SEQ ID NO: 551437 - DNA, 120 bp, Artificial Sequence
  ENSG00000168453_22 (sequence is synthesized)
gtatgggcccccggggatgcaggccagcagaaggaatcaacacagaaaacgcccccaactccacaaccttcctgcaatggcgacacccacaggaccaagagcatcaaagaggagaccccc

SEQ ID NO: 551438 - DNA, 120 bp, Artificial Sequence
  ENSG00000168453_23 (sequence is synthesized)
gattccgctgagaccccagcagaggaccgtgctggccgagggcccctgccttgtccttctctctgcgaactgctggcttctaccgcggtcaaactctgcttgggccatgagcgaatacac

SEQ ID NO: 551439 - DNA, 120 bp, Artificial Sequence
  ENSG00000168453_24 (sequence is synthesized)
atggccttcgcccccgtcactccggccctgcccagtgatgaccgcatcaccaacatcctggacagcattatcgcacaggtggtggaacggaagatccaggagaaagccctggggccgggg

SEQ ID NO: 551440 - DNA, 120 bp, Artificial Sequence
  ENSG00000168453_25 (sequence is synthesized)
cttcgagctggcccgggtctgcgcaagggcctgggcctgcccctctctccagtgcggccccggctgcctcccccaggggctttgctgtggctgcaggagccccagccttgccctcggcgt

SEQ ID NO: 551441 - DNA, 120 bp, Artificial Sequence
  ENSG00000168453_26 (sequence is synthesized)
ggcttccacctcttccaggagcactggaggcagggccagcctgtgttggtgtcagggatccaaaggacattgcagggcaacctgtgggggacagaagctcttggggcacttggaggccag

SEQ ID NO: 551442 - DNA, 120 bp, Artificial Sequence
  ENSG00000168453_27 (sequence is synthesized)
gtgcaggcgctgagccccctcggacctccccagcccagcagcctgggcagcacaacattctgggagggcttctcctggcctgagcttcgcccaaagtcagacgagggctctgtcctcctg

SEQ ID NO: 551443 - DNA, 120 bp, Artificial Sequence
  ENSG00000168453_28 (sequence is synthesized)
ctgcaccgagctttgggggatgaggacaccagcagggtggagaacctagctgccagtctgccacttccggagtactgcgccctccatggaaaactcaacctggcttcctacctcccaccg

SEQ ID NO: 551444 - DNA, 120 bp, Artificial Sequence
  ENSG00000168453_29 (sequence is synthesized)
ggccttgccctgcgtccactggagccccagctctgggcagcctatggtgtgagcccgcaccggggacacctggggaccaagaacctctgtgtggaggtggccgacctggtcagcatcctg

SEQ ID NO: 551445 - DNA, 120 bp, Artificial Sequence
  ENSG00000168453_30 (sequence is synthesized)
gtgcatgccgacacaccactgcctgcctggcaccgggcacagaaagacttcctttcaggcctggacggggaggggctctggtctccgggcagccaggtcagcactgtgtggcacgtgttc

SEQ ID NO: 551446 - DNA, 120 bp, Artificial Sequence
  ENSG00000168453_31 (sequence is synthesized)
cgggcacaggacgcccagcgcatccgccgctttctccagatggtgtgcccggccggggcaggcgccctggagcctggcgccccaggcagctgctacctggatgcagggctgcggcggcgc

SEQ ID NO: 551447 - DNA, 120 bp, Artificial Sequence
  ENSG00000168453_32 (sequence is synthesized)
ctgcgggaggagtggggcgtgagctgctggaccctgctccaggcccccggagaggccgtgctggtgcctgcaggggctccccaccaggtgcagggcctggtgagcacagtcagcgtcact

SEQ ID NO: 551448 - DNA, 120 bp, Artificial Sequence
  ENSG00000168453_33 (sequence is synthesized)
cagcacttcctctcccctgagacctctgccctctctgctcagctctgccaccagggacccagccttccccctgactgccacctgctttatgcccagatggactgggctgtgttccaagca

SEQ ID NO: 551449 - DNA, 120 bp, Artificial Sequence
  ENSG00000168453_34 (sequence is synthesized)
gtgaaggtggccgtggggacattacaggaggccaaatagagggatgctaggtgtctgggatcggggtggggacaggtagaccaggtgctcagcccaggcacaacttcagcaggggatggc

SEQ ID NO: 551450 - DNA, 120 bp, Artificial Sequence
  ENSG00000168453_35 (sequence is synthesized)
gctaggggacttggggatttctggtcaaccccacaagcaccactctgggcacaagcagggcactctgttcccctcccccttaagccaacaaccacagtgccaccaagctcacacctgtcc

SEQ ID NO: 551451 - DNA, 120 bp, Artificial Sequence
  ENSG00000168453_36 (sequence is synthesized)
ttctcaggctggcatctcccccaccctgtgccccttttcatggtaccaggcccgcactgggggcaattgacttcctccaatccccactcctccgagacccaggagacaaacagcccttcc

SEQ ID NO: 551452 - DNA, 120 bp, Artificial Sequence
  ENSG00000168453_37 (sequence is synthesized)
ttggggaaacttgggaatcattctggcttaaacaacacctcctcctgctgctcactcccgctgagcccactctactgccccagctccgtttctaccaccgcatcctcactgggctcactg

SEQ ID NO: 551453 - DNA, 120 bp, Artificial Sequence
  ENSG00000168453_38 (sequence is synthesized)
caggcatgctgaacaaggggcctccaaccttctgccctcctgccaaaagatctggggagtgtgaggagagggtggcatcaggagctgctcaggcttggcggagggagcggcatgggcgat

SEQ ID NO: 551454 - DNA, 120 bp, Artificial Sequence
  ENSG00000168453_39 (sequence is synthesized)
gtcactcagccccttcccggtccgcccgcttccctccttcatgatttccattaaagtctgttgttttgtgactgctgccagtgtggttggccctgcccctgcaggccacatggtccaggg

SEQ ID NO: 551455 - DNA, 120 bp, Artificial Sequence
  ENSG00000168453_40 (sequence is synthesized)
agggagggggacatggaaatctgccttagagacaaatggagtagggcagcccggagctggggcccaagggacaggacaccactgcctgctcttcgtctggggcctggggccttgcctccc

SEQ ID NO: 551456 - DNA, 120 bp, Artificial Sequence
  ENSG00000168453_41 (sequence is synthesized)
actgaggagactttgggtggggtggggggctgtcccccaaagatgctcctgagtgcaagagcaggcaaggcagagtcctggggcacagccacgaggtgacctccctgtgcagagactccc

SEQ ID NO: 551457 - DNA, 120 bp, Artificial Sequence
  ENSG00000168453_42 (sequence is synthesized)
gagccctactccacccagcaagctccagtccgccccatctctcccgtctaccctgacctggagatccagaagtatggcccagaagagcccttgccccgcctgtctgcccttggtggcagt

SEQ ID NO: 551458 - DNA, 120 bp, Artificial Sequence
  ENSG00000168453_43 (sequence is synthesized)
ggccatggccgacgccaggcccagccaccctgggactgagcctgactgcttcagacagccgacccctccttgtccccgctccacgcccgcagcctcctggtggcgctccgccctctcccg

SEQ ID NO: 551459 - DNA, 120 bp, Artificial Sequence
  ENSG00000168453_44 (sequence is synthesized)
cttcctttgtgtatctcagccctacaaagaaaaacactcccactcttgtcatacctaattgttcctgctgtggtttggggaattttttttattaaataaagttttttattataagggtaa

SEQ ID NO: 551460 - DNA, 120 bp, Artificial Sequence
  ENSG00000168453_45 (sequence is synthesized)
gttaggggagactgcctggaggagatgctcccggaggggctagcaaggaagggggctgagggaagtggagggagagatgggtcaggtgaggagccagggaaggggaaggtgatggggtgg

SEQ ID NO: 551461 - DNA, 120 bp, Artificial Sequence
  ENSG00000168453_46 (sequence is synthesized)
gctggaggcaagaagcttgaggcgcaggggaggagagagtccaggggtaaggcgagggcagccccgtggttcccaagtccagctgagccctcattatcctggggaaaagacttccaccta

SEQ ID NO: 551462 - DNA, 120 bp, Artificial Sequence
  ENSG00000168453_47 (sequence is synthesized)
gtgtcacccctcgccaaggcacacacacacacggagacgtgcagaggccagcatggtgtgcacccctcctgcccacaggtacacacatgtgtagatacacacacagatgctgggacacgc

SEQ ID NO: 551463 - DNA, 120 bp, Artificial Sequence
  ENSG00000168453_48 (sequence is synthesized)
agaggggagcagacaagcacacctccacacacagatggcctcttctgggctgggtgtggctggccgtgggcagtcactacggcccaacccagtgactcacggggcagggctgaggggcac

SEQ ID NO: 551464 - DNA, 120 bp, Artificial Sequence
  ENSG00000168453_49 (sequence is synthesized)
agtctccctgggtggcctgggaaacactgctcagctccaggatggagctgaatctccaagggcaaaggaatcttggcacccagctgggactcccctagggtccaatttgcttcaccagcc

SEQ ID NO: 551465 - DNA, 120 bp, Artificial Sequence
  ENSG00000168453_50 (sequence is synthesized)
ttcccttcccccacgccccatcttgcagccctaagcccaggggcaatggctgaggtccttgccaaagggggtggattgggctggtggtgggttggagcacgatgctggcgtcccctttgc

SEQ ID NO: 551466 - DNA, 120 bp, Artificial Sequence
  ENSG00000168453_51 (sequence is synthesized)
acatgttccctgggcacctctgtcctctgcgagtccctgcctgcccagagagctccctgctctggttaggcttgtgaggtccccgtagctgtggctgctgcagaggcctcagcctggccg

SEQ ID NO: 551467 - DNA, 120 bp, Artificial Sequence
  ENSG00000168453_52 (sequence is synthesized)
gaaagcctgttcacctgctggcactcagagcctcgcagtggtccttcccttttctgcatccggaatcttagggagaccctgatgaacactttgagttgtctccccagggacacacagctc

SEQ ID NO: 551468 - DNA, 120 bp, Artificial Sequence
  ENSG00000168453_53 (sequence is synthesized)
tctcctcatccaccacttagcacacaattctggccattccaaagacttcagatgaagaagtcctggtagacagtttatgaactgggattatgcaggacgtctccctcggatttgcagaaa

SEQ ID NO: 551469 - DNA, 120 bp, Artificial Sequence
  ENSG00000168453_54 (sequence is synthesized)
ccttctaagctccttccagccaaatgtgtgttctgccaacctgagctgccccagccccaaacaaactcagccatgccctccctgcctgcccttcaagacttgacccttcggctcttttct

SEQ ID NO: 551470 - DNA, 120 bp, Artificial Sequence
  ENSG00000168453_55 (sequence is synthesized)
ccacccctggcctctggaaagtccatgccccatcctcctgcagccctgcccttccctccccatctcgctcattcccccttctcttctttgaggtgtgcccggccggggcaggcgccctgg

SEQ ID NO: 551471 - DNA, 120 bp, Artificial Sequence
  ENSG00000168453_56 (sequence is synthesized)
ctctccccgcccggattagtggcagcttggcctgactctccggggctccttcccccgcccccgcctgctgccctcccctgggccgggggctgctccgcccggggggcactgtgcttgccc

SEQ ID NO: 551472 - DNA, 120 bp, Artificial Sequence
  ENSG00000168453_57 (sequence is synthesized)
cagcaaggtgagtgcaggggcagagagggtacctgtggctctggcctagcaaagttgctcggtggtccccaagatgcccttccactgtgatgaaaagagaaggcagcaccgaggtagagg

SEQ ID NO: 551473 - DNA, 120 bp, Artificial Sequence
  ENSG00000168453_58 (sequence is synthesized)
ggtctatcagcttggagctgtcccaggccccacagtcaaccccaagcaagccctaccctgagcagctccatctctctaggcctcccctgccctcgggtcattgcagccactgactcaccc

SEQ ID NO: 551474 - DNA, 120 bp, Artificial Sequence
  ENSG00000168453_59 (sequence is synthesized)
attgtctgcctaggataaggtcctgggaactgtggccttggaatgtgtggcttgtcctgggaggagatgggtgggcagacaagggccctctatctgagactgggatgtgcaggggacccc

SEQ ID NO: 551475 - DNA, 120 bp, Artificial Sequence
  ENSG00000168453_60 (sequence is synthesized)
atggcccatgtctagggtacctcctccatagatgactcccactcccagggatgagatgttaaaacacttaaaactcagtatggcacaggacaccaaatggcccaaacagaccccagatgc

SEQ ID NO: 551476 - DNA, 120 bp, Artificial Sequence
  ENSG00000168453_61 (sequence is synthesized)
catccgccgctttctccagatggtgaggaggcagccgggagccctccccttccccccgcccagccctagaagctcgtccagtcccaccccagtgtgcggtcccatgtgctcgctccctgc

SEQ ID NO: 551477 - DNA, 120 bp, Artificial Sequence
  ENSG00000168453_62 (sequence is synthesized)
cccacgccctcaggtgagctgcacagacccaactcgcacagacaggtgcagagaaggcagaggggacccggagttctgccgtggggctcagagaaggggcaggggctgcggcaggagagc

SEQ ID NO: 551478 - DNA, 120 bp, Artificial Sequence
  ENSG00000168453_63 (sequence is synthesized)
acaccaaatggcccaaacagaccccagatgccctttggctgtgccaggcattcactctttagttcttagacttccttgtggggacgtctgagaaatcctgggggaggaggtgggggttgc

SEQ ID NO: 551479 - DNA, 120 bp, Artificial Sequence
  ENSG00000168453_64 (sequence is synthesized)
ttggcaaggccaagctgcccgggactgcctgttggtctacactcaccaccaacctccctctcctgcccacccccacccccagctttggcagagctgagcactgcaatgcaccaggtctgg

SEQ ID NO: 551480 - DNA, 120 bp, Artificial Sequence
  ENSG00000168454_0 (sequence is synthesized)
agtgaatgcgtagtcccagcctcagcacaggggagccaccttgaagctctcaaatatcactgttgtgaatacagagagggaaaaccaactgtaacgtgccacccaaataaagctcattac

SEQ ID NO: 551481 - DNA, 120 bp, Artificial Sequence
  ENSG00000168454_1 (sequence is synthesized)
tagtcctgtccagcaacgtgcctctcctggccctagagttcttggaaatagcccaggccaaagagaaggcctttctccccatggtcagccacacgttccacatgcgcacagaggagtctg

SEQ ID NO: 551482 - DNA, 120 bp, Artificial Sequence
  ENSG00000168454_2 (sequence is synthesized)
atgcctcacaggagggcgatgacctacccaagtcctcagcaaacaccagccatcccaagcaggatgacagccccaagtcctcagaagaaaccatccagcccaaggagggtgacatcccca

SEQ ID NO: 551483 - DNA, 120 bp, Artificial Sequence
  ENSG00000168454_3 (sequence is synthesized)
aggccccagaagaaaccatccaatccaagaaggaggacctccccaagtcctcagaaaaagccatccagcccaaagagagtaacatccccaagtcctcagcaaaacccatccagcccaagc

SEQ ID NO: 551484 - DNA, 120 bp, Artificial Sequence
  ENSG00000168454_4 (sequence is synthesized)
tgggcaatattcccaaggcctcagtgaagcccagccagcccaaggagggtgacatccccaaggccccagaagaaaccatccaatccaagaaggaggacctccccaagtcctcagaagaag

SEQ ID NO: 551485 - DNA, 120 bp, Artificial Sequence
  ENSG00000168454_5 (sequence is synthesized)
ccatccagcccaaagagggtgacatccccaagtcctcagcaaaacccatccagcccaagctgggcaatattgccaagacctcagtgaagcccagccagcccaaggagagtgatatcccca

SEQ ID NO: 551486 - DNA, 120 bp, Artificial Sequence
  ENSG00000168454_6 (sequence is synthesized)
agtccccagaagaaaccatccagcccaaggagggtgacatccccaagtcctcagcaaagcccatccagcccaagctgggcaatattcccaaggcctcagtgaagcccagccagcccaagg

SEQ ID NO: 551487 - DNA, 120 bp, Artificial Sequence
  ENSG00000168454_7 (sequence is synthesized)
agggtgacatctccaagtccccagaagaagccatccagcccaaggagggtgacctccccaagtccctagaggaagccatccagcccaaggagggtgacatccccaagtccccagaagaag

SEQ ID NO: 551488 - DNA, 120 bp, Artificial Sequence
  ENSG00000168454_8 (sequence is synthesized)
ccatccagcccaaggagggtgacatccccaagtccctagaggaagccatccagcctaaggagggtgacatccccaagtccccagaagaaaccatccagcccaagaagggtgacatcccca

SEQ ID NO: 551489 - DNA, 120 bp, Artificial Sequence
  ENSG00000168454_9 (sequence is synthesized)
agtccccagaagaagccatccagcccaaggagggtgacattcccaagtctccaaaacaagccatccagcccaaggagggtgacattcccaagtccctagaggaagccatcccacccaagg

SEQ ID NO: 551490 - DNA, 120 bp, Artificial Sequence
  ENSG00000168454_10 (sequence is synthesized)
agattgacatccccaagtccccagaagaaaccatccagcccaaggaggatgacagccccaagtccctagaagaagccaccccatccaaggagggtgacatcctaaagcctgaagaagaaa

SEQ ID NO: 551491 - DNA, 120 bp, Artificial Sequence
  ENSG00000168454_11 (sequence is synthesized)
atcctgagcaaggaggactttgaggcatcactgaaggaggccggggagaggctggtggctgtggacttctcggccacgtggtgtgggccctgcaggaccatcagaccattcttccatgcc

SEQ ID NO: 551492 - DNA, 120 bp, Artificial Sequence
  ENSG00000168454_12 (sequence is synthesized)
ctgtctgtgaagcatgaggatgtggtgttcctggaggtggacgctgacaactgtgaggaggtggtgagagagtgcgccatcatgtgtgtcccaacctttcagttttataaaaaagaagaa

SEQ ID NO: 551493 - DNA, 120 bp, Artificial Sequence
  ENSG00000168454_13 (sequence is synthesized)
aaggtggatgaactttgcggcgcccttaaggaaaaacttgaagcagtcattgcagaattaaagtaaacatgtattctgaaaacattgcagacagtcaggtgtttatagcttttgagttct

SEQ ID NO: 551494 - DNA, 120 bp, Artificial Sequence
  ENSG00000168454_14 (sequence is synthesized)
cttttattatttacacaaagtgatcaggtataacaaaagtgtatgtccaaatggcactgcttgtacatgataatattaactctacccttttcaaaaaacagtccaagcattaaagtacat

SEQ ID NO: 551495 - DNA, 120 bp, Artificial Sequence
  ENSG00000168454_15 (sequence is synthesized)
tgcgactgtgtttctgttagtgggagagtataaaattagaaattcccatggtgaagactgctaagtcccatggtttcctatttttcaatcttgatatgtatttatttttcacttgtcttt

SEQ ID NO: 551496 - DNA, 120 bp, Artificial Sequence
  ENSG00000168454_16 (sequence is synthesized)
gaaaatttcacgcatttagtgtttgcagcaagactgaaaatttagataatttttctatagaggtagatgactgaaaggtgaatggaaacttcttttctcatgtcacacatctttggggat

SEQ ID NO: 551497 - DNA, 120 bp, Artificial Sequence
  ENSG00000168454_17 (sequence is synthesized)
tctgataagatatgtttggaaataaggaatttgaaagattcacatcttagctaacctccttcttgtgccggaagtgctacggaggccttgggaaattcagtgggttttccaagatctgat

SEQ ID NO: 551498 - DNA, 120 bp, Artificial Sequence
  ENSG00000168454_18 (sequence is synthesized)
ttgttggtgacggaaatgagatcaaggccgcttccagatttcaagtccagggctctacctactataatctacgctcacaaaatctcagacaagaggtcggaacttcaggtttctcggagg

SEQ ID NO: 551499 - DNA, 120 bp, Artificial Sequence
  ENSG00000168454_19 (sequence is synthesized)
ttgaagtcctctggatctttgctgcctttatgacatcagtgccctgatggcagagttcctggttcgtctccctggtaattgagttcataatacctagaccttcctctgacttttttactt

SEQ ID NO: 551500 - DNA, 120 bp, Artificial Sequence
  ENSG00000168454_20 (sequence is synthesized)
aaatttgttcttattttcaatattgaacaagccagcctttaacatgactctaccagcttagacatataggcctagactttaatgaattaacctaatcacagtgctaccagagtcttgttt

SEQ ID NO: 551501 - DNA, 120 bp, Artificial Sequence
  ENSG00000168454_21 (sequence is synthesized)
ggacaacttagtgagccccagatgtctatgagcccaaagtcccaggtctgaaccatagacagaggcttagtccagagtgggtttttaaaaatgaataaaaccagcttcattaggtataat

SEQ ID NO: 551502 - DNA, 120 bp, Artificial Sequence
  ENSG00000168454_22 (sequence is synthesized)
tgatatacaaagaacagcacatatttaatggagggagttggatgagtttggatgtgttgcatatgcccttgattgccatctccaccatcaaagtaattaacaccttcattgcctccagaa

SEQ ID NO: 551503 - DNA, 120 bp, Artificial Sequence
  ENSG00000168454_23 (sequence is synthesized)
attttgatgttaggatggatagcttggaaaaagttggagggtacggcctttactatgaggcatctatgaaggatcaggaatggatgtagacaaggaactaggaatggaaagtgttaaagc

SEQ ID NO: 551504 - DNA, 120 bp, Artificial Sequence
  ENSG00000168454_24 (sequence is synthesized)
gtaaagagaatgttggagctgggggatcctggagaaagatgataagatggttgattcacagaacccaggctggacgggacttgtggcgagcagtccagcacagcctcacagtgcagagca

SEQ ID NO: 551505 - DNA, 120 bp, Artificial Sequence
  ENSG00000168454_25 (sequence is synthesized)
tgagctttggagcctgcccccaccctagctttgtgaccttaagtgagctacatagcttctcatgtgtaaactactcatcataatggttctgacctcagtggtttgttgtgttctaggaaa

SEQ ID NO: 551506 - DNA, 120 bp, Artificial Sequence
  ENSG00000168454_26 (sequence is synthesized)
aggaagaaacaagtgaaggtgatgctaatgattaatacatcattcatcagacttcattcgtgatctcgaagagtgacatcagtcttccttggaatatgaagagaatttctttggttcttc

SEQ ID NO: 551507 - DNA, 120 bp, Artificial Sequence
  ENSG00000168454_27 (sequence is synthesized)
gattcacagaacccaggctggacgggacttgtggcgagcagtccagcacagcctcacagtgcagagcatgagctttggagcctgcccccaccctagctttgtgaccttaagaaatgatgc

SEQ ID NO: 551508 - DNA, 120 bp, Artificial Sequence
  ENSG00000168461_0 (sequence is synthesized)
gcgggcggcgcgagcgaggggcagaggcgagagacgccggcggggcgcgggcgcggcggccccggaggatgctgctgagccccggcactgcctggctgcgagcacatgatggcgatacgg

SEQ ID NO: 551509 - DNA, 120 bp, Artificial Sequence
  ENSG00000168461_1 (sequence is synthesized)
gagctcaaagtgtgccttctcggggacactggggttgggaaatcaagcatcgtgtgtcgatttgtccaggatcactttgaccacaacatcagccctactattggggcatcttttatgacc

SEQ ID NO: 551510 - DNA, 120 bp, Artificial Sequence
  ENSG00000168461_2 (sequence is synthesized)
aaaactgtgccttgtggaaatgaacttcacaagttcctcatctgggacactgctggtcaggaacggtttcattcattggctcccatgtactatcgaggctcagctgcagctgttatcgtg

SEQ ID NO: 551511 - DNA, 120 bp, Artificial Sequence
  ENSG00000168461_3 (sequence is synthesized)
tatgatattaccaagcaggattcattttataccttgaagaaatgggtcaaggagctgaaagaacatggtccagaaaacattgtaatggccatcgctggaaacaagtgcgacctctcagat

SEQ ID NO: 551512 - DNA, 120 bp, Artificial Sequence
  ENSG00000168461_4 (sequence is synthesized)
attagggaggttcccctgaaggatgctaaggaatacgctgaatccataggtgccatcgtggttgagacaagtgcaaaaaatgctattaatatcgaagagctctttcaaggaatcagccgc

SEQ ID NO: 551513 - DNA, 120 bp, Artificial Sequence
  ENSG00000168461_5 (sequence is synthesized)
cagatcccacccttggacccccatgaaaatggaaacaatggaacaatcaaagttgagaagccaaccatgcaagccagccgccggtgctgttgacccaagggccgtggtccacggtacttg

SEQ ID NO: 551514 - DNA, 120 bp, Artificial Sequence
  ENSG00000168461_6 (sequence is synthesized)
aagaagccagagcccacatcctgtgcactgctgaaggaccctacgctcggtggcctggcacctcactttgagaagagtgagcacactggctttgcatcctggaagacctgcagggggcgg

SEQ ID NO: 551515 - DNA, 120 bp, Artificial Sequence
  ENSG00000168461_7 (sequence is synthesized)
ggcaggaaatgtacctgaaaaggattttagaaaaccctgggaaaacccaccacaccaccacaaaatggcctttagtgtatgaaatgcacatggaggggatgtagttgcatttttgctaaa

SEQ ID NO: 551516 - DNA, 120 bp, Artificial Sequence
  ENSG00000168461_8 (sequence is synthesized)
aaaaaaaaaaaacctttaaaaattgttggatgtgtacaaaagtcttactgccttattatgtgtatgggattctaaagtggcattccacttggatttcctgtgctacctatccaaattcca

SEQ ID NO: 551517 - DNA, 120 bp, Artificial Sequence
  ENSG00000168461_9 (sequence is synthesized)
gtaactacttcagtgtcattgcctttgttacctaaccaaccttcactgaaaggcaaatttagttcaggaggttagtttttagctagctttggaagtaagcctttatttattactttttgg

SEQ ID NO: 551518 - DNA, 120 bp, Artificial Sequence
  ENSG00000168461_10 (sequence is synthesized)
aggaaatcagagaagtgtcaatggaccgtcactcagactgagacttgagttattacagaagccaggaaaagtgtattagaaactgttgtctacaccacttttaattggtgaacaattttt

SEQ ID NO: 551519 - DNA, 120 bp, Artificial Sequence
  ENSG00000168461_11 (sequence is synthesized)
ctaagttatggtcatatatacccaaacaaaccaaatcaaactaaattactgcatataattttgggattgggtggcctagtttgaaagagtgatttaagtaatcactatgtaagtggtgag

SEQ ID NO: 551520 - DNA, 120 bp, Artificial Sequence
  ENSG00000168461_12 (sequence is synthesized)
agatgcaggacatacacattattcaagagaccacctgacatgcatctcctccgcaggaatacattcgtcctctcttagagaagtttaacgcacatagtattattttactaagagaatatc

SEQ ID NO: 551521 - DNA, 120 bp, Artificial Sequence
  ENSG00000168461_13 (sequence is synthesized)
tcttggtgtcatatctaggggaagagaattaactagaattaaatttaatgtttgaatctaaatcattgggcaaacttctaataataacaattaataataggttacaggaaagccagccag

SEQ ID NO: 551522 - DNA, 120 bp, Artificial Sequence
  ENSG00000168461_14 (sequence is synthesized)
aggaagtgtcagcactttaaaattctagaccccaaaaaactacaaaatcagaaaaagtatttttatgtttctagcttgaggagaagggctttagggctaaccagaggtctgaccctagaa

SEQ ID NO: 551523 - DNA, 120 bp, Artificial Sequence
  ENSG00000168461_15 (sequence is synthesized)
tgccaaggaactgagaatgggctccgatgaaaaccttccttttcagattccctgtctgctcaattaaagatgtttgaatccaaaggaagtcaaggaagaaaaagcatggaaaggaagaga

SEQ ID NO: 551524 - DNA, 120 bp, Artificial Sequence
  ENSG00000168461_16 (sequence is synthesized)
ctgccagggcttatattagggggtgattcttaaaggacattaggattggtgctcagaaatggttaatcatgctgtgtgctagccagggccagctggtaccttctttgccatgagcattca

SEQ ID NO: 551525 - DNA, 120 bp, Artificial Sequence
  ENSG00000168461_17 (sequence is synthesized)
agggacggctaacctttattgacaatctatatcgcaaaagtcaggaaagaggttgtgagctgattggattaaagacctggcacttcagtaactcagcacgcttccacttcactcaactta

SEQ ID NO: 551526 - DNA, 120 bp, Artificial Sequence
  ENSG00000168461_18 (sequence is synthesized)
agagagttcattgacagtgttaggatgtgaaggctgggaaacacttattttgcttcaagagttccacttggctctcccaaataggtacctcaaaaactgttagcaagcggcatttggatg

SEQ ID NO: 551527 - DNA, 120 bp, Artificial Sequence
  ENSG00000168461_19 (sequence is synthesized)
tcttgacaggggctttgcagggatttttagggttttttccacattgtccacattaatggttggcatgattgtgcttgcaggccaagaaatgatcataccccttgccaaaggtaaaaaaaa

SEQ ID NO: 551528 - DNA, 120 bp, Artificial Sequence
  ENSG00000168461_20 (sequence is synthesized)
aaaaaaaaaaatgagttgaaaattgaagtgacctctttccagctgagttgcaggcttattttgtaacctttcctcatccagttttccctgagaacctgggtttatctctagatagctgtt

SEQ ID NO: 551529 - DNA, 120 bp, Artificial Sequence
  ENSG00000168461_21 (sequence is synthesized)
caggttttttagctgaggggtaagtatcctagctgagagttttgcatctttgggctgggtttgcagtggttgtgttttgcataaaatgtctagtctttgccacagatagtgagctaccca

SEQ ID NO: 551530 - DNA, 120 bp, Artificial Sequence
  ENSG00000168461_22 (sequence is synthesized)
ctaatgagcccatggttttatttcagaagcacatgagggtgtgaaaccactctgttacctttctgtattgtcttagctattcaagccagtcagaggataatatatatattctcatcagca

SEQ ID NO: 551531 - DNA, 120 bp, Artificial Sequence
  ENSG00000168461_23 (sequence is synthesized)
ctcagagtagtcagtgaagagagtagatcacacttgggcacaccaggattcacataaacattgtatcttctctgtggatgctcaggccttgtctacaatgaggctttacaaccttccttt

SEQ ID NO: 551532 - DNA, 120 bp, Artificial Sequence
  ENSG00000168461_24 (sequence is synthesized)
gttttggctcgggattacttcctggctgtctaataattgaaccataaccatgtaatattatgtaaaggcctggaaattactgttgctaaaaaaagtcatgtagtttcatgtagtgtagca

SEQ ID NO: 551533 - DNA, 120 bp, Artificial Sequence
  ENSG00000168461_25 (sequence is synthesized)
tccttggcatcgttttccaaaatttgttccttctcccttttttttttctttcgtgtgtggcatgagtgtgtatctgtgtaaatatgattgtatatgtgttactccgatatgtaatccatt

SEQ ID NO: 551534 - DNA, 120 bp, Artificial Sequence
  ENSG00000168461_26 (sequence is synthesized)
tcactggctgagtttggcccctagccatgtgttaatataaagtaggcatggcttcccaatggaaatctctgagaatgacagtggagttgtgcaagcattttacattgccacataattgac

SEQ ID NO: 551535 - DNA, 120 bp, Artificial Sequence
  ENSG00000168461_27 (sequence is synthesized)
ttgccattttatggttaaaaacggcacattaggcagttgaatatgacgttaccttgcagactaaaaggttgaaggcccgaaactaacttttagctaacaataagggctgtgccccaatgg

SEQ ID NO: 551536 - DNA, 120 bp, Artificial Sequence
  ENSG00000168461_28 (sequence is synthesized)
aaactgagttcattttctgagaaaggtttggatgactgaaatatttcctctacagtcaaggactttggcatgtggtggctgaaactgagcttttttgtgtgggctccagttctcactgtt

SEQ ID NO: 551537 - DNA, 120 bp, Artificial Sequence
  ENSG00000168461_29 (sequence is synthesized)
ctgcaatgctcatggcaagttgaatggtgagctagcttataaattaaagagctctgaactgtattcagaccgactgggtatctagcttactgttttaacatcattgttgaaaccagaccc

SEQ ID NO: 551538 - DNA, 120 bp, Artificial Sequence
  ENSG00000168461_30 (sequence is synthesized)
tgtagtccagtggtgctgccctgttgtgcaaactgctcctttttctcgtgtttttgtaaagagcttccatctgggctggacccagttcttgcacatacaagacaccgctgcagtcagcta

SEQ ID NO: 551539 - DNA, 120 bp, Artificial Sequence
  ENSG00000168461_31 (sequence is synthesized)
ggacctttccgccatgtattctattctgtagtaaagcatttccatcaacaatgcctaattgtatctgttatttttggtttaacacacactgattcatactaataaatattttcagtttta

SEQ ID NO: 551540 - DNA, 120 bp, Artificial Sequence
  ENSG00000168461_32 (sequence is synthesized)
agcgatgcttctgcttctcctgctggcggacgttccctgatgacttgctgtgttccatgtactgttctgagtgcctgtgtgtactgatgcattcagccctcctcgcaaaagcactttgag

SEQ ID NO: 551541 - DNA, 120 bp, Artificial Sequence
  ENSG00000168461_33 (sequence is synthesized)
ggaatgctgactctctcacatctcaaaactcttcctaccaaaggagaaaaatgaagtctgagaaatattttactctaataagtgaaattttgaatattctgaagataaaagaacctggca

SEQ ID NO: 551542 - DNA, 120 bp, Artificial Sequence
  ENSG00000168461_34 (sequence is synthesized)
ctcctaagaagccatgttcaacagctgattcaagagtgctgctaagagttcaaaacatgcaggaggggagtcttcttgagacagagccaggccttcctcaattttgcattctgtgcatca

SEQ ID NO: 551543 - DNA, 120 bp, Artificial Sequence
  ENSG00000168461_35 (sequence is synthesized)
ggggactgatggaaccgatctgttcccttacgaagtgtcacagtattggcaggactctggacaaggacaaggaaggctgcattcctgtggcaccaccaggtggaagatggaggtatgttc

SEQ ID NO: 551544 - DNA, 120 bp, Artificial Sequence
  ENSG00000168461_36 (sequence is synthesized)
tggcagaaagtggaagcgaagtgggtgtgtgcaaagagatcacatggtgtgaaggacagaggcttagccatgtgaaatgtttttgctcaatgtcataaaggccatgtgggaagtggaccc

SEQ ID NO: 551545 - DNA, 120 bp, Artificial Sequence
  ENSG00000168461_37 (sequence is synthesized)
taagccaggcagtgtgactgctccagggttcccagctccacagtgcaggaggtcaaaacaaccttgatgttatcgtacttaccgtaaatcttgctgtaaagcagttgttccgcacatccc

SEQ ID NO: 551546 - DNA, 120 bp, Artificial Sequence
  ENSG00000168461_38 (sequence is synthesized)
ttctgaagcacggacactgtccccctgtggtgcgtaagccctgggcctggggatggtagcacagggatcccccatttcgcctgtgggccacccgagacgcggctcctgttcatacgtccc

SEQ ID NO: 551547 - DNA, 120 bp, Artificial Sequence
  ENSG00000168476_0 (sequence is synthesized)
actcggttccgtgcaactttcaagtgagttgcgaactccgccctgtaggccggtgctggtggcccggcgcgctggaaccgcggcgacccgctccagcgcgggaccagcagcaagggccga

SEQ ID NO: 551548 - DNA, 120 bp, Artificial Sequence
  ENSG00000168476_1 (sequence is synthesized)
gcgccaggttctccgcggcagaaagggcgggtgggagctgtaactgccccggccgcggggcgcgcccgctcccaagtcggcttcctccccgccggggccgctttgcctcgggtctcccca

SEQ ID NO: 551549 - DNA, 120 bp, Artificial Sequence
  ENSG00000168476_2 (sequence is synthesized)
ttctccaggtcccctgaactgcacagtcggaggccgtgggcggcgggctctgcctccgccgagggacagccggatcgcccctctgcttcccgcaactgccctgatcaccccccgtcccag

SEQ ID NO: 551550 - DNA, 120 bp, Artificial Sequence
  ENSG00000168476_3 (sequence is synthesized)
cccttgagtgaacgtccttctgagcggcttcctggggtcctccccacgtcccaaaggccggcaagatggtgtcctggatgatctgtcgcctggtggtgctggtgtttgggatgctgtgtc

SEQ ID NO: 551551 - DNA, 120 bp, Artificial Sequence
  ENSG00000168476_4 (sequence is synthesized)
cagcttatgcttcctataaggctgtgaagaccaagaacattcgtgaatatgtgcggtggatgatgtactggattgtttttgcactcttcatggcagcagagatcgttacagacattttta

SEQ ID NO: 551552 - DNA, 120 bp, Artificial Sequence
  ENSG00000168476_5 (sequence is synthesized)
tctcctggttccctttctactatgagatcaagatggccttcgtgctgtggctgctctcaccctacaccaagggcgccagcctgctttaccgcaagtttgtccacccgtccctgtcccgcc

SEQ ID NO: 551553 - DNA, 120 bp, Artificial Sequence
  ENSG00000168476_6 (sequence is synthesized)
gcaggctgccaccaagagtcagggggcgctggccggcaggctgcggagcttctccatgcaggacctgcgctccatctctgacgcacctgcccctgcctaccatgaccccctctacctgga

SEQ ID NO: 551554 - DNA, 120 bp, Artificial Sequence
  ENSG00000168476_7 (sequence is synthesized)
ggaccaggtgtcccaccggaggccacccattgggtaccgggccgggggcctgcaggacagcgacaccgaggatgagtgttggtcagatactgaggcagtcccccgggcgccagcccggcc

SEQ ID NO: 551555 - DNA, 120 bp, Artificial Sequence
  ENSG00000168476_8 (sequence is synthesized)
ccgagagaagcccctaatccgcagccagagcctgcgtgtggtcaagaggaagccaccggtgcgggagggcacctcgcgctccctgaaggttcggacgaggaaaaagactgtgccctcaga

SEQ ID NO: 551556 - DNA, 120 bp, Artificial Sequence
  ENSG00000168476_9 (sequence is synthesized)
cgtggacagctagggtctgctgcatctgcccccttcttacctcgtgccctgcagggctccagggctatttggagggaccttgggctgcacatctggcctgcctgcaccagctgcctgggc

SEQ ID NO: 551557 - DNA, 120 bp, Artificial Sequence
  ENSG00000168476_10 (sequence is synthesized)
cccaccctcctgactcctgctgatggttaagggccgggagcagatgctgccaaggccacatgcagggatgcacccacaatgtaccaaagcaggctgggcccagggttctatttattgcct

SEQ ID NO: 551558 - DNA, 120 bp, Artificial Sequence
  ENSG00000168476_11 (sequence is synthesized)
tgctctgccctctcccttccccggttgtgggacaagagccctccctgaacccctgcaaccctccctgaacccctgcaaatgaaaccaaacgtccacctgggtgtgttcattccttcctgt

SEQ ID NO: 551559 - DNA, 120 bp, Artificial Sequence
  ENSG00000168476_12 (sequence is synthesized)
ccttcaaagtacttgatagcctttcataaggcctggcacatgtgtcctggttgtgtgtgtgtgtgttggtgagtgaggtcaggtttgcgagtgttttgataaataaatacataaaggggc

SEQ ID NO: 551560 - DNA, 120 bp, Artificial Sequence
  ENSG00000168476_13 (sequence is synthesized)
gctgctctcaccctacaccaagggcgccagcctgctttaccgcaagtttgtccacccgtccctgtcccgccatgagaaggtaccccagggggaagcgggaagggaggcttaggggtgggt

SEQ ID NO: 551561 - DNA, 120 bp, Artificial Sequence
  ENSG00000168476_14 (sequence is synthesized)
atgagggaaagagccctggacctgggatttaggatgctggggacaccggggttctatcccagtcctgctgctattgaggggcaggaccttgacagggcccagcctacctcatcttctggg

SEQ ID NO: 551562 - DNA, 120 bp, Artificial Sequence
  ENSG00000168476_15 (sequence is synthesized)
ggccaaggagcgcagctacgagaccgtgctcagcttcgggaagcggggcctcaacattgccgcctccgctgctgtgcaggctgccaccaaggtgctctgggcccccagccctccagcagc

SEQ ID NO: 551563 - DNA, 120 bp, Artificial Sequence
  ENSG00000168476_16 (sequence is synthesized)
ccccatcccacccctaaggccctttgggctcattcagctcctctgccagggagcccagagatggcagccggggagcaggggtgagaaggtgacgggggggtattggcagaagcgtggagc

SEQ ID NO: 551564 - DNA, 120 bp, Artificial Sequence
  ENSG00000168476_17 (sequence is synthesized)
tggagtcagaccttccttcctggctctggcactgagcgtaagcagcggctcctgctctctgactttggtttcctgttggtgccacattggcgcggggccagaagcttgctgagcagtttt

SEQ ID NO: 551565 - DNA, 120 bp, Artificial Sequence
  ENSG00000168477_0 (sequence is synthesized)
actgtcgctgccgagatccacagtcggttgtggctcagcccctgttgcaggggacaagtgagggagacttccctgtcctgccctgagacgccgccctcccggggttggggacagagcagg

SEQ ID NO: 551566 - DNA, 120 bp, Artificial Sequence
  ENSG00000168477_1 (sequence is synthesized)
tgcagaggcactgcagctgctcggttgcccagcctcctgaatgatgccagcccagtatgctctaacctccagcctggttctcctggtgctgctgagcacagccagagcaggccccttctc

SEQ ID NO: 551567 - DNA, 120 bp, Artificial Sequence
  ENSG00000168477_2 (sequence is synthesized)
ttcacggtccaatgtgacactgccagccccccggccccctccccagccagggggccacacagtgggggctggagtgggaagcccctcttctcagctttacgagcacacagtggaaggagg

SEQ ID NO: 551568 - DNA, 120 bp, Artificial Sequence
  ENSG00000168477_3 (sequence is synthesized)
ggagaagcaggtggtattcacccaccgcattaacctgcccccttccactggctgtggctgtcccccaggcaccgagcccccagtccttgcttcagaggtacaggccctgagggtccgtct

SEQ ID NO: 551569 - DNA, 120 bp, Artificial Sequence
  ENSG00000168477_4 (sequence is synthesized)
agagatcctggaggagttggtgaaggggctcaaggaacagtgcactgggggatgttgtcctgcctctgcccaagctggcacaggtcagacagatgtgcggaccctctgcagtctccatgg

SEQ ID NO: 551570 - DNA, 120 bp, Artificial Sequence
  ENSG00000168477_5 (sequence is synthesized)
tgtgtttgatctgagccgctgcacctgttcctgtgagccaggctggggtgggcccacctgctcagaccccacagatgctgagatccctccctcttccccaccctcagcctcggggtcctg

SEQ ID NO: 551571 - DNA, 120 bp, Artificial Sequence
  ENSG00000168477_6 (sequence is synthesized)
cccagatgactgcaatgatcagggtcgctgtgtccgtggtcgttgcgtgtgctttcccggctacactggccccagctgtggctggccatcctgtcccggggactgccaaggccgtgggcg

SEQ ID NO: 551572 - DNA, 120 bp, Artificial Sequence
  ENSG00000168477_7 (sequence is synthesized)
ctgcgtgcagggcgtgtgtgtgtgccgggcaggcttctcaggccccgactgcagccagcgctcctgccctcgaggttgcagccagaggggacgctgtgagggtgggcgctgcgtgtgtga

SEQ ID NO: 551573 - DNA, 120 bp, Artificial Sequence
  ENSG00000168477_8 (sequence is synthesized)
cccaggctacactggtgacgactgtggcatgaggagctgccctcgcggttgcagtcagagggggcgctgtgagaatgggcgctgcgtgtgtaaccccggctacactggcgaggactgtgg

SEQ ID NO: 551574 - DNA, 120 bp, Artificial Sequence
  ENSG00000168477_9 (sequence is synthesized)
ggtgaggagctgccctcggggctgcagccagcggggacgctgcaaggacgggcgctgcgtgtgtgaccccggctacactggcgaggactgtggtacgcggagctgcccctgggactgtgg

SEQ ID NO: 551575 - DNA, 120 bp, Artificial Sequence
  ENSG00000168477_10 (sequence is synthesized)
cgagggcgggcgctgcgtggacggccgctgcgtgtgctggcccgggtacacaggcgaggactgcagcacgcggacatgtccgagggactgccggggccgcgggcgctgcgaggacggcga

SEQ ID NO: 551576 - DNA, 120 bp, Artificial Sequence
  ENSG00000168477_11 (sequence is synthesized)
atgcatttgcgacacgggctacagcggggacgactgcggcgtgcgcagctgccctggcgactgcaaccaaaggggccgctgcgaggacggccgctgcgtgtgctggccggggtacactgg

SEQ ID NO: 551577 - DNA, 120 bp, Artificial Sequence
  ENSG00000168477_12 (sequence is synthesized)
aaccgattgcggctcgcgcgcctgcccacgcgactgtagaggtcgcgggcgctgcgagaacggcgtgtgtgtttgcaatgcgggctacagcggcgaggactgcggtgtgcgcagctgtcc

SEQ ID NO: 551578 - DNA, 120 bp, Artificial Sequence
  ENSG00000168477_13 (sequence is synthesized)
tggggactgtcgtggccggggccgctgtgagagtggccgctgcatgtgttggccggggtacacaggccgggactgcggcacgcgcgcctgtcctggcgactgtcgcgggcgcgggcgctg

SEQ ID NO: 551579 - DNA, 120 bp, Artificial Sequence
  ENSG00000168477_14 (sequence is synthesized)
cgtggatggccgctgcgtgtgcaacccgggcttcaccggtgaggactgtgggagccgtcgctgtcccggggactgccgtgggcacggcctttgcgaggatggcgtgtgcgtgtgtgacgc

SEQ ID NO: 551580 - DNA, 120 bp, Artificial Sequence
  ENSG00000168477_15 (sequence is synthesized)
aggctactcaggggaagactgcagcacgcgcagctgccccgggggctgccgaggccgcggccagtgcctagatgggcggtgtgtgtgcgaggacggctactctggcgaggattgcggtgt

SEQ ID NO: 551581 - DNA, 120 bp, Artificial Sequence
  ENSG00000168477_16 (sequence is synthesized)
gaggcagtgcccgaatgactgcagccagcacggcgtgtgccaggacggtgtgtgcatctgttgggaaggctacgtgagtgaggactgcagcatccgcacctgcccctccaactgccacgg

SEQ ID NO: 551582 - DNA, 120 bp, Artificial Sequence
  ENSG00000168477_17 (sequence is synthesized)
gaggggccgctgtgaggaagggcgctgcctgtgcgacccaggctacaccggccctacctgtgccacccgcatgtgcccggctgactgccggggacgtgggcggtgtgtgcaaggagtgtg

SEQ ID NO: 551583 - DNA, 120 bp, Artificial Sequence
  ENSG00000168477_18 (sequence is synthesized)
cctgtgccacgtgggctatggcggtgaggactgcgggcaggaagagcctccagccagcgcctgccctggaggctgcgggccccgggaactgtgccgggcaggccagtgtgtgtgtgtaga

SEQ ID NO: 551584 - DNA, 120 bp, Artificial Sequence
  ENSG00000168477_19 (sequence is synthesized)
gggcttccgaggccctgactgtgccatccagacatgcccaggggactgccgtggccgaggagagtgtcacgatggcagctgtgtctgcaaagatgggtatgctggcgaagactgcggaga

SEQ ID NO: 551585 - DNA, 120 bp, Artificial Sequence
  ENSG00000168477_20 (sequence is synthesized)
agaggtgccaaccattgagggcatgaggatgcatctcttggaggagacaacagttcggacagagtggaccccggctcctggccccgtggatgcctatgaaattcagttcatccccacgac

SEQ ID NO: 551586 - DNA, 120 bp, Artificial Sequence
  ENSG00000168477_21 (sequence is synthesized)
agagggggcgagccccccattcacagcacgggttccaagctctgcctcagcctatgaccagagaggactggcccctggacaggagtaccaggtcactgtccgagcccttcgagggaccag

SEQ ID NO: 551587 - DNA, 120 bp, Artificial Sequence
  ENSG00000168477_22 (sequence is synthesized)
ctggggccttcctgcctccaagaccatcaccaccatgatcgatgggccccaggacctccgagtggtggctgtgacaccgacaacactggagcttggctggctgcgtccccaggctgaggt

SEQ ID NO: 551588 - DNA, 120 bp, Artificial Sequence
  ENSG00000168477_23 (sequence is synthesized)
ggaccgatttgtggtgtcctacgtcagtgccggcaaccagagggtgaggctggaagtgccccctgaagcagacgggacgctgctgactgacctgatgccaggcgtagaatatgtggtgac

SEQ ID NO: 551589 - DNA, 120 bp, Artificial Sequence
  ENSG00000168477_24 (sequence is synthesized)
tgtcacagcggagcggggccgggcagtcagctacccagcttctgtcagggccaacacagcaccaggccactacagttacccggaggtgcgccccccagccccgccccccaagtcccggcc

SEQ ID NO: 551590 - DNA, 120 bp, Artificial Sequence
  ENSG00000168477_25 (sequence is synthesized)
ccccagccccgcggcccccacggcccccttggccctcgaggccagcagaggaaagggaggaggagtccccgcccaggccaagcctgtcccagcccccacggcggccttggggcaacctga

SEQ ID NO: 551591 - DNA, 120 bp, Artificial Sequence
  ENSG00000168477_26 (sequence is synthesized)
caacctgacggccgagctgagccgtttccgcggcacggtgcaggacctggagcgccacctgcgggctcacggctacccactgcgggccaaccagacttacacgtcggtggcgcgccacat

SEQ ID NO: 551592 - DNA, 120 bp, Artificial Sequence
  ENSG00000168477_27 (sequence is synthesized)
ccatgaatacttgcagcggcgtctgttggccgccgccccagccggctcccccgcacccccgccccgccacccccgccccaccgccagccctgatcccggcaccaggaaacgggactccaa

SEQ ID NO: 551593 - DNA, 120 bp, Artificial Sequence
  ENSG00000168477_28 (sequence is synthesized)
ccagggaatctacggcctctcgcctgaaggcgtcgaccgggtggctgcgtcccgccaccccaagccagaggtgctgggcagttccgccgatggcgcgcttctcgtgtctctcgacgggct

SEQ ID NO: 551594 - DNA, 120 bp, Artificial Sequence
  ENSG00000168477_29 (sequence is synthesized)
ccgcggccagttcgagcgcgtggtgctgcgctggcggcctcagccgcctgcagagggccccggcggtgagctgactgtgccgggcaccacgcgcaccgtcagcctgcccgacctcaggcc

SEQ ID NO: 551595 - DNA, 120 bp, Artificial Sequence
  ENSG00000168477_30 (sequence is synthesized)
cggcaccacctaccacgtggaggtccacggggtgcgggcggggcagacctccaagtcctacgccttcatcaccaccacagggtcctcacccttgggcctcttggggactaccgatgagcc

SEQ ID NO: 551596 - DNA, 120 bp, Artificial Sequence
  ENSG00000168477_31 (sequence is synthesized)
tcctccctcaggcccctcgacgacgcaaggggcccaggctcctctcctgcagcagcgcccccaggagctgggagagttgagggtgctgggcagagatgagacagggcgcctccgtgtggt

SEQ ID NO: 551597 - DNA, 120 bp, Artificial Sequence
  ENSG00000168477_32 (sequence is synthesized)
ctggaccgcccagcctgacacctttgcctacttccaactgcgcatgcgggtgcccgaggggccgggggcacatgaggaagtgctgccaggggacgtccgccaggctctggtgcctccacc

SEQ ID NO: 551598 - DNA, 120 bp, Artificial Sequence
  ENSG00000168477_33 (sequence is synthesized)
ccctcctggaaccccgtatgagctgtcacttcatggggtccctcctgggggcaagccctctgaccccatcatctaccaaggcattatggacaaggatgaggagaagcctgggaagtcctc

SEQ ID NO: 551599 - DNA, 120 bp, Artificial Sequence
  ENSG00000168477_34 (sequence is synthesized)
aggcccaccacgcctgggtgagctgacggtgacagacaggacctccgactccttgctcctgcgctggacggtccccgagggcgagtttgactccttcgtgatccagtacaaagacaggga

SEQ ID NO: 551600 - DNA, 120 bp, Artificial Sequence
  ENSG00000168477_35 (sequence is synthesized)
cgggcagccccaggtggtgcccgtggaaggaccccagcgctcggccgtcatcacctccctggatcctggccgcaagtacaaatttgtcctgtatgggtttgttggcaagaagaggcatgg

SEQ ID NO: 551601 - DNA, 120 bp, Artificial Sequence
  ENSG00000168477_36 (sequence is synthesized)
tccgctggtggctgaagccaagatcttgcctcagagtgacccaagtccagggactccaccccacctgggaaacctgtgggtgacagaccctaccccagattcactgcacctctcctggac

SEQ ID NO: 551602 - DNA, 120 bp, Artificial Sequence
  ENSG00000168477_37 (sequence is synthesized)
tgtccctgagggccagtttgacaccttcatggtccagtacagggacagggatggacggccccaggtggtacctgtggaagggcccgagcgttcatttgttgtctcctcactggaccctga

SEQ ID NO: 551603 - DNA, 120 bp, Artificial Sequence
  ENSG00000168477_38 (sequence is synthesized)
ccacaagtacagattcactctgtttggaattgcgaacaagaagcggtatggccccctcacggccgatggcaccactgctccagagaggaaagaggagcccccccgccctgagttcctgga

SEQ ID NO: 551604 - DNA, 120 bp, Artificial Sequence
  ENSG00000168477_39 (sequence is synthesized)
gcagcccctcctgggggaactgacagtgaccggcgtgaccccagactccttgcgtctctcatggacagtggcccagggccccttcgactcattcatggtccagtacaaggatgcacaggg

SEQ ID NO: 551605 - DNA, 120 bp, Artificial Sequence
  ENSG00000168477_40 (sequence is synthesized)
gcagccccaggcagtgcctgttgcgggggatgagaatgaggttactgtccccggcctggatcccgaccggaagtataagatgaacctctacgggcttcgtggcaggcagcgtgtggggcc

SEQ ID NO: 551606 - DNA, 120 bp, Artificial Sequence
  ENSG00000168477_41 (sequence is synthesized)
cgagtctgtggtggccaagactgctcctcaggaggatgtggacgagacccccagccccacagaactgggcacggaggccccggagtcccccgaggagccgctcctgggggagctgacagt

SEQ ID NO: 551607 - DNA, 120 bp, Artificial Sequence
  ENSG00000168477_42 (sequence is synthesized)
gacaggatcctcccctgattcgctgagcctcttctggaccgtcccccagggcagcttcgactctttcaccgtgcagtacaaggacagggatgggcggccccgggcggtgcgtgttggggg

SEQ ID NO: 551608 - DNA, 120 bp, Artificial Sequence
  ENSG00000168477_43 (sequence is synthesized)
caaggagagtgaggtcaccgtgggaggcctagagcccgggcacaagtacaagatgcacctgtacggcctccacgaggggcagcgcgtgggcccggtgtccgccgtgggcgtgacagcccc

SEQ ID NO: 551609 - DNA, 120 bp, Artificial Sequence
  ENSG00000168477_44 (sequence is synthesized)
acaacaagaagagacccctccagccactgagtccccgctggagccacgcctaggagagctgacagtgacagatgtgacccccaactctgtgggcctctcctggacagtccccgagggcca

SEQ ID NO: 551610 - DNA, 120 bp, Artificial Sequence
  ENSG00000168477_45 (sequence is synthesized)
gtttgactccttcatagtccagtacaaggacaaggacgggcagccccaggtggtgccggtggcggcagaccagcgagaggtcacagtctacaacctggagcctgagagaaaatataagat

SEQ ID NO: 551611 - DNA, 120 bp, Artificial Sequence
  ENSG00000168477_46 (sequence is synthesized)
gaacatgtatggactacatgatgggcaacgcatgggccccctgtctgtggtcatcgtgacggctcccctcccaccagccccagccacagaggcctccaagcctcccctggagccacgcct

SEQ ID NO: 551612 - DNA, 120 bp, Artificial Sequence
  ENSG00000168477_47 (sequence is synthesized)
aggggagctgacagtgacggatataacccctgactctgtgggcctctcatggacagtccctgagggtgaattcgactcctttgtggttcagtacaaggacagggacgggcagccccaggt

SEQ ID NO: 551613 - DNA, 120 bp, Artificial Sequence
  ENSG00000168477_48 (sequence is synthesized)
ggtgcccgtggctgcagatcagcgggaggtcactatccctgacctggaaccctcccgcaagtacaagttcctgctctttgggatccaggatgggaaacgacgcagcccagtctctgtgga

SEQ ID NO: 551614 - DNA, 120 bp, Artificial Sequence
  ENSG00000168477_49 (sequence is synthesized)
ggcaaagacggttgcccgaggtgacgccagcccaggggccccaccccgccttggggagctgtgggtgacagaccccaccccagactcactgcgcctctcctggacggttcctgagggcca

SEQ ID NO: 551615 - DNA, 120 bp, Artificial Sequence
  ENSG00000168477_50 (sequence is synthesized)
gttcgactcttttgtggtccagttcaaggacaaagacgggccccaggtggtgcccgtggagggccatgagcgctctgtcactgtcacccctctggatgccggccgcaagtacagattcct

SEQ ID NO: 551616 - DNA, 120 bp, Artificial Sequence
  ENSG00000168477_51 (sequence is synthesized)
cctctatggcctcctgggcaagaagcgccatggccctctcactgccgacggcaccacggaagcccggagtgctatggatgatactggaacaaagcgtcccccaaaaccccgtctggggga

SEQ ID NO: 551617 - DNA, 120 bp, Artificial Sequence
  ENSG00000168477_52 (sequence is synthesized)
ggagctgcaggtgaccaccgtgacccagaactccgtgggcctctcctggacagtccctgagggccagtttgactcctttgtggtccagtacaaagacagggacgggcagccccaggtggt

SEQ ID NO: 551618 - DNA, 120 bp, Artificial Sequence
  ENSG00000168477_53 (sequence is synthesized)
gcccgtggagggcagcctcagggaggtcagcgtgccgggcctggaccctgcccacaggtacaagctgctgctctacgggctgcaccacggcaagcgtgtgggccccatctcggccgtcgc

SEQ ID NO: 551619 - DNA, 120 bp, Artificial Sequence
  ENSG00000168477_54 (sequence is synthesized)
cattactgccggcagggaagaaacggaaactgagaccacggccccgacccctccagcgcctgagccccacctcggggagttgacagtggaggaggccacgtcacacaccctgcatctctc

SEQ ID NO: 551620 - DNA, 120 bp, Artificial Sequence
  ENSG00000168477_55 (sequence is synthesized)
ctggatggtgactgagggagaatttgactccttcgaaatccagtacacagatagagacgggcaactccaaatggtccgcataggaggtgaccggaatgacatcaccctctctggcctgga

SEQ ID NO: 551621 - DNA, 120 bp, Artificial Sequence
  ENSG00000168477_56 (sequence is synthesized)
atccgaccacagatacctggtgaccctgtatggtttcagtgatgggaagcatgtaggtcctgtccatgtcgaggccctgacagtcccggaggaggagaagccttcagaacctcccaccgc

SEQ ID NO: 551622 - DNA, 120 bp, Artificial Sequence
  ENSG00000168477_57 (sequence is synthesized)
ggggagctgaccgtgacagatgccacccctgactccctcagcctgtcctggacagttcccgagggacagtttgaccacttcctggtccagtacaggaatggagatgggcagcccaaggca

SEQ ID NO: 551623 - DNA, 120 bp, Artificial Sequence
  ENSG00000168477_58 (sequence is synthesized)
gtgagggtgccagggcacgaggaaggggtcaccatctcgggcctggagccagaccataaatacaagatgaacctgtacggcttccacggtggccagcgcatgggccctgtgtctgtcgtc

SEQ ID NO: 551624 - DNA, 120 bp, Artificial Sequence
  ENSG00000168477_59 (sequence is synthesized)
ggggtgacagctgcagaggaagagacccccagccccacagaacccagcatggaggccccggagcccgctgaggagccgctcctgggggagctaacagtgacaggatcctcccctgactcg

SEQ ID NO: 551625 - DNA, 120 bp, Artificial Sequence
  ENSG00000168477_60 (sequence is synthesized)
ctgagcctctcctggaccgtcccccagggccgcttcgactccttcaccgtgcagtacaaggacagggacgggcggccccaggtggtgcgtgttgggggcgaggagagtgaagtcaccgtg

SEQ ID NO: 551626 - DNA, 120 bp, Artificial Sequence
  ENSG00000168477_61 (sequence is synthesized)
gggggcctggagcctgggcgcaagtacaagatgcacctgtacggcctccacgaggggcggcgcgtgggcccagtgtctgctgtgggcgtcacggcccccgaagaggagtcccctgatgct

SEQ ID NO: 551627 - DNA, 120 bp, Artificial Sequence
  ENSG00000168477_62 (sequence is synthesized)
cctcttgcaaagctgcgcctagggcagatgacagtgagagacatcacctccgactccctcagcctctcctggacagtccccgagggccagtttgaccatttcttggtccagtttaagaat

SEQ ID NO: 551628 - DNA, 120 bp, Artificial Sequence
  ENSG00000168477_63 (sequence is synthesized)
ggggacgggcagcccaaggcggtgcgggtgccgggacacgaggatggggtcaccatctcgggcctggagccagaccacaagtacaagatgaacctgtacggcttccacggtggccagcgc

SEQ ID NO: 551629 - DNA, 120 bp, Artificial Sequence
  ENSG00000168477_64 (sequence is synthesized)
gtgggccccgtgtctgctgttggtttaactgccccaggaaaggatgaagaaatggccccagcctcgacagaacctcccacccctgaaccccccatcaagcctcgcctggaggagctgacc

SEQ ID NO: 551630 - DNA, 120 bp, Artificial Sequence
  ENSG00000168477_65 (sequence is synthesized)
gtgacagatgcgacccctgactccctcagcctgtcctggacggttcccgagggacagtttgaccacttcctggtccagtacaagaatggggatgggcagcccaaggcaacacgggtgcca

SEQ ID NO: 551631 - DNA, 120 bp, Artificial Sequence
  ENSG00000168477_66 (sequence is synthesized)
ggacatgaggacagggtcaccatctccggcctggagccagacaacaagtacaagatgaacctgtacggcttccacggtggccagcgtgtgggccccgtgtctgccatcggggtgacagct

SEQ ID NO: 551632 - DNA, 120 bp, Artificial Sequence
  ENSG00000168477_67 (sequence is synthesized)
gcagaggaagagacccccagccccacagaacccagcatggaggccccggagccccctgaggagccgctcctgggggagctaacagtgacaggatcctcccctgactcgctgagcctctcc

SEQ ID NO: 551633 - DNA, 120 bp, Artificial Sequence
  ENSG00000168477_68 (sequence is synthesized)
tggaccgtcccccagggccgcttcgactccttcaccgtgcagtacaaggacagggacgggcggccccaggtggtgcgtgttgggggcgaggagagcgaggtcaccgtggggggcctggag

SEQ ID NO: 551634 - DNA, 120 bp, Artificial Sequence
  ENSG00000168477_69 (sequence is synthesized)
cctgggcgcaaatacaagatgcacctgtatggcctccacgaggggcggcgcgtgggcccggtgtccaccgtgggcgtgactgccccacaagaggatgtggacgagacccccagccctaca

SEQ ID NO: 551635 - DNA, 120 bp, Artificial Sequence
  ENSG00000168477_70 (sequence is synthesized)
gaaccaggcacagaggccccagggccccccgaggagcctctcctgggggagctgacagtgacaggatcctcccctgactcgctgagcctttcctggaccgtcccccagggccgctttgac

SEQ ID NO: 551636 - DNA, 120 bp, Artificial Sequence
  ENSG00000168477_71 (sequence is synthesized)
tccttcaccgtgcagtacaaggacagggacgggcggccccaggcggtgcgtgttgggggccaggagagcaaggtcactgtgaggggcctggagcctgggcgcaagtacaagatgcacctg

SEQ ID NO: 551637 - DNA, 120 bp, Artificial Sequence
  ENSG00000168477_72 (sequence is synthesized)
tacggcctccacgaggggcggcgcctgggcccggtgtctgccgtgggcgtcacagaggatgaagccgagaccacccaagcagtgcctaccatgacccctgagccccccatcaagcctcgc

SEQ ID NO: 551638 - DNA, 120 bp, Artificial Sequence
  ENSG00000168477_73 (sequence is synthesized)
ctgggggagctgaccatgacagatgccacccctgactccctcagcctgtcctggacggttcccgagggccagtttgaccacttcctggtccagtacaggaatggggatgggcagcccaag

SEQ ID NO: 551639 - DNA, 120 bp, Artificial Sequence
  ENSG00000168477_74 (sequence is synthesized)
gcggtgcgggtgccggggcacgaggacggggtcaccatctcaggcctggagccagaccataaatacaagatgaacctgtacggcttccacggtggccagcgcgtgggccccatctctgtc

SEQ ID NO: 551640 - DNA, 120 bp, Artificial Sequence
  ENSG00000168477_75 (sequence is synthesized)
attggggtgacggctgcagaggaagagacccccagccccacggaactcagcactgaggccccggagccccctgaggagccgctcctgggggagctgacagtgacaggatcctcccctgac

SEQ ID NO: 551641 - DNA, 120 bp, Artificial Sequence
  ENSG00000168477_76 (sequence is synthesized)
tcgctgagcctctcctggaccatcccccagggccacttcgactccttcaccgtgcagtacaaggacagggacgggcggccccaggtgatgcgtgtcaggggcgaggagagcgaggtcacc

SEQ ID NO: 551642 - DNA, 120 bp, Artificial Sequence
  ENSG00000168477_77 (sequence is synthesized)
gtggggggcctggagcccgggcgcaaatacaagatgcacctgtacggcctccacgaggggcggcgtgtgggcccggtgtccaccgtgggtgtgacagctccagaggatgaagcagagacc

SEQ ID NO: 551643 - DNA, 120 bp, Artificial Sequence
  ENSG00000168477_78 (sequence is synthesized)
acccaagcagtgcccaccacaacccctgagccccccaacaagcctcgcctcggggagctgaccgtgacagatgccacccctgactccctcagcctgtcctggatggtccccgagggccag

SEQ ID NO: 551644 - DNA, 120 bp, Artificial Sequence
  ENSG00000168477_79 (sequence is synthesized)
tttgaccacttcctggtccagtacaggaatggggatgggcagcccaaggtggtgcgggtgccggggcacgaggacggggtcaccatctcaggcctggagccagaccacaagtacaagatg

SEQ ID NO: 551645 - DNA, 120 bp, Artificial Sequence
  ENSG00000168477_80 (sequence is synthesized)
aacctgtacggcttccacggtggccagcgcgtgggccccatctctgtcattggggtgacagctgcagaggaagaaactcccgcccccacagaacccagcacggaggccccggagccccct

SEQ ID NO: 551646 - DNA, 120 bp, Artificial Sequence
  ENSG00000168477_81 (sequence is synthesized)
gaggagccgctcctgggggagctgacagtgacaggatcctcccctgactcgctgagcctctcctggaccatcccccagggccgcttcgactccttcactgtgcagtacaaggacagggac

SEQ ID NO: 551647 - DNA, 120 bp, Artificial Sequence
  ENSG00000168477_82 (sequence is synthesized)
gggcggccccaggtggtgcgtgtcaggggcgaggagagcgaggtcaccgtggggggcctggagcccgggtgcaaatacaagatgcacctgtacggcctccacgaggggcagcgcgtgggc

SEQ ID NO: 551648 - DNA, 120 bp, Artificial Sequence
  ENSG00000168477_83 (sequence is synthesized)
ccagtgtccgctgtgggtgtgacagctccaaaggatgaagccgagaccacccaagcagtgcctaccatgacccctgagccccccatcaagcctcgcctgggggagctgaccgtgacagat

SEQ ID NO: 551649 - DNA, 120 bp, Artificial Sequence
  ENSG00000168477_84 (sequence is synthesized)
gccacccccgactccctcagcctgtcctggatggttcccgagggccagtttgaccacttcctggtccagtacaggaatggggatgggcagcccaaggcggtgcgggtgccggggcacgag

SEQ ID NO: 551650 - DNA, 120 bp, Artificial Sequence
  ENSG00000168477_85 (sequence is synthesized)
gacggggtcaccatctcaggcctggagccagaccataaatacaagatgaacctgtacggcttccacggtggccagcgcgtaggccctgtgtctgccattggggtgacggaggaagagacc

SEQ ID NO: 551651 - DNA, 120 bp, Artificial Sequence
  ENSG00000168477_86 (sequence is synthesized)
cccagccccacagaacccagcactgaggccccggaggcccctgaggagccgctcctgggggagttgacagtgacaggatcctcccctgactcgctgagcctctcctggaccgtcccccag

SEQ ID NO: 551652 - DNA, 120 bp, Artificial Sequence
  ENSG00000168477_87 (sequence is synthesized)
ggccgcttcgactccttcaccgtgcagtacaaggacagggacgggcagccccaggtggtgcgtgtcaggggcgaggagagcgaggtcaccgtggggggcctggagcccgggcgcaaatac

SEQ ID NO: 551653 - DNA, 120 bp, Artificial Sequence
  ENSG00000168477_88 (sequence is synthesized)
aagatgcatctgtacggcctccacgaggggcagcgcgtgggcccagtgtccaccgtgggcatcacggcgcccctgcccacaccactgccggtggagccccgcctgggggagctggcggtg

SEQ ID NO: 551654 - DNA, 120 bp, Artificial Sequence
  ENSG00000168477_89 (sequence is synthesized)
gcggccgtgacctcggactcagtgggcctctcatggacggtggcccagggcccctttgactccttcctggtacagtacagggacgcgcaggggcagccccaggcagtgcctgtgagcgga

SEQ ID NO: 551655 - DNA, 120 bp, Artificial Sequence
  ENSG00000168477_90 (sequence is synthesized)
gacctccgagcggtcgccgtctcggggctggacccggcccgcaagtacaagttcctgctctttggactccagaatgggaaacgccacggcccagtccctgtggaggccaggaccgcccca

SEQ ID NO: 551656 - DNA, 120 bp, Artificial Sequence
  ENSG00000168477_91 (sequence is synthesized)
gacaccaaaccgtctccccgcctgggggagctgactgtgacagatgcgacccctgactccgtgggcctctcgtggacggtccctgagggcgaattcgactccttcgtggtccagtacaag

SEQ ID NO: 551657 - DNA, 120 bp, Artificial Sequence
  ENSG00000168477_92 (sequence is synthesized)
gataaggatggtcggctccaggtggtgccggtggcagccaaccagcgggaggtcacagtccagggcctggagcccagtaggaaatacaggttcctgctctatggtctgtcaggcaggaaa

SEQ ID NO: 551658 - DNA, 120 bp, Artificial Sequence
  ENSG00000168477_93 (sequence is synthesized)
cgactgggccccatctctgctgacagcaccacagctcccctggagaaggagctacctccccacctgggggaactgaccgtggctgaggagacctccagctctctgcgcctgtcctggacg

SEQ ID NO: 551659 - DNA, 120 bp, Artificial Sequence
  ENSG00000168477_94 (sequence is synthesized)
gtagcccagggcccctttgactccttcgtggtccagtacagggacacggacgggcagcccagggcagtgcctgtggccgcagaccagcgcacagtcaccgtagaggacctggagcctggc

SEQ ID NO: 551660 - DNA, 120 bp, Artificial Sequence
  ENSG00000168477_95 (sequence is synthesized)
aagaaatacaagtttctgctctacgggctccttgggggaaagcgcctgggcccggtctctgccctgggaatgacagccccagaagaggacacaccagccccagagttagccccagaggcc

SEQ ID NO: 551661 - DNA, 120 bp, Artificial Sequence
  ENSG00000168477_96 (sequence is synthesized)
cctgagcctcctgaagagccccgcctaggagtgctgaccgtgaccgacacaaccccagactccatgcgcctctcgtggagcgtggcccagggcccctttgattccttcgtggtccagtat

SEQ ID NO: 551662 - DNA, 120 bp, Artificial Sequence
  ENSG00000168477_97 (sequence is synthesized)
gaggacacgaacgggcagccccaggccttgctcgtggacggcgaccagagcaagatcctcatctcaggcctggagcccagcaccccctacaggttcctcctctatggcctccatgaaggg

SEQ ID NO: 551663 - DNA, 120 bp, Artificial Sequence
  ENSG00000168477_98 (sequence is synthesized)
aagcgcctggggcccctctcagctgagggcaccacagggctggctcctgctggtcagacctcagaggagtcaaggccccgcctgtcccagctgtctgtgactgacgtgaccaccagttca

SEQ ID NO: 551664 - DNA, 120 bp, Artificial Sequence
  ENSG00000168477_99 (sequence is synthesized)
ctgaggctcaactgggaggccccaccgggggccttcgactccttcctgctccgctttggggttccatcaccaagcactctggagccgcatccgcgtccactgctgcagcgcgagctgatg

SEQ ID NO: 551665 - DNA, 120 bp, Artificial Sequence
  ENSG00000168477_100 (sequence is synthesized)
gtgccggggacgcggcactcggccgtgctccgggacctgcgttccgggactctgtacagcctgacactgtatgggctgcgaggaccccacaaggccgacagcatccagggaaccgcccgc

SEQ ID NO: 551666 - DNA, 120 bp, Artificial Sequence
  ENSG00000168477_101 (sequence is synthesized)
accctcagcccagttctggagagcccccgtgacctccaattcagtgaaatcagggagacctcagccaaggtcaactggatgcccccaccatcccgggcggacagcttcaaagtctcctac

SEQ ID NO: 551667 - DNA, 120 bp, Artificial Sequence
  ENSG00000168477_102 (sequence is synthesized)
cagctggcggacggaggggagcctcagagtgtgcaggtggatggccaggcccggacccagaaactccaggggctgatcccaggcgctcgctatgaggtgaccgtggtctcggtccgaggc

SEQ ID NO: 551668 - DNA, 120 bp, Artificial Sequence
  ENSG00000168477_103 (sequence is synthesized)
tttgaggagagtgagcctctcacaggcttcctcaccacggttcctgacggtcccacacagttgcgtgcactgaacttgaccgagggattcgccgtgctgcactggaagcccccccagaat

SEQ ID NO: 551669 - DNA, 120 bp, Artificial Sequence
  ENSG00000168477_104 (sequence is synthesized)
cctgtggacacctatgacgtccaggtcacagcccctggggccccgcctctgcaggcggagaccccaggcagcgcggtggactaccccctgcatgaccttgtcctccacaccaactacacc

SEQ ID NO: 551670 - DNA, 120 bp, Artificial Sequence
  ENSG00000168477_105 (sequence is synthesized)
gccacagtgcgtggcctgcggggccccaacctcacttccccagccagcatcaccttcaccacagggctagaggcccctcgggacttggaggccaaggaagtgaccccccgcaccgccctg

SEQ ID NO: 551671 - DNA, 120 bp, Artificial Sequence
  ENSG00000168477_106 (sequence is synthesized)
ctcacttggactgagcccccagtccggcccgcaggctacctgctcagcttccacacccctggtggacagaaccaggagatcctgctcccaggagggatcacatctcaccagctccttggc

SEQ ID NO: 551672 - DNA, 120 bp, Artificial Sequence
  ENSG00000168477_107 (sequence is synthesized)
ctctttccctccacctcctacaatgcacggctccaggccatgtggggccagagcctcctgccgcccgtgtccacctctttcaccacgggtgggctgcggatccccttccccagggactgc

SEQ ID NO: 551673 - DNA, 120 bp, Artificial Sequence
  ENSG00000168477_108 (sequence is synthesized)
ggggaggagatgcagaacggagccggtgcctccaggaccagcaccatcttcctcaacggcaaccgcgagcggcccctgaacgtgttttgcgacatggagactgatgggggcggctggctg

SEQ ID NO: 551674 - DNA, 120 bp, Artificial Sequence
  ENSG00000168477_109 (sequence is synthesized)
gtgttccagcgccgcatggatggacagacagacttctggagggactgggaggactatgcccatggttttgggaacatctctggagagttctggctgggcaatgaggccctgcacagcctg

SEQ ID NO: 551675 - DNA, 120 bp, Artificial Sequence
  ENSG00000168477_110 (sequence is synthesized)
acacaggcaggtgactactccatgcgcgtggacctgcgggctggggacgaggctgtgttcgcccagtacgactccttccacgtagactcggctgcggagtactaccgcctccacttggag

SEQ ID NO: 551676 - DNA, 120 bp, Artificial Sequence
  ENSG00000168477_111 (sequence is synthesized)
ggctaccacggcaccgcaggggactccatgagctaccacagcggcagtgtcttctctgcccgtgatcgggaccccaacagcttgctcatctcctgcgctgtctcctaccgaggggcctgg

SEQ ID NO: 551677 - DNA, 120 bp, Artificial Sequence
  ENSG00000168477_112 (sequence is synthesized)
tggtacaggaactgccactacgccaacctcaacgggctctacgggagcacagtggaccatcagggagtgagctggtaccactggaagggcttcgagttctcggtgcccttcacggaaatg

SEQ ID NO: 551678 - DNA, 120 bp, Artificial Sequence
  ENSG00000168477_113 (sequence is synthesized)
aagctgagaccaagaaactttcgctccccagcggggggaggctgagctgctgcccacctctctcgcaccccagtatgactgccgagcactgaggggtcgccccgagagaagagccagggt

SEQ ID NO: 551679 - DNA, 120 bp, Artificial Sequence
  ENSG00000168477_114 (sequence is synthesized)
ccttcaccacccagccgctggaggaagccttctctgccagcgatctcgcagcactgtgtttacaggggggaggggaggggttcgtacgggagcaataaaggagaaactgaggtacccggc

SEQ ID NO: 551680 - DNA, 120 bp, Artificial Sequence
  ENSG00000168477_115 (sequence is synthesized)
ccttgtgcatttgggctgaagacaaagatgactgcaggagtgggcaggccggagtggggcgccctggcctgtccccaggaaggaggaggagtctgcagccctgtgggcttcaacatccat

SEQ ID NO: 551681 - DNA, 120 bp, Artificial Sequence
  ENSG00000168477_116 (sequence is synthesized)
caaggagtccagagcaggagccaggccaggcgggagggaaaggccctgggaggggctctctaatctcccagccccgactctgccccgtcactgccactgctcctcattactcgctggggc

SEQ ID NO: 551682 - DNA, 120 bp, Artificial Sequence
  ENSG00000168477_117 (sequence is synthesized)
tgctgtcgcctccccgaagggtggccttgtccagatagcggcaaacctccctgccgtggatgagtcaggagcattttcttaagaggaacatcactggaaaacaaaatgagcggggacaca

SEQ ID NO: 551683 - DNA, 120 bp, Artificial Sequence
  ENSG00000168477_118 (sequence is synthesized)
gaaaccaacagcagtggctgcatttgtggtacaggctcctcttccagagctcgctgatgcccacctcagacaggcctgaccacggcacggctggtgggatttgccagtcacctcaaccag

SEQ ID NO: 551684 - DNA, 120 bp, Artificial Sequence
  ENSG00000168477_119 (sequence is synthesized)
ccagttccaccctcagcttctctcagaagggagcaccacactcctcaagctcagtgaatgtatcccggcatgggtggggccagagcctgtgatatctcgaggtgggctcggcaggacacc

SEQ ID NO: 551685 - DNA, 120 bp, Artificial Sequence
  ENSG00000168477_120 (sequence is synthesized)
ggggtgtggaagggggaagcgagcacctgactcagacagcgcgggagctcgcaggagtcacgaggccacagcgacttcattgtctgactgggcctggacctataaacttcccacctcagc

SEQ ID NO: 551686 - DNA, 120 bp, Artificial Sequence
  ENSG00000168477_121 (sequence is synthesized)
cttgggccaagcctggaagataaaaatggagcaccccatggcgcccctcactcagattctcccctgggcttctcccacgcagccccagaagaggacacaccagccccagagttagcccca

SEQ ID NO: 551687 - DNA, 120 bp, Artificial Sequence
  ENSG00000168477_122 (sequence is synthesized)
agaggtggggtggggtgggcattgctagtccataaaggtccttggtatgaattagaagaaggcactccttcctcaccatgaggggtgtggatgcagcccagaacacaacttggagagcag

SEQ ID NO: 551688 - DNA, 120 bp, Artificial Sequence
  ENSG00000168477_123 (sequence is synthesized)
agctgggctacatgtcaaccaaagcatatgcgagggccctgagaggctgcatacattacacatactagcaactgggagcagacatggccttatgagatgaggctagcctggctaggggcc

SEQ ID NO: 551689 - DNA, 120 bp, Artificial Sequence
  ENSG00000168477_124 (sequence is synthesized)
agccccctactatgttctgcctctcctcactctccagccaaagcagaagcagaaatctcaacttcgtggcgcaaccaagatagcttgaattttttcttctgtttaaacatctttttttgt

SEQ ID NO: 551690 - DNA, 120 bp, Artificial Sequence
  ENSG00000168477_125 (sequence is synthesized)
tgttgttataaaaatactttaatcacgagacaagaatttggcaactagagaaaagaaaaacaattcctggctgctcctcactaaaacaagcactgctaacattttaaagtgtttctccca

SEQ ID NO: 551691 - DNA, 120 bp, Artificial Sequence
  ENSG00000168477_126 (sequence is synthesized)
agttcaggtttatgtgtgtgcatttcttttttattattattaaataaacaacttggagggagttgaaggaatggtggctgccttcctggctcgtgatggggagtttgggggaaagtggct

SEQ ID NO: 551692 - DNA, 120 bp, Artificial Sequence
  ENSG00000168477_127 (sequence is synthesized)
gcatcaaagaatcaagcactgaagacatagctggctctgaggtggggtgggtgcgggatcacagaccgcatgtcatccccttgcccccacccctgcaactctggggtatatctgtgtcta

SEQ ID NO: 551693 - DNA, 120 bp, Artificial Sequence
  ENSG00000168477_128 (sequence is synthesized)
gcaacgatgtctcatggcgtgacagactagaggatacgcatccctggaatgtgagtcaacaggaaagatggggccccacgcccttcaggcctcctgaatgatgccagcccagtatgctct

SEQ ID NO: 551694 - DNA, 120 bp, Artificial Sequence
  ENSG00000168477_129 (sequence is synthesized)
ggcgggagcaggcctgtgtgtctcctcaaggagctgtccctggggctacactggagggaccatttcccagaacctcacacctccgggaggctgccagggcttaggcaaaggcagcatgtg

SEQ ID NO: 551695 - DNA, 120 bp, Artificial Sequence
  ENSG00000168481_0 (sequence is synthesized)
agtccgcagccacccggcgcggtcagccccggctgcggctccagctccgcgctccgctcttctctcccgagccggatcgcgggagcgagcaggggaggggaccgcagccggcgcccgagg

SEQ ID NO: 551696 - DNA, 80 bp, Artificial Sequence
  ENSG00000168481_1 (sequence is synthesized)
gcaggaggagtccgcaggcgggcccctggctgcggtagcagctgccggtggcagggaggtgccagcccgcgcggggtggc

SEQ ID NO: 551697 - DNA, 120 bp, Artificial Sequence
  ENSG00000168481_2 (sequence is synthesized)
ccccagggagagatcgcgggcagcatggcggggctgcgggccagggggggcccggggccggggctgctggcgctctccgcgctcggcttctgcctcatgctgcaagtcagcgctaagagg

SEQ ID NO: 551698 - DNA, 120 bp, Artificial Sequence
  ENSG00000168481_3 (sequence is synthesized)
ccccccaagacgcccccctgcccgcccagctgctcttgcaccagggacaccgccttctgcgtggactcaaaggcggtgcccaggaacctgccctcggaggtcatctccctgaccctggtg

SEQ ID NO: 551699 - DNA, 120 bp, Artificial Sequence
  ENSG00000168481_4 (sequence is synthesized)
aatgccgccttctcagagatccaggatggagcgttctcccacctcccgctgctgcagttcttgttactcaactccaacaagtttacactgattggagacaacgccttcacaggactgtcg

SEQ ID NO: 551700 - DNA, 120 bp, Artificial Sequence
  ENSG00000168481_5 (sequence is synthesized)
cacctgcagtatctcttcattgagaacaatgacatctgggcactatccaagttcaccttccgaggactcaagtccttgactcacctctcgctggccaacaataacctgcagacactgccc

SEQ ID NO: 551701 - DNA, 120 bp, Artificial Sequence
  ENSG00000168481_6 (sequence is synthesized)
agagacatcttccggcccctggacatcctgaatgacttggacctgcggggcaactcactcaactgtgactgcaaggtgaagtggttggtggagtggctggcacacaccaacaccacggtg

SEQ ID NO: 551702 - DNA, 120 bp, Artificial Sequence
  ENSG00000168481_7 (sequence is synthesized)
gcacccatctactgcgccagcccgccccgcttccaggagcacaaggtgcaggacctgccgctgcgggagttcgattgcatcaccacagattttgtgttgtaccagaccctggccttccca

SEQ ID NO: 551703 - DNA, 120 bp, Artificial Sequence
  ENSG00000168481_8 (sequence is synthesized)
gcagtgtcggctgagcccttcctctactccagtgacctctatttggctctggcccagccaggagtcagtgcctgcaccatcctgaagtgggactatgttgagcggcagcttcgagactat

SEQ ID NO: 551704 - DNA, 120 bp, Artificial Sequence
  ENSG00000168481_9 (sequence is synthesized)
gatagaatcccagccccctctgcagtgcactgcaagccgatggtggtggacagccagctgtacgtggtcgtggcccagctgtttggcggctcttacatttaccactgggatcccaacacc

SEQ ID NO: 551705 - DNA, 120 bp, Artificial Sequence
  ENSG00000168481_10 (sequence is synthesized)
acgcgcttcaccaggctgcaagacattgacccgcagcgcgtgcgcaagcctaacgacctagaagccttccgcatcgacggtgactggtactttgccgtggctgacagctccaaggcaggc

SEQ ID NO: 551706 - DNA, 120 bp, Artificial Sequence
  ENSG00000168481_11 (sequence is synthesized)
gccaccagcctctaccgctggcaccagaatggcttctactcccaccaggcactgcacccctggcaccgtgacaccgacctggagtttgtggacggcgagggcaagccacggctgattgtg

SEQ ID NO: 551707 - DNA, 120 bp, Artificial Sequence
  ENSG00000168481_12 (sequence is synthesized)
tccagcagctcccaggcacccgtcatctatcagtggagtcgcacccagaagcagtttgtggcccagggtgaggtgacccaggtgcctgatgcccaagctgtgaaacactttcgtgccggc

SEQ ID NO: 551708 - DNA, 120 bp, Artificial Sequence
  ENSG00000168481_13 (sequence is synthesized)
gcgacagctacctgtgcctcagccgctacattggcgactccaagatcctgcgctgggagggtacccgcttctcggaggtgcaggccctgccctcccggggctcgctggccctgcagccct

SEQ ID NO: 551709 - DNA, 120 bp, Artificial Sequence
  ENSG00000168481_14 (sequence is synthesized)
tccttgtgggtggccgccgctacctggcactgggcagtgatttctccttcacccagatctaccagtgggatgagggacgacagaagtttgtacggttccaggagctggctgtgcaggctc

SEQ ID NO: 551710 - DNA, 120 bp, Artificial Sequence
  ENSG00000168481_15 (sequence is synthesized)
ctcgggccttctgctacatgcctgctggggacgcccagctactcctggcccccagcttcaagggacagacgctggtgtatagacacattgtggtggatctcagtgcctagggggtgccga

SEQ ID NO: 551711 - DNA, 120 bp, Artificial Sequence
  ENSG00000168481_16 (sequence is synthesized)
ggcctctggtctcctcagggtggccactggaggatgggtgggggcctctgtgagcaccacgtatgcctgtgtgaagacaagcgaccaacctgcattcatgcccttgtatccgcacacgcc

SEQ ID NO: 551712 - DNA, 120 bp, Artificial Sequence
  ENSG00000168481_17 (sequence is synthesized)
cagtgtgtacaggcgcaccccgtggactggcccaggaggacgtgcatcatcactgcaatcagcatgaacaccaggcacccctgggacacctaacgcccagttcccgtgaccccaactgca

SEQ ID NO: 551713 - DNA, 120 bp, Artificial Sequence
  ENSG00000168481_18 (sequence is synthesized)
ggccccccctactctgcagcctttcccatgctctgccccctgtctcatgcacgagtggtgcggggtgctgggagcgaggggggccgcatcctcctgtccttgtgcttctccttctgcccc

SEQ ID NO: 551714 - DNA, 120 bp, Artificial Sequence
  ENSG00000168481_19 (sequence is synthesized)
tctggtctttcctgttggtgctccaggcattgtttacctgctcttgctccccgctgtagcccacagccatatctgtcatgcttccccggggccactcacccctgccccaccccgtctgca

SEQ ID NO: 551715 - DNA, 120 bp, Artificial Sequence
  ENSG00000168481_20 (sequence is synthesized)
tgctcacatggacgcggacggacacactcattacacactcacacgccccgactgcacccggtgtccatctataaacatgtcagggcacgtgtgcatacaagcagattcagcactgcctac

SEQ ID NO: 551716 - DNA, 120 bp, Artificial Sequence
  ENSG00000168481_21 (sequence is synthesized)
caggctctcctgttaccttgcctctctgcttggagggggccccctctgctcacccccagcgtgccccccccggaactgataaggatgagaatggtggtgccagcttctgagggcctgctt

SEQ ID NO: 551717 - DNA, 120 bp, Artificial Sequence
  ENSG00000168481_22 (sequence is synthesized)
ggcctcctgggggcaaagcccctctgcccgaagcaataacaacagcagcagaagcaatcccggggagctgccaggggtgtctgtctctgttctccttggcgtttccttcatggccgtgaa

SEQ ID NO: 551718 - DNA, 120 bp, Artificial Sequence
  ENSG00000168481_23 (sequence is synthesized)
tcccagctcacccatggacagaagacctcccctcatctgaaagcctttctgccttccttcctgtagctgtcgctttctcaggcttggactgtcccctggttcaccctgtctttgggatgt

SEQ ID NO: 551719 - DNA, 120 bp, Artificial Sequence
  ENSG00000168481_24 (sequence is synthesized)
ggcccttgagctgggcgggctccttgggtggattagagagctggccgagctgcaagcacctgagttacctgcgagggtgcccagagtggagcttggcctgagggcgtgttgcagccctgg

SEQ ID NO: 551720 - DNA, 120 bp, Artificial Sequence
  ENSG00000168481_25 (sequence is synthesized)
ccccaccagtccacagaggcccccaggagcactgcctttcagtggaccgggtggggcctggtgggaggggccccactagctgagcttctgctgccctctgctgtctgctgagatgccagg

SEQ ID NO: 551721 - DNA, 120 bp, Artificial Sequence
  ENSG00000168481_26 (sequence is synthesized)
ctagtggagagggcacaccatgtgcccaaatggtgtgatgctccttgtagcaggataccagggtactggggggcaatgctatgattaacttgcttcaaataaaaagttcccgccccataa

SEQ ID NO: 551722 - DNA, 120 bp, Artificial Sequence
  ENSG00000168481_27 (sequence is synthesized)
gctgctgcagttcttgtatggatagggccttgtggaagggttgggggaactatggggtggtagcaggggacaaatcctgggctggggagagggagagtggacagaggcagcctctgcaga

SEQ ID NO: 551723 - DNA, 120 bp, Artificial Sequence
  ENSG00000168481_28 (sequence is synthesized)
cgaagatgcaggtgtcccttgcttttgttctgataggatgtacccaaaagacggggcagccttgagtcaggggagtcggggcagcaggaggacagctagggatggcacagagaagccaag

SEQ ID NO: 551724 - DNA, 120 bp, Artificial Sequence
  ENSG00000168481_29 (sequence is synthesized)
caagtgggatgcggggatgggcttggctgctctggaaaccccagagaattgggtgcgatagcctgggctagtgcccaaggtgggcactgtggggccatcttagagacaggtgatcccagg

SEQ ID NO: 551725 - DNA, 120 bp, Artificial Sequence
  ENSG00000168481_30 (sequence is synthesized)
aatcagagttcccagaaagagctgggggctgaaagaaagggatggcaggagtgtctccaaccctacaagatgccgtccatgagggacagttgtccatgaggggctggaatgggacagaat

SEQ ID NO: 551726 - DNA, 120 bp, Artificial Sequence
  ENSG00000168481_31 (sequence is synthesized)
gagggtgggggagagggagaggagatgccacccgggaggaccaggagctggcttgacaagagagctctgccttggcccatgtttaggatccaacagggaccctgggagcttctggggcca

SEQ ID NO: 551727 - DNA, 120 bp, Artificial Sequence
  ENSG00000168481_32 (sequence is synthesized)
gaacaggctcctgcctggccttgttgcccaggtggcccagggattccccatggggtccccaggggtagcagcagggcagtcatgtcttggggaagcccagggctgaggcagcgggctggg

SEQ ID NO: 551728 - DNA, 120 bp, Artificial Sequence
  ENSG00000168481_33 (sequence is synthesized)
ggctggggcagcaggcacacccttggaagctctaattccacctttgtctctgcaggttactcaactccaacaagtttacactgattggagacaacgccttcacaggactgtcgcacctgc

SEQ ID NO: 551729 - DNA, 120 bp, Artificial Sequence
  ENSG00000168481_34 (sequence is synthesized)
agtatctgtgtgtgggagggaaaggggcaatgggaaagcagaagggagggggaccccaggcctgggaggccgagggactgggtagggagtggatgagaatgccgcaggaagggaaggtga

SEQ ID NO: 551730 - DNA, 120 bp, Artificial Sequence
  ENSG00000168481_35 (sequence is synthesized)
tgggaggcgagagcccttgcatcccgtgatggcaggacctgagcagaaggtcgtttcattcattttgcctctaccctacctgatgctctatctctatggcttggtgatgccagactccat

SEQ ID NO: 551731 - DNA, 120 bp, Artificial Sequence
  ENSG00000168481_36 (sequence is synthesized)
ttggaaacctgtctcggggacacgggctgaaatctaggctggggcgtagggcgagtgctgctgggggtctggcatcctgtgtgagcactgaggcaagttcccgctttccccagcttcatt

SEQ ID NO: 551732 - DNA, 120 bp, Artificial Sequence
  ENSG00000168484_0 (sequence is synthesized)
ggaggagaggagagcatagcacctgcagcaagatggatgtgggcagcaaagaggtcctgatggagagcccgccggactactccgcagctccccggggccgatttggcattccctgctgcc

SEQ ID NO: 551733 - DNA, 120 bp, Artificial Sequence
  ENSG00000168484_1 (sequence is synthesized)
cagtgcacctgaaacgccttcttatcgtggtggtggtggtggtcctcatcgtcgtggtgattgtgggagccctgctcatgggtctccacatgagccagaaacacacggagatggttctgg

SEQ ID NO: 551734 - DNA, 120 bp, Artificial Sequence
  ENSG00000168484_2 (sequence is synthesized)
agatgagcattggggcgccggaagcccagcaacgcctggccctgagtgagcacctggttaccactgccaccttctccatcggctccactggcctcgtggtgtatgactaccagcagctgc

SEQ ID NO: 551735 - DNA, 120 bp, Artificial Sequence
  ENSG00000168484_3 (sequence is synthesized)
tgatcgcctacaagccagcccctggcacctgctgctacatcatgaagatagctccagagagcatccccagtcttgaggctctcactagaaaagtccacaacttccaggccaagcccgcag

SEQ ID NO: 551736 - DNA, 120 bp, Artificial Sequence
  ENSG00000168484_4 (sequence is synthesized)
gtgagcaccctgtgtggcgaggtgccgctctactacatctaggacgcctccggtgagcaggtgtgatcccagggcccctgatcagcagcggaggagcgctcgggccacctgcccgggctg

SEQ ID NO: 551737 - DNA, 120 bp, Artificial Sequence
  ENSG00000168484_5 (sequence is synthesized)
tggaggagcgctcgcgctgaccaggcgctggggcgtccactgaagcggggtcatccaggcaactcgggggaggggaagctcacagaccggtacttcccactcccctgattctctctgtcc

SEQ ID NO: 551738 - DNA, 120 bp, Artificial Sequence
  ENSG00000168484_6 (sequence is synthesized)
atcctcaacattcctttgcttcacagggtcagtggaagccccaacgggaaaggaaacgccccgggcaaagggtcttttgcagcttttgcagacgggcaagaagctgcttctgcccacacc

SEQ ID NO: 551739 - DNA, 120 bp, Artificial Sequence
  ENSG00000168484_7 (sequence is synthesized)
gcagggacaagccctggagaaatgggagcttggggagaggatgggagtgggcagaggtggcgcccaggggcccgggaactcctgccacaacagaataaagcagcctgattgaaaagcaaa

SEQ ID NO: 551740 - DNA, 120 bp, Artificial Sequence
  ENSG00000168484_8 (sequence is synthesized)
gcgtgtggggctgcgcgtgagtgcatgcgtgtgagcttgtgcttgtgcctctgctgggcacgactgtgcgcgccggtgctcacctgtctctgcacgggcacatgcactcactgccttgtg

SEQ ID NO: 551741 - DNA, 120 bp, Artificial Sequence
  ENSG00000168484_9 (sequence is synthesized)
gaggcgcttcggcgttagggatccctgtgcttctgtctacctgggtttctttgcatggggggacacatcccctaggcagcatcatgggcatgtcgtgagtgacagacgcatatctaagtt

SEQ ID NO: 551742 - DNA, 120 bp, Artificial Sequence
  ENSG00000168484_10 (sequence is synthesized)
agcatgcaagattagaagcacaagggcgtcctggaggagtctgaagtgcgcttctaaccggattcacatgtttttccacgcgccgctgaacagaatgtacctttgtgtcagcatgagctg

SEQ ID NO: 551743 - DNA, 120 bp, Artificial Sequence
  ENSG00000168484_11 (sequence is synthesized)
aaaagggaaacgcagcctctggagctggagtgggactgtgtggaattctggaacatttctcacgctcaaccacagcctgttaaagctgggaagcgctttggatatttttcagtccagccc

SEQ ID NO: 551744 - DNA, 120 bp, Artificial Sequence
  ENSG00000168484_12 (sequence is synthesized)
ctatcgcaagtgctctgtactttccctacttaatcctctcaatcgtttgaggcaggtgatagtaattcccttttacagacaagaaaagtgaggcctgtcgcaccagaagaaaaaggtatc

SEQ ID NO: 551745 - DNA, 120 bp, Artificial Sequence
  ENSG00000168484_13 (sequence is synthesized)
agcagggatttccgcccactctgcccagcttcaaggttcacggtcgtccttccatgcacggctcttccaagtgtagccctgggagcccgggggtccttgagaacctttcaggaagtctct

SEQ ID NO: 551746 - DNA, 120 bp, Artificial Sequence
  ENSG00000168484_14 (sequence is synthesized)
gaggaacccaagaccttcacttggttggtgtgagcactccaggaggcaggcaccctccctcagccctcaagcaagcaaaaatgggtttaaaaaaagaaggagaagaagcagcagcagcag

SEQ ID NO: 551747 - DNA, 120 bp, Artificial Sequence
  ENSG00000168484_15 (sequence is synthesized)
ccgccacagagcttgtgacagctacagcctaagggcaacaggcaggggagaccaaggaccagaaagagcagaggctttttcaaagaaagagatccctctcccagcacccagcgatggcgg

SEQ ID NO: 551748 - DNA, 120 bp, Artificial Sequence
  ENSG00000168484_16 (sequence is synthesized)
atgatgctaatgaggatgactggatgtcacacccatgatgctattaggtcctcataatagcatagtgaggtggacagctagtacctgacccatctcacagatgaacatactaatgcctaa

SEQ ID NO: 551749 - DNA, 120 bp, Artificial Sequence
  ENSG00000168484_17 (sequence is synthesized)
attggctgccagctgactgcccctctcctattcccctgcacgactcctttccttcccaccccactgccaagctgctgggctcagctgagtccactcactacctggtggcttctgactcta

SEQ ID NO: 551750 - DNA, 120 bp, Artificial Sequence
  ENSG00000168484_18 (sequence is synthesized)
gcacagcccctctttactgatgagaaaactgaggctcagagagattgcctgatatacctgaagtcccacaataagggctgcacatgggatagaaactcacttcctacattccagatggaa

SEQ ID NO: 551751 - DNA, 120 bp, Artificial Sequence
  ENSG00000168484_19 (sequence is synthesized)
cttatctgggcttcggttctggagggccaggaacaaacaggcttcaaagccaagggcttggctggcacacagggggcttggtccttcacctctgtcccctctccctacggacacatataa

SEQ ID NO: 551752 - DNA, 120 bp, Artificial Sequence
  ENSG00000168484_20 (sequence is synthesized)
aatgcctaacaaagcagaacgactcacgctgggtcccagagctggccagtggaagcactgagacctccacatactgaaggcatggactattgaccgctgttggtattggtctcatcattg

SEQ ID NO: 551753 - DNA, 120 bp, Artificial Sequence
  ENSG00000168484_21 (sequence is synthesized)
actatcattaagtgttggctgtttgcatgcttcctgcccagtggcaggttcaaagaagcccgcaggaagcgtgctcctttctttcccagggcccgcaattgggctggaagatagagcaac

SEQ ID NO: 551754 - DNA, 120 bp, Artificial Sequence
  ENSG00000168484_22 (sequence is synthesized)
cgtgagaacaacatggccccccgagatgcccacagggaccccgagatgcctgcagtgcttggctctcccgctggccagctgcccacctggctcaggcccagtactcaccctggtcacacc

SEQ ID NO: 551755 - DNA, 120 bp, Artificial Sequence
  ENSG00000168487_0 (sequence is synthesized)
gcttccctcgccgccgccccgccagcatgcccggcgtggcccgcctgccgctgctgctcgggctgctgctgctcccgcgtcccggccggccgctggacttggccgactacacctatgacc

SEQ ID NO: 551756 - DNA, 120 bp, Artificial Sequence
  ENSG00000168487_1 (sequence is synthesized)
ctatgacctggcggaggaggacgactcggagcccctcaactacaaagacccctgcaaggcggctgcctttcttggggacattgccctggacgaagaggacctgagggccttccaggtaca

SEQ ID NO: 551757 - DNA, 120 bp, Artificial Sequence
  ENSG00000168487_2 (sequence is synthesized)
gcaggctgtggatctcagacggcacacagctcgtaagtcctccatcaaagctgcagttccaggaaacacttctacccccagctgccagagcaccaacgggcagcctcagaggggagcctg

SEQ ID NO: 551758 - DNA, 120 bp, Artificial Sequence
  ENSG00000168487_3 (sequence is synthesized)
tgggagatggagaggtagatcccgtagccggcgggcggcgacgtcccgaccagagcgtgtgtggcccgatggggtcatcccctttgtcattgggggaaacttcactggtagccagagggc

SEQ ID NO: 551759 - DNA, 120 bp, Artificial Sequence
  ENSG00000168487_4 (sequence is synthesized)
agtcttccggcaggccatgaggcactgggagaagcacacctgtgtcaccttcctggagcgcactgacgaggacagctatattgtgttcacctatcgaccttgcgggtgctgctcctacgt

SEQ ID NO: 551760 - DNA, 120 bp, Artificial Sequence
  ENSG00000168487_5 (sequence is synthesized)
gggtcgccgcggcgggggcccccaggccatctccatcggcaagaactgtgacaagttcggcattgtggtccacgagctgggccacgtcgtcggcttctggcacgaacacactcggccaga

SEQ ID NO: 551761 - DNA, 120 bp, Artificial Sequence
  ENSG00000168487_6 (sequence is synthesized)
ccgggaccgccacgtttccatcgttcgtgagaacatccagccagggcaggagtataacttcctgaagatggagcctcaggaggtggagtccctgggggagacctatgacttcgacagcat

SEQ ID NO: 551762 - DNA, 120 bp, Artificial Sequence
  ENSG00000168487_7 (sequence is synthesized)
catgcattacgctcggaacacattctccaggggcatcttcctggataccattgtccccaagtatgaggtgaacggggtgaaacctcccattggccaaaggacacggctcagcaaggggga

SEQ ID NO: 551763 - DNA, 120 bp, Artificial Sequence
  ENSG00000168487_8 (sequence is synthesized)
cattgcccaagcccgcaagctttacaagtgcccagcctgtggagagaccctgcaagacagcacaggcaacttctcctcccctgaataccccaatggctactctgctcacatgcactgcgt

SEQ ID NO: 551764 - DNA, 120 bp, Artificial Sequence
  ENSG00000168487_9 (sequence is synthesized)
gtggcgcatctctgtcacacccggggagaagatcatcctgaacttcacgtccctggacctgtaccgcagccgcctgtgctggtacgactatgtggaggtccgagatggcttctggaggaa

SEQ ID NO: 551765 - DNA, 120 bp, Artificial Sequence
  ENSG00000168487_10 (sequence is synthesized)
ggcgcccctccgaggccgcttctgcgggtccaaactccctgagcctatcgtctccactgacagccgcctctgggttgaattccgcagcagcagcaattgggttggaaagggcttctttgc

SEQ ID NO: 551766 - DNA, 120 bp, Artificial Sequence
  ENSG00000168487_11 (sequence is synthesized)
agtctacgaagccatctgcgggggtgatgtgaaaaaggactatggccacattcaatcgcccaactacccagacgattaccggcccagcaaagtctgcatctggcggatccaggtgtctga

SEQ ID NO: 551767 - DNA, 120 bp, Artificial Sequence
  ENSG00000168487_12 (sequence is synthesized)
gggcttccacgtgggcctcacattccagtcctttgagattgagcgccacgacagctgtgcctacgactatctggaggtgcgcgacgggcacagtgagagcagcaccctcatcgggcgcta

SEQ ID NO: 551768 - DNA, 120 bp, Artificial Sequence
  ENSG00000168487_13 (sequence is synthesized)
ctgtggctatgagaagcctgatgacatcaagagcacgtccagccgcctctggctcaagttcgtctctgacgggtccattaacaaagcgggctttgccgtcaactttttcaaagaggtgga

SEQ ID NO: 551769 - DNA, 120 bp, Artificial Sequence
  ENSG00000168487_14 (sequence is synthesized)
gtgaggctgcttgtggcggattcctcaccaagctcaacggctccatcaccagcccgggctggcccaaggagtacccccccaacaagaactgcatctggcagctggtggcccccacccagt

SEQ ID NO: 551770 - DNA, 120 bp, Artificial Sequence
  ENSG00000168487_15 (sequence is synthesized)
accgcatctccctgcagtttgacttctttgagacagagggcaatgatgtgtgcaagtacgacttcgtggaggtgcgcagtggactcacagctgactccaagctgcatggcaagttctgtg

SEQ ID NO: 551771 - DNA, 120 bp, Artificial Sequence
  ENSG00000168487_16 (sequence is synthesized)
gttctgagaagcccgaggtcatcacctcccagtacaacaacatgcgcgtggagttcaagtccgacaacaccgtgtccaaaaagggcttcaaggcccacttcttctcagacaaggacgagt

SEQ ID NO: 551772 - DNA, 120 bp, Artificial Sequence
  ENSG00000168487_17 (sequence is synthesized)
gctccaaggataacggcggctgccagcaggactgcgtcaacacgttcggcagttatgagtgccaatgccgcagtggcttcgtcctccatgacaacaagcacgactgcaaagaagccggct

SEQ ID NO: 551773 - DNA, 120 bp, Artificial Sequence
  ENSG00000168487_18 (sequence is synthesized)
gtgaccacaaggtgacatccaccagtggtaccatcaccagccccaactggcctgacaagtatcccagcaagaaggagtgcacgtgggccatctccagcacccccgggcaccgggtcaagc

SEQ ID NO: 551774 - DNA, 120 bp, Artificial Sequence
  ENSG00000168487_19 (sequence is synthesized)
tgaccttcatggagatggacatcgagtcccagcctgagtgtgcctacgaccacctagaggtgttcgacgggcgagacgccaaggcccccgtcctcggccgcttctgtgggagcaagaagc

SEQ ID NO: 551775 - DNA, 120 bp, Artificial Sequence
  ENSG00000168487_20 (sequence is synthesized)
ccgagcccgtcctggccacaggcagccgcatgttcctgcgcttctactcagataactcggtccagcgaaagggcttccaggcctcccacgccacagagtgcgggggccaggtacgggcag

SEQ ID NO: 551776 - DNA, 120 bp, Artificial Sequence
  ENSG00000168487_21 (sequence is synthesized)
acgtgaagaccaaggacctttactcccacgcccagtttggcgacaacaactaccctgggggtgtggactgtgagtgggtcattgtggccgaggaaggctacggcgtggagctcgtgttcc

SEQ ID NO: 551777 - DNA, 120 bp, Artificial Sequence
  ENSG00000168487_22 (sequence is synthesized)
agacctttgaggtggaggaggagaccgactgcggctatgactacatggagctcttcgacggctacgacagcacagcccccaggctggggcgctactgtggctcagggcctcctgaggagg

SEQ ID NO: 551778 - DNA, 120 bp, Artificial Sequence
  ENSG00000168487_23 (sequence is synthesized)
tgtactcggcgggagattctgtcctggtgaagttccactcggatgacaccatcaccaaaaaaggtttccacctgcgatacaccagcaccaagttccaggacacactccacagcaggaagt

SEQ ID NO: 551779 - DNA, 120 bp, Artificial Sequence
  ENSG00000168487_24 (sequence is synthesized)
gaccactgcctgagcaggggcggggactggagcctgctgcccttggtcgcctagactggatagtgggggtgggcggaaggcaacgcaccatccctctcccccaggccccaggacctgcag

SEQ ID NO: 551780 - DNA, 120 bp, Artificial Sequence
  ENSG00000168487_25 (sequence is synthesized)
ggccaatggcctggtgagactgtccataggaggtgggggaactggactccggcataagccacttccccacaaacccccaccagcaaggggctggggccagggagcagagcttccacaaga

SEQ ID NO: 551781 - DNA, 120 bp, Artificial Sequence
  ENSG00000168487_26 (sequence is synthesized)
catttcgaagtcatcattcctctcttagggggccctgcctggtggcaagagggaatgtcagcaggaccccatcgccatccctgtgtctctacacgctgtattgtgtatcaccgggggcat

SEQ ID NO: 551782 - DNA, 120 bp, Artificial Sequence
  ENSG00000168487_27 (sequence is synthesized)
tattttcattgtaatgttcatttcccacccctgctccagcctcgatttggttttattttgagcccccattccaccaccccagtttcctggggcacaagtgtctgtgcatgtcccccagga

SEQ ID NO: 551783 - DNA, 120 bp, Artificial Sequence
  ENSG00000168487_28 (sequence is synthesized)
gccaccgtggggagccgatggggaggggatggagaaacaagacagggcttctctcaggcccagtggccggtcagccacaccagggcaccgcagccaataaaccgaaagtgttacagccaa

SEQ ID NO: 551784 - DNA, 81 bp, Artificial Sequence
  ENSG00000168487_29 (sequence is synthesized)
gggaggccaaggcaggaggatcacctgtggtcaggagttcaagaacagcctgatcaacaaggtgaaacctaggctgagaca

SEQ ID NO: 551785 - DNA, 120 bp, Artificial Sequence
  ENSG00000168487_30 (sequence is synthesized)
gaaagaaaggtataacacaagcctaagtgtggaggcattcgtgtggcagatgcacatctacgtgaactttgctgcctttcttggggacattgccctggacgaagaggacctgagggcctt

SEQ ID NO: 551786 - DNA, 120 bp, Artificial Sequence
  ENSG00000168487_31 (sequence is synthesized)
cactcttcatccccctccagggcccaacactggccagggatgacaacctggtatgggagccaggagtcctggcatcattagtcccagatagctgcattactcacttgctgcgagacttca

SEQ ID NO: 551787 - DNA, 120 bp, Artificial Sequence
  ENSG00000168487_32 (sequence is synthesized)
gagacaggaaggagggaggcgagcagagggaaggggaagaggtcggggagcgagggcgggagcggtcgcggtcgcgatcgagcaagcaagcgggcgagaggacgccctcccctggcctcc

SEQ ID NO: 551788 - DNA, 120 bp, Artificial Sequence
  ENSG00000168487_33 (sequence is synthesized)
aggccagctctgcagccccctcggggacgcccccaccagctcaaattccgagtgcagaaaagaaaccggaccccccagtgaggcctgccaggcctcccggaccccttgttactcaggaac

SEQ ID NO: 551789 - DNA, 120 bp, Artificial Sequence
  ENSG00000168487_34 (sequence is synthesized)
ctcaccttggacggaatgggatgggggcttcggtgcccaccaaccccccacctccactctgccattccggcccacctccctctggccggacagaactggtgctctcttctccccactgtg

SEQ ID NO: 551790 - DNA, 120 bp, Artificial Sequence
  ENSG00000168487_35 (sequence is synthesized)
cccgtccgcggaccggggacccttccccgtgccctaccccctcccattttgatggtgtctgtgacatttcctgttgtgaagtaaaagagggacccctgcgtcctgctcctttctcttgca

SEQ ID NO: 551791 - DNA, 120 bp, Artificial Sequence
  ENSG00000168487_36 (sequence is synthesized)
ggtacgagctggccccagacaagcgccgctgtgaggggtgttatgatctacaggttgggaaacccctgttgtgggacagacactgtttccgcctctccacgcatggtcccgagatgctgg

SEQ ID NO: 551792 - DNA, 120 bp, Artificial Sequence
  ENSG00000168487_37 (sequence is synthesized)
ggacagcactccgaggctaatggctccagctcactaggccgatcctgctgtgcccccgagctgctccctttcctgcacctcccaggaccgcccctccctgaactgctttccctgagcccc

SEQ ID NO: 551793 - DNA, 120 bp, Artificial Sequence
  ENSG00000168487_38 (sequence is synthesized)
ttattcccgctcactccctcttggaggaccttggcctgttcatttgcagagaagatagaaatggccacacttatgaccccttagctcccccactcctccctacaggcccacccctgagga

SEQ ID NO: 551794 - DNA, 120 bp, Artificial Sequence
  ENSG00000168487_39 (sequence is synthesized)
cacccaggccaccctgcctcctcccgtccgccccagagggaccagacacaggtccctgagccttggggagtccacaggctccccatcttctccttactgcatcccagcccacatctcagc

SEQ ID NO: 551795 - DNA, 120 bp, Artificial Sequence
  ENSG00000168487_40 (sequence is synthesized)
gagaacatccagccaggcgttctccactcttcactgctccttctcagctgtggctctagaaatggtgcttccttcccatgttcccttgagtcctccattcaccaggccctctgctggaca

SEQ ID NO: 551796 - DNA, 120 bp, Artificial Sequence
  ENSG00000168487_41 (sequence is synthesized)
ggagatctccccttctttgtgaatcactcagcccttcaccctggggtgaggctgtaaggtagctggtggtctccagaggtaacaggacccaggcccatgcagtgaagggcaggagtggag

SEQ ID NO: 551797 - DNA, 120 bp, Artificial Sequence
  ENSG00000168487_42 (sequence is synthesized)
ttgagcaggggagacagggaggtcagagtctggctggagcaggcccatggatcctcactcccggcctgcctgctgggccggacaggggataggcaggaaggcaggatgcccacggccgag

SEQ ID NO: 551798 - DNA, 120 bp, Artificial Sequence
  ENSG00000168487_43 (sequence is synthesized)
tccatgctgccttccttctcccctccttcgcccagggtcctgcatcctcaagccccctctgtggctgccctgcacccctgcctgacccccggatgccatgcacctgcccctgcactggct

SEQ ID NO: 551799 - DNA, 120 bp, Artificial Sequence
  ENSG00000168487_44 (sequence is synthesized)
ccctgcttggcactgccagccaccctgctctgcttacagtggcccgttgacctcctgcccccaacccccgcttgctgagaccctccccatgccaggccaatttcttccttccctgtgccc

SEQ ID NO: 551800 - DNA, 120 bp, Artificial Sequence
  ENSG00000168487_45 (sequence is synthesized)
acctgggactcctaagaggtgctcaccagagggttgagaggatgtaacacccactcggggcaggctctgccccgggaaaccattacctgcttactctcgtctcttcctgcccttctgttg

SEQ ID NO: 551801 - DNA, 120 bp, Artificial Sequence
  ENSG00000168487_46 (sequence is synthesized)
gcaggggaccgacactcacatctatcaggcctggagttactgctctgcccccatgccctggtcgacactgtgcccgccccaccctcagccctgcacggagacacacacgcccacacgcac

SEQ ID NO: 551802 - DNA, 120 bp, Artificial Sequence
  ENSG00000168487_47 (sequence is synthesized)
acacatgtgcacacacattgccccatcgcacaagaaacctgcagaggacccccactgggggcatcgaggctcagccctcagggcccggggcatctgactctggccccccaggaggggagc

SEQ ID NO: 551803 - DNA, 120 bp, Artificial Sequence
  ENSG00000168487_48 (sequence is synthesized)
tatttggacttttgggacacccaccgaggagaccctaagccaagaaggagaagaaagagcctgaagaccttcagtctgacccctgccaccttccggggcatttgggcactgtaggaaaag

SEQ ID NO: 551804 - DNA, 120 bp, Artificial Sequence
  ENSG00000168487_49 (sequence is synthesized)
acccccatcctcctctccccacagctgggccctgctcagctggtcctgctggatgcagtgcccctttggacccccttgtcgcctggcctcccactcccggccacctggcctggccagctc

SEQ ID NO: 551805 - DNA, 120 bp, Artificial Sequence
  ENSG00000168487_50 (sequence is synthesized)
tgccagctgttgctctgtcccggtgggagaaagtccagccaggcctccacttcccctggggcatcccaacctcagccctgcacagacccagcgtctgcccttatttgctcccctgcagac

SEQ ID NO: 551806 - DNA, 120 bp, Artificial Sequence
  ENSG00000168487_51 (sequence is synthesized)
atgccctgccctgccttgcacttgctctgccctggttctacactggccctggacccgcaggccagcacagttctgtggcctctgcaccagggtttcactcaaggaggagtgggggcagag

SEQ ID NO: 551807 - DNA, 120 bp, Artificial Sequence
  ENSG00000168487_52 (sequence is synthesized)
gtctctgggcatggtaaaacaactccctcctggcacctgaggggcaagattgtgggttcccaagggaagaagcagagagaatgatgggattgcctgggactgggggtttggtggggaact

SEQ ID NO: 551808 - DNA, 120 bp, Artificial Sequence
  ENSG00000168487_53 (sequence is synthesized)
cctgtgctggtacgactatgtggaggtccgagatggcttctggaggaaggcgcccctccgagggcccaacactggccagggatgacaacctggtatgggagccaggagtcctggcatcat

SEQ ID NO: 551809 - DNA, 120 bp, Artificial Sequence
  ENSG00000168488_0 (sequence is synthesized)
ctccccccgcccgcccacggcgggccccggctgcccgatccccctcgcttcccgcgctctccagcggggccccagccccggccccctctctccctcccttctctctaattccccttccgg

SEQ ID NO: 551810 - DNA, 120 bp, Artificial Sequence
  ENSG00000168488_1 (sequence is synthesized)
cctctctccctcccttctctctaattccccttccggacgctgccatcatgttgaagcctcagccgctacaacagccctcccagccccagcagccgccccccacgcaacaggccgtggccc

SEQ ID NO: 551811 - DNA, 80 bp, Artificial Sequence
  ENSG00000168488_2 (sequence is synthesized)
ctcccaacggcggcctcccggggccgctggccacctctgcggctcctcccgggcctccagcggccgcctccccctgcctg

SEQ ID NO: 551812 - DNA, 120 bp, Artificial Sequence
  ENSG00000168488_3 (sequence is synthesized)
ccgggagcgggctccgccggggagccgaaggcatcttggcgccgcagccgccgccgccgcagcaacaccaggagaggccgggggcagccgccatcggcagcgccaggggacagagcacag

SEQ ID NO: 551813 - DNA, 120 bp, Artificial Sequence
  ENSG00000168488_4 (sequence is synthesized)
gaaagggacccccacagtcacctgtgtttgaaggcgtctacaacaattccagaatgctgcatttccttacagctgttgtgggctccacttgtgatgtaaaggtgaaaaatggtaccactt

SEQ ID NO: 551814 - DNA, 120 bp, Artificial Sequence
  ENSG00000168488_5 (sequence is synthesized)
atgagggtatcttcaagacgctaagctcaaagtttgaactagccgtggatgctgtgcaccggaaagcatctgagccagcaggtggccctcgtcgggaggacattgtggacaccatggtgt

SEQ ID NO: 551815 - DNA, 120 bp, Artificial Sequence
  ENSG00000168488_6 (sequence is synthesized)
ttaagccaagtgatgtcatgcttgttcacttccgaaatgttgacttcaactatgctactaaagacaagttcaccgattcagccattgccatgaactcgaaagtgaatggggaacacaaag

SEQ ID NO: 551816 - DNA, 120 bp, Artificial Sequence
  ENSG00000168488_7 (sequence is synthesized)
agaaggtgcttcagcgctgggaggggggtgacagcaacagcgacgactatgacctcgagtctgacatgtccaatggatgggaccccaatgaaatgttcaagttcaatgaggagaactacg

SEQ ID NO: 551817 - DNA, 120 bp, Artificial Sequence
  ENSG00000168488_8 (sequence is synthesized)
gtgtgaagactacctatgatagcagtctttcttcttatacggtgcccttagaaaaggacaactcagaagagtttcgtcagcgagagctgcgtgcggcccagttggctcgagagattgaat

SEQ ID NO: 551818 - DNA, 120 bp, Artificial Sequence
  ENSG00000168488_9 (sequence is synthesized)
caagcccccagtaccgcctacggatcgccatggagaacgacgatgggcgcactgaagaggagaagcacagtgcagtccagcggcagggctcagggcgggagagccccagcttggcatcca

SEQ ID NO: 551819 - DNA, 120 bp, Artificial Sequence
  ENSG00000168488_10 (sequence is synthesized)
gggaggggaagtatatccctctgcctcaacgagtccgggaaggtccccggggaggagttcgatgcagcagctctcggggcggtcggcctggccttagctctttgccacctcgtggccctc

SEQ ID NO: 551820 - DNA, 120 bp, Artificial Sequence
  ENSG00000168488_11 (sequence is synthesized)
accatctggacaacagcagccctggcccaggttctgaggcccgtggtatcaatggaggcccttcccgcatgtccccaaaggcacaacggcctctgagaggtgccaagactctgtcttcgc

SEQ ID NO: 551821 - DNA, 120 bp, Artificial Sequence
  ENSG00000168488_12 (sequence is synthesized)
ccagtaataggccttctggagaaacttctgttccacctcctcctgcagtgggccggatgtatcccccgcgttctcccaagtctgctgcccctgccccaatctcagcttcctgtccagagc

SEQ ID NO: 551822 - DNA, 120 bp, Artificial Sequence
  ENSG00000168488_13 (sequence is synthesized)
ctcccatcggctcggcagtgccaacctcttcagcctccatccctgtgacctcatcagtctcagatcctggagtgggctccatttctccagcttctccaaagatctccctggcccccacag

SEQ ID NO: 551823 - DNA, 120 bp, Artificial Sequence
  ENSG00000168488_14 (sequence is synthesized)
atgtaaaagaactctctaccaaggaacctgggagaactctggagccccaggagctggctcggatagctgggaaagtccctggtcttcagaatgaacagaaacgattccaactggaagaac

SEQ ID NO: 551824 - DNA, 120 bp, Artificial Sequence
  ENSG00000168488_15 (sequence is synthesized)
tgagaaagtttggggcccagtttaagcttcagcccagtagctcccctgagaacagcctggatccttttcctccccggatcttaaaggaggagcccaaaggaaaggagaaagaggttgatg

SEQ ID NO: 551825 - DNA, 120 bp, Artificial Sequence
  ENSG00000168488_16 (sequence is synthesized)
tggggtctcccgtctcctccaagacagagtccgtatcggataaggaggacaaaccacccctggcaccatcaggaggcactgaggggccagagcagcccccaccaccttgtccaagccaaa

SEQ ID NO: 551826 - DNA, 120 bp, Artificial Sequence
  ENSG00000168488_17 (sequence is synthesized)
ctggcagccccccggtgggcctcatcaagggagaagacaaagatgagggccctgttgctgaacaagtaaagaaatcaacgttgaaccctaatgctaaggagttcaatcctacaaagcctc

SEQ ID NO: 551827 - DNA, 120 bp, Artificial Sequence
  ENSG00000168488_18 (sequence is synthesized)
tgctgtctgtgaataaatccaccagtaccccaacttctccggggccccggactcattcaactccctccatcccggtgctgacagcaggccagagtgggctatacagcccccagtacatct

SEQ ID NO: 551828 - DNA, 120 bp, Artificial Sequence
  ENSG00000168488_19 (sequence is synthesized)
cctacatacctcagatccacatgggaccagctgtgcaggcacctcagatgtatccatatcctgtatccaattcagtgcctgggcagcagggcaagtaccggggagcaaaaggctcccttc

SEQ ID NO: 551829 - DNA, 120 bp, Artificial Sequence
  ENSG00000168488_20 (sequence is synthesized)
ctccgcagcgctcggaccaacaccagccagcctcagccccgccgatgatgcaggccgccgcggctgctggcccgcctctggtggctgccacgccctattcttcctacatcccctacaacc

SEQ ID NO: 551830 - DNA, 120 bp, Artificial Sequence
  ENSG00000168488_21 (sequence is synthesized)
ctcagcagttcccaggccagccagccatgatgcagcccatggcccactacccctcacagccggtgtttgcccccatgcttcagagcaacccacgcatgctgacgtcgggcagccatcccc

SEQ ID NO: 551831 - DNA, 120 bp, Artificial Sequence
  ENSG00000168488_22 (sequence is synthesized)
aggccatcgtgtcatcctctacccctcagtacccttctgcagagcagcctaccccccaagccctttatgccactgttcaccagtcctacccacaccatgccacacagctccatgcccacc

SEQ ID NO: 551832 - DNA, 120 bp, Artificial Sequence
  ENSG00000168488_23 (sequence is synthesized)
agccgcagccggctaccacgcctactggaagccagccgcagtcccagcatgcggcccccagtcctgtccagcatcaggcggggcaggccccacacttgggcagtggacagccacagcaga

SEQ ID NO: 551833 - DNA, 120 bp, Artificial Sequence
  ENSG00000168488_24 (sequence is synthesized)
atctgtaccacccaggggccctgacaggcacgccgccctctctgccaccgggaccttctgcccagtcccctcagagcagcttcccccagccagccgctgtgtatgccatccaccaccagc

SEQ ID NO: 551834 - DNA, 120 bp, Artificial Sequence
  ENSG00000168488_25 (sequence is synthesized)
agctgccccacggcttcaccaacatggcccatgttacccaggcccatgtccaaactggaatcacagcagccccgccccctcaccctggggctccccacccgccccaggtgatgctgctgc

SEQ ID NO: 551835 - DNA, 120 bp, Artificial Sequence
  ENSG00000168488_26 (sequence is synthesized)
acccaccccagagtcatggggggcccccccaaggcgcggtgccccagagtggggtgcctgcactctcagcttccacaccctcaccctacccctacatcggacacccccaaggtgagcagc

SEQ ID NO: 551836 - DNA, 120 bp, Artificial Sequence
  ENSG00000168488_27 (sequence is synthesized)
ctggccaggcgcctggatttccaggaggagccgatgacaggattctatgtagggtgggcagaagccacagtcgccgccgccaggggcttgctcctggctctgtcctttgcttccctccgt

SEQ ID NO: 551837 - DNA, 120 bp, Artificial Sequence
  ENSG00000168488_28 (sequence is synthesized)
cctcgctcagttgtgatccagcagcccccctccccactgcctccccagctctcagtgaccccgactgtctcctgacttagccgaggtaagttcaatctcatccctcccagcagctcccct

SEQ ID NO: 551838 - DNA, 120 bp, Artificial Sequence
  ENSG00000168488_29 (sequence is synthesized)
tccaccccccggggaactgaagattgtcctggccgcgacctgagacctccatgagtggagggaagagtgatctatgtctcttcccccagcagctcggaccactcccagccccccatcccc

SEQ ID NO: 551839 - DNA, 120 bp, Artificial Sequence
  ENSG00000168488_30 (sequence is synthesized)
ccgttccccaggggagctggggaattcctgccaagcaccttgaatgggaggggcctcacagagggcagggccagggtccagcaggggtggggggttcctgctctgcccctgcccgtcccc

SEQ ID NO: 551840 - DNA, 120 bp, Artificial Sequence
  ENSG00000168488_31 (sequence is synthesized)
acccagtcttgccctcccatcctctcatctattcccccgctggagacggaagatcttttattttctattatttataacttcagacttgggccccctgttctttctttcccattaacttga

SEQ ID NO: 551841 - DNA, 120 bp, Artificial Sequence
  ENSG00000168488_32 (sequence is synthesized)
gtgacctgtgtgagagacagacagatgccccacgaggatggctggacaaggacttttactttttattacataaaaatattaaaaaataaataaaaaaaataaaattttaaactaacttaa

SEQ ID NO: 551842 - DNA, 120 bp, Artificial Sequence
  ENSG00000168488_33 (sequence is synthesized)
ggagccgatgacaggattcgtgagttctcattagctgggggaatttggcatggaagagctgaggggctgcaggtggggcaggatgcacgggttctgggtggggagtgaggggtcttggag

SEQ ID NO: 551843 - DNA, 120 bp, Artificial Sequence
  ENSG00000168488_34 (sequence is synthesized)
gggtgtggggggctgagctgggcacatgagtgagggctctggcttactgggaaacagcgattgacctgtgcttctgacagcccccgagacaccttgaggaggccgctccttcccagacac

SEQ ID NO: 551844 - DNA, 120 bp, Artificial Sequence
  ENSG00000168488_35 (sequence is synthesized)
acccccacgcccccactggacggcattggaggaagggacagctgcttgggttctaatgctcctgctctcttctctttcccctccaaccagttcaatctcatccctcccagcagctcccct

SEQ ID NO: 551845 - DNA, 120 bp, Artificial Sequence
  ENSG00000168488_36 (sequence is synthesized)
tggtgagtcctgcgcctggtccctctgctctgggctgtgtgccagccccctctggtgtgctcagcactggttctccctctttcctgctgcagccactgttcaccagtcctacccacacca

SEQ ID NO: 551846 - DNA, 120 bp, Artificial Sequence
  ENSG00000168488_37 (sequence is synthesized)
agagcacaggaaagggacccccacagtcacctgtgtttgaaggcgtctacaacaattccagaatgctgcatttccttacagctgttgtggtaagttggtacttaacccccgggttgttta

SEQ ID NO: 551847 - DNA, 120 bp, Artificial Sequence
  ENSG00000168488_38 (sequence is synthesized)
ctctggtggtacctgtaacaaggcattggacatctgtatctctgaagtgtagagaaaatagtgtctgctgggtgggatcgttatgaatgttgaatcaatagggtgattgtgaggaggccc

SEQ ID NO: 551848 - DNA, 120 bp, Artificial Sequence
  ENSG00000168488_39 (sequence is synthesized)
aagcggtgctgtgcacgcagtgactggcaggaggacaccttcccagctggcggctgtgccaaccactcctctctctgtcccgccagccggtgtttgcccccatgcttcagagcaacccac

SEQ ID NO: 551849 - DNA, 120 bp, Artificial Sequence
  ENSG00000168488_40 (sequence is synthesized)
agccccgccagcggccccctcttcgccctcaaccgccggttacatcagccagcgacgagcagggttacctggcgattggtgatccccgcagagtgggtaacgggctgaatgagtcatgag

SEQ ID NO: 551850 - DNA, 120 bp, Artificial Sequence
  ENSG00000168488_41 (sequence is synthesized)
aagctctcagtgaccccgactgtctcctgacttagccgagctcggaccactcccagccccccatccccccgttccccaggggagctggggaattcctgccaagcaccttgaatgggaggg

SEQ ID NO: 551851 - DNA, 120 bp, Artificial Sequence
  ENSG00000168488_42 (sequence is synthesized)
gacttgttgaaatgtttttccttttttcctcttttgtcccctggcactgggatggtggtggtctgtgggtgctgtctcagggtgcccttagaaaaggacaactcagaagagtttcgtcag

SEQ ID NO: 551852 - DNA, 120 bp, Artificial Sequence
  ENSG00000168488_43 (sequence is synthesized)
gagggcagggaaggggatgccaaggaggtgggagggtaattggaggggtttgggtgtgttggaatgacgctgcatcggtgggaatgtaataggtcgtctgcctcctgacattttcttctc

SEQ ID NO: 551853 - DNA, 120 bp, Artificial Sequence
  ENSG00000168488_44 (sequence is synthesized)
ccccagtcctgtccaggtgcctgccatggggggtgctgagtggtcctggtgcaggaatgggtggccagaagaagggatagagctaggggtcatttctgagtggcgaggactgggggccag

SEQ ID NO: 551854 - DNA, 120 bp, Artificial Sequence
  ENSG00000168488_45 (sequence is synthesized)
gcccccttcccgtacgtgcgcgtggatgctcggtctcatgacccgggcattcgcgcgccccgggaacacctagggcagggactagttcgtggaggggctcgtctggtggcagtgcatgag

SEQ ID NO: 551855 - DNA, 120 bp, Artificial Sequence
  ENSG00000168488_46 (sequence is synthesized)
tagtggaggccctgctcagtttttcctgtgcgagtgtgtgtgtgttaatggaattaagagtggcagcacacgcaggcgcagtgggctctgatcgctggaggtgggggttcggaaagtccc

SEQ ID NO: 551856 - DNA, 120 bp, Artificial Sequence
  ENSG00000168488_47 (sequence is synthesized)
gtgggttttagtgcgcaggcgcagaccgggcgaggcctcccggtggatggcttttgcggctgcgctgtcccccagccccgccagcggccccctcttcgccctcaaccgccggttacatca

SEQ ID NO: 551857 - DNA, 120 bp, Artificial Sequence
  ENSG00000168488_48 (sequence is synthesized)
tggacaacagcagccctggcccaggttctgaggcccgtggtatcaatggagtaaaagaactctctaccaaggaacctgggagaactctggagccccaggagctggctcggatagctggga

SEQ ID NO: 551858 - DNA, 120 bp, Artificial Sequence
  ENSG00000168488_49 (sequence is synthesized)
gttgacttcaactatgctactaaaggtattgtcctaggctgttacctcagacctgctctgtgtgcatagaggacagagggtagtttgtgtgcaggtggaacatggtgatgtgtttggttt

SEQ ID NO: 551859 - DNA, 120 bp, Artificial Sequence
  ENSG00000168488_50 (sequence is synthesized)
gtttttttgtttttgtttgtttgttttgctttaatgccttttttttcctgagcgaagtgggtggatttttcttcttaaaaatatgtcttgatgtctaatatataatgcgatgaattcctg

SEQ ID NO: 551860 - DNA, 120 bp, Artificial Sequence
  ENSG00000168488_51 (sequence is synthesized)
gtgatcttggacgtcacttacattctctgcctcacctgtaactttagaatactcatctcctcatagggtttaatgtgaggctttatcaagataagtgcagaatatgtttggtatgcagca

SEQ ID NO: 551861 - DNA, 120 bp, Artificial Sequence
  ENSG00000168488_52 (sequence is synthesized)
gttgtttctgtaggcctgtgctgaatagtgctgcagggaaaaaagacaaatttgagggctgggtactttaatgttaaaatatttaagtttaaatttttgtgagacttttgctaagtcctg

SEQ ID NO: 551862 - DNA, 120 bp, Artificial Sequence
  ENSG00000168488_53 (sequence is synthesized)
tggctgatgttgagaaaacaatgcacttggttccaagcatgttgaggatgtagtgttgtgaaaagtttgggaagggtaagagaaatccagttctatttaagagaaatccagttctatttt

SEQ ID NO: 551863 - DNA, 120 bp, Artificial Sequence
  ENSG00000168490_0 (sequence is synthesized)
ttctttctcccttctctgcctctctctcctccacgctgctttgatttcgctcttgcctctcttcttgcgctgctcagctgggaacatcgtctcaccaggggcagcagcgacgcgctgcac

SEQ ID NO: 551864 - DNA, 120 bp, Artificial Sequence
  ENSG00000168490_1 (sequence is synthesized)
agccagacaggagctggctgcggggcatggaagcagcctccttggcagccgggagaggagcaagcgcacgccactgcccgtgacccaggcgtccggctgctgtcccctgccggggagctc

SEQ ID NO: 551865 - DNA, 120 bp, Artificial Sequence
  ENSG00000168490_2 (sequence is synthesized)
atccacgcagaggtctctccctgtcctccctgcgagcttttcctctgcagagcccagtggagccagccatgtaccgcggcaacgcttgctgaccccagtgaggagagaggcctgaatccg

SEQ ID NO: 551866 - DNA, 120 bp, Artificial Sequence
  ENSG00000168490_3 (sequence is synthesized)
agggccctggcacctgtgagctcttggctgtcacctgccccaagcctcgcacctccgctccacagcagtccccacaggagacaaccctgacgggagcatggagctgctgtccacgcccca

SEQ ID NO: 551867 - DNA, 120 bp, Artificial Sequence
  ENSG00000168490_4 (sequence is synthesized)
cagcattgagatcaacaacatcacctgcgactccttccgcatctcctgggccatggaggacagtgacctggagagggtcacccattacttcattgaccttaacaagaaggagaataagaa

SEQ ID NO: 551868 - DNA, 120 bp, Artificial Sequence
  ENSG00000168490_5 (sequence is synthesized)
ttccaacaagttcaagcaccgggacgtccccaccaagctcgtggccaaggcagtgccgctgcccatgacggtgagaggccactggttcctgagcccccgcacggagtacagtgtggccgt

SEQ ID NO: 551869 - DNA, 120 bp, Artificial Sequence
  ENSG00000168490_6 (sequence is synthesized)
gcagacggcagtgaagcagagcgatggggagtacctggtgtccggctggagcgagacggtggagttctgcactggggattatgccaaggagcacctggctcagcttcaggagaaagctga

SEQ ID NO: 551870 - DNA, 120 bp, Artificial Sequence
  ENSG00000168490_7 (sequence is synthesized)
gcagatcgcaggccgcatgctccgcttctccgtcttctaccgcaaccatcacaaggagtacttccagcatgccaggacccactgcgggaacatgctgcagccttacctgaaggacaacag

SEQ ID NO: 551871 - DNA, 120 bp, Artificial Sequence
  ENSG00000168490_8 (sequence is synthesized)
tggcagccacggctcccccaccagcggtatgctccacggggtcttcttcagctgcaacacggagttcaacacgggccagcccccgcaggactccccctacggccgctggcgcttccagat

SEQ ID NO: 551872 - DNA, 120 bp, Artificial Sequence
  ENSG00000168490_9 (sequence is synthesized)
cccagctcagcgcctcttcaatcccagcaccaacctctactttgcggacttctactgcatgtacacggcctaccactacgccatcctggtgctggcgcccaaaggctccctgggggaccg

SEQ ID NO: 551873 - DNA, 120 bp, Artificial Sequence
  ENSG00000168490_10 (sequence is synthesized)
cttctgccgcgaccgcctgcccctcctggacattgcttgcaacaagttcctgacctgcagcgtggaggatggggagctggtcttccgccacgcccaggacctcatcctggagatcatcta

SEQ ID NO: 551874 - DNA, 120 bp, Artificial Sequence
  ENSG00000168490_11 (sequence is synthesized)
cactgagcccgtcgacctgtccctgggcaccctgggggagatcagtgggcaccagctcatgagtctgtctactgccgatgccaagaaggaccccagctgcaagacctgcaacatcagcgt

SEQ ID NO: 551875 - DNA, 120 bp, Artificial Sequence
  ENSG00000168490_12 (sequence is synthesized)
gcccccctgctccctccactctgcccagctgccctcccctcgccccttggcattggaggcaacagacggtggtcctcttggtaagtgtggcccacacccagcctggtggacatggaaagg

SEQ ID NO: 551876 - DNA, 120 bp, Artificial Sequence
  ENSG00000168490_13 (sequence is synthesized)
cttctcagcctctgtagttggcagctgggctggacttctggagaacttcccctttcctctggtttccttgtcctactgttctttgcctcgtccaggtctctatctcccaaagacctgccc

SEQ ID NO: 551877 - DNA, 120 bp, Artificial Sequence
  ENSG00000168490_14 (sequence is synthesized)
acctcctgggctctcccagggaagcccctctgggccaaagcccatgggtagcttggctgcctccagaagagatgcagagagctgtggggcgatctttcttagtcccactcaccccactca

SEQ ID NO: 551878 - DNA, 120 bp, Artificial Sequence
  ENSG00000168490_15 (sequence is synthesized)
gggccaaccacagaatgccccctccctgctgagctgggtctctggggcttcccactccaggcctggatcccttccttctataaatagtctcctgcaccaccgtgactccctggctgctcc

SEQ ID NO: 551879 - DNA, 120 bp, Artificial Sequence
  ENSG00000168490_16 (sequence is synthesized)
ttgccccaaagaaccctcttcctgcatgggagagctgtccctccttctccacctgcccaccgggacactccccctgctctctagaaaggaactctctttcttctcttggcactgggggcg

SEQ ID NO: 551880 - DNA, 120 bp, Artificial Sequence
  ENSG00000168490_17 (sequence is synthesized)
tcaggctgtcggatgttccttccttccataccccagcataccttctccttgcttagagtgcaggggtctgagacagcagccactggggttgaggagggggaggagacccctgagacccag

SEQ ID NO: 551881 - DNA, 120 bp, Artificial Sequence
  ENSG00000168490_18 (sequence is synthesized)
aggtgccccttcctcagctgggagtgggccgcctcatgctctgctggggcctggcatggaacgtgagacctgtaagctgtcccgcgggccccggcaccccgcccagctgtgcactttgct

SEQ ID NO: 551882 - DNA, 120 bp, Artificial Sequence
  ENSG00000168490_19 (sequence is synthesized)
cactcgctctgccatggtgccatgactgtactgtgcccatgcgtgacctggactgtggaccctctgctgctccgcctctcccctccccactggctctgtctgctctcctgccaccctgct

SEQ ID NO: 551883 - DNA, 120 bp, Artificial Sequence
  ENSG00000168490_20 (sequence is synthesized)
ggccgggagcccctccccggggagttcttggtgaagtccttcccgggcctccttgtgtttttgcctcattcctactgtcacacaggtcacgagggtggactccctacaatcaacaaagca

SEQ ID NO: 551884 - DNA, 120 bp, Artificial Sequence
  ENSG00000168490_21 (sequence is synthesized)
aacagagagcctgtgggaggggctgacagcagcagccggctgtttgggggatgatggaggtgacatcaggcagaggagagtgcagcctcacagtgactttctcagaggtgacagagatga

SEQ ID NO: 551885 - DNA, 120 bp, Artificial Sequence
  ENSG00000168490_22 (sequence is synthesized)
tggatgagcagctggattttcgtgatgaaggacggaagcagcagcgggccggcaaggccatacctcggtgagggacaggtggacaacggtcacctatctgtagccaggggcagttgtgtg

SEQ ID NO: 551886 - DNA, 120 bp, Artificial Sequence
  ENSG00000168490_23 (sequence is synthesized)
gccagctgtctctctgggatgagtcaggaggcctggaggcttggggagaggtgtggagaaggagagaacatggcccaggccctttccttccccctgtgctgacagcattgctgtgggggt

SEQ ID NO: 551887 - DNA, 120 bp, Artificial Sequence
  ENSG00000168490_24 (sequence is synthesized)
ggcccactgccctcccctggccctcatgtccccccggggctggggtccgcctgcctgtgctgtgcttgcgacgtgcatcaataaaccaccatggcctgagggccctgctcgtctcagtcc

SEQ ID NO: 551888 - DNA, 120 bp, Artificial Sequence
  ENSG00000168490_25 (sequence is synthesized)
ctcccggctggacccgccgggcctctcctccctcccagcccttcctgctcctgtcctggctgtctgaggtcacccccaccctcgtggctgccagtccctcctctagggttgacatgtcct

SEQ ID NO: 551889 - DNA, 120 bp, Artificial Sequence
  ENSG00000168490_26 (sequence is synthesized)
gacgtcaccaggctggctctgaagagactgctactttggggattgggctcagggaagatcaagggctctggggacagggccttctgcaagagtgttgtactaatgagcctgggagaatga

SEQ ID NO: 551890 - DNA, 120 bp, Artificial Sequence
  ENSG00000168490_27 (sequence is synthesized)
ggtctgggtttgctcccactctgggacagttcctttcacaggggtctaccaccacaggtctctccgattcaggccctggggccaaagggaaggtggcagggagtgcacaaaatgagtgtt

SEQ ID NO: 551891 - DNA, 120 bp, Artificial Sequence
  ENSG00000168490_28 (sequence is synthesized)
ctgatcacaaagggttcgaggaagcacccagctcgtcggttttcaaactgggtgctccctccagggagacatgtcagtgaaccccttagaatgctgccatggggttggggggaccagagg

SEQ ID NO: 551892 - DNA, 120 bp, Artificial Sequence
  ENSG00000168490_29 (sequence is synthesized)
aaatctgtccccgcccggctttgcagcattcccactgcctctgccacctgtcaggtgccgtctgctctgcagacccctccgaggagagcaaagagccccccgggcaggcacccctttcca

SEQ ID NO: 551893 - DNA, 120 bp, Artificial Sequence
  ENSG00000168490_30 (sequence is synthesized)
ccctccatcatccttctccagcctcccctgtacagtctttcccatctggttcatgaggcatgtggattccaggggtccttgaggttccgcctcgaaagggatattgggaggaggacattc

SEQ ID NO: 551894 - DNA, 120 bp, Artificial Sequence
  ENSG00000168491_0 (sequence is synthesized)
ggcggagcgggtgcgtgcggcggcggttgcgagagagatgagccgcggcgatgagcccggaaaagcagcaccgggaagaggatgaagttgactccgttctcctttcagcgtccaagatcc

SEQ ID NO: 551895 - DNA, 120 bp, Artificial Sequence
  ENSG00000168491_1 (sequence is synthesized)
taaattcttcggagggggtgaaggaaagtggctgcagtgacacagaatatggctgcatagcagaatcagaaaatcaaatccaaccacaatcagcattgaaagtccttcagcagcagttgg

SEQ ID NO: 551896 - DNA, 120 bp, Artificial Sequence
  ENSG00000168491_2 (sequence is synthesized)
aatcatttcaggctttgcgaatgcagactttgcagaatgtcagcatggtacagtcggaaatcagtgaaatattgaacaaaagtattattgaagtagaaaacccacaatttagctcagaaa

SEQ ID NO: 551897 - DNA, 120 bp, Artificial Sequence
  ENSG00000168491_3 (sequence is synthesized)
aaaatctggtgtttggcacgcgcattgaaaaggatttgcctacagagaatcaagaagaaaacctttctatggagaaaagtcatcattttgaggattccaagacacttcattcagtggaag

SEQ ID NO: 551898 - DNA, 120 bp, Artificial Sequence
  ENSG00000168491_4 (sequence is synthesized)
aaaaattaagtggtgatagtgtgaacagtctccctcaaagtgtaaatgttccatcccagatacattccgaggacacattaactctgagaacttcaacagacaatttatcttcaaacataa

SEQ ID NO: 551899 - DNA, 120 bp, Artificial Sequence
  ENSG00000168491_5 (sequence is synthesized)
ttatacacccttcagaaaattctgacatcttgaagaattataataacttttatcgttttctacctactgcacctccaaatgtgatgtctcaagctgatacagtaattctggataaatcca

SEQ ID NO: 551900 - DNA, 120 bp, Artificial Sequence
  ENSG00000168491_6 (sequence is synthesized)
aaattactgtgccttttctcaagcatggattttgtgaaaatttagatgacatttgccattctatcaaacaaatgaaagaagagcttcaaaagtcacatgatggggaagtggcacttacaa

SEQ ID NO: 551901 - DNA, 120 bp, Artificial Sequence
  ENSG00000168491_7 (sequence is synthesized)
atgaacttcagactttacaaactgatccagatgttcacaggaatggtaaatatgacatgtcccctattcaccaggataaaatgaactttattaaggaagaaaacttggacggtaacttaa

SEQ ID NO: 551902 - DNA, 120 bp, Artificial Sequence
  ENSG00000168491_8 (sequence is synthesized)
atgaagatataaaatcaaagagaatttcagaattagaggcattagtgaagaaattactccccttcagggaaactgtgtcaaaattccatgtgcatttttgtagaaaatgtaaaaagttat

SEQ ID NO: 551903 - DNA, 120 bp, Artificial Sequence
  ENSG00000168491_9 (sequence is synthesized)
ctaagagtgaaatgcacaggggaaagaaaaatgagaaaaacaataaagaaattcccatcactggcaaaaatattacagatttaaaattccattccagagttccaagatacacactgtcct

SEQ ID NO: 551904 - DNA, 120 bp, Artificial Sequence
  ENSG00000168491_10 (sequence is synthesized)
tcctcgaccaaacaaaacatgaaatgaaagacaaagaaagacaaccatttctagtaaaacaaggatcaataatatctgaaaatgagaaaacttccaaagttaattccgttactgagcagt

SEQ ID NO: 551905 - DNA, 120 bp, Artificial Sequence
  ENSG00000168491_11 (sequence is synthesized)
tcttatctttaccacacaatctctcatacagaaagttgaaacatatgaaaagcaacttaagaatctggttgaagaaaagagtactattcagtctaagttaagtaaaacagaagaatacag

SEQ ID NO: 551906 - DNA, 120 bp, Artificial Sequence
  ENSG00000168491_12 (sequence is synthesized)
caaagagtgtcttaaagaatttaaaaaaataattagtaaatataatgttctgcaaggccaaaataaaactctagaggaaaaaaatatacaactttctttagagaagcaacaaatgatgga

SEQ ID NO: 551907 - DNA, 120 bp, Artificial Sequence
  ENSG00000168491_13 (sequence is synthesized)
agcattagatcaactaaaaagtaaggaacacaaaactcaaagtgatatggccattgtaaataatgaaaataatcgaatgagtatagaaatggaagcaatgaaaaccaatattctgttgat

SEQ ID NO: 551908 - DNA, 120 bp, Artificial Sequence
  ENSG00000168491_14 (sequence is synthesized)
acaagatgaaaaagaaatgttagagaaaaaaacacaccagcttctaaaagaaaaaagctcacttggaaatgaactaaaagaaagccagctagagataatccagctaaaagagaaagaaag

SEQ ID NO: 551909 - DNA, 120 bp, Artificial Sequence
  ENSG00000168491_15 (sequence is synthesized)
attggcaaaaacggaacaagagacacttcttcaaataatagaaacagttaaagatgaaaaactcaaccttgaaacaacattacaagaatctactgctgccagacaaattatggaaagaga

SEQ ID NO: 551910 - DNA, 120 bp, Artificial Sequence
  ENSG00000168491_16 (sequence is synthesized)
aattgagaatattcaaacctaccaatctactgccgaagagaattttctgcaagaaataaaaaatgcaaaatcagaagcaagtatttataagaatagcttgtcagaaattggcaaggaatg

SEQ ID NO: 551911 - DNA, 120 bp, Artificial Sequence
  ENSG00000168491_17 (sequence is synthesized)
tgaaatgttatcaaaaatggtaatggaaaccaaaacagataatcagattctaaaagaagaactaaagaaacatagtcaagaaaatataaaatttgaaaacagcatcagtagacttactga

SEQ ID NO: 551912 - DNA, 120 bp, Artificial Sequence
  ENSG00000168491_18 (sequence is synthesized)
agacaaaatacttttagaaaattacgtaagaagcatagaaaatgaaagggataccttggaatttgagatgcggcatcttcaacgagaatatttaagtttaagtgataaaatttgtaatca

SEQ ID NO: 551913 - DNA, 120 bp, Artificial Sequence
  ENSG00000168491_19 (sequence is synthesized)
gcataatgacccttcaaaaacaacttacatttcaagaagagagaaattccattttgacaactatactcacgaagatacttctagtcctcagagtaggcctttggcttcggatttgaaagg

SEQ ID NO: 551914 - DNA, 120 bp, Artificial Sequence
  ENSG00000168491_20 (sequence is synthesized)
ttatttcaaagttaaagacagaactctcaagcatcattaggattcctcaagattgctaagaaactcccttcgagaaatagccaatgttaattgtactgctaactgaactatgcatatcta

SEQ ID NO: 551915 - DNA, 120 bp, Artificial Sequence
  ENSG00000168491_21 (sequence is synthesized)
actcatctcaaatgactcataatgaggcgctatatatttgctttaaaaattatgcacagaatggtttggtgcagataacttaagctttctcagctgggaatttcagaagatgggggagaa

SEQ ID NO: 551916 - DNA, 120 bp, Artificial Sequence
  ENSG00000168491_22 (sequence is synthesized)
cttctacaagggagggcaggtacctgtacatggaaggagctgagatgtctaaagtcacccacatttgtcatttaaaaaagtatatataaataaaagatactattttgaagaagtataaaa

SEQ ID NO: 551917 - DNA, 120 bp, Artificial Sequence
  ENSG00000168491_23 (sequence is synthesized)
agactgctattcaaatattccttgttgaattctgtccaaagctttttctacatttattggaggttatttcaaagttaaagacagaactctcaagcatcattaggattcctcaagattgct

SEQ ID NO: 551918 - DNA, 120 bp, Artificial Sequence
  ENSG00000168491_24 (sequence is synthesized)
gtagcagagactgatgtctggctgagcaagcttatttcttccattactcattgacgatggatgcagaaaactacccaagtcatacaggcatcataacaggagagtagataactagatgtg

SEQ ID NO: 551919 - DNA, 120 bp, Artificial Sequence
  ENSG00000168495_0 (sequence is synthesized)
agacttccgcccggcgcggagaccgaaggctggcggctggtcgcgttgcaggcaacatgtcggaaggaaacgccgccggcgagcccagcacgccgggagggccccgacctctcctgactg

SEQ ID NO: 551920 - DNA, 120 bp, Artificial Sequence
  ENSG00000168495_1 (sequence is synthesized)
gggcccgggggctcatcgggcggcggccggcgcctcccctcacccccggccgccttccctccatccgttccagggacctcaccctcgggggagtcaagaagaaaaccttcaccccaaata

SEQ ID NO: 551921 - DNA, 120 bp, Artificial Sequence
  ENSG00000168495_2 (sequence is synthesized)
tcatcagtcggaagatcaaggaagagcccaaggaagaagtaactgtcaagaaggagaagcgtgaaagggacagagaccgacaacgagaggggcatggacgagggcgaggccgtccagaag

SEQ ID NO: 551922 - DNA, 120 bp, Artificial Sequence
  ENSG00000168495_3 (sequence is synthesized)
tgatccagtctcactccatctttgagcagggcccagctgaaatgatgaagaaaaaagggaactgggataagacagtggatgtgtcagacatgggaccttctcatatcatcaacatcaaaa

SEQ ID NO: 551923 - DNA, 120 bp, Artificial Sequence
  ENSG00000168495_4 (sequence is synthesized)
aagagaagagagagacagacgaagaaactaaacagatcttgcgtatgctggagaaggacgatttcctcgatgaccccggcctgaggaacgacactcgaaatatgcctgtgcagctgccgc

SEQ ID NO: 551924 - DNA, 120 bp, Artificial Sequence
  ENSG00000168495_5 (sequence is synthesized)
tggctcactcaggatggctttttaaggaagaaaatgacgaaccagatgttaaaccttggctggctggccccaaggaagaggacatggaggtggacatacctgctgtgaaagtgaaagagg

SEQ ID NO: 551925 - DNA, 120 bp, Artificial Sequence
  ENSG00000168495_6 (sequence is synthesized)
agccacgagatgaggaggaagaggccaagatgaaggctcctcccaaagcagccaggaagactccaggcctcccgaaggatgtatctgtggcagagctgctgagggagctgagcctcacca

SEQ ID NO: 551926 - DNA, 120 bp, Artificial Sequence
  ENSG00000168495_7 (sequence is synthesized)
aggaagaggaactgctgtttctgcagctgccagacaccctccctggccagccacccacccaggacatcaagcctatcaagacagaggtgcagggcgaggacggacaggtggtgctcatca

SEQ ID NO: 551927 - DNA, 120 bp, Artificial Sequence
  ENSG00000168495_8 (sequence is synthesized)
agcaggagaaagaccgagaagccaaattggcagagaatgcttgtaccctggctgacctgacagagggtcaggttggcaagctactcatccgcaagtctggaagggtgcaactcctcttgg

SEQ ID NO: 551928 - DNA, 120 bp, Artificial Sequence
  ENSG00000168495_9 (sequence is synthesized)
gcaaggtgactctggacgtgaccatgggaactgcctgctccttcctgcaggagctggtgtccgtgggccttggagacagtaggacaggggagatgacagtcctgggacacgtgaagcaca

SEQ ID NO: 551929 - DNA, 120 bp, Artificial Sequence
  ENSG00000168495_10 (sequence is synthesized)
aacttgtatgttcccctgattttgaatccctcttggatcacaaacaccggtaaaatgagcaggtggaggaggacggcgcctgtgcccacggctgctgcctgctccagacattttgttctt

SEQ ID NO: 551930 - DNA, 120 bp, Artificial Sequence
  ENSG00000168495_11 (sequence is synthesized)
gaatctgtgagacccagaaggggcccactgagcccactcactccagcctttggcaaccattgttccaggtcccccagggcttcctcccacagcagctgtgaatggcacagtgaccttcct

SEQ ID NO: 551931 - DNA, 120 bp, Artificial Sequence
  ENSG00000168495_12 (sequence is synthesized)
gcagcgtggagatggcacatccttgctgctggggacttggccctgctatttatttttgtatttatgtcttaatctcttccactgatgcatcctccaagggtagatggggagggtctgtgt

SEQ ID NO: 551932 - DNA, 120 bp, Artificial Sequence
  ENSG00000168495_13 (sequence is synthesized)
gaaggggccggcttctcttggtgcctgctgggttgcaggggcaggaagcgtgtggactgcagcttctgctggtgctccccccgtcctcctggaggcagtataggagagagagcaaggatt

SEQ ID NO: 551933 - DNA, 120 bp, Artificial Sequence
  ENSG00000168495_14 (sequence is synthesized)
gagtctgagacttaagcactcggtcccagcttgccagttcctggttctgtgtccttggacaaactacctaacctttctgagcctcctatacctcatccgacacaaatggggatgatacct

SEQ ID NO: 551934 - DNA, 120 bp, Artificial Sequence
  ENSG00000168495_15 (sequence is synthesized)
acctccagggttggcgtgaggattcatgggctattatagatgaaaactgcacaaggccagaaccagcaggcactcaataaacgttcatgtcctttttctctacctgagtctattttcaaa

SEQ ID NO: 551935 - DNA, 120 bp, Artificial Sequence
  ENSG00000168495_16 (sequence is synthesized)
caaaatagagattctaaatctcccagaagcagcgactagagctgctcccgtccccactcttgccccttcctgctttatatcccgtcctcaccctgggcctgatgccctaaatttatggtg

SEQ ID NO: 551936 - DNA, 120 bp, Artificial Sequence
  ENSG00000168495_17 (sequence is synthesized)
tcagattgttctatgcctttttctcctggctcctgttagccaggtgcctcctgtgtgagttactgtaatagctgcaggtaatagaaaggaagaagtcagagacccctcccagcaccctac

SEQ ID NO: 551937 - DNA, 120 bp, Artificial Sequence
  ENSG00000168495_18 (sequence is synthesized)
aaaagcctttgggggacatgttgggcccaggacatgttccctgcactctttcctttgcagttagtactcatgtatgagccgaagtcatatattgctaacaaaaaaactaaatccttcata

SEQ ID NO: 551938 - DNA, 120 bp, Artificial Sequence
  ENSG00000168495_19 (sequence is synthesized)
agagaagttagggatgtattgaataatggcctctttgacacttggccgatgatgcccacttcaaaaactttgggtttcagaggcctgcccgtctcctgtcctagcactgccagagccacc

SEQ ID NO: 551939 - DNA, 120 bp, Artificial Sequence
  ENSG00000168495_20 (sequence is synthesized)
tactcagtgttacttttttgggtctgtgatcctgttccctttaccaggtcattgtactgtgttgtccctggaggaacagcttctcctcttgtcttgacagtagggctggggttttccctg

SEQ ID NO: 551940 - DNA, 120 bp, Artificial Sequence
  ENSG00000168495_21 (sequence is synthesized)
gttcagctggggagacgtttgcaggttagaaaaaggtctcatgcggcagcgtgtgtggctgttagacgctgatggcacaacttccctttgctggcgtcgtggcacctggcctctgggaca

SEQ ID NO: 551941 - DNA, 120 bp, Artificial Sequence
  ENSG00000168495_22 (sequence is synthesized)
cctagtggccccttagattttgggtacatcttccttcaggctcaccttccttcttttcaaagttcctcaagcctgttactcatttgtcaaggctgggcttctcctacaaagccctcaacc

SEQ ID NO: 551942 - DNA, 120 bp, Artificial Sequence
  ENSG00000168495_23 (sequence is synthesized)
tgcccagccagcagctgtgaggctgactgaatatttggtgaccatatcaccctttctggtgctgaagctcatgtcagctccattggacagtgttattctgggctcttctcactgtagagg

SEQ ID NO: 551943 - DNA, 120 bp, Artificial Sequence
  ENSG00000168495_24 (sequence is synthesized)
actggagcagaaagggttccttggaaacctgtgctgggaagccctgtttggtctaaggctaagctttggttaactctgggctccagccctttcttcctttaaatagctgatgcacggcca

SEQ ID NO: 551944 - DNA, 120 bp, Artificial Sequence
  ENSG00000168495_25 (sequence is synthesized)
gcaggtctccattctcatcctctctttctattctgtttctttggttcagaaatactcttctgctttttttggacgaactcaatggcccgatgttagatattgggtatttttcaatcttct

SEQ ID NO: 551945 - DNA, 120 bp, Artificial Sequence
  ENSG00000168495_26 (sequence is synthesized)
gttttctgacccttccaagaaagtttgaggaagaacatgtactgctttcacgttcatttcgcccattcagatgtcttggcttgaaccttatgactccgtatcaaagtcctcacaacctgt

SEQ ID NO: 551946 - DNA, 120 bp, Artificial Sequence
  ENSG00000168495_27 (sequence is synthesized)
ctcagatccctgatgcacaaattaggtcttattaataagtgtgggaaaagagaggagagtccaccttcttggtcaggcccctgaggcatgcatttctaccaaggaatatggacagatgac

SEQ ID NO: 551947 - DNA, 120 bp, Artificial Sequence
  ENSG00000168495_28 (sequence is synthesized)
agaggagaagagcccaaagccaaatttatacatgagtgcaagtggatgcaaatttgttgctccctgcatctgtgtatatgctttctgttaaatacagaaagaaggaacaataggcttgca

SEQ ID NO: 551948 - DNA, 120 bp, Artificial Sequence
  ENSG00000168495_29 (sequence is synthesized)
cacttttctaactacatgtttaagtggcagagtccaggctgtcgagtcacggttgggtttgaatctgactccaccagtaactttggttggaaaaaatcacttatcctctttaagcttgat

SEQ ID NO: 551949 - DNA, 120 bp, Artificial Sequence
  ENSG00000168495_30 (sequence is synthesized)
tttatttattttattttatgtaagagtgagacagtagtagcttaatagggttgcttttaaattagagtgaacatgaggcatttattcggtgccagacagataactgcctataacaggatg

SEQ ID NO: 551950 - DNA, 120 bp, Artificial Sequence
  ENSG00000168495_31 (sequence is synthesized)
tgatcagcacaagtaacagaaaattagcctgacggtggcttaagcaatgggaatgtttatctcacatagcaaaaagtctgtaaatagatggttctagagttgggtggaagccaaaatgtc

SEQ ID NO: 551951 - DNA, 120 bp, Artificial Sequence
  ENSG00000168495_32 (sequence is synthesized)
atcaggatttccttggaaccgtctgctttgccatcctcagtattgcagaatggctgctcctgcgccaagcatcattctgcaaatgatggtgtccacagccagagtggacagtagtacagg

SEQ ID NO: 551952 - DNA, 120 bp, Artificial Sequence
  ENSG00000168495_33 (sequence is synthesized)
agccttctcattctgcccttatccgggaataaccgtcagcagctccagcaacctcccccctgtctctttatagagtggggccacgtgcccactcttggaccaggccctggcaaaggggga

SEQ ID NO: 551953 - DNA, 120 bp, Artificial Sequence
  ENSG00000168495_34 (sequence is synthesized)
tgggtcgactagtgtatcccctggcactgagcacacttgcccttgagctggggttttgttagtagggaggaagctggagtggcagttggatagacaattcatagtagctgctgccatgtt

SEQ ID NO: 551954 - DNA, 120 bp, Artificial Sequence
  ENSG00000168495_35 (sequence is synthesized)
tgttcaaaaaatgctgcaatgtaaaatcataaagtattcatctaggcataactttttaaaatattcagtcaccttttattctactaaaatcaattttaacattttagtgtatattatttt

SEQ ID NO: 551955 - DNA, 120 bp, Artificial Sequence
  ENSG00000168495_36 (sequence is synthesized)
taaaatcaattttaacattttagtgtatattattttattttagattcagcaggtacatgagcatgttagttttgttttgttttgttttgttctgttttgttttttgagatggagtctcac

SEQ ID NO: 551956 - DNA, 81 bp, Artificial Sequence
  ENSG00000168495_37 (sequence is synthesized)
tctgtcgcccagtggtgtgatcttggcttactgcaactctgtctcccaggttcaagtgatcctcccgcctcagccccccag

SEQ ID NO: 551957 - DNA, 62 bp, Artificial Sequence
  ENSG00000168495_38 (sequence is synthesized)
gtgcgtgtttgtgtatattgcgtactggtggggattgggcttctgtcatacctatcacccaa

SEQ ID NO: 551958 - DNA, 120 bp, Artificial Sequence
  ENSG00000168495_39 (sequence is synthesized)
tactggtggggattgggcttctgtcatacctatcacccaaatagtgaacattgtactcaggtagcatttcaacccttgccccccctcccactcacccccttttggagtgcccagtgtttg

SEQ ID NO: 551959 - DNA, 120 bp, Artificial Sequence
  ENSG00000168495_40 (sequence is synthesized)
tagctcccacttataagtgagaacatgtgctatttgattttctgtttccgaggttaggataattacctcaagctccatccatgtggctgcaaagcacatgatttcattgtattttatgac

SEQ ID NO: 551960 - DNA, 120 bp, Artificial Sequence
  ENSG00000168495_41 (sequence is synthesized)
ggctgcaaagcacatgatttcattgtattttatgactgctcatgtatattatttcagcctccaaaattttgtatgttatttataatgatataaattatgtggttttatcgtgtactctat

SEQ ID NO: 551961 - DNA, 84 bp, Artificial Sequence
  ENSG00000168495_42 (sequence is synthesized)
tataatgatataaattatgtggttttatcgtgtactctatctcactcagaaatacatacaattcttcgttcccagctactctgg

SEQ ID NO: 551962 - DNA, 120 bp, Artificial Sequence
  ENSG00000168495_43 (sequence is synthesized)
aaataaataatacacacccacatgcacacacatccagttcttccatgttaatgagtatgttgtgtttcacatacttctgaattagccgaaggaattaaaggtagcatcttttaatcctca

SEQ ID NO: 551963 - DNA, 120 bp, Artificial Sequence
  ENSG00000168495_44 (sequence is synthesized)
ggttcctgggcggggttcctggagagggcgtgtcgcgagccaaaggctctcacctgggtggtcccgggagtctcgccacgtgggaggggaggagctgagaggccactggagggacgcacc

SEQ ID NO: 551964 - DNA, 120 bp, Artificial Sequence
  ENSG00000168495_45 (sequence is synthesized)
gactgggggaccggaaagcaagggggtggggttccgccagggtccgcgtgtcagtcccctctggtgatctcgtcgccccttctctcccaggcaacatgtcggaaggaaacgccgccggcg

SEQ ID NO: 551965 - DNA, 120 bp, Artificial Sequence
  ENSG00000168496_0 (sequence is synthesized)
ggctgaacgtcaggccacccgccgctaagctgagaagggagagcgagcttaggaccgcctgcccggggcaaccccgaaccaagctttagccgccgaggccgcgtgtcccaaaggccagtc

SEQ ID NO: 551966 - DNA, 120 bp, Artificial Sequence
  ENSG00000168496_1 (sequence is synthesized)
atccctcctctgtgttgccatgggaattcaaggcctggccaaactaattgctgatgtggcccccagtgccatccgggagaatgacatcaagagctactttggccgtaaggtggccattga

SEQ ID NO: 551967 - DNA, 120 bp, Artificial Sequence
  ENSG00000168496_2 (sequence is synthesized)
tgcctctatgagcatttatcagttcctgattgctgttcgccagggtggggatgtgctgcagaatgaggagggtgagaccaccagccacctgatgggcatgttctaccgcaccattcgcat

SEQ ID NO: 551968 - DNA, 120 bp, Artificial Sequence
  ENSG00000168496_3 (sequence is synthesized)
gatggagaacggcatcaagcccgtgtatgtctttgatggcaagccgccacagctcaagtcaggcgagctggccaaacgcagtgagcggcgggctgaggcagagaagcagctgcagcaggc

SEQ ID NO: 551969 - DNA, 120 bp, Artificial Sequence
  ENSG00000168496_4 (sequence is synthesized)
tcaggctgctggggccgagcaggaggtggaaaaattcactaagcggctggtgaaggtcactaagcagcacaatgatgagtgcaaacatctgctgagcctcatgggcatcccttatcttga

SEQ ID NO: 551970 - DNA, 120 bp, Artificial Sequence
  ENSG00000168496_5 (sequence is synthesized)
tgcacccagtgaggcagaggccagctgtgctgccctggtgaaggctggcaaagtctatgctgcggctaccgaggacatggactgcctcaccttcggcagccctgtgctaatgcgacacct

SEQ ID NO: 551971 - DNA, 120 bp, Artificial Sequence
  ENSG00000168496_6 (sequence is synthesized)
gactgccagtgaagccaaaaagctgccaatccaggaattccacctgagccggattctgcaggagctgggcctgaaccaggaacagtttgtggatctgtgcatcctgctaggcagtgacta

SEQ ID NO: 551972 - DNA, 120 bp, Artificial Sequence
  ENSG00000168496_7 (sequence is synthesized)
ctgtgagagtatccggggtattgggcccaagcgggctgtggacctcatccagaagcacaagagcatcgaggagatcgtgcggcgacttgaccccaacaagtaccctgtgccagaaaattg

SEQ ID NO: 551973 - DNA, 120 bp, Artificial Sequence
  ENSG00000168496_8 (sequence is synthesized)
gatcaagttcatgtgtggtgaaaagcagttctctgaggagcgaatccgcagtggggtcaagaggctgagtaagagccgccaaggcagcacccagggccgcctggatgatttcttcaaggt

SEQ ID NO: 551974 - DNA, 120 bp, Artificial Sequence
  ENSG00000168496_9 (sequence is synthesized)
gaccggctcactctcttcagctaagcgcaaggagccagaacccaagggatccactaagaagaaggcaaagactggggcagcagggaagtttaaaaggggaaaataaatgtgtttccccat

SEQ ID NO: 551975 - DNA, 120 bp, Artificial Sequence
  ENSG00000168496_10 (sequence is synthesized)
tatacctccttcaccccagaatatttgccgtcttgtacccttaagagctacagctagagaaaccttcacggggtggagagaggattctaaggcttttctagcgtgacccttttcagtagt

SEQ ID NO: 551976 - DNA, 120 bp, Artificial Sequence
  ENSG00000168496_11 (sequence is synthesized)
gctagtcccttttttacttgatcttaatggcaagaaggccacagaggtacttttccttttttagctcaggaaaatatgtcaggctcaaaccacttctcaggcagtttaatggacactaag

SEQ ID NO: 551977 - DNA, 120 bp, Artificial Sequence
  ENSG00000168496_12 (sequence is synthesized)
tccattgttacatgaaagtgatagatagcaacaagttttggagaagagagagggagataaaagggggagacaaaagatgtacagaaatgatttcctggctggccaactggtggccagtgg

SEQ ID NO: 551978 - DNA, 120 bp, Artificial Sequence
  ENSG00000168496_13 (sequence is synthesized)
gaggtgatggtggacctagactgtgcttttctgtcttgttcagccttgacccaccttgagagagagccaccaggaaggcgcatcttagcagatgggaggaactgctgagagaagatgggc

SEQ ID NO: 551979 - DNA, 120 bp, Artificial Sequence
  ENSG00000168496_14 (sequence is synthesized)
agaaagctggagcccctggagttggctgtgtctgtgtttgtgactgattactggctgtgtcttgggtgggcagaaactcgaacttgctatgtaatttgtgtctagttattcagaggagta

SEQ ID NO: 551980 - DNA, 120 bp, Artificial Sequence
  ENSG00000168496_15 (sequence is synthesized)
agatggtgatgttcacctggcaatcagctgagttgagactttggaataagacactggttttcatgcgctgtttttgttttaaagttatgaagaaaaaagtcaataaaattctaaaagtaa

SEQ ID NO: 551981 - DNA, 120 bp, Artificial Sequence
  ENSG00000168496_16 (sequence is synthesized)
gagcgagcttaggaccgcctgcccggggcaaccccgaaccaagctttagccgccgaggccgcgtgtcccaaaggccaggtgagaccccatgggaagcgcctccgggagcgacggggtccg

SEQ ID NO: 551982 - DNA, 120 bp, Artificial Sequence
  ENSG00000168496_17 (sequence is synthesized)
cttggcgctgggggccgtggggagccggggtctggagtgcgcgggattcgcagtcaagaggtcccgccacttttccccctgtgagccttgggccagtcgcgtaagctccgagcctctctt

SEQ ID NO: 551983 - DNA, 120 bp, Artificial Sequence
  ENSG00000168497_0 (sequence is synthesized)
gatcagcgtagccagttgttgcctgtctgaacctctgccagtcctggagactggtgccctgagctccaaccagcgggcctcatcctacaccctcaccaccgcaacttctcacccgagcaa

SEQ ID NO: 551984 - DNA, 120 bp, Artificial Sequence
  ENSG00000168497_1 (sequence is synthesized)
gaagcagctcccagagagaaagaacgttcccacctgcctagccatgggagaggacgctgcacaggccgaaaagttccagcaccctgggtctgacatgcggcaggaaaagccctcgagccc

SEQ ID NO: 551985 - DNA, 120 bp, Artificial Sequence
  ENSG00000168497_2 (sequence is synthesized)
cagcccgatgccttcctccacaccaagccccagcctgaacctagggaacacagaggaggccatccgggacaactcacaggtgaacgcagtcacggtgctcacgctcctggacaagctggt

SEQ ID NO: 551986 - DNA, 120 bp, Artificial Sequence
  ENSG00000168497_3 (sequence is synthesized)
gaacatgctagacgctgtgcaggagaaccagcacaagatggagcagcgacagatcagtttggagggctccgtgaagggcatccagaatgacctcaccaagctctccaagtaccaggcctc

SEQ ID NO: 551987 - DNA, 120 bp, Artificial Sequence
  ENSG00000168497_4 (sequence is synthesized)
caccagcaacacggtgagcaagctgctggagaagtcccgcaaggtcagcgcccacacgcgcgcggtcaaagagcgcatggataggcagtgcgcacaggtgaagcggctggagaacaacca

SEQ ID NO: 551988 - DNA, 120 bp, Artificial Sequence
  ENSG00000168497_5 (sequence is synthesized)
cgcccagctcctccgacgcaaccatttcaaagtgctcatcttccaggaggaaaatgagatccctgccagcgtgtttgtgaaacagcccgtttccggtgccgtggaagggaaggaggagct

SEQ ID NO: 551989 - DNA, 120 bp, Artificial Sequence
  ENSG00000168497_6 (sequence is synthesized)
tccggatgaaaacaaatccctggaggaaaccctgcacaccgtggacctctcctcagatgatgatttgccccacgatgaggaggccctggaagacagtgccgaggaaaaggtggaagaaag

SEQ ID NO: 551990 - DNA, 120 bp, Artificial Sequence
  ENSG00000168497_7 (sequence is synthesized)
tagggcagagaaaataaaaagatccagcctgaagaaagtggatagcctcaagaaagcattttctcgccagaacatcgagaaaaagatgaacaagctggggacaaagatcgtatctgtaga

SEQ ID NO: 551991 - DNA, 120 bp, Artificial Sequence
  ENSG00000168497_8 (sequence is synthesized)
gaggagagagaagattaagaaatctctcacgtcaaatcaccagaaaatatcctcaggaaaaagctcccccttcaaggtttctcccctcactttcgggcggaagaaagtccgagagggaga

SEQ ID NO: 551992 - DNA, 120 bp, Artificial Sequence
  ENSG00000168497_9 (sequence is synthesized)
aagccatgcagaaaatgagaccaagtcagaagacctgcctagcagtgagcagatgccaaatgaccaggaagaggagtcctttgcagagggtcattccgaagcgtccctcgccagcgctct

SEQ ID NO: 551993 - DNA, 120 bp, Artificial Sequence
  ENSG00000168497_10 (sequence is synthesized)
ggtggaaggggaaattgcagaggaggctgctgagaaggcgacctccagggggagtaactcggggatggacagcaacatcgacttgactattgtggaagatgaagaggaggagtcagtggc

SEQ ID NO: 551994 - DNA, 120 bp, Artificial Sequence
  ENSG00000168497_11 (sequence is synthesized)
cctggaacaggcacagaaggtacgctatgagggtagctacgcgctaacatccgaggaggcggagcgctccgatggggaccccgtgcagcccgccgtgctccaggtgcaccagacctcctg

SEQ ID NO: 551995 - DNA, 120 bp, Artificial Sequence
  ENSG00000168497_12 (sequence is synthesized)
aagaacaaactcttgcacatctccagcacgactcacccactcctgcgttcctgtccaggcagtaatcattgaccatatagtcatagtaagacacacgagaccaggctttaccatgaaagc

SEQ ID NO: 551996 - DNA, 120 bp, Artificial Sequence
  ENSG00000168497_13 (sequence is synthesized)
gacctgtcacggactccacttttaatttgctcttaggttctatctctgtagaatgtctccaagattgaagaagaaactgagcagttgaaaaatgctaatctctttgacttagtcagaaaa

SEQ ID NO: 551997 - DNA, 120 bp, Artificial Sequence
  ENSG00000168497_14 (sequence is synthesized)
aaacagaggataattaagatactagtcatgaaaagtgattcattcttttttgtcattccataagcttgctgaatagtgtaccggtaatatattgtatttccaccgtactctgtgaatcta

SEQ ID NO: 551998 - DNA, 120 bp, Artificial Sequence
  ENSG00000168497_15 (sequence is synthesized)
ttattctttaagtgttgatatataatatacataaatatgtaagctaaacatataactatatgttttaagaagaaaacatctacgaaaggtaaaaagagatgatcagttggttgtttactt

SEQ ID NO: 551999 - DNA, 120 bp, Artificial Sequence
  ENSG00000168497_16 (sequence is synthesized)
acttgctagaaaccattgttttattgcaaacgaaggaaaaatgaagagattataaaagtcagctaatgaagtaagatacgtagtaaagtcaggactattcaaaaagtaagaaagaaaatt

SEQ ID NO: 552000 - DNA, 120 bp, Artificial Sequence
  ENSG00000168497_17 (sequence is synthesized)
tggaaaatgagagaaacaggaaacaaagaatgccgaaaagaatgaaaacagagaaaaaatgtatgtgcttgaaagtaaaatacttacaatagtagcttaactatttcactctttaaataa

SEQ ID NO: 552001 - DNA, 80 bp, Artificial Sequence
  ENSG00000168497_18 (sequence is synthesized)
atagtagcttaactatttcactctttaaataaaaatactaaagaagttcgtatatcctggaataacatgtcatcttcaaa

SEQ ID NO: 552002 - DNA, 120 bp, Artificial Sequence
  ENSG00000168497_19 (sequence is synthesized)
aaggacattacaaatatttctttaaggaagttcaaaaggatgttgtcttgttaacactggaacgaatataaatcttcaaaatacaattaatatatactgttttgtggaaacttagctcat

SEQ ID NO: 552003 - DNA, 120 bp, Artificial Sequence
  ENSG00000168497_20 (sequence is synthesized)
actattctttaatgctcttcaaatttaaactaacccttacattccatgtgatgtgatgtaggcttataagatgctaaaatctataggttttggaagtgaaagattctattttttcttttt

SEQ ID NO: 552004 - DNA, 120 bp, Artificial Sequence
  ENSG00000168497_21 (sequence is synthesized)
ttgtacataatgggaatttcattccagattatattttatttacatattaatttcacagaatattaatatttcttaacttcttaaagcatgctagcgttttatgtatatgtacacatatat

SEQ ID NO: 552005 - DNA, 120 bp, Artificial Sequence
  ENSG00000168497_22 (sequence is synthesized)
tcagacagggtaattttatctgctgcctaacattgtactaaaatattgctttatctgtttttaattacaaaatgctaatgatttcttaaattatagtttaaagacaattggcccaggaag

SEQ ID NO: 552006 - DNA, 120 bp, Artificial Sequence
  ENSG00000168497_23 (sequence is synthesized)
caaatcccctgcctttagtatgaaccactataagtaaccttacaaatagagttaatccaagacaatattaacaaactgtgctttgtctttaataaaagggataggattaacaaacatatt

SEQ ID NO: 552007 - DNA, 120 bp, Artificial Sequence
  ENSG00000168497_24 (sequence is synthesized)
gatggcataacctattcagctatgtccttatttttgcaataatgtaacctcaaatattggattgttgaaccaacaatggctgtgttaaagaagattaaataaaccgaaaaataaaaagca

SEQ ID NO: 552008 - DNA, 120 bp, Artificial Sequence
  ENSG00000168502_0 (sequence is synthesized)
gagtgttttcagaagtgggaatagcaggcgaggtcttgaggcctgaagaagcaaagcgtcgcttagtcaatgctgagatgcgtcttgtggaacagaatttttgggacatttgcaggatga

SEQ ID NO: 552009 - DNA, 120 bp, Artificial Sequence
  ENSG00000168502_1 (sequence is synthesized)
gttagatgaactccgtgctgagatggaagagatgagagacagttatttagaggaagatgtttaccagctgcaggaacttcggcgagaactggaccgcgctaataaaaactgccgaatcct

SEQ ID NO: 552010 - DNA, 120 bp, Artificial Sequence
  ENSG00000168502_2 (sequence is synthesized)
gcagtaccgtcttcggaaagccgagcagaaaagcctgaaagtggctgagacgggtcaggtggatggtgagcttattcgaagcctggagcaggacttgaaggtagccaaagatgtatctgt

SEQ ID NO: 552011 - DNA, 120 bp, Artificial Sequence
  ENSG00000168502_3 (sequence is synthesized)
cagattgcaccacgaacttaagacggtggaggaaaagcgcgctaaagctgaggatgaaaacgaaactctccgacagcagatgattgaagtggaaatatccaaacaggccctccagaatga

SEQ ID NO: 552012 - DNA, 120 bp, Artificial Sequence
  ENSG00000168502_4 (sequence is synthesized)
gctggagagactgaaagagagttccctaaaaagaagaagcactcgggaaatgtacaaggagaagaaaacctttaaccaggatgacagtgccgatttgaggtgccagctccagtttgccaa

SEQ ID NO: 552013 - DNA, 120 bp, Artificial Sequence
  ENSG00000168502_5 (sequence is synthesized)
agaggaagccttcctgatgcgcaaaaagatggccaagctaggaagggagaaggacgagctggagcaggagctccagaagtacaagtccctctatggggatgtggacagtcccctgcccac

SEQ ID NO: 552014 - DNA, 120 bp, Artificial Sequence
  ENSG00000168502_6 (sequence is synthesized)
gggggaagcaggcgggccccccagcacccgggaggccgagctgaagctgcggctaaagctggtggaggaggaagccaacatcttgggccggaagatcgtggagctggaggtggagaaccg

SEQ ID NO: 552015 - DNA, 120 bp, Artificial Sequence
  ENSG00000168502_7 (sequence is synthesized)
tggcctcaaggcagagatggaggacatgcggggccagcaggagcgggagggcccgggtcgggaccacgcacccagcattcctacctcacccttcggtgactccctggagtcctccactga

SEQ ID NO: 552016 - DNA, 120 bp, Artificial Sequence
  ENSG00000168502_8 (sequence is synthesized)
gctccgccgccacctgcagtttgtagaagaggaagcggagttgctccggaggtccatctccgagatcgaagaccacaaccggcaactgacccacgagctcagcaagtttaagtttgagcc

SEQ ID NO: 552017 - DNA, 120 bp, Artificial Sequence
  ENSG00000168502_9 (sequence is synthesized)
tccccgggagccgggctggctaggagagggtgcaagtcctggtgccgggggtggggcccccctgcaggaggagctgaagtcagccaggctgcagatcagcgagctcagcggcaaggtgct

SEQ ID NO: 552018 - DNA, 120 bp, Artificial Sequence
  ENSG00000168502_10 (sequence is synthesized)
caaactgcagcacgagaaccacgcgctgctgtccaacatccagcgctgcgacctggcagcccacctggggctgcgtgcccccagtccccgggacagcgatgccgagagtgatgcgggcaa

SEQ ID NO: 552019 - DNA, 120 bp, Artificial Sequence
  ENSG00000168502_11 (sequence is synthesized)
gaaggagagtgatggggaggagagccgcctgccccagcccaagcgggaagggcctgttggcggggagagtgactcggaggaaatgtttgagaagacgtcgggcttcgggagcgggaagcc

SEQ ID NO: 552020 - DNA, 120 bp, Artificial Sequence
  ENSG00000168502_12 (sequence is synthesized)
atcggaggccagcgagccatgccccacggagctcctgaaggcccgggaggactctgagtacctagtgaccctaaaacacgaggcccagcggctagagcggacggtggagcgcctcatcac

SEQ ID NO: 552021 - DNA, 120 bp, Artificial Sequence
  ENSG00000168502_13 (sequence is synthesized)
ggacaccgacagcttcctccatgatgcggggctgcggggtggtgcgcccttaccggggcctggcctccagggcgaagaggagcagggtgagggggaccagcaggagccccagctgctggg

SEQ ID NO: 552022 - DNA, 120 bp, Artificial Sequence
  ENSG00000168502_14 (sequence is synthesized)
gaccatcaacgccaagatgaaggctttcaagaaagagctgcaggccttcctggagcaggtgaaccgcattggggatggcctatcccccttgccccacctcacagagtcctctagcttcct

SEQ ID NO: 552023 - DNA, 120 bp, Artificial Sequence
  ENSG00000168502_15 (sequence is synthesized)
ctccactgtgacttccgtgtcccgggactcccccatcgggaacctggggaaggagctgggcccagacttgcagtccagactgaaagagcagctggagtggcagctcgggccggcccgagg

SEQ ID NO: 552024 - DNA, 120 bp, Artificial Sequence
  ENSG00000168502_16 (sequence is synthesized)
ggacgagcgggagagcctgcgcctccgagccgcgcgggagctgcaccgccgcgcagacggggacaccgggagccacgggctgggaggccagacctgcttcagcctggagctcaggggccc

SEQ ID NO: 552025 - DNA, 120 bp, Artificial Sequence
  ENSG00000168502_17 (sequence is synthesized)
ccccgttttacctgagcagagtgtatccatagaggagctacagggtcagctcgtgcaggcggccagactgcatcaagaggagacagagacatttacaaacaagatccataagatggagga

SEQ ID NO: 552026 - DNA, 120 bp, Artificial Sequence
  ENSG00000168502_18 (sequence is synthesized)
ggagcacctctatgccttgaggtggaaagaactggaaatgcacagcctggctttgcaaaacaccctccatgagcgaacctggagtgatgagaagaatctgatgcagcaggagctccggtc

SEQ ID NO: 552027 - DNA, 120 bp, Artificial Sequence
  ENSG00000168502_19 (sequence is synthesized)
cttgaagcagaacattttcctcttctacgtcaaactcaggtggctgctgaaacactggcggcaagggaagcagatggaggaggaaggagaggagttcactgagggtgaacatccagagac

SEQ ID NO: 552028 - DNA, 120 bp, Artificial Sequence
  ENSG00000168502_20 (sequence is synthesized)
cctctccaggctcggggagcttggagtccaggggggtcaccaggcggatggcccagaccacgacagtgaccgaggctgtggctttccagtgggggagcactccccacactcccgggtgca

SEQ ID NO: 552029 - DNA, 120 bp, Artificial Sequence
  ENSG00000168502_21 (sequence is synthesized)
gattggagatcacagcttgcggctgcagaccgcggacaggggacagccccacaaacaggtggtggaaaaccagcagctgttcagcgccttcaaggccttgctggaggacttccgtgcgga

SEQ ID NO: 552030 - DNA, 120 bp, Artificial Sequence
  ENSG00000168502_22 (sequence is synthesized)
gctgcgggaggatgagcgtgcccgactacggctgcagcagcaatatgccagcgacaaggcggcctgggacgtggagtgggccgtgctcaagtgccgtctggaacagctggaagagaagac

SEQ ID NO: 552031 - DNA, 120 bp, Artificial Sequence
  ENSG00000168502_23 (sequence is synthesized)
tgagaacaagttgggagaactaggctcctccgctgagagcaagggggccttgaagaaggagagagaggtgcaccagaagctcctggcagacagtcacagcctggtcatggacctgcgctg

SEQ ID NO: 552032 - DNA, 120 bp, Artificial Sequence
  ENSG00000168502_24 (sequence is synthesized)
gcagatccatcacagcgagaagaactggaaccgggagaaggtggaacttctcgaccgcctggacagagatcggcaggagtgggagcggcagaagaaggaattcttgtggaggatagagca

SEQ ID NO: 552033 - DNA, 120 bp, Artificial Sequence
  ENSG00000168502_25 (sequence is synthesized)
ccgcatgccccgtccagtggccatgtggccttgtgcagatgctgactccatcccgtttgaagaccggccgctgtccaagctgaaggagtcggacaggtgctcggccagtgagaatctcta

SEQ ID NO: 552034 - DNA, 120 bp, Artificial Sequence
  ENSG00000168502_26 (sequence is synthesized)
cctggatgccttgtccctggatgacgagccagaagagccaccagcccacaggcccgagagggagttcaggaaccgcctccctgaggaagaagaaaatcacaaaggaaatcttcaaagggc

SEQ ID NO: 552035 - DNA, 120 bp, Artificial Sequence
  ENSG00000168502_27 (sequence is synthesized)
ggtgtccgtgtcctccatgtctgagttccagcgtctaatggacatctcccccttcctgcctgagaagggcctgccgtccaccagcagcaaggaggatgtcaccccacccctgtctccaga

SEQ ID NO: 552036 - DNA, 120 bp, Artificial Sequence
  ENSG00000168502_28 (sequence is synthesized)
cgacctcaagtacatcgaggagttcaacaagagctgggactacacacccaacaggggccacaatggtggggggccggacctttgggccgacaggaccgaggtggggcgggcagggcacga

SEQ ID NO: 552037 - DNA, 120 bp, Artificial Sequence
  ENSG00000168502_29 (sequence is synthesized)
ggacagcacagagcctttccccgactcctcctggtacctaaccacaagtgtcaccatgaccacggacaccatgaccagcccagagcactgccagaagcagccactgcggagccacgtcct

SEQ ID NO: 552038 - DNA, 120 bp, Artificial Sequence
  ENSG00000168502_30 (sequence is synthesized)
caccgagcagtcggggttgcgcgtgttacacagcccgcctgccgtgcgcagggtcgacagcatcacggcggcaggtggtgagggtccctttcccacaagcagagccagagggagcccggg

SEQ ID NO: 552039 - DNA, 120 bp, Artificial Sequence
  ENSG00000168502_31 (sequence is synthesized)
agacaccaagggaggccctccagaacccatgctcagcaggtggccttgcacctcccccaggcactcccgggactatgtggagggggcacggcgcccccttgatagtcccctctgtacctc

SEQ ID NO: 552040 - DNA, 120 bp, Artificial Sequence
  ENSG00000168502_32 (sequence is synthesized)
cctggggtttgcctccccactgcacagcctggagatgtccaagaacttgagtgatgacatgaaggaggtggccttctctgtcaggaatgccatctgctccggccctggcgagctgcaagt

SEQ ID NO: 552041 - DNA, 120 bp, Artificial Sequence
  ENSG00000168502_33 (sequence is synthesized)
caaggacatggcctgccagaccaatgggtcccggacgatggggacccagactgttcagaccatcagtgtgggcttgcagactgaagccctgcgtggcagcggtgtcaccagcagccccca

SEQ ID NO: 552042 - DNA, 120 bp, Artificial Sequence
  ENSG00000168502_34 (sequence is synthesized)
caagtgtctcactccaaaggctgggggcggtgctacacccgtgtcgtctccttcccggagccttaggagcagacaggtggcccctgccatcgagaaggtgcaggccaagtttgaacgcac

SEQ ID NO: 552043 - DNA, 120 bp, Artificial Sequence
  ENSG00000168502_35 (sequence is synthesized)
atgctgctcccccaagtatggttctcccaagctgcagaggaagcccctccccaaagccgaccagccaaataacaggacgtcaccagggatggcccagaaagggtacagtgagtcagcctg

SEQ ID NO: 552044 - DNA, 120 bp, Artificial Sequence
  ENSG00000168502_36 (sequence is synthesized)
ggcccgctccaccaccacaagggagagccccgtgcacaccaccattaatgatggcctctccagcctcttcaacatcattgaccacagccccgtggtgcaggaccccttccagaaggggct

SEQ ID NO: 552045 - DNA, 120 bp, Artificial Sequence
  ENSG00000168502_37 (sequence is synthesized)
gcgggccggcagtcggtctcgctcagcagagccccgaccagagctgggcccaggccaggaaacaggcaccaattcccgaggaaggtcgcctagccccattggggtggggtcagagatgtg

SEQ ID NO: 552046 - DNA, 120 bp, Artificial Sequence
  ENSG00000168502_38 (sequence is synthesized)
cagggaggaagggggagagggcacgccagtgaagcaggacttatctgctccccctggctacacgctcactgagaacgtggcccggatcctcaacaagaagctgctggaacatgccttaaa

SEQ ID NO: 552047 - DNA, 120 bp, Artificial Sequence
  ENSG00000168502_39 (sequence is synthesized)
ggaggagaggaggcaggctgcccacgggcccccgggtctccacagtgacagccactcgctgggggacacagccgagccagggcccatggagaaccaaactgtcttgctaactgccccctg

SEQ ID NO: 552048 - DNA, 120 bp, Artificial Sequence
  ENSG00000168502_40 (sequence is synthesized)
gggactctagccctgcccgcctcacgctgaactaccttgttctgcactagctccatccctagagccctgcttctccaggcccgagagaccagcaaaccgtcgccctccgtcccgttgggc

SEQ ID NO: 552049 - DNA, 120 bp, Artificial Sequence
  ENSG00000168502_41 (sequence is synthesized)
cccacattcccccactgcctcacagcctcagtcacccggagacccgacgtccttggaggagcatggtggcgaggagccgcccgaggagcagccacaccgagatgcaagcttgcatggatt

SEQ ID NO: 552050 - DNA, 120 bp, Artificial Sequence
  ENSG00000168502_42 (sequence is synthesized)
atcacagtataattcactgtaatttgcataaccacaccatcaccatgaacaaaactctgcccaacaggagagatctagttttctcaaggtcaaagaatgttttttaaaaacacaaagctg

SEQ ID NO: 552051 - DNA, 120 bp, Artificial Sequence
  ENSG00000168502_43 (sequence is synthesized)
ctgaatgttcaacctgtgaaactgagatgtttctagaatgaaacagtaaatgtgcctgtaataacttaatttttttcatagctcagaaaactatttttgtctccatcttttttacacaca

SEQ ID NO: 552052 - DNA, 120 bp, Artificial Sequence
  ENSG00000168502_44 (sequence is synthesized)
gtatattaaacgaaaaggtaaataaggtataaatagatttaaaaaataaaagttttaaaaaatgtacattttaagagattctgaacaccctcgctgtcaatacctgactgcctctgttaa

SEQ ID NO: 552053 - DNA, 120 bp, Artificial Sequence
  ENSG00000168502_45 (sequence is synthesized)
atttgcactgttacattttggttcagtttatttccatgttgaattagagtggattaagttaattttattttgtcagtgttactgttttttacgaattttttaatgcttcagactgtctga

SEQ ID NO: 552054 - DNA, 120 bp, Artificial Sequence
  ENSG00000168502_46 (sequence is synthesized)
ttcagtgaactttttgtagtgaaaaagccatgaagccagtagacaagacagatattctgtatgctggaggggatacaggatgattttgaaaaggtacaaagtcctcagtgggcttagaaa

SEQ ID NO: 552055 - DNA, 120 bp, Artificial Sequence
  ENSG00000168502_47 (sequence is synthesized)
attcactgtatgatccttatattatcctacttggcttgcacgtcttcgggtgcatgtatataccgctactgtgtcctcgccatcacctaaatgtgactcagtctgttccactgtaatatg

SEQ ID NO: 552056 - DNA, 120 bp, Artificial Sequence
  ENSG00000168502_48 (sequence is synthesized)
ttgtgaatttccttgtactgtacttttattgttggtcttcttgcatcgatgatccaacagcaacaccatttttaaattattgtgaaaagattaactggcaatgtacagagtttactcaaa

SEQ ID NO: 552057 - DNA, 120 bp, Artificial Sequence
  ENSG00000168502_49 (sequence is synthesized)
gttttcttaagggaaaacactacaaaaagtcacaaggataccaaatggaaacacatgatgatgcctctgggtctgtatgagaccgtgatgaagtagaaataaagcccttctgagatggca

SEQ ID NO: 552058 - DNA, 120 bp, Artificial Sequence
  ENSG00000168502_50 (sequence is synthesized)
atggagacactgaacggccccgcgggcggaggtgccccggacgcgaagctgcagccgcccggccagcaccaccgccaccaccacctccacccggtggccgaaaggcggcggctgcaccgt

SEQ ID NO: 552059 - DNA, 80 bp, Artificial Sequence
  ENSG00000168502_51 (sequence is synthesized)
aaaggcggcggctgcaccgtgcgccctcgcccgccagacccttcctcaaggacctgcacgcccggcccgccgcgcccggc

SEQ ID NO: 552060 - DNA, 80 bp, Artificial Sequence
  ENSG00000168502_52 (sequence is synthesized)
ccaacctcgcgggcaaagcgccgccctcgccggggtccctggccgcgcccggccgcctctctcggcgcagtggcggcgtc

SEQ ID NO: 552061 - DNA, 80 bp, Artificial Sequence
  ENSG00000168502_53 (sequence is synthesized)
ggcggtgccaaggctgccctgggaagcaggagggcggcgcgcgtggcgcccgcggagccgctgtcccgggctgggaagcc

SEQ ID NO: 552062 - DNA, 120 bp, Artificial Sequence
  ENSG00000168502_54 (sequence is synthesized)
accgtcggccccccgaccccggccgcccggatccctgccgtgaccctcgcggtgacctcggtggccgggtccccggcccgctgctcgcgcatcagccacacggacagcagctccgacctc

SEQ ID NO: 552063 - DNA, 120 bp, Artificial Sequence
  ENSG00000168502_55 (sequence is synthesized)
tcgcgcatcagccacacggacagcagctccgacctctctgactgcccctccgaacccctgtccgacgagcagcgcctgctccctgccgccagcagcgacgccgaatccggcacgggctcc

SEQ ID NO: 552064 - DNA, 80 bp, Artificial Sequence
  ENSG00000168502_56 (sequence is synthesized)
agcgaccgtgaacccccacgaggagcgccgacgccgagccccgcagcccgaggagcgccgccgggcagccccgagccccc

SEQ ID NO: 552065 - DNA, 120 bp, Artificial Sequence
  ENSG00000168502_57 (sequence is synthesized)
gccggagcatcccgagcggggtttcggggggtttcgcggggcccggcgtggcggaggatgtccgggggcgctcgccaccggagcgaccagtccccgggacccccaaggagcccagcctgg

SEQ ID NO: 552066 - DNA, 120 bp, Artificial Sequence
  ENSG00000168502_58 (sequence is synthesized)
cggcgcctgctgcactctctgagtattttccggcagggcctgcgggcagtggcgtcttagtcgccttagcactgggtgcttaatccggctccatcttttctccacggagggggcctggtg

SEQ ID NO: 552067 - DNA, 120 bp, Artificial Sequence
  ENSG00000168502_59 (sequence is synthesized)
aaatgatgagtgtgcgaccagactgcggcagagaacgagccatgctctctgagtgtaaaagctgcattgtgagcacacgtgacgatccgaaggagttaattctcccccgggggctgactt

SEQ ID NO: 552068 - DNA, 120 bp, Artificial Sequence
  ENSG00000168502_60 (sequence is synthesized)
gttccacagaaggggcgacaggcctggagagcagtttgaagccttttcctccacgagggctgtgggatttgactcccgcagtgctgttgttgacagtttctctgtgtgatgggggaaacc

SEQ ID NO: 552069 - DNA, 120 bp, Artificial Sequence
  ENSG00000168502_61 (sequence is synthesized)
tttgctgaagccttttgaaacttttgatggccgatcaaagaggagtgattcgtgaaatcggttatttttcccatctgctgaatgtgaacagtaaaacgtttttgcaaaaccaaaacgggg

SEQ ID NO: 552070 - DNA, 120 bp, Artificial Sequence
  ENSG00000168502_62 (sequence is synthesized)
agttcatctggcttcaaaacaaggagaccagccctgcaaagcagcgttgactttccactggacccaaaaagtgccgttttgacctcagccaagcattgcaggctgtgaacagcagagtca

SEQ ID NO: 552071 - DNA, 120 bp, Artificial Sequence
  ENSG00000168502_63 (sequence is synthesized)
gcttttgaggatcctccagaaccctctggaagccctatgaggacacttcttaggttttgatacacttgactctatccaacacttacctccttgccttgggtctctgggtttaatttcctg

SEQ ID NO: 552072 - DNA, 120 bp, Artificial Sequence
  ENSG00000168502_64 (sequence is synthesized)
gtaaaaacgttgaagagccttgggttgcagagattggaggtgagaggggtgactctgaagtaaagcagcagcagtggagaaggagtggagggcacacacctgaaaaaaacggagcaagta

SEQ ID NO: 552073 - DNA, 120 bp, Artificial Sequence
  ENSG00000168502_65 (sequence is synthesized)
gagagtggccgggcctggtggccggttcatgagacgccgtggagcaacaggcacctcgcacggctgtcaggtttctagtacgggtgcctgggcgatgggccatcactgagacaggaacgc

SEQ ID NO: 552074 - DNA, 120 bp, Artificial Sequence
  ENSG00000168502_66 (sequence is synthesized)
agagagacaaccagttgggatggaaaggggacaggttggatttgaggtgtgtgtcatcacaggcactgggacttgaaaagggctgggctgaagatgtatatacctgggtgtgaatgagga

SEQ ID NO: 552075 - DNA, 120 bp, Artificial Sequence
  ENSG00000168502_67 (sequence is synthesized)
ggtgggaggcagggccatggaggacgctgcaggactgtgcacagaatgaaaggaactcatagaaggaaccaaaatattcattttgcagaaattagtggaaggagaagagattggaaagga

SEQ ID NO: 552076 - DNA, 120 bp, Artificial Sequence
  ENSG00000168502_68 (sequence is synthesized)
ggcaaagagggggtactgaatggtctcataaaaagcctgctcttcagcaccagccaggcggaacgggatacggtggtgtcagataaacctatgacagcagcttcaccaacacacaacaca

SEQ ID NO: 552077 - DNA, 120 bp, Artificial Sequence
  ENSG00000168502_69 (sequence is synthesized)
cacagaacagatacacaatacacaacacacacactacttctataacaaggggagcgcagacacaaaacacacagatttcccaaaccgtgtgtcccagtcaagcactgtgggctgcagtga

SEQ ID NO: 552078 - DNA, 120 bp, Artificial Sequence
  ENSG00000168502_70 (sequence is synthesized)
gatgaggacacaggagcaccttgggttagtctgcatcttggtggctggtggcgctggtggagttttaactggagaggtatttctggttgtcacggtactgttagcataatgctttgggaa

SEQ ID NO: 552079 - DNA, 120 bp, Artificial Sequence
  ENSG00000168502_71 (sequence is synthesized)
cagaagcttctccctgtggccgtatgaagttccagccacaaaagcagcagggagcatgaagcatagtctccagggccactgttccttttctgctgaccccagagggaggcagggaaaccg

SEQ ID NO: 552080 - DNA, 120 bp, Artificial Sequence
  ENSG00000168502_72 (sequence is synthesized)
ctcgccccattgctcttctggaagcctgtggctcccacgctgtcctcgggccatgctgtctctgccgtgttccatcttctcccgagtgacactgcccattccgtgcagccgtctgtcctt

SEQ ID NO: 552081 - DNA, 120 bp, Artificial Sequence
  ENSG00000168502_73 (sequence is synthesized)
cccccgctgctgctcccctgcaccactggctgggctgtcctcatcctggtcttttcagttgcttgtcacatctttttaaatcctccaactcacttcctttctttgagggtccttgttctc

SEQ ID NO: 552082 - DNA, 120 bp, Artificial Sequence
  ENSG00000168502_74 (sequence is synthesized)
tgtcatccttcctgtgccttccattcagttcacctcaagcttccagtgtctgagtgtcattccagccagcgggctccatgctgggcaactcagttttctcatgccacagctttttacatt

SEQ ID NO: 552083 - DNA, 120 bp, Artificial Sequence
  ENSG00000168502_75 (sequence is synthesized)
tctgtgtatcagcaaattccaaatttgggtgtcctggttttgtaacatgtaaggacaaggagctcaacattctttaaaaacaaagtagcttgagaataaggattctaggtgatttgcaca

SEQ ID NO: 552084 - DNA, 120 bp, Artificial Sequence
  ENSG00000168502_76 (sequence is synthesized)
tggttgagtgtgtcttgcatcacctgctcgcagaacattaggatgcctgaaacacaaaaccaccagtacattctgattctacctttttaaaatgctgctgcaattgaacagtcattaaag

SEQ ID NO: 552085 - DNA, 120 bp, Artificial Sequence
  ENSG00000168502_77 (sequence is synthesized)
aaaaccagacccaaattaaaatttctgcctgcagcatttttgccatgttgtgggagtttgtttaagctactcccagtcaatttcaaataaacagtagcagagttcgtttaagacgactgc

SEQ ID NO: 552086 - DNA, 120 bp, Artificial Sequence
  ENSG00000168502_78 (sequence is synthesized)
cattgctaacacagctgaatgaaatcagaggtctctttgtgggctcccagtagatccaggccctgtaggaccagttcacttgtccactgtagctaaatagatcatacaaaagggccaaat

SEQ ID NO: 552087 - DNA, 120 bp, Artificial Sequence
  ENSG00000168502_79 (sequence is synthesized)
aaaggagctttgcaagctgactcatctcacagtattgctgtgtttaatcataattggtctcttcccattcatgtcactgatcatttgtgttgaattctttattattttaagttattctgc

SEQ ID NO: 552088 - DNA, 120 bp, Artificial Sequence
  ENSG00000168502_80 (sequence is synthesized)
atgagcatagaaagtagttaatattcacgagttgcctgtggtgtatacttcatctcacttgagtctgttgagaagtgtgtttgggggaatcatccactggtgacactgccggtctgagta

SEQ ID NO: 552089 - DNA, 120 bp, Artificial Sequence
  ENSG00000168502_81 (sequence is synthesized)
aaaaaaaactgcatataccgatcaaccttgggatggctcataacaaatcatcaggttggcaaacatttggctccgcagacattccctgtttccctgtcttcagccacgtgagctcgcagt

SEQ ID NO: 552090 - DNA, 120 bp, Artificial Sequence
  ENSG00000168502_82 (sequence is synthesized)
catgacctgggcgctttagagccacagtgaatgctttcagtttccccagccatcctgaagagcagaggctgcgcacacgcaagagggaatcttacagttttccttgagctccaagactca

SEQ ID NO: 552091 - DNA, 120 bp, Artificial Sequence
  ENSG00000168502_83 (sequence is synthesized)
tcccccccccccgccctccccctcctttttctgtgtggctggctgtgtgacgttttctgtcccggacgaggccctgagggaacatggcaggaggaggtggaactaggtggaactcacttg

SEQ ID NO: 552092 - DNA, 120 bp, Artificial Sequence
  ENSG00000168502_84 (sequence is synthesized)
acagcaaacccattttgtggcactgggacaggcaggtgtgcgcaggtgcctgcggtgaactgctgtgctcgtcagacagagggacagctcactgtaggcactgtccacctcctgtttccg

SEQ ID NO: 552093 - DNA, 120 bp, Artificial Sequence
  ENSG00000168502_85 (sequence is synthesized)
cagaccgggagcacctggaagtaggctgattggtgagtgcgcagtggcttcttgtccagtcgcagagaaagaagggatgaaaacccagcacgggcttccctgctctggaggaaactctcc

SEQ ID NO: 552094 - DNA, 120 bp, Artificial Sequence
  ENSG00000168502_86 (sequence is synthesized)
ggcacccctagcagtgtctgtcaccacagtaacccggtatacacaaggcttcagccaccacagagaccatggttggaagtgttgtcagcagcctggaagagtgaaagctcttagatgcgg

SEQ ID NO: 552095 - DNA, 120 bp, Artificial Sequence
  ENSG00000168502_87 (sequence is synthesized)
gtcacccgacccgggacagaaagaggggatccccgaggagctgttgaatgaggaagcacctttaaaagtccaaatgctgtgtcagtgtaaagtatgaataatagagaatgcaatgtcttg

SEQ ID NO: 552096 - DNA, 120 bp, Artificial Sequence
  ENSG00000168502_88 (sequence is synthesized)
ccattggggactgtcaagggggaaagcgtgtcacagcccgcctagtcaggggcccagttttcccttcccactgtagctctttcttctttgccatgggctgtttctggaaccacagctccg

SEQ ID NO: 552097 - DNA, 120 bp, Artificial Sequence
  ENSG00000168502_89 (sequence is synthesized)
gctacacagggcggcccccttccctttgatggctggttttacaggaagtgcgtctcccttcccgagtgttccgtccttcaaggtgtgtcacacatagctgtgtgcagttagagcctgtgt

SEQ ID NO: 552098 - DNA, 120 bp, Artificial Sequence
  ENSG00000168502_90 (sequence is synthesized)
cagagagctctcctcctggattcttcctaggtccttattgtgtaacctggagcagtgataagttgtcaccatcatgaatgcatcgcatagcttcagaaactgggagtgatttgggagaga

SEQ ID NO: 552099 - DNA, 120 bp, Artificial Sequence
  ENSG00000168502_91 (sequence is synthesized)
gaagcatacttagttgaagcaaaccaaatactgaggagcaataaagcttcacaagaagtagattagcagagtgagctggtgccatgtgacagcacaggatctccaaacaatgcagctcag

SEQ ID NO: 552100 - DNA, 120 bp, Artificial Sequence
  ENSG00000168502_92 (sequence is synthesized)
ctttcttacaccactgtctttaagcctgtgtttctgttcgtgctgttctttggtcgttttctcagtcgtctcccttgtccatttttgttttctttatcccccctccctgcctccaccctt

SEQ ID NO: 552101 - DNA, 120 bp, Artificial Sequence
  ENSG00000168502_93 (sequence is synthesized)
gggaaatgtacaaggagaagaaaacctttaaccaggtaagcagaggttttcattctaatgttacatctcctataagtgaagtcaactcattttgaatgtttttcagtaagtgttagcttt

SEQ ID NO: 552102 - DNA, 120 bp, Artificial Sequence
  ENSG00000168502_94 (sequence is synthesized)
ttctgcaagctgcacaagaagcatggtgccagcatctgctgctggagagggccaggctgcttccactcagcaaaaggcaaaggggagccgatgtgtgcagatcacatggcaagaaaggaa

SEQ ID NO: 552103 - DNA, 120 bp, Artificial Sequence
  ENSG00000168502_95 (sequence is synthesized)
aatgactccttgggttcccctgtattcagggtgcattcctgtggacagcaaagagtggaggtgtgggaaagtcagaataggtgaatgggaaaaaacagacccaatgtgtatttaaaataa

SEQ ID NO: 552104 - DNA, 120 bp, Artificial Sequence
  ENSG00000168502_96 (sequence is synthesized)
ttgtttatactgtgggattggtcaaatcttggtttaaacatgtttccagggatcacatgtaaatgtgctgagacttcatccttgaatgcaagacttgtcagagagggaattcctaagtct

SEQ ID NO: 552105 - DNA, 120 bp, Artificial Sequence
  ENSG00000168505_0 (sequence is synthesized)
aaaggtgctggctgcgcccgccggagataagtacgccggcttcgcgcgctccccagcggcccgcgggaggcgacggacggcgggacggacggacggacggcagcttaccggggccgaggg

SEQ ID NO: 552106 - DNA, 80 bp, Artificial Sequence
  ENSG00000168505_1 (sequence is synthesized)
gcgaagcgcgcgggctccgacgggcaagcggcggacgggggctccggcgagccctcggggcccgggcgccctctccactc

SEQ ID NO: 552107 - DNA, 80 bp, Artificial Sequence
  ENSG00000168505_2 (sequence is synthesized)
gcacccgcccggcatgcagcgggcccaggactgaggggcggaggcgtctgctctccgggtcccgctcggcccctgcccgg

SEQ ID NO: 552108 - DNA, 120 bp, Artificial Sequence
  ENSG00000168505_3 (sequence is synthesized)
cggcggcgcggcgcggggacttttcgcctctcgctggcctctaccgagcgcgtctatgagcgcagcgttcccgccgtcgctgatgatgatgcagcgcccgctggggagtagcaccgcctt

SEQ ID NO: 552109 - DNA, 120 bp, Artificial Sequence
  ENSG00000168505_4 (sequence is synthesized)
cagcatagactcgctgatcggcagcccgccgcagcccagccccggccatttcgtctacaccggctaccccatgttcatgccctaccggccggtagtgctgccgccgccgccgccgccgcc

SEQ ID NO: 552110 - DNA, 120 bp, Artificial Sequence
  ENSG00000168505_5 (sequence is synthesized)
gcccgcgctgccccaggccgcgctgcagccagcgctgccgcccgcacaccctcaccaccagatccccagcctgcccacaggcttctgctccagcctggcgcagggcatggcgctcacctc

SEQ ID NO: 552111 - DNA, 120 bp, Artificial Sequence
  ENSG00000168505_6 (sequence is synthesized)
tacgctcatggccacgctccccggcggcttctccgcgtcgccccagcaccaggaggcggcagcggcccgcaagttcgcgccgcagccgctgcccggcggcggtaacttcgacaaggcgga

SEQ ID NO: 552112 - DNA, 120 bp, Artificial Sequence
  ENSG00000168505_7 (sequence is synthesized)
ggcgctgcaggctgacgcggaggacggcaaaggcttcctggccaaagagggctcgctgctcgccttctccgcggccgagacggtgcaggcttcgctcgtcggggctgtccgagggcaagg

SEQ ID NO: 552113 - DNA, 120 bp, Artificial Sequence
  ENSG00000168505_8 (sequence is synthesized)
caggcagctcacaaggaggaagacccgggccacgcgctggaggagaccccgccgagcagcggcgccgcgggcagcaccacgtctacgggcaagaaccggcggcggcggactgccttcacc

SEQ ID NO: 552114 - DNA, 120 bp, Artificial Sequence
  ENSG00000168505_9 (sequence is synthesized)
agcgagcagctgctggagctagagaaggagttccactgcaaaaagtacctctccttgaccgagcgctcgcagatcgcccacgccctcaaactcagcgaggtgcaggtgaaaatctggttc

SEQ ID NO: 552115 - DNA, 120 bp, Artificial Sequence
  ENSG00000168505_10 (sequence is synthesized)
cagaaccgacgggccaagtggaaacgggtgaaggcaggcaatgccaattccaagacaggggagccctcccggaaccctaagatcgtcgtccccatccctgtccacgtcagcaggttcgct

SEQ ID NO: 552116 - DNA, 120 bp, Artificial Sequence
  ENSG00000168505_11 (sequence is synthesized)
atcagaagtcagcatcagcagctagaacaggcccggccctgagggtccagaagggccagggcctggcacccacctggagaagcccccgcacccgagggaacccatggtggactccactgt

SEQ ID NO: 552117 - DNA, 120 bp, Artificial Sequence
  ENSG00000168505_12 (sequence is synthesized)
gtttgaagcaacaaagtcacagcccagctgtggccatcccaagcaaattgagaatatattcactaaatgggcttaaaagactgcttttgaaggggcttacagccacaccagaagacacgc

SEQ ID NO: 552118 - DNA, 120 bp, Artificial Sequence
  ENSG00000168505_13 (sequence is synthesized)
taaatatttattatactatcctactttgtacataaatatctctatagactggatctcagctgcagtattttgaaagttataggacttaattacccagtaatttctccactcattccagaa

SEQ ID NO: 552119 - DNA, 120 bp, Artificial Sequence
  ENSG00000168505_14 (sequence is synthesized)
gaaaacaaaacctctgctgtaatctgcgcggttagcagccacctttccatacttttccaaaggtaaacgtgaaacccaagaacaagcactggggtttaaactgattttggtttgcgttct

SEQ ID NO: 552120 - DNA, 120 bp, Artificial Sequence
  ENSG00000168505_15 (sequence is synthesized)
ggctttttgagttgactgaaaagcagacattgttaggcagcctggaaattcgctttgctttgctttgcttttgcctggctttggtttcccctggggttgcctatcctatctgagccatgt

SEQ ID NO: 552121 - DNA, 120 bp, Artificial Sequence
  ENSG00000168505_16 (sequence is synthesized)
gaagcacgtctccgttgtgttaatttatttcaatgtagcttattttcttataagttatgacatttaaacaatttcagtcttgtgaataataaaaaggagagagggggggaaaaagaccaa

SEQ ID NO: 552122 - DNA, 120 bp, Artificial Sequence
  ENSG00000168505_17 (sequence is synthesized)
aggagctggaggatgaggcccggctgtgccgctgggcctccgggggacattcagagccacccaacaagcggggtctcgggagggggggcgtttagcgcccggcgaccagctgctgccctg

SEQ ID NO: 552123 - DNA, 120 bp, Artificial Sequence
  ENSG00000168505_18 (sequence is synthesized)
ggccacatatctatctgacgatgcgtttggccgaggccgcctctgccgctccgcggtgacctggggttccggtcggggctgtccgagggcaagggaaagacgagtcaaaggtggaagacg

SEQ ID NO: 552124 - DNA, 120 bp, Artificial Sequence
  ENSG00000168509_0 (sequence is synthesized)
cttctctggttccctgacctcagtgagacagcagccggcctggggacctgggggagacacggaggaccccctggctggagctgacccacagagtagggaatcatggctggagaattggat

SEQ ID NO: 552125 - DNA, 120 bp, Artificial Sequence
  ENSG00000168509_1 (sequence is synthesized)
agcagagtaatgtttgacctctggaaacatcacttacagggcttccggtcaaaattcactaggtaggagggtcatcagctgggaagaaccggcgcctgggaaacctggctggataggtat

SEQ ID NO: 552126 - DNA, 120 bp, Artificial Sequence
  ENSG00000168509_2 (sequence is synthesized)
gggggagccaggccagtcccctagtcccaggtcctcccatggcagtcccccaactctaagcactctcactctcctgctgctcctctgtggacatgctcattctcaatgcaagatcctccg

SEQ ID NO: 552127 - DNA, 120 bp, Artificial Sequence
  ENSG00000168509_3 (sequence is synthesized)
ctgcaatgctgagtacgtatcgtccactctgagccttagaggtgggggttcatcaggagcacttcgaggaggaggaggaggaggccggggtggaggggtgggctctggcggcctctgtcg

SEQ ID NO: 552128 - DNA, 120 bp, Artificial Sequence
  ENSG00000168509_4 (sequence is synthesized)
agccctccgctcctatgcgctctgcactcggcgcaccgcccgcacctgccgcggggacctcgccttccattcggcggtacatggcatcgaagacctgatgatccagcacaactgctcccg

SEQ ID NO: 552129 - DNA, 120 bp, Artificial Sequence
  ENSG00000168509_5 (sequence is synthesized)
ccagggccctacagcccctcccccgccccggggccccgcccttccaggcgcgggctccggcctccctgccccggacccttgtgactatgaaggccggttttcccggctgcatggtcgtcc

SEQ ID NO: 552130 - DNA, 120 bp, Artificial Sequence
  ENSG00000168509_6 (sequence is synthesized)
cccggggttcttgcattgcgcttccttcggggacccccatgtgcgcagcttccaccatcactttcacacatgccgtgtccaaggagcttggcctctactggataatgacttcctctttgt

SEQ ID NO: 552131 - DNA, 120 bp, Artificial Sequence
  ENSG00000168509_7 (sequence is synthesized)
ccaagccaccagctcccccatggcgttgggggccaacgctaccgccacccggaagctcaccatcatatttaagaacatgcaggaatgcattgatcagaaggtgtatcaggctgaggtgga

SEQ ID NO: 552132 - DNA, 120 bp, Artificial Sequence
  ENSG00000168509_8 (sequence is synthesized)
ctgggaaccatgtggagatccaagctgcctacattggcacaactataatcattcggcagacagctgggcagctctccttctccatcaaggtagcagaggatgtggccatggccttctcag

SEQ ID NO: 552133 - DNA, 120 bp, Artificial Sequence
  ENSG00000168509_9 (sequence is synthesized)
ctgaacaggacctgcagctctgtgttggggggtgccctccaagtcagcgactctctcgatcagagcgcaatcgtcggggagctataaccattgatactgccagacggctgtgcaaggaag

SEQ ID NO: 552134 - DNA, 120 bp, Artificial Sequence
  ENSG00000168509_10 (sequence is synthesized)
ggcttccagtggaagatgcttacttccattcctgtgtctttgatgttttaatttctggtgatcccaactttaccgtggcagctcaggcagcactggaggatgcccgagccttcctgccag

SEQ ID NO: 552135 - DNA, 120 bp, Artificial Sequence
  ENSG00000168509_11 (sequence is synthesized)
acttagagaagctgcatctcttcccctcagatgctggggttcctctttcctcagcaaccctcttagctccactcctttctgggctctttgttctgtggctttgcattcagtaaggggacc

SEQ ID NO: 552136 - DNA, 120 bp, Artificial Sequence
  ENSG00000168509_12 (sequence is synthesized)
atcagtcccattactagtttggaaatgatttggagatacagattggcatagaagaatgtaaagaatcattaaaggaagcagggcctaggagacacgtgaaacaatgacattatccagagt

SEQ ID NO: 552137 - DNA, 120 bp, Artificial Sequence
  ENSG00000168509_13 (sequence is synthesized)
cagatgaggctgcagtccagggttgaaattatcacagaataaggattctgggcaaggttactgcattccggatctctgtggggctcttcaccaatttttccagcctcatttatagtaaac

SEQ ID NO: 552138 - DNA, 120 bp, Artificial Sequence
  ENSG00000168509_14 (sequence is synthesized)
aaattgttctaatccatttactgcagatttcacccttataagtttagaggtcatgaaggttttaatgatcagtaaagatttaagggttgagatttttaagaggcaagagctgaaagcaga

SEQ ID NO: 552139 - DNA, 120 bp, Artificial Sequence
  ENSG00000168509_15 (sequence is synthesized)
agacatgatcattagccataagaaactcaaaggaggaagacataattagggaaagaagtctatttgatgaatatgtgtgtgtaaggtatgttctgctttcttgattcaaaaatgaagcag

SEQ ID NO: 552140 - DNA, 120 bp, Artificial Sequence
  ENSG00000168509_16 (sequence is synthesized)
gcattgtctagctcttaggtgaagggagtctctgcttttgaagaatggcacaggtaggacagaagtatcatccctaccccctaactaatctgttattaaagctacaaattcttcacacca

SEQ ID NO: 552141 - DNA, 120 bp, Artificial Sequence
  ENSG00000168509_17 (sequence is synthesized)
ggaagctggctaaactaattatggaaaatccatacaacggaatgctatgtgccagaagaaagaatgaggaagttcttcatgtctaatctctcattctcaatgcaagatcctccgctgcaa

SEQ ID NO: 552142 - DNA, 120 bp, Artificial Sequence
  ENSG00000168509_18 (sequence is synthesized)
atattctttctaatcctctaaccctccccactcccccaactcccacaccctacccccaccaacgttcctggaattttggacttagctatttttaaaaccgtcaactcagtagccacctcc

SEQ ID NO: 552143 - DNA, 120 bp, Artificial Sequence
  ENSG00000168515_0 (sequence is synthesized)
aggctcccggggctgagtctaaatcactcatcattggttaaagccgagctcacagcagaataagccaccatgaggctgtcggtgtgtctcctgctgctcacgctggccctttgctgctac

SEQ ID NO: 552144 - DNA, 120 bp, Artificial Sequence
  ENSG00000168515_1 (sequence is synthesized)
tttaaggcacctctggaagctgttgcagccaagatggaagtgaagaaatgcgtggatacgatggcctatgagaaaagagtgctaattacaaaaacattgggaaaaatagcagagaaatgt

SEQ ID NO: 552145 - DNA, 120 bp, Artificial Sequence
  ENSG00000168515_2 (sequence is synthesized)
gatcgctgagatgtaaaaagtttttaatgctagtttccaccatctttcaatgataccctgatcttcactgcagaatgtaaaggtttcaacgtcttgctctaataaatcacttgccctgaa

SEQ ID NO: 552146 - DNA, 120 bp, Artificial Sequence
  ENSG00000168517_0 (sequence is synthesized)
acactttaggcgtttcaccaagaggctggcgacatgctaggtcaggttgtccggagaatcggggctgaatgggagagatcttgagggcaagagcctcagagaccttcaggcaccgagctc

SEQ ID NO: 552147 - DNA, 120 bp, Artificial Sequence
  ENSG00000168517_1 (sequence is synthesized)
gtgaaggtttccaagtgcccctctctagctgctcccagggggaattagtggttgctacagtagtttaagagggtcgtggtttttcgcaacccgggcggcgagatggcgctttggtgtaag

SEQ ID NO: 552148 - DNA, 120 bp, Artificial Sequence
  ENSG00000168517_2 (sequence is synthesized)
cgaggaggacagtacaggacatgagtcctggtgagggacccgaggagcaggacagagaagacggcccctgaatcccatttggccccttgctggctggaggtgtgaaaaccagcggtggag

SEQ ID NO: 552149 - DNA, 120 bp, Artificial Sequence
  ENSG00000168517_3 (sequence is synthesized)
gcagccttcggggcctgcatttgagaataagggtgtcactagttccaggcgtctgctgaaagatttggaacagaagatgatggccactccgaaccagaccgcctgtaatgcagagtcacc

SEQ ID NO: 552150 - DNA, 120 bp, Artificial Sequence
  ENSG00000168517_4 (sequence is synthesized)
agtggccctggaggaggccaagacctctggtgccccggggagcccccaaacaccccctgagcgtcatgactctggtggttccctgcccctgacaccgcggatggagagccactcagagga

SEQ ID NO: 552151 - DNA, 120 bp, Artificial Sequence
  ENSG00000168517_5 (sequence is synthesized)
tgaagatcttgctggggctgtcggtggcctgggctggaacagtaggagtccccggacccagagcccagggggctgctcagcggaggctgtgctggcccggaagaaacaccgtcggcggcc

SEQ ID NO: 552152 - DNA, 120 bp, Artificial Sequence
  ENSG00000168517_6 (sequence is synthesized)
tcccgggtccgcgaagagatgttcgccaaaggccagcccgtggccccctacaacaccacccagttcctgatgaatgacagggacccggaggagcccaacttggatgtgccccatgggatc

SEQ ID NO: 552153 - DNA, 120 bp, Artificial Sequence
  ENSG00000168517_7 (sequence is synthesized)
tcccacccaggttccagtggggagagtgaggccggggacagtgatgggcggggccgagcgcacggtgagttccagcggaaggacttctctgagacttacgaacgcttccacaccgagagc

SEQ ID NO: 552154 - DNA, 120 bp, Artificial Sequence
  ENSG00000168517_8 (sequence is synthesized)
ctgcagggccgcagcaagcaggagctggtgcgagactacctggagctggagaagcggctgtcgcaggcggaggaggagactaggaggctgcagcagctgcaggcgtgcaccggccagcag

SEQ ID NO: 552155 - DNA, 120 bp, Artificial Sequence
  ENSG00000168517_9 (sequence is synthesized)
tcctgccgccaggtggaggagctggctgccgaggtccagaggctccggaccgaaaaccagcggcttcgtcaggagaaccagatgtggaaccgagagggctgccgctgtgatgaggagccg

SEQ ID NO: 552156 - DNA, 120 bp, Artificial Sequence
  ENSG00000168517_10 (sequence is synthesized)
ggtacctaggggtgcctcccagcctggtggacccaaggagaaggtcccatttcgtgcacactcaggccagctgggtctcaaggaggcaggtggcagatgaaaaccaccgtcaacaccctg

SEQ ID NO: 552157 - DNA, 120 bp, Artificial Sequence
  ENSG00000168517_11 (sequence is synthesized)
tgcgccctgagaacagctaaatcggttcagactcccacctcaccgtttccatagttggctcttttgtgtcatcttaccctttacagagaaattaaatggccttggtgggaccaaatggga

SEQ ID NO: 552158 - DNA, 120 bp, Artificial Sequence
  ENSG00000168517_12 (sequence is synthesized)
agctgctgcaactgcagcaagaggtagggctcaggcgttgggaattgcaccgacaggcagtcgcacagaaaggcacacagatgtagtggtgtgcatagcccttgacagcgaataggtgtc

SEQ ID NO: 552159 - DNA, 120 bp, Artificial Sequence
  ENSG00000168517_13 (sequence is synthesized)
cctctgtgcggggcctcgccgccatacccaggccgaatgggggtggggagggaagctggcagagctcggcctcaggatccgcgcccctgtggaaagaccgcagagggaagccgtttcacc

SEQ ID NO: 552160 - DNA, 120 bp, Artificial Sequence
  ENSG00000168517_14 (sequence is synthesized)
agcctctccccttctggggtctcgggaaacacgcggtaattaccgaagaaccccgcactctgtgagaggcgaggctgcggggctgccgggacggtttgaggaccgggctcggccgaggag

SEQ ID NO: 552161 - DNA, 120 bp, Artificial Sequence
  ENSG00000168517_15 (sequence is synthesized)
aatccccagcaggcaccgcgcgtccaggctctctcttcccccccatcttagtggcctgagcggcttgaccagagctgctgcaactgcagcaagaggtagggctcaggcgttgggaattgc

SEQ ID NO: 552162 - DNA, 80 bp, Artificial Sequence
  ENSG00000168522_0 (sequence is synthesized)
acctcagctgcggaccgaggcgagatggcggccaccgagggggtcggggaggctgcgcaagggggcgagcccgggcagcc

SEQ ID NO: 552163 - DNA, 120 bp, Artificial Sequence
  ENSG00000168522_1 (sequence is synthesized)
cagcagcacaaggaagagatggcggccgaggctggggaagccgtggcgtcccccatggacgacgggtttgtgagcctggactcgccctcctatgtcctgtacagggacagagcagaatgg

SEQ ID NO: 552164 - DNA, 120 bp, Artificial Sequence
  ENSG00000168522_2 (sequence is synthesized)
gctgatatagatccggtgccgcagaatgatggccccaatcccgtggtccagatcatttatagtgacaaatttagagatgtttatgattacttccgagctgtcctgcagcgtgatgaaaga

SEQ ID NO: 552165 - DNA, 120 bp, Artificial Sequence
  ENSG00000168522_3 (sequence is synthesized)
agtgaacgagcttttaagctaacccgggatgctattgagttaaatgcagccaattatacagtgtggcatttccggagagttcttttgaagtcacttcagaaggatctacatgaggaaatg

SEQ ID NO: 552166 - DNA, 120 bp, Artificial Sequence
  ENSG00000168522_4 (sequence is synthesized)
aactacatcactgcaataattgaggagcagcccaaaaactatcaagtttggcatcataggcgagtattagtggaatggctaagagatccatctcaggagcttgaatttattgctgatatt

SEQ ID NO: 552167 - DNA, 120 bp, Artificial Sequence
  ENSG00000168522_5 (sequence is synthesized)
cttaatcaggatgcaaagaattatcatgcctggcagcatcgacaatgggttattcaggaatttaaactttgggataatgagctgcagtatgtggaccaacttctgaaagaggatgtgaga

SEQ ID NO: 552168 - DNA, 120 bp, Artificial Sequence
  ENSG00000168522_6 (sequence is synthesized)
actagtaccacataatgaaagtgcatggaactatttgaaagggattttgcaggatcgtggtctttccaaatatcctaatctgttaaatcaattacttgatttacaaccaagtcatagttc

SEQ ID NO: 552169 - DNA, 120 bp, Artificial Sequence
  ENSG00000168522_7 (sequence is synthesized)
cccctacctaattgcctttcttgtggatatctatgaagacatgctagaaaatcagtgtgacaataaggaagacattcttaataaagcattagagttatgtgaaatcctagctaaagaaaa

SEQ ID NO: 552170 - DNA, 120 bp, Artificial Sequence
  ENSG00000168522_8 (sequence is synthesized)
ggacactataagaaaggaatattggagatacattggaagatcccttcaaagcaaacacagcacagaaaatgactcaccaacaaatgtacagcaataacaccatccagaagaacttgatgg

SEQ ID NO: 552171 - DNA, 120 bp, Artificial Sequence
  ENSG00000168522_9 (sequence is synthesized)
aatgcttttattttttattaagggaccctgcaggagtttcacacgagagtggtccttccctttgcctgtggtgtaaaagtgcatcacacaggtattgctttttaacaagaactgatgctc

SEQ ID NO: 552172 - DNA, 120 bp, Artificial Sequence
  ENSG00000168522_10 (sequence is synthesized)
cttgggtgctgctgctactcagactagctctaagtaatgtgattcttctaaagcaaagtcattggatgggaggaggaagaaaaagtcccataaaggaacttttgtagtcttatcaacata

SEQ ID NO: 552173 - DNA, 120 bp, Artificial Sequence
  ENSG00000168522_11 (sequence is synthesized)
taatctaatcccttagcatcagctcctccctcagtggtacatgcgtcaagatttgtagcagtaataactgcaggtcacttgtatgtaatggatgtgaggtagccgaagtttggttcagta

SEQ ID NO: 552174 - DNA, 120 bp, Artificial Sequence
  ENSG00000168522_12 (sequence is synthesized)
agcagggaatacagtcgttccatcagagctggtctgcacactcacattatcttgctatcactgtaaccaactaatgccaaaagaacggttttgtaataaaattatagctgtatctaaaaa

SEQ ID NO: 552175 - DNA, 120 bp, Artificial Sequence
  ENSG00000168522_13 (sequence is synthesized)
aaaactatcaagtttgaaattagccgggtgtggtggcgtgcctgtaatcccagctactcaaggagcgtgcctgtaatcccagctactcaaggagcgtgcctgtaatcccagctactcagg

SEQ ID NO: 552176 - DNA, 80 bp, Artificial Sequence
  ENSG00000168522_14 (sequence is synthesized)
gccaggccgaagttcccgtggcgccgcgtgggccggtgcatggcgctgggcccgggcggctgccgggacgtcgccgcttc

SEQ ID NO: 552177 - DNA, 76 bp, Artificial Sequence
  ENSG00000168522_15 (sequence is synthesized)
gtggaggttgcagtgagctgagctcaaaaaaataataataagatatattaatatcaagtcacatcaaatttatatc

SEQ ID NO: 552178 - DNA, 120 bp, Artificial Sequence
  ENSG00000168522_16 (sequence is synthesized)
aataagatatattaatatcaagtcacatcaaatttatatctatactgtggtcactccttctcttactagtgagtttggggtttttttccctcaaaattttcttggatgtcttttttcctg

SEQ ID NO: 552179 - DNA, 120 bp, Artificial Sequence
  ENSG00000168522_17 (sequence is synthesized)
ctttctgtatgtgtctttccaggctctatcatcaatttcatacttgtatccccctctatttcctttacttgcagctatcactaccttctgaatttgtgataaatcctgtgtcctcagttc

SEQ ID NO: 552180 - DNA, 120 bp, Artificial Sequence
  ENSG00000168522_18 (sequence is synthesized)
taccttctttgttgtagttttaatttattttttattcataaataatgggacatttctaattggatgatttttctaaatttttcctttaggaatttaaactttgggataatgagctgcagt

SEQ ID NO: 552181 - DNA, 120 bp, Artificial Sequence
  ENSG00000168522_19 (sequence is synthesized)
tagtaatctccttcacttgctcattcgttacaaacatgtttgcatgcctaccatatctcaggcactggggatacagcagatcaagatcctaccccatggaactaaaagaggacagagtac

SEQ ID NO: 552182 - DNA, 120 bp, Artificial Sequence
  ENSG00000168522_20 (sequence is synthesized)
tgagtggaacataggatgatagatttacaaataatgtagcatacttctacttcattgtatcttaagtttcttgaaatattgctactggagattggaaagaaatcttaatgttatggggta

SEQ ID NO: 552183 - DNA, 120 bp, Artificial Sequence
  ENSG00000168522_21 (sequence is synthesized)
ttgtctaagaagctttattttaaaaccatctcattaaattttgttgcattttagataatcgtccccagatgccatgttaccctagtgcagagtttggggctggataagtttttgttgtag

SEQ ID NO: 552184 - DNA, 120 bp, Artificial Sequence
  ENSG00000168522_22 (sequence is synthesized)
gtggctatcctgtgttttgtagggtatttagcagcatcctggccttaaaacaaaaatgttttcagacattgccaaatgtcccccgagcggtaaagtcacccccaagttgagaaccgctct

SEQ ID NO: 552185 - DNA, 120 bp, Artificial Sequence
  ENSG00000168522_23 (sequence is synthesized)
atacaaagagctgttattagagctagacatttctgaattggcatcaatttctatattgtatccataaacattagtagccacgatttttgtgaccttatttgtccattgtgtctgagtgtc

SEQ ID NO: 552186 - DNA, 120 bp, Artificial Sequence
  ENSG00000168522_24 (sequence is synthesized)
tgttttacaatttgaacaggcttgttgttttcagagcctgatgagatgggagtcataattttagtgtaaatgtgtttgaacaactgttgagtggagctgatttgtatagtgcatctcctc

SEQ ID NO: 552187 - DNA, 120 bp, Artificial Sequence
  ENSG00000168522_25 (sequence is synthesized)
tcttccaagctcttgattttgcctggatcgaggcagcttgctcttcttttatctgctctatacaggattctggtgacttaaaatttataaaaggctttaatccatgtctcaccttaacac

SEQ ID NO: 552188 - DNA, 120 bp, Artificial Sequence
  ENSG00000168522_26 (sequence is synthesized)
tctgctctgggcttttgtctggagcgtgcactacccctcaagcacacttcatgctttttttctagtgctctcctatataaagctgtacaggcatacctggttttttgagccttgtatata

SEQ ID NO: 552189 - DNA, 120 bp, Artificial Sequence
  ENSG00000168522_27 (sequence is synthesized)
tttttgtttgttttttgttttttttaacaagttgaagcatcttgagcaatcttgagttgagcatgtcttcattgccattctttctaacagcatgtgctcacttgtgtctccgtgtcacat

SEQ ID NO: 552190 - DNA, 120 bp, Artificial Sequence
  ENSG00000168522_28 (sequence is synthesized)
tccgtgtcacattttggtactcctcagtatttcacattttttcataatcattatatctgttccagtgatttgtgatcagtcatctttgatcagtcatctattgtaattgtttgggggtgc

SEQ ID NO: 552191 - DNA, 120 bp, Artificial Sequence
  ENSG00000168522_29 (sequence is synthesized)
tctattgtaattgtttgggggtgccactaactgcacccatataaaacagagaatatcactgttgcatgtgttccaccatctctctccctcacctcaggcctccctattccctgagacaca

SEQ ID NO: 552192 - DNA, 120 bp, Artificial Sequence
  ENSG00000168522_30 (sequence is synthesized)
accctacagtgtcctctgagtgttcaagtgaaaggaagagtcacagcctctcactttaaatcaaaagccagaagtgattaagcttagtgaggaacacatatcaaaagctgagataggtcc

SEQ ID NO: 552193 - DNA, 120 bp, Artificial Sequence
  ENSG00000168522_31 (sequence is synthesized)
aaagctaggcctcttgcaccaaacaccaaactcataagaaagagttcttgaaggaaattaaaagtgctgctccagtgaacacctggacaaaacagcattattgctggtatagagaaagtt

SEQ ID NO: 552194 - DNA, 120 bp, Artificial Sequence
  ENSG00000168522_32 (sequence is synthesized)
attcccttaagccaaagcctaatccagaggaagccctaattctctttaatttgatgaaggctgagagaagtgaggaagctgcagaagaaaacttggatgctagcagaggttggttcatga

SEQ ID NO: 552195 - DNA, 120 bp, Artificial Sequence
  ENSG00000168522_33 (sequence is synthesized)
aagaaaacttggatgctagcagaggttggttcatgaggtataagaaagaagccatctccatagcatggaagtgcaaggtgaagcagcaagtgctgctggagaagctgcagtgagttttcc

SEQ ID NO: 552196 - DNA, 120 bp, Artificial Sequence
  ENSG00000168522_34 (sequence is synthesized)
aagcagcaagtgctgctggagaagctgcagtgagttttccagatcccgctcagatcactaatgaaggtggctgcatgtaaacagaagattttcagtgtagatgaaacagccttctattgg

SEQ ID NO: 552197 - DNA, 120 bp, Artificial Sequence
  ENSG00000168522_35 (sequence is synthesized)
gcactgcttcaaagcttcacacagctggctgaatcttgttagggcccaatgcagctggtgacttgaagttgaaaccagtgttcggtgatgattctggaaatcttagggcccttaagaatt

SEQ ID NO: 552198 - DNA, 62 bp, Artificial Sequence
  ENSG00000168522_36 (sequence is synthesized)
tctttgaggtctgttgttcagaaaaatttcttggaaaatatgattgttcatggacaacggac

SEQ ID NO: 552199 - DNA, 120 bp, Artificial Sequence
  ENSG00000168522_37 (sequence is synthesized)
aaaatttcttggaaaatatgattgttcatggacaacggacctcatcacccaagagctctaatggagatgtgcaaggagatgctgttttcatgcctgcgaacacaacatccattctgcagc

SEQ ID NO: 552200 - DNA, 120 bp, Artificial Sequence
  ENSG00000168522_38 (sequence is synthesized)
ccatggataaaggagtcattttgattttaaagtctcactatttaagaaataaattttgtaaggctatgagctaccatagatagtgattcctccaatgaatctgcagagtcaattgaaaac

SEQ ID NO: 552201 - DNA, 120 bp, Artificial Sequence
  ENSG00000168522_39 (sequence is synthesized)
gaatctgcagagtcaattgaaaaccttctgggaagaatttaccattctaggtgctattaggaatattcgtgattcataggaggaggtcagaataccaacattaacaggagtttggaagaa

SEQ ID NO: 552202 - DNA, 86 bp, Artificial Sequence
  ENSG00000168522_40 (sequence is synthesized)
atggatgactttgaggggttcaagactttagaggaagaaggaactgctgctgtggtggaaacagcaaggacgaactgctgcatcaa

SEQ ID NO: 552203 - DNA, 120 bp, Artificial Sequence
  ENSG00000168522_41 (sequence is synthesized)
ttgatcagatgaggagtcgcttcttatggatgagcaaaagaagtggtttctcaagatggaatctaatcctggcaacgacgttgtgaaatgacattgttgaaatgacaacaaaggatttta

SEQ ID NO: 552204 - DNA, 120 bp, Artificial Sequence
  ENSG00000168522_42 (sequence is synthesized)
aatattgtaaatattacctgaacttagttgataaagcagcaggatatatgagaggattgactccagttttgaaaagttttactgtgagtaaaatgctatcagacagcatcacatgctaca

SEQ ID NO: 552205 - DNA, 120 bp, Artificial Sequence
  ENSG00000168522_43 (sequence is synthesized)
tcttattttaagaaattgccacagccatctcatccttcagcacccagcaccctaccctgatcagtcagcagccatcaacatggaggccagaccctccaccagcagaaagattacgacttg

SEQ ID NO: 552206 - DNA, 120 bp, Artificial Sequence
  ENSG00000168522_44 (sequence is synthesized)
tagcattttttagcaataaagtattttttaattgaggtatgtacattgtttttttagatatgatgctattgcatactagactacaatatagtgtaaacataatttatatgtgctgggaaa

SEQ ID NO: 552207 - DNA, 120 bp, Artificial Sequence
  ENSG00000168522_45 (sequence is synthesized)
tagtgtaaacataatttatatgtgctgggaaaaagaaaagtcgtgtgacttgcttaattgtgataaaattgctttactgaaccttccatatctgcaaggtattcctgtattgttcagtat

SEQ ID NO: 552208 - DNA, 120 bp, Artificial Sequence
  ENSG00000168522_46 (sequence is synthesized)
ggtagctactagccacatatggctatttaagtttcaatcggtatgattataaaaaattaaaaatacaattatttcattgcacatgtcctattttgggcgttcagtacgtacatgtggcta

SEQ ID NO: 552209 - DNA, 120 bp, Artificial Sequence
  ENSG00000168522_47 (sequence is synthesized)
gtgactaccatattggacagcacatacaaaacatttgcatcatcactggcagttttattgaacattattcgtctaaagattgacagtagttagcggtaacaaagcattttaaaaattgaa

SEQ ID NO: 552210 - DNA, 120 bp, Artificial Sequence
  ENSG00000168522_48 (sequence is synthesized)
tatgaagagttttcaaaatgcaaacgtttagccttttcagaggcagatcactggcttcctgttgccaaatagaaacagaaataattacccaagaatctaaaagagcttcctatacttagg

SEQ ID NO: 552211 - DNA, 120 bp, Artificial Sequence
  ENSG00000168522_49 (sequence is synthesized)
atttattttccttttaagatgggtaaaagaagtatttaaaatgtgaagagtagctgtaggtatctagaatttacagtttgttaaattttttttaactctaagcatacacagatagatgta

SEQ ID NO: 552212 - DNA, 120 bp, Artificial Sequence
  ENSG00000168522_50 (sequence is synthesized)
cataattatttttgtcatttttttctttttattataaaagtaatgcaatgtagttatggggggggaaattgtactaaattctataaagtaaaaagtcaaagtcttttactgttcttcatc

SEQ ID NO: 552213 - DNA, 120 bp, Artificial Sequence
  ENSG00000168522_51 (sequence is synthesized)
ccacatcccattttccagagtgagctataattgggtgaatttttccaaactttataaatacacttgcaaacatttatacacagcaacctagataataatgttacaggcattgccttttca

SEQ ID NO: 552214 - DNA, 120 bp, Artificial Sequence
  ENSG00000168522_52 (sequence is synthesized)
gttaatgtgtcatggccctttttctagactatgagtgcatagtcttctagtactaccaataacagcatttatcaagcatttactatatgccactaattctaacagctctgtgagacactt

SEQ ID NO: 552215 - DNA, 120 bp, Artificial Sequence
  ENSG00000168522_53 (sequence is synthesized)
catgaagaacttgaggttccaggtaattctgtaatttgcccaagagcacataatttatgggaccaggatttgaagcgaggcagcctgacctcaaagttcatcggtctttttgtttgtttg

SEQ ID NO: 552216 - DNA, 89 bp, Artificial Sequence
  ENSG00000168522_54 (sequence is synthesized)
tctgtcacccaggctggagtgcagtgacggatcatagctcactgctgccttgagctcctgagctgaaggaatcctcccacctcagcctg

SEQ ID NO: 552217 - DNA, 89 bp, Artificial Sequence
  ENSG00000168522_55 (sequence is synthesized)
ctgggactacaggcatgtgccactgcatccagctaattgttaaaattttttgtagcgatgatctcctggcctcaagcagtcttcccgct

SEQ ID NO: 552218 - DNA, 120 bp, Artificial Sequence
  ENSG00000168522_56 (sequence is synthesized)
acagatgtgagccaccatgcccagctaaagttcatgttttaaccataaaaataggtaatgctttagtacacatgtatgtaaataaaaatttagatattgccaaaatgaaattaagaatct

SEQ ID NO: 552219 - DNA, 120 bp, Artificial Sequence
  ENSG00000168522_57 (sequence is synthesized)
ttgccaaaatgaaattaagaatcttaaacaaggaccagctaagacctgcggggacatggtttcgcaaataattggaaacattaagtcatgtaaaagtagttggaaaagtatttttataat

SEQ ID NO: 552220 - DNA, 120 bp, Artificial Sequence
  ENSG00000168522_58 (sequence is synthesized)
gttgaatgagtttattattactctgtggaaaaaaaaaaattatagtaacagcactgcagcagaaccaagactaccaagctttagtcagtgacttactcatctgagcaattatgtggtaaa

SEQ ID NO: 552221 - DNA, 120 bp, Artificial Sequence
  ENSG00000168522_59 (sequence is synthesized)
gcaagttctgtggcttccttgggatttgtgataattgagtctgaattatatttaatctgtttaaggggaagataaaggtatggagcacccattttgacagggaatcacatcacagtttac

SEQ ID NO: 552222 - DNA, 120 bp, Artificial Sequence
  ENSG00000168522_60 (sequence is synthesized)
tagtcatcttgctttggaatataagaaatacattcttgtgttgatttttcatttttattctttgcctatgtaatttccatgccattttttaatgatagctaaagattatgtaaattctcc

SEQ ID NO: 552223 - DNA, 120 bp, Artificial Sequence
  ENSG00000168522_61 (sequence is synthesized)
tatttcagtgactagggatttgttgggacgtaagtagagcttagactgtttccccaaggttgctttaccaataaatggaaagtttccttcttttagctgatgtttccttcaaaaggaaaa

SEQ ID NO: 552224 - DNA, 120 bp, Artificial Sequence
  ENSG00000168522_62 (sequence is synthesized)
tcttccatattatttaaaggaaatattttatgttcctttttttcctattgtgaattgaagcttttagattagttttgtgtccttccctagaactgaattgacagctgcagccttaaggga

SEQ ID NO: 552225 - DNA, 120 bp, Artificial Sequence
  ENSG00000168522_63 (sequence is synthesized)
ttctcgtgatttaaatatgactgagagaggtgccacagtacactaagaaacgctgacacaagtgaaagtgtgtttacaaagctgtgccacagtcttagtaaaactgtgtcttggccgggc

SEQ ID NO: 552226 - DNA, 120 bp, Artificial Sequence
  ENSG00000168522_64 (sequence is synthesized)
cctgggtgacagagcaagactccgtttcagaaaaaaaaaaaaactgtgtctcatcattgcactgttcttttaaaattgtatatatatatttttcttgcagatacactctggaaatgatta

SEQ ID NO: 552227 - DNA, 120 bp, Artificial Sequence
  ENSG00000168522_65 (sequence is synthesized)
gaatccaaccatgattacattatgagccctgtaagttattaatatcaatgtaactgtaattattgtcattttaaaaacactagagtcccttttcttctgtatttgaatgtaaccactggt

SEQ ID NO: 552228 - DNA, 120 bp, Artificial Sequence
  ENSG00000168522_66 (sequence is synthesized)
gggtttattttctcttgatctttctactgcttttgttcttccttcacaaaatcaagtctttgttttttgttgttgtttacaggattttgcaggatcgtggtctttccaaatatcctaatc

SEQ ID NO: 552229 - DNA, 86 bp, Artificial Sequence
  ENSG00000168522_67 (sequence is synthesized)
ggagatacccatattaattaaagttcacaatggaagttatggtgatgcactaatgtagtcccagctactcagcaaagtgagccaag

SEQ ID NO: 552230 - DNA, 120 bp, Artificial Sequence
  ENSG00000168522_68 (sequence is synthesized)
gcatggcgctgggcccgggcggctgccgggacgtcgccgcttcccagggcggcgccggcgcgagaccgcggggacgcgaagcagcgaggtctcggctttccgcctgctttaagccacgcg

SEQ ID NO: 552231 - DNA, 120 bp, Artificial Sequence
  ENSG00000168522_69 (sequence is synthesized)
gaaactgctgcacccttgactgcactcgttcagctgttcaggcgtcgcgattcgtaaatataagaaatttcccgctctcttccacggcttcccagaacgctgtgtcgctaacaaccagtg

SEQ ID NO: 552232 - DNA, 120 bp, Artificial Sequence
  ENSG00000168522_70 (sequence is synthesized)
aagacccaagggctagggtgcagttctggtagccgggcaggaaaccagggccagatttgctcaccctaaaaacgaagtgtgagggcttccagtggctggctctgcttggagcccagagac

SEQ ID NO: 552233 - DNA, 120 bp, Artificial Sequence
  ENSG00000168522_71 (sequence is synthesized)
attttcatccaatctgtattttagcgcctcgtatcagccaggctaaaggctgaaaagagatttgctactgaacctctcttaagtctccctgcatcgcctcgtacataatacaagtgaggt

SEQ ID NO: 552234 - DNA, 120 bp, Artificial Sequence
  ENSG00000168522_72 (sequence is synthesized)
gtactggggactgcggtaactttcttgcctctgtcaccccgtctttgctgacacccagttccatcagttctttgctttcagatggtaatgttgattcctaattccctgtgaacctgcaga

SEQ ID NO: 552235 - DNA, 120 bp, Artificial Sequence
  ENSG00000168528_0 (sequence is synthesized)
ggcgccgggcgcccgaagccgggagccgccgccatgggggcctgcctgggagcctgctccctgctcagctgcgcgtcctgcctctgcggctctgccccctgcatcctgtgcagctgctgc

SEQ ID NO: 552236 - DNA, 120 bp, Artificial Sequence
  ENSG00000168528_1 (sequence is synthesized)
gcatcctgtgcagctgctgccccgccagccgcaactccaccgtgagccgcctcatcttcacgttcttcctcttcctgggggtgctggtgtccatcattatgctgagcccgggcgtggaga

SEQ ID NO: 552237 - DNA, 120 bp, Artificial Sequence
  ENSG00000168528_2 (sequence is synthesized)
gtcagctctacaagctgccctgggtgtgtgaggagggggccgggatccccaccgtcctgcagggccacatcgactgtggctccctgcttggctaccgcgctgtctaccgcatgtgcttcg

SEQ ID NO: 552238 - DNA, 120 bp, Artificial Sequence
  ENSG00000168528_3 (sequence is synthesized)
ccacggcggccttcttcttctttttcaccctgctcatgctctgcgtgagcagcagccgggacccccgggctgccatccagaatgggttttggttctttaagttcctgatcctggtgggcc

SEQ ID NO: 552239 - DNA, 120 bp, Artificial Sequence
  ENSG00000168528_4 (sequence is synthesized)
tcaccgtgggtgccttctacattcctgacggctccttcaccaacatctggttctacttcggcgtcgtgggctccttcctcttcatcctcatccagctggtgctgctcatcgactttgcgc

SEQ ID NO: 552240 - DNA, 120 bp, Artificial Sequence
  ENSG00000168528_5 (sequence is synthesized)
actcctggaaccagcggtggctgggcaaggccgaggagtgcgattcccgtgcctggtacgcaggcctcttcttcttcactctcctcttctacttgctgtcgatcgcggccgtggcgctga

SEQ ID NO: 552241 - DNA, 120 bp, Artificial Sequence
  ENSG00000168528_6 (sequence is synthesized)
tgttcatgtactacactgagcccagcggctgccacgagggcaaggtcttcatcagcctcaacctcaccttctgtgtctgcgtgtccatcgctgctgtcctgcccaaggtccaggacgccc

SEQ ID NO: 552242 - DNA, 120 bp, Artificial Sequence
  ENSG00000168528_7 (sequence is synthesized)
ccatttgccaacccagctgggcaacgagacagttgtggcaggccccgagggctatgagacccagtggtgggatgccccgagcattgtgggcctcatcatcttcctcctgtgcaccctctt

SEQ ID NO: 552243 - DNA, 120 bp, Artificial Sequence
  ENSG00000168528_8 (sequence is synthesized)
catcagtctgcgctcctcagaccaccggcaggtgaacagcctgatgcagaccgaggagtgcccacctatgctagacgccacacagcagcagcagcaggtggcagcctgtgagggccgggc

SEQ ID NO: 552244 - DNA, 120 bp, Artificial Sequence
  ENSG00000168528_9 (sequence is synthesized)
ctttgacaacgagcaggacggcgtcacctacagctactccttcttccacttctgcctggtgctggcctcactgcacgtcatgatgacgctcaccaactggtacaagcccggtgagacccg

SEQ ID NO: 552245 - DNA, 120 bp, Artificial Sequence
  ENSG00000168528_10 (sequence is synthesized)
gaagatgatcagcacgtggaccgccgtgtgggtgaagatctgtgccagctgggcagggctgctcctctacctgtggaccctggtagccccactcctcctgcgcaaccgcgacttcagctg

SEQ ID NO: 552246 - DNA, 120 bp, Artificial Sequence
  ENSG00000168528_11 (sequence is synthesized)
aggcagcctcacagcctgccatctggtgcctcctgccacctggtgcctctcggctcagtgacagccaacctgccccctccccacaccaatcagccaggctgagcccccacccctgcccca

SEQ ID NO: 552247 - DNA, 120 bp, Artificial Sequence
  ENSG00000168528_12 (sequence is synthesized)
gctccaggacctgcccctgagccgggccttctagtcgtagtgccttcagggtccgaggagcatcaggctcctgcagagccccatccccccgccacacccacacggtggagctgcctcttc

SEQ ID NO: 552248 - DNA, 120 bp, Artificial Sequence
  ENSG00000168528_13 (sequence is synthesized)
cttcccctcctccctgttgcccatactcagcatctcggatgaaagggctcccttgtcctcaggctccacgggagcggggctgctggagagagcggggaactcccaccacagtggggcatc

SEQ ID NO: 552249 - DNA, 120 bp, Artificial Sequence
  ENSG00000168528_14 (sequence is synthesized)
cggcactgaagccctggtgttcctggtcacgtcccccaggggaccctgcccacttcctggacttcgtgccttactgagtctctaagactttttctaataaacaagccagtgcgtgtacca

SEQ ID NO: 552250 - DNA, 120 bp, Artificial Sequence
  ENSG00000168528_15 (sequence is synthesized)
tactttagcctttgctctgaaatcccatgcacgctttgtgaggaaggacagccttggttggggggtgtttatggggagagcagagtggatggtgcgtatgtgaatacctctccccagatg

SEQ ID NO: 552251 - DNA, 120 bp, Artificial Sequence
  ENSG00000168528_16 (sequence is synthesized)
ctcccccaatcccaagctctcattatcttatatgcatattcataagggatggccctgctctgtaaatgggtcagaagcaggaaatagaggccagtacagacagcgaagcccaagggatag

SEQ ID NO: 552252 - DNA, 120 bp, Artificial Sequence
  ENSG00000168528_17 (sequence is synthesized)
gagggctcaaagccggcacacatctgagtcctcatggacgggaggatgatgagaagcatgaggctgagagaggaggagtcacccggacccagccacacagcgtcctgcctctgcggctct

SEQ ID NO: 552253 - DNA, 120 bp, Artificial Sequence
  ENSG00000168528_18 (sequence is synthesized)
gtatttgtctggttcctgtctgtgtccgtcgttcgtccgactgtctttgtccgtctgctgtcttctgtccgtctgcccgtccgcccgtccgtccctcagtctctctgcggtccctttacc

SEQ ID NO: 552254 - DNA, 120 bp, Artificial Sequence
  ENSG00000168528_19 (sequence is synthesized)
gtcctcagtctggctcgcgctgcctctcaggcacttccccagctcgccccggatcatctgggccccagcgcggagactgggatgggagcggagggagccccggactttcttagctgccct

SEQ ID NO: 552255 - DNA, 120 bp, Artificial Sequence
  ENSG00000168528_20 (sequence is synthesized)
agtatcacatagctgctgactgtgactgtgcttttgggggtgcaagagacagagctactctggccccatgcaggaggttcaaatctgggagtaaaggctgatgggctggccaggacacca

SEQ ID NO: 552256 - DNA, 120 bp, Artificial Sequence
  ENSG00000168528_21 (sequence is synthesized)
agaaatgaagctctttatccatgtcctcacttcatctcctcagtagtcccctcagatagctggggtaaaaaaacttatctttattttacagatgagaagcatgaggctgagagaggagga

SEQ ID NO: 552257 - DNA, 120 bp, Artificial Sequence
  ENSG00000168528_22 (sequence is synthesized)
cgagtgaggcgggtgcgggtcgtcacggaccaccgggcggaactctgggttgggagagcaggaatcgagggaggttcgggtgtgcgcggggagtgcccggtcgcgggttcgggacctgtg

SEQ ID NO: 552258 - DNA, 120 bp, Artificial Sequence
  ENSG00000168528_23 (sequence is synthesized)
gggaggccaacctctgttctgtagctgcagccgcagaggggaggggctccagcaagaccccggctgggaggcccgttctcccttccctttccccagcccccctctcctttcctcttcccc

SEQ ID NO: 552259 - DNA, 120 bp, Artificial Sequence
  ENSG00000168528_24 (sequence is synthesized)
tcattaaatctgaggttcattcaggcagccccctccccctctggccccacacaaagaggccctgagagggagaaggggctgcagcggctgctgaatctcgggactcgctttcctttgtcc

SEQ ID NO: 552260 - DNA, 120 bp, Artificial Sequence
  ENSG00000168528_25 (sequence is synthesized)
gtgtgtgagagagagagagagagagaggagggggtgtaggggagagctgagggtctagagatttactttacagcctttttctgagaatgagatcagcatagacagcacagagaggcaaga

SEQ ID NO: 552261 - DNA, 120 bp, Artificial Sequence
  ENSG00000168528_26 (sequence is synthesized)
gaatgagatcagcatagacagcacagagaggcaagagagcctctcgcctcattaggcctccatttttcgtgtgtgtgtgtgcgtgtgcatgtgcgtgtgcaggaggaggaatcaagctgg

SEQ ID NO: 552262 - DNA, 120 bp, Artificial Sequence
  ENSG00000168528_27 (sequence is synthesized)
tgcctgaaatccctcccagcccaaagaattcaaggtttgggccaggtctctgccaacaagggtttgcttcctggtgagggaggcagagcttccacagtggacctgatttccatcggttgc

SEQ ID NO: 552263 - DNA, 120 bp, Artificial Sequence
  ENSG00000168530_0 (sequence is synthesized)
ccagggatgaccccactcagggaccggagcagccctcaactcactcttcagcttccctgctgtgttgcagcccagccgctccatcatgtccttcagtgctgaccagattgctgaattcaa

SEQ ID NO: 552264 - DNA, 120 bp, Artificial Sequence
  ENSG00000168530_1 (sequence is synthesized)
ggaggcatttctcctgtttgacagaacaggtgattccaagatcaccttaagccaggtcggtgatgtccttcgagctctgggcacaaatcccaccaatgcagaggtcaggaaagttctggg

SEQ ID NO: 552265 - DNA, 120 bp, Artificial Sequence
  ENSG00000168530_2 (sequence is synthesized)
aaaccccagcaatgaagagctgaatgccaagaaaattgagtttgaacaatttctgcctatgatgcaagccatttccaacaacaaggaccaggccacctatgaagactttgttgagggtct

SEQ ID NO: 552266 - DNA, 120 bp, Artificial Sequence
  ENSG00000168530_3 (sequence is synthesized)
agtcatgggtgctgaactccgccatgttctagccaccctgggtgaaaagatgaaagaggaagaagtggaagccctgatggcaggtcaagaagactccaatggctgcatcaactacgaagc

SEQ ID NO: 552267 - DNA, 120 bp, Artificial Sequence
  ENSG00000168530_4 (sequence is synthesized)
ttttgtcaagcacatcatgtctatctgaatggagctctcaagaacaagcattgtttaggaagactggctggaaacttattttaatcacacccatgacaaactctccagatctgtttacca

SEQ ID NO: 552268 - DNA, 120 bp, Artificial Sequence
  ENSG00000168530_5 (sequence is synthesized)
tcattcaggaaaacaaagcaatctggacggttcaagactgagcaactccctgaatttttatacatcttcagtttttctctgaattgaattcataccacacaaacaaagtgtctgctgctc

SEQ ID NO: 552269 - DNA, 120 bp, Artificial Sequence
  ENSG00000168530_6 (sequence is synthesized)
tagatgagaagaataaaatattgacaatctcaaatccaagcaccattctttattatctaccatgaatcaacaaacattcttaaaacaataaatcaataaacaattttggtcagtctggaa

SEQ ID NO: 552270 - DNA, 120 bp, Artificial Sequence
  ENSG00000168530_7 (sequence is synthesized)
actcagggaccggagcagccctcaactcactcttcagcttccctgctgtgttgcagcccagccgctccatcatgctttttatgttcctagattcaaaagtatcctaaggcaaccttctaa

SEQ ID NO: 552271 - DNA, 120 bp, Artificial Sequence
  ENSG00000168530_8 (sequence is synthesized)
tgccaagacacctacatagcttcctaaaaatctcagagcaaccagcactcattcttctgtcaatgcatttgaaagagtactagttttttttctttctttctcttcttcgccactgcagtc

SEQ ID NO: 552272 - DNA, 120 bp, Artificial Sequence
  ENSG00000168530_9 (sequence is synthesized)
aacactctgggtccatcttcaagacactgggctgtggatcaacccaaccaccactcctcttccaagaatcattttgacaggttcttttggaggaactccttctctttttaacccaccctt

SEQ ID NO: 552273 - DNA, 120 bp, Artificial Sequence
  ENSG00000168530_10 (sequence is synthesized)
ttaaaaaaaaaaatggcaccaaagaaagacgtgaagaaacctgtggctgcggctgcggctgccccagccccggcaccggcacctgcacctgcccctgccccagccaaacccaaagaagaa

SEQ ID NO: 552274 - DNA, 120 bp, Artificial Sequence
  ENSG00000168538_0 (sequence is synthesized)
gggtacagggaagtctcgcctgttggaactggctgtggggctgcggcggtggggacgggccacggcgttctgtgacatccccccgcctcccctcgtcttctcccggctggcggcgaccgg

SEQ ID NO: 552275 - DNA, 120 bp, Artificial Sequence
  ENSG00000168538_1 (sequence is synthesized)
cctcagctgcagcgggcccggggcgtggggcctgggttttttgtgacatcgtaaacatgagccccacacagtgggacttccctgtggaattatgttgccggcctatggcctttgttactc

SEQ ID NO: 552276 - DNA, 120 bp, Artificial Sequence
  ENSG00000168538_2 (sequence is synthesized)
taacgggcctggatgtagtttataatgcagtccatcgagctgtctgggacgccttctgtgcaaatcggagagctgatcgagtaccaatttctttcaaggtgctcccaggtgaccatgagt

SEQ ID NO: 552277 - DNA, 120 bp, Artificial Sequence
  ENSG00000168538_3 (sequence is synthesized)
atcccaaatgtagacccaagagaacttcatatgagtggtacattcctaaagggatcttaaagactggctggatgaataagcatctgaatctggtgccagccctggtggttgtgttctatg

SEQ ID NO: 552278 - DNA, 120 bp, Artificial Sequence
  ENSG00000168538_4 (sequence is synthesized)
aactggactgggatgagcctcagtggaaagaaaagcagtctgagtgcgccaccagagtggaaatagtcaggcaaagtttacaaggaagaaacacaaaagttgcagtggttctgattcaga

SEQ ID NO: 552279 - DNA, 120 bp, Artificial Sequence
  ENSG00000168538_5 (sequence is synthesized)
agaaaacccctttgcccccaggagaagatgtcattgcttcagaaagggctgcagctttatgcaatgcatgtgaactctcaggaaagtctttgtttgtactgccgcacactgaccaccttg

SEQ ID NO: 552280 - DNA, 120 bp, Artificial Sequence
  ENSG00000168538_6 (sequence is synthesized)
tgggttatattataagattggaaaatgccttttatgaacatgcacagacttattactacactgagatcagaagagtgaaatctcataaagaatttttgaataaaacaacacaccagcttt

SEQ ID NO: 552281 - DNA, 120 bp, Artificial Sequence
  ENSG00000168538_7 (sequence is synthesized)
tatttgttaggcatcagttcaaaatagctttcttcagtgagttgaaacaagatacacaaaatgcgctgaagaattataggaccgcctataatcttgtacacgaattgagagcccatgaaa

SEQ ID NO: 552282 - DNA, 120 bp, Artificial Sequence
  ENSG00000168538_8 (sequence is synthesized)
ctaatattctggaaattaagactatggcaggatttataaactacaagatctgtaggctgtgttttcaacacaacaccccattggatgcaattgctcagttccgaaaacacatcgacttgt

SEQ ID NO: 552283 - DNA, 120 bp, Artificial Sequence
  ENSG00000168538_9 (sequence is synthesized)
gtaagaaaaagattggaagtgcagagctgtcttttgagcatgatgcatggatgtctaaacaattccaggcctttggagatttatttgatgaagctattaagttagggttaacagctattc

SEQ ID NO: 552284 - DNA, 120 bp, Artificial Sequence
  ENSG00000168538_10 (sequence is synthesized)
aaactcagaatcctggtttctattaccagcaggcagcatactatgcccaggagcggaaacagcttgcaaaaaccctctgtaaccacgaagcttctgtaatgtatcccaatcctgatccct

SEQ ID NO: 552285 - DNA, 120 bp, Artificial Sequence
  ENSG00000168538_11 (sequence is synthesized)
tagaaacacaaacaggcgttcttgacttttatggacaaagatcatggcgacaaggaatactaagttttgatctttctgatcctgaaaaagaaaaggtgggaattcttgccattcagctga

SEQ ID NO: 552286 - DNA, 120 bp, Artificial Sequence
  ENSG00000168538_12 (sequence is synthesized)
aggagagaaatgttgttcactctgagataatcataactcttctgagcaatgctgttgcacagttcaagaagtataagtgcccgcgaatgaaaagtcacctaatggttcagatgggagagg

SEQ ID NO: 552287 - DNA, 120 bp, Artificial Sequence
  ENSG00000168538_13 (sequence is synthesized)
aatattattacgcaaaggattataccaaagctttgaagttgctggattatgtgatgtgtgattatcggagtgaaggatggtggactctgctcacttctgtattaactacagctctgaagt

SEQ ID NO: 552288 - DNA, 120 bp, Artificial Sequence
  ENSG00000168538_14 (sequence is synthesized)
gctcctacctcatggcccaattaaaggattacattacttactccctagaactccttggtagagcttcaactctgaaagatgaccagaagtctcggatagaaaagaacctcataaatgttt

SEQ ID NO: 552289 - DNA, 120 bp, Artificial Sequence
  ENSG00000168538_15 (sequence is synthesized)
taatgaatgaaagtcctgatccagaacccgactgtgatatcttagctgtgaaaactgctcagaagctgtgggcagaccgaatttctctggctggcagcaatattttcacaataggagtac

SEQ ID NO: 552290 - DNA, 120 bp, Artificial Sequence
  ENSG00000168538_16 (sequence is synthesized)
aggactttgtgccatttgtgcagtgcaaagccaagtttcatgccccaagttttcatgttgatgttcctgttcagtttgatatttatctgaaggctgattgtccacatcccattaggtttt

SEQ ID NO: 552291 - DNA, 120 bp, Artificial Sequence
  ENSG00000168538_17 (sequence is synthesized)
ccaagctctgtgtcagctttaataatcaggaatacaaccagttctgtgtaatagaagaagcatccaaagcaaatgaagttttagaaaatctgactcaaggaaagatgtgcctagttcctg

SEQ ID NO: 552292 - DNA, 120 bp, Artificial Sequence
  ENSG00000168538_18 (sequence is synthesized)
gctctgggcaatgagacgggaagatgtgtggttttaaattggcagggaggaggaggagatgctgcttcctcccaagaagccttacaggcagctcggtctttcaaaaggcgacctaagcta

SEQ ID NO: 552293 - DNA, 120 bp, Artificial Sequence
  ENSG00000168538_19 (sequence is synthesized)
cctgacaatgaagttcactgggacagcattataattcaggcaagcacaatgatcatatccagagtcccaaacatttctgtacatctgctacatgaaccccctgcactgactaatgaaatg

SEQ ID NO: 552294 - DNA, 120 bp, Artificial Sequence
  ENSG00000168538_20 (sequence is synthesized)
tattgtttggttgtgactgttcagtcccatgaaaagacccaaatcagagatgtgaagctcaccgctggcttaaaaccaggacaggatgccaatttaactcagaagactcacgtgactctt

SEQ ID NO: 552295 - DNA, 120 bp, Artificial Sequence
  ENSG00000168538_21 (sequence is synthesized)
catggaacagaactgtgtgatgaatcctacccggctttactcactgacattcctgttggagacttacatccaggggaacagctggaaaaaatgttgtatgttcgctgtggaacagtgggt

SEQ ID NO: 552296 - DNA, 120 bp, Artificial Sequence
  ENSG00000168538_22 (sequence is synthesized)
tccagaatgtttcttgtatatgtttcttacctgataaatacaaccgttgaagaaaaagaaattgtttgcaagtgtcacaaggatgaaactgtaacaattgaaacagtctttccatttgat

SEQ ID NO: 552297 - DNA, 120 bp, Artificial Sequence
  ENSG00000168538_23 (sequence is synthesized)
gttgcggttaaatttgtttctaccaagtttgagcacctggaaagggtttatgctgacatcccctttctgttgatgacggacctcttaagtgcctcaccctgggccctcactattgtttcc

SEQ ID NO: 552298 - DNA, 120 bp, Artificial Sequence
  ENSG00000168538_24 (sequence is synthesized)
agtgagctccagcttgctccatccatgaccacagtggaccagctcgagtctcaagtggacaatgttatcttacagactggagagagtgctagtgaatgcttttgtcttcaatgcccatct

SEQ ID NO: 552299 - DNA, 120 bp, Artificial Sequence
  ENSG00000168538_25 (sequence is synthesized)
cttggaaatattgaaggtggagtagcaaccgggcattatattatctcttggaaaaggacctcagcaatggagaatatccccatcatcacaactgtcatcactctgccgcacgtgattgtg

SEQ ID NO: 552300 - DNA, 120 bp, Artificial Sequence
  ENSG00000168538_26 (sequence is synthesized)
gagaatatccctctccatgtgaatgcagatctgccgtcatttgggcgtgtcagagagtcgttacctgtcaagtatcacctacagaataagaccgacttagttcaagatgtagaaatttct

SEQ ID NO: 552301 - DNA, 120 bp, Artificial Sequence
  ENSG00000168538_27 (sequence is synthesized)
gtggagcccagtgatgccttcatgttctcaggtctcaaacagattcgattacgtatcctccctggcacggagcaggaaatgctatataatttctatcctctgatggctggataccagcag

SEQ ID NO: 552302 - DNA, 120 bp, Artificial Sequence
  ENSG00000168538_28 (sequence is synthesized)
ctgccatctctcaacatcaacttgcttagatttcctaacttcacaaatcagctgctcaggcgttttatacctaccagtatttttgtcaagccacagggtcgactcatggatgatacctct

SEQ ID NO: 552303 - DNA, 120 bp, Artificial Sequence
  ENSG00000168538_29 (sequence is synthesized)
attgctgctgcatgatgttcaagaccggcccttggctgttgttacagagatgttgggcagagctatgcaggtgtttcattgtgaactctagctttgatcatggtaaaaagttaacctttt

SEQ ID NO: 552304 - DNA, 120 bp, Artificial Sequence
  ENSG00000168538_30 (sequence is synthesized)
ctattttttaatggatgttataccaactattcagaggaactcatacttcaaaaatattaggaaaatctgtcttatagtttctctaataaatatctgaaatctcagtacgacatgaaagaa

SEQ ID NO: 552305 - DNA, 120 bp, Artificial Sequence
  ENSG00000168538_31 (sequence is synthesized)
tgtcagaccattgttattgttgaaagtcatttgatgaatggtaaattctatgaaaagtaagtgatttgcatgtataatatcaggaaaattaagcatcccaagtgtgactggacaaagaga

SEQ ID NO: 552306 - DNA, 120 bp, Artificial Sequence
  ENSG00000168538_32 (sequence is synthesized)
gcagatgcaccagtgcctgtgccataaagttccgaatcccccatgtgtctctttcagagctggccagaccggaaataaatcattctcataaattcagtgtgtactcagaacacatacaca

SEQ ID NO: 552307 - DNA, 120 bp, Artificial Sequence
  ENSG00000168538_33 (sequence is synthesized)
acaacatagggagttgtatgactgatacggaaaacttccagaaagttttaatcaaagcagtttaattaaggtatcaaaaatatctttgcttactatcaagaagtgtcaaataggttcagc

SEQ ID NO: 552308 - DNA, 120 bp, Artificial Sequence
  ENSG00000168538_34 (sequence is synthesized)
ttgctgccaaaatatggatcatttatgaagcaggttcatattttagaggtgttaataaaatcctcatcggaaaagatccaaagtgcaaggatttgattataaacataatttcctagactg

SEQ ID NO: 552309 - DNA, 120 bp, Artificial Sequence
  ENSG00000168538_35 (sequence is synthesized)
aaagtttttggaaaagatgcagggtctgagtcaggccttctggttatattgtgcagtttcaaaagaactatttaaaactcttgaaaactcatgtaaataaaaatcatagggtgaaaattg

SEQ ID NO: 552310 - DNA, 120 bp, Artificial Sequence
  ENSG00000168538_36 (sequence is synthesized)
tatttgttaaaataccttaataatttaaaatgacctgatttcctggaaaattttattattcaaaaggtggaggcattgtaaaaaggaaatagtgatgtaaataaacatgttctctttcaa

SEQ ID NO: 552311 - DNA, 120 bp, Artificial Sequence
  ENSG00000168538_37 (sequence is synthesized)
agaatgttgaagagtctgaaatgattatattaaataaaggtttcaaggagtgtacacatacaacgttcatatgaagatttatattaaatgagctgtctaaaatgagttgtgtctcatctt

SEQ ID NO: 552312 - DNA, 120 bp, Artificial Sequence
  ENSG00000168538_38 (sequence is synthesized)
gcacgccaccacacctggctaatttttaaattatttatagggacgagatctccctgtgttgctcaggcgagtctcaaactcctggagctcaagcagtcctcccaccttggcctccgtaag

SEQ ID NO: 552313 - DNA, 120 bp, Artificial Sequence
  ENSG00000168538_39 (sequence is synthesized)
attacaggtgtgagccaccacacctggatgcacttccttttagaataacctttgcgtgtcatgttggcactcaaaacatttcagattttgaagcattttggtttcagatttttagattag

SEQ ID NO: 552314 - DNA, 120 bp, Artificial Sequence
  ENSG00000168538_40 (sequence is synthesized)
tttggtttcagatttttagattagggatggtcaacctgtatatgtttactcagagaaagccacaattttctggaatgatattttgagtactttaagagtaactgaaattttctattttct

SEQ ID NO: 552315 - DNA, 120 bp, Artificial Sequence
  ENSG00000168538_41 (sequence is synthesized)
ttttctctaccccaaagtgtttactttggaggcatgaaataatttggaaaaagaaaaacaatcaccgtaagatattgattctgtctctaagctttttgcattcattagtttccataggac

SEQ ID NO: 552316 - DNA, 120 bp, Artificial Sequence
  ENSG00000168538_42 (sequence is synthesized)
tttcttgcagatatacagatgcctcattggattttactgtgatggaatattggtacattagcaaaaacagtggactttgtgaccttgaaaaagtcatttaacatctctgaaccctacttt

SEQ ID NO: 552317 - DNA, 120 bp, Artificial Sequence
  ENSG00000168538_43 (sequence is synthesized)
ctaagtctctacaagtaatatatagtgggtgaggtgttctttctttgttctgttacttggatgtgaaactctccttttgtagatgaaaccattgcataaggaatataaagacttttccct

SEQ ID NO: 552318 - DNA, 120 bp, Artificial Sequence
  ENSG00000168538_44 (sequence is synthesized)
attgtgacatatatgtgctttgtgtgcaggaaaagatttcttctgatcttggtttttttagttgaaatttatcttcggttgaatgaccaaggttgtattttatgtgaagtcatgaataca

SEQ ID NO: 552319 - DNA, 120 bp, Artificial Sequence
  ENSG00000168538_45 (sequence is synthesized)
gaaatttatcttcggttgaatgaccaaggcaaagtttacaaggaagaaacacaaaagttgcagtggttctgattcagaagaaaacccctttgcccccagttattttatttctcattcatc

SEQ ID NO: 552320 - DNA, 120 bp, Artificial Sequence
  ENSG00000168539_0 (sequence is synthesized)
atgccaatcactggctgtgcctctcccgctgccagcacagggcgcagctccccctgggagccaggtgtttgggtccctggagacgccgcaggcccccagggaggcagtggggctgaggac

SEQ ID NO: 552321 - DNA, 120 bp, Artificial Sequence
  ENSG00000168539_1 (sequence is synthesized)
cctacagacccctcttcagccccgtggtgatgactttcccctgaggaagccctgtagcgtgcctggaggaaggggctctccaaccccagccccacctagccaccatgaacacttcagccc

SEQ ID NO: 552322 - DNA, 120 bp, Artificial Sequence
  ENSG00000168539_2 (sequence is synthesized)
cacctgctgtcagccccaacatcaccgtcctggcaccaggaaagggtccctggcaagtggccttcattgggatcaccacgggcctcctgtcgctagccacagtgacaggcaacctgctgg

SEQ ID NO: 552323 - DNA, 120 bp, Artificial Sequence
  ENSG00000168539_3 (sequence is synthesized)
tactcatctctttcaaggtcaacacggagctcaagacagtcaataactacttcctgctgagcctggcctgtgctgacctcatcatcggtaccttctccatgaacctctataccacgtacc

SEQ ID NO: 552324 - DNA, 120 bp, Artificial Sequence
  ENSG00000168539_4 (sequence is synthesized)
tgctcatgggccactgggctctgggcacgctggcttgtgacctctggctggccctggactatgtggccagcaatgcctccgtcatgaatctgctgctcatcagctttgaccgctacttct

SEQ ID NO: 552325 - DNA, 120 bp, Artificial Sequence
  ENSG00000168539_5 (sequence is synthesized)
ccgtgactcggcccctgagctaccgtgccaagcgcacaccccgccgggcagctctgatgatcggcctggcctggctggtttcctttgtgctctgggccccagccatcctcttctggcagt

SEQ ID NO: 552326 - DNA, 120 bp, Artificial Sequence
  ENSG00000168539_6 (sequence is synthesized)
acctggtaggggagcggacagtgctagctgggcagtgctacatccagttcctctcccagcccatcatcacctttggcacagccatggctgccttctacctccctgtcacagtcatgtgca

SEQ ID NO: 552327 - DNA, 120 bp, Artificial Sequence
  ENSG00000168539_7 (sequence is synthesized)
cgctctactggcgcatctaccgggagacagagaaccgagcacgggagctggcagcccttcagggctccgagacgccaggcaaagggggtggcagcagcagcagctcagagaggtctcagc

SEQ ID NO: 552328 - DNA, 120 bp, Artificial Sequence
  ENSG00000168539_8 (sequence is synthesized)
caggggctgagggctcaccagagactcctccaggccgctgctgtcgctgctgccgggcccccaggctgctgcaggcctacagctggaaggaagaagaggaagaggacgaaggctccatgg

SEQ ID NO: 552329 - DNA, 120 bp, Artificial Sequence
  ENSG00000168539_9 (sequence is synthesized)
agtccctcacatcctcagagggagaggagcctggctccgaagtggtgatcaagatgccaatggtggaccccgaggcacaggcccccaccaagcagcccccacggagctccccaaatacag

SEQ ID NO: 552330 - DNA, 120 bp, Artificial Sequence
  ENSG00000168539_10 (sequence is synthesized)
tcaagaggccgactaagaaagggcgtgatcgagctggcaagggccagaagccccgtggaaaggagcagctggccaagcggaagaccttctcgctggtcaaggagaagaaggcggctcgga

SEQ ID NO: 552331 - DNA, 120 bp, Artificial Sequence
  ENSG00000168539_11 (sequence is synthesized)
gtgccatcctcctggccttcatcctcacctggacaccgtacaacatcatggtgctggtgtccaccttctgcaaggactgtgttcccgagaccctgtgggagctgggctactggctgtgct

SEQ ID NO: 552332 - DNA, 120 bp, Artificial Sequence
  ENSG00000168539_12 (sequence is synthesized)
acgtcaacagcaccatcaaccccatgtgctacgcactctgcaacaaagccttccgggacacctttcgcctgctgctgctttgccgctgggacaagagacgctggcgcaagatccccaagc

SEQ ID NO: 552333 - DNA, 120 bp, Artificial Sequence
  ENSG00000168539_13 (sequence is synthesized)
gccctggctccgtgcaccgcactccctcccgccaatgctgatagtcccctctcctgcatccctccaccccagtccccgggaaaggccggtgggaagagggcaggggctgcatcctcagcc

SEQ ID NO: 552334 - DNA, 120 bp, Artificial Sequence
  ENSG00000168539_14 (sequence is synthesized)
ccagggccctgctcaggcctcacctggcttcccaggaccctgggtcaccttcctgggcagcccagagagaccctgccaactttccagacttcgctattcccaggcagggagggaaacccg

SEQ ID NO: 552335 - DNA, 120 bp, Artificial Sequence
  ENSG00000168539_15 (sequence is synthesized)
gggaactggtttttctgttccctgctgggtgggaatgcgctcttcaccaggaagaaggcccgggaggaggatccgggctttggactccttgtttgcctttaggcaggaagtcaggagcca

SEQ ID NO: 552336 - DNA, 120 bp, Artificial Sequence
  ENSG00000168539_16 (sequence is synthesized)
gcagggcgggccaggagaaagaaggcttaacattaagtattccttggcccagcagcggcccagattgcggtgtgagatggtgccccctggggggcacagccagaaactgaactggccgct

SEQ ID NO: 552337 - DNA, 120 bp, Artificial Sequence
  ENSG00000168539_17 (sequence is synthesized)
gggagaaaagccagatgacagggagctggggaatcccctcgcttcataggcagagcccgcccacctgggccctaggcatactctccaggattgtccacaaatgtcctcagagggtcccta

SEQ ID NO: 552338 - DNA, 120 bp, Artificial Sequence
  ENSG00000168539_18 (sequence is synthesized)
ggtgggtcaactccaaggcaaatgtccaagcatcagcaagacaatgacactggaagggtccggcttggctagtcacatatcaagtcccgaggcagcaacaggaccaggagccaggtgtcc

SEQ ID NO: 552339 - DNA, 120 bp, Artificial Sequence
  ENSG00000168539_19 (sequence is synthesized)
tgactgtcctacaatatcattttcctgggagtgggagtcaagtgtgcctgctatccagccgcaaatccataccccctgccccagagaagcctcagtccctccctcctggctcacagccac

SEQ ID NO: 552340 - DNA, 120 bp, Artificial Sequence
  ENSG00000168539_20 (sequence is synthesized)
cacctggatggatctgctccatgcagatctagccaggcctcccgcatgctgcctgcctccggccctgccccacacaggcctggcccagccagcaggttctctcctgtgagctccccaatc

SEQ ID NO: 552341 - DNA, 120 bp, Artificial Sequence
  ENSG00000168539_21 (sequence is synthesized)
caacccatgcatggcctcccagccacccggatctccaggcccagcctggccccaaatgttctttcctttcatcctcagcaagtgctgagtctgtgaataaagccacataaccagcgggca

SEQ ID NO: 552342 - DNA, 120 bp, Artificial Sequence
  ENSG00000168539_22 (sequence is synthesized)
atgtgcaggggggagggcgtgtgtgcgagggaagcaggcatgtgaataccagggcatgtgtgttggggcatggtgcacaggggctgggggctctaaggttgggtggggggaggagcccaa

SEQ ID NO: 552343 - DNA, 120 bp, Artificial Sequence
  ENSG00000168539_23 (sequence is synthesized)
ggaaacagtgtgcctttgtgagggtgtgtgtgccgccgggtctgtgcagtgggtgtgggtgtttgtctccctgtatccgccttctctcccgtccgggacttttagccttcctgggctcgc

SEQ ID NO: 552344 - DNA, 120 bp, Artificial Sequence
  ENSG00000168539_24 (sequence is synthesized)
cttcctcatgtcctttctcctccctcttggggctcaaattgggtgccctggtgaaggaggggggcacactccagaacctagtccaaccccagacgctgcctgaggcttccctccagctcc

SEQ ID NO: 552345 - DNA, 120 bp, Artificial Sequence
  ENSG00000168542_0 (sequence is synthesized)
gtgagggaagccaaactttttcctatttaaggccaaagcaaaggaatctcagtggctgagttttatgacgggcccggtgctgaagggcagggaacaacttgatggtgctactttgaactg

SEQ ID NO: 552346 - DNA, 120 bp, Artificial Sequence
  ENSG00000168542_1 (sequence is synthesized)
cttttcttttctcctttttgcacaaagagtctcatgtctgatatttagacatgatgagctttgtgcaaaaggggagctggctacttctcgctctgcttcatcccactattattttggcac

SEQ ID NO: 552347 - DNA, 120 bp, Artificial Sequence
  ENSG00000168542_2 (sequence is synthesized)
aacaggaagctgttgaaggaggatgttcccatcttggtcagtcctatgcggatagagatgtctggaagccagaaccatgccaaatatgtgtctgtgactcaggatccgttctctgcgatg

SEQ ID NO: 552348 - DNA, 120 bp, Artificial Sequence
  ENSG00000168542_3 (sequence is synthesized)
acataatatgtgacgatcaagaattagactgccccaacccagaaattccatttggagaatgttgtgcagtttgcccacagcctccaactgctcctactcgccctcctaatggtcaaggac

SEQ ID NO: 552349 - DNA, 120 bp, Artificial Sequence
  ENSG00000168542_4 (sequence is synthesized)
ctcaaggccccaagggagatccaggccctcctggtattcctgggagaaatggtgaccctggtattccaggacaaccagggtcccctggttctcctggcccccctggaatctgtgaatcat

SEQ ID NO: 552350 - DNA, 120 bp, Artificial Sequence
  ENSG00000168542_5 (sequence is synthesized)
gccctactggtcctcagaactattctccccagtatgattcatatgatgtcaagtctggagtagcagtaggaggactcgcaggctatcctggaccagctggccccccaggccctcccggtc

SEQ ID NO: 552351 - DNA, 120 bp, Artificial Sequence
  ENSG00000168542_6 (sequence is synthesized)
cccctggtacatctggtcatcctggttcccctggatctccaggataccaaggaccccctggtgaacctgggcaagctggtccttcaggccctccaggacctcctggtgctataggtccat

SEQ ID NO: 552352 - DNA, 120 bp, Artificial Sequence
  ENSG00000168542_7 (sequence is synthesized)
ctggtcctgctggaaaagatggagaatcaggtagacccggacgacctggagagcgaggattgcctggacctccaggtatcaaaggtccagctgggatacctggattccctggtatgaaag

SEQ ID NO: 552353 - DNA, 120 bp, Artificial Sequence
  ENSG00000168542_8 (sequence is synthesized)
gacacagaggcttcgatggacgaaatggagaaaagggtgaaacaggtgctcctggattaaagggtgaaaatggtcttccaggcgaaaatggagctcctggacccatgggtccaagagggg

SEQ ID NO: 552354 - DNA, 120 bp, Artificial Sequence
  ENSG00000168542_9 (sequence is synthesized)
ctcctggtgagcgaggacggccaggacttcctggggctgcaggtgctcggggtaatgacggtgctcgaggcagtgatggtcaaccaggccctcctggtcctcctggaactgccggattcc

SEQ ID NO: 552355 - DNA, 120 bp, Artificial Sequence
  ENSG00000168542_10 (sequence is synthesized)
ctggatcccctggtgctaagggtgaagttggacctgcagggtctcctggttcaaatggtgcccctggacaaagaggagaacctggacctcagggacacgctggtgctcaaggtcctcctg

SEQ ID NO: 552356 - DNA, 120 bp, Artificial Sequence
  ENSG00000168542_11 (sequence is synthesized)
gccctcctgggattaatggtagtcctggtggtaaaggcgaaatgggtcccgctggcattcctggagctcctggactgatgggagcccggggtcctccaggaccagccggtgctaatggtg

SEQ ID NO: 552357 - DNA, 120 bp, Artificial Sequence
  ENSG00000168542_12 (sequence is synthesized)
ctcctggactgcgaggtggtgcaggtgagcctggtaagaatggtgccaaaggagagcccggaccacgtggtgaacgcggtgaggctggtattccaggtgttccaggagctaaaggcgaag

SEQ ID NO: 552358 - DNA, 120 bp, Artificial Sequence
  ENSG00000168542_13 (sequence is synthesized)
atggcaaggatggatcacctggagaacctggtgcaaatgggcttccaggagctgcaggagaaaggggtgcccctgggttccgaggacctgctggaccaaatggcatcccaggagaaaagg

SEQ ID NO: 552359 - DNA, 120 bp, Artificial Sequence
  ENSG00000168542_14 (sequence is synthesized)
gtcctgctggagagcgtggtgctccaggccctgcagggcccagaggagctgctggagaacctggcagagatggcgtccctggaggtccaggaatgaggggcatgcccggaagtccaggag

SEQ ID NO: 552360 - DNA, 120 bp, Artificial Sequence
  ENSG00000168542_15 (sequence is synthesized)
gaccaggaagtgatgggaaaccagggcctcccggaagtcaaggagaaagtggtcgaccaggtcctcctgggccatctggtccccgaggtcagcctggtgtcatgggcttccccggtccta

SEQ ID NO: 552361 - DNA, 120 bp, Artificial Sequence
  ENSG00000168542_16 (sequence is synthesized)
aaggaaatgatggtgctcctggtaagaatggagaacgaggtggccctggaggacctggccctcagggtcctcctggaaagaatggtgaaactggacctcagggacccccagggcctactg

SEQ ID NO: 552362 - DNA, 120 bp, Artificial Sequence
  ENSG00000168542_17 (sequence is synthesized)
ggcctggtggtgacaaaggagacacaggaccccctggtccacaaggattacaaggcttgcctggtacaggtggtcctccaggagaaaatggaaaacctggggaaccaggtccaaagggtg

SEQ ID NO: 552363 - DNA, 120 bp, Artificial Sequence
  ENSG00000168542_18 (sequence is synthesized)
atgccggtgcacctggagctccaggaggcaagggtgatgctggtgcccctggtgaacgtggacctcctggattggcaggggccccaggacttagaggtggagctggtccccctggtcccg

SEQ ID NO: 552364 - DNA, 120 bp, Artificial Sequence
  ENSG00000168542_19 (sequence is synthesized)
aaggaggaaagggtgctgctggtcctcctgggccacctggtgctgctggtactcctggtctgcaaggaatgcctggagaaagaggaggtcttggaagtcctggtccaaagggtgacaagg

SEQ ID NO: 552365 - DNA, 120 bp, Artificial Sequence
  ENSG00000168542_20 (sequence is synthesized)
gtgaaccaggcggtccaggtgctgatggtgtcccagggaaagatggcccaaggggtcctactggtcctattggtcctcctggcccagctggccagcctggagataagggtgaaggtggtg

SEQ ID NO: 552366 - DNA, 120 bp, Artificial Sequence
  ENSG00000168542_21 (sequence is synthesized)
cccccggacttccaggtatagctggacctcgtggtagccctggtgagagaggtgaaactggccctccaggacctgctggtttccctggtgctcctggacagaatggtgaacctggtggta

SEQ ID NO: 552367 - DNA, 120 bp, Artificial Sequence
  ENSG00000168542_22 (sequence is synthesized)
aaggagaaagaggggctccgggtgagaaaggtgaaggaggccctcctggagttgcaggaccccctggaggttctggacctgctggtcctcctggtccccaaggtgtcaaaggtgaacgtg

SEQ ID NO: 552368 - DNA, 120 bp, Artificial Sequence
  ENSG00000168542_23 (sequence is synthesized)
gctggcttccctggtgctcgtggtcttcctggtcctcctggtagtaatggtaacccaggacccccaggtcccagcggttctccaggcaaggatgggcccccaggtcctgcgggtaacact

SEQ ID NO: 552369 - DNA, 120 bp, Artificial Sequence
  ENSG00000168542_24 (sequence is synthesized)
ggtgctcctggcagccctggagtgtctggaccaaaaggtgatgctggccaaccaggagagaagggatcgcctggtgcccagggcccaccaggagctccaggcccacttgggattgctggg

SEQ ID NO: 552370 - DNA, 120 bp, Artificial Sequence
  ENSG00000168542_25 (sequence is synthesized)
atcactggagcacggggtcttgcaggaccaccaggcatgccaggtcctaggggaagccctggccctcagggtgtcaagggtgaaagtgggaaaccaggagctaacggtctcagtggagaa

SEQ ID NO: 552371 - DNA, 120 bp, Artificial Sequence
  ENSG00000168542_26 (sequence is synthesized)
cgtggtccccctggaccccagggtcttcctggtctggctggtacagctggtgaacctggaagagatggaaaccctggatcagatggtcttccaggccgagatggatctcctggtggcaag

SEQ ID NO: 552372 - DNA, 120 bp, Artificial Sequence
  ENSG00000168542_27 (sequence is synthesized)
ggtgatcgtggtgaaaatggctctcctggtgcccctggcgctcctggtcatccaggcccacctggtcctgtcggtccagctggaaagagtggtgacagaggagaaagtggccctgctggc

SEQ ID NO: 552373 - DNA, 120 bp, Artificial Sequence
  ENSG00000168542_28 (sequence is synthesized)
cctgctggtgctcccggtcctgctggttcccgaggtgctcctggtcctcaaggcccacgtggtgacaaaggtgaaacaggtgaacgtggagctgctggcatcaaaggacatcgaggattc

SEQ ID NO: 552374 - DNA, 120 bp, Artificial Sequence
  ENSG00000168542_29 (sequence is synthesized)
cctggtaatccaggtgccccaggttctccaggccctgctggtcagcagggtgcaatcggcagtccaggacctgcaggccccagaggacctgttggacccagtggacctcctggcaaagat

SEQ ID NO: 552375 - DNA, 120 bp, Artificial Sequence
  ENSG00000168542_30 (sequence is synthesized)
ggaaccagtggacatccaggtcccattggaccaccagggcctcgaggtaacagaggtgaaagaggatctgagggctccccaggccacccagggcaaccaggccctcctggacctcctggt

SEQ ID NO: 552376 - DNA, 120 bp, Artificial Sequence
  ENSG00000168542_31 (sequence is synthesized)
gcccctggtccttgctgtggtggtgttggagccgctgccattgctgggattggaggtgaaaaagctggcggttttgccccgtattatggagatgaaccaatggatttcaaaatcaacacc

SEQ ID NO: 552377 - DNA, 120 bp, Artificial Sequence
  ENSG00000168542_32 (sequence is synthesized)
gatgagattatgacttcactcaagtctgttaatggacaaatagaaagcctcattagtcctgatggttctcgtaaaaaccccgctagaaactgcagagacctgaaattctgccatcctgaa

SEQ ID NO: 552378 - DNA, 120 bp, Artificial Sequence
  ENSG00000168542_33 (sequence is synthesized)
ctcaagagtggagaatactgggttgaccctaaccaaggatgcaaattggatgctatcaaggtattctgtaatatggaaactggggaaacatgcataagtgccaatcctttgaatgttcca

SEQ ID NO: 552379 - DNA, 120 bp, Artificial Sequence
  ENSG00000168542_34 (sequence is synthesized)
cggaaacactggtggacagattctagtgctgagaagaaacacgtttggtttggagagtccatggatggtggttttcagtttagctacggcaatcctgaacttcctgaagatgtccttgat

SEQ ID NO: 552380 - DNA, 120 bp, Artificial Sequence
  ENSG00000168542_35 (sequence is synthesized)
gtgcatctggcattccttcgacttctctccagccgagcttcccagaacatcacatatcactgcaaaaatagcattgcatacatggatcaggccagtggaaatgtaaagaaggccctgaag

SEQ ID NO: 552381 - DNA, 120 bp, Artificial Sequence
  ENSG00000168542_36 (sequence is synthesized)
ctgatggggtcaaatgaaggtgaattcaaggctgaaggaaatagcaaattcacctacacagttctggaggatggttgcacgaaacacactggggaatggagcaaaacagtctttgaatat

SEQ ID NO: 552382 - DNA, 120 bp, Artificial Sequence
  ENSG00000168542_37 (sequence is synthesized)
cgaacacgcaaggctgtgagactacctattgtagatattgcaccctatgacattggtggtcctgatcaagaatttggtgtggacgttggccctgtttgctttttataaaccaaactctat

SEQ ID NO: 552383 - DNA, 120 bp, Artificial Sequence
  ENSG00000168542_38 (sequence is synthesized)
ctgaaatcccaacaaaaaaaatttaactccatatgtgttcctcttgttctaatcttgtcaaccagtgcaagtgaccgacaaaattccagttatttatttccaaaatgtttggaaacagta

SEQ ID NO: 552384 - DNA, 120 bp, Artificial Sequence
  ENSG00000168542_39 (sequence is synthesized)
taatttgacaaagaaaaatgatacttctctttttttgctgttccaccaaatacaattcaaatgctttttgttttatttttttaccaattccaatttcaaaatgtctcaatggtgctataa

SEQ ID NO: 552385 - DNA, 120 bp, Artificial Sequence
  ENSG00000168542_40 (sequence is synthesized)
taaataaacttcaacactctttatgataacaacactgtgttatattctttgaatcctagcccatctgcagagcaatgactgtgctcaccagtaaaagataacctttctttctgaaatagt

SEQ ID NO: 552386 - DNA, 120 bp, Artificial Sequence
  ENSG00000168542_41 (sequence is synthesized)
caaatacgaaattagaaaagccctccctattttaactacctcaactggtcagaaacacagattgtattctatgagtcccagaagatgaaaaaaattttatacgttgataaaacttataaa

SEQ ID NO: 552387 - DNA, 120 bp, Artificial Sequence
  ENSG00000168542_42 (sequence is synthesized)
tttcattgattaatctcctggaagattggtttaaaaagaaaagtgtaatgcaagaatttaaagaaatatttttaaagccacaattattttaatattggatatcaactgcttgtaaaggtg

SEQ ID NO: 552388 - DNA, 120 bp, Artificial Sequence
  ENSG00000168542_43 (sequence is synthesized)
ctcctcttttttcttgtcattgctggtcaagattactaatatttgggaaggctttaaagacgcatgttatggtgctaatgtactttcacttttaaactctagatcagaattgttgacttg

SEQ ID NO: 552389 - DNA, 120 bp, Artificial Sequence
  ENSG00000168542_44 (sequence is synthesized)
cattcagaacataaatgcacaaaatctgtacatgtctcccatcagaaagattcattggcatgccacaggggattctcctccttcatcctgtaaaggtcaacaataaaaaccaaattatgg

SEQ ID NO: 552390 - DNA, 120 bp, Artificial Sequence
  ENSG00000168542_45 (sequence is synthesized)
ggctgcttttgtcacactagcatagagaatgtgttgaaatttaactttgtaagcttgtatgtggttgttgatcttttttttccttacagacacccataataaaatatcatattaaaattc

SEQ ID NO: 552391 - DNA, 120 bp, Artificial Sequence
  ENSG00000168542_46 (sequence is synthesized)
agataaactgtacatcttcaatattcatatttagacacatgaatagctcctatatcataggagcctaaaagggaatgaaagtcatgttcatcaaatagccatgtttgtattacgagtaaa

SEQ ID NO: 552392 - DNA, 120 bp, Artificial Sequence
  ENSG00000168542_47 (sequence is synthesized)
aagtgaccgtttcaatttaaagataaggattggttagaatctgggttactaaataatatgcaaattctgtgtcttgtttaacttgtttcttttccatttattagcctactcgccctccta

SEQ ID NO: 552393 - DNA, 120 bp, Artificial Sequence
  ENSG00000168542_48 (sequence is synthesized)
atgtttctaccacactataacaggagaaaaatacctttttaaaaatttgatcaggtatccatcgtatcagaataatgacatctgcccaattaaccaaataaaccctgtccacattgctat

SEQ ID NO: 552394 - DNA, 120 bp, Artificial Sequence
  ENSG00000168542_49 (sequence is synthesized)
cccactagagatctcagaattacaacattcataattatctgcgtttatgtagtgcattttacttctcaaacagcttccatggttactattttgttaatgatactatcattcctaatactt

SEQ ID NO: 552395 - DNA, 120 bp, Artificial Sequence
  ENSG00000168542_50 (sequence is synthesized)
tctattccatgcctttgggtaaatgaaataaaaacaattatcccaacaaattacactcccctctgtcatgtcaatattggaattgtagctcacaggtgtttgcttacatcagtcatccag

SEQ ID NO: 552396 - DNA, 120 bp, Artificial Sequence
  ENSG00000168542_51 (sequence is synthesized)
aaggaagaatgatagagaaaacttgtgctctgacactactgattcttacatagtggaacaatatctttcttgataatgaattgtagttattataaatcggtgatcacgtgaccctaaagg

SEQ ID NO: 552397 - DNA, 120 bp, Artificial Sequence
  ENSG00000168542_52 (sequence is synthesized)
cacccaaataaatctttagtaaaataattctgatgacacaatgaatgaattatttttaaggcattttcttggactagcaatgtattcttagagtggcgactgaatgtgcatacctcaatg

SEQ ID NO: 552398 - DNA, 120 bp, Artificial Sequence
  ENSG00000168542_53 (sequence is synthesized)
atggtggttttcaggtaggaaaggatatacctttttttaaataagtcacctctatatcctttgtattcttcctatatgttcatcacaaagcaaagttactaggttggtacaaacataatt

SEQ ID NO: 552399 - DNA, 120 bp, Artificial Sequence
  ENSG00000168542_54 (sequence is synthesized)
gcagtttttgctactgaaagtgatggcatgcaataaaaatattttcacacataaaatactcgtacataaaatatataaacagcccatattacaatatgcatacacatactacatgaatcc

SEQ ID NO: 552400 - DNA, 120 bp, Artificial Sequence
  ENSG00000168542_55 (sequence is synthesized)
gttaaagtcttttctcatcatacacttcagaaagagcattcatgtatgtataggatgagaaacttacacattgctacttatttctctagtaagtctcaaataaaattatttgaagtaagt

SEQ ID NO: 552401 - DNA, 120 bp, Artificial Sequence
  ENSG00000168546_0 (sequence is synthesized)
gggagtggagccagcagctgagaccccggcaagggcaaccatggatctggagttggaacgggacaatgcgccatcaggccggcagaagctggcagatgagggccgagttgcggcacacag

SEQ ID NO: 552402 - DNA, 120 bp, Artificial Sequence
  ENSG00000168546_1 (sequence is synthesized)
gtgccagatctccaaatagaggaaattggaaagaaaaagataaagctaatctgtaatttcatcacccggagacaactgctgttgacattgcattgtgtgtctaaggaggactttgacagg

SEQ ID NO: 552403 - DNA, 120 bp, Artificial Sequence
  ENSG00000168546_2 (sequence is synthesized)
gagaaagacaaaaaaacggtgggatttatttaacatgatcttggcaaacgtcttctgcctcttcttctttctagacgagaccctccgctctttggccagcccttcctccctgcagggccc

SEQ ID NO: 552404 - DNA, 120 bp, Artificial Sequence
  ENSG00000168546_3 (sequence is synthesized)
cgagctccacggctggcgccccccagtggactgtgtccgggccaatgagctgtgtgccgccgaatccaactgcagctctcgctaccgcactctgcggcagtgcctggcaggccgcgaccg

SEQ ID NO: 552405 - DNA, 120 bp, Artificial Sequence
  ENSG00000168546_4 (sequence is synthesized)
caacaccatgctggccaacaaggagtgccaggcggccttggaggtcttgcaggagagcccgctgtacgactgccgctgcaagcggggcatgaagaaggagctgcagtgtctgcagatcta

SEQ ID NO: 552406 - DNA, 120 bp, Artificial Sequence
  ENSG00000168546_5 (sequence is synthesized)
ctggagcatccacctggggctgaccgagggtgaggagttctacgaagcctccccctatgagccggtgacctcccgcctctcggacatcttcaggcttgcttcaatcttctcagggacagg

SEQ ID NO: 552407 - DNA, 120 bp, Artificial Sequence
  ENSG00000168546_6 (sequence is synthesized)
ggcagacccggtggtcagcgccaagagcaaccattgcctggatgctgccaaggcctgcaacctgaatgacaactgcaagaagctgcgctcctcctacatctccatctgcaaccgcgagat

SEQ ID NO: 552408 - DNA, 120 bp, Artificial Sequence
  ENSG00000168546_7 (sequence is synthesized)
ctcgcccaccgagcgctgcaaccgccgcaagtgccacaaggccctgcgccagttcttcgaccgggtgcccagcgagtacacctaccgcatgctcttctgctcctgccaagaccaggcgtg

SEQ ID NO: 552409 - DNA, 120 bp, Artificial Sequence
  ENSG00000168546_8 (sequence is synthesized)
tgcctggacctgcgtggcgtgtgccggactgaccacctgtgtcggtcccggctggccgacttccatgccaattgtcgagcctcctaccagacggtcaccagctgccctgcggacaattac

SEQ ID NO: 552410 - DNA, 120 bp, Artificial Sequence
  ENSG00000168546_9 (sequence is synthesized)
caggcgtgtctgggctcttatgctggcatgattgggtttgacatgacacctaactatgtggactccagccccactggcatcgtggtgtccccctggtgcagctgtcgtggcagcgggaac

SEQ ID NO: 552411 - DNA, 120 bp, Artificial Sequence
  ENSG00000168546_10 (sequence is synthesized)
atggaggaggagtgtgagaagttcctcagggacttcaccgagaacccatgcctccggaacgccatccaggcctttggcaacggcacggacgtgaacgtgtccccaaaaggcccctcgttc

SEQ ID NO: 552412 - DNA, 120 bp, Artificial Sequence
  ENSG00000168546_11 (sequence is synthesized)
caggccacccaggcccctcgggtggagaagacgccttctttgccagatgacctcagtgacagtaccagcttggggaccagtgtcatcaccacctgcacgtctgtccaggagcaggggctg

SEQ ID NO: 552413 - DNA, 120 bp, Artificial Sequence
  ENSG00000168546_12 (sequence is synthesized)
aaggccaacaactccaaagagttaagcatgtgcttcacagagctcacgacaaatatcatcccagggagtaacaaggtgatcaaacctaactcaggccccagcagagccagaccgtcggct

SEQ ID NO: 552414 - DNA, 120 bp, Artificial Sequence
  ENSG00000168546_13 (sequence is synthesized)
gccttgaccgtgctgtctgtcctgatgctgaaactggccttgtaggctgtgggaaccgagtcagaatatttttgaaagctacgcagacaagaacagccgcctgacgaaatggaaacacac

SEQ ID NO: 552415 - DNA, 120 bp, Artificial Sequence
  ENSG00000168546_14 (sequence is synthesized)
acagacacacacacaccttgcaaaaaaaaaattgtttttcccaccttgtcgctgaacctgtctcctcccaggtttcttctctggagaagtttttgtaaaccaaacagacaagcaggcagg

SEQ ID NO: 552416 - DNA, 120 bp, Artificial Sequence
  ENSG00000168546_15 (sequence is synthesized)
cagcctgagagctggcccaggggtcccctggcaggggaaactctggtgccggggagggcacgaggctctagaaatgcccttcactttctcctggtgtttttctctctggacccttctgaa

SEQ ID NO: 552417 - DNA, 120 bp, Artificial Sequence
  ENSG00000168546_16 (sequence is synthesized)
gcagagaccggacaagagcctgcagcggaagggactctgggctgtgcctgaggctggctgggggcaggacaacacagctgcttccccaggctgcccactctggggacccgctgggggctg

SEQ ID NO: 552418 - DNA, 120 bp, Artificial Sequence
  ENSG00000168546_17 (sequence is synthesized)
gagagctggagagagcgagagcaaagagcgagcgagggagaggagagagagagagaggagagagaaagacacacgcacgcagagacacacggtcactggaattccattagaaaaaagtga

SEQ ID NO: 552419 - DNA, 120 bp, Artificial Sequence
  ENSG00000168546_18 (sequence is synthesized)
gccgagcaagggttagcgggagaagatttttttgaatcttgtcttcgtcttggtgcgaaagaagcgactccagtctctcgtcctcgaagctccgactggattgttcttgggcgctgacac

SEQ ID NO: 552420 - DNA, 120 bp, Artificial Sequence
  ENSG00000168546_19 (sequence is synthesized)
ccgtctgtggatttcttttctatttgcattttattccgaccccctccctcgccgcttccttccagcccttcactcgcaaatcgcctctctccccacctccccaggcccctcctgggaagc

SEQ ID NO: 552421 - DNA, 120 bp, Artificial Sequence
  ENSG00000168546_20 (sequence is synthesized)
gcaggggaattggacccgcggggactcacgccttcccggacgattggaggggagggctgaccccaggactgggctgttggcttagaaagccgatacacagatacgcgtatatttgattgt

SEQ ID NO: 552422 - DNA, 120 bp, Artificial Sequence
  ENSG00000168546_21 (sequence is synthesized)
agcgggcaaggggggcgtcgagaggcagcagcccatcgcccgcctctcaccccaccccctccagccagaggcgagaatcgcaggactcgggatcttcatcgggtggactagctgggatct

SEQ ID NO: 552423 - DNA, 120 bp, Artificial Sequence
  ENSG00000168546_22 (sequence is synthesized)
ccaccttcagccctttggcttcaaggatggagatggttttgccctccctctctgccctcgggtggggctggtgggtctgcagctggtgtgggaacttccccacggatggcggtggagggg

SEQ ID NO: 552424 - DNA, 120 bp, Artificial Sequence
  ENSG00000168546_23 (sequence is synthesized)
gttcgcaccgtgctgggctccccctgactgtagcacggagtgttggggctgggggccagctccaggagggcttgagagctcagcctgcctgggagagcccttgtggcgaggcattaaaac

SEQ ID NO: 552425 - DNA, 120 bp, Artificial Sequence
  ENSG00000168546_24 (sequence is synthesized)
ttgggcaccagcttctttctcggtggcagaaattttgaagtcagagagaaacggtcctttgttggcttctttgctttctcgtgggtcctttggcaggcctccctttggggagagggaggg

SEQ ID NO: 552426 - DNA, 120 bp, Artificial Sequence
  ENSG00000168546_25 (sequence is synthesized)
gagagaccacagccgggtgtgtgtctgcagcaccgtgggccctcaagctttcctgctgtcttctccctcctcctcctttcccctttctctttcctcatttcctagacgtacgtcaactgt

SEQ ID NO: 552427 - DNA, 120 bp, Artificial Sequence
  ENSG00000168546_26 (sequence is synthesized)
atgtacataccggggctcctctcctaacatatatgtatatacacatccatatacatatattgtgtggtttcccctttctttcctttttttaagcaacaaaactatggaaataatacccca

SEQ ID NO: 552428 - DNA, 120 bp, Artificial Sequence
  ENSG00000168546_27 (sequence is synthesized)
acagatgagcgaaaatgtattattgtaaagtttattttttttaatactgttgtctataatggggaaaaaggacattggccccgcagtgccctgccccagtcagcctggctgggctctggt

SEQ ID NO: 552429 - DNA, 120 bp, Artificial Sequence
  ENSG00000168546_28 (sequence is synthesized)
gggggctcctgatccgcatccaagcttaaccaaggctccaataaacgtgctaggaagcaagctgcctctgcctcggtcccgtggggttttgcccccattttgttcttggtccagtgttac

SEQ ID NO: 552430 - DNA, 120 bp, Artificial Sequence
  ENSG00000168546_29 (sequence is synthesized)
ctgcgtaagtggagctcccagtgggctggggaaatgtgtgtccgtgtgtgtgcctgtgtgcatgtgtgtgcatccatgtgtctcacccatgtgtccacattgtgtgtagatggagctctc

SEQ ID NO: 552431 - DNA, 120 bp, Artificial Sequence
  ENSG00000168546_30 (sequence is synthesized)
ttaggagctggtttgacactgggggcgggatctgagggtccacgctgtgctgagcctggtgggctgttctgttccctctttgctcacttctccagttggcgcaaatgcctgtggctccca

SEQ ID NO: 552432 - DNA, 120 bp, Artificial Sequence
  ENSG00000168546_31 (sequence is synthesized)
ggctggaagagaatgcagtggacgtggacgtggtggggagccacagcttggcatcacacgttgggaatgttttattgtcaggctgtctgggtggccctgttagtcttacatagagcaaag

SEQ ID NO: 552433 - DNA, 120 bp, Artificial Sequence
  ENSG00000168546_32 (sequence is synthesized)
tggtatgtccctctgggactcctggcttatttgagatgtgtgattgtgagtgcagtgacctggccttttgggtcccaccagagaagaaggacatgactgtgcatgttctggggtcatggt

SEQ ID NO: 552434 - DNA, 120 bp, Artificial Sequence
  ENSG00000168546_33 (sequence is synthesized)
ctgaaagcataagtattttttgggtctccctctattccttcctttcctgtttctccatttgctacccaggccccacttggacactaggcctgccatagtctccaagagagattctcccca

SEQ ID NO: 552435 - DNA, 120 bp, Artificial Sequence
  ENSG00000168546_34 (sequence is synthesized)
gagaggaccaggagaatgcctgctggccaagtgtgtgtgtgtccatgtatgtgagcatgtgtacatgtgtgtgcggtcgtgtgcaggctcgcacatgttcacgtgcacgtgtgaatatat

SEQ ID NO: 552436 - DNA, 120 bp, Artificial Sequence
  ENSG00000168546_35 (sequence is synthesized)
acccatggcaggagggagaatggaagactggtaggcgagaagatgtttctactgtcagcctggccttcagggctgcatgtgagcccatcccatttcaactggacaataggatgcagtttt

SEQ ID NO: 552437 - DNA, 120 bp, Artificial Sequence
  ENSG00000168546_36 (sequence is synthesized)
cccatctcccaatcgcaggtcccctcaatggcttttgcttctggttgtatatgtgtgagcagcatccgttcacagcgtttatcactgtggtgtattgccttccagcctctgcatggaagg

SEQ ID NO: 552438 - DNA, 120 bp, Artificial Sequence
  ENSG00000168546_37 (sequence is synthesized)
ggtacagtgagccagccaggtctctgtccagccattgcgggtagacgtggtcatggcatccacttaggaatccgtgttctttgcaaacagcaaagaccatttaacttaaaaagtacttta

SEQ ID NO: 552439 - DNA, 120 bp, Artificial Sequence
  ENSG00000168546_38 (sequence is synthesized)
ctggaaggctatgggagaaggtggctcacggaatttgtgggaggtggggggaccaggggaggcgagggcagggactggagggcatctgaggggctggaaggcaggatgtacagggtcagc

SEQ ID NO: 552440 - DNA, 120 bp, Artificial Sequence
  ENSG00000168546_39 (sequence is synthesized)
attctgctgccaaccattgcccatctggctgaactgggccttgtgcctgccctctgccatacttgagtgtgagagagaggatatatatgtcatgtctggtatccctaataggaggtaagc

SEQ ID NO: 552441 - DNA, 120 bp, Artificial Sequence
  ENSG00000168546_40 (sequence is synthesized)
ccttaggctacatcatgggggagagaaaatttcccaagaggaaactgaggtgccattatgaaggaggagtggatactagctagctttactctgccctcaaatgtctccctatccaagtat

SEQ ID NO: 552442 - DNA, 120 bp, Artificial Sequence
  ENSG00000168546_41 (sequence is synthesized)
cacatggctgaaattttaccattaggtattcattcctttggttgagatgattcctatttgtgattctctcaaaatatgcaaatcgaactagaagaataaattgttgctatcttaatgtta

SEQ ID NO: 552443 - DNA, 120 bp, Artificial Sequence
  ENSG00000168546_42 (sequence is synthesized)
cacaggcctatctcaaactcccgggctcaagcagtactcccaccttggtttcccaaagttctgggcttacaggcggtgccttctccctagcaacctggattcctagaactagcatgagca

SEQ ID NO: 552444 - DNA, 120 bp, Artificial Sequence
  ENSG00000168546_43 (sequence is synthesized)
aagggaggaatactgtcctgagggtactgcactctattcttcaggagataaggcgctgtcttcacccagagccggactctgtagcgtacaaataattaaagcgctcaatgcctgagctga

SEQ ID NO: 552445 - DNA, 120 bp, Artificial Sequence
  ENSG00000168546_44 (sequence is synthesized)
aggaatggagtgcaaagggagaaaacttgctcctacatccaggggaggatgatgcctgagttctccctggggtatgaggagggctgtcccacagagtcgccttggtgtgctttggcgaaa

SEQ ID NO: 552446 - DNA, 120 bp, Artificial Sequence
  ENSG00000168546_45 (sequence is synthesized)
tgggtgtgacgttcccagcagggcccaagcccccaggcctgcatcttgggtgggagattgtggcggccgtcattcatgcttgtcttccctccccaccacccagacgagaccctccgctct

SEQ ID NO: 552447 - DNA, 120 bp, Artificial Sequence
  ENSG00000168556_0 (sequence is synthesized)
cggcgccgggctgctgagctgagggcccgcggcggccgcggccggtgcatgtgcggctgctggatgcggaggcggcggcgacggcgcggatcggcaggatgttagggcagcagcagcagc

SEQ ID NO: 552448 - DNA, 120 bp, Artificial Sequence
  ENSG00000168556_1 (sequence is synthesized)
acggcgcggatcggcaggatgttagggcagcagcagcagcaactgtactcgtcggccgcgctcctgaccggggagcggagccggctgctcacctgctacgtgcaggactaccttgagtgc

SEQ ID NO: 552449 - DNA, 120 bp, Artificial Sequence
  ENSG00000168556_2 (sequence is synthesized)
gtggagtcgctgccccacgacatgcagaggaacgtgtctgtgctgcgagagctggacaacaaatatcaagaaacgttaaaggaaattgatgatgtctacgaaaaatataagaaagaagat

SEQ ID NO: 552450 - DNA, 120 bp, Artificial Sequence
  ENSG00000168556_3 (sequence is synthesized)
gatttaaaccagaagaaacgtctacagcagcttctccagagagcactaattaatagtcaagaattgggagatgaaaaaatacagattgttacacaaatgctcgaattggtggaaaatcgg

SEQ ID NO: 552451 - DNA, 120 bp, Artificial Sequence
  ENSG00000168556_4 (sequence is synthesized)
gcaagacaaatggagttacactcacagtgtttccaagatcctgctgaaagtgaacgagcctcagataaagcaaagatggattccagccaaccagaaagatcttcaagaagaccccgcagg

SEQ ID NO: 552452 - DNA, 120 bp, Artificial Sequence
  ENSG00000168556_5 (sequence is synthesized)
cagcggaccagtgaaagccgtgatttatgtcacatggcaaatgggattgaagactgtgatgatcagccacctaaagaaaagaaatccaagtcagcaaagaaaaagaaacgctccaaggcc

SEQ ID NO: 552453 - DNA, 120 bp, Artificial Sequence
  ENSG00000168556_6 (sequence is synthesized)
aagcaggaaagggaagcttcacctgttgagtttgcaatagatcctaatgaacctacatactgcttatgcaaccaagtgtcttatggggagatgataggatgtgacaatgaacagtgtcca

SEQ ID NO: 552454 - DNA, 120 bp, Artificial Sequence
  ENSG00000168556_7 (sequence is synthesized)
attgaatggtttcacttttcatgtgtttcacttacctataaaccaaaggggaaatggtattgcccaaagtgcaggggagataatgagaaaacaatggacaaaagtactgaaaagacaaaa

SEQ ID NO: 552455 - DNA, 120 bp, Artificial Sequence
  ENSG00000168556_8 (sequence is synthesized)
aaggatagaagatcgaggtagtaaaggccatccacattttaaagggttatttgtcttttatataattcgtttgctttcagaaaatgttttagggtaaatgcataagactatgcaataatt

SEQ ID NO: 552456 - DNA, 120 bp, Artificial Sequence
  ENSG00000168556_9 (sequence is synthesized)
tttaatcattagtattaatggtgtattaaaagttgttgtactttgtctgtgaccttaattttctgcactgagttaccaaatatttccaaccaggtagtcttcagatcacctgatgaaagg

SEQ ID NO: 552457 - DNA, 120 bp, Artificial Sequence
  ENSG00000168556_10 (sequence is synthesized)
tttcattttcacttaaaactgcaatgttattttttgggtaaacacaaaagtttcactagcattttagttatacatgcttaaaaaaatgttagatgtagtgggatttctcttaagcatcaa

SEQ ID NO: 552458 - DNA, 120 bp, Artificial Sequence
  ENSG00000168556_11 (sequence is synthesized)
atgatcttgggtactttaaaatacagacactatgccatttgagctgctttttccctagtcctatttatacgttggcttgttcatctctagtcttctaggagtttaaggaactggagataa

SEQ ID NO: 552459 - DNA, 120 bp, Artificial Sequence
  ENSG00000168556_12 (sequence is synthesized)
gagtaatttgggattccatgtggaataatgtgctcttatgagagtacgtgctgctgtcttttgcttagtagcattttgatccactgtcagtagcccatttgtcaatgccttgctgctgct

SEQ ID NO: 552460 - DNA, 120 bp, Artificial Sequence
  ENSG00000168556_13 (sequence is synthesized)
ttgtagatatacttagtctagtgcttaataagggagttgttttgtgttttcttttaattgggacaggtaagagtagttagcataccaaaaatatacattggcttacattggcaaactttg

SEQ ID NO: 552461 - DNA, 120 bp, Artificial Sequence
  ENSG00000168556_14 (sequence is synthesized)
ggttatatagtatcacggctcaaggttgaacaatttaaaaatacatcttaattaatagtattttccatgtgacctgctgccaggatgcgtagccacaggcctatcagtggaaaggggcat

SEQ ID NO: 552462 - DNA, 120 bp, Artificial Sequence
  ENSG00000168556_15 (sequence is synthesized)
atagtagtctttaaatattgcctttatgtcagagagttgttttaaatggttttgctagtggttattgttcatttctgtcccaatcagtgactattttaaataatagtgtatttactgtct

SEQ ID NO: 552463 - DNA, 120 bp, Artificial Sequence
  ENSG00000168556_16 (sequence is synthesized)
taacttctagtattggtgctgtttgatgttttcacatttaattaacttatttcatcatcataatgcaattaatgtatttgtaaattgaattttccaagattctgatatttgaagggtaag

SEQ ID NO: 552464 - DNA, 120 bp, Artificial Sequence
  ENSG00000168556_17 (sequence is synthesized)
catcttgatggatatatgtccatatgtttagagaaggttttggttttgggggcagcagattgactagttctttaaatctgtgtgtaacgtatgttttattcctcatttcttcctaatctg

SEQ ID NO: 552465 - DNA, 120 bp, Artificial Sequence
  ENSG00000168556_18 (sequence is synthesized)
atgatcttgattctttttgattaacatgaaaaatcctgtctgcttgttttgggaaaaaaaaatgctttttttctcttctagctctcctgtgtgacttttaggcatgtcatttcaccttgt

SEQ ID NO: 552466 - DNA, 120 bp, Artificial Sequence
  ENSG00000168556_19 (sequence is synthesized)
ctgggtgtcaggtcattcacctgtaaaatgagttggcttaaatatctccgagattccttggaaatttctactatttgcactatagtgaggattttaataatgacatgacttctcttttca

SEQ ID NO: 552467 - DNA, 120 bp, Artificial Sequence
  ENSG00000168556_20 (sequence is synthesized)
gtgggaggggcgcggcgcgcgttcccgcgggcctggaaaatggctggtcgcgagaggggcggtggcgagctggctgctggggagggagtcggggctgtgcgggggcgttggttcggcccc

SEQ ID NO: 552468 - DNA, 120 bp, Artificial Sequence
  ENSG00000168556_21 (sequence is synthesized)
agcggagtccgaatcggggtttgcagcatgttttgcggtgatgtttccaacctctttcccagtcaatggatcaggacggcgatcagcagctcggaccgtcgcggatcctggctccgcaaa

SEQ ID NO: 552469 - DNA, 120 bp, Artificial Sequence
  ENSG00000168564_0 (sequence is synthesized)
agtgggcggttcggcggctctgggcgctgttgtttggtctttaggcctgcggaggggcgttatctggagggccgcgggtgcaggccgcagtgacagggccgctcgccccgctagtcctgc

SEQ ID NO: 552470 - DNA, 120 bp, Artificial Sequence
  ENSG00000168564_1 (sequence is synthesized)
ctgtctcccggtgcagctgtgttcgcggcctgcaggcccaacatggcgcaggaggtgtcggagtacctgagccagaacccgcgggtggcagcctgggtggaggcgctgcgctgcgacggc

SEQ ID NO: 552471 - DNA, 120 bp, Artificial Sequence
  ENSG00000168564_2 (sequence is synthesized)
gagactgacaaacactggcgccaccgccgggattttttgcttcgcaacgccggggacctggcccccgctggcggcgctgcctccgctagcacggatgaagctgccgacgccgagagcggg

SEQ ID NO: 552472 - DNA, 120 bp, Artificial Sequence
  ENSG00000168564_3 (sequence is synthesized)
acccgaaaccggcagctgcagcagctcatctccttttccatggcctgggcgaaccacgtcttcctcgggtgccgataccctcaaaaagttatggataaaatacttagtatggctgaaggc

SEQ ID NO: 552473 - DNA, 120 bp, Artificial Sequence
  ENSG00000168564_4 (sequence is synthesized)
atcaaagtgacagatgctccaacctatacaacaagagatgaactggttgccaaggtgaagaaaagagggatatcgagtagcaatgaaggggtagaagagccatccaaaaaacgagttata

SEQ ID NO: 552474 - DNA, 120 bp, Artificial Sequence
  ENSG00000168564_5 (sequence is synthesized)
gaaggaaaaaacagttctgcagttgagcaagatcacgcaaaaacctctgccaagacagaacgtgcatcagctcagcaggaaaacagttcaacgtgtatagggtcggccatcaaatcagag

SEQ ID NO: 552475 - DNA, 120 bp, Artificial Sequence
  ENSG00000168564_6 (sequence is synthesized)
agtgggaactcagctcggagctctggcatctccagtcagaatagctctacaagtgatggagatcgatctgtttccagccaaagcagcagcagcgtttcctctcaggtaacaacggcagga

SEQ ID NO: 552476 - DNA, 120 bp, Artificial Sequence
  ENSG00000168564_7 (sequence is synthesized)
tctgggaaagcttctgaagcagaagctccagataaacacggttctgcatcatttgtttccttgctgaaatccagtgtgaatagtcacatgacccaatccactgattctagacaacaaagt

SEQ ID NO: 552477 - DNA, 120 bp, Artificial Sequence
  ENSG00000168564_8 (sequence is synthesized)
ggatcacctaaaaagagtgctttggaaggctcttcagcctcagcttctcaaagcagctcagagatcgaggtgcccttgttgggctcctcaggaagctcagaggtagaattgccactattg

SEQ ID NO: 552478 - DNA, 120 bp, Artificial Sequence
  ENSG00000168564_9 (sequence is synthesized)
tcttccaaacctagttcagagacagcttcaagtgggttaacttccaaaactagttcagaggcaagtgtttcatcatcagttgctaaaaacagttcctcatcaggcacatccttactgact

SEQ ID NO: 552479 - DNA, 120 bp, Artificial Sequence
  ENSG00000168564_10 (sequence is synthesized)
cccaagagcagctcttcaacaaatacatcgctgctaacttccaagagcacttcccaggtagctgcatcactactagcttccaagagcagctcccagaccagtggatctctggtttccaaa

SEQ ID NO: 552480 - DNA, 120 bp, Artificial Sequence
  ENSG00000168564_11 (sequence is synthesized)
agcacttccttagcaagtgtgtcccagttggcttctaagagtagttctcagactagcacctcacagttgccttctaaaagtacttcacagtcaagtgagagttctgtcaaattctcttgc

SEQ ID NO: 552481 - DNA, 120 bp, Artificial Sequence
  ENSG00000168564_12 (sequence is synthesized)
aagttaaccaatgaagatgtgaaacagaagcaaccttttttcaatagactatataaaacggtggcatggaagttggtagctgttggtggctttagtcccaatgtgaatcatggagagctc

SEQ ID NO: 552482 - DNA, 120 bp, Artificial Sequence
  ENSG00000168564_13 (sequence is synthesized)
ctaaatgcagctattgaggctctgaaagcaacactggatgtattttttgtcccactaaaagaattggcagatctgcctcaaaataagagctctcaagaaagtattgtttgtgaattgagg

SEQ ID NO: 552483 - DNA, 120 bp, Artificial Sequence
  ENSG00000168564_14 (sequence is synthesized)
atcaagagaagcattgaagttatttctcaagaaaaaggtggtggtaaaaatatgtaaaaggaaatacagaggcagtgaaatagaagatctagtactccttgatgaagaatcgaggcctgt

SEQ ID NO: 552484 - DNA, 120 bp, Artificial Sequence
  ENSG00000168564_15 (sequence is synthesized)
aaacttacctccagcactaaaacatcctcaagaattactataatgtgtccaaaatatcactgcatacaatatctggtatttgaagagaaaaactgacttttgtatagtataaaacacagg

SEQ ID NO: 552485 - DNA, 120 bp, Artificial Sequence
  ENSG00000168564_16 (sequence is synthesized)
ctttcacaaattttgtattgctttttttccagttttgcagaaaatttacattctagttctcttcacacagtagcagttgtaaataatttatgaatgacagtacacattaaaaggtatgca

SEQ ID NO: 552486 - DNA, 120 bp, Artificial Sequence
  ENSG00000168564_17 (sequence is synthesized)
ttagcagcatattagtatgctgttttatttgctgaagaaaatactgtcttctatttttaatgatacattaggtacgatgtgtagttcggtagagtcctaaaatttttgtactactttcaa

SEQ ID NO: 552487 - DNA, 120 bp, Artificial Sequence
  ENSG00000168564_18 (sequence is synthesized)
tttggtgaaaatgtattaagttgtctaccatgttttcttttctagctgaataaaccacatcaaaggaaagggaccacagtatttgaatgtttgaaagtctgtaaagcttaaggttttaaa

SEQ ID NO: 552488 - DNA, 120 bp, Artificial Sequence
  ENSG00000168564_19 (sequence is synthesized)
aatgttgcccgtaatgttgaacgtgtctgttaaaaaataaaagaaaaaatagttgcttcaaactatttttatgagaagttgtaagcattttttagatataaagcagtataaagtacttgt

SEQ ID NO: 552489 - DNA, 120 bp, Artificial Sequence
  ENSG00000168564_20 (sequence is synthesized)
tattttactctgaagttgtttaaaattcaccatgactttgaccgctgaagattctttaagcgggttaatttatgttttgaggtggaatacaatttacacttttttcttaaaaacatgaat

SEQ ID NO: 552490 - DNA, 120 bp, Artificial Sequence
  ENSG00000168564_21 (sequence is synthesized)
gtgggtttctatattaagcatattttgtgactactattaacagattgatttgtttagatattaaatgctttaagctattttaccttttcaagaagttgtgttttttttctccaagtcaga

SEQ ID NO: 552491 - DNA, 120 bp, Artificial Sequence
  ENSG00000168564_22 (sequence is synthesized)
accaattcctgcaaataggcttcccatgacttgtcattataaattagacaaccaggtaattgtgtgatatacatctttatttaatttttttttttacagcaatcccctgagccagaatag

SEQ ID NO: 552492 - DNA, 120 bp, Artificial Sequence
  ENSG00000168564_23 (sequence is synthesized)
attaaaagcgattcccttcaattttcaaatctagaactggatggtttttgtgtttatgcatcttttagaataccggaaagaacagagagccgtgttcagctcttgataatgagcctattc

SEQ ID NO: 552493 - DNA, 120 bp, Artificial Sequence
  ENSG00000168564_24 (sequence is synthesized)
aatttaactacattcgttaaaatgaagtggaattttgttttcgtcttaggtgattctgcctgtttgtctgtcattgtatattctgtttactttgcttcaaactggccccaagatgttatt

SEQ ID NO: 552494 - DNA, 120 bp, Artificial Sequence
  ENSG00000168564_25 (sequence is synthesized)
tttgtggtttctggctttctagattctatttttagatactgcccattgagcaataatggtgataatatagagagaaaagaaagacctttcatgggccagttgtgttggaataggaaaatc

SEQ ID NO: 552495 - DNA, 120 bp, Artificial Sequence
  ENSG00000168564_26 (sequence is synthesized)
aaacgtaagcacaatttaagtatgtagcagttattcctattttgtattctaggaataaaaagatactttaattttttatgctagaattacataattacataatcagatgttttaatttta

SEQ ID NO: 552496 - DNA, 120 bp, Artificial Sequence
  ENSG00000168564_27 (sequence is synthesized)
ccatataacctttaaaaatgattcatttttgaggatatttaattggataccaaagctaaaatccatatactgtaagtgggttgcctttatagattgcgggacacaataacatgaatgtat

SEQ ID NO: 552497 - DNA, 120 bp, Artificial Sequence
  ENSG00000168564_28 (sequence is synthesized)
tgtgaaagcacttttagttacctcactttcctcagtcttggaatgtgtattttgtgggataatgattatcagaaaagcaaaaaattacaacgaacaaataaatttatataatatatccaa

SEQ ID NO: 552498 - DNA, 120 bp, Artificial Sequence
  ENSG00000168564_29 (sequence is synthesized)
tgaagcgcgggaatccgccggcccggctgccctctaagggggagaagggcgtccctgcgaggagccgacatgattcccggacgtctgtgtgcccggtggtgtgggcgcagctgctgatac

SEQ ID NO: 552499 - DNA, 120 bp, Artificial Sequence
  ENSG00000168564_30 (sequence is synthesized)
aatggttagcagatcatagatgtgaacatacataggagtttagagcataagtttgatataattaggaattattgttactaatttttttaacaagccagaatttttatgttattaataagt

SEQ ID NO: 552500 - DNA, 120 bp, Artificial Sequence
  ENSG00000168564_31 (sequence is synthesized)
aataaagttggaatgttaaacctaaagtatatatctgtgtctttaggctttgaatttgatagtttgctttgactgctttagattttgaagtgtccactgttgtctgatgctgttattttt

SEQ ID NO: 552501 - DNA, 120 bp, Artificial Sequence
  ENSG00000168564_32 (sequence is synthesized)
ttaatattagacattcatgatgttattcaacactgttttaagaaattaatgactccacactttttaaagaaacgattagtcttgaaatgttttcactttgtgcctttattttaatgtgta

SEQ ID NO: 552502 - DNA, 120 bp, Artificial Sequence
  ENSG00000168566_0 (sequence is synthesized)
agaggcctgcgcgtgcggtctgcagttcggccgcttcctcttggcgggtgggctgcagctatggagggcgagcctccacctgtggaggagcggcggcggctgcaggaggagctgaacgag

SEQ ID NO: 552503 - DNA, 120 bp, Artificial Sequence
  ENSG00000168566_1 (sequence is synthesized)
ttcgtggagagcggctgccggacgttggaggaggtgaccgcgtccctgggctgggacctagatagtctggatcccggggaagaggaggcggcggaggatgaagttgtgatatgtccatac

SEQ ID NO: 552504 - DNA, 120 bp, Artificial Sequence
  ENSG00000168566_2 (sequence is synthesized)
gattccaatcatcacatgcctaaatcatctttggcaaagcacatggcatcttgtagattgaggaaaatgggctataccaaagaagaagaggatgaaatgtataatcctgagtttttctat

SEQ ID NO: 552505 - DNA, 120 bp, Artificial Sequence
  ENSG00000168566_3 (sequence is synthesized)
gaaaatgtgaagataccttcgattactttgaataaggactcacaattccagataattaaacaagctagaactgcagttgggaaagacagtgattgttataatcaaagaatttattcttca

SEQ ID NO: 552506 - DNA, 120 bp, Artificial Sequence
  ENSG00000168566_4 (sequence is synthesized)
ttgcctgttgaagttcctttgaatcacaaacggtttgtttgtgatctaactcaagctgatcgtcttgccctctatgatttcgtagttgaggagacaaagaaaaagcgctctgattctcaa

SEQ ID NO: 552507 - DNA, 120 bp, Artificial Sequence
  ENSG00000168566_5 (sequence is synthesized)
attattgaaaatgacagcgatctctttgtagacttggctgccaaaatcaatcaagacaatagtcgaaaaagtccaaaatcctaccttgaaatcctggcagaagtacgagattataaaaga

SEQ ID NO: 552508 - DNA, 120 bp, Artificial Sequence
  ENSG00000168566_6 (sequence is synthesized)
agacgccagtcctatagagccaagaatgttcacataaccaagaaatcatatactgaggtgattcgagatgtgataaatgtgcacatggaagaactcagcaatcattggcaagaagagcaa

SEQ ID NO: 552509 - DNA, 120 bp, Artificial Sequence
  ENSG00000168566_7 (sequence is synthesized)
gagaaggcagaggatgatgccgaaaagaatgaagaaaggcgatcagcttcagtagattcacggcagtctggtggaagctatttggatgctgagtgttcacgacatagaagggataggagt

SEQ ID NO: 552510 - DNA, 120 bp, Artificial Sequence
  ENSG00000168566_8 (sequence is synthesized)
agaagcccacataaaagaaaaagaaacaaagataaggataaaaactgtgagtcgagaagaaggaaagagagggatggggaaagacaccatagtcataaaagaagaaagcaaaaaatataa

SEQ ID NO: 552511 - DNA, 120 bp, Artificial Sequence
  ENSG00000168566_9 (sequence is synthesized)
atgaagtacttgtacctatattaattatgcttacgccatgataaccaatatacagatatattaattggaattcctttgcataggagaatgtttttatgatctgtttagtgcttattattt

SEQ ID NO: 552512 - DNA, 120 bp, Artificial Sequence
  ENSG00000168566_10 (sequence is synthesized)
tttttatgatctgtttagtgcttattattttccagtaaatatgcttcaaaccatgagtacactattaggccctacaactttgttttccttatattttattagatgatttgcttcctataa

SEQ ID NO: 552513 - DNA, 120 bp, Artificial Sequence
  ENSG00000168566_11 (sequence is synthesized)
tgttgttttgttcgttttgctaatatatgtatctcaaaattctttaagtcaatatttatcatatgtaaattaaacatgaatacattctcatcttataactacatcttataaataaggcta

SEQ ID NO: 552514 - DNA, 120 bp, Artificial Sequence
  ENSG00000168566_12 (sequence is synthesized)
gctaataacccttagaacaccacctgcggttctgtcctcaccccagtggtgactactgtttaccactacactggtgaattgtagtagggaaaaacaatctaaatattgaagaggaatggc

SEQ ID NO: 552515 - DNA, 120 bp, Artificial Sequence
  ENSG00000168566_13 (sequence is synthesized)
ctaattaaaatatgatgtagtcataggatagattattgtattggagttaaaagaaataatctagatccatattaacctggattggtctcaaaaacataatgctcagtgaaaatagcaagt

SEQ ID NO: 552516 - DNA, 120 bp, Artificial Sequence
  ENSG00000168566_14 (sequence is synthesized)
tgtagaaagttatatacaaattatatatatgtacaaaacaatactatgcattctctatggctatataatgtacgtaaatctatttttaaaggttcagaggaatccataccaaagttctaa

SEQ ID NO: 552517 - DNA, 120 bp, Artificial Sequence
  ENSG00000168566_15 (sequence is synthesized)
cagcgagtaggaggtatagatgagagattaggggtgcaaatcaggattgggagggtggtcagagggaactttagctttatccataacattaatttttttaaaaaataaggtcttaatgtt

SEQ ID NO: 552518 - DNA, 120 bp, Artificial Sequence
  ENSG00000168566_16 (sequence is synthesized)
tcatttaatttaaaatatactgtcatgttgtgttttgtaaatcaactgaattgaggtactatttacttagatttattgcaccctttttacgtgtgtattttattgggttttgacagattc

SEQ ID NO: 552519 - DNA, 120 bp, Artificial Sequence
  ENSG00000168566_17 (sequence is synthesized)
ctagccctaggcagccacagatttgcttttggttaccgattagatctatccattgtagaattcatgtaaatagaatactgtagtatgtactttgccttcttcctctctgcagatttttga

SEQ ID NO: 552520 - DNA, 120 bp, Artificial Sequence
  ENSG00000168566_18 (sequence is synthesized)
gattgatccctgtgtgtcagttgtgcattttttttgttgctgagtagtatgttctatcttatgtcagatcattcacgtgagactttggcatgaaatgttaagcatccgacatctaaatag

SEQ ID NO: 552521 - DNA, 120 bp, Artificial Sequence
  ENSG00000168566_19 (sequence is synthesized)
caatattttgaatactggaaactcaggttaaagattttgtttccaagtagaaatgaaatcttattattttaataagtagctgacagtgacagaaagattggatttggatcagattggctg

SEQ ID NO: 552522 - DNA, 120 bp, Artificial Sequence
  ENSG00000168566_20 (sequence is synthesized)
ttaggcttcaggtatgggaaacagctctcagatttataaattggaaatcaccaggttacttgccaatatatagtcatattgctgccattgtacttaatttctaaatatataaaatccaca

SEQ ID NO: 552523 - DNA, 120 bp, Artificial Sequence
  ENSG00000168566_21 (sequence is synthesized)
tttaaaaattataaaagcaaggacttgggagtgactgatgaatcatgaaattgctgcttttatagatcaaaactacttgaatcatcaggaatttcatatttttcatattgtgtgacaact

SEQ ID NO: 552524 - DNA, 120 bp, Artificial Sequence
  ENSG00000168566_22 (sequence is synthesized)
tataattttgtttcaaattgtgatttcattgattttactaactggaaggaagaagagtaaaattggcatatttaggttttttgtagaagaaagatacaagtgaaaattaggagtggattg

SEQ ID NO: 552525 - DNA, 120 bp, Artificial Sequence
  ENSG00000168566_23 (sequence is synthesized)
gagaaattggggggaaatagaagagtacggagaaaggaagagattgaaaatgttaccagagttctttaaagctcacattttatagtatcactgctacaaactatttaatgaaatgtggca

SEQ ID NO: 552526 - DNA, 120 bp, Artificial Sequence
  ENSG00000168566_24 (sequence is synthesized)
tcgggtgaaaagaggcatttgtttgatccttgaacgaattaatctcacgtacttccctgtttgtggtttgagcctttcactggatgtgagctacttgagagcagggtttatgccttcatc

SEQ ID NO: 552527 - DNA, 120 bp, Artificial Sequence
  ENSG00000168566_25 (sequence is synthesized)
agcgtgacccctgtgcctgcagcctcataggtgttaatctgtaattttaaattttgacaaaagcattttcacagccctgccacataagatctagtttttatttctagagtgctgctatga

SEQ ID NO: 552528 - DNA, 120 bp, Artificial Sequence
  ENSG00000168566_26 (sequence is synthesized)
ataattactatagctgctgtccatcttgcccatccattaaggtaccttctcacaaacatttctaatctactggctggagtgcagtggtgcagtctgtagctcactgcagcctcaaactcc

SEQ ID NO: 552529 - DNA, 120 bp, Artificial Sequence
  ENSG00000168566_27 (sequence is synthesized)
taggctcaggcgatcctcttgccctggcctcccatgtagctgcaactataggtgtgtgccactacacctggctaatgtttttagttttttagagatggagtcttgctctgttgcctaggc

SEQ ID NO: 552530 - DNA, 120 bp, Artificial Sequence
  ENSG00000168566_28 (sequence is synthesized)
tggtcttgaactcctgggctcagatgatcctcctgtcctcagcctcccaaaatgctgggagccaccaggcaccaggtgtgatctaccacacctgtctaaaaagtatgtatttttaaattt

SEQ ID NO: 552531 - DNA, 88 bp, Artificial Sequence
  ENSG00000168566_29 (sequence is synthesized)
atctaccacacctgtctaaaaagtatgtatttttaactccagctggtctcaagctcctggcctcggcctcctaaagtgctgggattac

SEQ ID NO: 552532 - DNA, 120 bp, Artificial Sequence
  ENSG00000168566_30 (sequence is synthesized)
tggcaagtcaactgccatgcagagcccagggcactggttatattcagtaggaaactgaactcagcactcagaattttaaattaaatcaatgatcttcaagtatttgccactttcgagtac

SEQ ID NO: 552533 - DNA, 120 bp, Artificial Sequence
  ENSG00000168566_31 (sequence is synthesized)
agctaattggataatctcaaaccctttagtgaaaatatcttaaatgcattgagaatattttctaattacctgtgtatgctacagtacagacattaattctataaacatgttcataggtct

SEQ ID NO: 552534 - DNA, 120 bp, Artificial Sequence
  ENSG00000168566_32 (sequence is synthesized)
tccccctcgccccgcccgtcttctaagggcattttctgtttctttttagtgagttcatgaatgtttaacggttctggcgcaaagctttcttgcattctgagcataaaaataataaaaccc

SEQ ID NO: 552535 - DNA, 120 bp, Artificial Sequence
  ENSG00000168566_33 (sequence is synthesized)
acttatatttgcttgagtgtgtttacaagtcaatttccttttatgtagcttgctttttcatttgctataattgatcctgcaggtgtgtgaattattaaactaacgctcttttaaaccaca

SEQ ID NO: 552536 - DNA, 120 bp, Artificial Sequence
  ENSG00000168566_34 (sequence is synthesized)
taattggggtgagtataaagaggaattaggaacctgaatgtactccttatttaaagatatgcagtatcctttttgcaaatgatatccttttaaaagtaaaatttctaaactttatcttaa

SEQ ID NO: 552537 - DNA, 120 bp, Artificial Sequence
  ENSG00000168566_35 (sequence is synthesized)
tacctgtcacatattatagtcttgaattggaattttggttgaattacaaggaatttaagtatcagtcttcatcataaagaaatttaagatgaataaattgaagaaaaggctaaaataatt

SEQ ID NO: 552538 - DNA, 120 bp, Artificial Sequence
  ENSG00000168566_36 (sequence is synthesized)
taagaaggaaattatatttctttgtttaaaaataacaggcaaaggtttatatgaagcttgtttgtaatacatcattattttctaatctgtgttttcctcccaaatttttatagcctaatt

SEQ ID NO: 552539 - DNA, 120 bp, Artificial Sequence
  ENSG00000168566_37 (sequence is synthesized)
caaaggaattaggcttatcaaagctgtttttataattttgtattatgaaatgcctactataattagaataaaattgattgacttgaaagggaacccttttttccccattaattcaaaacc

SEQ ID NO: 552540 - DNA, 120 bp, Artificial Sequence
  ENSG00000168566_38 (sequence is synthesized)
ctttgacgagtaaaaatggccatatattgttatgtatagccgtgttaaaccatggcctcagattcactgcagctctcctcttaatatgtagacaagtagtacctcttttttgttgtaatg

SEQ ID NO: 552541 - DNA, 120 bp, Artificial Sequence
  ENSG00000168566_39 (sequence is synthesized)
cttagttcatagtatgctcttatttgaattctttttgcctctacctaggaacttaatgaggttagactttatcaaatataagtatctggaaagagctactgattttatgttgttctatga

SEQ ID NO: 552542 - DNA, 120 bp, Artificial Sequence
  ENSG00000168566_40 (sequence is synthesized)
accagttactactttagaataagttagcaaacaataaaaggattcctttagtagctcatgttctttgtttgcattagtgagtaatgaagtctagaaagaattgttttaaattgctttttt

SEQ ID NO: 552543 - DNA, 120 bp, Artificial Sequence
  ENSG00000168566_41 (sequence is synthesized)
tacagttccaatcatttttttatttgagaaaatttgaatctcaaaacaaaaattttcttcaatgtttaatacatcatatcaaggtattgtatttactttttttcactaatgagcagattt

SEQ ID NO: 552544 - DNA, 120 bp, Artificial Sequence
  ENSG00000168566_42 (sequence is synthesized)
tagaaaattctgtaactaccggggggcactgctattaacttttttcaattaatttggttaagccactatgcttcctcctcaggaaattaaaatgagtttaatttaatctgtgctttcctg

SEQ ID NO: 552545 - DNA, 120 bp, Artificial Sequence
  ENSG00000168566_43 (sequence is synthesized)
gcgtgaggaggtgtgggatttctgctacttaattattttgtggcccctagctctaagtccttgcacaagtgggatatattttgaatattgaccatctagcttgatgtctcatacaaaaag

SEQ ID NO: 552546 - DNA, 120 bp, Artificial Sequence
  ENSG00000168566_44 (sequence is synthesized)
ctttgatggggaaaagcatatcaacagatacctacttttgtagatggctataaaaattgttacccaaaaggctttcttagagcaaattgtctcttatgattattcctgcctgcctccatg

SEQ ID NO: 552547 - DNA, 120 bp, Artificial Sequence
  ENSG00000168566_45 (sequence is synthesized)
ggatctgtctttatattgttggagagaatagcaaacatccataatacattttttttttttttgtggatataacattcaggatagaattgtttgtcatttattgcttagattgatattttg

SEQ ID NO: 552548 - DNA, 120 bp, Artificial Sequence
  ENSG00000168566_46 (sequence is synthesized)
tatacttagggattatgaaaaaagtttgtgttaatattgcattattaaagcacatgtttaaagataattattagattttaagttcacaatgcttcatgtattgtttattcttgtgatttt

SEQ ID NO: 552549 - DNA, 120 bp, Artificial Sequence
  ENSG00000168569_0 (sequence is synthesized)
agtcggctggccatggcggcgccttggaggcgatggcccacggggctgctagccgtgctgcggcccctgctcacctgccggcccctgcaaggcacgacgctgcaacgggatgtgctgctc

SEQ ID NO: 552550 - DNA, 120 bp, Artificial Sequence
  ENSG00000168569_1 (sequence is synthesized)
tttgagcatgatcggggccgcttcttcaccatcctcgggctgttctgcgcgggccagggcgtcttctgggcttccatggctgtggcagccgtgtcccggcccccggttccggtgcagcct

SEQ ID NO: 552551 - DNA, 120 bp, Artificial Sequence
  ENSG00000168569_2 (sequence is synthesized)
ctggatgcggaggtcccaaatcgtggccccttcgacctgcgctccgcgctctggcgctacggtctggccgtcggctgcggcgccatcggagccctcgtactcggtgctggtcttctcttc

SEQ ID NO: 552552 - DNA, 120 bp, Artificial Sequence
  ENSG00000168569_3 (sequence is synthesized)
tctctccggtctgtgcgctcagtggtgcttcgagctggagggcagcaggtgaccctcaccactcatgccccctttggcttgggggcccatttcacagttcctttgaagcaggtatcttgc

SEQ ID NO: 552553 - DNA, 120 bp, Artificial Sequence
  ENSG00000168569_4 (sequence is synthesized)
atggcccaccggggtgaagtccctgccatgctacctctgaaagtcaaaggccgacgcttctatttcctcttggacaaaactggacacttccctaacacaaaactctttgacaatactgtg

SEQ ID NO: 552554 - DNA, 120 bp, Artificial Sequence
  ENSG00000168569_5 (sequence is synthesized)
atcccagcactttgggagggtgaggcaggagcactgctcgagcccaggctgggcaacatagcgagaccttgtctctatttacaaaaaaaaaaacaaaaaaaaacgccaatcttagaatgg

SEQ ID NO: 552555 - DNA, 120 bp, Artificial Sequence
  ENSG00000168569_6 (sequence is synthesized)
aaaaaaaaacaaaaaaaaacgccaatcttagaatggagtaacaaccagggtcacacaaggaggtcaagattcattaacaacaaataaaggagcagtcatccctagggcagctgcctaaca

SEQ ID NO: 552556 - DNA, 120 bp, Artificial Sequence
  ENSG00000168569_7 (sequence is synthesized)
gtacctctaagtttcagtccatgtctgcttagccttcactccttcctcctatctagttgtactttaacatcaaaaactcactactaagatgaagacagtaatataatattttggtacaaa

SEQ ID NO: 552557 - DNA, 120 bp, Artificial Sequence
  ENSG00000168569_8 (sequence is synthesized)
aacagctgcaggaagaggtggaggggggcctgtcattatgtttcccccccaccccccaacgaaaggaaaactaagactcccaacataaacagggccttgaggggggggattacaggcact

SEQ ID NO: 552558 - DNA, 120 bp, Artificial Sequence
  ENSG00000168569_9 (sequence is synthesized)
tgggcatggagtcttcggctgcaggaagcactccgcttattcttcaggaatgggaaaggcgtgacccaacgagagcatctgtctcagagctccactcagggtcacccctctccagaggcc

SEQ ID NO: 552559 - DNA, 120 bp, Artificial Sequence
  ENSG00000168569_10 (sequence is synthesized)
accagaaggcaaggaaatcaaacctcagaggctaaatgttccatgacttctccaagatcatgaagtaagcactgagtaagtagggagggggagcaaggactcaaccccttgctcctaatc

SEQ ID NO: 552560 - DNA, 120 bp, Artificial Sequence
  ENSG00000168569_11 (sequence is synthesized)
tttactctataccgcattcaggagccgccagctgtatggggaacaaggcctggatcccaccccaaagacatggattggagacccaccccttggtgaccctagacccgccaatagatcgtt

SEQ ID NO: 552561 - DNA, 120 bp, Artificial Sequence
  ENSG00000168569_12 (sequence is synthesized)
gtgaagctgcagtttccctatctgtaaaatgggagcatttagtccaccagcgcgaaaggcacggagggagtttccctattatatgaccgtacacgaaatctagactgtgaccaaagtctc

SEQ ID NO: 552562 - DNA, 120 bp, Artificial Sequence
  ENSG00000168569_13 (sequence is synthesized)
ccgctcctcagcctcctctcctccgcatcctcagccactagtcacgctggagaggaggcgtgggaactgacctccgcgggccgggcctcggcaacgcgcatcctcccacccggcctagcc

SEQ ID NO: 552563 - DNA, 120 bp, Artificial Sequence
  ENSG00000168569_14 (sequence is synthesized)
ttctgatttaacggatggacgcaggttctgcactgacttctgtttcggaaccacagtaaggctgtgcagcaggagccacgaaacccgactccacctagtgctttaagacgctactgaccc

SEQ ID NO: 552564 - DNA, 120 bp, Artificial Sequence
  ENSG00000168569_15 (sequence is synthesized)
gtccctttggcgaggggacaacttcgaagtatgacctggccaggaggagccacaaagcgcgattagcctcgctgcatttcaggtacaggccggcgccagccgtgcctcaccaggtccacc

SEQ ID NO: 552565 - DNA, 120 bp, Artificial Sequence
  ENSG00000168569_16 (sequence is synthesized)
ggctccgagcagcagcaagcccggtcggaaagcgaaagtggcctcgccatgtccagaccggccagctcccccgcctacctgaccccgccccgcagccgcacctgggtccgagtcatcgcc

SEQ ID NO: 552566 - DNA, 120 bp, Artificial Sequence
  ENSG00000168575_0 (sequence is synthesized)
cgcttccggaagcgggcgactcgcagctccacgcgacgccgaggggctccgcgccgggaccgggcgggtgctcggagtttcggggaccgcacgggaccgagggcaggaggagacatcaca

SEQ ID NO: 552567 - DNA, 120 bp, Artificial Sequence
  ENSG00000168575_1 (sequence is synthesized)
gctttcccagatcgggaggaaaaatatggaatgtgttttaccgctgactgaacacaaccaaatgaactgtcctgacagtagtttgcaaaccagcagctagcagtttgtccagcctctaac

SEQ ID NO: 552568 - DNA, 120 bp, Artificial Sequence
  ENSG00000168575_2 (sequence is synthesized)
attgtccagcactttccagagcaaactcactgtttacaagaactcttggccttacgaagtttataacctcaagctttgtttatttaaaatattcctgcaaaagaaaagtacccggcaccc

SEQ ID NO: 552569 - DNA, 120 bp, Artificial Sequence
  ENSG00000168575_3 (sequence is synthesized)
actttccaaaatggccatggatgagtatttgtggatggtcattttgggtttcatcatagctttcatcttggccttttctgttggtgcaaacgatgttgccaactcctttggtacagccgt

SEQ ID NO: 552570 - DNA, 120 bp, Artificial Sequence
  ENSG00000168575_4 (sequence is synthesized)
gggctctggtgtggtgaccttgaggcaggcatgcattttagcttcaatatttgaaaccaccggctccgtgttactaggcgccaaagtaggagaaaccattcgcaaaggtatcattgacgt

SEQ ID NO: 552571 - DNA, 120 bp, Artificial Sequence
  ENSG00000168575_5 (sequence is synthesized)
gaacctgtacaacgagacggtggagactctcatggctggggaagttagtgccatggttggttccgctgtgtggcagctgattgcttccttcctgaggcttccaatctcaggaacgcactg

SEQ ID NO: 552572 - DNA, 120 bp, Artificial Sequence
  ENSG00000168575_6 (sequence is synthesized)
cattgtgggttctactataggattctcactggtcgcaatcggtaccaaaggtgtgcagtggatggagcttgtcaagattgttgcttcttggtttatatctccactgttgtctggtttcat

SEQ ID NO: 552573 - DNA, 120 bp, Artificial Sequence
  ENSG00000168575_7 (sequence is synthesized)
gtctggcctgctgtttgtactcatcagaattttcatcttaaaaaaggaagaccctgttcccaatggcctccgggcactcccagtattctatgctgctaccatagcaatcaatgtcttttc

SEQ ID NO: 552574 - DNA, 120 bp, Artificial Sequence
  ENSG00000168575_8 (sequence is synthesized)
catcatgtacacaggagcaccagtgctcggccttgttctccccatgtgggccatagccctcatttcctttggtgtcgccctcctgttcgctttttttgtgtggctcttcgtgtgtccgtg

SEQ ID NO: 552575 - DNA, 120 bp, Artificial Sequence
  ENSG00000168575_9 (sequence is synthesized)
gatgcggaggaaaataacaggcaaattacaaaaagaaggtgctttatcacgagtatctgacgaaagcctcagtaaggttcaggaagcagagtccccagtatttaaagagctaccaggtgc

SEQ ID NO: 552576 - DNA, 120 bp, Artificial Sequence
  ENSG00000168575_10 (sequence is synthesized)
caaggctaatgatgacagcaccatcccgctcacgggagcagcaggggagacactggggacctcggaaggcacttctgcgggcagccaccctcgggctgcatacggaagagcactgtccat

SEQ ID NO: 552577 - DNA, 120 bp, Artificial Sequence
  ENSG00000168575_11 (sequence is synthesized)
gacccatggctctgtgaaatcgcccatctccaacggcaccttcggcttcgacggccacaccaggagcgacggtcatgtgtaccacaccgtgcacaaagactcggggctctacaaagatct

SEQ ID NO: 552578 - DNA, 120 bp, Artificial Sequence
  ENSG00000168575_12 (sequence is synthesized)
gctgcacaaaatccacatcgacaggggccccgaggagaagccagcccaggaaagcaactaccggctgctgcgccgaaacaacagttacacctgctacaccgcagccatttgtgggctgcc

SEQ ID NO: 552579 - DNA, 120 bp, Artificial Sequence
  ENSG00000168575_13 (sequence is synthesized)
agtgcacgccacctttcgagctgcggactcatcggccccagaggacagtgagaagctggtgggcgacaccgtgtcctactccaagaagaggctgcgctacgacagctactcgagctactg

SEQ ID NO: 552580 - DNA, 120 bp, Artificial Sequence
  ENSG00000168575_14 (sequence is synthesized)
taacgcggtggcagaggcggagatcgaggcggaggagggcggcgtggagatgaagctggcgtcggagctggccgaccctgaccagccgcgagaggaccctgcagaggaggagaaggagga

SEQ ID NO: 552581 - DNA, 120 bp, Artificial Sequence
  ENSG00000168575_15 (sequence is synthesized)
tttcgggtcctttgctcacggcggcaatgacgtgagtaatgccatcggtcccctggtagccttgtggctgatttacaaacaaggcggggtaacgcaagaagcagctacacccgtctggct

SEQ ID NO: 552582 - DNA, 120 bp, Artificial Sequence
  ENSG00000168575_16 (sequence is synthesized)
gctgttttatggaggagttggaatctgcacaggcctctgggtctgggggagaagagtgatccagaccatggggaaggacctcactcccatcacgccgtccagcggcttcacgatcgagct

SEQ ID NO: 552583 - DNA, 120 bp, Artificial Sequence
  ENSG00000168575_17 (sequence is synthesized)
ggcctcagccttcacagtggtgatcgcctccaacatcgggcttccagtcagcaccacgcactgtaaggtgggctcggtggtggccgtgggctggatccgctcccgcaaggctgtggactg

SEQ ID NO: 552584 - DNA, 120 bp, Artificial Sequence
  ENSG00000168575_18 (sequence is synthesized)
gcgcctctttcggaacatcttcgtggcctggttcgtgaccgtccctgtggctgggctgttcagcgctgctgtcatggctcttctcatgtatgggatccttccatatgtgtgatttgtctt

SEQ ID NO: 552585 - DNA, 120 bp, Artificial Sequence
  ENSG00000168575_19 (sequence is synthesized)
cttccagctgcaaacagctaaagggatggtctggtgttggcgtgtgggagacatgtgtgctcgtgccgcacatacacatcctggccgtgcacggctctctcatgaccagctctctgcctc

SEQ ID NO: 552586 - DNA, 120 bp, Artificial Sequence
  ENSG00000168575_20 (sequence is synthesized)
ccttccaggaggctccatcccacactgttcacccaggctgcggagactcaccttcccgagctaacttaactactgtacataataatatgtattaaactggtatcgtggtgatataatgtg

SEQ ID NO: 552587 - DNA, 120 bp, Artificial Sequence
  ENSG00000168575_21 (sequence is synthesized)
gtgcagttacttatatattaaatatctattgtatccatagaataggcagcattatttcaaacatattcaagttgggagtggagatcattgcctagaagtcaatattcaataaatcttgta

SEQ ID NO: 552588 - DNA, 120 bp, Artificial Sequence
  ENSG00000168575_22 (sequence is synthesized)
cataactatttcgatggcaaatgttaagccttctaaaaggaaagtgtagattggaaaatgattttttttccaaatgatgtttttgccttctaatatactgtaaggtaatgagcttcagaa

SEQ ID NO: 552589 - DNA, 120 bp, Artificial Sequence
  ENSG00000168575_23 (sequence is synthesized)
caggcaacctgaccctgcagaggtcgcgtgctgtgggatgacagcgggacgggagctcacaagtgctttcactgaagatttgttcatatactgtgtattgattgttgtgtaatatatcat

SEQ ID NO: 552590 - DNA, 120 bp, Artificial Sequence
  ENSG00000168575_24 (sequence is synthesized)
cattgcttttgtaaatacgtaaaactgtaattttttaatggtgtgcttcccttatacttttttgatcagagaattttggaaagtaccaaagaagcaggggaatcattggccagtgttacg

SEQ ID NO: 552591 - DNA, 120 bp, Artificial Sequence
  ENSG00000168575_25 (sequence is synthesized)
ttttcacattgtctgtctcccaccctcactgatcacgcctgccccagagcagtgtgtggcggtgacaccgtcacccagcatgcgccacgccgtggctcccaccagcagtgccaccgccac

SEQ ID NO: 552592 - DNA, 120 bp, Artificial Sequence
  ENSG00000168575_26 (sequence is synthesized)
cacaccccagatcccacccaccttgcagtggcctttccttgtcatcagagtagagaatgcacaggtgttggtgagggcgtgtggctgagcactacatgtcaagtccagagtcagtttcta

SEQ ID NO: 552593 - DNA, 120 bp, Artificial Sequence
  ENSG00000168575_27 (sequence is synthesized)
tcccaattctccctgcagcctgaagaacggatccttgtctccaatgtcagcacaaaggaggctttttctgtgctttgacattctagcacttcagggatgagagggagggagaatcctgga

SEQ ID NO: 552594 - DNA, 120 bp, Artificial Sequence
  ENSG00000168575_28 (sequence is synthesized)
tgctggatggagtatttctctgaggcccacacaaagctggacacccccaggctctactccatcccattggagtctcttctttttttgatagcgggagggaggaagtacgactaatgttgg

SEQ ID NO: 552595 - DNA, 120 bp, Artificial Sequence
  ENSG00000168575_29 (sequence is synthesized)
agcctgaaactatggaaatgctgctaaaatttttatattgacaaacattttcttggtacttcattgtcatttttcattaatcaaccatattaaatttataataaaaaatgcccctcagaa

SEQ ID NO: 552596 - DNA, 120 bp, Artificial Sequence
  ENSG00000168575_30 (sequence is synthesized)
agcgtgttcctgcctgctgcttggctgcagttaattttagccggggttagttctatgagttgtaaaagtagaagttagcaagctgaaatgtgacttctcggcctaatgtggtaggatatc

SEQ ID NO: 552597 - DNA, 120 bp, Artificial Sequence
  ENSG00000168575_31 (sequence is synthesized)
aatgccatttctgcagaagtggagcagatcacaggcagtgacaacgcccatccttttggccacactggggtttgggaagagtttcttgtaacagtattttgtatcattttgtctgtgttg

SEQ ID NO: 552598 - DNA, 120 bp, Artificial Sequence
  ENSG00000168575_32 (sequence is synthesized)
atttcctgccggccggtcggtttccggatgaaacgaggagccaggcatctccttggaaacaatgccatctttgaatgtgagagataaacctagtttcagcatgtctgcagcagagaccag

SEQ ID NO: 552599 - DNA, 120 bp, Artificial Sequence
  ENSG00000168575_33 (sequence is synthesized)
caagatgaagaacagtggtatttctctgaaagtcccagtatgtctcccttttgttgggagctgacagtatgattttgggggcatcgggcatcaacagtcactgaatctaaatggctccac

SEQ ID NO: 552600 - DNA, 120 bp, Artificial Sequence
  ENSG00000168575_34 (sequence is synthesized)
cagctgtccaggaattaggaggaagtgcccttgaatgaagcctgggctgcaagcctggttagcagccagggaggacacacacacgttgcaggcatctccttggaaacaatgccatctttg

SEQ ID NO: 552601 - DNA, 120 bp, Artificial Sequence
  ENSG00000168575_35 (sequence is synthesized)
tttcttacattatctttgttaacccatccgcttttgtgtataatattaagttattttccactactgcaatggctagtaatttacttaggctcagagttttactctgtatggacagagaaa

SEQ ID NO: 552602 - DNA, 120 bp, Artificial Sequence
  ENSG00000168575_36 (sequence is synthesized)
agggagaagagggttagagaggaattctaccaccttctgctttcaacaggacatatcctcttgtaggaagagtcctgcagcaggaggttccgctgtgtggcagctgattgcttccttcct

SEQ ID NO: 552603 - DNA, 120 bp, Artificial Sequence
  ENSG00000168575_37 (sequence is synthesized)
gggcattacctgcgagtgccgggcgcctcctgctccgctgtgcgcgcttggggtgggactcggcgggggaggggtcgtgtacattgtcccaccaggcgcaatgtagccgggcggcgcaga

SEQ ID NO: 552604 - DNA, 120 bp, Artificial Sequence
  ENSG00000168575_38 (sequence is synthesized)
tactcttaagaaagcgtctgttctccaaactggctttccattctccccgtcctaaatggtgcgtggctgacaccgtagtgttttcaaaactggatatggccaggatgctatagcattgtc

SEQ ID NO: 552605 - DNA, 120 bp, Artificial Sequence
  ENSG00000168575_39 (sequence is synthesized)
agtataggggagtgtatacatcaccacaccagctgtccaggaattaggaggaagtgcccttgaatgaagcctgggctgcaagcctggttagcagccagggaggacacacacacgttgcag

SEQ ID NO: 552606 - DNA, 80 bp, Artificial Sequence
  ENSG00000168575_40 (sequence is synthesized)
gttttttgagccggagagacgcagcggcggccccagtgccgcccccgggcgcgtgagtggagccgggctcctttccccta

SEQ ID NO: 552607 - DNA, 80 bp, Artificial Sequence
  ENSG00000168575_41 (sequence is synthesized)
tcgcggcggcggcgggttgcgtcccccgcgcctgctggcccacgtggacctggccgtcgcttgccgtgcggcgcctttgc

SEQ ID NO: 552608 - DNA, 120 bp, Artificial Sequence
  ENSG00000168575_42 (sequence is synthesized)
tacatcaggcttattcccacaggaagcctcctaaagcctgtggcgcggcaaccatttccaggactaaataataatgtgtcagatgcctgtgagtggactgcctggccaaatgactcatga

SEQ ID NO: 552609 - DNA, 120 bp, Artificial Sequence
  ENSG00000168575_43 (sequence is synthesized)
agatattcacggaagaatagtcaaaaaccaaagaaaaggcatattctagaagcaccttcaattccatcgaggatttttgagcagctgaagaagaaagttctgaaaatatgagtgacagga

SEQ ID NO: 552610 - DNA, 120 bp, Artificial Sequence
  ENSG00000168575_44 (sequence is synthesized)
tgtgctgaattgctttttcatagtgatgtgctgcttcttgttcatactcttatgactttaatttcacctttatctactcccagcctctgtatatgcctacgtttttaaaaataatttttg

SEQ ID NO: 552611 - DNA, 120 bp, Artificial Sequence
  ENSG00000168575_45 (sequence is synthesized)
gtcttctgaggcccgagcttggggcaggggtttcttgaccctgcattggcagtgtggtcagtggtgtgtgactgtgtgttgatgtctgagtgtggccataaatgtgtgaaggtcagctct

SEQ ID NO: 552612 - DNA, 120 bp, Artificial Sequence
  ENSG00000168575_46 (sequence is synthesized)
gccgaggggatgcaatctcagatcagcagccagcagtgtttgtaaacaacaggagggagattgtgctggtgatgtccaactcacaccaatgaagatcaaccggtttgtgctttgggcagc

SEQ ID NO: 552613 - DNA, 120 bp, Artificial Sequence
  ENSG00000168575_47 (sequence is synthesized)
aggctgcagatggacagtgcctcctgagggcatcgccatgttttagggatccatgttgcaggatacctgtctgcaagagagagtcaaggagggctttttaagcccctggggttcaggcct

SEQ ID NO: 552614 - DNA, 120 bp, Artificial Sequence
  ENSG00000168575_48 (sequence is synthesized)
actcacgctgccggctccggaggcggcacgcggccagcgctgctccgctccggggctctttaccccggagtcggggccgggcgcgcgggaaacggttaccgagcggacctggacgccctc

SEQ ID NO: 552615 - DNA, 120 bp, Artificial Sequence
  ENSG00000168575_49 (sequence is synthesized)
tgccttcgtcatttcctgccggccggtcggtttccggatgaaacgaggagccaggtagtaagcctggagaaaaattgaggccctggctgaaaacataaatagattcatggaggagacatc

SEQ ID NO: 552616 - DNA, 120 bp, Artificial Sequence
  ENSG00000168582_0 (sequence is synthesized)
atactagatgctaatcaccctctgtcaacaaccatggggaagatcaccttctacgaggaccgagactttcagggtcgctgctacaattgcatcagtgactgccccaacctgcgggtctac

SEQ ID NO: 552617 - DNA, 120 bp, Artificial Sequence
  ENSG00000168582_1 (sequence is synthesized)
ttcagccgctgcaactccatccgagtagacagcggctgctggatgctctatgagcgtcccaattaccagggccaccagtacttcctgcgccgaggcaagtaccccgactatcagcactgg

SEQ ID NO: 552618 - DNA, 120 bp, Artificial Sequence
  ENSG00000168582_2 (sequence is synthesized)
aatcctgccgtataattcctcataccagctcgcacaagttaaggctgtacgagagagatgactaccgaggccttatgtctgagctcactgatgactgcgcctgtgttccagaactgttcc

SEQ ID NO: 552619 - DNA, 120 bp, Artificial Sequence
  ENSG00000168582_3 (sequence is synthesized)
gtctccctgagatctattccctccacgtactggagggctgctgggtcctctatgaaatgcccaactaccgggggcggcagtatctgctgaggcctggggactacagaaggtaccacgact

SEQ ID NO: 552620 - DNA, 120 bp, Artificial Sequence
  ENSG00000168582_4 (sequence is synthesized)
gggggggtgcagatgccaaagtcggctctttgagacgggtcaccgatttgtactaagctgtgcctgccttgttgtgatccccatagaaacataataaatatacaagttgtgttccctgca

SEQ ID NO: 552621 - DNA, 120 bp, Artificial Sequence
  ENSG00000168589_0 (sequence is synthesized)
gtctcctagcaacggcgggtagcgttgttgacatcccgggaggctgtgccgccggcctgagcccagagtttcgcggcctccgcgatggcagaggtggaggaaaccttaaagaggatccag

SEQ ID NO: 552622 - DNA, 120 bp, Artificial Sequence
  ENSG00000168589_1 (sequence is synthesized)
agtcataaaggggttattggaactatggttgtaaatgcagaaggtattcccatccgaacaaccttggacaactcaacaactgttcaatatgcaggccttcttcatcacctgacaatgaaa

SEQ ID NO: 552623 - DNA, 120 bp, Artificial Sequence
  ENSG00000168589_2 (sequence is synthesized)
ctcagaacgacctgacttttcttaggatcagatcaaagaaacatgaaatcatggtagctccagataaggaatatcttctgatcgtcattcagaatccatgtgaatagacctgcgatggcc

SEQ ID NO: 552624 - DNA, 120 bp, Artificial Sequence
  ENSG00000168589_3 (sequence is synthesized)
aaggctgtttaagcgacactgggttggaaacacttggctctctcatgagtattaaaattctatttcaatctaactgacccttcaaacattcttttctatttctatatctaaactgttctg

SEQ ID NO: 552625 - DNA, 120 bp, Artificial Sequence
  ENSG00000168589_4 (sequence is synthesized)
catgtctcatttagtcccttttgattatattgtgaagttgtactttagtgatacaataagtgaattctggtatatacgtctctattgtcttataatacacaaaaccaaggattctactaa

SEQ ID NO: 552626 - DNA, 120 bp, Artificial Sequence
  ENSG00000168589_5 (sequence is synthesized)
aaatgcagaagatccacgctttgtgaccttcaagtatgcaagacagctgactgccttccagagaaaaagtggccaacaaatcacaataaaagattagcaaggtattcccatccgaacaac

SEQ ID NO: 552627 - DNA, 120 bp, Artificial Sequence
  ENSG00000168589_6 (sequence is synthesized)
agttctggaggttagaagttgaaatcaagatgtccgaaggctcatgctgtctctgaagactctgtgggaggaccattccttacctcttcctagcttctggtattcccatccgaacaacct

SEQ ID NO: 552628 - DNA, 120 bp, Artificial Sequence
  ENSG00000168589_7 (sequence is synthesized)
tgcagaagggaagaagactaacaccatgtcacagagcaagaacttcagagcagactcactatagacaagatgttcaggggagtgcatttcatataaaaatatgttaacttagtactcaag

SEQ ID NO: 552629 - DNA, 120 bp, Artificial Sequence
  ENSG00000168589_8 (sequence is synthesized)
tagtcagttaatggcttctgaaagatttatgcacaaaaatgttcatcatcaccccattagctataaaaaatataaggtaccaaatgaccaaacaataggagattgattatatgtccataa

SEQ ID NO: 552630 - DNA, 120 bp, Artificial Sequence
  ENSG00000168589_9 (sequence is synthesized)
aatagtgaagtatgcagttattaaaaataatgttgatgacattgtcaacaaggacaacttgtatgttataattttgtgaagaaaaaagcaacagtcaagtttgtaaatatagtttcacac

SEQ ID NO: 552631 - DNA, 120 bp, Artificial Sequence
  ENSG00000168589_10 (sequence is synthesized)
aaaatctacgtagcgacaaaaggatttgagggaaataaactaaaattgttaccagagagggataagccatcacttttttctcttctttacaactatcagtgttttccaatacttccacac

SEQ ID NO: 552632 - DNA, 120 bp, Artificial Sequence
  ENSG00000168589_11 (sequence is synthesized)
gtggttatcacattaattcgtgcctcaatgaatgaatgaatggacaaacacaggccgggagcctgacccacttccctcttccctcccgggacccactgctccaggattgggcgaacctca

SEQ ID NO: 552633 - DNA, 120 bp, Artificial Sequence
  ENSG00000168591_0 (sequence is synthesized)
cccgccccgaagtttgaggggtgtggacggtttgtgacccccttagccgaccctactcctcactggccgggacaactggtcttatcacggaggctggggccaggcagcccttcggttcgg

SEQ ID NO: 552634 - DNA, 120 bp, Artificial Sequence
  ENSG00000168591_1 (sequence is synthesized)
gtgggcccatggaccccagtccaacgccgagggaataggaccatccaaaagcggaaccttcgcctcagaaaaagggtgcgggacccctcctcaccgtgcggtcacggtacggacagggta

SEQ ID NO: 552635 - DNA, 120 bp, Artificial Sequence
  ENSG00000168591_2 (sequence is synthesized)
gatcacaggctgagggacagagcaaagacccctgaggccggacacctggggtcctgccgggcccctccccacgagagttccctgtgtctgtgccaatcgttttcgtctttctttgccgca

SEQ ID NO: 552636 - DNA, 120 bp, Artificial Sequence
  ENSG00000168591_3 (sequence is synthesized)
gtttcttttcctgtaaatcatggttaataacattaaccttcttaccatcaggggttagttgtggttgtgataaataattactaccgttattaagcaattgcaatttgcagtgtgccaggc

SEQ ID NO: 552637 - DNA, 120 bp, Artificial Sequence
  ENSG00000168591_4 (sequence is synthesized)
actgtgccaagtattttgcttcgatgatttcacgtcatcttcaaaacaacctcatgagggctgggtcagttagaacctaaacaaactagagacctggttgcaacccctcaggctctgctg

SEQ ID NO: 552638 - DNA, 120 bp, Artificial Sequence
  ENSG00000168591_5 (sequence is synthesized)
atgctgtccccctttgttcctgcagcgtggaccctgccagcagccaggccatggagctctctgatgtcaccctcattgagggtgtgggtaatgaggtgatggtggtggcaggtgtggtgg

SEQ ID NO: 552639 - DNA, 120 bp, Artificial Sequence
  ENSG00000168591_6 (sequence is synthesized)
tgctgattctagccttggtcctagcttggctctctacctacgtagcagacagcggtagcaaccagctcctgggcgctattgtgtcagcaggcgacacatccgtcctccacctggggcatg

SEQ ID NO: 552640 - DNA, 120 bp, Artificial Sequence
  ENSG00000168591_7 (sequence is synthesized)
tggaccacctggtggcaggccaaggcaaccccgagccaactgaactcccccatccatcagagggtaatgatgagaaggctgaagaggcgggtgaaggtcggggagactccactggggagg

SEQ ID NO: 552641 - DNA, 120 bp, Artificial Sequence
  ENSG00000168591_8 (sequence is synthesized)
ctggagctgggggtggtgttgagcccagccttgagcatctccttgacatccaaggcctgcccaaaagacaagcaggtgcaggcagcagcagtccagaggcccccctgagatctgaggata

SEQ ID NO: 552642 - DNA, 120 bp, Artificial Sequence
  ENSG00000168591_9 (sequence is synthesized)
gcacctgcctccctcccagccctggcctcatcactgtgcggctcaaattcctcaatgataccgaggagctggctgtggctaggccagaggataccgtgggtgccctgaagagcaaatact

SEQ ID NO: 552643 - DNA, 120 bp, Artificial Sequence
  ENSG00000168591_10 (sequence is synthesized)
agatgaaactgatctaccagggccgcctgctacaagacccagcccgcacactgcgttctctgaacattaccgacaactgtgtgattcactgccaccgctcacccccagggtcagctgttc

SEQ ID NO: 552644 - DNA, 120 bp, Artificial Sequence
  ENSG00000168591_11 (sequence is synthesized)
caggcccctcagcctccttggccccctcggccactgagccacccagccttggtgtcaatgtgggcagcctcatggtgcctgtctttgtggtgctgttgggtgtggtctggtacttccgaa

SEQ ID NO: 552645 - DNA, 120 bp, Artificial Sequence
  ENSG00000168591_12 (sequence is synthesized)
tcaattaccgccaattcttcacagcacctgccactgtctccctggtgggagtcaccgtcttcttcagcttcctagtatttgggatgtatggacgataaggacataggaagaaaatgaaag

SEQ ID NO: 552646 - DNA, 120 bp, Artificial Sequence
  ENSG00000168591_13 (sequence is synthesized)
gcatggtctttctcctttacggcctccccacttttcctggccagagctgggcccaagggccggggagggaggggtggaaaggatgtgatggaaatctcctccataggacacaggaggcaa

SEQ ID NO: 552647 - DNA, 120 bp, Artificial Sequence
  ENSG00000168591_14 (sequence is synthesized)
gtatgcggcctccccttctcatccacaggagtacagatgtccctcccgtgcgagcacaactcaggtagaaatgaggatgtcatcttccttcacttttagggtcctctgaaggagttcaaa

SEQ ID NO: 552648 - DNA, 120 bp, Artificial Sequence
  ENSG00000168591_15 (sequence is synthesized)
gctgctggccaagctcagtggggagcctgggctctgagattccctcccacctgtggttctgactcttcccagtgtcctgcatgtctgcccccagcacccagggctgcctgcaagggcagc

SEQ ID NO: 552649 - DNA, 120 bp, Artificial Sequence
  ENSG00000168591_16 (sequence is synthesized)
tcagcatggccccagcacaactccgtagggagcctggagtatccttccatttctcagccaaatactcatcttttgagactgaaatcacactggcgggaatgaagattgtgccagccttct

SEQ ID NO: 552650 - DNA, 120 bp, Artificial Sequence
  ENSG00000168591_17 (sequence is synthesized)
cttatgggcacctagccgccttcaccttcttcctctaccccttagcaggaatagggtgtcctcccttctttcaaagcactttgcttgcattttattttatttttttaagagtccttcata

SEQ ID NO: 552651 - DNA, 120 bp, Artificial Sequence
  ENSG00000168591_18 (sequence is synthesized)
gagctcagtcaggaaggggatggggcaccaagccaagcccccagcattgggagcggccaggccacagctgctgctcccgtagtcctcaggctgtaagcaagagacagcactggcccttgg

SEQ ID NO: 552652 - DNA, 120 bp, Artificial Sequence
  ENSG00000168591_19 (sequence is synthesized)
ccagcgtcctaccctgcccaactccaaggactgggtatggattgctgggccctaggctcttgcttctggggctattggagggtcagtgtctgtgactgaataaagttccattttgtggtc

SEQ ID NO: 552653 - DNA, 120 bp, Artificial Sequence
  ENSG00000168591_20 (sequence is synthesized)
gaagccggaagagaccggaccctgaacagaatcgcagattgccagcccttttcccgacccctacggaaagacgagtccaggggccgtcctggcgaggtcaaaacatttagtctggtcttt

SEQ ID NO: 552654 - DNA, 120 bp, Artificial Sequence
  ENSG00000168591_21 (sequence is synthesized)
acgggagatgcagtttatttacaccagcagccatgggggcagagggaatacacagcgtttacaaagttagctacctgtacagaatggattacatatgcaaaaataaaaatctcaagacca

SEQ ID NO: 552655 - DNA, 120 bp, Artificial Sequence
  ENSG00000168591_22 (sequence is synthesized)
ccagcccttggttgcctctaaggaggctggtgcagacatgggagctgcagcaaagtgtaagatccagcccctaccaagggcaggtagatactttcttagaaatacacccttcaggccggg

SEQ ID NO: 552656 - DNA, 79 bp, Artificial Sequence
  ENSG00000168591_23 (sequence is synthesized)
caggtagatactttcttagaaatacacccttcaggccgggtgcagtggctcccgggactttgggaggccgaggcgggtg

SEQ ID NO: 552657 - DNA, 81 bp, Artificial Sequence
  ENSG00000168591_24 (sequence is synthesized)
caaaacaaacaaatacacccctcattagttaaggataaagatgaggggggcctgtcgcggtggctcacgcctgtaatccca

SEQ ID NO: 552658 - DNA, 120 bp, Artificial Sequence
  ENSG00000168591_25 (sequence is synthesized)
tttaggtttaggttggggtgccggaattaggaaggtttgtgcccccttctacacaacactgaactccttttttttttttttcagggctgggtcagttagaacctaaacaaactagagacc

SEQ ID NO: 552659 - DNA, 120 bp, Artificial Sequence
  ENSG00000168591_26 (sequence is synthesized)
cattatattggacacttcagtaccaagagaaatacatacgatccttgtctaccaggagtctaatagaaagatggacagggctgggtcagttagaacctaaacaaactagagacctggttg

SEQ ID NO: 552660 - DNA, 120 bp, Artificial Sequence
  ENSG00000168594_0 (sequence is synthesized)
gtgacatcacatccactaaccaaatggggtggtgtgagtatctcctataaaataaaagctctcctgatggcctgttcctgcacatttcctgaggacgccctcgatcacaagcagcttgct

SEQ ID NO: 552661 - DNA, 120 bp, Artificial Sequence
  ENSG00000168594_1 (sequence is synthesized)
ggatgaataaaggaaagaaggtttatatacactaataatagaaatgttttgggatggttcatgatttcgaaaagcttcagagaaaataaagatgcttaatgttagagtacaaaacattct

SEQ ID NO: 552662 - DNA, 120 bp, Artificial Sequence
  ENSG00000168594_2 (sequence is synthesized)
ccctgcagtctcacgaactgtgaacaaaaactgaagtgaaaactcatagtgcataactcgtcaatactcctgtgatcgtataaccatcagcaagaaaacaaatttgattgagcccccatc

SEQ ID NO: 552663 - DNA, 120 bp, Artificial Sequence
  ENSG00000168594_3 (sequence is synthesized)
cagtcctctttgcgtggaatcagacctcttttgcagtggaaaggagcagagaatgtgactttcctgaacaacaggagcaagaatcaatgccagattctcttctctaaaaataatcaattt

SEQ ID NO: 552664 - DNA, 120 bp, Artificial Sequence
  ENSG00000168594_4 (sequence is synthesized)
gttactacagtgctgcagctctgatggttcaactctgccaaaagatggatctttaatgattagcactacacactgaccaactcagaagaaggagccacaccacctgtgactccagccctg

SEQ ID NO: 552665 - DNA, 120 bp, Artificial Sequence
  ENSG00000168594_5 (sequence is synthesized)
acttctgctctggaccagtgtttccataacagggacttcaaaatcactgtgatttgaagcctttttgaacatgaagatgttactcctgctgcattgccttggggtgtttctgtcctgttc

SEQ ID NO: 552666 - DNA, 120 bp, Artificial Sequence
  ENSG00000168594_6 (sequence is synthesized)
tggacacatccaggatgagcacccccaatatcacagccctccggatgtggtgattcctgtgaggataactggcaccaccagaggcatgacacctccaggctggctctcctatatcctgcc

SEQ ID NO: 552667 - DNA, 120 bp, Artificial Sequence
  ENSG00000168594_7 (sequence is synthesized)
ctttggaggccagaaacacattatccacataaaggtcaagaagcttttgttttccaaacacctccctgtgttcacctacacagaccagggtgctatccttgaggaccagccatttgtcca

SEQ ID NO: 552668 - DNA, 120 bp, Artificial Sequence
  ENSG00000168594_8 (sequence is synthesized)
gaataactgctactatcatggttatgtggaaggggacccagaatccctggtttccctcagtacctgttttgggggttttcaaggaatattacagataaatgactttgcttatgaaatcaa

SEQ ID NO: 552669 - DNA, 120 bp, Artificial Sequence
  ENSG00000168594_9 (sequence is synthesized)
gcccctagcattttctaccacgtttgaacatctggtatacaagatggacagtgaggagaaacaattttcaaccatgagatccggatttatgcaaaatgaaataacatgccgaatggaatt

SEQ ID NO: 552670 - DNA, 120 bp, Artificial Sequence
  ENSG00000168594_10 (sequence is synthesized)
tgaagaaattgataattccactcagaagcaaagttcttatgtgggctggtggatccattttaggattgttgaaattgtagtcgtcattgataattatctgtacattcgttatgaaaggaa

SEQ ID NO: 552671 - DNA, 120 bp, Artificial Sequence
  ENSG00000168594_11 (sequence is synthesized)
cgactcaaagttgctggaggatctatatgttattgttaatatagtggattccattttggatgtcattggtgttaaggtgttattatttggtttggagatctggaccaataaaaacctcat

SEQ ID NO: 552672 - DNA, 120 bp, Artificial Sequence
  ENSG00000168594_12 (sequence is synthesized)
tgtagtagatgatgtaaggaaatctgtgcacctgtattgcaagtggaagtcggagaacattacgccccggatgcaacatgacacctcacatcttttcacaactctaggattaagagggtt

SEQ ID NO: 552673 - DNA, 120 bp, Artificial Sequence
  ENSG00000168594_13 (sequence is synthesized)
ttttcaattgcagtggctcatcatctaggtcataatttgggcatgaaccatgatgaggatacatgtcgttgttcacaacctagatgcataatgcatgaaggcaacccaccaataactaaa

SEQ ID NO: 552674 - DNA, 120 bp, Artificial Sequence
  ENSG00000168594_14 (sequence is synthesized)
tttagcaattgtagttatggtgatttttgggaatatactgtagagaggacaaagtgtttgcttgaaacagtacacacaaaggacatctttaatgtgaagcgctgtgggaatggtgttgtt

SEQ ID NO: 552675 - DNA, 120 bp, Artificial Sequence
  ENSG00000168594_15 (sequence is synthesized)
gaagaaggagaagagtgtgactgtggacctttaaagcattgtgcaaaagatccctgctgtctgtcaaattgcactctgactgatggttctacttgtgcttttgggctttgttgcaaagac

SEQ ID NO: 552676 - DNA, 120 bp, Artificial Sequence
  ENSG00000168594_16 (sequence is synthesized)
tgcaagttcctaccatcagggaaagtgtgtagaaaggaggtcaatgaatgtgatcttccagagtggtgcaatggtacttcccataagtgcccagatgacttttatgtggaagatggaatt

SEQ ID NO: 552677 - DNA, 120 bp, Artificial Sequence
  ENSG00000168594_17 (sequence is synthesized)
ccctgtaaggagaggggctactgctatgaaaagagctgtcatgaccgcaatgaacagtgtaggaggatttttggtgcaggcgcaaatactgcaagtgagacttgctacaaagaattgaac

SEQ ID NO: 552678 - DNA, 120 bp, Artificial Sequence
  ENSG00000168594_18 (sequence is synthesized)
accttaggtgaccgtgttggtcactgtggtatcaaaaatgctacatatataaagtgtaatatctcagatgtccagtgtggaagaattcagtgtgagaatgtgacagaaattcccaatatg

SEQ ID NO: 552679 - DNA, 120 bp, Artificial Sequence
  ENSG00000168594_19 (sequence is synthesized)
agtgatcatactactgtgcattgggctcgcttcaatgacataatgtgctggagtactgattaccatttggggatgaagggacctgatattggtgaagtgaaagatggaacagagtgtggg

SEQ ID NO: 552680 - DNA, 120 bp, Artificial Sequence
  ENSG00000168594_20 (sequence is synthesized)
atagatcatatatgcatccacaggcactgtgtccatataaccatcttgaatagtaattgctcacctgcattttgtaacaagaggggcatctgcaacaataaacatcactgccattgcaat

SEQ ID NO: 552681 - DNA, 120 bp, Artificial Sequence
  ENSG00000168594_21 (sequence is synthesized)
tatctgtgggaccctcccaactgcctgataaaaggctatggaggtagtgttgacagtggcccaccccctaagagaaagaagaaaaagaagttctgttatctgtgtatattgttgcttatt

SEQ ID NO: 552682 - DNA, 120 bp, Artificial Sequence
  ENSG00000168594_22 (sequence is synthesized)
gttttgtttattttattatgttgtctttatcgactttgtaaaaaaagtaaaccaataaaaaagcagcaagatgttcaaactccatctgcaaaagaagaggaaaaaattcagcgtcgacct

SEQ ID NO: 552683 - DNA, 120 bp, Artificial Sequence
  ENSG00000168594_23 (sequence is synthesized)
catgagttacctccccagagtcaaccttgggtgatgccttcccagagtcaacctcctgtgacgccttcccagagtcatcctcaggtgatgccttcccagagtcaacctcctgtgacaccc

SEQ ID NO: 552684 - DNA, 120 bp, Artificial Sequence
  ENSG00000168594_24 (sequence is synthesized)
tcccagagtcaacctcgggtgatgccttctcagagtcaacctcctgtgatgccttcccagagtcatcctcagttgacgccttcccagagtcaacctcctgtgacaccctcccagaggcaa

SEQ ID NO: 552685 - DNA, 120 bp, Artificial Sequence
  ENSG00000168594_25 (sequence is synthesized)
cctcagttgatgccttcccagagtcaacctcctgtgacgccctcctagagccaacctcagttgatgccttcccagagtcaacctcctgtgacgccctcccagagccaacctcgggtgaca

SEQ ID NO: 552686 - DNA, 120 bp, Artificial Sequence
  ENSG00000168594_26 (sequence is synthesized)
ccctcccagagtcaacctcatgtgacaccttaccggagtaaaagtggtaaacaaaagcaatcagtaccaattccaaaaactgtatccagaaaaggtacattaaaaaaataattcctagta

SEQ ID NO: 552687 - DNA, 120 bp, Artificial Sequence
  ENSG00000168594_27 (sequence is synthesized)
gtgacatcacatccactaaccaaatggggtggtgtgagtatctcctataaaataaaagctctcctgatggcctgttcctgcacatttcctgaggacgccctcgatcacaagcagaatctg

SEQ ID NO: 552688 - DNA, 120 bp, Artificial Sequence
  ENSG00000168594_28 (sequence is synthesized)
cagtggaaaggagcaggtaaaacaaataagcagaggcacaaaatcatcaccaaaccagactcactgaaatgccaacactggcatgtgcgcagacattttctattctggacttacttctaa

SEQ ID NO: 552689 - DNA, 120 bp, Artificial Sequence
  ENSG00000168594_29 (sequence is synthesized)
acagcaatgccaacaagcatgagaggtgaaaaaatgtggataaatacatgtttggtttattgaactaggtcttatcatatccaaattaaaaacaaaaggcacatctcaatttcaaaataa

SEQ ID NO: 552690 - DNA, 120 bp, Artificial Sequence
  ENSG00000168594_30 (sequence is synthesized)
aagcctggccagcttctggccaggaagcgttgttgactggatttaagttgggtttccttaagtaatagtaagggttctaaaaagatgaaggtgtgaagtctaaagagatggctgctagag

SEQ ID NO: 552691 - DNA, 120 bp, Artificial Sequence
  ENSG00000168594_31 (sequence is synthesized)
acgcaaggcttcccaccattttttttttttttggtctttcccgttttacatcttcacaatgaaatataatttgatgtttgcccttgtttgaatactccatgaagatgaggaaaatacatg

SEQ ID NO: 552692 - DNA, 120 bp, Artificial Sequence
  ENSG00000168594_32 (sequence is synthesized)
ttttattgactgctgggtcttacaattcctcaccagatggctttgaacacagttcgatcatcaatctcattgatgctactgataattctgttggaacagcaggagatggctctagctcct

SEQ ID NO: 552693 - DNA, 120 bp, Artificial Sequence
  ENSG00000168594_33 (sequence is synthesized)
aaacctgccactcgaaacacctgtcatcacctccaaagatctttccaatacccactggtacagttgtaactcaatcacttcgcaagacagataattgcatgtggccaaagatgtacctgg

SEQ ID NO: 552694 - DNA, 120 bp, Artificial Sequence
  ENSG00000168594_34 (sequence is synthesized)
tcaacaggacaggttagactatctgctctcaggtagtccctccaaatcaatggctggactcggttgttcaaaatgaataggaaatcctaaggcttatcagcaaattggaaagtcatgttc

SEQ ID NO: 552695 - DNA, 120 bp, Artificial Sequence
  ENSG00000168594_35 (sequence is synthesized)
gaggtcctatcaagctaggctcctaaaagatatagtccccacctggaggaggggatcaaagaattttaaacagctctttcattttagggccactatttgtgccctaagactatgcttctt

SEQ ID NO: 552696 - DNA, 120 bp, Artificial Sequence
  ENSG00000168594_36 (sequence is synthesized)
gtacagaagctagctattaatttgcctcccactcaaacatgtttgcttaaaaactttaattgtggttattagggaagttcagagtgatttgggtcacattaccagagatcatgtatccaa

SEQ ID NO: 552697 - DNA, 120 bp, Artificial Sequence
  ENSG00000168594_37 (sequence is synthesized)
aacacaactgtagagatctctcccaaatgtatctacccttgtttactcatgggaacttcctgggaatgtaactgactcattacattgtcacaactgtgggcagtttccctaaaatgggaa

SEQ ID NO: 552698 - DNA, 120 bp, Artificial Sequence
  ENSG00000168594_38 (sequence is synthesized)
aaaaagaaaagaaagaaagaaaaaaggaaggtattcagatcagcctcaactcactggtaaggattgccttagatttttatccttgagggccaaggattagtctgtgtaattgaaaatata

SEQ ID NO: 552699 - DNA, 120 bp, Artificial Sequence
  ENSG00000168594_39 (sequence is synthesized)
gccaaggattagtctgtgtaattgaaaatatatcctgctggattaatgctatggaccatttcaatgcagaaacttgtgaaagacacttcttggttttctaaagtagaccttattgatgta

SEQ ID NO: 552700 - DNA, 120 bp, Artificial Sequence
  ENSG00000168594_40 (sequence is synthesized)
taggaattattctataaataccttgaaggacatggatgagcataatattgcagattgaccagatctacttgtttagagtactagagatagtagccttatggtcagattattcagggtagc

SEQ ID NO: 552701 - DNA, 120 bp, Artificial Sequence
  ENSG00000168594_41 (sequence is synthesized)
tgttgagattattcagggcagctgttgacatggcataatctaatgggaaaatttgccagaaaccaagatgatattgattagagggagtgctgttttggggaaacaattctctatggatct

SEQ ID NO: 552702 - DNA, 120 bp, Artificial Sequence
  ENSG00000168594_42 (sequence is synthesized)
ctgatgtctccatgtcttacaagcagaagcactgactgctgtttgtcctggactatcttttaaggcatatttacatagagatagtgtcttcacgggagcaaagagcacacatgcttactg

SEQ ID NO: 552703 - DNA, 120 bp, Artificial Sequence
  ENSG00000168594_43 (sequence is synthesized)
cccagataatgtttctctgagagcaaaaagcagaaatgcatcctgctcattactaaagattcgtgtttcttaagctcagtgtctctttcctgtggactacaacccactaaatgtgcatgt

SEQ ID NO: 552704 - DNA, 120 bp, Artificial Sequence
  ENSG00000168594_44 (sequence is synthesized)
atcatctgtccctcctagtgtctccttatagaaatggggacctgggaacaggtgcaaaatatatgctgatacactggctactggaattagcttaaagtaataaactcccctttttctgtg

SEQ ID NO: 552705 - DNA, 120 bp, Artificial Sequence
  ENSG00000168610_0 (sequence is synthesized)
gaattatgcatgacggcgtgcctcggccaggctggggctgggcgaggattggctgaaggggctgtaattcagcggtttccggagctgcggcggcgcagactgggagggggagccgggggt

SEQ ID NO: 552706 - DNA, 120 bp, Artificial Sequence
  ENSG00000168610_1 (sequence is synthesized)
tccgacgtcgcagccgagggaacaagccccaaccggatcctggacaggcaccccggcttggcgctgtctctccccctcggctcggagaggcccttcggcctgagggagcctcgccgcccg

SEQ ID NO: 552707 - DNA, 120 bp, Artificial Sequence
  ENSG00000168610_2 (sequence is synthesized)
tccccggcacacgcgcagccccggcctctcggcctctgccggagaaacagttgggacccctgattttagcaggatggcccaatggaatcagctacagcagcttgacacacggtacctgga

SEQ ID NO: 552708 - DNA, 120 bp, Artificial Sequence
  ENSG00000168610_3 (sequence is synthesized)
gcagctccatcagctctacagtgacagcttcccaatggagctgcggcagtttctggccccttggattgagagtcaagattgggcatatgcggccagcaaagaatcacatgccactttggt

SEQ ID NO: 552709 - DNA, 120 bp, Artificial Sequence
  ENSG00000168610_4 (sequence is synthesized)
gtttcataatctcctgggagagattgaccagcagtatagccgcttcctgcaagagtcgaatgttctctatcagcacaatctacgaagaatcaagcagtttcttcagagcaggtatcttga

SEQ ID NO: 552710 - DNA, 120 bp, Artificial Sequence
  ENSG00000168610_5 (sequence is synthesized)
gaagccaatggagattgcccggattgtggcccggtgcctgtgggaagaatcacgccttctacagactgcagccactgcggcccagcaagggggccaggccaaccaccccacagcagccgt

SEQ ID NO: 552711 - DNA, 120 bp, Artificial Sequence
  ENSG00000168610_6 (sequence is synthesized)
ggtgacggagaagcagcagatgctggagcagcaccttcaggatgtccggaagagagtgcaggatctagaacagaaaatgaaagtggtagagaatctccaggatgactttgatttcaacta

SEQ ID NO: 552712 - DNA, 120 bp, Artificial Sequence
  ENSG00000168610_7 (sequence is synthesized)
taaaaccctcaagagtcaaggagacatgcaagatctgaatggaaacaaccagtcagtgaccaggcagaagatgcagcagctggaacagatgctcactgcgctggaccagatgcggagaag

SEQ ID NO: 552713 - DNA, 120 bp, Artificial Sequence
  ENSG00000168610_8 (sequence is synthesized)
catcgtgagtgagctggcggggcttttgtcagcgatggagtacgtgcagaaaactctcacggacgaggagctggctgactggaagaggcggcaacagattgcctgcattggaggcccgcc

SEQ ID NO: 552714 - DNA, 120 bp, Artificial Sequence
  ENSG00000168610_9 (sequence is synthesized)
caacatctgcctagatcggctagaaaactggataacgtcattagcagaatctcaacttcagacccgtcaacaaattaagaaactggaggagttgcagcaaaaagtttcctacaaagggga

SEQ ID NO: 552715 - DNA, 120 bp, Artificial Sequence
  ENSG00000168610_10 (sequence is synthesized)
ccccattgtacagcaccggccgatgctggaggagagaatcgtggagctgtttagaaacttaatgaaaagtgcctttgtggtggagcggcagccctgcatgcccatgcatcctgaccggcc

SEQ ID NO: 552716 - DNA, 120 bp, Artificial Sequence
  ENSG00000168610_11 (sequence is synthesized)
cctcgtcatcaagaccggcgtccagttcactactaaagtcaggttgctggtcaaattccctgagttgaattatcagcttaaaattaaagtgtgcattgacaaagactctggggacgttgc

SEQ ID NO: 552717 - DNA, 120 bp, Artificial Sequence
  ENSG00000168610_12 (sequence is synthesized)
agctctcagaggatcccggaaatttaacattctgggcacaaacacaaaagtgatgaacatggaagaatccaacaacggcagcctctctgcagaattcaaacacttgaccctgagggagca

SEQ ID NO: 552718 - DNA, 120 bp, Artificial Sequence
  ENSG00000168610_13 (sequence is synthesized)
gagatgtgggaatgggggccgagccaattgtgatgcttccctgattgtgactgaggagctgcacctgatcacctttgagaccgaggtgtatcaccaaggcctcaagattgacctagagac

SEQ ID NO: 552719 - DNA, 120 bp, Artificial Sequence
  ENSG00000168610_14 (sequence is synthesized)
ccactccttgccagttgtggtgatctccaacatctgtcagatgccaaatgcctgggcgtccatcctgtggtacaacatgctgaccaacaatcccaagaatgtaaacttttttaccaagcc

SEQ ID NO: 552720 - DNA, 120 bp, Artificial Sequence
  ENSG00000168610_15 (sequence is synthesized)
cccaattggaacctgggatcaagtggccgaggtcctgagctggcagttctcctccaccaccaagcgaggactgagcatcgagcagctgactacactggcagagaaactcttgggacctgg

SEQ ID NO: 552721 - DNA, 120 bp, Artificial Sequence
  ENSG00000168610_16 (sequence is synthesized)
tgtgaattattcagggtgtcagatcacatgggctaaattttgcaaagaaaacatggctggcaagggcttctccttctgggtctggctggacaatatcattgaccttgtgaaaaagtacat

SEQ ID NO: 552722 - DNA, 120 bp, Artificial Sequence
  ENSG00000168610_17 (sequence is synthesized)
cctggccctttggaacgaagggtacatcatgggctttatcagtaaggagcgggagcgggccatcttgagcactaagcctccaggcaccttcctgctaagattcagtgaaagcagcaaaga

SEQ ID NO: 552723 - DNA, 120 bp, Artificial Sequence
  ENSG00000168610_18 (sequence is synthesized)
aggaggcgtcactttcacttgggtggagaaggacatcagcggtaagacccagatccagtccgtggaaccatacacaaagcagcagctgaacaacatgtcatttgctgaaatcatcatggg

SEQ ID NO: 552724 - DNA, 120 bp, Artificial Sequence
  ENSG00000168610_19 (sequence is synthesized)
ctataagatcatggatgctaccaatatcctggtgtctccactggtctatctctatcctgacattcccaaggaggaggcattcggaaagtattgtcggccagagagccaggagcatcctga

SEQ ID NO: 552725 - DNA, 120 bp, Artificial Sequence
  ENSG00000168610_20 (sequence is synthesized)
agctgacccaggtagcgctgccccatacctgaagaccaagtttatctgtgtgacaccaacgacctgcagcaataccattgacctgccgatgtccccccgcactttagattcattgatgca

SEQ ID NO: 552726 - DNA, 120 bp, Artificial Sequence
  ENSG00000168610_21 (sequence is synthesized)
aataatggtgaaggtgctgaaccctcagcaggagggcagtttgagtccctcacctttgacatggagttgacctcggagtgcgctacctcccccatgtgaggagctgagaacggaagctgc

SEQ ID NO: 552727 - DNA, 120 bp, Artificial Sequence
  ENSG00000168610_22 (sequence is synthesized)
agaaagatacgactgaggcgcctacctgcattctgccacccctcacacagccaaaccccagatcatctgaaactactaactttgtggttccagattttttttaatctcctacttctgcta

SEQ ID NO: 552728 - DNA, 120 bp, Artificial Sequence
  ENSG00000168610_23 (sequence is synthesized)
tctttgagcaatctgggcacttttaaaaatagagaaatgagtgaatgtgggtgatctgcttttatctaaatgcaaataaggatgtgttctctgagacccatgatcaggggatgtggcggg

SEQ ID NO: 552729 - DNA, 120 bp, Artificial Sequence
  ENSG00000168610_24 (sequence is synthesized)
gggtggctagagggagaaaaaggaaatgtcttgtgttgttttgttcccctgccctcctttctcagcagctttttgttattgttgttgttgttcttagacaagtgcctcctggtgcctgcg

SEQ ID NO: 552730 - DNA, 120 bp, Artificial Sequence
  ENSG00000168610_25 (sequence is synthesized)
gcatccttctgcctgtttctgtaagcaaatgccacaggccacctatagctacatactcctggcattgcactttttaaccttgctgacatccaaatagaagataggactatctaagcccta

SEQ ID NO: 552731 - DNA, 120 bp, Artificial Sequence
  ENSG00000168610_26 (sequence is synthesized)
aagccctaggtttctttttaaattaagaaataataacaattaaagggcaaaaaacactgtatcagcatagcctttctgtatttaagaaacttaagcagccgggcatggtggctcacgcct

SEQ ID NO: 552732 - DNA, 120 bp, Artificial Sequence
  ENSG00000168610_27 (sequence is synthesized)
tctcaaaaaaaaaaaaaaaaaaaagaaacttcagttaacagcctccttggtgctttaagcattcagcttccttcaggctggtaatttatataatccctgaaacgggcttcaggtcaaacc

SEQ ID NO: 552733 - DNA, 120 bp, Artificial Sequence
  ENSG00000168610_28 (sequence is synthesized)
gtcaaacccttaagacatctgaagctgcaacctggcctttggtgttgaaataggaaggtttaaggagaatctaagcattttagacttttttttataaatagacttattttcctttgtaat

SEQ ID NO: 552734 - DNA, 120 bp, Artificial Sequence
  ENSG00000168610_29 (sequence is synthesized)
gtattggccttttagtgagtaaggctgggcagagggtgcttacaaccttgactccctttctccctggacttgatctgctgtttcagaggctaggttgtttctgtgggtgccttatcaggg

SEQ ID NO: 552735 - DNA, 120 bp, Artificial Sequence
  ENSG00000168610_30 (sequence is synthesized)
ctgggatacttctgattctggcttccttcctgccccaccctcccgaccccagtccccctgatcctgctagaggcatgtctccttgcgtgtctaaaggtccctcatcctgtttgttttagg

SEQ ID NO: 552736 - DNA, 120 bp, Artificial Sequence
  ENSG00000168610_31 (sequence is synthesized)
aatcctggtctcaggacctcatggaagaagagggggagagagttacaggttggacatgatgcacactatggggccccagcgacgtgtctggttgagctcagggaatatggttcttagcca

SEQ ID NO: 552737 - DNA, 120 bp, Artificial Sequence
  ENSG00000168610_32 (sequence is synthesized)
gtttcttggtgatatccagtggcacttgtaatggcgtcttcattcagttcatgcagggcaaaggcttactgataaacttgagtctgccctcgtatgagggtgtatacctggcctccctct

SEQ ID NO: 552738 - DNA, 120 bp, Artificial Sequence
  ENSG00000168610_33 (sequence is synthesized)
gaggctggtgactcctccctgctggggccccacaggtgaggcagaacagctagagggcctccccgcctgcccgccttggctggctagctcgcctctcctgtgcgtatgggaacacctagc

SEQ ID NO: 552739 - DNA, 120 bp, Artificial Sequence
  ENSG00000168610_34 (sequence is synthesized)
acgtgctggatgggctgcctctgactcagaggcatggccggatttggcaactcaaaaccaccttgcctcagctgatcagagtttctgtggaattctgtttgttaaatcaaattagctggt

SEQ ID NO: 552740 - DNA, 120 bp, Artificial Sequence
  ENSG00000168610_35 (sequence is synthesized)
ctctgaattaagggggagacgaccttctctaagatgaacagggttcgccccagtcctcctgcctggagacagttgatgtgtcatgcagagctcttacttctccagcaacactcttcagta

SEQ ID NO: 552741 - DNA, 120 bp, Artificial Sequence
  ENSG00000168610_36 (sequence is synthesized)
cataataagcttaactgataaacagaatatttagaaaggtgagacttgggcttaccattgggtttaaatcatagggacctagggcgagggttcagggcttctctggagcagatattgtca

SEQ ID NO: 552742 - DNA, 120 bp, Artificial Sequence
  ENSG00000168610_37 (sequence is synthesized)
agttcatggccttaggtagcatgtatctggtcttaactctgattgtagcaaaagttctgagaggagctgagccctgttgtggcccattaaagaacagggtcctcaggccctgcccgcttc

SEQ ID NO: 552743 - DNA, 120 bp, Artificial Sequence
  ENSG00000168610_38 (sequence is synthesized)
ctgtccactgccccctccccatccccagcccagccgagggaatcccgtgggttgcttacctacctataaggtggtttataagctgctgtcctggccactgcattcaaattccaatgtgta

SEQ ID NO: 552744 - DNA, 77 bp, Artificial Sequence
  ENSG00000168610_39 (sequence is synthesized)
agctgctgtcctggccactgcattcaaattccaatgtgtacttcatagtgtaaaaatttatattattgtgctgtatc

SEQ ID NO: 552745 - DNA, 120 bp, Artificial Sequence
  ENSG00000168610_40 (sequence is synthesized)
agattcattgatgcagtttggaaataatggtgaaggtgctgaaccctcagcaggagggcagtttggtgagtatttggttgacagactttgtccctataagggaagttggtcccctttgtg

SEQ ID NO: 552746 - DNA, 120 bp, Artificial Sequence
  ENSG00000168610_41 (sequence is synthesized)
tgatgctctcacatgtacacaccgagagctggtcactcggaatggtaggagattctagagctttgctttccaaaagagatggtatgaatgccacatgtgtgagtataaatcttctagcag

SEQ ID NO: 552747 - DNA, 120 bp, Artificial Sequence
  ENSG00000168610_42 (sequence is synthesized)
ccacactggaaatagacgaacttaatttttacaatatattttatttaacccactaaatccaacatactctcaatttaacatttcagaaaaagttgaggctgggtgagtggctcatgcctg

SEQ ID NO: 552748 - DNA, 120 bp, Artificial Sequence
  ENSG00000168610_43 (sequence is synthesized)
aaataaacaaaactaaactaaaaagaaaaagttgagacctttttttattcttttttttcatactaagcctttaaaatccagtgggcttttgacagccacagcacagctcagtttggacaa

SEQ ID NO: 552749 - DNA, 120 bp, Artificial Sequence
  ENSG00000168610_44 (sequence is synthesized)
accaaatctcaaatgcttggtggccacgtgtgtctcggggctcctgaattaaacagtagatcaagggcagaagatctcaggacagccttagagcttctgtaaacatggagctctgggaat

SEQ ID NO: 552750 - DNA, 120 bp, Artificial Sequence
  ENSG00000168610_45 (sequence is synthesized)
cagttaaggtgggaatgagaaaggacccttcccgaggcagggtcctccagggaggagggtaaatctggcttttctgaccatccctgggccttaaggggcaggagattggatagcagtggt

SEQ ID NO: 552751 - DNA, 120 bp, Artificial Sequence
  ENSG00000168610_46 (sequence is synthesized)
cacgtggaggctgttaaacttttacataatctagggaaagaagggacacaaggtggcattagtctagggtcaggtgggaaaaggttatgctgaaaagtctctgcagctcaggacagcttt

SEQ ID NO: 552752 - DNA, 120 bp, Artificial Sequence
  ENSG00000168610_47 (sequence is synthesized)
gtgcaaagaactgaagttcacagctgctagtgcctgggagatcaaatagtataaatgagggcagacaaccctgaggggcagatggagctttccagacaatcttggcatgaggatgagtga

SEQ ID NO: 552753 - DNA, 120 bp, Artificial Sequence
  ENSG00000168610_48 (sequence is synthesized)
ctcggcctctgccggagaaacaggtgaagggggtgcagggtggggccgttggggaggcctggggacccgggggctccgcagcggcagggggcctctgggaccttggggatgttgtgatgg

SEQ ID NO: 552754 - DNA, 120 bp, Artificial Sequence
  ENSG00000168610_49 (sequence is synthesized)
acgctgcagtggggccgggagagatgaagagacgcggagggtcgccctgagggaagactcttcgggatgacaggagcgggcctcggaagggactcggggcgctggagggaagtttcgttc

SEQ ID NO: 552755 - DNA, 120 bp, Artificial Sequence
  ENSG00000168610_50 (sequence is synthesized)
ttcggagaaacagaacgcgctcgagggggcaccgtggggcgagggcgcactcggttgcggcggcaggagtgagggacagtcccccgatttcctgctccctggggccctggggacgttccg

SEQ ID NO: 552756 - DNA, 120 bp, Artificial Sequence
  ENSG00000168610_51 (sequence is synthesized)
gccaccggagcgactgtcacgccgacggggatcaccggcgcgagtggggggtcggaaagcgcctcctccccgcccggtcggcggctcccgctgagccacttcctccgcttgccctgttcc

SEQ ID NO: 552757 - DNA, 120 bp, Artificial Sequence
  ENSG00000168610_52 (sequence is synthesized)
cgctccttcaggagacagctgtgcccttttggaggcaggaataggtgtgtctgtcgcctgcagccttacgggctggctggtcgtgggtaggctttattgcataagaatcaagtttcctgt

SEQ ID NO: 552758 - DNA, 120 bp, Artificial Sequence
  ENSG00000168610_53 (sequence is synthesized)
ctttttctaggttaaattatgctccccccacgtccccgccttgtaaaaaagagaaaaaaagacaaaataaaatccccatcaacccgtcaagccagctctagagagagaaataaacctctt

SEQ ID NO: 552759 - DNA, 120 bp, Artificial Sequence
  ENSG00000168610_54 (sequence is synthesized)
gacattgtccttttccaaatacctggtaaagtcggccagaagataaataattgagccattgcatttactggattgtggtgttgcttaattgcataggacggaatgaaccaattgagagtg

SEQ ID NO: 552760 - DNA, 120 bp, Artificial Sequence
  ENSG00000168610_55 (sequence is synthesized)
ggagttttctgtctcagagccaagatcttgggtaaatgcagaggagagggaaacaaagacaggctggccttgaaaaaaccatgtgtgcaaactttacatgcatttggggggtgtggttgc

SEQ ID NO: 552761 - DNA, 120 bp, Artificial Sequence
  ENSG00000168610_56 (sequence is synthesized)
actgaagttaacaagattcaaaccgtcgcccaagttggtatttccatgtttggtacacatcactctgtgccatatcaggtcgttgttaagtgtggtgacaaaatcagtggttagtcattt

SEQ ID NO: 552762 - DNA, 120 bp, Artificial Sequence
  ENSG00000168610_57 (sequence is synthesized)
ttttaattaaaaatgtgtatagtgtgtacctgctggtcttactgtatgtgcaactaaaggtttacatagtctgtgtatgggttgtaaatttttggctggctgtgctgataaagcattggg

SEQ ID NO: 552763 - DNA, 120 bp, Artificial Sequence
  ENSG00000168610_58 (sequence is synthesized)
cttgaataaagcaaagcagaaaatcatctcaatcttttatatgtggatttagactgtgttatgacttggttcagccagttttctatcttattttatattaaatatgtctgtgttctctga

SEQ ID NO: 552764 - DNA, 120 bp, Artificial Sequence
  ENSG00000168610_59 (sequence is synthesized)
aagactctggggacgttgcagctctcagagggtaagttcagcctagaggcttccttttgttccgtttaacctaacttcatcctccggctacttggtcacctacatagttgattgttcccc

SEQ ID NO: 552765 - DNA, 120 bp, Artificial Sequence
  ENSG00000168610_60 (sequence is synthesized)
atggcagtagacttggctttcccattactcttttctccaggaaaacatggctggcaagggcttctccttctgggtctggctggacaatatcattgaccttgtgaaaaagtacatcctggc

SEQ ID NO: 552766 - DNA, 120 bp, Artificial Sequence
  ENSG00000168610_61 (sequence is synthesized)
cctttggaacgaagggtaggttggacagagtgtgcacagatgtaaccaagtcccctgctctcagcaagccagtggcaggggatggatgccctgttagcaataacaacattgttcctcctc

SEQ ID NO: 552767 - DNA, 120 bp, Artificial Sequence
  ENSG00000168610_62 (sequence is synthesized)
cttggctccaggtacatcatgggctttatcagtaaggagcgggagcgggccatcttgagcactaagcctccaggcaccttcctgctaagattcagtgaaagcagcaaagaaggaggcgtc

SEQ ID NO: 552768 - DNA, 120 bp, Artificial Sequence
  ENSG00000168610_63 (sequence is synthesized)
cgctgccccatacctgaagaccaagtttatctgtgtgacaccgtaagtggcttcctttccccgttttgccttcatttctaatatcctcagttatccctgggaatgggacactgggtgaga

SEQ ID NO: 552769 - DNA, 120 bp, Artificial Sequence
  ENSG00000168610_64 (sequence is synthesized)
gttaatctgccaaaggttggaagcccctgggctatgtttagtactcaaagtgaccttgtgtgtttaaaaagcttgagcttttatttttctgttggagaccagagtttgatggcttgtgtg

SEQ ID NO: 552770 - DNA, 120 bp, Artificial Sequence
  ENSG00000168610_65 (sequence is synthesized)
tgtgtgttttgttcttttttttttttccattgtgtcttgtcaaccccccgtttcccctcctgctgccccccatttcctacagaacgacctgcagcaataccattgacctgccgatgtccc

SEQ ID NO: 552771 - DNA, 120 bp, Artificial Sequence
  ENSG00000168610_66 (sequence is synthesized)
ctggtctgggaggaatggaaaatcaaacaactttataatgagataaattattagatctactaaaaaagaaggaaaagaaattaaatagatcaataatcataaaaatacattgaaaaactc

SEQ ID NO: 552772 - DNA, 120 bp, Artificial Sequence
  ENSG00000168612_0 (sequence is synthesized)
ggcgacggagcctggctgtgggcccatctttggaaaaaagatctgggaatgattgtctagcctccagcctcaacttacttgatgcttgagagactcaaagccccgtggtcagctgccctg

SEQ ID NO: 552773 - DNA, 120 bp, Artificial Sequence
  ENSG00000168612_1 (sequence is synthesized)
caaagaaagtattttgaccttggcatttggacagctcccatctctcccatggccctgacaatgctgaatgggctcctgattaaggactcaagcccacctatgctgctgcaccaggttaac

SEQ ID NO: 552774 - DNA, 120 bp, Artificial Sequence
  ENSG00000168612_2 (sequence is synthesized)
aagactgcccagttagataccttcaactaccagagctgctttatgcaaagtgtctttgaccatttccctgagatcttatttatccaccggacctataacccaaggggtaaggtcttatat

SEQ ID NO: 552775 - DNA, 120 bp, Artificial Sequence
  ENSG00000168612_3 (sequence is synthesized)
accttcctggtggatggacctcgggtgcagctggagggtcatcttgcccgagcagtctactttgccatccctgccaaggaggacactgaaggcctggcccagatgttccaagtattcaag

SEQ ID NO: 552776 - DNA, 120 bp, Artificial Sequence
  ENSG00000168612_4 (sequence is synthesized)
aagtttaatccagcatgggagagagtctgtaccatcctggtggatcctcatttccttccactgcctatcctagctatggagttccccacagctgaggtccttctctcagccttccacatt

SEQ ID NO: 552777 - DNA, 120 bp, Artificial Sequence
  ENSG00000168612_5 (sequence is synthesized)
tgtaagttcctccaggccaagttctatcagctgtcccttgaacggcccgtggaaaggctgctcctgacctccctgcagagcacaatgtgctcagccacagcaggcaacctgagaaagttg

SEQ ID NO: 552778 - DNA, 120 bp, Artificial Sequence
  ENSG00000168612_6 (sequence is synthesized)
tatacactcctgagcaactgcatccctccagccaagctgcccgagcttcactcacactggctgctcaacgaccgcatctggctggctcaccgctggagaagccgagctgagagcagccac

SEQ ID NO: 552779 - DNA, 120 bp, Artificial Sequence
  ENSG00000168612_7 (sequence is synthesized)
tacttccagagcctcgaggtcaccacccacatcctcagccagttctttggtaccaccccatctgagaaacaaggtatggcttctctgttccgttacatgcagcagaactctgcagacaag

SEQ ID NO: 552780 - DNA, 120 bp, Artificial Sequence
  ENSG00000168612_8 (sequence is synthesized)
gcaaacttcaaccagggcctgtgtgcccagaacaatcatgctccctcagacaccatccccgaaagccccaaactggagcagctggtagaatcccacatccagcactccctcaatgccatc

SEQ ID NO: 552781 - DNA, 120 bp, Artificial Sequence
  ENSG00000168612_9 (sequence is synthesized)
gccagcagcccaactgtgcctgggcgagcttgctgtggtccagaaatccacacacctcattggctctggctcagaaaagatgaacatacagatcctggaagatacccataaggtgcagcc

SEQ ID NO: 552782 - DNA, 120 bp, Artificial Sequence
  ENSG00000168612_10 (sequence is synthesized)
ccagccccctgccagctgcagctgctactttaaccaggccttccacctgccctgccgccacatcctagccatgctcagtgcccgccgccaggtgctccagcccgacatgctgccggctca

SEQ ID NO: 552783 - DNA, 120 bp, Artificial Sequence
  ENSG00000168612_11 (sequence is synthesized)
gtggacggcaggctgtgctaccagtctagacagcatcctgggcagcaagtggagtgagaccctggataagcacctggcagtgactcacctcaccgaggaggtgggtcagctgttgcagca

SEQ ID NO: 552784 - DNA, 120 bp, Artificial Sequence
  ENSG00000168612_12 (sequence is synthesized)
ctgcaccaaggaggagtttgagcggaggtatagcaccctgcgggaactggccgacagctggattgggccttatgagcaggtccaactctgattattctcgatgcccagagatgctcatgc

SEQ ID NO: 552785 - DNA, 120 bp, Artificial Sequence
  ENSG00000168612_13 (sequence is synthesized)
acacacacacacacacacacacactcccttacactgttgtacttccgtgggccctccttccagaacaaggacaacaaggacaaggttgaagggtcttctcatctaccatggcctgctacc

SEQ ID NO: 552786 - DNA, 120 bp, Artificial Sequence
  ENSG00000168612_14 (sequence is synthesized)
caaggttgaagggtcttctcatctaccatggcctgctacctagcatgtgtctagctcaatgagacaggagtcagcaaatcttaatctgtttagtttactcaggtggccacatacagtctc

SEQ ID NO: 552787 - DNA, 87 bp, Artificial Sequence
  ENSG00000168612_15 (sequence is synthesized)
gtctccagcctgggagggtgagactccatctaaaaaaaataaaataaatggcaacccctggtctaagataagagataaaacatcagg

SEQ ID NO: 552788 - DNA, 120 bp, Artificial Sequence
  ENSG00000168612_16 (sequence is synthesized)
atggcaacccctggtctaagataagagataaaacatcaggtggtgaggttgaggtttggggcttggtagcagttgccccagtcatgagatgactcacttaacccgtctcctttaagtgag

SEQ ID NO: 552789 - DNA, 120 bp, Artificial Sequence
  ENSG00000168612_17 (sequence is synthesized)
ctgggctgggaggcttcctacaggggaagaggcccctctggggagctgactcagccaggctccctgaacttttttccttgtcccatcctggggtcaataaaactgaatgttgcatattct

SEQ ID NO: 552790 - DNA, 120 bp, Artificial Sequence
  ENSG00000168612_18 (sequence is synthesized)
tacaggcgtgagccatcgcacccggcctgttttaacattttcataaggtaaaaacctttcttagctcaaaggtctttaaaaaagcaggcaatccagctgggcatggtggctcacgcctgt

SEQ ID NO: 552791 - DNA, 120 bp, Artificial Sequence
  ENSG00000168615_0 (sequence is synthesized)
agacttggggccccggcagggttggaaaatgatggaagaggcggaggtggaggcgaccgagtgctgagaggaacctgcggaatcggccgagatggggtctggcgcgcgctttccctcggg

SEQ ID NO: 552792 - DNA, 120 bp, Artificial Sequence
  ENSG00000168615_1 (sequence is synthesized)
gacccttcgtgtccggtggttgctgttgcttggcctggtgggcccagtcctcggtgcggcgcggccaggctttcaacagacctcacatctttcttcttatgaaattataactccttggag

SEQ ID NO: 552793 - DNA, 120 bp, Artificial Sequence
  ENSG00000168615_2 (sequence is synthesized)
attaactagagaaagaagagaagcccctaggccctattcaaaacaagtatcttatgttattcaggctgaaggaaaagagcatattattcacttggaaaggaacaaagaccttttgcctga

SEQ ID NO: 552794 - DNA, 120 bp, Artificial Sequence
  ENSG00000168615_3 (sequence is synthesized)
agattttgtggtttatacttacaacaaggaagggactttaatcactgaccatcccaatatacagaatcattgtcattatcggggctatgtggagggagttcataattcatccattgctct

SEQ ID NO: 552795 - DNA, 120 bp, Artificial Sequence
  ENSG00000168615_4 (sequence is synthesized)
tagcgactgttttggactcagaggattgctgcatttagagaatgcgagttatgggattgaacccctgcagaacagctctcattttgagcacatcatttatcgaatggatgatgtctacaa

SEQ ID NO: 552796 - DNA, 120 bp, Artificial Sequence
  ENSG00000168615_5 (sequence is synthesized)
agagcctctgaaatgtggagtttccaacaaggatatagagaaagaaactgcaaaggatgaagaggaagagcctcccagcatgactcagctacttcgaagaagaagagctgtcttgccaca

SEQ ID NO: 552797 - DNA, 120 bp, Artificial Sequence
  ENSG00000168615_6 (sequence is synthesized)
gacccggtatgtggagctgttcattgtcgtagacaaggaaaggtatgacatgatgggaagaaatcagactgctgtgagagaagagatgattctcctggcaaactacttggatagtatgta

SEQ ID NO: 552798 - DNA, 120 bp, Artificial Sequence
  ENSG00000168615_7 (sequence is synthesized)
tattatgttaaatattcgaattgtgctagttggactggagatttggaccaatggaaacctgatcaacatagttgggggtgctggtgatgtgctggggaacttcgtgcagtggcgggaaaa

SEQ ID NO: 552799 - DNA, 120 bp, Artificial Sequence
  ENSG00000168615_8 (sequence is synthesized)
gtttcttatcacacgtcggagacatgacagtgcacagctagttctaaagaaaggttttggtggaactgcaggaatggcatttgtgggaacagtgtgttcaaggagccacgcaggcgggat

SEQ ID NO: 552800 - DNA, 120 bp, Artificial Sequence
  ENSG00000168615_9 (sequence is synthesized)
taatgtgtttggacaaatcactgtggagacatttgcttccattgttgctcatgaattgggtcataatcttggaatgaatcacgatgatgggagagattgttcctgtggagcaaagagctg

SEQ ID NO: 552801 - DNA, 120 bp, Artificial Sequence
  ENSG00000168615_10 (sequence is synthesized)
catcatgaattcaggagcatcgggttccagaaactttagcagttgcagtgcagaggactttgagaagttaactttaaataaaggaggaaactgccttcttaatattccaaagcctgatga

SEQ ID NO: 552802 - DNA, 120 bp, Artificial Sequence
  ENSG00000168615_11 (sequence is synthesized)
agcctatagtgctccctcctgtggtaataagttggtggacgctggggaagagtgtgactgtggtactccaaaggaatgtgaattggacccttgctgcgaaggaagtacctgtaagcttaa

SEQ ID NO: 552803 - DNA, 120 bp, Artificial Sequence
  ENSG00000168615_12 (sequence is synthesized)
atcatttgctgagtgtgcatatggtgactgttgtaaagactgtcggttccttccaggaggtactttatgccgaggaaaaaccagtgagtgtgatgttccagagtactgcaatggttcttc

SEQ ID NO: 552804 - DNA, 120 bp, Artificial Sequence
  ENSG00000168615_13 (sequence is synthesized)
tcagttctgtcagccagatgtttttattcagaatggatatccttgccagaataacaaagcctattgctacaacggcatgtgccagtattatgatgctcaatgtcaagtcatctttggctc

SEQ ID NO: 552805 - DNA, 120 bp, Artificial Sequence
  ENSG00000168615_14 (sequence is synthesized)
aaaagccaaggctgcccccaaagattgtttcattgaagtgaattctaaaggtgacagatttggcaattgtggtttctctggcaatgaatacaagaagtgtgccactgggaatgctttgtg

SEQ ID NO: 552806 - DNA, 120 bp, Artificial Sequence
  ENSG00000168615_15 (sequence is synthesized)
tggaaagcttcagtgtgagaatgtacaagagatacctgtatttggaattgtgcctgctattattcaaacgcctagtcgaggcaccaaatgttggggtgtggatttccagctaggatcaga

SEQ ID NO: 552807 - DNA, 120 bp, Artificial Sequence
  ENSG00000168615_16 (sequence is synthesized)
tgttccagatcctgggatggttaacgaaggcacaaaatgtggtgctggaaagatctgtagaaacttccagtgtgtagatgcttctgttctgaattatgactgtgatgttcagaaaaagtg

SEQ ID NO: 552808 - DNA, 120 bp, Artificial Sequence
  ENSG00000168615_17 (sequence is synthesized)
attgtcactgtgaaaatggctgggctcccccaaattgtgagactaaaggatacggaggaagtgtggacagtggacctacatacaatgaaatgaatactgcattgagggacggacttctgg

SEQ ID NO: 552809 - DNA, 120 bp, Artificial Sequence
  ENSG00000168615_18 (sequence is synthesized)
tcttcttcttcctaattgttccccttattgtctgtgctatttttatcttcatcaagagggatcaactgtggagaagctacttcagaaagaagagatcacaaacatatgagtcagatggca

SEQ ID NO: 552810 - DNA, 120 bp, Artificial Sequence
  ENSG00000168615_19 (sequence is synthesized)
aaaatcaagcaaacccttctagacagccggggagtgttcctcgacatgtttctccagtgacacctcccagagaagttcctatatatgcaaacagatttgcagtaccaacctatgcagcca

SEQ ID NO: 552811 - DNA, 120 bp, Artificial Sequence
  ENSG00000168615_20 (sequence is synthesized)
agcaacctcagcagttcccatcaaggccacctccaccacaaccgaaagtatcatctcagggaaacttaattcctgcccgtcctgctcctgcacctcctttatatagttccctcacttgat

SEQ ID NO: 552812 - DNA, 120 bp, Artificial Sequence
  ENSG00000168615_21 (sequence is synthesized)
ttttttaaccttctttttgcaaatgtcttcagggaactgagctaatactttttttttttcttgatgttttcttgaaaagcctttctgttgcaactatgaatgaaaacaaaacaccacaaa

SEQ ID NO: 552813 - DNA, 120 bp, Artificial Sequence
  ENSG00000168615_22 (sequence is synthesized)
acagacttcactaacacagaaaaacagaaactgagtgtgagagttgtgaaatacaaggaaatgcagtaaagccagggaatttacaataacatttccgtttccatcattgaataagtctta

SEQ ID NO: 552814 - DNA, 120 bp, Artificial Sequence
  ENSG00000168615_23 (sequence is synthesized)
ttcagtcatcggtgaggttaatgcactaatcatggattttttgaacatgttattgcagtgattctcaaattaactgtattggtgtaagagttttgtcattaagtgtttaagtgttattct

SEQ ID NO: 552815 - DNA, 120 bp, Artificial Sequence
  ENSG00000168615_24 (sequence is synthesized)
gaattttctaccttagttatcattaatgtagttcctcattgaacatgtgataatctaatacctgtgaaaactgactaatcagctgccaataatatctaatatttttcatcatgcacgaat

SEQ ID NO: 552816 - DNA, 120 bp, Artificial Sequence
  ENSG00000168615_25 (sequence is synthesized)
taataatcatcatactctagaatcttgtctgtcactcactacatgaataagcaaatattgtcttcaaaagaatgcacaagaaccacaattaagatgtcatattattttgaaagtacaaaa

SEQ ID NO: 552817 - DNA, 120 bp, Artificial Sequence
  ENSG00000168615_26 (sequence is synthesized)
tatactaaaagagtgtgtgtgtattcacgcagttactcgcttccatttttatgacctttcaactataggtaataactcttagagaaattaatttaatattagaatttctattatgaatca

SEQ ID NO: 552818 - DNA, 120 bp, Artificial Sequence
  ENSG00000168615_27 (sequence is synthesized)
tgtgaaagcatgacattcgttcacaatagcactattttaaataaattataagctttaaggtacgaagtatttaatagatctaatcaaatatgttgattcatggctataataaagcaggag

SEQ ID NO: 552819 - DNA, 120 bp, Artificial Sequence
  ENSG00000168615_28 (sequence is synthesized)
caattataaaatcttcaatcaattgaacttttacaaaaccacttgagaatttcatgagcactttaaaatctgaactttcaaagcttgctattaaatcatttagaatgtttacatttacta

SEQ ID NO: 552820 - DNA, 120 bp, Artificial Sequence
  ENSG00000168615_29 (sequence is synthesized)
aggtgtgctgggtcatgtaaaatattagacactaatattttcatagaaattaggctggagaaagaaggaagaaatggttttcttaaatacctacaaaaaagttactgtggtatctatgag

SEQ ID NO: 552821 - DNA, 120 bp, Artificial Sequence
  ENSG00000168615_30 (sequence is synthesized)
ttatcatcttagctgtgttaaaaatgaatttttactatggcagatatggtatggatcgtaaaattttaagcactaaaaattttttcataacctttcataataaagtttaataataggttt

SEQ ID NO: 552822 - DNA, 120 bp, Artificial Sequence
  ENSG00000168615_31 (sequence is synthesized)
attaactgaatttcattagttttttaaaagtgtttttggtttgtgtatatatacatatacaaatacaacatttacaataaataaaatacttgaaattctcttttgtgtctcctagtagct

SEQ ID NO: 552823 - DNA, 120 bp, Artificial Sequence
  ENSG00000168615_32 (sequence is synthesized)
tcctactcaactatttataatctcattaattaaaaagttataattttagataaaaattctagtcaaatttttacagatattatctcactaattttcagacttttgccaaagtgtgcacaa

SEQ ID NO: 552824 - DNA, 120 bp, Artificial Sequence
  ENSG00000168615_33 (sequence is synthesized)
tggctttttgttaataaagaacagattagttttgaagaaggcaaaaatttcagttttctgaagacagcatgttattttaacaatcaagtatacatattaaaaattgtgagcaatctcaaa

SEQ ID NO: 552825 - DNA, 120 bp, Artificial Sequence
  ENSG00000168615_34 (sequence is synthesized)
gcacttctctcaggtcagctagcaaataaatggtgacataagaataaatgtaaagttgggacaaaattattaactcttaaatgcaggatgaagggaagatgaagacttaatagcagcaca

SEQ ID NO: 552826 - DNA, 120 bp, Artificial Sequence
  ENSG00000168615_35 (sequence is synthesized)
acaaaaattaggagttttagtgatatattcaaggacatcaataatataatgtagttataaaagctattgtaatcttgaacttaatagaagtacagtatctagaataaacaagagctccat

SEQ ID NO: 552827 - DNA, 120 bp, Artificial Sequence
  ENSG00000168615_36 (sequence is synthesized)
agtagaaacgtattttgttcttgattgtttgctcgaagaaatactgtaaggttacagaagaaactaataaaagtggttatttttgtgaaggcagaagtaaagcggacaggaatgaacttt

SEQ ID NO: 552828 - DNA, 120 bp, Artificial Sequence
  ENSG00000168615_37 (sequence is synthesized)
gtggaagacttctcaatatattcaattaatatcagtttgatttttgagtaatgtgaaaattaatgtaaagtgtttataatcatctagtattttctgcctagtatgagtttggtgactgtt

SEQ ID NO: 552829 - DNA, 120 bp, Artificial Sequence
  ENSG00000168615_38 (sequence is synthesized)
acttacaacaaggaagggactttaatcactgaccatcccaatatacagaggtgtggtcctctctgcatcagagaacagagtactcctggggacagagctggccagaatacccaaaataat

SEQ ID NO: 552830 - DNA, 120 bp, Artificial Sequence
  ENSG00000168615_39 (sequence is synthesized)
tggcagatgtcaaatttggctttctgtgtttattactagagcataaacatttctagttttgtttgagtgttttacagtcctttttggcagttaggtattatacctttttttcttttgcaa

SEQ ID NO: 552831 - DNA, 120 bp, Artificial Sequence
  ENSG00000168615_40 (sequence is synthesized)
tggttttcatgagaaatctttattcccattacatgtgtatgttttatttttcttctgaactttgtaatactttgctatgttgaattgtttctgttggtagcgcacttttgcagcattctt

SEQ ID NO: 552832 - DNA, 120 bp, Artificial Sequence
  ENSG00000168615_41 (sequence is synthesized)
caaataggaggcaaaaaaatctttagattaattattagtacttacaaaaaccaaggaaatgctgacttaggcctatcttctggtccactatctgatttctttatcttagtgtgttgttgg

SEQ ID NO: 552833 - DNA, 120 bp, Artificial Sequence
  ENSG00000168615_42 (sequence is synthesized)
agaaaattagtagaggagtttgaatttaccttacagcataaaccagatagaaaataacgcattcatccagtcatgcatccaatgattaccaaggcagaaggccaaacaccacataatttg

SEQ ID NO: 552834 - DNA, 120 bp, Artificial Sequence
  ENSG00000168615_43 (sequence is synthesized)
tgtcacttgacaaaagcagtaatgttaaaaggcatttttttcctcatagaggtttcttggcatactttcttcagacatacactgtttgggcttgagttttgactcattatttgctgatga

SEQ ID NO: 552835 - DNA, 120 bp, Artificial Sequence
  ENSG00000168615_44 (sequence is synthesized)
agctactttaatctgtttgtgccttggtatcttcgctttaaaatgtaataatagttaccactttatggatatactgggaaacttaactgagttaatacttacaagatgcttagaacagtc

SEQ ID NO: 552836 - DNA, 120 bp, Artificial Sequence
  ENSG00000168615_45 (sequence is synthesized)
tgacaatttttaactcaacgaatgttattatttgttgctattattgacagcgtatgttcttaaaactgccaaaaattgatttaattatatagaaacttatgtaactattatcttatataa

SEQ ID NO: 552837 - DNA, 120 bp, Artificial Sequence
  ENSG00000168615_46 (sequence is synthesized)
tacttaagtatcataagtatgatagagttatgcttttctgggtgtttgaaaaatgtcaactaagacagatggtgtctcacttatttcttggttatttaatattgttcagttagatgaaag

SEQ ID NO: 552838 - DNA, 120 bp, Artificial Sequence
  ENSG00000168615_47 (sequence is synthesized)
tgtgattgtagatttgaaatacaaaataaaacttggatactgtgatttttttaacatggccagactgtcatgtattataatgacatatacttttgtccataaaatgaaattaagtttcac

SEQ ID NO: 552839 - DNA, 120 bp, Artificial Sequence
  ENSG00000168615_48 (sequence is synthesized)
tgaaaaatttacatactttcccctggggattctattgcttcagattaaagtttataaagtatcattagtgtcttccacagggtcattttacacaaacacagttttagtgagatgtcaact

SEQ ID NO: 552840 - DNA, 120 bp, Artificial Sequence
  ENSG00000168615_49 (sequence is synthesized)
ggcttttgttggttgttggattgactgtgatttaaaatgttaaagatgatataatgcatcttgttctgcttctaggctgaaaggtcactgaggcagagctgtttgtaccttgtatcccct

SEQ ID NO: 552841 - DNA, 120 bp, Artificial Sequence
  ENSG00000168615_50 (sequence is synthesized)
ggaattttgcctaaacatttgtgtactcatagggtggtaggagatagtccgcagatggtctaaagaatgccatgtgatactgtgagatgccaataatataaataaaactttgttattatt

SEQ ID NO: 552842 - DNA, 120 bp, Artificial Sequence
  ENSG00000168615_51 (sequence is synthesized)
atttgagctttcaatttaggtccgtcccagccctatctgtctgattctaaagcctctattttcttctctatgtaatgctatgcctacttacacatttaagaattaggacttgaacttagg

SEQ ID NO: 552843 - DNA, 120 bp, Artificial Sequence
  ENSG00000168615_52 (sequence is synthesized)
tatacttacaacaaggaagggactttaatcactgaccatcccaatatacaggtaatgtatttttctcttgatcccatagcaaattttaaaacaattataatttaaaaatgagttctgtat

SEQ ID NO: 552844 - DNA, 120 bp, Artificial Sequence
  ENSG00000168615_53 (sequence is synthesized)
aggcactcaggactgttacattgcacagccccacagggtacctttaacattataacatatgggttatcttgggaaaagtgggtgcatttctatagactaagctgtaccttacagctctcc

SEQ ID NO: 552845 - DNA, 120 bp, Artificial Sequence
  ENSG00000168615_54 (sequence is synthesized)
aggtactcagtagttaaggttttttttttaaagactaggaaaataaatcttctatttaatggtaatccttactgatgagaaaatttgatatgttttgaaaataggagtttctgatttttt

SEQ ID NO: 552846 - DNA, 120 bp, Artificial Sequence
  ENSG00000168615_55 (sequence is synthesized)
tgttgaaagttaatatctctaaaagtgcacttattaaaacatttaatttgtcagtgatatttagtaaagaaaaacactcatttgatgttatgtgttctaatgttctaaattttttctgaa

SEQ ID NO: 552847 - DNA, 120 bp, Artificial Sequence
  ENSG00000168619_0 (sequence is synthesized)
aacgctgctcaacggtctctgtccttggctgtggctcctgcgctctggctgagccatgttccttctcctcgccctcctcactgagcttggaagactgcaagcccacgaaggttctgaagg

SEQ ID NO: 552848 - DNA, 120 bp, Artificial Sequence
  ENSG00000168619_1 (sequence is synthesized)
aatatttctgcatgtcacagttccacggaagattaagtcaaatgacagtgaagtttcagagaggaagatgatttacatcattacaattgatggacaaccttacactctacatctcggaaa

SEQ ID NO: 552849 - DNA, 120 bp, Artificial Sequence
  ENSG00000168619_2 (sequence is synthesized)
acaatcattcttaccccagaactttttggtttatacatataatgaaactggatctttgcattctgtgtctccatattttatgatgcattgccattaccaaggatatgctgccgaatttcc

SEQ ID NO: 552850 - DNA, 120 bp, Artificial Sequence
  ENSG00000168619_3 (sequence is synthesized)
aaattcatttgtgacactcagtatatgttctggtctcaggggatttctccagtttgaaaatatcagttatggaattgaaccagtagaatcttcagcaagatttgagcatataatttatca

SEQ ID NO: 552851 - DNA, 120 bp, Artificial Sequence
  ENSG00000168619_4 (sequence is synthesized)
aatgaaaaataatgatccaaatgtatccattttagcagtaaattacagtcatatttggcagaaagaccagccctacaaagttcctttaaactcacagataaaaaatctttcaaaactatt

SEQ ID NO: 552852 - DNA, 120 bp, Artificial Sequence
  ENSG00000168619_5 (sequence is synthesized)
accccaatatctggaaatatacattatagtggaaaaagctttgtatgattatatgggatctgaaatgatggctgtaacacaaaaaattgtccaggttattgggcttgtcaacactatgtt

SEQ ID NO: 552853 - DNA, 120 bp, Artificial Sequence
  ENSG00000168619_6 (sequence is synthesized)
tacccagttcaaattgactgttatactgtcttccttggaattgtggtcaaatgaaaaccagatttccaccagtggggatgctgatgatatattacaaagatttttggcatggaaacggga

SEQ ID NO: 552854 - DNA, 120 bp, Artificial Sequence
  ENSG00000168619_7 (sequence is synthesized)
ctatctcatcctacggccccatgacatagcatacttacttgtttacaggaaacatcctaaatatgtgggagcaacatttcctggcactgtatgcaataaaagctatgatgcaggtattgc

SEQ ID NO: 552855 - DNA, 120 bp, Artificial Sequence
  ENSG00000168619_8 (sequence is synthesized)
tatgtatccagatgcaataggtttggagggattttcggttattatagctcaactgcttggccttaatgtaggattaacatatgatgacatcactcagtgtttctgtctgagagctacatg

SEQ ID NO: 552856 - DNA, 120 bp, Artificial Sequence
  ENSG00000168619_9 (sequence is synthesized)
catcatgaatcatgaagcagtgagtgccagtggtagaaagatttttagcaactgcagcatgcacgactatagatattttgtttcaaaatttgagactaaatgccttcagaagctttcaaa

SEQ ID NO: 552857 - DNA, 120 bp, Artificial Sequence
  ENSG00000168619_10 (sequence is synthesized)
tttgcaaccattacatcaaaatcaaccagtgtgtggtaatgggattttggaatccaatgaagaatgtgactgtggtaataaaaatgaatgtcaatttaagaagtgctgtgattataacac

SEQ ID NO: 552858 - DNA, 120 bp, Artificial Sequence
  ENSG00000168619_11 (sequence is synthesized)
atgtaaactgaagggctcagtaaaatgtggttctggaccatgttgtacatcaaagtgtgagttgtcaatagcaggcactccatgtagaaagagtattgatccagagtgtgattttacaga

SEQ ID NO: 552859 - DNA, 120 bp, Artificial Sequence
  ENSG00000168619_12 (sequence is synthesized)
gtactgcaatggaacctctagtaattgtgttcctgacacttatgcattgaatggccgtttgtgcaagttgggaactgcctattgctataacggacaatgtcaaactactgataaccagtg

SEQ ID NO: 552860 - DNA, 120 bp, Artificial Sequence
  ENSG00000168619_13 (sequence is synthesized)
tgccaagatatttggaaaaggtgctcaaggtgctccatttgcctgttttaaagaagttaattctctgcatgaaagatctgaaaactgtggttttaaaaattcacaaccattaccttgtga

SEQ ID NO: 552861 - DNA, 120 bp, Artificial Sequence
  ENSG00000168619_14 (sequence is synthesized)
acggaaggatgttctctgtggaaaattagcttgtgttcagccacataaaaatgctaataaaagtgacgctcaatctacagtttattcatatattcaagaccatgtatgtgtatctatagc

SEQ ID NO: 552862 - DNA, 120 bp, Artificial Sequence
  ENSG00000168619_15 (sequence is synthesized)
cactggttcctccatgagatcagatggaacagacaatgcctatgtggctgatggcaccatgtgtggtccagaaatgtactgtgtaaataaaacctgcagaaaagttcatttaatgggata

SEQ ID NO: 552863 - DNA, 120 bp, Artificial Sequence
  ENSG00000168619_16 (sequence is synthesized)
taactgtaatgccaccacaaaatgcaaagggaaagggatatgtaataattttggtaattgtcaatgcttccctggacatagacctccagattgtaaattccagtttggttccccaggggg

SEQ ID NO: 552864 - DNA, 120 bp, Artificial Sequence
  ENSG00000168619_17 (sequence is synthesized)
tagtattgatgatggaaattttcagaaatctggtgacttttatactgaaaaaggctacaatacacactggaacaactggtttattctgagtttctgcatttttctgccgtttttcatagt

SEQ ID NO: 552865 - DNA, 120 bp, Artificial Sequence
  ENSG00000168619_18 (sequence is synthesized)
tttcaccactgtgatctttaaaagaaatgaaataagtaaatcatgtaacagagagaatgcagagtataatcgtaattcatccgttgtatcagaaagcgatgacgtgggacattaatattg

SEQ ID NO: 552866 - DNA, 120 bp, Artificial Sequence
  ENSG00000168619_19 (sequence is synthesized)
cacagaacttccatagcaaataacctaaaggaacgaatgtgctttatttataaccttacgttatccccaatgcattgtaaatgtcaaacttttggaaaataaagcctgcgtgccctccca

SEQ ID NO: 552867 - DNA, 120 bp, Artificial Sequence
  ENSG00000168619_20 (sequence is synthesized)
acaactcttcctgctacaatgacagttctctgcctgtgctgtgagggcatctggggcatcctttgaagtccaggtgaaggcagccatgcctccacagcttgttcattctgggcccttgta

SEQ ID NO: 552868 - DNA, 120 bp, Artificial Sequence
  ENSG00000168619_21 (sequence is synthesized)
aagatggcaccatggagacacccccaaggttgatttgaatgtgccgtccagaagaacatctccttgggtctcatcccacctgggcccagtggagtcatacccgatatggttgaagagcgg

SEQ ID NO: 552869 - DNA, 120 bp, Artificial Sequence
  ENSG00000168619_22 (sequence is synthesized)
tttgccatgtgcaagttcctgcttcaccttctgccatgagtaaaaactctctgaggcctccccagaagccaagcagatgttggtcccatgcctgtagagcctgcagaacgatgatttaca

SEQ ID NO: 552870 - DNA, 120 bp, Artificial Sequence
  ENSG00000168619_23 (sequence is synthesized)
gttacatatttcaagcttaatattttatgatgtattatgtaacattaatttttatatttttttcaaacaaaatgatactattgaaaaagtttagaaatgcagaaagaacagagtcactgt

SEQ ID NO: 552871 - DNA, 120 bp, Artificial Sequence
  ENSG00000168619_24 (sequence is synthesized)
agaacagagtcactgttattctagtaccttggtaaaattacttttaatattttgttatatatcttacatactacctgaacatatctttctaaaatgcacagccatttgcatgttgccaga

SEQ ID NO: 552872 - DNA, 120 bp, Artificial Sequence
  ENSG00000168619_25 (sequence is synthesized)
tgctcttaatttgctggtagactaggtatagaattcttgctggcagtttctttctttcagcactttgaatatttcaatccatcaccatgtggcctctgttttttctgataaaaatattct

SEQ ID NO: 552873 - DNA, 120 bp, Artificial Sequence
  ENSG00000168619_26 (sequence is synthesized)
attattcttattgggaattccttggacaaaatgagttgcttctcttttgtttcttttgagattcttcctttgcctttgtcttatggcagtgtgcttatcatgtttctatgaatggatctc

SEQ ID NO: 552874 - DNA, 120 bp, Artificial Sequence
  ENSG00000168619_27 (sequence is synthesized)
tttgtgtttaccatacttggagctcaaagcacttcttgggtctgtaaatggatgtgttttgaaattaaattagcttgtgtgaatcctgaaaaaaaaaatcccatgaagctatgaaaccaa

SEQ ID NO: 552875 - DNA, 120 bp, Artificial Sequence
  ENSG00000168619_28 (sequence is synthesized)
ctatctgtatggttcctagagacttcacacttttattctactttaaaatttgtctcgattttgtagttcattattgccaaaagtatttactgggataaataaaaaaagcattcttctcgg

SEQ ID NO: 552876 - DNA, 120 bp, Artificial Sequence
  ENSG00000168621_0 (sequence is synthesized)
agcctgcgctcctggcgccctcatgtcttcacgggactccccgcgccggttgacgtggtgtctcgttcggatctccaggcaagacctcagctccggcagcagcatcagacaaaccagtct

SEQ ID NO: 552877 - DNA, 120 bp, Artificial Sequence
  ENSG00000168621_1 (sequence is synthesized)
acaaaccagtctcgtgctcccaggcagtgcgcccagaggaggcgcagagcgcggcagctgccgctgagccgcccgcagcgccccgggcccgcgcagccccagccaagagcgcgacgcgcg

SEQ ID NO: 552878 - DNA, 120 bp, Artificial Sequence
  ENSG00000168621_2 (sequence is synthesized)
aagagcgcgacgcgcgcagccctgtcagccccccacccaaagcagcggcggctgctcggacctcggcttctgggggtgcgggggcccggcgggagagttgccggcagccctcgccctgtt

SEQ ID NO: 552879 - DNA, 120 bp, Artificial Sequence
  ENSG00000168621_3 (sequence is synthesized)
gccgcctccagcgcgcccttgctgccccgcgcgaccccaggattgcgaactcttgcccctgacctgttgggcggggctccgcgctccagccatcagcccggatgggtctcctggctggga

SEQ ID NO: 552880 - DNA, 120 bp, Artificial Sequence
  ENSG00000168621_4 (sequence is synthesized)
cttggggcacctggagttaatgtccaacctagggtctgcggagacccgatccgaggtgccgccgccggacgggactttaagatgaagttatgggatgtcgtggctgtctgcctggtgctg

SEQ ID NO: 552881 - DNA, 120 bp, Artificial Sequence
  ENSG00000168621_5 (sequence is synthesized)
ctccacaccgcgtccgccttcccgctgcccgccggtaagaggcctcccgaggcgcccgccgaagaccgctccctcggccgccgccgcgcgcccttcgcgctgagcagtgactcaaatatg

SEQ ID NO: 552882 - DNA, 120 bp, Artificial Sequence
  ENSG00000168621_6 (sequence is synthesized)
ccagaggattatcctgatcagttcgatgatgtcatggattttattcaagccaccattaaaagactgaaaaggtcaccagataaacaaatggcagtgcttcctagaagagagcggaatcgg

SEQ ID NO: 552883 - DNA, 120 bp, Artificial Sequence
  ENSG00000168621_7 (sequence is synthesized)
caggctgcagctgccaacccagagaattccagaggaaaaggtcggagaggccagaggggcaaaaaccggggttgtgtcttaactgcaatacatttaaatgtcactgacttgggtctgggc

SEQ ID NO: 552884 - DNA, 120 bp, Artificial Sequence
  ENSG00000168621_8 (sequence is synthesized)
tatgaaaccaaggaggaactgatttttaggtactgcagcggctcttgcgatgcagctgagacaacgtacgacaaaatattgaaaaacttatccagaaatagaaggctggtgagtgacaaa

SEQ ID NO: 552885 - DNA, 120 bp, Artificial Sequence
  ENSG00000168621_9 (sequence is synthesized)
gtagggcaggcatgttgcagacccatcgcctttgatgatgacctgtcgtttttagatgataacctggtttaccatattctaagaaagcattccgctaaaaggtgtggatgtatctgactc

SEQ ID NO: 552886 - DNA, 120 bp, Artificial Sequence
  ENSG00000168621_10 (sequence is synthesized)
cggctccagagactgctgtgtattgcattcctgctacagtgcaaagaaagggaccaaggttcccaggaaatgtttgcccagaatggaagatgaggaccaaggaggcggaggaggaggaag

SEQ ID NO: 552887 - DNA, 120 bp, Artificial Sequence
  ENSG00000168621_11 (sequence is synthesized)
ggaggaggaggaggaggaggaggaaggcagccatcatgggagcctggtagagggagatccagctacagacaactggacaggagagagagaaaacagccctctggattctccaggatggca

SEQ ID NO: 552888 - DNA, 120 bp, Artificial Sequence
  ENSG00000168621_12 (sequence is synthesized)
attctccaggatggcagccgatgtcactagaagctcagggctgatgttcctggttggctattgccaccatttcagctgatacagtccaccatcactgattaccggcgcggttgcggtgga

SEQ ID NO: 552889 - DNA, 120 bp, Artificial Sequence
  ENSG00000168621_13 (sequence is synthesized)
tgcacttgaaccaaaccagtgtatctcctgtgatttgttttcatgtgtccgaagacaccagggaaacagagatcctggtgttgttccttgttattacgttttactgctgaaagtaagagg

SEQ ID NO: 552890 - DNA, 120 bp, Artificial Sequence
  ENSG00000168621_14 (sequence is synthesized)
tttatttttctgtcactcagtggagacataccctggaaaggagaggggaaaaaaaaagcaaagatacaagagataatcacctttgcatttgaaagttgaggcccgaggtttactacaacc

SEQ ID NO: 552891 - DNA, 120 bp, Artificial Sequence
  ENSG00000168621_15 (sequence is synthesized)
agcatttttgccaacggttggtgattgatttccatcacggtgtgtggggtgggaagaagttggctaggaaccaaaaaggctgtgctcatgattaaacacaaacctgaaggtatttccttt

SEQ ID NO: 552892 - DNA, 120 bp, Artificial Sequence
  ENSG00000168621_16 (sequence is synthesized)
atgtccttggaaacaggaaacgagttgtggttttcgccagcattcttgtaggagagaatcggggaaggccccgaactgcccccgggcagggagagcccctcaggcctgttggtttacaga

SEQ ID NO: 552893 - DNA, 120 bp, Artificial Sequence
  ENSG00000168621_17 (sequence is synthesized)
aatatagagaagatatttattgaaatttaagttattgttatttattaccgttcactaatgaatttctcttttttcccttatttattaaagtttcttttcaaaggtgccaaagtatatgtg

SEQ ID NO: 552894 - DNA, 120 bp, Artificial Sequence
  ENSG00000168621_18 (sequence is synthesized)
ctcgcaaaatgcaaagaaaggtgacaaaaggaaatttgaattgggaacaagggtccatgcttttcaaagtattaaaaagttttttgccaggcaaaaatcacttactttacctttttaaga

SEQ ID NO: 552895 - DNA, 120 bp, Artificial Sequence
  ENSG00000168621_19 (sequence is synthesized)
aaatttgtcattaattttccccagatttcagcatttttcccaatttttatttgtggagcatctcaggcaagccccctttcctggagcagcgtgcagagaccactggcacttgactttatt

SEQ ID NO: 552896 - DNA, 120 bp, Artificial Sequence
  ENSG00000168621_20 (sequence is synthesized)
tcttccttgctccattgctgaacagaaatgtcgtgggctccacttcctgttgtctttaagctcttagtcccctccacgtatacctatctgtactatgcataaccatatgtagaaaaggtt

SEQ ID NO: 552897 - DNA, 120 bp, Artificial Sequence
  ENSG00000168621_21 (sequence is synthesized)
cagttccttttagtaggtagtcctggatttaatgctgacctaaaagtaatgtcgacaatgctgtcaggtagctgccgttctaccgactccctccatccctgcccacccactgccctcccg

SEQ ID NO: 552898 - DNA, 120 bp, Artificial Sequence
  ENSG00000168621_22 (sequence is synthesized)
agaatatgctggctgcccagtgcagcccgggagacacaggggccttccagaggtagggtctaccaggtcctgtacaacccctgggctgtcaccgggggtcaacagctgctgctcctatat

SEQ ID NO: 552899 - DNA, 120 bp, Artificial Sequence
  ENSG00000168621_23 (sequence is synthesized)
acccaaacacctgacagctccctggggagcagatggctgagaagggtgctgaggaagccatattgggaccagccacagccacacacatggagcctcatacttaggagcgtgctgccttta

SEQ ID NO: 552900 - DNA, 120 bp, Artificial Sequence
  ENSG00000168621_24 (sequence is synthesized)
gtgctgcctttaaatgaaggtggtcggggccagtgcagcggctcacacccataatcccaacactttggaaagccaaggtgggaggatctcttgaacccaggagtttgagaccagcttggg

SEQ ID NO: 552901 - DNA, 87 bp, Artificial Sequence
  ENSG00000168621_25 (sequence is synthesized)
caacatagggagaccctgtctctacagaaactttaaaaattaggcaggcatgatggtgaggaggatcacttgagtccagaaggtcga

SEQ ID NO: 552902 - DNA, 82 bp, Artificial Sequence
  ENSG00000168621_26 (sequence is synthesized)
ggttggagcaggaggaagcataggggcgggaacagccacctcctccatgccctagattgtgaatttatcgggcagccaacac

SEQ ID NO: 552903 - DNA, 120 bp, Artificial Sequence
  ENSG00000168621_27 (sequence is synthesized)
ctccatgccctagattgtgaatttatcgggcagccaacacatgtatgacacactaggccctgtattacagcttgttacgcatttcataaaagggattttcattaaggagataatctatta

SEQ ID NO: 552904 - DNA, 120 bp, Artificial Sequence
  ENSG00000168621_28 (sequence is synthesized)
ctacctaccttagtggctactagtataaaactatgacagatttagcaattaaatgaaatactggcctccatcaaataatcatagtaacaagaagcagcagttaccagacatctgatcccc

SEQ ID NO: 552905 - DNA, 120 bp, Artificial Sequence
  ENSG00000168621_29 (sequence is synthesized)
ttcccccaaaatacccaaattcttcatggttctgcccttctctgtcctttctgctccccttgctcgcctgggaaatggaggaaaggccttccctctcacactgtcttgggatcttgctga

SEQ ID NO: 552906 - DNA, 120 bp, Artificial Sequence
  ENSG00000168621_30 (sequence is synthesized)
gaattcagactgctcgaaacagtgacaaaccccagccatccagtcattcgtggagcacaatttggatgtggccccaggggcatctgtcccattcagagaaccttggcagtgcgatggcca

SEQ ID NO: 552907 - DNA, 120 bp, Artificial Sequence
  ENSG00000168621_31 (sequence is synthesized)
ctgttcccaggcttcaacctcagtgaccccccccaacaactccccatggagagtccctgcccaaaaaagctgtaggatccaaggggtgtcaatagctcgttcccggcatcacctacacac

SEQ ID NO: 552908 - DNA, 120 bp, Artificial Sequence
  ENSG00000168621_32 (sequence is synthesized)
cacaagcaggttttaatggaagcaagttgctccaccaaatccacaaaagggtaaagtttgtgatttttctttatcattgcgatcaccatctgataccgtaaggagtgcacttgtttggaa

SEQ ID NO: 552909 - DNA, 120 bp, Artificial Sequence
  ENSG00000168621_33 (sequence is synthesized)
gttctgacttctctgatctgtcttggtcgtttgtgttataaaaccaaagttctctacagactttatttttgtacaatatcattttgtaactttttacaaataaaaactcatttctattgc

SEQ ID NO: 552910 - DNA, 120 bp, Artificial Sequence
  ENSG00000168621_34 (sequence is synthesized)
catacaggccaaaagtctccaagtccctgctaacttcttgctctcgcaacagaatacctatttaggtgggaagaatgaggtgtgggcggcaggctgggtgccgccgccggacgggacttt

SEQ ID NO: 552911 - DNA, 120 bp, Artificial Sequence
  ENSG00000168621_35 (sequence is synthesized)
tggagaggggcgcagggacccgcagggagcccaggcttaacgtgcattctgcggttctctcccccacctcccgcctgcccgcgcaggtgccgccgccggacgggactttaagatgaagtt

SEQ ID NO: 552912 - DNA, 120 bp, Artificial Sequence
  ENSG00000168621_36 (sequence is synthesized)
ccaaagcgtccgagactgggtacagtcgtccaggcgtgacgggggcgcggggagccagtgactcctctgggaggggaagggattagggccagaatctctcaaaggtgcaaaaatccagtc

SEQ ID NO: 552913 - DNA, 120 bp, Artificial Sequence
  ENSG00000168621_37 (sequence is synthesized)
aagagagggttttcgggtataccacggaggattaaaactttcaagacaaatgcagtctttgcctaacagcaatggtgccgccgccggacgggactttaagatgaagttatgggatgtcgt

SEQ ID NO: 552914 - DNA, 120 bp, Artificial Sequence
  ENSG00000168621_38 (sequence is synthesized)
gtgccgccgccggacgggactttaagatgaagttatgggatgtcgtggctgtctgcctggtgctgctccacaccgcgtccgccttcccgctgcccgccgggcacaggaagatgacttgat

SEQ ID NO: 552915 - DNA, 120 bp, Artificial Sequence
  ENSG00000168631_0 (sequence is synthesized)
gtccccaagcagccacccagctccgacatggcccagccggtccacagcctctgctccgcctttggcctccagtgctgcctcctcttccttctagcttcttggggggcaggtgctactaca

SEQ ID NO: 552916 - DNA, 120 bp, Artificial Sequence
  ENSG00000168631_1 (sequence is synthesized)
ttccaagaatatcagaaaactggggaactctcaacatccgatcacatatttcccctcactccaggccttgtttatagtatcccttttgatcacattgttctgcattcaggacaaagacct

SEQ ID NO: 552917 - DNA, 120 bp, Artificial Sequence
  ENSG00000168631_2 (sequence is synthesized)
ccagagctccctaaatctacagaaatccatgagcaaaaacgccactgcaacaccacacgccattctaagccaactgacaagcctacaggcaactccaaaactatagaccacaaaagctct

SEQ ID NO: 552918 - DNA, 120 bp, Artificial Sequence
  ENSG00000168631_3 (sequence is synthesized)
acagataatcatgaggctcctcccacttctgaagaaaactccagcaaccaagggaaagacccaatgatccggaaccagcgctctgttgatcctgctgactccactaccacacataaagaa

SEQ ID NO: 552919 - DNA, 120 bp, Artificial Sequence
  ENSG00000168631_4 (sequence is synthesized)
tccgctggaaaaaaacatataacgccagcacccaagagcaaaataaactgtcgtaagtccacaacaggcaaatcaacggtaacaagaaaatcagataaaactggaagacctttggaaaag

SEQ ID NO: 552920 - DNA, 120 bp, Artificial Sequence
  ENSG00000168631_5 (sequence is synthesized)
tccatgagtactttggataagacaagtaccagctcacataagactacaacttccttccacaactcaggcaattcacagaccaagcaaaaaagcacatcttttccagaaaaaatcacagca

SEQ ID NO: 552921 - DNA, 120 bp, Artificial Sequence
  ENSG00000168631_6 (sequence is synthesized)
gcctcaaaaacaacatacaagaccacaggaaccccagaagagtcagaaaaaactgaagattccagaacaacagttgcctcagacaagctcctgacaaaaactacaaaaaacatacaagag

SEQ ID NO: 552922 - DNA, 120 bp, Artificial Sequence
  ENSG00000168631_7 (sequence is synthesized)
accatatcagccaatgagctcacacaatctctagcagagcctacagaacatggaggaaggacagccaatgagaacaacacaccatccccagcagagcctacagaaaatagagaaaggaca

SEQ ID NO: 552923 - DNA, 120 bp, Artificial Sequence
  ENSG00000168631_8 (sequence is synthesized)
gccaatgagaacaccacactatccccagcagagcctatagaaaatagagaaaggacagccaatgagaacaccgcaccattcccagcagggcctacagaaaatagagaaatgacagccaat

SEQ ID NO: 552924 - DNA, 120 bp, Artificial Sequence
  ENSG00000168631_9 (sequence is synthesized)
gagaataccacactattcccagcagagcctacagaacatggagaaaggacagccaatgagaacaccacaccatccccagcagagcctacagaacatggagaaaggacagccaatgagaac

SEQ ID NO: 552925 - DNA, 120 bp, Artificial Sequence
  ENSG00000168631_10 (sequence is synthesized)
actacaccatccccagcagagcctacagaacatggagaaaggaccccatttgccaatgacaaaaccacatcatcctcagcagagtctacagaacatggagaaaggaccccactggccaac

SEQ ID NO: 552926 - DNA, 120 bp, Artificial Sequence
  ENSG00000168631_11 (sequence is synthesized)
gagaacaccacaccatccccagcagagcctacagaaaatagagaaaggacagccaatgagaacaccacaccatccccagcagggcctacagaaaacagagaaacgacagccaacgagaag

SEQ ID NO: 552927 - DNA, 120 bp, Artificial Sequence
  ENSG00000168631_12 (sequence is synthesized)
accacactatccccagtagagcctacagaaaatagagaaacaacagccaatgagaagaccacaccatccccagcagagcctacagaaaatggacaaaggaccccatttgccaatgagaaa

SEQ ID NO: 552928 - DNA, 120 bp, Artificial Sequence
  ENSG00000168631_13 (sequence is synthesized)
accacatcatcctcagcagagcctacagaacacggagaaaggaccccactggccaatgagaacaccacaccatccccagcagagcctacagaaaatagagaaaggacagccaatgagaag

SEQ ID NO: 552929 - DNA, 120 bp, Artificial Sequence
  ENSG00000168631_14 (sequence is synthesized)
accacaccatccccagcagagcctacagaaaatggagacaggactcctttggccaatgagaagaccacgccatctctagcagagcctacagaaaatggacaaaggaccccatttgccaat

SEQ ID NO: 552930 - DNA, 120 bp, Artificial Sequence
  ENSG00000168631_15 (sequence is synthesized)
gagaagaccacatcatcctcagcagagcctacagaacacgaagaaaggactccactggccaatgagaacaccacaccatccccggcagagcctacagaaaatagagaaaggacagccaat

SEQ ID NO: 552931 - DNA, 120 bp, Artificial Sequence
  ENSG00000168631_16 (sequence is synthesized)
gagaacaccacaccatccccagcagggcctacagaaaatagagaaatgacagccaacgagaagaccacactattcccagcagagcctacagaaaatagagaaaggacagccaatgagaag

SEQ ID NO: 552932 - DNA, 120 bp, Artificial Sequence
  ENSG00000168631_17 (sequence is synthesized)
accacatcatccccagcagagcctacagaaaatggacaaaggaccccatttgccaatgagaaaaccacatcatcctcagcagagcctacagaacacggagaaaggaccccactggccaat

SEQ ID NO: 552933 - DNA, 120 bp, Artificial Sequence
  ENSG00000168631_18 (sequence is synthesized)
gagaacaccacactatccccagcagagcctacagaaaatagagaaaggacagccaatgagaagaccacaccattcccagcagagcctacagaaaatagagaaaggacagccaatgagaac

SEQ ID NO: 552934 - DNA, 120 bp, Artificial Sequence
  ENSG00000168631_19 (sequence is synthesized)
accacaccatccccagcacagcctacagaaaatggagacaggactccattggccaatgagaagaccacaccatctctagcagagcctacagaaaatggaaaaaggaccccatttgccaat

SEQ ID NO: 552935 - DNA, 120 bp, Artificial Sequence
  ENSG00000168631_20 (sequence is synthesized)
gagaagaccacatcatcctcagcagagcctacagaacacgcagaaaggactccactggccaatgagaacaccacatcatccccagcagagcctacagaaaatagagaaaggacagccaat

SEQ ID NO: 552936 - DNA, 120 bp, Artificial Sequence
  ENSG00000168631_21 (sequence is synthesized)
gagaagaccacacaattcccagcagagcctacagaaaatagagaaagcacagccaatgagaagaccacaccattcccagcagagcctacagaaaatagagaatggacagccaatgagaac

SEQ ID NO: 552937 - DNA, 120 bp, Artificial Sequence
  ENSG00000168631_22 (sequence is synthesized)
gaagaaatgaccccattggccaatgagaagaccacactatccccagcagagcctacagaaaatggagaaaggaccccatttaccaatgagaagaccacaccatcctcagcagagcctaca

SEQ ID NO: 552938 - DNA, 120 bp, Artificial Sequence
  ENSG00000168631_23 (sequence is synthesized)
gaacatggagaaaggaccccactggccaatgagatcaccacaccatcccgagcagagcctacagaacatggagaaaggatagccaatgagaaggccacaccatccccagcaaagcctaca

SEQ ID NO: 552939 - DNA, 120 bp, Artificial Sequence
  ENSG00000168631_24 (sequence is synthesized)
gaacatggagaaacgacagtcaatgaggacaccacaccatcctcagcagagcctacagaaaatggagaaaggaccccactggccaatgagaacaccacaacatccccaacagagtctaca

SEQ ID NO: 552940 - DNA, 120 bp, Artificial Sequence
  ENSG00000168631_25 (sequence is synthesized)
gaacatggagaaaggacagccaatgagaagaccacaccatccccagcagagcctacagaacatggagaaaggacaccatcagccaatgagaagaccataccatctccagcaaagcctaca

SEQ ID NO: 552941 - DNA, 120 bp, Artificial Sequence
  ENSG00000168631_26 (sequence is synthesized)
gaacacgaagaaatgaccccatcggccaatgagaacaccacaccatccccagtaaagcctacagaacatggagaaaagactacattggccaatgagaagatcacactatccccagaaggg

SEQ ID NO: 552942 - DNA, 120 bp, Artificial Sequence
  ENSG00000168631_27 (sequence is synthesized)
cctacagaacatggagcaaaaactacgtcggccaatgagaagatcacaccatccctagcaaagcctacagaacatggagaaaggaccacatcacccaatgacaagatcacctcatctgca

SEQ ID NO: 552943 - DNA, 120 bp, Artificial Sequence
  ENSG00000168631_28 (sequence is synthesized)
gcagagtctacagaacatagagatagggctacatcagccaatgtgatcacaccagccccagcagagcctataaaacatgcaaaaaggaccacattggcccatgagaagatgacacaagtc

SEQ ID NO: 552944 - DNA, 120 bp, Artificial Sequence
  ENSG00000168631_29 (sequence is synthesized)
acagaaaagtccacagaacacccagaaaagaccacgtcaaccacagagaaaaccacaagaaccccagaaaagcctacgctatactcagagaagaccatatgcaccaaagggaaaaacaca

SEQ ID NO: 552945 - DNA, 120 bp, Artificial Sequence
  ENSG00000168631_30 (sequence is synthesized)
ccagtcccagaaaagcctacagaaaacctggggaacaccacactgaccactgagaccataaaagccccagtaaagtccacagaaaacccagaaaaaacagcagcagtcacaaagactata

SEQ ID NO: 552946 - DNA, 120 bp, Artificial Sequence
  ENSG00000168631_31 (sequence is synthesized)
aaaccttcagtcaaggtcacaggagacaaatctctcactactacctcttctcatctaaataaaactgaagttactcatcaggtgcccactggttctttcaccctcattacatctagaacg

SEQ ID NO: 552947 - DNA, 120 bp, Artificial Sequence
  ENSG00000168631_32 (sequence is synthesized)
aagctgagttctatcacatcagaagccacaggaaacgagagccatccatacctcaataaagatggctcacagaaaggtatccacgctggacagatgggagagaatgattcattccctgca

SEQ ID NO: 552948 - DNA, 120 bp, Artificial Sequence
  ENSG00000168631_33 (sequence is synthesized)
tgggccatagttattgtggtcctggtggctgtgattctcctcctggtgttccttggcctgatcttcttggtctcctatatgatgcggacacgccgcacactaacccagaacacccagtac

SEQ ID NO: 552949 - DNA, 120 bp, Artificial Sequence
  ENSG00000168631_34 (sequence is synthesized)
aatgatgcagaggatgagggtggccccaattcctacccggtctacctgatggagcagcagaatcttggcatgggccagatcccttccccacggtgatcttggagtaggcgcccagccctg

SEQ ID NO: 552950 - DNA, 120 bp, Artificial Sequence
  ENSG00000168631_35 (sequence is synthesized)
gctcttccatgctctgcccctttcctggatgaggaaccggactcacaatttctatttccgggactacaggaagggcagagaatactgacggttaccagtattaacccttcatctgttctt

SEQ ID NO: 552951 - DNA, 120 bp, Artificial Sequence
  ENSG00000168631_36 (sequence is synthesized)
gaaactggttggggaatgaggtgataagcaaggagggtgtaagtttaggggacaaagaagaaagaatgaataatacgagcagacattctctgtagaaggtaatggtctgagaatgaaaag

SEQ ID NO: 552952 - DNA, 120 bp, Artificial Sequence
  ENSG00000168631_37 (sequence is synthesized)
gtgtttgatggacatgttgtgggggcaccaatgcagaacactgcactgagtcctaaaggaaggacaggagccttataggcaatgccccagactgacttgtgagtggggtttatggggaaa

SEQ ID NO: 552953 - DNA, 120 bp, Artificial Sequence
  ENSG00000168631_38 (sequence is synthesized)
gggagggactgagggcagagtctctgggtttcaggacagcattatgttatttccattcactattacttaagagtttgtgtgtaaacaggctcatctctgagttctcaggacccttgcccc

SEQ ID NO: 552954 - DNA, 120 bp, Artificial Sequence
  ENSG00000168631_39 (sequence is synthesized)
cacccccatttttttaatgaaaaaaaaaaacaaaaaaaacggatccaagaagaaaagagaatttatttccttctccactctctccatgccctggagaaaaaaaagtccagaagaaatcat

SEQ ID NO: 552955 - DNA, 120 bp, Artificial Sequence
  ENSG00000168631_40 (sequence is synthesized)
aaatatctctcatctacatggttgcttcctcttcctcccaaatcccttagttttcctaaatgtctacagtggacgccctgttggtttggcttgctgggttgtgggtggacacgcaaggag

SEQ ID NO: 552956 - DNA, 120 bp, Artificial Sequence
  ENSG00000168631_41 (sequence is synthesized)
gggatttttatttggccagcagtctcacccactgatctccaccccagaccttccctgattggtgtctcagcatttattttcctgtctcttccaccaaaagccagctgtagctttatctcg

SEQ ID NO: 552957 - DNA, 120 bp, Artificial Sequence
  ENSG00000168631_42 (sequence is synthesized)
taaaagttacccatcttctctactgtccccattctctctcctcccaccttcaccccagattcaagttttcctccttgtaggcatttcatctgtgtgtgttttctggattttctctctctc

SEQ ID NO: 552958 - DNA, 120 bp, Artificial Sequence
  ENSG00000168631_43 (sequence is synthesized)
ttcttatggccatttcaccttattactgattgggtagagggggaaaaggagaatgatgatgatagtttccttctgtctattgaccttttttataataaagtataacatgtttataaaggg

SEQ ID NO: 552959 - DNA, 120 bp, Artificial Sequence
  ENSG00000168631_44 (sequence is synthesized)
gaggccccggcacaactggctctcccgggactcataataggccccagagcctttaaagagcctgggagatgggcctggccaacacacttcaactggtgccatggacactgtgctggtgct

SEQ ID NO: 552960 - DNA, 120 bp, Artificial Sequence
  ENSG00000168631_45 (sequence is synthesized)
gctcctgggcctgcaggccttggccggacccagtccgaagccccagaaggactctgtctcagactgggccattgtgttgatcactctcactttggtggcagcaattgtcagcctaatgta

SEQ ID NO: 552961 - DNA, 120 bp, Artificial Sequence
  ENSG00000168631_46 (sequence is synthesized)
cggtatcaagaaggcctgccagttccggagggagatgagtctggggtgtggctgtggctctgtgaccccttacagcagccaccatgagggggaggctgccagccagcgctactcttgtca

SEQ ID NO: 552962 - DNA, 120 bp, Artificial Sequence
  ENSG00000168634_0 (sequence is synthesized)
ctctttccttctcttctcctcacagcagtgcctggtcaaacccagcaacccttggccagaacttactcacccatcccactgacaccatgaagcctgtgctgcctctccagttcctggtgg

SEQ ID NO: 552963 - DNA, 120 bp, Artificial Sequence
  ENSG00000168634_1 (sequence is synthesized)
tgttctgcctagcactgcagctggtgcctgggagtcccaagcagcgtgttctgaagtatatcttggaacctccaccctgcatatcagcacctgaaaactgtactcacctgtgtacaatgc

SEQ ID NO: 552964 - DNA, 120 bp, Artificial Sequence
  ENSG00000168634_2 (sequence is synthesized)
aggaagattgcgagaaaggatttcagtgctgttcctccttctgtgggatagtctgttcatcagaaacatttcaaaagcgcaacagaatcaaacacaagggctcagaagtcatcatgcctg

SEQ ID NO: 552965 - DNA, 120 bp, Artificial Sequence
  ENSG00000168634_3 (sequence is synthesized)
ccaactgaggcatatttcctagatcattttgcctctacgatgttttttcttggtccacctttaggaaggtattgagaagcaagaaactggaggcccaatatctaacctgcaaatcgtttt

SEQ ID NO: 552966 - DNA, 120 bp, Artificial Sequence
  ENSG00000168634_4 (sequence is synthesized)
tgagtttggcaataaaggctaatctaccataaaactcttgaagcttaagctttaggtcaacacttgcaagagccccttccaaagctcagcacagtttcctcctgggatgaggagaggaat

SEQ ID NO: 552967 - DNA, 120 bp, Artificial Sequence
  ENSG00000168634_5 (sequence is synthesized)
agcactgttccagtccagggatgctgtgtgtgccctggtggtggtcttaaggacctaccacatcaacatctggacaaccctcactgattacctgcccttggttgcactcatcaggctaat

SEQ ID NO: 552968 - DNA, 120 bp, Artificial Sequence
  ENSG00000168634_6 (sequence is synthesized)
tgatcccatatttaacctcaaggagaaatatcaaccagacactgcatggcaacctccttggggccagccttcaaggcttcatggccatatcatgaacccaggacaggcacagtgggggtg

SEQ ID NO: 552969 - DNA, 120 bp, Artificial Sequence
  ENSG00000168634_7 (sequence is synthesized)
gtgaggacctgatagagttggatcagtgactaagaggctgcaataaggtgccatgaaatcaaaatcaaagggctagaactctccaaggtcttgcccccggcatgtagcaccacctgagcc

SEQ ID NO: 552970 - DNA, 120 bp, Artificial Sequence
  ENSG00000168634_8 (sequence is synthesized)
agaaactgcagaggacatgacagtgtggcattactgataagttatggaaatggaaataatctttcctaaactaccaataataactttaaatttttgatcaaccatgctagagcaaagatt

SEQ ID NO: 552971 - DNA, 120 bp, Artificial Sequence
  ENSG00000168634_9 (sequence is synthesized)
gattgaattatccttctgttctctctacagaaatgatataaaaactatagtcataagaagagacaatcaaaaataatcagccataaaatattaaaaaggtattataaaggtatttaaaat

SEQ ID NO: 552972 - DNA, 120 bp, Artificial Sequence
  ENSG00000168634_10 (sequence is synthesized)
ataataaagtgttattttcctgggattcatgatatttgatatattcgtaagcttttgttaagtttgtaatttgttgcaatttctttttcatttcaaataaatattcacttacgtgtctaa

SEQ ID NO: 552973 - DNA, 120 bp, Artificial Sequence
  ENSG00000168646_0 (sequence is synthesized)
gcggctgtgattggcgcggcgggatcactggctccgcgagcctggcccgggggagtcggctggagccggctgcgctttgataaggtcctggcaactcagtaacagcccgagagccgggaa

SEQ ID NO: 552974 - DNA, 120 bp, Artificial Sequence
  ENSG00000168646_1 (sequence is synthesized)
ataaaaataacccctcagagcgatggatttcggggccgcccggcggccgaggcgcccgccgaaggccctgctgtaaaagagaggaggttcagatgagcccctgctgacttgagagagaca

SEQ ID NO: 552975 - DNA, 120 bp, Artificial Sequence
  ENSG00000168646_2 (sequence is synthesized)
gagagaccacgccgattgctgagaggaactggaagaagaaaaattcccagactcagtgggaagagctccctcaccatgagtagcgctatgttggtgacttgcctcccggaccccagcagc

SEQ ID NO: 552976 - DNA, 120 bp, Artificial Sequence
  ENSG00000168646_3 (sequence is synthesized)
agcttccgtgaggatgccccgcggcccccagtgccaggggaagaaggggagaccccaccgtgtcagccaggggtgggcaagggccaggtcaccaaacccatgcctgtctcttccaacacc

SEQ ID NO: 552977 - DNA, 120 bp, Artificial Sequence
  ENSG00000168646_4 (sequence is synthesized)
aggcggaacgaagatgggttgggggagccggaggggcgggcatctccggattcccctctgacccggtggaccaagtccttacactccttattgggcgatcaagacggtgcttacctgttc

SEQ ID NO: 552978 - DNA, 120 bp, Artificial Sequence
  ENSG00000168646_5 (sequence is synthesized)
cgaactttcctggagagggagaaatgcgtggataccttagacttctggtttgcctgcaatggattcaggcagatgaacctgaaggataccaaaactttacgagtagccaaagcgatctac

SEQ ID NO: 552979 - DNA, 120 bp, Artificial Sequence
  ENSG00000168646_6 (sequence is synthesized)
aaaaggtacattgagaacaacagcattgtctccaagcagctgaagcctgccaccaagacctacataagagatggcatcaagaagcagcagattgattccatcatgtttgaccaggcgcag

SEQ ID NO: 552980 - DNA, 120 bp, Artificial Sequence
  ENSG00000168646_7 (sequence is synthesized)
accgagatccagtcggtgatggaggaaaatgcctaccagatgtttttgacttctgatatatacctcgaatatgtgaggagtgggggagaaaacacagcttacatgagtaatgggggactc

SEQ ID NO: 552981 - DNA, 120 bp, Artificial Sequence
  ENSG00000168646_8 (sequence is synthesized)
gggagcctaaaggtcgtgtgtggctatctccccaccttgaatgaagaagaggagtggacttgtgccgacttcaagtgcaaactttcgccaaccgtggttggcttgtccagcaaaactctg

SEQ ID NO: 552982 - DNA, 120 bp, Artificial Sequence
  ENSG00000168646_9 (sequence is synthesized)
agggccacggcgagtgtgaggtccacggaaactgttgacagtggatacaggtccttcaagaggagcgatcctgttaatccttatcacataggttctggctatgtctttgcaccagccacc

SEQ ID NO: 552983 - DNA, 120 bp, Artificial Sequence
  ENSG00000168646_10 (sequence is synthesized)
agcgccaacgacagtgagatatccagtgatgcgctgacggatgattccatgtccatgacggacagcagtgtagatggaattcctccttatcgtgtgggcagtaagaaacagctccagaga

SEQ ID NO: 552984 - DNA, 120 bp, Artificial Sequence
  ENSG00000168646_11 (sequence is synthesized)
gaaatgcatcgcagtgtgaaggccaatggccaagtgtctctacctcatttcccgagaacccaccgcctgcccaaggagatgacccccgtggaacccgccacctttgcagctgagctgatc

SEQ ID NO: 552985 - DNA, 120 bp, Artificial Sequence
  ENSG00000168646_12 (sequence is synthesized)
tcgaggctggaaaagctgaagctggagttggagagccgccacagcctggaggagcgcctgcagcagatccgagaggatgaagagagagagggctccgagctcacactcaattcgcgggag

SEQ ID NO: 552986 - DNA, 120 bp, Artificial Sequence
  ENSG00000168646_13 (sequence is synthesized)
ggggcgcccacgcagcaccccctctccctactgccctccggcagctacgaggaagacccgcagacgatactggacgatcacctgtccagggtcctcaagacccctggctgccagtctcca

SEQ ID NO: 552987 - DNA, 120 bp, Artificial Sequence
  ENSG00000168646_14 (sequence is synthesized)
ggcgtaggccgctatagcccccgctcccgctccccggaccaccaccaccaccaccattcgcagtaccactccctgctcccgcccggtggcaagctgcctcccgcggccgcctcgccgggc

SEQ ID NO: 552988 - DNA, 120 bp, Artificial Sequence
  ENSG00000168646_15 (sequence is synthesized)
gcctgccccctcctcgggggcaaaggctttgtgaccaagcagacgacgaagcatgtccaccaccactacatccaccaccatgccgtccccaagaccaaggaggagatcgaggcggaggcc

SEQ ID NO: 552989 - DNA, 120 bp, Artificial Sequence
  ENSG00000168646_16 (sequence is synthesized)
acgcagcgggtgcactgcttctgccctgggggcagcgagtattactgctactcgaaatgcaaaagccactccaaggctccggaaaccatgcccagcgagcagtttggcggcagcagaggc

SEQ ID NO: 552990 - DNA, 120 bp, Artificial Sequence
  ENSG00000168646_17 (sequence is synthesized)
gaaggaggggcccccggcggagctggggccctgcagcttccccgggaggaaggagacaggtcgcaggatgtctggcagtggatgctggagagtgagcggcagagcaagcccaagccccat

SEQ ID NO: 552991 - DNA, 120 bp, Artificial Sequence
  ENSG00000168646_18 (sequence is synthesized)
agtgcccaaagcacaaaaaaggcctaccccttggagtctgcccgctcgtctccaggcgaacgagccagccggcaccatctgtgggggggcaacagcgggcacccccgcaccaccccccgt

SEQ ID NO: 552992 - DNA, 120 bp, Artificial Sequence
  ENSG00000168646_19 (sequence is synthesized)
gcccacctgttcacccaggaccctgcgatgcctcccctgaccccacccaacacgctggctcagctggaggaggcctgtcgcaggctagctgaggtgtcgaagcccccaaagcagcggtgc

SEQ ID NO: 552993 - DNA, 120 bp, Artificial Sequence
  ENSG00000168646_20 (sequence is synthesized)
tgtgtggccagtcagcagagggacaggaatcattcggccactgttcagacgggagccacacccttctccaatccaagcctggctccagaagatcacaaagagccaaagaaactggcaggt

SEQ ID NO: 552994 - DNA, 120 bp, Artificial Sequence
  ENSG00000168646_21 (sequence is synthesized)
gtccacgcgctccaggccagtgagttggttgtcacttactttttctgtggggaagaaattccataccggaggatgctgaaggctcagagcttgaccctgggccactttaaagagcagctc

SEQ ID NO: 552995 - DNA, 120 bp, Artificial Sequence
  ENSG00000168646_22 (sequence is synthesized)
agcaaaaagggaaattataggtattacttcaaaaaagcaagcgatgagtttgcctgtggagcggtgtttgaggagatctgggaggatgagacggtgctcccgatgtatgaaggccggatt

SEQ ID NO: 552996 - DNA, 120 bp, Artificial Sequence
  ENSG00000168646_23 (sequence is synthesized)
ctgggcaaagtggagcggatcgattgagccctggggtctggctttggtgaactgttggagcccgaagctcttgtgaactgtcttggctgtgagcaactgcgacaaaacattttgaaggaa

SEQ ID NO: 552997 - DNA, 120 bp, Artificial Sequence
  ENSG00000168646_24 (sequence is synthesized)
aattaaaccaatgaagaagacaaagtctaaggaagaatcggccagtgggccttcgggagggcggggggaggttgattttcatgattcatgagctgggtactgactgagataagaaaagcc

SEQ ID NO: 552998 - DNA, 120 bp, Artificial Sequence
  ENSG00000168646_25 (sequence is synthesized)
tgaactatttattaaaaacatgaccactcttggctattgaagatgctgcctgtatttgagagactgccatacataatatatgacttcctagggatctgaaatccataaactaagagaaac

SEQ ID NO: 552999 - DNA, 120 bp, Artificial Sequence
  ENSG00000168646_26 (sequence is synthesized)
tgtgtatagcttacctgaacaggaatccttactgatatttatagaacagttgatttcccccatccccagtttatggatatgctgctttaaacttggaagggggagacaggaagttttaat

SEQ ID NO: 553000 - DNA, 120 bp, Artificial Sequence
  ENSG00000168646_27 (sequence is synthesized)
tgttctgactaaacttaggagttgagctaggagtgcgttcatggtttcttcactaacagaggaattatgctttgcactacgtccctccaagtgaagacagactgttttagacagactttt

SEQ ID NO: 553001 - DNA, 120 bp, Artificial Sequence
  ENSG00000168646_28 (sequence is synthesized)
taaaatggtgccctaccattgacacatgcagaaattggtgcgttttgtttttttttttcctatgctgctctgttttgtcttaaaggtcttgagggttgaccatgttgcgtcatcatcaac

SEQ ID NO: 553002 - DNA, 120 bp, Artificial Sequence
  ENSG00000168646_29 (sequence is synthesized)
attttgggggttgtgttggatgggatgatctgttgcagagggagaggcagggaaccctgctccttcgggccccaggttgatcctgtgactgaggctccccctcatgtagcctccccaggc

SEQ ID NO: 553003 - DNA, 120 bp, Artificial Sequence
  ENSG00000168646_30 (sequence is synthesized)
ccagggccctgaggcctgctagaatcactgccgctgtgctttcgtggaaatgacagttccttgttttttttgtttctgtttttgttttacattagtcattggaccacagccattcaggaa

SEQ ID NO: 553004 - DNA, 120 bp, Artificial Sequence
  ENSG00000168646_31 (sequence is synthesized)
ctaccccctgccccacaaagaaatgaacagttgtagggagacccagcagcacctttcctccacacaccttcattttgatgttcgggtttttgtgttaagttaatctgtacattctgtttg

SEQ ID NO: 553005 - DNA, 120 bp, Artificial Sequence
  ENSG00000168646_32 (sequence is synthesized)
ccattgttacttgtactatacatctgtatatagtgtacggcaaaagagtattaatccactatctctagtgcttgactttaaatcagtacagtacctgtacctgcacggtcacccgctccg

SEQ ID NO: 553006 - DNA, 120 bp, Artificial Sequence
  ENSG00000168646_33 (sequence is synthesized)
tgtgtcgccctatattgagggctcaagctttcccttgttttttgaaaggggtttatgtataaatatattttatgcctttttattacaagtcttgtactcaatgacttttgtcatgacatt

SEQ ID NO: 553007 - DNA, 120 bp, Artificial Sequence
  ENSG00000168646_34 (sequence is synthesized)
tgtcatgacattttgttctacttatactgtaaattatgcattataaagagttcatttaaggaaaattacttggtacaataattattgtaattaagagatgtagcctttattaaaatttta

SEQ ID NO: 553008 - DNA, 120 bp, Artificial Sequence
  ENSG00000168646_35 (sequence is synthesized)
gttaaatccacagcgcagtttttgttggaagcgcccggaggacatttggtgcgccgagtgactgctggaaacaggacctgcgttgaaagccgggccgggcgggggcggaggcccgctcgg

SEQ ID NO: 553009 - DNA, 120 bp, Artificial Sequence
  ENSG00000168646_36 (sequence is synthesized)
atcttttgcataaaaggggcggcggggcgcgccgttccccctccccggccggtggctttcgctctgaacccgggattgttgtttcccgcaccccctcccccgccgcacgactccccatgt

SEQ ID NO: 553010 - DNA, 120 bp, Artificial Sequence
  ENSG00000168646_37 (sequence is synthesized)
ctgccgccgcgagccgagccgggggccggggccgggcccctgccaggggcgcctgcgaggtctcgccgccgagcgcgcgcggggatcaatgagaggaggttcagatgagcccctgctgac

SEQ ID NO: 553011 - DNA, 120 bp, Artificial Sequence
  ENSG00000168646_38 (sequence is synthesized)
tgttatggtagttttttttttaactctctctctgagcagaatagacaagtttctattgaagtcacattttccagttcttctaacccagtttctttccttctgttttctctctgctcattc

SEQ ID NO: 553012 - DNA, 120 bp, Artificial Sequence
  ENSG00000168646_39 (sequence is synthesized)
caagtccggggcgcccgtgtccctcgcgtccctcctcccggcccgggcccctcgcccgtggccgccccggccccttttgcggagaggcagagactccgcgcgtcgccatttctggactag

SEQ ID NO: 553013 - DNA, 120 bp, Artificial Sequence
  ENSG00000168646_40 (sequence is synthesized)
gctgctgctttctgtgctttttctgcgggcgcctctgcaaacggcggcgccggggaccgaccccccgcccgggctcggggcgctgctggcgtgtcccggggttccggcctcgaggtgtgc

SEQ ID NO: 553014 - DNA, 120 bp, Artificial Sequence
  ENSG00000168646_41 (sequence is synthesized)
ccgccagggctctggaggcgttcagttgcatttgggccgggggaccgggccggaggggctcggaggacatgagagcctggcttcggcggccttcgtcttccagagaggaggttcagatga

SEQ ID NO: 553015 - DNA, 120 bp, Artificial Sequence
  ENSG00000168653_0 (sequence is synthesized)
atcctttacggcaggcgtccgcgtcgctagctagtcgttctgaagcggcggccagagaagagtcaagggcacgagcatcggccatgcctttcttggacatccagaaaaggttcggcctta

SEQ ID NO: 553016 - DNA, 120 bp, Artificial Sequence
  ENSG00000168653_1 (sequence is synthesized)
acatagatcgatggttgacaatccagagtggtgaacagccctacaagatggctggtcgatgccatgcttttgaaaaagaatggatagaatgtgcacatggaatcggttatactcgggcag

SEQ ID NO: 553017 - DNA, 120 bp, Artificial Sequence
  ENSG00000168653_2 (sequence is synthesized)
acgtgcaggtaccatcaggaagcagcgggataagctgataaaggaaggaaagtacacccctccacctcaccacattggcaagggggagcctcggccctgaacagagcagctgctgatgtc

SEQ ID NO: 553018 - DNA, 120 bp, Artificial Sequence
  ENSG00000168653_3 (sequence is synthesized)
tggaggctgattttcctgttctctgttctccactggaaaggttgtttacgacaaacctccttgtcaaagtgtgtaaaaataaaggattgctccatcctatttgttctattttctcttgga

SEQ ID NO: 553019 - DNA, 120 bp, Artificial Sequence
  ENSG00000168658_0 (sequence is synthesized)
agaggcgcgggtcacagagacctagaacagctggaatccttcgcccccggcgcgcagccttcgcccgccggaatcgctgccttatccaccagcgggatgcttacctcgcccgccctctcg

SEQ ID NO: 553020 - DNA, 120 bp, Artificial Sequence
  ENSG00000168658_1 (sequence is synthesized)
ggtcaggcgggcccgggaggatgggagggtggctgctgagcgggagccgccacgtcttccacccgacatattgcctagagtttgctgtgacttagatcttgattcagagatggagaaatc

SEQ ID NO: 553021 - DNA, 120 bp, Artificial Sequence
  ENSG00000168658_2 (sequence is synthesized)
aggcccatcttctaccatctctgagcagcagctgcagaggcaagagggatggattaacaccaaaacagacttggctgagcagagtctcatttcatctgagaaatggcttcaactgcatgg

SEQ ID NO: 553022 - DNA, 120 bp, Artificial Sequence
  ENSG00000168658_3 (sequence is synthesized)
gcttaagagcaacaaattgaccttgaaacagattttgtcacagatcggattcccacattgtgaagattatgtggcgtctctggggagacctgtggcttctcggtatgctgatggtctgtt

SEQ ID NO: 553023 - DNA, 120 bp, Artificial Sequence
  ENSG00000168658_4 (sequence is synthesized)
tccacagctctacagagcagaagatggcagagtatacaatctgacagctaaatcagaactgatttatcagtttgtggaacatttaacacaagctgtggagagctacaagcagcgaatgga

SEQ ID NO: 553024 - DNA, 120 bp, Artificial Sequence
  ENSG00000168658_5 (sequence is synthesized)
ctggctcaccagcaagagccggcagatttttggtgtcatcttggaacagtgcgtcaccatagtgctggattttggcggcattctggagggggagcttgatctgtgccgagaggctctaac

SEQ ID NO: 553025 - DNA, 120 bp, Artificial Sequence
  ENSG00000168658_6 (sequence is synthesized)
aatggttctccaggagcaggtggctcacataaccgagttcaatatcatacgggtttctcaagagcctgtgaagtggcaggaaaatgctactcctgtgaccgaacagtccatagctactgc

SEQ ID NO: 553026 - DNA, 120 bp, Artificial Sequence
  ENSG00000168658_7 (sequence is synthesized)
catcagttgggttgagaaactgacggttgagctgactgtgagcgaggctggccgcctggatgctctgctggaagccgggagagacaagactattgaatccatttactactttgtggtggg

SEQ ID NO: 553027 - DNA, 120 bp, Artificial Sequence
  ENSG00000168658_8 (sequence is synthesized)
ggatgttcctgaagaatccaaggagcttctcctccagagggccttggagatcccgtgtccagtctacacagtgtccttcaacgccagaggagaaggcactatagcttttctaaaggatct

SEQ ID NO: 553028 - DNA, 120 bp, Artificial Sequence
  ENSG00000168658_9 (sequence is synthesized)
gagtgccaagacccacagcagattccacgcatttgccgagagaacagagtgtgtagaatttcctgcattctccacaaaggatggtgacaatgtgatgacttggaattcaaggaaactgaa

SEQ ID NO: 553029 - DNA, 120 bp, Artificial Sequence
  ENSG00000168658_10 (sequence is synthesized)
aggaaaactccctccaggagctggagtcagagaggacgtgtttctcgtttggcaagagatggaggaagcctgcagcacgctggcccagatccagaggctggtggccgagcctcccaagcc

SEQ ID NO: 553030 - DNA, 120 bp, Artificial Sequence
  ENSG00000168658_11 (sequence is synthesized)
cgacgtggccactgtggactgcgagtcagaaacaacctctgttgagattgcatcgaatccagaagacacctgggactctaagacatggctgcagaaatatggcttgaaggcccagaagct

SEQ ID NO: 553031 - DNA, 120 bp, Artificial Sequence
  ENSG00000168658_12 (sequence is synthesized)
atccttgtatgatgtgcttgccgactgctctttccgccacgctgatggggttgtggatataaaagccaaaccggagaatgagtccgtgcagaccagtgcggagacgaacaagaagacagt

SEQ ID NO: 553032 - DNA, 120 bp, Artificial Sequence
  ENSG00000168658_13 (sequence is synthesized)
ccatgcaaaatattgcagcaggtttgtccatgctccctggaaggatgggagcttggtccacgtcaacattaccaaagagaagtgcaagtggtacagtgagagaatccacacagccctggc

SEQ ID NO: 553033 - DNA, 120 bp, Artificial Sequence
  ENSG00000168658_14 (sequence is synthesized)
ccggatccgaaggaggattaaatggctacaggatgggagtcaaagcctctttggaagattgcataatgattgcatctacattctcattgacacgtctcactcaatgaagagcaaactgga

SEQ ID NO: 553034 - DNA, 120 bp, Artificial Sequence
  ENSG00000168658_15 (sequence is synthesized)
cttggtgaaggacaagatcattcagttcatacaggaacagctgaaatataaaagtaagtttaactttgtgaagtttgatggtcaagcagttgcttggcgggaacaacttgctgaagtcaa

SEQ ID NO: 553035 - DNA, 120 bp, Artificial Sequence
  ENSG00000168658_16 (sequence is synthesized)
tgaagataatttggaacaggctcagtcctggattagagacataaagattggaagctccacaaacaccctgagtgccctgaaaactgcttttgctgataaagaaacacaggcaatctacct

SEQ ID NO: 553036 - DNA, 120 bp, Artificial Sequence
  ENSG00000168658_17 (sequence is synthesized)
tctgaccgatgggagacctgatcagccacctgaaacagttatagaccaggtcaaacgttttcaggaaattcctatttataccatctccttcaattacaatgatgagattgcaaacaggtt

SEQ ID NO: 553037 - DNA, 120 bp, Artificial Sequence
  ENSG00000168658_18 (sequence is synthesized)
tttgaaagaggttgctgctttgactggaggagagttccatttttataattttggttgcaaggatcccactcccccagaggctgttcagaatgaagatctgactcttttagttaaggaaat

SEQ ID NO: 553038 - DNA, 120 bp, Artificial Sequence
  ENSG00000168658_19 (sequence is synthesized)
ggaacagggtcacagtgatctggagaagatgcaagacctttattctgagtccttgatcatggactggtggtacaatgcagaaaaggatggagacagcaagcatcaaaaggaaatctgttc

SEQ ID NO: 553039 - DNA, 120 bp, Artificial Sequence
  ENSG00000168658_20 (sequence is synthesized)
tatgatttcaaccccagaaaagtgtgcaaagcctcaatctgatgtcgattcaacacaaacttcatctctgaatatgttgaagggaccatggggcctttcagatcaaaaggttcagaaaaa

SEQ ID NO: 553040 - DNA, 120 bp, Artificial Sequence
  ENSG00000168658_21 (sequence is synthesized)
caaaaccagcctgctcagaagccagatgtcctccctcaggagctcagcttgcagtgaaaggaaggatggcctctccaatgccagcagccggaggactgctctaagtgacaaagaaatgag

SEQ ID NO: 553041 - DNA, 120 bp, Artificial Sequence
  ENSG00000168658_22 (sequence is synthesized)
catcttgctggctgaggagtggctggatgacaaatcgtcagaaaaggtgacgcgagaaggaagccaggtttatgaccacgattcttcagatgtgtcttcagaaaactggctgaagaccta

SEQ ID NO: 553042 - DNA, 120 bp, Artificial Sequence
  ENSG00000168658_23 (sequence is synthesized)
tggcttggtcgccaagaaactcaccctcatggatgccttgtcagtggcagcagtcccgcacagctccacctatgttcccgtcctggacaagcatgtcgtgtctaaggtctttgatgaggt

SEQ ID NO: 553043 - DNA, 120 bp, Artificial Sequence
  ENSG00000168658_24 (sequence is synthesized)
gttccctctggcacatgtgtgcaacgacacaaataagatgacattaattaacccccaaggagccaaactcaatatctacaagcgaaaagtggaacaggcaattcaatcctatgaaaagcg

SEQ ID NO: 553044 - DNA, 120 bp, Artificial Sequence
  ENSG00000168658_25 (sequence is synthesized)
cttgaataaaattgtttggcgagcattatctcaagaggaaaaagaaaagttagatgcaaacaaaccaatacagtacttggaaaacaaaacagttttaaaccaggctttagaacggttgaa

SEQ ID NO: 553045 - DNA, 120 bp, Artificial Sequence
  ENSG00000168658_26 (sequence is synthesized)
ttggcccatttcactgaaagagctgtcgatgctggaaagtgaaatcctagctgggaaaatgtacatccagcaggccatggaactccaggaggctgccaagaagaattatgcaaacaaggc

SEQ ID NO: 553046 - DNA, 120 bp, Artificial Sequence
  ENSG00000168658_27 (sequence is synthesized)
cccgggagagcaacagaaattgcaaggaaatccaacaaagaaaaccaaatcaaaaagaccagatcccctcaaaggacagaaggttattgcaagatgtgatgaaaatggcttttattttcc

SEQ ID NO: 553047 - DNA, 120 bp, Artificial Sequence
  ENSG00000168658_28 (sequence is synthesized)
aggggttgtgaagaagtgtgtgagccgcacccaagcactggtgggcttcagttacggagacaccaaggtcgtgtccacctccttcatcacgcctgtggggggcgccatgccctgcccgct

SEQ ID NO: 553048 - DNA, 120 bp, Artificial Sequence
  ENSG00000168658_29 (sequence is synthesized)
gctccaggttggagattatgtgtttgccaaaattgtgatacccaaaggatttgacttctatgtccctgccattgtcatagcacttcccaataagcatgtggccacagaaaaattctacac

SEQ ID NO: 553049 - DNA, 120 bp, Artificial Sequence
  ENSG00000168658_30 (sequence is synthesized)
agttttgaagtgtaacaaccggagagaattttgccctcggagtgcacttattaagatcagccaaaacaagtatgcgctctcttgctctcatataaagtcacccccaattcctgaggatcc

SEQ ID NO: 553050 - DNA, 120 bp, Artificial Sequence
  ENSG00000168658_31 (sequence is synthesized)
agaagtagaggatgtggaggcgaggaactctgctttcctcttctggccactgaaagaagcggacacgcaggattccagagagccaagacgagagaagcccaggaggaaaaagaggcccgc

SEQ ID NO: 553051 - DNA, 120 bp, Artificial Sequence
  ENSG00000168658_32 (sequence is synthesized)
caagcagccactccagcaggcggcgccctcggactcggacggctcctcccacggcatcagctcccatgggtcctgccaggggacacaccccgagcccaggacagcccacctccacttccc

SEQ ID NO: 553052 - DNA, 120 bp, Artificial Sequence
  ENSG00000168658_33 (sequence is synthesized)
cgcggccgggcgtctaggactcagcagccacgccatcattgccacacctccacctcgagcagccctgccctgtactctccaagccacccacagcagcaaagggctgaggagcgtccctga

SEQ ID NO: 553053 - DNA, 120 bp, Artificial Sequence
  ENSG00000168658_34 (sequence is synthesized)
gacactttaaggccgtctggtggcagctatgtttaagagaccagcgtccttccaggctgttcagacctcagcgttgacactgaaactggcccctccgcggaggtaaggccgccctccgcg

SEQ ID NO: 553054 - DNA, 120 bp, Artificial Sequence
  ENSG00000168658_35 (sequence is synthesized)
ccgcctatgcctgccctgtctgtagcaaagactcctctcccctccatccctgctgcctcccctacccgtttgacgacttggttctggctttttctgactgttctttatcctgttttcccc

SEQ ID NO: 553055 - DNA, 120 bp, Artificial Sequence
  ENSG00000168658_36 (sequence is synthesized)
ctgcactcacaaaattgtattccatcttctggtagacgccccacccccagaagttttaacctgaaggatgactgtcacaggactttcaaattgtttagcagtcagcatagtcaggatcca

SEQ ID NO: 553056 - DNA, 120 bp, Artificial Sequence
  ENSG00000168658_37 (sequence is synthesized)
agcccgcaatcttgttttaaattaattatcacatctaaattagagaatttgtcacccaatattaggactgaaattcagactcggtaacttgtctgagatctgcaagactgaacatcccct

SEQ ID NO: 553057 - DNA, 120 bp, Artificial Sequence
  ENSG00000168658_38 (sequence is synthesized)
actgtatagtttcctgacattttcatttagcctttcctaattatttttgtctatagtctgttgtaggtaactctaattgagcccgaaaccagaataaaaactcttacattggaaacattt

SEQ ID NO: 553058 - DNA, 120 bp, Artificial Sequence
  ENSG00000168658_39 (sequence is synthesized)
caaaaccattggattgttggattatttgttaccatttttctctgaacacattttagcaatgacatatgaaagtattcagttgtgtttactaacttcaaaaatgaaatcgctccatcaaat

SEQ ID NO: 553059 - DNA, 120 bp, Artificial Sequence
  ENSG00000168658_40 (sequence is synthesized)
ttcgtttttctagtcggtaagatccctgaggctagatgaaaatagagcacaggtcatcactagggaaaatattggatgctttttgcaaacagaacagatagggctgagttctgatactct

SEQ ID NO: 553060 - DNA, 120 bp, Artificial Sequence
  ENSG00000168658_41 (sequence is synthesized)
aaaaatttacaatctaattaaaagtggcattcacattcctgaaagctaggagtagccagggttatggtgaagaaattaaagaactaatccacttctaaaaatatgaaaaaaaaaaaataa

SEQ ID NO: 553061 - DNA, 120 bp, Artificial Sequence
  ENSG00000168658_42 (sequence is synthesized)
ttgaagaattccctttagcatttcttataaggcaggtctggtagtgatgaactccctcggcttttgtttatctgtgaaagtctttatctctccttcatttgggaaggacagctttgatta

SEQ ID NO: 553062 - DNA, 120 bp, Artificial Sequence
  ENSG00000168658_43 (sequence is synthesized)
acatgccctaggccattcagatgggcagtgctggatgagcttcaagcccaagtctctcgctctggagctgtttccttcattccatacagctgaagacagcatgagtgggagagactgtca

SEQ ID NO: 553063 - DNA, 120 bp, Artificial Sequence
  ENSG00000168658_44 (sequence is synthesized)
aatttgatactagggacaagaagtttcaacctgtgcttttgctagaacactgacatttcatgagctggcctgagctagtccacttttcacagagaagaagtggaatatctctggccagct

SEQ ID NO: 553064 - DNA, 120 bp, Artificial Sequence
  ENSG00000168658_45 (sequence is synthesized)
catgaaatgagcgtatttgggccccccaaaaaagtagccagaaaaatgcacttattttaatttctcattttttagtaaacaaatttttattacccatttactgcgttgcatgtatgtaat

SEQ ID NO: 553065 - DNA, 120 bp, Artificial Sequence
  ENSG00000168658_46 (sequence is synthesized)
attttgaaagtactggtctaatggtatgagcaaaaaggtgaacattcttgctttttggagattacatcttaaaggagacagacaagcaatgaaataaacagataaaatatgtggtgtgtc

SEQ ID NO: 553066 - DNA, 120 bp, Artificial Sequence
  ENSG00000168658_47 (sequence is synthesized)
agatacagtgccatagagaaaaatcaagccacaaatggggttgagaatgttggggtgagggttttgattctatatttggtggttaatgaagagctcctggggaaggtgacatatgaataa

SEQ ID NO: 553067 - DNA, 120 bp, Artificial Sequence
  ENSG00000168658_48 (sequence is synthesized)
ggacttaaaggaggtggggcaagccatgagattggggaagggagttctaagcagaaacaacagcggtgcccaggcctcagggtggagtgcacacgtgtgttggaggaagggccatgagac

SEQ ID NO: 553068 - DNA, 120 bp, Artificial Sequence
  ENSG00000168658_49 (sequence is synthesized)
tgggatagctgggcctcagaggtttgccccagacttcctgggggatgtgatccctgaaggaatcagccagctgcaattcagcaaggggtggaggtatgaagggagtttcatggatggtga

SEQ ID NO: 553069 - DNA, 120 bp, Artificial Sequence
  ENSG00000168658_50 (sequence is synthesized)
caataatacgtgtgaagacttagaaatgaagaaagacatctatgtctggagaaataaaattgattctggctggaacataaaatgagaaggaagggtggaaataataaagctcttcagaga

SEQ ID NO: 553070 - DNA, 120 bp, Artificial Sequence
  ENSG00000168658_51 (sequence is synthesized)
ggtgagcatggggctatgcataaagggtcatattaaggatttgcactttaccctgagggcaatgagagccacatttaaagcagtgagaaacacaatcacatttgaagttttcaaaagctc

SEQ ID NO: 553071 - DNA, 120 bp, Artificial Sequence
  ENSG00000168658_52 (sequence is synthesized)
tctcccactgctgtgtgaagattggataccaaggggttaggatgtctctggtccctggcttcgggtggtagatagatagtggtacctacaggagatggtggtgtggatggaaagacaatg

SEQ ID NO: 553072 - DNA, 120 bp, Artificial Sequence
  ENSG00000168658_53 (sequence is synthesized)
agatgtgtctgcaacatgatgaattgcaggtgcctgcaagatgcccagatgaagatatcagagaagcaattggagatgtgggtctagagtctggagacagagatttgggagacataacca

SEQ ID NO: 553073 - DNA, 120 bp, Artificial Sequence
  ENSG00000168658_54 (sequence is synthesized)
cagaagtcatcactgaaatcatgggaagggtctgtagggaaaagggaactgggagaaaaccctgaggaagctctgtcaggcaaaaagattacattgcagggcgggtgtggtgggtcacac

SEQ ID NO: 553074 - DNA, 120 bp, Artificial Sequence
  ENSG00000168658_55 (sequence is synthesized)
acactttccaaggtgaagtacgcgcaagctgatgactccatccatttttggatgtcaatgtattgacatgaattttgatagggacatttttggaaataaagctttacctggaagaagtga

SEQ ID NO: 553075 - DNA, 120 bp, Artificial Sequence
  ENSG00000168658_56 (sequence is synthesized)
tcaccctcatggatgccttgtcagtggcagcagtcccgcacagctccacctatgttcccgtcctggacaagcatgtcgtgtctaaggtctttgatgagtgtttcccggaccagcctcaaa

SEQ ID NO: 553076 - DNA, 120 bp, Artificial Sequence
  ENSG00000168658_57 (sequence is synthesized)
accttggaaatgaggtgttccctctggcacatgtgtgcaacgacacaaataagatgacattaattaacccccaaggagccaaactcaatatctacaagcgaaaagtggaacaggcaattc

SEQ ID NO: 553077 - DNA, 120 bp, Artificial Sequence
  ENSG00000168658_58 (sequence is synthesized)
agagggcctcactgatgctctgaaagcaaatgctggaaatgggtctgggggaccttttcagctgccaccaaaaatctgtggacatatacttccttggcttagggactcagatctgaggtg

SEQ ID NO: 553078 - DNA, 120 bp, Artificial Sequence
  ENSG00000168658_59 (sequence is synthesized)
gtaaaaactaagatgtcagactcgaagtgtggggtatgactttatctttccctggatctgcatgtggagaggacggagagtgggtgcacacaagccaaatctgagctactatcacactga

SEQ ID NO: 553079 - DNA, 120 bp, Artificial Sequence
  ENSG00000168658_60 (sequence is synthesized)
tcaagaggaaaaagaaaagagcctgtaatatcttgttccccctggtgtctctctgaagtactgcagtatctccaatgctgtaacaagctgtgacactcatttctgttctcagaggtccca

SEQ ID NO: 553080 - DNA, 120 bp, Artificial Sequence
  ENSG00000168661_0 (sequence is synthesized)
cttgtggactgcgccgggcatgctcggcggtgtgacggctcaggactgcatttcccagaggctgcagctatccggccaatgtagcctgaaactacatttctcagcggccactggaacgac

SEQ ID NO: 553081 - DNA, 120 bp, Artificial Sequence
  ENSG00000168661_1 (sequence is synthesized)
ctcaatctctgcctcctcgccagttcattgtggtcgttgacccggcagcgagctttggagttcatcgagggagaagtcagcgcccagctccgaggttggagcagccccgccgggcaactt

SEQ ID NO: 553082 - DNA, 120 bp, Artificial Sequence
  ENSG00000168661_2 (sequence is synthesized)
gaatttctgcaaacgaacacagcaccgggagctctgcagacctgtgtcggcgcggaacccggactgagacatgccttttgaacttctcagatagaggaaccccagtgaagactgatcagt

SEQ ID NO: 553083 - DNA, 120 bp, Artificial Sequence
  ENSG00000168661_3 (sequence is synthesized)
tcttacaattctcaaagcatggcccataaatatgtgggtttgcagtatcacggatcagtgacatttgaggatgtggccatagccttctcccagcaggagtgggagagtctggactcttcc

SEQ ID NO: 553084 - DNA, 120 bp, Artificial Sequence
  ENSG00000168661_4 (sequence is synthesized)
cagaggggcttgtacagagatgtgatgttggagaactacaggaacttggtgtcaatggcaggacattcccgttctaaaccacatgtgatcgccttattggaacaatggaaagagcctgaa

SEQ ID NO: 553085 - DNA, 120 bp, Artificial Sequence
  ENSG00000168661_5 (sequence is synthesized)
gtgacagtgaggaaagatggaagaagatggtgcacagatttgcagttggaagatgatacaatcggctgtaaagaaatgcccacctctgaaaactgtccatcttttgctctacatcagaaa

SEQ ID NO: 553086 - DNA, 120 bp, Artificial Sequence
  ENSG00000168661_6 (sequence is synthesized)
ataagtagacagaaaccacgtgaatgtcaggaatatggaaagaccctttgtcaagactcaaagcctgttcaacatgaaagaatacatagtagtgaaaaacccaacagatgtaaagaatgt

SEQ ID NO: 553087 - DNA, 120 bp, Artificial Sequence
  ENSG00000168661_7 (sequence is synthesized)
gggaagaactttagtaatggacatcaactcaccatacatcagagattgcatgttggtgagaaaccctataaatatgaaaaatgtgggaaggcctttatcagtggctcagcctttgttaag

SEQ ID NO: 553088 - DNA, 120 bp, Artificial Sequence
  ENSG00000168661_8 (sequence is synthesized)
catgggagaattcacactggtgagaagccactcaaatgtaagcaatgtggaaagactattagtggtagctatcaacttacagtacataagagtattcatactgggaagaaaccatatgag

SEQ ID NO: 553089 - DNA, 120 bp, Artificial Sequence
  ENSG00000168661_9 (sequence is synthesized)
tgcggggaatgtgggaaagcttttctagtatatggaaagcttacccggcatcagagtactcacactggtgaaaaaccctttgggtgtgaggagtgtgggaaggccttcagtaccttttca

SEQ ID NO: 553090 - DNA, 120 bp, Artificial Sequence
  ENSG00000168661_10 (sequence is synthesized)
tgggaaggcctttagcactagctcaccccttgctaagcatcagagaattcatactggcgagaaaccctatgaatgtaaggagtgtgggaagtccttcactgtgtatggacagcttactcg

SEQ ID NO: 553091 - DNA, 120 bp, Artificial Sequence
  ENSG00000168661_11 (sequence is synthesized)
acatcagagtattcatactggtgagaaaccttttgaatgtaaggaatgtggaaaggcctttagacttagttccttccttcatgcacatcagcgaattcatgcagagataaagccctacgg

SEQ ID NO: 553092 - DNA, 120 bp, Artificial Sequence
  ENSG00000168661_12 (sequence is synthesized)
atgcaaggaatgcgggagaaccttcagtcgtgcctcatatcttgttcaacatggaagacttcacactggcgagaagccctatgaatgtaaggagtgtggcaaggcctttagtactggctc

SEQ ID NO: 553093 - DNA, 120 bp, Artificial Sequence
  ENSG00000168661_13 (sequence is synthesized)
ataccttgttcagcatcagaggatccatactggggagaaaccctatgaatgtaaggaatgtggcaaagcctttattagtcgccatcagcttaccgtacatcaaagggttcatactggaga

SEQ ID NO: 553094 - DNA, 120 bp, Artificial Sequence
  ENSG00000168661_14 (sequence is synthesized)
gaaaccctatgagtgtaaggaatgtggcaaggccttcagagtgcacgtacatctcacacagcatcggaaaattcatactgatgtaaagccctatgaatgtaaggaatgtggaaagacttt

SEQ ID NO: 553095 - DNA, 120 bp, Artificial Sequence
  ENSG00000168661_15 (sequence is synthesized)
tagtcgagcctcgtaccttgtacaacatagcagaatccatactggtaagaagccctatgagtgtaaggagtgtggcaaggccttcagttctggctcataccttgttcagcatcaaagaat

SEQ ID NO: 553096 - DNA, 120 bp, Artificial Sequence
  ENSG00000168661_16 (sequence is synthesized)
tcatactggggagaaaccctatgaatgtaacaaatgtgggaaagcctttactgtttatggacaacttattggacatcagagtgttcacactggtgagaaaccttttgaatgtaaggaatg

SEQ ID NO: 553097 - DNA, 120 bp, Artificial Sequence
  ENSG00000168661_17 (sequence is synthesized)
cgggaaggcctttagacttaattcattccttactgaacatcagcgggtacacactggtgagaaaccctttaaatgcaaaaaatgtgggaagacctttagatacagttcagcccttaaagt

SEQ ID NO: 553098 - DNA, 120 bp, Artificial Sequence
  ENSG00000168661_18 (sequence is synthesized)
gcatctgagaaaacatatgagtgttataccctaagagtctgaggagtgtgggaagtgcttcgtgtgtggctcaaacattgttgaacatcggggaatttatgctggtaggaaactttcaaa

SEQ ID NO: 553099 - DNA, 120 bp, Artificial Sequence
  ENSG00000168661_19 (sequence is synthesized)
tgtgaagaatattggcaggtctattctcatcttataattcataatataactcagaaaacataagaatattcctttgtcatttataggtttgtaataccaatatttatactggtggaccat

SEQ ID NO: 553100 - DNA, 120 bp, Artificial Sequence
  ENSG00000168661_20 (sequence is synthesized)
tcagaaaaagtgggaaacgttattacttaatggttacagcactgacagcatgaacttttatatgatgcatttattctaatgtgattgtatgaacaagtgaataaaaaaccttggacctcc

SEQ ID NO: 553101 - DNA, 120 bp, Artificial Sequence
  ENSG00000168661_21 (sequence is synthesized)
acatgtgatcgccttattggaacaatggaaagagcctgaagtgacagtgaggaaagatggaagaagatggtgcacaggataagaaagctccagtctacaaacaaaacatgccagaagatt

SEQ ID NO: 553102 - DNA, 120 bp, Artificial Sequence
  ENSG00000168671_0 (sequence is synthesized)
agtgcctttggcgcactgaggtgcacagggtcccttagccgggcgcagggcgcgcagcccaggctgagatccgcggcttccgtagaagtgagcatggctgggcagcgagtgcttcttcta

SEQ ID NO: 553103 - DNA, 120 bp, Artificial Sequence
  ENSG00000168671_1 (sequence is synthesized)
gtgggcttccttctccctggggtcctgctctcagaggctgccaaaatcctgacaatatctacagtaggtggaagccattatctactgatggaccgggtttctcagattcttcaagatcac

SEQ ID NO: 553104 - DNA, 120 bp, Artificial Sequence
  ENSG00000168671_2 (sequence is synthesized)
ggtcataatgtcaccatgcttaaccacaaaagaggtccttttatgccagattttaaaaaggaagaaaaatcatatcaagttatcagttggcttgcacctgaagatcatcaaagagaattt

SEQ ID NO: 553105 - DNA, 120 bp, Artificial Sequence
  ENSG00000168671_3 (sequence is synthesized)
aaaaagagttttgatttctttctggaagaaactttaggtggcagaggaaaatttgaaaacttattaaatgttctagaatacttggcgttgcagtgcagtcattttttaaatagaaaggat

SEQ ID NO: 553106 - DNA, 120 bp, Artificial Sequence
  ENSG00000168671_4 (sequence is synthesized)
atcatggattccttaaagaatgagaacttcgacatggtgatagttgaaacttttgactactgtcctttcctgattgctgagaagcttgggaagccatttgtggccattctttccacttca

SEQ ID NO: 553107 - DNA, 120 bp, Artificial Sequence
  ENSG00000168671_5 (sequence is synthesized)
ttcggctctttggaatttgggctaccaatccccttgtcttatgttccagtattccgttccttgctgactgatcacatggacttctggggccgagtgaagaattttctgatgttctttagt

SEQ ID NO: 553108 - DNA, 120 bp, Artificial Sequence
  ENSG00000168671_6 (sequence is synthesized)
ttctgcaggaggcaacagcacatgcagtctacatttgacaacaccatcaaggaacatttcacagaaggctctaggccagttttgtctcatcttctactgaaagcagagttgtggttcatt

SEQ ID NO: 553109 - DNA, 120 bp, Artificial Sequence
  ENSG00000168671_7 (sequence is synthesized)
aactctgactttgcctttgattttgctcgacctctgcttcccaacactgtttatgttggaggcttgatggaaaaacctattaaaccagtaccacaagacttggagaacttcattgccaag

SEQ ID NO: 553110 - DNA, 120 bp, Artificial Sequence
  ENSG00000168671_8 (sequence is synthesized)
tttggggactctggttttgtccttgtgaccttgggctccatggtgaacacctgtcagaatccggaaatcttcaaggagatgaacaatgcctttgctcacctaccccaaggggtgatatgg

SEQ ID NO: 553111 - DNA, 120 bp, Artificial Sequence
  ENSG00000168671_9 (sequence is synthesized)
ctggcttcctcagagtgacctcctggctcacccaagcatccgtctgtttgtcacccacggcgggcagaatagcataatggaggccatccagcatggtgtgcccatggtggggatccctct

SEQ ID NO: 553112 - DNA, 120 bp, Artificial Sequence
  ENSG00000168671_10 (sequence is synthesized)
ctttggagaccagcctgaaaacatggtccgagtagaagccaaaaagtttggtgtttctattcagttaaagaagctcaaggcagagacattggctcttaagatgaaacaaatcatggaaga

SEQ ID NO: 553113 - DNA, 120 bp, Artificial Sequence
  ENSG00000168671_11 (sequence is synthesized)
caagagatacaagtccgcggcagtggctgccagtgtcatcctgcgctcccacccgctcagccccacacagcggctggtgggctggattgaccacgtcctccagacagggggcgcgacgca

SEQ ID NO: 553114 - DNA, 120 bp, Artificial Sequence
  ENSG00000168671_12 (sequence is synthesized)
cctcaagccctatgtctttcagcagccctggcatgagcagtacctgctcgacgtttttgtgtttctgctggggctcactctggggactctatggctttgtgggaagctgctgggcatggc

SEQ ID NO: 553115 - DNA, 120 bp, Artificial Sequence
  ENSG00000168671_13 (sequence is synthesized)
tgtctggtggctgcgtggggccagaaaggtgaaggagacataaggccaggtgcagccttggcggggtctgtttggtgggcgatgtcaccatttctagggagcttcccactagttctggca

SEQ ID NO: 553116 - DNA, 120 bp, Artificial Sequence
  ENSG00000168671_14 (sequence is synthesized)
gccccattctctagtccttctagttatctcctgttttcttgaagaacaggaaaaatggccaaaaatcatcctttccacttgctaattttgctacaaattcatccttactagctcctgcct

SEQ ID NO: 553117 - DNA, 120 bp, Artificial Sequence
  ENSG00000168671_15 (sequence is synthesized)
gctagcagaattctttccagtcctcttgtcctcctttgtttgccatcagcaagggctatgctgtgattctgtctctgagtgacttggaccactgaccctcagatttccagccttaaaatc

SEQ ID NO: 553118 - DNA, 120 bp, Artificial Sequence
  ENSG00000168671_16 (sequence is synthesized)
caccttccttctcatgcgcctctccgaatcacaccctgactcttccagcctccatgtccagacctagtcagcctctctcactcctgcccctactatctatcatggaataacatccaagaa

SEQ ID NO: 553119 - DNA, 120 bp, Artificial Sequence
  ENSG00000168671_17 (sequence is synthesized)
agacaccttgcatattctttcagtttctgttttgttctcccacatattctcttcaatgctcaggaagcctgccctgtgcttgagagttcagggccggacacaggctcacaggtctccaca

SEQ ID NO: 553120 - DNA, 120 bp, Artificial Sequence
  ENSG00000168671_18 (sequence is synthesized)
ttgggtccctgtctctggtgcccacagtgagctccttcttggctgagcaggcttggagactgtaggtttccagatttcctgaaaaataaaagtttacagcgttatctctccccaacctca

SEQ ID NO: 553121 - DNA, 120 bp, Artificial Sequence
  ENSG00000168671_19 (sequence is synthesized)
atattctcttcaatgttcaggaagcctgccctgtgcttgagagtacaaggctggacacaggctcgtgggtctccacattgggtccctgtctctggtgcccacagtgagctccttctttgc

SEQ ID NO: 553122 - DNA, 120 bp, Artificial Sequence
  ENSG00000168671_20 (sequence is synthesized)
tgagcaggcatggagactgtaggtttccagatttcctgaaaaataaaagtttacagcattatctttccacaacctcactaaacgattggccaagagatttctgtcctaattgcccagaat

SEQ ID NO: 553123 - DNA, 120 bp, Artificial Sequence
  ENSG00000168672_0 (sequence is synthesized)
gcctgtctctttaaatgccacgggctgcgctcccgcccgggagcccggagccggatctacaatcccgtccctccagctccggtgcttgttgctcgcccggcccaagcgggagctgttgcc

SEQ ID NO: 553124 - DNA, 120 bp, Artificial Sequence
  ENSG00000168672_1 (sequence is synthesized)
gccaggctgcgaggctgccgtcctctcctcctcgcgccccacctcccccgagagctggctgaggaggggcagcagccccagctggcgggaggaagcgcggtgtgaacagggattgccccc

SEQ ID NO: 553125 - DNA, 120 bp, Artificial Sequence
  ENSG00000168672_2 (sequence is synthesized)
cgccttcaagtatcggggcgctacgcagccgcgggggaaagacatgcccctagtctgcccgctgcgctgccctctgcccagcctcgctgccgcccgcgccgggagaggagggactgccga

SEQ ID NO: 553126 - DNA, 120 bp, Artificial Sequence
  ENSG00000168672_3 (sequence is synthesized)
gcctacaccttcaaactcgccctagaagtctcggggcgcggcagggagcccttccccaggccccacggccttcacctctccgcgggtagcctcagcccctgtccggggacctgtgcaaat

SEQ ID NO: 553127 - DNA, 120 bp, Artificial Sequence
  ENSG00000168672_4 (sequence is synthesized)
gaccctggagttggtttcgctttctccccttgcggcggtgtgaacgtgtgtccgcagcgtgatgggcaaccaggtggagaaattgacccacctaagttacaaggaagttcccacggccga

SEQ ID NO: 553128 - DNA, 120 bp, Artificial Sequence
  ENSG00000168672_5 (sequence is synthesized)
cccgactggcgtggaccgggacgacgggccccgcattggggtctcctacattttctccaatgacgatgaggacgtggagccgcagccgccgcctcaggggccagatggcggcggcttgcc

SEQ ID NO: 553129 - DNA, 120 bp, Artificial Sequence
  ENSG00000168672_6 (sequence is synthesized)
cgacggtggggacgggccgccgccgccccagccgcagccctacgatccgcggctgcacgaggtggaatgctccgtgttctaccgggacgaatgcatctaccagaagagcttcgcgccggg

SEQ ID NO: 553130 - DNA, 120 bp, Artificial Sequence
  ENSG00000168672_7 (sequence is synthesized)
ctcggcggcgctgagtacctacacgcccgagaacctgctcaacaagtgcaagccgggcgatctggtggagttcgtgtcgcaggctcagtacccgcactgggccgtatatgtgggtaactt

SEQ ID NO: 553131 - DNA, 120 bp, Artificial Sequence
  ENSG00000168672_8 (sequence is synthesized)
ccaggtggtgcacctgcaccggctggaggtgattaacagcttcctgactgacgccagccagggccgtcgcggccgcgtggtcaacgatctgtaccgctacaagccgctaagctccagcgc

SEQ ID NO: 553132 - DNA, 120 bp, Artificial Sequence
  ENSG00000168672_9 (sequence is synthesized)
cgtggtgcgcaacgcgctggcgcacgtgggtgccaaggagcgcgagctgagctggcgcaactcggagagtttcgccgcctggtgccgctacggcaagcgcgagttcaagatcggcggcga

SEQ ID NO: 553133 - DNA, 120 bp, Artificial Sequence
  ENSG00000168672_10 (sequence is synthesized)
gctgcgcatcggcaagcagccctaccggctgcagattcagctgtcggcgcagcgcagccacacgctcgagttccagagtctagaggacctgatcatggagaagcgacgcaacgaccagat

SEQ ID NO: 553134 - DNA, 120 bp, Artificial Sequence
  ENSG00000168672_11 (sequence is synthesized)
gaccagatcgggcgcgcggccgtgctgcaggagctcgccacgcacctgcacccggcggagccggaggagggcgacagcaacgtggcgcggactacgccgcctcccgggcgcccccctgcg

SEQ ID NO: 553135 - DNA, 120 bp, Artificial Sequence
  ENSG00000168672_12 (sequence is synthesized)
cgaggaggaggacggagaggcagtggcacactgatgggcgagctgagcgcagagctgcgaaggggaactgtttgcagtagcagccgctgctccctttctccctctcttcctccctctttt

SEQ ID NO: 553136 - DNA, 120 bp, Artificial Sequence
  ENSG00000168672_13 (sequence is synthesized)
gccactgtctgggccccatctgggattcctgggccctttggaaaagagttggtgaaatgcgcagccggctgtggacgggggaggaggaaggggacagagggagcaggtaggaaacacttt

SEQ ID NO: 553137 - DNA, 120 bp, Artificial Sequence
  ENSG00000168672_14 (sequence is synthesized)
agttgggggtggggggcgtctccctctggccccctgtctgtcttcctctccgcggtggagcaaactgtggacttgcctggcacttaaaccttggtagatctgggtttataatcggccatt

SEQ ID NO: 553138 - DNA, 120 bp, Artificial Sequence
  ENSG00000168672_15 (sequence is synthesized)
cttaagcacgtggggttgggggaaagttcggagtacccattcctgccgttgcttcctatcctgggcttggaagaatcctggtagaaaggccagagtgggtttgtggagtcgccactgcgg

SEQ ID NO: 553139 - DNA, 120 bp, Artificial Sequence
  ENSG00000168672_16 (sequence is synthesized)
gaccagcacgaaagctgcttgtctgctttggcggagctgagctgtgtatgggatccaggaggctggggtgatttattttatgggattcctggagcgcagggctggtgaatccatgacaag

SEQ ID NO: 553140 - DNA, 120 bp, Artificial Sequence
  ENSG00000168672_17 (sequence is synthesized)
gtccgggagcagcagaccaaaaccacagcagcctcctattaagtgtaacaaatagttaagcaaactcgggctacaaacaaagactttgctacctccctcctccacaacccccaagtaatt

SEQ ID NO: 553141 - DNA, 120 bp, Artificial Sequence
  ENSG00000168672_18 (sequence is synthesized)
agccttctggagctggctcttagctgaggctcctgctacctcctgctccacccgccccttcctaggttacaagtaaatcattgtcaagggccagccaggggaaggtttcaattaaggttc

SEQ ID NO: 553142 - DNA, 120 bp, Artificial Sequence
  ENSG00000168672_19 (sequence is synthesized)
tgttctgctgcctttgtttctcccctgctgttgtaggcacttacagctgcgttgttatgaaaggagggaatagccctttgtgtctttgatctaattaaacctgcttggctgtgtttatcc

SEQ ID NO: 553143 - DNA, 120 bp, Artificial Sequence
  ENSG00000168672_20 (sequence is synthesized)
gcagggcaggtcacagatagggttggctgtgccactccataaagtatctattgtggaagcagccaaaaagggctgctgtggcaggaattggttaatttctccttccacttcccttcctga

SEQ ID NO: 553144 - DNA, 120 bp, Artificial Sequence
  ENSG00000168672_21 (sequence is synthesized)
atagtgaagggagcccttttaaaacaaggctttggtggtaatcctgtgatttttttttctcccccatcccctcactggcccatccctctcaccctcacttttgttctgctggtgggtaaa

SEQ ID NO: 553145 - DNA, 120 bp, Artificial Sequence
  ENSG00000168672_22 (sequence is synthesized)
actgaagcagtctccttgttgcttggagaacacctccttcagagccctttgttaaataagaggggcgacgttgatcatagatgccacctggttagcaccgaatctgactttggtgacagt

SEQ ID NO: 553146 - DNA, 120 bp, Artificial Sequence
  ENSG00000168672_23 (sequence is synthesized)
cctaaagcacagttggtgattgtgagatctgttagcggcaggctgagcagatactacttggttttgcttggtatgagatactactgtttgcttagtatgagattttttccagcctgtctc

SEQ ID NO: 553147 - DNA, 120 bp, Artificial Sequence
  ENSG00000168672_24 (sequence is synthesized)
ttaaactcctgtgacatcttcaatgatatgtgccctcagttgcagcatagcttctctgctgcctattgccattgctgtctcaaaagttgagtgaattttgaggcgtcttttttttttttt

SEQ ID NO: 553148 - DNA, 120 bp, Artificial Sequence
  ENSG00000168672_25 (sequence is synthesized)
cctctcttgggagtcgttgtaaactactgtgtacaagtcattttgtgatatgattctgaacagttggaatagaatcatagttaagtggtacagccatggctatcgtcaggcctgttgcct

SEQ ID NO: 553149 - DNA, 120 bp, Artificial Sequence
  ENSG00000168672_26 (sequence is synthesized)
ggagatctctaagttaaggcaacaagacttaaagaattttctaatacacttgtttcacacatggacgttgaggccatagtctttaaaagcttggacctttgtagcacctcaacatgaaag

SEQ ID NO: 553150 - DNA, 120 bp, Artificial Sequence
  ENSG00000168672_27 (sequence is synthesized)
ggcattagctatgtttcctgtttttacagtgatcaccaaacagatcttgccactttgattgttaaaaatgaaccacattctagccctggtctgggactttggagggagatgaatttcttg

SEQ ID NO: 553151 - DNA, 120 bp, Artificial Sequence
  ENSG00000168672_28 (sequence is synthesized)
ttggaaatgtaaatctagtgtccatatttaatactctcacagctttgtgtttattctctttgctcatggaatagcagaacaagataaacatgggttaagacatttaggagaacctgctgt

SEQ ID NO: 553152 - DNA, 120 bp, Artificial Sequence
  ENSG00000168672_29 (sequence is synthesized)
aagataaacatgggttaagacatttaggagaacctgctgtatctaacccagttggattttctttcatgcttaacacagtagtgaaaatagaaggtaggccgggcacagtggctcatgcct

SEQ ID NO: 553153 - DNA, 77 bp, Artificial Sequence
  ENSG00000168672_30 (sequence is synthesized)
aaaccctgtctctaccacgcctgctacttgggagcctgaggcagaagaattgcttgaagctgggaagcagaggttgc

SEQ ID NO: 553154 - DNA, 71 bp, Artificial Sequence
  ENSG00000168672_31 (sequence is synthesized)
tagtaataaccaccgtgtagacaagtgggagggaagaatagaatggcactgtccagctctgggctagccag

SEQ ID NO: 553155 - DNA, 120 bp, Artificial Sequence
  ENSG00000168672_32 (sequence is synthesized)
ggaagaatagaatggcactgtccagctctgggctagccagatcaactcccccacccgtcttcttcctctgtcccagaatggaaaatgatgtatggtcagtcacgctgaagtatagcagcg

SEQ ID NO: 553156 - DNA, 120 bp, Artificial Sequence
  ENSG00000168672_33 (sequence is synthesized)
actgtgttaagagagagcagtgactctctcttctagagaagaggttttcaataacagggcttggaaatgaactagaataggaaatagatcttttcagatgctgctttcccatgtaataca

SEQ ID NO: 553157 - DNA, 120 bp, Artificial Sequence
  ENSG00000168672_34 (sequence is synthesized)
agcgtttctacagggtaccagaggtgtgaaatatgtgacacttaagaacagtgatttttattgggaattttcttagggttattacacttaaagcaacaaccaactagtaacagctccagg

SEQ ID NO: 553158 - DNA, 120 bp, Artificial Sequence
  ENSG00000168672_35 (sequence is synthesized)
aaaggggaatgaatcaactcttggttctttcctgaagacggcagtgttgtggataagtgagtttttaatgccctggcagtggctacatttgacactttagaaaaaataaacatatttaat

SEQ ID NO: 553159 - DNA, 120 bp, Artificial Sequence
  ENSG00000168672_36 (sequence is synthesized)
aatttttgtttctccttaggaataagactgtagaactgttttgtactgtgaattacggatgctctttgaaggaaagaaatatcgattctaatgttcttcagaagttctggcagggataag

SEQ ID NO: 553160 - DNA, 120 bp, Artificial Sequence
  ENSG00000168672_37 (sequence is synthesized)
caggacatcgactggaacgtatgctaaatgaaagcagacaaatttctattttcttacctgagcaaatattttattgaaactgcttatgtatgtcaaaggagcccacaacttcagctacac

SEQ ID NO: 553161 - DNA, 120 bp, Artificial Sequence
  ENSG00000168672_38 (sequence is synthesized)
aactttttgtattgaaagaactcatactttttgtagcttttatttcacatttaatttaaagtgacttttagcactaaaatgcctagaagattttactccagacctataaggaaatgttta

SEQ ID NO: 553162 - DNA, 120 bp, Artificial Sequence
  ENSG00000168672_39 (sequence is synthesized)
gtttttatgaaaaatgacaagtcgatggttaaacttctcatgtctttggtgctttggccctaatagcactggacaacaccacgaccacatggaaacatatttttggaagcaaaactttaa

SEQ ID NO: 553163 - DNA, 120 bp, Artificial Sequence
  ENSG00000168672_40 (sequence is synthesized)
ttttatataacgtatgctatggagagctaagacaatttaaggactacttgttttctattttttttcttaataaaatggaatccactgtgttgaagactcttgatatcatgtgcttgtcta

SEQ ID NO: 553164 - DNA, 120 bp, Artificial Sequence
  ENSG00000168672_41 (sequence is synthesized)
accattttttgttttataaattagaataaaatatagttgtgataatggtcatcgaatggatttgtttggaaagctacatcttatttgtgaaatgttttttaaatcagagtaactatcaac

SEQ ID NO: 553165 - DNA, 120 bp, Artificial Sequence
  ENSG00000168672_42 (sequence is synthesized)
tgattcagctttttgttgttttgttcttggctataatacttgtgactcatgaagaattatgttgacaaacaggataaattccacatgcattttatttcccagtgagttgtataaacttta

SEQ ID NO: 553166 - DNA, 120 bp, Artificial Sequence
  ENSG00000168672_43 (sequence is synthesized)
tttttgttgaaggttgtatgttaaatcaatgttacattcttatatcacttcttgagaaggaagttccgatttgaaattgtatcatttccttcaaaatgaagggcagtgcttagttaaata

SEQ ID NO: 553167 - DNA, 120 bp, Artificial Sequence
  ENSG00000168672_44 (sequence is synthesized)
aaagattgatgatatcttttaagccatttcctcttcactatgtcttattaaaataaaacctgtcaagttcttttcaaaagatgctatgagcgtttccaataaaccatctattagagttca

SEQ ID NO: 553168 - DNA, 120 bp, Artificial Sequence
  ENSG00000168672_45 (sequence is synthesized)
gaagctgctgatgcaatgggcttttgccagggccaggcgaagggctggggacagggagaacaggagttgcccagtctcctgtgaccgtgaccttacaggtggagaaacgagggaaagctc

SEQ ID NO: 553169 - DNA, 120 bp, Artificial Sequence
  ENSG00000168672_46 (sequence is synthesized)
gctacacccgagacttccccctaaaatggctccaggtgctgagcccccaccgattctttttcggaacaaaacgcccttttcacggaggggctcctgcatggctttcttgccttcctctcc

SEQ ID NO: 553170 - DNA, 120 bp, Artificial Sequence
  ENSG00000168675_0 (sequence is synthesized)
agcggttcaagctctacgttcgtgacatcaaacctcctgttgggccatttccgagaactcccatcagtttctgtatagtgtaaaagtttcagaggcggagcacagagagctgcggctggg

SEQ ID NO: 553171 - DNA, 120 bp, Artificial Sequence
  ENSG00000168675_1 (sequence is synthesized)
acaaggagcacccgcgtgcaggtgcgaccctgcaggatgctggcagcggcgtggccaggggcgcccgtgttctgagggcctgagggccagcccctccacccgcgccatggcctccgcgcc

SEQ ID NO: 553172 - DNA, 120 bp, Artificial Sequence
  ENSG00000168675_2 (sequence is synthesized)
ctgacgggagcagggaccgccgccgcccaggtgccacacccaggtaccgcccgcccgcgcgagagccgggcaggtgggccgcggatgctcccagaggccggcccagcagagcgatggact

SEQ ID NO: 553173 - DNA, 120 bp, Artificial Sequence
  ENSG00000168675_3 (sequence is synthesized)
gagcgatggacttggacaggctaagatggaagtgacctgagcctcgcccggcggcttcctcgacgggacagcgcaagagttggagcacaggcttgtccggggagcagtatgccggaagct

SEQ ID NO: 553174 - DNA, 120 bp, Artificial Sequence
  ENSG00000168675_4 (sequence is synthesized)
ggttttcaggccacaaatgctttcacagagtgcaaattcacctgcaccagtggtaaatgcttgtatcttggttcgctggtctgtaaccaacagaacgactgtggggacaacagtgacgaa

SEQ ID NO: 553175 - DNA, 120 bp, Artificial Sequence
  ENSG00000168675_5 (sequence is synthesized)
gagaactgtctcctggtgaccgagcacccgcctccgggcatcttcaactcggagctggagttcgcccaaatcatcatcatcgtcgtggtggtcacggtgatggtggtggtcatcgtctgc

SEQ ID NO: 553176 - DNA, 120 bp, Artificial Sequence
  ENSG00000168675_6 (sequence is synthesized)
ctgctgaaccactacaaagtctccacgcggtccttcatcaaccgcccgaaccagagccggaggcgggaggacgggctgccgcaggaagggtgcctgtggccttcagacagcgccgcaccg

SEQ ID NO: 553177 - DNA, 120 bp, Artificial Sequence
  ENSG00000168675_7 (sequence is synthesized)
cggctgggcgcctcggagatcatgcatgccccgcggtccagggacaggttcacagcgccgtccttcatccagagggatcgcttcagccgcttccagcccacctacccctatgtgcagcac

SEQ ID NO: 553178 - DNA, 120 bp, Artificial Sequence
  ENSG00000168675_8 (sequence is synthesized)
gagattgatcttcctcccaccatctccctgtccgacggtgaagagccacctccttaccaggggccctgcaccctgcagctccgggaccctgaacagcagatggaactcaaccgagagtcc

SEQ ID NO: 553179 - DNA, 120 bp, Artificial Sequence
  ENSG00000168675_9 (sequence is synthesized)
gtgagggccccacccaaccgaaccatatttgacagtgatttaatagacattgctatgtatagcgggggtccatgcccacccagcagcaactcgggcatcagtgcaagcacctgcagcagt

SEQ ID NO: 553180 - DNA, 120 bp, Artificial Sequence
  ENSG00000168675_10 (sequence is synthesized)
aacgggaggatggaggggccaccccccacatacagcgaggtgatgggccaccacccaggcgcctctttcctccatcaccagcgcagcaacgcacacaggggcagcagactgcagtttcag

SEQ ID NO: 553181 - DNA, 120 bp, Artificial Sequence
  ENSG00000168675_11 (sequence is synthesized)
cagaacaatgcagagagcacaatagtacccatcaaaggcaaagataggaagcctgggaacctggtctgattccttccaacgtgcacttcagctggagaaagaaaccaagaagggaagcgg

SEQ ID NO: 553182 - DNA, 120 bp, Artificial Sequence
  ENSG00000168675_12 (sequence is synthesized)
ccgctgggcccctcctgcgcacagtgttgttcagtttcacatggtacaaataagtaaaaccaaatgagcaaacacggtctttgtttctgattccttttaggggaattgcatgcaaactag

SEQ ID NO: 553183 - DNA, 120 bp, Artificial Sequence
  ENSG00000168675_13 (sequence is synthesized)
actgaaatgatacaaacttccatctggtctgaccgcaaacagtgtttatttggggacaggggttgggatgggggtgtgggcaggggaaaacagagaacgggatgctttgaagataccatg

SEQ ID NO: 553184 - DNA, 120 bp, Artificial Sequence
  ENSG00000168675_14 (sequence is synthesized)
aaataaaacccacagaggtatttgatgtatttaattgtgaaaggagactttgcagataaatgaggccagaatggcatgttttataattaactgaataaagaaggaagcattattatatat

SEQ ID NO: 553185 - DNA, 120 bp, Artificial Sequence
  ENSG00000168675_15 (sequence is synthesized)
tattgtggggaagaaccagccagttcgctttttctcctaaggtgtggaacttttattttgttttaaaaatatgaatcaaaattcctgtgttgtgtgccaaggtataaagtggagaagtta

SEQ ID NO: 553186 - DNA, 120 bp, Artificial Sequence
  ENSG00000168675_16 (sequence is synthesized)
gatgagtgcaaggagctcctttgtgttgtgatgatgtgttttaaaagttgcactatcttaatgttgaaaatatttacaagggaactgttttacgtgaagttctgtatgttgtcttttcac

SEQ ID NO: 553187 - DNA, 120 bp, Artificial Sequence
  ENSG00000168675_17 (sequence is synthesized)
ctgtggattgtaatcaggcccaaggaatatcctggagtggtccccagaagcatccaagaaaagatatttggggacgtagcctaacattttaccaacttacgtaaatcaaaaaagtcatta

SEQ ID NO: 553188 - DNA, 120 bp, Artificial Sequence
  ENSG00000168675_18 (sequence is synthesized)
ttgttgcaggagtttgcatcaaatagcagtgcatcgctgaagcttttggagacttttggatggaagataagatagggaagattaagttccagcatttctgacttgttattttgagttact

SEQ ID NO: 553189 - DNA, 120 bp, Artificial Sequence
  ENSG00000168675_19 (sequence is synthesized)
ctgctactcttaggctgcatagtttatgagaaaatgaacacatgcatttatggatccagtatcatgcagtgctgccctcatcctccagcagtgcaatttcttcagtaatttagatttttt

SEQ ID NO: 553190 - DNA, 120 bp, Artificial Sequence
  ENSG00000168675_20 (sequence is synthesized)
tcactatagcatgaaatatattcaaatacataccttattttatgcaataaattgtttaaaatgcaaggtggttattctgcatactgttgaaatatgtgactcctcagtatattcccattg

SEQ ID NO: 553191 - DNA, 120 bp, Artificial Sequence
  ENSG00000168675_21 (sequence is synthesized)
cctctccccctttcctcgacagcttagttcagttctgcagggctgctcagttcacaggaggctcccagcagccaccccacatccagcctacacagaacttcgtgtgggagtggtgtgggt

SEQ ID NO: 553192 - DNA, 120 bp, Artificial Sequence
  ENSG00000168675_22 (sequence is synthesized)
ggtggtttcttatgctttggaagcccctagaaataatgacggaagaatgccatgttgctgatcgtggtaataagccattgtgggttattgtatgtcactagtattagcatagcattctta

SEQ ID NO: 553193 - DNA, 120 bp, Artificial Sequence
  ENSG00000168675_23 (sequence is synthesized)
aaggaatgcagtgctcaaaacctacccaaattcccgcaggattctaccaaacccttccccaggccagcttttgtactgaaggcaagaactggacagtcagagaacagtggagggggcaag

SEQ ID NO: 553194 - DNA, 120 bp, Artificial Sequence
  ENSG00000168675_24 (sequence is synthesized)
tgactgaagagcaccgggtaaaaagcacaacatgcagttaaaatgcaactagaaaactaattttaaatattgttagttttaatattcctgatatttacaaatattcattcttatatacaa

SEQ ID NO: 553195 - DNA, 120 bp, Artificial Sequence
  ENSG00000168675_25 (sequence is synthesized)
tgaaaaaaataactttcttctgcagatgtaagcactggcttttataagagcagcagccaacacgtttagcagacactgcgcgtggagaagggcttatctgcagtacactctgccatgtgg

SEQ ID NO: 553196 - DNA, 120 bp, Artificial Sequence
  ENSG00000168675_26 (sequence is synthesized)
agggtgggcctctgtggcctcttcacataacaagatgagctggaatgatgattccatgactcccacctatgcagccttaaagccaaatccgcgtgtgtgtgtttgtgtctgtctgtgggt

SEQ ID NO: 553197 - DNA, 120 bp, Artificial Sequence
  ENSG00000168675_27 (sequence is synthesized)
ctcgaaggtgatccgtcggtgcggtggctctgtgctgtaactggagagactgttccaaaccccaagagttgtctgatcctagtctgttcccttctgcttcttacctctgtagataggtca

SEQ ID NO: 553198 - DNA, 120 bp, Artificial Sequence
  ENSG00000168675_28 (sequence is synthesized)
ctggtttttgtttgtttgttttgaggattggaatttccattacattcatcctttgcacacagtaacatccacagaactagtccaactcttaaaaggagagaggaaaaacacaggcaccag

SEQ ID NO: 553199 - DNA, 120 bp, Artificial Sequence
  ENSG00000168675_29 (sequence is synthesized)
ttgtcagctcatgcttacaacctgtgtggaagtatatacagttgagagtcacagtggaggttctgagactggattcagtcttgttccagtgacagttggaaggcctctgctggagagaca

SEQ ID NO: 553200 - DNA, 120 bp, Artificial Sequence
  ENSG00000168675_30 (sequence is synthesized)
ccagctctcagggcagagattggcttggggccagaaggaccctccccaaccctggagacaccctgaaggttcactggctctccagattagcctctcttcctctgtcaggcaaagatgagg

SEQ ID NO: 553201 - DNA, 120 bp, Artificial Sequence
  ENSG00000168675_31 (sequence is synthesized)
agcccgtgttcccatcgggccctgctggcagggacttgcagtggattcttggtcaggtgtgcccacagatgcggaggcgaggtgagtgattccatcatttcagttctcacctgcagtttt

SEQ ID NO: 553202 - DNA, 120 bp, Artificial Sequence
  ENSG00000168675_32 (sequence is synthesized)
ggtgaagcaggagatgcaccccacagctctagctctcaaatggcttcacagtccttacttctctacctgcctcaagaaggggctcagagcagagacttgtgaattccttagtaactgtga

SEQ ID NO: 553203 - DNA, 120 bp, Artificial Sequence
  ENSG00000168675_33 (sequence is synthesized)
gtatatgaatgtgttgcacatgtccacagtattggcgagataattacataattcagatacctttaatcatctttcaagaaagaggctcctcccattcaaccaccctagagaactgccttt

SEQ ID NO: 553204 - DNA, 120 bp, Artificial Sequence
  ENSG00000168675_34 (sequence is synthesized)
gttaaatagttatttaaagactcatacatatcaaaccatgactttgaaaggtcttcgaggctggggctctgtaatgaattagtttaaaagccaaggtcataacatgaattgatggtcaat

SEQ ID NO: 553205 - DNA, 120 bp, Artificial Sequence
  ENSG00000168675_35 (sequence is synthesized)
gctagtgtggcgttgaaagagtagcgactgggaagatacaacttacacagtggggcctattgttctttcaagaaccctttttttagcttatagaacccatgggtccagtttagtaacgag

SEQ ID NO: 553206 - DNA, 120 bp, Artificial Sequence
  ENSG00000168675_36 (sequence is synthesized)
tgatttaggcaatcaatgataggtttataatcttagattattccagcaaagtgtggattgcattgttaggaagaacatttggtgggaatgaacactcctgggcataccgctgacttttgt

SEQ ID NO: 553207 - DNA, 120 bp, Artificial Sequence
  ENSG00000168675_37 (sequence is synthesized)
cccttgttcccggtgtaggagacccaaggcatcttgaatcccatctataagaacacaatcttccagcatacgtttgctttttcagaaactctagcattctctttaaatactgacgcaatc

SEQ ID NO: 553208 - DNA, 120 bp, Artificial Sequence
  ENSG00000168675_38 (sequence is synthesized)
cttaatggaaaagagatttcatgaagcaaattatgtatttcaatagttcttctatttttagtgtccaaaatttactaatacagaagcttgacaagcatgtcctcaccctccccaccacat

SEQ ID NO: 553209 - DNA, 120 bp, Artificial Sequence
  ENSG00000168675_39 (sequence is synthesized)
aaacacatggacacacacccaagccacaagaaatcccaagagagcagaagcgaatttttaaaagatttatcgtgaggactgcatttccattcactaattttggctcaaacttatgaggca

SEQ ID NO: 553210 - DNA, 120 bp, Artificial Sequence
  ENSG00000168675_40 (sequence is synthesized)
ggaaataggggccaacagtaaatgggggaggcctcctgacaccagcagaggaattttgtacccaggcgaggacttcttgaacttctgcgtatctccgtttgatctctttcacctttattt

SEQ ID NO: 553211 - DNA, 120 bp, Artificial Sequence
  ENSG00000168675_41 (sequence is synthesized)
catcttcataagaatgagaaaggctcaaaaggaagcacttttagaaatcttctctgacctagaagaatccatccaaatccctgccttcctctctgaaccaacagttcccttctctgacag

SEQ ID NO: 553212 - DNA, 120 bp, Artificial Sequence
  ENSG00000168675_42 (sequence is synthesized)
gggccatcctctatcttccatccagcggctcttctttttaggaaggctctggtgcagagcacttcaaatatgtcctcaggccagatactgattgctagtagagagacacccggcacccag

SEQ ID NO: 553213 - DNA, 120 bp, Artificial Sequence
  ENSG00000168675_43 (sequence is synthesized)
tccgaagccctccctcaaaggaccggctcatggcgttggtcactggcaggctcagagacattctgctgtgggcgcagggagcccggccccccatgcagccatgactggatgcgcccccat

SEQ ID NO: 553214 - DNA, 120 bp, Artificial Sequence
  ENSG00000168675_44 (sequence is synthesized)
ctcgggggcttgctgcactgcttgtttattgaattttgctacttagaatggcaacattaactttgtgtaccattcattttttaaaaattttccaaagctcggcagtgtatgaaagaaaaa

SEQ ID NO: 553215 - DNA, 120 bp, Artificial Sequence
  ENSG00000168675_45 (sequence is synthesized)
actgggaaagatacttggtttctgttaacttttgtgttgcttgcttaagtgattaaagccagtgcttggagccaagccttcatgccacgaacatgctccacagcctgccctttgctctcc

SEQ ID NO: 553216 - DNA, 120 bp, Artificial Sequence
  ENSG00000168675_46 (sequence is synthesized)
tgctcacactgaccaagaatgccgcgtgcttggcctactgaggtgaaaggacaattgaatgacaggtgggcaaagggagaacttccccttcttggtgcgaggaaagtcacaaatttaaaa

SEQ ID NO: 553217 - DNA, 120 bp, Artificial Sequence
  ENSG00000168675_47 (sequence is synthesized)
atgttgcttccagcccagatcctaaatgctagttctcagcagctgcgtggcttaccgttcgccatttccaccaccgccagctgccagcaccgctacagatcacagagatgtgaacagaca

SEQ ID NO: 553218 - DNA, 120 bp, Artificial Sequence
  ENSG00000168675_48 (sequence is synthesized)
atggaaagcactcttagccttgcagtggtctacattttttaggaaccaatatttcagcattctttattacccggcacgctgtgtcctttgcagagttcaagtttatgttactgccagggt

SEQ ID NO: 553219 - DNA, 120 bp, Artificial Sequence
  ENSG00000168675_49 (sequence is synthesized)
cagacagtcatttgctgctgctgctgctgctgctgcttctcgaactggatgcattaggaagctgctgtctgagtgtaggaatgtcttgctaagaaagcaatgtcttccttcatccttttc

SEQ ID NO: 553220 - DNA, 120 bp, Artificial Sequence
  ENSG00000168675_50 (sequence is synthesized)
tttcttccctctgcgtgtccttgtttttgtgtaatgcgggagagggttagagctatagagattatatatacactatccgtgcacattatatatatgtagatatacccctatcatgtcaga

SEQ ID NO: 553221 - DNA, 120 bp, Artificial Sequence
  ENSG00000168675_51 (sequence is synthesized)
gatctgcatgtcagtttttcagcaactaaggtgcctcatgttctgagttcagcagatataggaaccaagccgccccctcctgcacttgatgctcccacctttgttgtgcctcacttaaaa

SEQ ID NO: 553222 - DNA, 120 bp, Artificial Sequence
  ENSG00000168675_52 (sequence is synthesized)
tggtgcttttttcagttgtctgtcttttcttatgtttttatttgtaaggtgctgtatataagttgaatatattatgcacatatcctacccaatgggtagaacaaaaagttgttaatactg

SEQ ID NO: 553223 - DNA, 120 bp, Artificial Sequence
  ENSG00000168675_53 (sequence is synthesized)
taatataatgtatagatgataccaattttaacagaaatggcatagaatttgtgaatgcctatgtgctttgtcctcttttgtaaggaaatttgcaaatggatgcatacagattaaagtcta

SEQ ID NO: 553224 - DNA, 120 bp, Artificial Sequence
  ENSG00000168675_54 (sequence is synthesized)
tgtagtttattttcctattaaatatcaatattataacacaagagaaagaagtgtgaacaaacaagcaacagtttatgaccagcgtatatatagcaatggaaagttgcatctttgctgtga

SEQ ID NO: 553225 - DNA, 120 bp, Artificial Sequence
  ENSG00000168675_55 (sequence is synthesized)
aaacactttaaagaaaatactttttaaaaaatcccacagctttttggttgccactagacgcttcttattttaatcattttagtaatgctcagctggaccagtgttagttatatttgagtc

SEQ ID NO: 553226 - DNA, 120 bp, Artificial Sequence
  ENSG00000168675_56 (sequence is synthesized)
agaaaaatgttgtttttcaacttgctttataatctcctgcatctatctcctgctgtagcatcacgaaggtgtcaggcaacagtgaaaagtgcacatttttgttgttgcagaaactgtgtc

SEQ ID NO: 553227 - DNA, 120 bp, Artificial Sequence
  ENSG00000168675_57 (sequence is synthesized)
agaggaataagtaaatcagcctgcagcagaagactttgttcagctccagaggcatctgtgaccgtctgtgtccaagtctctctgtgcctttttcttttacaaactgaagctgtggagcca

SEQ ID NO: 553228 - DNA, 120 bp, Artificial Sequence
  ENSG00000168675_58 (sequence is synthesized)
atgaagtaacagtagagattgtagggaaagaatacctcaggaaaaacaaatacacttacaagaagaccctgttcttagaaaatgtgtttagttatgggttagcactagaagagacttggc

SEQ ID NO: 553229 - DNA, 120 bp, Artificial Sequence
  ENSG00000168675_59 (sequence is synthesized)
tgtcagccagccaagtgaaggacctctcatccattcccattcatgtcccatcataatacggacccaaaaagcaaactcggttttgccatcagttagaaattacgttttggattgtatatt

SEQ ID NO: 553230 - DNA, 120 bp, Artificial Sequence
  ENSG00000168675_60 (sequence is synthesized)
gttacatctctcttccggcttagtttttagtgtctgattgtgacctctgcatttatcttcaaataccctaattttaaaacaaaagaacaagaaaagtttataacaccatgttcactaaaa

SEQ ID NO: 553231 - DNA, 120 bp, Artificial Sequence
  ENSG00000168675_61 (sequence is synthesized)
ccacggttgaatcttgggtgtgggcatcctttcgagtgttgtccataagagcagttcgtggaattttgcccatctgacccatattatcagcttattctgccaccagagtagagtctaata

SEQ ID NO: 553232 - DNA, 120 bp, Artificial Sequence
  ENSG00000168675_62 (sequence is synthesized)
aattccaaagtttttatttgctccatggtgtatgttctgactttgaaaatgtcagattctataatcatacccctaacatccaggaaacaaatgacagattatctttaaactgaaattgac

SEQ ID NO: 553233 - DNA, 120 bp, Artificial Sequence
  ENSG00000168675_63 (sequence is synthesized)
tctacaatgcaacccttaatgctgaatggattaaaaaagtcagcccttttagtatctgtttgaaagggccgtaaaaagttgacacttttgttgttgtggatcctgcgtgtctagacccac

SEQ ID NO: 553234 - DNA, 120 bp, Artificial Sequence
  ENSG00000168675_64 (sequence is synthesized)
gtgttgtttccatcgtatactgtagggtgcaccccttgggattcatcattaagaactgaggctcactgttgtcagaaacaaagctcccaccccccaggttcaaccttgtgggagaactgt

SEQ ID NO: 553235 - DNA, 120 bp, Artificial Sequence
  ENSG00000168675_65 (sequence is synthesized)
tgagcatgagaatgttctagactcagaggtactaaaatttgttaccacatcattgcttcctttctacaggacgaattgaggcttaaactttactgttaatgatactggttcattttaatg

SEQ ID NO: 553236 - DNA, 120 bp, Artificial Sequence
  ENSG00000168675_66 (sequence is synthesized)
tgcttgttggtatgttgctatttttcatttcatagctttcaaaaatcatgctaattgtatacttgtctagtttaaggctattttaaaatatgtacaatactattcacagcatttagttcg

SEQ ID NO: 553237 - DNA, 120 bp, Artificial Sequence
  ENSG00000168675_67 (sequence is synthesized)
tttaatttttattataaagcaatctactaaaaaagtacaactgtatttgaacttttcaatagttgtttgtgagctatgataatcaaaagtcattaaagtcttttttaacaaacattcgtg

SEQ ID NO: 553238 - DNA, 120 bp, Artificial Sequence
  ENSG00000168675_68 (sequence is synthesized)
cttacttttcaacataattcccagttatatacagaaaaagatttccacctgtcacgtatctgcctcttttacctgagcaatggtgtagttcttagacctaaggtctgtaattgcaatact

SEQ ID NO: 553239 - DNA, 120 bp, Artificial Sequence
  ENSG00000168675_69 (sequence is synthesized)
tttaaagaaagatgttgctctaagtgctgtttgttagttatgaaatcagatttttctgcttgttcttaatgctgtggtcaaaccatagcacaaaatcattaaaaataatcagcggcatac

SEQ ID NO: 553240 - DNA, 120 bp, Artificial Sequence
  ENSG00000168675_70 (sequence is synthesized)
tgatattttcctttccagctgttgcctagtttcctggtattaaggagaatcaactctctggataaacgtggtaaatatggcccatagtcccatctttttacaggcattttttacacctgg

SEQ ID NO: 553241 - DNA, 120 bp, Artificial Sequence
  ENSG00000168675_71 (sequence is synthesized)
catccagcacttcctttagttttgccctggtgctgttgacttttgtttactgaagagtgtgctggaggcaggacaagggacatggaaggctgcaatttaagagtctaaaaggttttagaa

SEQ ID NO: 553242 - DNA, 120 bp, Artificial Sequence
  ENSG00000168675_72 (sequence is synthesized)
tcctgaaggaggtttaacaagctgaattgaagaataatacctttctcaactggagagaatttacatgattgcattattgttaaaattaacatctcatctattaaaagcatttgtagatta

SEQ ID NO: 553243 - DNA, 120 bp, Artificial Sequence
  ENSG00000168675_73 (sequence is synthesized)
gattgccggaagctgaagggatgctttgaacgtgggggggctgcgtcacagttggactcccacttgcagaggacctgattatgtccagtgaccacctgaacaacagcacactgaaggagg

SEQ ID NO: 553244 - DNA, 120 bp, Artificial Sequence
  ENSG00000168675_74 (sequence is synthesized)
ctcagttcaaagacctgttcttaaaaaaagtgactcatctgttacagcatcatgaactacagcgccgtagaagggggatgtgaacgtttgactttggcctcaacttctttccttgcgtgc

SEQ ID NO: 553245 - DNA, 120 bp, Artificial Sequence
  ENSG00000168675_75 (sequence is synthesized)
ttcagaatccgtgttaggcgtgtagcatcttggaagccccaaagcatcctattaattttctaagaatgctactattcctgcgggttttatttttctaaactttctgttttaacagttctt

SEQ ID NO: 553246 - DNA, 120 bp, Artificial Sequence
  ENSG00000168675_76 (sequence is synthesized)
ccagaattcattttcttcttagcctcccctttccagcccactcctccccaacccctaaaaacgaaacccaaaccccaggtgtctttcctttctgtggatgctgggctccacgcaccacag

SEQ ID NO: 553247 - DNA, 120 bp, Artificial Sequence
  ENSG00000168675_77 (sequence is synthesized)
ctcagctccctgtggtgggggatggcagaggcttcccgctccccgcagctggtttgcacagcctcccgactgtgccgtggtgtctccttccctaaagtgggacagtcgtttctgtgtcct

SEQ ID NO: 553248 - DNA, 120 bp, Artificial Sequence
  ENSG00000168675_78 (sequence is synthesized)
gctggcctctgaggaacagacgtgtgtgagaggccttcagggcctgatggctggggtggtgacagtgcctggagaatgggtggggactggaggggccaggtggctaaccactctcctctt

SEQ ID NO: 553249 - DNA, 120 bp, Artificial Sequence
  ENSG00000168675_79 (sequence is synthesized)
gccgggcctcgggggcgcagccggactggacggcggctcctgtgggcacttggccgggtttgctggtttttcgggaaataaggccactggggacagtcactacgttttcaggaaccgctc

SEQ ID NO: 553250 - DNA, 120 bp, Artificial Sequence
  ENSG00000168675_80 (sequence is synthesized)
agcccctctgagtgccccgcagatggacctggcggcgttcctggctacggctgactgggctcccggagcgaggagcgcccctgcgggcccagcctgggccctgggcggtgggagggcctc

SEQ ID NO: 553251 - DNA, 120 bp, Artificial Sequence
  ENSG00000168675_81 (sequence is synthesized)
cgcccccttcccgcttccgccccgctggcgccggacccccgccctcgtctgtgcctgccaggccgggcccttccctcccgtcacaggcggtccctgagcccacccttcgtctccgagcag

SEQ ID NO: 553252 - DNA, 120 bp, Artificial Sequence
  ENSG00000168675_82 (sequence is synthesized)
ctggaccgccgtatacgtttgccactgattccaggatgtccccgagtatcttaggaaagggccgtgttggacaaacgcggggctcggtgtttcttccgcgccgtccctcgctgctggcgc

SEQ ID NO: 553253 - DNA, 120 bp, Artificial Sequence
  ENSG00000168675_83 (sequence is synthesized)
cggggccgtcggaggctcagtgatggcccagcccgcccgtttccgagaattccccaaacgcgggcccctacacgctgagttcgcgctctcccgtgacggccgacagccccgcggaccctg

SEQ ID NO: 553254 - DNA, 120 bp, Artificial Sequence
  ENSG00000168675_84 (sequence is synthesized)
ctgacagccacactctgggctgaaaagggtaccacgcgtactttttttcccagcacgcgtggggccttggaaagaacctttactgaggcctgtggctggcctgtcaccttgtcaatctgg

SEQ ID NO: 553255 - DNA, 120 bp, Artificial Sequence
  ENSG00000168675_85 (sequence is synthesized)
actcgctggaggatcctgagcccaggctcggaaagggccgtccacctgcgagcgcggacttgcgcctctgctggaggccgggcagggcacgggcgggccccgggccacctctgccagggc

SEQ ID NO: 553256 - DNA, 120 bp, Artificial Sequence
  ENSG00000168675_86 (sequence is synthesized)
acacagcctgggggcatccgaatgcacgggagatgttttacactcagatgaaacaaactgtttagacctcggggaaaagagactgtgcttgaacaaaatgaaccaggagaaagcgccctc

SEQ ID NO: 553257 - DNA, 120 bp, Artificial Sequence
  ENSG00000168675_87 (sequence is synthesized)
ctgagacatgtctctgctttcatgtttgaattgcctgggattctgttctctaatttctgatccttataaactaaaactgcctaggaacattgagcatcctgactttgaaggagtctctgt

SEQ ID NO: 553258 - DNA, 120 bp, Artificial Sequence
  ENSG00000168675_88 (sequence is synthesized)
ggtgtttttgtgctaccatacatggggaataatgatgtgaggcagagggagagggaatgaatgggagagccaagagggaagagcgagccggggggaaaggagcgcgcagtgtttcctgct

SEQ ID NO: 553259 - DNA, 120 bp, Artificial Sequence
  ENSG00000168675_89 (sequence is synthesized)
gcggttaggacctcacgccttgccagtacagagctcggtggcaagagccgctgggagctgctcccatcagttagaggatgtggagagggagcaccagaagaggacagcccgcagcctggc

SEQ ID NO: 553260 - DNA, 120 bp, Artificial Sequence
  ENSG00000168675_90 (sequence is synthesized)
tcgcagcctgagggacgctgtgggtgctcccagccgggcgagcacgctctgggagcggatctgcaggggagaagcacgcgagcctaacgtgagcgtcccgcctgtcgcgtgtcctgcctt

SEQ ID NO: 553261 - DNA, 120 bp, Artificial Sequence
  ENSG00000168675_91 (sequence is synthesized)
ggtaagcgccctctccggtccttccacactgaaagcttccagcagagatcaagggaaggagtattgtgtgagacttgcagatttcctcctttctgtctggactggtttgatatttgcctg

SEQ ID NO: 553262 - DNA, 120 bp, Artificial Sequence
  ENSG00000168675_92 (sequence is synthesized)
ttgaaaagattactgaacgcagtgtgacaagatgagccgtctagctgcgttctgcttgcctgtgtgtgtgacacgtccaggtgtgaggccaaacctgagaagtgcagactgctcactgat

SEQ ID NO: 553263 - DNA, 120 bp, Artificial Sequence
  ENSG00000168675_93 (sequence is synthesized)
agacgttgctgtaaacagtagtgccctgggtgtacagctggtctcaggatcggagaccccggacttattctctgctcggtgacacggccggcttcctgccgcagagctcctggtttctgt

SEQ ID NO: 553264 - DNA, 120 bp, Artificial Sequence
  ENSG00000168675_94 (sequence is synthesized)
tgatggcagttgataattggtagccacagtctgcggtcggagccacagcatttgagtctagcacctggggtgggccctgctgatacagtagagagagagtgaacgaggcagacagaaaca

SEQ ID NO: 553265 - DNA, 120 bp, Artificial Sequence
  ENSG00000168675_95 (sequence is synthesized)
atttatttcctggttagtcctgcccatcttcccagtataaatagaacctccatgtgtgtgtgcgtgtgtgtgtgcgtgtgtgtgcgtgtgtgcatgtgtgtgcgtgtgtgtgtagaatga

SEQ ID NO: 553266 - DNA, 120 bp, Artificial Sequence
  ENSG00000168675_96 (sequence is synthesized)
ctgcccaccggaaacgatggcgcgaggccgcagagctaaatgggggcctctccagggagtgctctgttcacggctccatcgctgttaggtagctgggacgatgaaagcatcccaagacct

SEQ ID NO: 553267 - DNA, 120 bp, Artificial Sequence
  ENSG00000168675_97 (sequence is synthesized)
gggcttgtcaccgagtgcatccgtcatgctcgggccatgggccggcacctgtgtgtgtgtgtccagcttaacgacagagatttttggaaagacgccctaagatagacatacttgaaactg

SEQ ID NO: 553268 - DNA, 120 bp, Artificial Sequence
  ENSG00000168675_98 (sequence is synthesized)
agtgagaataagtttgacttatttctttttgagatactttatatgtttgaaataattaatagctggcgccagtgaatctagtttctgtctgtttcctttaaagattatatgtagtgttgg

SEQ ID NO: 553269 - DNA, 120 bp, Artificial Sequence
  ENSG00000168675_99 (sequence is synthesized)
aagaggggtgctgcccaccggaaacgatggcgcgaggccgcagagctaaatgggggcctctccagggagtgctctgttcacggctccatcgctgttaggaaggagcaaaagccccttgcc

SEQ ID NO: 553270 - DNA, 120 bp, Artificial Sequence
  ENSG00000168675_100 (sequence is synthesized)
atccctgtgtgacagcaatgaggtgaacccaggggccgaagcccacccagggagttgatgggtagctgggacgatgaaagcatcccaagacctcccttttccatctgtggctgatcacct

SEQ ID NO: 553271 - DNA, 120 bp, Artificial Sequence
  ENSG00000168675_101 (sequence is synthesized)
gtttcctaaggatttctttaacatggttcttctgattcagtccggccaattaaatctaaatccacccctgaaagccatctggtgtggataacaagcccacaaatgagcagtcagcttttt

SEQ ID NO: 553272 - DNA, 120 bp, Artificial Sequence
  ENSG00000168675_102 (sequence is synthesized)
gttcaaagacctgttcttaaaaaaaggtacatttcccaagaactgctatggatgatgcatgctctttcgggtttgctgtggttcttcttggagtttggtctgaggacagagctgagaaga

SEQ ID NO: 553273 - DNA, 120 bp, Artificial Sequence
  ENSG00000168675_103 (sequence is synthesized)
ggagaagctctttctcaagaagtttctttctacctaagaggggtctgtcaactcagaacatttccgggtgggactccctttaggaagatgcatgtcaggctttttcatcttctttcaagc

SEQ ID NO: 553274 - DNA, 120 bp, Artificial Sequence
  ENSG00000168675_104 (sequence is synthesized)
ctggaattagtttgttcctgttggaggtgttatgcatgagtacacagtttgttgctttggagttttgtttttttcaaatgtctgtatataaggctgagacctcccctggaaattctgcta

SEQ ID NO: 553275 - DNA, 120 bp, Artificial Sequence
  ENSG00000168675_105 (sequence is synthesized)
cttgttaataattcctttttcttcaccctcatgagctgaaaactgcattttaaagaaaaggtatttctcaggatgtggctggttcattgaacactttcttaggtcatccatgtagtgaca

SEQ ID NO: 553276 - DNA, 120 bp, Artificial Sequence
  ENSG00000168675_106 (sequence is synthesized)
ggagctattaggaaggagaactgtgactctgagagatagagagccaaagaaagtgagagacagacagactggctgtgggatgagagcctcagaagccaccactctcccctgtggaaatga

SEQ ID NO: 553277 - DNA, 120 bp, Artificial Sequence
  ENSG00000168675_107 (sequence is synthesized)
aggttccattccatgtgcagctgtgttttttttctgatgcactttcctaaattaataatgtggaggtggaggtgagggtggattttaaatgaatcctatagggggaattatggcttatgt

SEQ ID NO: 553278 - DNA, 120 bp, Artificial Sequence
  ENSG00000168675_108 (sequence is synthesized)
atgtatttttttccatttatagcatggcagagggatagacttttaaaaggtttataattgctcttactcctctgctgattttttagaaaatcctgtcagtcatctttgatcagaacatat

SEQ ID NO: 553279 - DNA, 120 bp, Artificial Sequence
  ENSG00000168675_109 (sequence is synthesized)
ttaggtaaatttctttctgaagagatcatgaaactctagattctaaaatgcgtggtgagaagtaattgtagtggatgaaggcttgggctttcataaagtgaggagatgccactccagctg

SEQ ID NO: 553280 - DNA, 120 bp, Artificial Sequence
  ENSG00000168675_110 (sequence is synthesized)
gacgggctcgtggagtctgcattcgagggattccctagtccgtccagtcatcacgggctgctgcccgcctgcccgtgccgtccaaggcacctggccttgggccggtatcaggtagccgcg

SEQ ID NO: 553281 - DNA, 120 bp, Artificial Sequence
  ENSG00000168675_111 (sequence is synthesized)
cctgggtcacacctgccctccacgttcatctctccacctacagatcatagggaccgtttcctcattttattgtcatgcaaatgttgtacataaatacatggctataaacaggcagctcag

SEQ ID NO: 553282 - DNA, 120 bp, Artificial Sequence
  ENSG00000168675_112 (sequence is synthesized)
agtaaccaggaggctcttttctcagtgacagatcacaccctcttagagtagtaatttttgaataattgttgcaaaatatgaaaacctttagcaaaactccagcaccactgaagtcatcag

SEQ ID NO: 553283 - DNA, 120 bp, Artificial Sequence
  ENSG00000168675_113 (sequence is synthesized)
gaagtgtttgggagaatacgtgtctgtgctggatgctgttgaagcaggtcaggccgttggggtcccttcgttcttagggcttctccaccagcttctaaatggggaatgccaactttgtgc

SEQ ID NO: 553284 - DNA, 120 bp, Artificial Sequence
  ENSG00000168675_114 (sequence is synthesized)
caggcacacactacctgctgagacactgtggatgaacaaggcgttgacccagggctcactctgtagaggaagaagaccagagaatggataccaccaagacagtgataagtgctgcaacag

SEQ ID NO: 553285 - DNA, 120 bp, Artificial Sequence
  ENSG00000168675_115 (sequence is synthesized)
ggttcagagctgcacaggaagtccccaaaggtagtgaacccatcatcggggcttaggaaagagcttttaaaggaagataaagccagcaggtgacgccaaaaactgggtatttctgtaggg

SEQ ID NO: 553286 - DNA, 120 bp, Artificial Sequence
  ENSG00000168675_116 (sequence is synthesized)
tagcttttttccctttcgttctacttgttgtactatacagtagagtagccaacccacctccaaggaaaataaaattcaaaatatataatgtaatcagtatgatgatagctcttattgttt

SEQ ID NO: 553287 - DNA, 120 bp, Artificial Sequence
  ENSG00000168675_117 (sequence is synthesized)
tgcttctgtacttcaagctgtgaagtcattcttgtaacacaggctgaattttccccctcaaccatggtgtttaatgagtgtgaatcttcattcaaccattaaaatctccaagagtatttt

SEQ ID NO: 553288 - DNA, 120 bp, Artificial Sequence
  ENSG00000168675_118 (sequence is synthesized)
tatactaacagttcacaaacttgaggcaattatagtctaagtagattccaactcctgcccccacccgtcttcctgccaccaccgccgcccggtctctggaggatcttggaaagaatttac

SEQ ID NO: 553289 - DNA, 120 bp, Artificial Sequence
  ENSG00000168675_119 (sequence is synthesized)
cagcctttaggaacattcagcactttaaaagtgtcacagagccataaataaagagtaagacacccctaagactgtcatctcatcaccacacccgtctctgctgaggaggacagagacagg

SEQ ID NO: 553290 - DNA, 120 bp, Artificial Sequence
  ENSG00000168675_120 (sequence is synthesized)
aaggaaatgcgacaagttcactgtgcagtagccaagcaggcccagccaacatgtgggagggtgggtgtctgtcccagcggtggggcaggaggcgtgcaggggaaggggctgcctggaggt

SEQ ID NO: 553291 - DNA, 120 bp, Artificial Sequence
  ENSG00000168675_121 (sequence is synthesized)
aaggctctgcggtcagccagccctgggtttggtgctccaggaaaggccagcacgtaggggagtgaggtggggtgctgctgttggtagggtaggaagtgacctcgcagggtggggccaggg

SEQ ID NO: 553292 - DNA, 120 bp, Artificial Sequence
  ENSG00000168675_122 (sequence is synthesized)
cttcgtggccagtgggcggccatttctgtgacattgcaatgttctgcgtggatcgttttctggattcctgccaaggtgtttacttggcctggggaaagagaggaacgcatgaggggccca

SEQ ID NO: 553293 - DNA, 120 bp, Artificial Sequence
  ENSG00000168675_123 (sequence is synthesized)
gaccttgccccctgacccatgatagggtctttgagggcatacataacacatctggagcttaaaaagaattaaactgtagaaataagacttcagtgaaggataatatattagtggaggaaa

SEQ ID NO: 553294 - DNA, 120 bp, Artificial Sequence
  ENSG00000168675_124 (sequence is synthesized)
gaccaaatggaagatggtgttaaccatcccacaaatagaaatgagtgttatattaggagcctaaggtgggacaaccacacttccccagagctctttaaaaatagcgcagacactcatgcc

SEQ ID NO: 553295 - DNA, 120 bp, Artificial Sequence
  ENSG00000168675_125 (sequence is synthesized)
tctagtatgattcagttcagctcctcattgaaccagggaagagaccgacagacttcacaccacttcttctgttcctgtaattctccactgtgcagcttgggatttcctggagatgtttcc

SEQ ID NO: 553296 - DNA, 120 bp, Artificial Sequence
  ENSG00000168675_126 (sequence is synthesized)
ataaaaatagagagatgccatcatcactgtcgtcactgtcactgctgtacaataataaaagaaggtgctaggatgccttcctgtaagttttagactagatgtattaaaaagtatccggta

SEQ ID NO: 553297 - DNA, 120 bp, Artificial Sequence
  ENSG00000168675_127 (sequence is synthesized)
agcttatgatcacagtctggcgccatctccctccttgcctggagtctgatctgtcccggcccagtgtcctccaggaccctggcccctcatgcctccgtgcttgcgcgtgtgccatttcct

SEQ ID NO: 553298 - DNA, 120 bp, Artificial Sequence
  ENSG00000168675_128 (sequence is synthesized)
ctctccagaggacctttcctgcctaggactcatgattgtcccctccctggggtctttgctaagccattaatattgaggtgaagagagaggagaagaaatggattatgcctgaccgtggag

SEQ ID NO: 553299 - DNA, 120 bp, Artificial Sequence
  ENSG00000168675_129 (sequence is synthesized)
cctgagcccccgccacggcggccccggtacccgcggcctggccgcgcgccgggtccccaccgcggagtgggaaggaggaggagagactggaggagttggagacagacacagccgcggcgc

SEQ ID NO: 553300 - DNA, 120 bp, Artificial Sequence
  ENSG00000168675_130 (sequence is synthesized)
gcagtcacggctggagacagacggcggcgacggcggcgggaggcgggacactcccccctccggcgactggaggcgggacacctccccggcggccgcagcgccgcgtcccctctctccccg

SEQ ID NO: 553301 - DNA, 120 bp, Artificial Sequence
  ENSG00000168675_131 (sequence is synthesized)
gctgggtctccgagccccggaggaagcaggcgtgtgttgaatttctctctgcccctcaccttggaataaacaggaagcgacaagcacccagcccggcccggcacttgcctttgtgaaggg

SEQ ID NO: 553302 - DNA, 120 bp, Artificial Sequence
  ENSG00000168675_132 (sequence is synthesized)
ctgctctgcagtggtggacctgtctggctgcgtttgttttgacaagggtgtgcctcatttgtgtgtttcttctttggggctggatgttaatggctggggcttgggtatctattcacagta

SEQ ID NO: 553303 - DNA, 120 bp, Artificial Sequence
  ENSG00000168676_0 (sequence is synthesized)
acaagcccgcccgcccgctgctggagccgcgaccatggaggagtctggcatggctcatgaatcagcagaggacttgtttcatttcaacgtagggggctggcatttctcagttcccagaag

SEQ ID NO: 553304 - DNA, 120 bp, Artificial Sequence
  ENSG00000168676_1 (sequence is synthesized)
caaactctctcagtttccagactccctgctgtggaaagaggcttcagccttgacctcttcagaaagccagaggctatttatcgacagagatggttccacatttaggcacgtgcactatta

SEQ ID NO: 553305 - DNA, 120 bp, Artificial Sequence
  ENSG00000168676_2 (sequence is synthesized)
cctctacacctccaaactctccttctccagttgtgcagaactgaacttgctgtatgagcaagcattgggtttgcagctgatgcctttgctgcagactctagataacctgaaggaagggaa

SEQ ID NO: 553306 - DNA, 120 bp, Artificial Sequence
  ENSG00000168676_3 (sequence is synthesized)
acaccatctacgcgtacggcctgcagacctacctgttgctgagagagcatctctgaactactggcgtacatggaagtgtattagcaaaccctcagaatttccaattaaaagcccagcctt

SEQ ID NO: 553307 - DNA, 120 bp, Artificial Sequence
  ENSG00000168676_4 (sequence is synthesized)
tacaggcctacatgataaggcacctctggggctcatggacacacccctgttagacacagaagaggaggtgcactactgcttcctgcccctagacctggtggccaaatatcccagcctagt

SEQ ID NO: 553308 - DNA, 120 bp, Artificial Sequence
  ENSG00000168676_5 (sequence is synthesized)
gactgaagacaacctgctgtggctggctgagacggtggccctcatcgagtgcgagtgcagcgagttccgcttcattgtgaattttcttcgctcacagaagattttactaccggataattt

SEQ ID NO: 553309 - DNA, 120 bp, Artificial Sequence
  ENSG00000168676_6 (sequence is synthesized)
ctccaacattgatgtattagaagcagaagtggaaattctggaaatccctgcactcactgaagccgtaaggtggtaccggatgaacatgggtggctgttccccgaccacctgttctcccct

SEQ ID NO: 553310 - DNA, 120 bp, Artificial Sequence
  ENSG00000168676_7 (sequence is synthesized)
gagccccgggaagggggcccgcacagccagcctggagtccgtgaaaccgctctacacaatggccctgggtctgctggtcaagtacccggactctgcgctgggccagcttcgcatcgagag

SEQ ID NO: 553311 - DNA, 120 bp, Artificial Sequence
  ENSG00000168676_8 (sequence is synthesized)
cacgctagacggaagccgactgtacatcacagggaatggcgtcctctttcagcacgtcaagaactggctggggacttgccggctgcccctgacagagaccatttccgaggtatatgagct

SEQ ID NO: 553312 - DNA, 120 bp, Artificial Sequence
  ENSG00000168676_9 (sequence is synthesized)
ctgtgccttcctagacaaaagggacatcacctacgagccaatcaaagttgctttgaagactcatctggagccaaggactttggcacccatggatgtgctcaatgagtggacggcagagat

SEQ ID NO: 553313 - DNA, 120 bp, Artificial Sequence
  ENSG00000168676_10 (sequence is synthesized)
cactgtgtattccccacaacagatcatcaaagtgtatgttggaagccactggtacgcaaccaccctgcagacactgctgaagtatccagaactgctgtccaaccctcagagagtgtactg

SEQ ID NO: 553314 - DNA, 120 bp, Artificial Sequence
  ENSG00000168676_11 (sequence is synthesized)
gatcacatatggacaaaccctgctcatccacggggatggccagatgttccgacacattctcaacttcctgagacttggcaaactgtttttaccatctgaatttaaggaatggcccctctt

SEQ ID NO: 553315 - DNA, 120 bp, Artificial Sequence
  ENSG00000168676_12 (sequence is synthesized)
atggactcaggagaaagaatctgaaaatgaagaagctttttccatcaggaggctgcatgtggtgacagaagggccagggtcactggtggagttcagtagagacactaaagaaaccacagc

SEQ ID NO: 553316 - DNA, 120 bp, Artificial Sequence
  ENSG00000168676_13 (sequence is synthesized)
ctacatgcctgtggacttcgaagactgcagtgacaggactccatggaacaaggctaagggaaacctggtcaggtccaaccagatggatgaggctgagcagtacactcggcccatccaggt

SEQ ID NO: 553317 - DNA, 120 bp, Artificial Sequence
  ENSG00000168676_14 (sequence is synthesized)
gtccctatgccgaaatgccaagagggctggcaaccctagcacatactcacactgccgtggcttgtgtaccaatcctggacactgggggagccaccctgagagccccccaaagaagaaatg

SEQ ID NO: 553318 - DNA, 120 bp, Artificial Sequence
  ENSG00000168676_15 (sequence is synthesized)
caccacaatcaacctcacacagaaatctgaaaccaaagaccctcccgccactcccatgcaaaaactcatctccctggtgagagaatgggacatggtcaattgcaaacagtgggaattcca

SEQ ID NO: 553319 - DNA, 120 bp, Artificial Sequence
  ENSG00000168676_16 (sequence is synthesized)
gccactgacagccacacggagcagccccttggaggaggccaccctgcagctccccttgggaagcgaggctgcttcccagcccagcacctcagctgcctggaaagcccattccacagcctc

SEQ ID NO: 553320 - DNA, 120 bp, Artificial Sequence
  ENSG00000168676_17 (sequence is synthesized)
agagaaggatccaggaccacaggcaggggctggagctggagcgaaagacaaggggccagagccaaccttcaagccatacttacccccaaaaagagctggcaccctgaaggactggagcaa

SEQ ID NO: 553321 - DNA, 120 bp, Artificial Sequence
  ENSG00000168676_18 (sequence is synthesized)
gcagaggaccaaggagagagaaagccctgcccctgagcagcctctgcccgaggccagtgaggtggacagcctaggggttatcctcaaagtgactcacccccccgtggtgggcagcgatgg

SEQ ID NO: 553322 - DNA, 120 bp, Artificial Sequence
  ENSG00000168676_19 (sequence is synthesized)
cttctgcatgttctttgaggacagcatcatctataccacggagatggacaacctcaggcacacaacacccacagccagtccccagccccaagaagtgactttcctgagtttctctctgtc

SEQ ID NO: 553323 - DNA, 120 bp, Artificial Sequence
  ENSG00000168676_20 (sequence is synthesized)
ctgggaagagatgttttatgcacagaaatgtcactgcttcctggctgacatcatcatggattccatcaggcaaaaggaccccaaagccatcacagccaaggtggtctccctggccaatcg

SEQ ID NO: 553324 - DNA, 120 bp, Artificial Sequence
  ENSG00000168676_21 (sequence is synthesized)
gctgtggaccctgcacatcagccccaagcagtttgtggtagatttgctggccatcaccggcttcaaggatgaccggcacacccaggagcgcctgtacagctgggtggagcttacactgcc

SEQ ID NO: 553325 - DNA, 120 bp, Artificial Sequence
  ENSG00000168676_22 (sequence is synthesized)
cttcgccaggaaatatggccgatgcatggacctgctcatccagaggggcctgtctaggtctgtctcttactccatcctgggaaagtacctacaagaggactagggtgcccagagatgcag

SEQ ID NO: 553326 - DNA, 120 bp, Artificial Sequence
  ENSG00000168676_23 (sequence is synthesized)
cccctcatgccccacccgccaagtctcattttaattggagatagcccagaatgcatgtgcccatcagagggtacatatcagtctattttttattataaacaaataaaagattaaatcaca

SEQ ID NO: 553327 - DNA, 120 bp, Artificial Sequence
  ENSG00000168676_24 (sequence is synthesized)
aggacttttgagggagaatgggtccctgggtaagggcggcacgaagaccgccctgggcttcaggcttgcctagttggggtgctccactccagcctcagcccacctctggtcgcctgatcc

SEQ ID NO: 553328 - DNA, 120 bp, Artificial Sequence
  ENSG00000168676_25 (sequence is synthesized)
ttcaagctgacaagctctggacttggaagactgcttgggcgggccacaaagcctttgacctcagctgcctcatcagtaagacactcaccaaccacatctgtctcacagaatcatgtcatg

SEQ ID NO: 553329 - DNA, 120 bp, Artificial Sequence
  ENSG00000168676_26 (sequence is synthesized)
ctccccatcacatgtcccacagaggcccagcttggtgctcagggcctcaggagcttccctgggcagaggtagcggaagcatgacagagccttccaggaagcaagcagattccagcattag

SEQ ID NO: 553330 - DNA, 120 bp, Artificial Sequence
  ENSG00000168676_27 (sequence is synthesized)
aatctcactagactcagggctgttttattccctatttgttttgggatggcctggctgtaaaagtgtcaggcactggaaagtgctagggaccacaggagttggtgtgaagggcagggagct

SEQ ID NO: 553331 - DNA, 120 bp, Artificial Sequence
  ENSG00000168676_28 (sequence is synthesized)
cagctggttgccagtcggcttctcttcttactctgcccttatgtatccagctggtcttccggcctcagttcctctcaccataaaatgaggaatccagattgtttcaaaggatggtgctac

SEQ ID NO: 553332 - DNA, 120 bp, Artificial Sequence
  ENSG00000168676_29 (sequence is synthesized)
ctgctcttaatgtcagcaaactcagaataaaagggaaggagggtggatggtgacaggttcccccagagtcatagcagaattgtccacttgaggtagtggcctaaggaaggatgagatttt

SEQ ID NO: 553333 - DNA, 120 bp, Artificial Sequence
  ENSG00000168676_30 (sequence is synthesized)
ccacctttgacagagagagcctctctccccctactgccccaggatgagctctgtttgggatgtgaactgaatgatctctttgaccccaagatgctactgctgtctagatagatagggcag

SEQ ID NO: 553334 - DNA, 120 bp, Artificial Sequence
  ENSG00000168676_31 (sequence is synthesized)
taaacactcaagttacactaggagcccaaatgtctggaaccccagtcattcatattcatagtcacctagaaagttgtctgtgatgtgcttctgtatctctaagttgattcacacaggaca

SEQ ID NO: 553335 - DNA, 120 bp, Artificial Sequence
  ENSG00000168676_32 (sequence is synthesized)
ttagcgttggctccatctctgcctcccatactgcagtccaggcagggacaaactgcaagtgccacccgccagcccaggctcggccgggcccctcctctctaagcagcaagacaactccct

SEQ ID NO: 553336 - DNA, 120 bp, Artificial Sequence
  ENSG00000168676_33 (sequence is synthesized)
cttttggaatgacctgctcttgggtcaaaactcacagggtaagtctcagggccagtgtgcccaccaggagggcctggcttgggagccccaggccaagccacgggaggccacacccacggc

SEQ ID NO: 553337 - DNA, 120 bp, Artificial Sequence
  ENSG00000168676_34 (sequence is synthesized)
ctcagacacaggaaaacaaagtaatgtggggtctttcgccttgaaaaccacacactcaaagctaatctaataaggtatgttgataagttgtttcagaacaaggagaacctaggataagtt

SEQ ID NO: 553338 - DNA, 120 bp, Artificial Sequence
  ENSG00000168676_35 (sequence is synthesized)
acagcaccagaaacctgccaaaaccaggacctacagctaaaccagaaatagcctcattaactcactgtgttcccctttgtttttcaagtgaattttcttcgctcacagaagattttacta

SEQ ID NO: 553339 - DNA, 120 bp, Artificial Sequence
  ENSG00000168676_36 (sequence is synthesized)
cctgctccccatctggcatcaccacctgagctgctctgggggccatcacctggccctcacacagcttccagcacttgcttagaacaaaggctttcccgccaggcacggtggctcatgcct

SEQ ID NO: 553340 - DNA, 69 bp, Artificial Sequence
  ENSG00000168676_37 (sequence is synthesized)
tgtaatcccagatacttgggaggctgaagcaccagaattgtttgaacccaggagaggagtgtgactctg

SEQ ID NO: 553341 - DNA, 120 bp, Artificial Sequence
  ENSG00000168676_38 (sequence is synthesized)
agtgtgactctgcctcaaaaaacaaaacaaaacagagcacaagtggaccgagtggcctgctgggaaggccctccagagtttgcatagggagggggccagctctgagggacctggactgag

SEQ ID NO: 553342 - DNA, 120 bp, Artificial Sequence
  ENSG00000168676_39 (sequence is synthesized)
aaggaggtacggtgggcttccaaatgccttgagagggtggtctaggggccatcaaaagttgaagcagggatgatgtgcttctccctggaagctctgctccccaccatggttccttgtgac

SEQ ID NO: 553343 - DNA, 120 bp, Artificial Sequence
  ENSG00000168676_40 (sequence is synthesized)
tgacaagacagggaaatggaatctcaaagcctctgctctagtgtagttggaaaaggggagtgagagaagattgacctgccccttcgcaaagacctagcctctgagactgagtccggtgtc

SEQ ID NO: 553344 - DNA, 120 bp, Artificial Sequence
  ENSG00000168676_41 (sequence is synthesized)
ccacccccaaattccctcgtcacctcacgtggaaacccccggctgctgtgcctgtttctgcctattcctgacgcttgctgacccctgtccagcctaggccttcgtgctcccagccctacc

SEQ ID NO: 553345 - DNA, 120 bp, Artificial Sequence
  ENSG00000168676_42 (sequence is synthesized)
tcattccagcttgttcttcccctcatggtttcctcagggctgttcatcattccatttcccaactccacctccatggaagctactgtgcatgttatagggcgcaagctacctgagcatggc

SEQ ID NO: 553346 - DNA, 120 bp, Artificial Sequence
  ENSG00000168676_43 (sequence is synthesized)
ttcagccaccatcccgagaatgtgtagaactgcattgcacatgggaagtttggcctggacatcaccagacatttatcccatggcaatcaggcctttccttatcttcaggcatagatttcc

SEQ ID NO: 553347 - DNA, 120 bp, Artificial Sequence
  ENSG00000168676_44 (sequence is synthesized)
cagccttctcccagacaaatagaaacccatcctcttggccaggcgctggtggctgatgcctgtaatctcagcattttgagaggccaacgcaagtggctcacttgaggtcaggagttcgag

SEQ ID NO: 553348 - DNA, 84 bp, Artificial Sequence
  ENSG00000168676_45 (sequence is synthesized)
gcactcagaaacccatcctctttgtggggagtggcatgctccagcaggtctcaggaccctgtcccagggccttataatccgctt

SEQ ID NO: 553349 - DNA, 120 bp, Artificial Sequence
  ENSG00000168676_46 (sequence is synthesized)
caggtctcaggaccctgtcccagggccttataatccgcttaagatggtgtgagttcagccccttccctcaaagccttctactcctcagagaacatagatcattgtgagatggtagcgtag

SEQ ID NO: 553350 - DNA, 120 bp, Artificial Sequence
  ENSG00000168676_47 (sequence is synthesized)
tccctgctccacagagcaatgcaaagatggaggaagtgtgttgacagccaggctctgggagctggcagcactcctcaaacacaaagggtggctttagctttctacaaagcatcacaataa

SEQ ID NO: 553351 - DNA, 120 bp, Artificial Sequence
  ENSG00000168676_48 (sequence is synthesized)
gggaaacagctgtggtaaccttggagctggacagagctgacctcaaatcctagccctgcccctgcctagctttgcagtttagggcaagatacttcattagcctctcagggcaggttcttc

SEQ ID NO: 553352 - DNA, 120 bp, Artificial Sequence
  ENSG00000168676_49 (sequence is synthesized)
aacgtgaaatgatgatagcactatcccctcttgcagggttgctctgaggattggagatgatccacgaacatcccccagcagtgtgcccactggcacattgttgccacgggagcagggtcc

SEQ ID NO: 553353 - DNA, 120 bp, Artificial Sequence
  ENSG00000168676_50 (sequence is synthesized)
tgaaggctgtgataactgtattctctggactgtaccctaggcccactataggagaaaaaggtcccatccataaaccagcaacccaaatacccaccctgaaaataatgccacacagtatgt

SEQ ID NO: 553354 - DNA, 120 bp, Artificial Sequence
  ENSG00000168676_51 (sequence is synthesized)
ctctgggggaaattctgcccaggagagccagcaacaggggctgtgaatccaggaagcctgtaacacacattgagtttccaggccatggttgccgttctttacctttggatggttacagaa

SEQ ID NO: 553355 - DNA, 120 bp, Artificial Sequence
  ENSG00000168676_52 (sequence is synthesized)
atgctagtgatacagcaaatgaatccccccactcccaactcacctcccaacaaatagttatgacttctaagcctgagtatacaaaaaaattatactaattttgagaagatcttgatttgg

SEQ ID NO: 553356 - DNA, 120 bp, Artificial Sequence
  ENSG00000168676_53 (sequence is synthesized)
actgtgcaaagaaatatccttcctctgagcctcctcggtacaatggaggcagcagtaggaaccgagccccaaagcctccaatccagctatgaccatggggggcctaggagtcaccccttt

SEQ ID NO: 553357 - DNA, 120 bp, Artificial Sequence
  ENSG00000168676_54 (sequence is synthesized)
cgcgaccatggtacggagcccgctctggcgggggcgccaaaagcaccaaagcggcgaatgggggccgctgtggccaaggattggggctaagtggaggagtctggcatggctcatgaatca

SEQ ID NO: 553358 - DNA, 120 bp, Artificial Sequence
  ENSG00000168676_55 (sequence is synthesized)
ggcgggtgtccccttcttccctcaacgctccacgtgcgtccctcctgaagctgcgtgctcagtcaaagaggacgaccatccccaataaaggaggaccagtcttcagtcaagggaggagtc

SEQ ID NO: 553359 - DNA, 120 bp, Artificial Sequence
  ENSG00000168679_0 (sequence is synthesized)
gtctgagccctccttggctcttacaatgctcacttgttttcacaatgcagcaaaatgaaatgccttagaaaaagagtaacattccagaaaacggtgtaatttatttttcttccttaattg

SEQ ID NO: 553360 - DNA, 120 bp, Artificial Sequence
  ENSG00000168679_1 (sequence is synthesized)
ccccatctgtggaggatttctttgctgaacaccacatcaaagggatcttctgcatttaaaatagaagaggcatcatgctgaagagggaggggaaggtccaaccttacactaaaaccctgg

SEQ ID NO: 553361 - DNA, 120 bp, Artificial Sequence
  ENSG00000168679_2 (sequence is synthesized)
atggaggatggggatggatgattgtgattcattttttcctggtgaatgtgtttgtgatggggatgaccaagacttttgcaattttctttgtggtctttcaagaagagtttgaaggcacct

SEQ ID NO: 553362 - DNA, 120 bp, Artificial Sequence
  ENSG00000168679_3 (sequence is synthesized)
cagagcaaattggttggattggatccatcatgtcatctcttcgtttttgtgcaggtcccctggttgctattatttgtgacatacttggagagaaaactacctccattcttggggctttcg

SEQ ID NO: 553363 - DNA, 120 bp, Artificial Sequence
  ENSG00000168679_4 (sequence is synthesized)
ttgttactggtggatatctgatcagcagctgggccacaagtattccttttctttgtgtgactatgggacttctacccggtttgggttctgctttcttataccaagtggctgctgtggtaa

SEQ ID NO: 553364 - DNA, 120 bp, Artificial Sequence
  ENSG00000168679_5 (sequence is synthesized)
ctaccaaatacttcaaaaaacgattggctctttctacagctattgcccgttctgggatgggactgacttttcttttggcaccctttacaaaattcctgatagatctgtatgactggacag

SEQ ID NO: 553365 - DNA, 120 bp, Artificial Sequence
  ENSG00000168679_6 (sequence is synthesized)
gagcccttatattatttggagctatcgcattgaatttggtgccttctagtatgctcttaagacccatccatatcaaaagtgagaacaattctggtattaaagataaaggcagcagtttgt

SEQ ID NO: 553366 - DNA, 120 bp, Artificial Sequence
  ENSG00000168679_7 (sequence is synthesized)
ctgcacatggtccagaggcacatgcaacagaaacacactgccatgagacagaagagtctaccatcaaggacagtactacgcagaaggctggactacctagcaaaaatttaacagtctcac

SEQ ID NO: 553367 - DNA, 120 bp, Artificial Sequence
  ENSG00000168679_8 (sequence is synthesized)
aaaatcaaagtgaagagttctacaatgggcctaacaggaacagactgttattaaagagtgatgaagaaagtgataaggttatttcgtggagctgcaaacaactgtttgacatttctctct

SEQ ID NO: 553368 - DNA, 120 bp, Artificial Sequence
  ENSG00000168679_9 (sequence is synthesized)
ttagaaatcctttcttctacatatttacttggtcttttctcctcagtcagttagcatacttcatccctacctttcacctggtagccagagccaaaacactggggattgacatcatggatg

SEQ ID NO: 553369 - DNA, 120 bp, Artificial Sequence
  ENSG00000168679_10 (sequence is synthesized)
attatttctggatgggttgctgatcaaaactggattaagaagtatcattaccacaagtcttacctcatcctctgcggcatcactaacctgcttgctcctttagccaccacatttccacta

SEQ ID NO: 553370 - DNA, 120 bp, Artificial Sequence
  ENSG00000168679_11 (sequence is synthesized)
cttatgacctacaccatctgctttgccatctttgctggtggttacctggcattgatactgcctgtactggttgatctgtgtaggaattctacagtaaacaggtttttgggacttgccagt

SEQ ID NO: 553371 - DNA, 120 bp, Artificial Sequence
  ENSG00000168679_12 (sequence is synthesized)
ttctttgctgggatggctgtcctttctggaccacctatagcaggctggttatatgattatacccagacatacaatggctctttctacttctctggcatatgctatctcctctcttcagtt

SEQ ID NO: 553372 - DNA, 120 bp, Artificial Sequence
  ENSG00000168679_13 (sequence is synthesized)
tcctttttttttgtaccattggccgaaagatggaaaaacagtctgacctgaaagaaagaagactgcaatcaagtgagagctaaacaaaagaaaacctaaactaatgtcattggaaacaaa

SEQ ID NO: 553373 - DNA, 88 bp, Artificial Sequence
  ENSG00000168679_14 (sequence is synthesized)
taaacaaaagaaaacctaaactaatgtcattggaaacaaaagcttgaaagaaacacatcgcatctacatttgtaacatgagaaggaaa

SEQ ID NO: 553374 - DNA, 81 bp, Artificial Sequence
  ENSG00000168679_15 (sequence is synthesized)
ctgacctcgtgatccgcccgccttgtgcggccagataagtttttaaggttccttcttgctttagcattctgagaaatgtct

SEQ ID NO: 553375 - DNA, 120 bp, Artificial Sequence
  ENSG00000168679_16 (sequence is synthesized)
tttaaggttccttcttgctttagcattctgagaaatgtctaattggtagtaagacaagagtaatagcaacctgtattgttagtatttaaccaaataggctaaaattttaatcaggtacct

SEQ ID NO: 553376 - DNA, 120 bp, Artificial Sequence
  ENSG00000168679_17 (sequence is synthesized)
tatgtattaaatagaaatcggaatgtaccataataaatccaaactctcaattacgccatggtaattcagtcactaaaatatgtaaagatagaaaattttttaatttaaagaagtgtgaaa

SEQ ID NO: 553377 - DNA, 120 bp, Artificial Sequence
  ENSG00000168679_18 (sequence is synthesized)
catagccattgattgatcagaattctggaatctgaatattaaaaccttacttagtgactggaatggtatatgctccctccaaaagtttatctttgtttattgattaaaggtaatccttac

SEQ ID NO: 553378 - DNA, 120 bp, Artificial Sequence
  ENSG00000168679_19 (sequence is synthesized)
ggtaatccttactttctttgtattacttaggttcttaattaaaggtaatccttactttctttgtattacttaggttcttaaatttctatgataaacatgtattgctaaataataaaaagt

SEQ ID NO: 553379 - DNA, 76 bp, Artificial Sequence
  ENSG00000168679_20 (sequence is synthesized)
gggaggggaaggtccaaccttacactaaaaccctggatggaggatggggatggatgattgtgattcattttttcct

SEQ ID NO: 553380 - DNA, 120 bp, Artificial Sequence
  ENSG00000168679_21 (sequence is synthesized)
gattaatggtaacatgtaatgatggtatcaggttaaaagaaacagattatttctgcttttcctatatctactcactccaccaccaatgcaggaaaatctgaaggctcagattcttgtatt

SEQ ID NO: 553381 - DNA, 120 bp, Artificial Sequence
  ENSG00000168679_22 (sequence is synthesized)
atcttaagatgtgccttaagcagattcttatattcttgggagttgtagggcagacactggatctatgtctacttgtctggggagacaatccagagttttttcagagcctcaaagacccat

SEQ ID NO: 553382 - DNA, 120 bp, Artificial Sequence
  ENSG00000168679_23 (sequence is synthesized)
gatgctttaaaaaaaaaaaaaaaaggctgggagcaattgctcacgcctgtaattctagcactctgggaggccaaggcgggggtatcacttgagctgaggggttcaagaccagcctgggca

SEQ ID NO: 553383 - DNA, 120 bp, Artificial Sequence
  ENSG00000168685_0 (sequence is synthesized)
cttcctccctccctcccttcctcttactctcattcatttcatacacactggctcacacatctactctctctctctatctctctcagaatgacaattctaggtacaacttttggcatggtt

SEQ ID NO: 553384 - DNA, 120 bp, Artificial Sequence
  ENSG00000168685_1 (sequence is synthesized)
ttttctttacttcaagtcgtttctggagaaagtggctatgctcaaaatggagacttggaagatgcagaactggatgactactcattctcatgctatagccagttggaagtgaatggatcg

SEQ ID NO: 553385 - DNA, 120 bp, Artificial Sequence
  ENSG00000168685_2 (sequence is synthesized)
cagcactcactgacctgtgcttttgaggacccagatgtcaacatcaccaatctggaatttgaaatatgtggggccctcgtggaggtaaagtgcctgaatttcaggaaactacaagagata

SEQ ID NO: 553386 - DNA, 120 bp, Artificial Sequence
  ENSG00000168685_3 (sequence is synthesized)
tatttcatcgagacaaagaaattcttactgattggaaagagcaatatatgtgtgaaggttggagaaaagagtctaacctgcaaaaaaatagacctaaccactatagttaaacctgaggct

SEQ ID NO: 553387 - DNA, 120 bp, Artificial Sequence
  ENSG00000168685_4 (sequence is synthesized)
ccttttgacctgagtgtcgtctatcgggaaggagccaatgactttgtggtgacatttaatacatcacacttgcaaaagaagtatgtaaaagttttaatgcacgatgtagcttaccgccag

SEQ ID NO: 553388 - DNA, 120 bp, Artificial Sequence
  ENSG00000168685_5 (sequence is synthesized)
gaaaaggatgaaaacaaatggacgcatgtgaatttatccagcacaaagctgacactcctgcagagaaagctccaaccggcagcaatgtatgagattaaagttcgatccatccctgatcac

SEQ ID NO: 553389 - DNA, 120 bp, Artificial Sequence
  ENSG00000168685_6 (sequence is synthesized)
tattttaaaggcttctggagtgaatggagtccaagttattacttcagaactccagagatcaataatagctcaggggagatggatcctatcttactaaccatcagcattttgagttttttc

SEQ ID NO: 553390 - DNA, 120 bp, Artificial Sequence
  ENSG00000168685_7 (sequence is synthesized)
tctgtcgctctgttggtcatcttggcctgtgtgttatggaaaaaaaggattaagcctatcgtatggcccagtctccccgatcataagaagactctggaacatctttgtaagaaaccaaga

SEQ ID NO: 553391 - DNA, 120 bp, Artificial Sequence
  ENSG00000168685_8 (sequence is synthesized)
aaaaatttaaatgtgagtttcaatcctgaaagtttcctggactgccagattcatagggtggatgacattcaagctagagatgaagtggaaggttttctgcaagatacgtttcctcagcaa

SEQ ID NO: 553392 - DNA, 120 bp, Artificial Sequence
  ENSG00000168685_9 (sequence is synthesized)
ctagaagaatctgagaagcagaggcttggaggggatgtgcagagccccaactgcccatctgaggatgtagtcatcactccagaaagctttggaagagattcatccctcacatgcctggct

SEQ ID NO: 553393 - DNA, 120 bp, Artificial Sequence
  ENSG00000168685_10 (sequence is synthesized)
gggaatgtcagtgcatgtgacgcccctattctctcctcttccaggtccctagactgcagggagagtggcaagaatgggcctcatgtgtaccaggacctcctgcttagccttgggactaca

SEQ ID NO: 553394 - DNA, 120 bp, Artificial Sequence
  ENSG00000168685_11 (sequence is synthesized)
aacagcacgctgccccctccattttctctccaatctggaatcctgacattgaacccagttgctcagggtcagcccattcttacttccctgggatcaaatcaagaagaagcatatgtcacc

SEQ ID NO: 553395 - DNA, 120 bp, Artificial Sequence
  ENSG00000168685_12 (sequence is synthesized)
atgtccagcttctaccaaaaccagtgaagtgtaagaaacccagactgaacttaccgtgagcgacaaagatgatttaaaagggaagtctagagttcctagtctccctcacagcacagagaa

SEQ ID NO: 553396 - DNA, 120 bp, Artificial Sequence
  ENSG00000168685_13 (sequence is synthesized)
gacaaaattagcaaaaccccactacacagtctgcaagattctgaaacattgctttgaccactcttcctgagttcagtggcactcaacatgagtcaagagcatcctgcttctaccatgtgg

SEQ ID NO: 553397 - DNA, 120 bp, Artificial Sequence
  ENSG00000168685_14 (sequence is synthesized)
atttggtcacaaggtttaaggtgacccaatgattcagctatttaaaaaaaaaagaggaaagaatgaaagagtaaaggaaatgattgaggagtgaggaaggcaggaagagagcatgagagg

SEQ ID NO: 553398 - DNA, 120 bp, Artificial Sequence
  ENSG00000168685_15 (sequence is synthesized)
aaagaaagaaaggaaaataaaaaatgatagttgccattattaggatttaatatatatccagtgctttgcaagtgctctgcgcaccttgtctcactccatcctgacaataatcctgggagg

SEQ ID NO: 553399 - DNA, 120 bp, Artificial Sequence
  ENSG00000168685_16 (sequence is synthesized)
tgtgtgcaattactacgactactctcttttttatagatcattaaattcagaactaaggagttaagtaacttgtccaagttgttcacacagtgaagggaggggccaagatatgatggctgg

SEQ ID NO: 553400 - DNA, 120 bp, Artificial Sequence
  ENSG00000168685_17 (sequence is synthesized)
gagtctaattgcagttccctgagccatgtgcctttctcttcactgaggactgccccattcttgagtgccaaacgtcactagtaacagggtgtgcctagataatttatgatccaaactgag

SEQ ID NO: 553401 - DNA, 120 bp, Artificial Sequence
  ENSG00000168685_18 (sequence is synthesized)
tcagtttggaaagtgaaagggaaacttacatataatccctccgggacaatgagcaaaaactaggactgtccccagacaaatgtgaacatacatatcatcacttaaattaaaatggctatg

SEQ ID NO: 553402 - DNA, 120 bp, Artificial Sequence
  ENSG00000168685_19 (sequence is synthesized)
tcttgcgggtgtgaagtcccatgaccagccatgtcaaaagaaggtaaagaagtcaagaaaaagccatgaagcccatttggtttcatttttctgaaaataggctcaagagggaataaatta

SEQ ID NO: 553403 - DNA, 120 bp, Artificial Sequence
  ENSG00000168685_20 (sequence is synthesized)
gaaactcacaatttctcttgtttgttaccaagacagtgattctcttgctgctaccacccaactgcatccgtccatgatctcagaggaaactgtcgctgaccctggacatgggtacgtttg

SEQ ID NO: 553404 - DNA, 120 bp, Artificial Sequence
  ENSG00000168685_21 (sequence is synthesized)
acgagtgagaggaggcatgacccctcccatgtgtatagacactaccccaacctaaattcatccctaaattgtcccaagttctccagcaatagaggctgccacaaacttcagggagaaaga

SEQ ID NO: 553405 - DNA, 120 bp, Artificial Sequence
  ENSG00000168685_22 (sequence is synthesized)
gttacaagtacatgcaatgagtgaactgactgtggctacaatcttgaagatatacggaagagacgtattattaatgcttgacatatatcatcttgcctttcttggtctagactgacttct

SEQ ID NO: 553406 - DNA, 120 bp, Artificial Sequence
  ENSG00000168685_23 (sequence is synthesized)
aatgactaactcaaagtcaaggcaactgagtaatgtcagctcagcaaagtgcagcaaacccatctcccacaggcctccaaaccctggctgttcacagaaccacaaagggcagatgctgca

SEQ ID NO: 553407 - DNA, 120 bp, Artificial Sequence
  ENSG00000168685_24 (sequence is synthesized)
cagaaaactagagaaggggtcataggttcatggttttgtttgagatttgttgctactgtttttctgttttgaattttcttctttgttctgtttttactttatttagggggactaggtgtt

SEQ ID NO: 553408 - DNA, 120 bp, Artificial Sequence
  ENSG00000168685_25 (sequence is synthesized)
tctgatattttagttttcttgtttgttttgttttgtgttgtctgtgaatggggttttaactgtggatgaatggaccttatctgttggcttaaaggactggtaagatcagaccatcttatt

SEQ ID NO: 553409 - DNA, 120 bp, Artificial Sequence
  ENSG00000168685_26 (sequence is synthesized)
cttcaggtgaatgttttactttccaaagtgctctcctctgcaccagcagtaataaatacaatgccataatcccttaggtttgcctagtgcttttgcaattttcaaagcacttccataagc

SEQ ID NO: 553410 - DNA, 120 bp, Artificial Sequence
  ENSG00000168685_27 (sequence is synthesized)
attccttccacctccttgataggcatttatggaaagcctgctacatgtcaatcatactgttaggcacaggggacctaaagacacataaaaggatggcattctgcctcataaattgcaaaa

SEQ ID NO: 553411 - DNA, 120 bp, Artificial Sequence
  ENSG00000168685_28 (sequence is synthesized)
cctaatgaaagtgactgcttggtaaacaaattattattatattataaaatgctataaaagagccatattgaaagtgccctgttggagacagggcaaatgccacaaaaatgatgtaaattt

SEQ ID NO: 553412 - DNA, 120 bp, Artificial Sequence
  ENSG00000168685_29 (sequence is synthesized)
acatggaggaaaagtagaatctgcctggtttgtaggcagcagaagacatttttcatcagtgggcaggtgttctttaccttttgtagaaatgggagtcaagtctcaaataggaggctccac

SEQ ID NO: 553413 - DNA, 120 bp, Artificial Sequence
  ENSG00000168685_30 (sequence is synthesized)
aaaatctcatgccaggtctctgataccttattcacagaagttctttgaagtatttattgttattttctttgacttatgggaaaactgggacacaggaagacaggtaaattacccaacctc

SEQ ID NO: 553414 - DNA, 120 bp, Artificial Sequence
  ENSG00000168685_31 (sequence is synthesized)
acacgttaagtcagaactgggagccataattttgtatccctggtataaatagacaatctcttgaagaaatgaagagatgaccatagaaaaacatcgagatatctccagctctaaaatcct

SEQ ID NO: 553415 - DNA, 120 bp, Artificial Sequence
  ENSG00000168685_32 (sequence is synthesized)
ttgtttcaatgttgtttggcatatgttatctttggaatttagtgtctgagcctctgtctgttactgtagtatttaaaatgcatgtattataatcatataatcataactgctgttaattct

SEQ ID NO: 553416 - DNA, 120 bp, Artificial Sequence
  ENSG00000168685_33 (sequence is synthesized)
tgattatatacctagggacaatgtgtaatgtaagattactaattggttctgcccaatctcctttcagattttattaggaaaaaaaaataaacctcctgatcggagacaatgtattaatca

SEQ ID NO: 553417 - DNA, 120 bp, Artificial Sequence
  ENSG00000168685_34 (sequence is synthesized)
gaagtgtaaactgccagttctatatagcatgaaatgaaaagacagctaatttggtccaacaaacatgactgggtctagggcacccaggctgattcagctgatttcctaccagcctttgcc

SEQ ID NO: 553418 - DNA, 120 bp, Artificial Sequence
  ENSG00000168685_35 (sequence is synthesized)
tcttccttcaatgtggtttccatgggaatttgcttcagaaaagccaagtatgggctgttcagaggtgcacacctgcattttcttagctcttctagaggggctaagagacttggtacgggc

SEQ ID NO: 553419 - DNA, 120 bp, Artificial Sequence
  ENSG00000168685_36 (sequence is synthesized)
caggaagaatatgtggcagagctcctggaaatgatgcagattaggtggcatttttgtcagctctgtggtttattgttgggactattctttaaaatatccattgttcactacagtgaagat

SEQ ID NO: 553420 - DNA, 120 bp, Artificial Sequence
  ENSG00000168685_37 (sequence is synthesized)
ctctgatttaaccgtgtactatccacatgcattacaaacatttcgcagagctgcttagtatataagcgtacaatgtatgtaataaccatctcatatttaattaaatggtatagaagaaca

SEQ ID NO: 553421 - DNA, 120 bp, Artificial Sequence
  ENSG00000168685_38 (sequence is synthesized)
gcttaaaaagtgttgtgttggcaacatcccagtggccaagaatgatattccaggacaaggaacagttgaacctcaccttttggtatttgattcatcctgtaactagggtccctcctaaga

SEQ ID NO: 553422 - DNA, 120 bp, Artificial Sequence
  ENSG00000168685_39 (sequence is synthesized)
tgtcacttttgggctacctgaaaacactgtgtctggacattctgtaggttaaaagtagacaaatagtggaaacaactggcaatagataatagctaattccctactgtaaatttttataat

SEQ ID NO: 553423 - DNA, 90 bp, Artificial Sequence
  ENSG00000168685_40 (sequence is synthesized)
gacacccttggatgttggggttttttttttccacagctcttgtggtccccagcctctctcttgagcagggctggctttttttttttaata

SEQ ID NO: 553424 - DNA, 120 bp, Artificial Sequence
  ENSG00000168685_41 (sequence is synthesized)
agcctctctcttgagcagggctggctttttttttttaataagatagctggtgcccaagattgttttccaccttaaggataaaacctgttaagaaaggagacttggaagatgcagaactgg

SEQ ID NO: 553425 - DNA, 120 bp, Artificial Sequence
  ENSG00000168685_42 (sequence is synthesized)
gtgtggaaagggagatcctgggcagtgcctaactcacctgaataagacccatcatttcactctcctccttgaccactcacaacatcctttataagctcagattctgtccctaattttgct

SEQ ID NO: 553426 - DNA, 120 bp, Artificial Sequence
  ENSG00000168685_43 (sequence is synthesized)
gttgactcctttacgtatcagagctccttattctaacaaatacgagacaacttcagagaatgcttatgggactaaaggaatcccaattgaaatgatttgggagatttaggcaacacctct

SEQ ID NO: 553427 - DNA, 62 bp, Artificial Sequence
  ENSG00000168685_44 (sequence is synthesized)
gaaaacacaaaaattaggctggcatagtggcatttgcctgtagtcctagctactcaggaggc

SEQ ID NO: 553428 - DNA, 120 bp, Artificial Sequence
  ENSG00000168685_45 (sequence is synthesized)
atctgttcttctgattccaagctcagaataagtgggaagactcagtgtgcctgtgccctctgccattcacttcatctatcaatgttctctgatttcaggattaagcctatcgtatggccc

SEQ ID NO: 553429 - DNA, 120 bp, Artificial Sequence
  ENSG00000168701_0 (sequence is synthesized)
ggaagtgcatgagctgccgatgtggtgcttagtgattgcggtttcggtcgctctcccgtgtttcccgggctgggtatttgcctcgcaccatggcgcccaagggcaaagtgggcacgagag

SEQ ID NO: 553430 - DNA, 120 bp, Artificial Sequence
  ENSG00000168701_1 (sequence is synthesized)
ggaagaagcagatatttgaagagaacagagagactctgaagttctacctgcggatcatactgggggccaatgccatttactgccttgtgacgttggtcttcttttactcatctgcctcat

SEQ ID NO: 553431 - DNA, 120 bp, Artificial Sequence
  ENSG00000168701_2 (sequence is synthesized)
tttgggcctggttggccctgggctttagtctggcagtgtatggggccagctaccactctatgagctcgatggcacgagcagcgttctctgaggatggggccctgatggatggtggcatgg

SEQ ID NO: 553432 - DNA, 120 bp, Artificial Sequence
  ENSG00000168701_3 (sequence is synthesized)
gccatcgtgcaggtgctcagctgcttctctctctatgtctggtccttctggcttctggctccaggccgggccctttacctcctgtgggtgaatgtgctgggcccctggttcactgcagac

SEQ ID NO: 553433 - DNA, 120 bp, Artificial Sequence
  ENSG00000168701_4 (sequence is synthesized)
agtggcaccccagcaccagagcacaatgagaaacggcagcgccgacaggagcggcggcagatgaagcggttatagccattgacattgtggccacaggccactggccctgggtggctctgt

SEQ ID NO: 553434 - DNA, 120 bp, Artificial Sequence
  ENSG00000168701_5 (sequence is synthesized)
cagggtgcacagcccctcatgcctggagcaatgagggtctagtccaggggccaaaagcagtctgaggtattgggtatacttatactctatagggtcgttgaataaatggcttagaatgtg

SEQ ID NO: 553435 - DNA, 120 bp, Artificial Sequence
  ENSG00000168701_6 (sequence is synthesized)
ccgccagcccaggtgagcggccccagggctggggcccagatagcccaagaagcacagctacttgtaacttgaaaagggtggaagggagttgcaacttgaaaagggtggaagggcccatat

SEQ ID NO: 553436 - DNA, 120 bp, Artificial Sequence
  ENSG00000168701_7 (sequence is synthesized)
tcggtctgcgccggaagtgcatgagctgccgatgtggtgcttagtgattgcggtttcggtcgctctcccgtgtttcccgggctgggtatttgcctcgcaccatggcgggcgagcaagagg

SEQ ID NO: 553437 - DNA, 120 bp, Artificial Sequence
  ENSG00000168701_8 (sequence is synthesized)
cgattgatcctagctgcgggtgctggagagatggcgtcagccctaggcagaatggactggaggatgggtggacatcccagggattttgctaggtttctgcactacggggacctggctgag

SEQ ID NO: 553438 - DNA, 120 bp, Artificial Sequence
  ENSG00000168701_9 (sequence is synthesized)
cctccttgcttctatgcccacttatagtcagttccctagtcctcagccctgcttggtgacgaggagtggtacccgaaaaagctctagaagagagctccagtcaaaaagaaatgagagatc

SEQ ID NO: 553439 - DNA, 120 bp, Artificial Sequence
  ENSG00000168701_10 (sequence is synthesized)
tgggcacagagaaagtgctaactagtaaaacacaaagaaaatgaaggcgtgagtcgtagctgaatttgagagctcttcctacctccaagtacacaaaggcttctttcctgggctgagttg

SEQ ID NO: 553440 - DNA, 120 bp, Artificial Sequence
  ENSG00000168701_11 (sequence is synthesized)
ggtgtcagaggagagtgggtatttgggattcagggagcagggccctttcttcaaccctgtaagaacaaccttgctcctcccacagcctggcctaattcttggtcagagttgagggagacc

SEQ ID NO: 553441 - DNA, 120 bp, Artificial Sequence
  ENSG00000168701_12 (sequence is synthesized)
gaccccaacctgatcctgtgattgcttgcaggccatttactgccttgtgacgttggtcttcttttactcatctgcctcattttgggcctgggtaagtatctccatcctgggaggtggatg

SEQ ID NO: 553442 - DNA, 120 bp, Artificial Sequence
  ENSG00000168701_13 (sequence is synthesized)
ggctgggggcgctcccaagaaggggcatctaaccctccccatcttttattccctgcatcttgcttcaagttaccgtttctcttgtaggctccaggccgggccctttacctcctgtgggtg

SEQ ID NO: 553443 - DNA, 120 bp, Artificial Sequence
  ENSG00000168701_14 (sequence is synthesized)
tttccagctttatttctatccacaggcaccttaaggatgtgatcctactgacagccatcgtgcaggtgctcagctgcttctctctctatgtctggtccttctggcttctggctccaggcc

SEQ ID NO: 553444 - DNA, 120 bp, Artificial Sequence
  ENSG00000168701_15 (sequence is synthesized)
ggtctgcgccggaagtgcatgagctgccgatgtggtgcttagtgattgcggtttcggtcgctctcccgtgtttcccgggctgggtatttgcctcgcaccatggcggtttctgcactacgg

SEQ ID NO: 553445 - DNA, 120 bp, Artificial Sequence
  ENSG00000168702_0 (sequence is synthesized)
aaagacagaaccccagagaaaaacgctgccaattcgttgctttattgttccctgcctggggacctcaatagccttttccattaaccttcccttcttacgcaacggttaatgactttgggg

SEQ ID NO: 553446 - DNA, 120 bp, Artificial Sequence
  ENSG00000168702_1 (sequence is synthesized)
gttgttttgctttctgtttctgctgagtcactaaattttgcctctttgtccccaggtgctgctcagcataaaagttaaaagtgcaattcaggaagtactgggattctgtgtagagccgag

SEQ ID NO: 553447 - DNA, 120 bp, Artificial Sequence
  ENSG00000168702_2 (sequence is synthesized)
gaaaccatttccctaagagaagctctgttccttggcttgtccttccttcccgggaaggaagcttccgaggaacgaagggagaagctttgttttgcctgcagaagcagccctgtgctcggc

SEQ ID NO: 553448 - DNA, 120 bp, Artificial Sequence
  ENSG00000168702_3 (sequence is synthesized)
tgagggttctcagctggctgtgaactgcggagcattgtaggcgcctggctggctcaggccaatgcagaagtctctcccttctccaaagacccaaatccccacagaaccagcttcgagtta

SEQ ID NO: 553449 - DNA, 120 bp, Artificial Sequence
  ENSG00000168702_4 (sequence is synthesized)
ctttcccttcaaggggattaaaataattgtgatttgtggcgctctccgttcgcggtggtattttcctgttgtgttaaatgcctcttattaagtaatagatgtgatttatgtgaacgacga

SEQ ID NO: 553450 - DNA, 120 bp, Artificial Sequence
  ENSG00000168702_5 (sequence is synthesized)
aggggtgtgtggtggattcggtgattaatcagtgaattcccatccgctggcatctctcactgcccctcttgcgtgatgtaagatcagacgtaccctgcattgaaaagtcaagacacacgg

SEQ ID NO: 553451 - DNA, 120 bp, Artificial Sequence
  ENSG00000168702_6 (sequence is synthesized)
gcgtctcgctcgcgctcacacacgctctgcctcctctctcccgcacgcgcgcatccctccaccttccacatcctgctccaggcaggagaaggctgactggctggactcattgagctgaag

SEQ ID NO: 553452 - DNA, 120 bp, Artificial Sequence
  ENSG00000168702_7 (sequence is synthesized)
aatttccagtgacatttgtaaatgacgccgctcgattccaggctccaagcggcccctgccgccgccgccgccgccgggccgaaggtgccgccgagcagtctccagcgcaggcttccttac

SEQ ID NO: 553453 - DNA, 120 bp, Artificial Sequence
  ENSG00000168702_8 (sequence is synthesized)
cgggcgaccacaatgtccgagtttctcctcgccttactcactctctcgggattattgccgattgccagggtgctgaccgtgggagccgaccgagatcagcagttgtgtgatcctggtgaa

SEQ ID NO: 553454 - DNA, 120 bp, Artificial Sequence
  ENSG00000168702_9 (sequence is synthesized)
tttctttgccacgatcacgtgacttgtgtctcccagagctggctgtgtgatggggaccctgactgccctgatgattcagacgagtctttagatacctgtcccgaggaggtagaaatcaag

SEQ ID NO: 553455 - DNA, 120 bp, Artificial Sequence
  ENSG00000168702_10 (sequence is synthesized)
tgccccttgaatcacattgcttgccttggtaccaacaaatgtgttcatttatcccagctgtgcaatggtgtcttggactgcccagatgggtatgacgaaggagtacattgtcaggaactg

SEQ ID NO: 553456 - DNA, 120 bp, Artificial Sequence
  ENSG00000168702_11 (sequence is synthesized)
ttatccaattgccaacagctgaattgtcagtataaatgtacaatggtcagaaatagtacaagatgttactgtgaggatggattcgaaataacagaagatgggagaagctgtaaagatcaa

SEQ ID NO: 553457 - DNA, 120 bp, Artificial Sequence
  ENSG00000168702_12 (sequence is synthesized)
gatgaatgtgctgtttatggtacatgcagccagacctgcagaaacacacatggatcctacacttgcagttgtgtggaaggctacctaatgcagccagacaacagatcttgcaaggctaaa

SEQ ID NO: 553458 - DNA, 120 bp, Artificial Sequence
  ENSG00000168702_13 (sequence is synthesized)
attgaacctacagatagaccacctatactattaattgcaaattttgaaacaattgaggttttctatcttaatggaagtaaaatggcaactctaagctcagtcaatggaaatgaaattcat

SEQ ID NO: 553459 - DNA, 120 bp, Artificial Sequence
  ENSG00000168702_14 (sequence is synthesized)
actctggattttatttataatgaagatatgatttgttggattgaatcaagagaatcttcaaatcaactcaaatgtatccagataacaaaagcaggaggattaacagatgaatggacaatc

SEQ ID NO: 553460 - DNA, 120 bp, Artificial Sequence
  ENSG00000168702_15 (sequence is synthesized)
aatattcttcaatccttccacaatgtgcaacaaatggcgattgactggctcactcgaaatctctattttgtggaccatgtcggtgaccggatctttgtttgtaattccaacggttctgta

SEQ ID NO: 553461 - DNA, 120 bp, Artificial Sequence
  ENSG00000168702_16 (sequence is synthesized)
tgtgtcaccctgattgatctggagcttcacaatcctaaagcaatagcagtagatccaatagcaggaaaacttttctttactgactacgggaatgtcgccaaagtggagagatgtgacatg

SEQ ID NO: 553462 - DNA, 120 bp, Artificial Sequence
  ENSG00000168702_17 (sequence is synthesized)
gatgggatgaaccgaacaaggataattgattcaaagacagagcagccagctgcactggcactagacctagtcaacaaattggtttactgggtagatctttacttggactatgtgggagta

SEQ ID NO: 553463 - DNA, 120 bp, Artificial Sequence
  ENSG00000168702_18 (sequence is synthesized)
gtggactatcaaggaaaaaatagacacactgtcattcaaggcagacaagttagacatctttatggtataactgtgtttgaagattatttgtatgcaaccaattctgataactacaatatc

SEQ ID NO: 553464 - DNA, 120 bp, Artificial Sequence
  ENSG00000168702_19 (sequence is synthesized)
gtaaggataaaccgatttaatgggactgatattcactcattaattaaaattgagaatgcttggggaatccgaatttatcaaaaaagaactcaaccaacagtcagaagccatgcatgtgaa

SEQ ID NO: 553465 - DNA, 120 bp, Artificial Sequence
  ENSG00000168702_20 (sequence is synthesized)
gtcgatccatatggaatgccagggggctgttcacacatctgtctactcagcagcagttacaaaactcggacttgtcgctgcaggactggcttcaacttgggaagtgatggcaggtcatgc

SEQ ID NO: 553466 - DNA, 120 bp, Artificial Sequence
  ENSG00000168702_21 (sequence is synthesized)
aaaagaccaaagaatgagttgttcctcttttatgggaaaggacgcccaggaattgttagaggaatggacttgaataccaagatagctgatgaatacatgatccccatagaaaatctggta

SEQ ID NO: 553467 - DNA, 120 bp, Artificial Sequence
  ENSG00000168702_22 (sequence is synthesized)
aaccctcgtgctttagactttcacgcagaaaccaattacatctactttgctgacaccaccagtttcctaattggccggcagaagatagatggcacagagagagaaaccatcctgaaagat

SEQ ID NO: 553468 - DNA, 120 bp, Artificial Sequence
  ENSG00000168702_23 (sequence is synthesized)
gatctggataatgtagagggcattgctgtggactggattggaaataatctttactggaccaatgatggccataggaaaaccattaatgtggccaggctggaaaaagcttctcagagtcgg

SEQ ID NO: 553469 - DNA, 120 bp, Artificial Sequence
  ENSG00000168702_24 (sequence is synthesized)
aagactcttttagagggtgaaatgtctcatcccagaggaattgtggtggatccagttaatggttggatgtattggacagactgggaggaagatgaaatagatgacagcgtgggaaggatt

SEQ ID NO: 553470 - DNA, 120 bp, Artificial Sequence
  ENSG00000168702_25 (sequence is synthesized)
gagaaggcctggatggatggattcaatcggcagatttttgtgacttcaaagatgctgtggccaaacggtttaactctggactttcacaccaacacattatactggtgtgatgcctattac

SEQ ID NO: 553471 - DNA, 120 bp, Artificial Sequence
  ENSG00000168702_26 (sequence is synthesized)
gatcatattgaaaaagtatttttgaatgggactcacaggaagattgtttacagtgggagagagttgaaccaccctttcggactgtcgcatcatggaaattatgtgttctggactgattat

SEQ ID NO: 553472 - DNA, 120 bp, Artificial Sequence
  ENSG00000168702_27 (sequence is synthesized)
atgaatggttccatttttcaactagatttgataacaagtgaggtgacattgctgaggcatgaaagaccacccctatttgggcttcagatttatgatccacgaaagcaacaaggtgacaat

SEQ ID NO: 553473 - DNA, 120 bp, Artificial Sequence
  ENSG00000168702_28 (sequence is synthesized)
atgtgccgagtaaataatgggggctgtagtacactttgcttggctatcccaggaggccgggtgtgtgcttgtgccgataatcaacttttggatgaaaatgggacaacttgcacatttaat

SEQ ID NO: 553474 - DNA, 120 bp, Artificial Sequence
  ENSG00000168702_29 (sequence is synthesized)
cctggagaagcactacctcacatatgtaaagctggagagtttcgctgcaaaaacagacactgtatccaagctcggtggaaatgtgatggcgacgatgactgcctagacggaagcgatgag

SEQ ID NO: 553475 - DNA, 120 bp, Artificial Sequence
  ENSG00000168702_30 (sequence is synthesized)
gattcagtaaactgcttcaatcatagctgtcctgatgatcagtttaaatgccagaataatcgctgcatccccaagagatggctttgtgatggagctaatgactgtgggagcaatgaagat

SEQ ID NO: 553476 - DNA, 120 bp, Artificial Sequence
  ENSG00000168702_31 (sequence is synthesized)
gaatccaatcaaacttgcacagccagaacatgccaggtagaccagttttcttgcggaaatgggcgttgcattcccagagcatggctgtgtgacagggaagacgactgtggtgaccagaca

SEQ ID NO: 553477 - DNA, 120 bp, Artificial Sequence
  ENSG00000168702_32 (sequence is synthesized)
gatgaaatggcatcttgtgaattcccaacttgtgagccactaacccaattcgtatgcaaaagtggaagatgcattagcagcaaatggcactgcgactctgatgacgactgtggggacggg

SEQ ID NO: 553478 - DNA, 120 bp, Artificial Sequence
  ENSG00000168702_33 (sequence is synthesized)
agtgatgaggtgggctgtgttcactcttgctttgataatcagttcagatgttccagtggcagatgcatcccaggccactgggcctgtgatggtgacaatgactgtggggacttcagtgat

SEQ ID NO: 553479 - DNA, 120 bp, Artificial Sequence
  ENSG00000168702_34 (sequence is synthesized)
gaagcccagatcaattgtactaaagaagagattcattctcctgctggttgtaacggaaatgaatttcagtgccaccctgatggtaattgcgttcctgatttgtggcgctgtgatggagaa

SEQ ID NO: 553480 - DNA, 120 bp, Artificial Sequence
  ENSG00000168702_35 (sequence is synthesized)
aaagactgtgaagatggtagtgatgaaaaaggttgcaatggtaccatacgattgtgtgaccacaaaaccaagttttcctgttggagtacagggagatgcatcaacaaagcatgggtgtgt

SEQ ID NO: 553481 - DNA, 120 bp, Artificial Sequence
  ENSG00000168702_36 (sequence is synthesized)
gatggagatattgattgcgaagatcagtcagatgaagatgactgtgacagtttcttgtgtggaccacccaagcatccttgtgctaatgacacctcagtctgcctgcagccagagaaactc

SEQ ID NO: 553482 - DNA, 120 bp, Artificial Sequence
  ENSG00000168702_37 (sequence is synthesized)
tgcaatgggaaaaaggattgtcctgatggctctgatgaaggctatctctgtgatgagtgttcgctgaacaatggaggctgtagcaaccactgttctgttgttcctggaagaggaattgtc

SEQ ID NO: 553483 - DNA, 120 bp, Artificial Sequence
  ENSG00000168702_38 (sequence is synthesized)
tgttcctgccctgaaggacttcaactcaacaaagacaataaaacatgtgaaattgtggattattgtagcaatcatctaaagtgcagccaagtatgtgagcagcacaagcacacagtcaag

SEQ ID NO: 553484 - DNA, 120 bp, Artificial Sequence
  ENSG00000168702_39 (sequence is synthesized)
tgctcatgttatgaaggttggaagctggatgtagacggtgaaagttgtacaagtgttgatccttttgaagcattcatcatcttttctattcgtcatgagatcagaaggattgatcttcac

SEQ ID NO: 553485 - DNA, 120 bp, Artificial Sequence
  ENSG00000168702_40 (sequence is synthesized)
aaaagagactatagtctacttgttcctggattgagaaacacaatagcacttgattttcacttcaatcaaagtttactttattggacagatgttgtagaagacagaatataccggggaaag

SEQ ID NO: 553486 - DNA, 120 bp, Artificial Sequence
  ENSG00000168702_41 (sequence is synthesized)
ctttctgaaagtggaggtgtcagtgccattgaagtggttgtggagcatggcctggctactccagaaggcctgacagtcgactggatagcaggaaacatatactggatagacagcaatctg

SEQ ID NO: 553487 - DNA, 120 bp, Artificial Sequence
  ENSG00000168702_42 (sequence is synthesized)
gaccaaatcgaagtggccaaactagatggctccctaagaactacactaatagcaggagccatggaacaccccagggccattgctttggacccaagatatggaattcttttctggacagac

SEQ ID NO: 553488 - DNA, 120 bp, Artificial Sequence
  ENSG00000168702_43 (sequence is synthesized)
tgggatgcaaattttcctcgcattgaatctgcctctatgagtggtgctgggagaaaaaccatctataaagacatgaaaactggggcttggcctaatggactaactgtggaccactttgag

SEQ ID NO: 553489 - DNA, 120 bp, Artificial Sequence
  ENSG00000168702_44 (sequence is synthesized)
aaaaggatagtgtggacagacgccaggtcagatgctatttattcagccctctatgatggaacaaacatgatagaaatcatccgaggtcatgaatacctttcccatccctttgctgtgtct

SEQ ID NO: 553490 - DNA, 120 bp, Artificial Sequence
  ENSG00000168702_45 (sequence is synthesized)
ctatatgggagtgaagtctactggacagactggaggaccaacacattgtccaaagccaataagtggacagggcagaatgtcagtgtgattcagaaaaccagtgcacagccatttgacctt

SEQ ID NO: 553491 - DNA, 120 bp, Artificial Sequence
  ENSG00000168702_46 (sequence is synthesized)
cagatataccatcccagtcgccagccacaggctcccaatccttgtgcagctaatgatggcaaaggcccctgctctcacatgtgtctaatcaatcacaataggagtgctgcctgtgcgtgc

SEQ ID NO: 553492 - DNA, 120 bp, Artificial Sequence
  ENSG00000168702_47 (sequence is synthesized)
ccccacttgatgaagctttcttcagacaagaagacctgctatgaaatgaaaaaatttcttctttatgcaagacgttctgaaatcagaggagtggatattgacaatccatactttaacttc

SEQ ID NO: 553493 - DNA, 120 bp, Artificial Sequence
  ENSG00000168702_48 (sequence is synthesized)
atcacggcatttacagtccctgatattgatgacgttactgtgatagacttcgatgcatctgaggaacgtttatactggacagatattaaaacacaaaccattaaacgagcttttattaac

SEQ ID NO: 553494 - DNA, 120 bp, Artificial Sequence
  ENSG00000168702_49 (sequence is synthesized)
ggaactgggttagaaactgttatttcaagagatattcagagtatcagagggctagcagtggattgggtgtcacgtaatttatactggattagctcagaatttgatgaaacgcaaattaat

SEQ ID NO: 553495 - DNA, 120 bp, Artificial Sequence
  ENSG00000168702_50 (sequence is synthesized)
gtggcaaggctagatggctctttgaaaacctcaattatccatggaatcgataagccacagtgtcttgcagctcacccagtcaggggaaaactctactggaccgatggaaacacaattaac

SEQ ID NO: 553496 - DNA, 120 bp, Artificial Sequence
  ENSG00000168702_51 (sequence is synthesized)
atggcaaatatggatggcagtaatagcaagattctgtttcagaatcagaaggagccagttggtctatcgatagactatgtggaaaacaagctttattggatcagttcagggaatggaacc

SEQ ID NO: 553497 - DNA, 120 bp, Artificial Sequence
  ENSG00000168702_52 (sequence is synthesized)
ataaatagatgcaacctggatggtggtaatttagaagtaatcgagtcaatgaaagaagaattaacaaaagctacagccctaaccatcatggataagaaactgtggtgggcagaccaaaac

SEQ ID NO: 553498 - DNA, 120 bp, Artificial Sequence
  ENSG00000168702_53 (sequence is synthesized)
ttagcccagctaggaacctgcagcaaaagagacggaagaaaccccaccatcctacggaataagacttctggggtagttcatatgaaagtctatgataaagaagcacagcaaggcagcaat

SEQ ID NO: 553499 - DNA, 120 bp, Artificial Sequence
  ENSG00000168702_54 (sequence is synthesized)
tcctgccaactaaacaatggtggatgctctcaactttgtttaccaacatctgaaactacaaggacttgtatgtgtacagtgggatattatctccaaaagaaccgtatgtcatgtcaaggt

SEQ ID NO: 553500 - DNA, 120 bp, Artificial Sequence
  ENSG00000168702_55 (sequence is synthesized)
atagaatcatttcttatgtactctgttcatgaaggaatcaggggaatacctcttgaaccaagtgacaaaatggatgctttgatgcctatatcaggaacttcatttgccgtgggaatagat

SEQ ID NO: 553501 - DNA, 120 bp, Artificial Sequence
  ENSG00000168702_56 (sequence is synthesized)
ttccatgcagaaaatgataccatctactggacagacatgggcttcaataaaattagcagagctaaaagagatcagacttggaaagaagatatcattaccaatggcttgggaagagtggaa

SEQ ID NO: 553502 - DNA, 120 bp, Artificial Sequence
  ENSG00000168702_57 (sequence is synthesized)
gggatagctgttgactggattgctggtaacatatattggacagatcatggtttcaacttaattgaagttgcaagactcaatggttctttccgttatgtaattatttcccaaggcctggat

SEQ ID NO: 553503 - DNA, 120 bp, Artificial Sequence
  ENSG00000168702_58 (sequence is synthesized)
caaccaagatctatagctgtgcacccagagaaaggcctcttgttctggactgaatggggacaaatgccctgtattggaaaggctcgcttggatggctcagagaaggttgtccttgtaagc

SEQ ID NO: 553504 - DNA, 120 bp, Artificial Sequence
  ENSG00000168702_59 (sequence is synthesized)
atgggaatagcatggccgaatggcatctccatcgactatgaggaaaataaattgtactggtgtgatgctcgcacagacaagatagagagaatcgaccttgagactggagggaatcgcgag

SEQ ID NO: 553505 - DNA, 120 bp, Artificial Sequence
  ENSG00000168702_60 (sequence is synthesized)
atggtgctgtcaggaagcaatgtggatatgttttcagttgcagtctttggggcttacatctactggtctgacagagcacatgcaaacgggtctgtcagaaggggccacaagaatgatgcc

SEQ ID NO: 553506 - DNA, 120 bp, Artificial Sequence
  ENSG00000168702_61 (sequence is synthesized)
acagaaacgataaccatgagaaccggccttggagtcaacctgaaggaggttaaaatatttaaccgagtaagagagaaagggaccaatgtttgtgccagggacaatggtggctgtaagcaa

SEQ ID NO: 553507 - DNA, 120 bp, Artificial Sequence
  ENSG00000168702_62 (sequence is synthesized)
ctctgtctttatcgaggaaattcccggagaacttgtgcttgtgcccatggatatttggcagaagatggagttacttgcctgaggcatgaaggctatttactgtattcaggaagaacaata

SEQ ID NO: 553508 - DNA, 120 bp, Artificial Sequence
  ENSG00000168702_63 (sequence is synthesized)
ttaaaaagtatacatctttctgatgaaaccaatttaaattccccaataaggccatatgagaatccacgttatttcaagaatgtcatagccttggcttttgactataatcaaagaagaaaa

SEQ ID NO: 553509 - DNA, 120 bp, Artificial Sequence
  ENSG00000168702_64 (sequence is synthesized)
ggtaccaaccgaatcttttacagtgatgcacactttggaaatatacagcttattaaagacaactgggaagacagacaagtaattgttgaaaatgtgggttctgtggaaggacttgcctat

SEQ ID NO: 553510 - DNA, 120 bp, Artificial Sequence
  ENSG00000168702_65 (sequence is synthesized)
cacagagcctgggatacactgtactggacaagctctaccacctcatccatcaccagacacactgtggaccagactcggcctggagcatttgacagggaagctgtcatcaccatgtcagaa

SEQ ID NO: 553511 - DNA, 120 bp, Artificial Sequence
  ENSG00000168702_66 (sequence is synthesized)
gatgaccatccacatgtgctagccttggatgaatgtcaaaatttaatgttttggaccaactggaatgaacaacatccaagtatcatgagatctactctgactgggaaaaatgctcaagtg

SEQ ID NO: 553512 - DNA, 120 bp, Artificial Sequence
  ENSG00000168702_67 (sequence is synthesized)
gtggtcagtacagacatactcactccaaatggacttactatcgactaccgtgcagagaagctgtatttctcagatggcagtctaggaaaaattgaaaggtgtgaatacgatggatcccag

SEQ ID NO: 553513 - DNA, 120 bp, Artificial Sequence
  ENSG00000168702_68 (sequence is synthesized)
actgcggtccaacaagtacacaggaggagatacaaaaattcttcgttccgatattccacatcagccaatgggaatcatagctgttgccaatgacaccaatagctgtgaactttctccatg

SEQ ID NO: 553514 - DNA, 120 bp, Artificial Sequence
  ENSG00000168702_69 (sequence is synthesized)
tgcattattgaatggaggctgccatgacttgtgccttttaactcccaatgggagagtgaattgttcctgcagaggggaccgaatattgctagaggacaacagatgtgtgactaaaaattc

SEQ ID NO: 553515 - DNA, 120 bp, Artificial Sequence
  ENSG00000168702_70 (sequence is synthesized)
ctcctgcaacgcttattcggagtttgaatgtggaaatggtgagtgcattgactaccagctcacctgtgatggcattcctcactgtaaagataaatcagatgaaaaactgctctactgtga

SEQ ID NO: 553516 - DNA, 120 bp, Artificial Sequence
  ENSG00000168702_71 (sequence is synthesized)
aaacagaagctgtcgaagaggcttcaagccatgctataatcgccgctgcattcctcatggcaagttatgtgatggagaaaatgactgcggagacaactctgatgaattagattgtaaagt

SEQ ID NO: 553517 - DNA, 120 bp, Artificial Sequence
  ENSG00000168702_72 (sequence is synthesized)
ttcaacctgtgccacggttgagttccgctgtgcagatgggacttgtattccaagatcagcacgatgcaaccagaacatagattgtgcagatgcttcagatgaaaagaactgcaataacac

SEQ ID NO: 553518 - DNA, 120 bp, Artificial Sequence
  ENSG00000168702_73 (sequence is synthesized)
agactgcacacatttctataagcttggagtgaaaaccacagggttcataagatgtaattctacctcactgtgtgttctgccaacctggatatgcgacgggtctaatgactgtggagacta

SEQ ID NO: 553519 - DNA, 120 bp, Artificial Sequence
  ENSG00000168702_74 (sequence is synthesized)
ttcagatgaattaaagtgcccagttcaaaacaaacacaaatgtgaagaaaattattttagttgtcctagtggaagatgcattttgaatacctggatatgcgatggtcagaaagattgtga

SEQ ID NO: 553520 - DNA, 120 bp, Artificial Sequence
  ENSG00000168702_75 (sequence is synthesized)
ggatggacgtgatgaattccactgtgattcttcttgctcttggaaccaatttgcttgttccgcacaaaaatgtatttctaagcattggatttgtgatggagaagatgactgtggggatgg

SEQ ID NO: 553521 - DNA, 120 bp, Artificial Sequence
  ENSG00000168702_76 (sequence is synthesized)
gttagatgaaagtgacagcatttgtggtgccataacctgtgctgctgacatgttcagctgccagggctctcgtgcctgcgtgccccgacattggctttgtgatggtgaaagggactgtcc

SEQ ID NO: 553522 - DNA, 120 bp, Artificial Sequence
  ENSG00000168702_77 (sequence is synthesized)
agatggaagcgatgagctttccacagcaggctgcgctcccaataatacatgtgatgaaaatgctttcatgtgccataataaagtatgcattcccaagcaatttgtttgtgaccatgatga

SEQ ID NO: 553523 - DNA, 120 bp, Artificial Sequence
  ENSG00000168702_78 (sequence is synthesized)
cgactgtggagatggctctgatgagtcaccgcagtgtggatatcgacagtgtggtacagaagaatttagttgtgctgatgggcggtgtcttctaaatactcaatggcagtgtgatggaga

SEQ ID NO: 553524 - DNA, 120 bp, Artificial Sequence
  ENSG00000168702_79 (sequence is synthesized)
ctttgactgtcctgaccattctgatgaagcacctttaaacccaaagtgtaaaagtgcagaacagtcatgcaacagttcattttttatgtgcaaaaatggcaggtgcattcccagtggagg

SEQ ID NO: 553525 - DNA, 120 bp, Artificial Sequence
  ENSG00000168702_80 (sequence is synthesized)
tctttgcgacaataaggatgactgtggcgatggttcagatgagagaaactgccatataaatgaatgtttgagtaagaaagtcagtggatgttctcaagactgtcaagaccttccggtcag

SEQ ID NO: 553526 - DNA, 120 bp, Artificial Sequence
  ENSG00000168702_81 (sequence is synthesized)
ttataagtgcaaatgctggcctggattccaactgaaggatgacggcaaaacatgtgtagacattgatgaatgctcttcaggctttccctgtagccagcaatgcatcaatacatacgggac

SEQ ID NO: 553527 - DNA, 120 bp, Artificial Sequence
  ENSG00000168702_82 (sequence is synthesized)
ttacaagtgcctctgtacagatgggtatgaaatacaacctgataacccaaatggctgcaaatcgctctcagatgaagaaccttttttaattcttgctgatcatcatgagataaggaaaat

SEQ ID NO: 553528 - DNA, 120 bp, Artificial Sequence
  ENSG00000168702_83 (sequence is synthesized)
tagcactgatggctccaactacacacttttaaaacagggattaaacaatgttattgctatagactttgattacagagaagaattcatctattggatcgattctagccgacccaatggcag

SEQ ID NO: 553529 - DNA, 120 bp, Artificial Sequence
  ENSG00000168702_84 (sequence is synthesized)
tcgcataaatagaatgtgtttaaatggaagtgacattaaggtagttcataacacagcggtccccaatgcacttgctgtcgattggattggaaaaaacctctattggtctgacacagaaaa

SEQ ID NO: 553530 - DNA, 120 bp, Artificial Sequence
  ENSG00000168702_85 (sequence is synthesized)
aagaatcattgaagtatccaaactcaatggcttgtaccctactatactcgttagcaaaaggctgaagtttcccagagacttgtctttagatcctcaagctggatatttgtattggattga

SEQ ID NO: 553531 - DNA, 120 bp, Artificial Sequence
  ENSG00000168702_86 (sequence is synthesized)
ctgctgcgagtatcctcatattggccgtgttggaatggatggaaccaatcagagtgttgtcatagaaaccaagatttctagacctatggcactaacaatagattatgttaatcgtagact

SEQ ID NO: 553532 - DNA, 120 bp, Artificial Sequence
  ENSG00000168702_87 (sequence is synthesized)
ctactgggccgatgaaaatcacattgaatttagcaacatggatggatctcatagacacaaagtccctaatcaagatattccaggggtgattgcactaacattgtttgaagactacatcta

SEQ ID NO: 553533 - DNA, 120 bp, Artificial Sequence
  ENSG00000168702_88 (sequence is synthesized)
ctggactgatgggaaaaccaagtcactcagccgtgcccataaaacatcgggagcagacagactctcactgatttactcatggcatgccatcacagatatccaggtgtatcattcttatag

SEQ ID NO: 553534 - DNA, 120 bp, Artificial Sequence
  ENSG00000168702_89 (sequence is synthesized)
acaacctgatgtctccaaacatctctgcatgataaataatggtggttgcagtcatttgtgccttttagcccctggaaaaacccacacttgtgcatgtcccactaacttctatctggcagc

SEQ ID NO: 553535 - DNA, 120 bp, Artificial Sequence
  ENSG00000168702_90 (sequence is synthesized)
tgataataggacttgcttatccaactgcacagccagccagtttcgttgcaaaactgacaaatgtattccattctggtggaaatgtgacaccgtggatgactgtggtgatggatctgatga

SEQ ID NO: 553536 - DNA, 120 bp, Artificial Sequence
  ENSG00000168702_91 (sequence is synthesized)
acctgatgactgtcctgaatttagatgtcagccaggccgatttcagtgtgggactggactctgtgctctaccagctttcatctgtgatggagagaatgattgtggagacaattctgatga

SEQ ID NO: 553537 - DNA, 120 bp, Artificial Sequence
  ENSG00000168702_92 (sequence is synthesized)
actcaactgtgacacacatgtctgcctgtcaggtcaattcaaatgtaccaagaaccagaaatgtatcccagtaaacttaagatgtaatgggcaagatgactgtggtgatgaggaagatga

SEQ ID NO: 553538 - DNA, 120 bp, Artificial Sequence
  ENSG00000168702_93 (sequence is synthesized)
aagagactgtcctgaaaacagctgttctccagactatttccagtgtaagactacgaagcattgcatttccaagctgtgggtttgtgacgaggatccagactgtgcagatgcatcagacga

SEQ ID NO: 553539 - DNA, 120 bp, Artificial Sequence
  ENSG00000168702_94 (sequence is synthesized)
ggccaactgcgataaaaagacttgtggacctcatgaattccagtgtaaaaacaacaactgtattcccgatcactggcggtgtgatagccaaaatgactgcagtgataattcagatgaaga

SEQ ID NO: 553540 - DNA, 120 bp, Artificial Sequence
  ENSG00000168702_95 (sequence is synthesized)
aaactgtaagccacagacatgtacattgaaagatttcctctgtgccaatggggactgtgtttcttcaaggttttggtgtgatggagattttgactgtgcagatggctctgatgagagaaa

SEQ ID NO: 553541 - DNA, 120 bp, Artificial Sequence
  ENSG00000168702_96 (sequence is synthesized)
ttgtgagacaagttgttccaaagatcagttccggtgttccaatggtcagtgtataccagcaaaatggaaatgtgatggccatgaagactgcaaatatggggaagatgagaaaagctgtga

SEQ ID NO: 553542 - DNA, 120 bp, Artificial Sequence
  ENSG00000168702_97 (sequence is synthesized)
gccagcttctcctacttgctcatcacgtgaatatatatgtgccagtgatggatgtatttcagcatctttgaaatgtaatggagaatatgattgtgctgatggttcagatgagatggactg

SEQ ID NO: 553543 - DNA, 120 bp, Artificial Sequence
  ENSG00000168702_98 (sequence is synthesized)
tgtgactgaatgtaaggaagatcagtttcggtgcaaaaataaagcccactgtattccaattagatggctgtgtgatggaattcatgactgtgtggatggcagtgatgaagagaactgtga

SEQ ID NO: 553544 - DNA, 120 bp, Artificial Sequence
  ENSG00000168702_99 (sequence is synthesized)
aagaggaggaaatatatgtagagctgatgagttcctttgcaataattctctctgcaaactacatttctgggtgtgtgatggagaggacgactgtggagacaactctgatgaagcccctga

SEQ ID NO: 553545 - DNA, 120 bp, Artificial Sequence
  ENSG00000168702_100 (sequence is synthesized)
tatgtgtgtcaaatttctttgtccatccacgagacctcacagatgcagaaataacagaatatgcctacagtcggagcaaatgtgcaatgggattgatgaatgcggtgacaattcagatga

SEQ ID NO: 553546 - DNA, 120 bp, Artificial Sequence
  ENSG00000168702_101 (sequence is synthesized)
agatcactgtggtggtaagctgacatataaagcaaggccttgtaaaaaggatgagtttgcttgtagtaataaaaaatgcatccctatggatctccagtgtgatcgacttgatgactgcgg

SEQ ID NO: 553547 - DNA, 120 bp, Artificial Sequence
  ENSG00000168702_102 (sequence is synthesized)
agatggttcagatgagcaaggatgcagaatagctcctactgaatatacctgtgaagataatgtgaatccatgtggagatgatgcatattgtaatcaaataaaaacatctgttttctgtcg

SEQ ID NO: 553548 - DNA, 120 bp, Artificial Sequence
  ENSG00000168702_103 (sequence is synthesized)
ctgtaagcctggatttcagagaaacatgaaaaacagacaatgtgaagaccttaatgaatgtttggtgtttggcacatgttcccatcaatgtataaatgtggaaggatcatataaatgtgt

SEQ ID NO: 553549 - DNA, 120 bp, Artificial Sequence
  ENSG00000168702_104 (sequence is synthesized)
gtgtgaccagaattttcaagaaagaaataacacctgcatagcagaaggctctgaagatcaagttctctacattgctaatgacactgatatcctgggttttatatatccattcaactacag

SEQ ID NO: 553550 - DNA, 120 bp, Artificial Sequence
  ENSG00000168702_105 (sequence is synthesized)
tggcgatcatcaacaaatttctcatattgaacataattcaagaataacagggatggatgtatattatcaaagagatatgattatttggagtactcagtttaatccaggcggaattttcta

SEQ ID NO: 553551 - DNA, 120 bp, Artificial Sequence
  ENSG00000168702_106 (sequence is synthesized)
caaaaggatccatggcagagaaaaaaggcaagcaaacagtggcttgatttgtcctgaatttaaaaggcccagggacattgcagttgactgggtggctggaaacatttactggactgatca

SEQ ID NO: 553552 - DNA, 120 bp, Artificial Sequence
  ENSG00000168702_107 (sequence is synthesized)
ttctagaatgcattggttcagttactacactactcactggaccagtctgaggtactctatcaacgtagggcagctgaatggccccaactgcaccagactcttaacaaatatggctggaga

SEQ ID NO: 553553 - DNA, 120 bp, Artificial Sequence
  ENSG00000168702_108 (sequence is synthesized)
accctatgctattgcagtaaatcctaaaagagggatgatgtactggactgttgttggggatcattcccatatagaagaagcagccatggatggtacactgagaaggattttagtacaaaa

SEQ ID NO: 553554 - DNA, 120 bp, Artificial Sequence
  ENSG00000168702_109 (sequence is synthesized)
gaacttacagagacccacaggtttggctgtggattattttagtgaacgcatatattgggctgactttgagctctccatcattggcagtgttctgtatgatggctctaattcagtagtctc

SEQ ID NO: 553555 - DNA, 120 bp, Artificial Sequence
  ENSG00000168702_110 (sequence is synthesized)
tgtcagcagcaaacaaggtttattacatccacataggatcgatatctttgaagattatatatatggagcaggacctaaaaatggtgtatttcgagttcaaaaatttggccatggttcagt

SEQ ID NO: 553556 - DNA, 120 bp, Artificial Sequence
  ENSG00000168702_111 (sequence is synthesized)
agagtacttagctttaaatattgataaaacaaaaggtgttttgatatctcatcgttataaacaactagatttacccaatccatgcttggatttagcatgcgaatttctttgcttgctaaa

SEQ ID NO: 553557 - DNA, 120 bp, Artificial Sequence
  ENSG00000168702_112 (sequence is synthesized)
tccttctggggccacttgtgtgtgtccagaaggaaaatatttgattaatggcacctgcaatgatgacagcctgttagatgattcatgtaagttaacttgtgaaaatggaggaagatgcat

SEQ ID NO: 553558 - DNA, 120 bp, Artificial Sequence
  ENSG00000168702_113 (sequence is synthesized)
tttaaatgagaaaggtgatttgaggtgtcactgttggcccagttattcaggagaaagatgtgaagtcaaccactgtagcaactactgccagaatggaggaacttgcgtaccatcagttct

SEQ ID NO: 553559 - DNA, 120 bp, Artificial Sequence
  ENSG00000168702_114 (sequence is synthesized)
agggagacccacctgcagctgtgcactgggtttcactgggccaaactgtggtaagacagtctgtgaggatttttgtcaaaatggaggaacctgcattgtgactgctggaaaccagcctta

SEQ ID NO: 553560 - DNA, 120 bp, Artificial Sequence
  ENSG00000168702_115 (sequence is synthesized)
ctgccactgccagccggaatacaccggagacagatgtcagtactacgtgtgccaccactattgtgtgaattctgaatcatgtaccattggggatgatggaagtgttgaatgtgtctgtcc

SEQ ID NO: 553561 - DNA, 120 bp, Artificial Sequence
  ENSG00000168702_116 (sequence is synthesized)
aacgcgctatgaaggaccaaaatgtgaggttgacaagtgtgtaaggtgccatggggggcactgcattataaataaagacagtgaagatatattttgcaactgcactaatggaaagattgc

SEQ ID NO: 553562 - DNA, 120 bp, Artificial Sequence
  ENSG00000168702_117 (sequence is synthesized)
ctctagctgtcagttatgtgatggctactgttacaatggtggcacatgccagctggaccccgagacaaatgtacctgtgtgtctatgctccaccaactggtcaggcacacagtgtgaaag

SEQ ID NO: 553563 - DNA, 120 bp, Artificial Sequence
  ENSG00000168702_118 (sequence is synthesized)
gccagccccaaagagcagcaagtctgatcatatcagcacaagaagcattgccatcattgtgcctctcgtcctcttggtgactttgataaccaccttagtaattggtttagtgctttgtaa

SEQ ID NO: 553564 - DNA, 120 bp, Artificial Sequence
  ENSG00000168702_119 (sequence is synthesized)
aagaaaaagaaggacaaaaacaattagaagacaacctattatcaatggaggaataaatgtagaaattggcaatccatcttataacatgtatgaggtagatcatgatcacaacgatggagg

SEQ ID NO: 553565 - DNA, 120 bp, Artificial Sequence
  ENSG00000168702_120 (sequence is synthesized)
tcttttagatcctggctttatgatagacccaacaaaggccaggtacatagggggaggacccagtgctttcaagcttccacacacagcgccgcccatctacctaaactctgatttgaaagg

SEQ ID NO: 553566 - DNA, 120 bp, Artificial Sequence
  ENSG00000168702_121 (sequence is synthesized)
accactaactgctgggccaacaaattactccaatccggtatatgcaaaattatatatggatgggcaaaactgtcgaaactccttaggaagtgttgatgaaaggaaagaactgcttccaaa

SEQ ID NO: 553567 - DNA, 120 bp, Artificial Sequence
  ENSG00000168702_122 (sequence is synthesized)
gaaaatagaaattggtataagagagacagtggcataatcagtgatatcttttatatgctgtataaatgtataaaatataaggattacttttgtatgttccaacagtattatacttgtttt

SEQ ID NO: 553568 - DNA, 120 bp, Artificial Sequence
  ENSG00000168702_123 (sequence is synthesized)
ggcatcagcattacctctttctttatctttttcctggttaattgttttctgagttttttgggttttattttttgctgatgactattgattgaccatttgtatggtatttttatgaaaaag

SEQ ID NO: 553569 - DNA, 120 bp, Artificial Sequence
  ENSG00000168702_124 (sequence is synthesized)
aactgcactacagtacaatttacaacaatgctgctgatatgacacacctttgaatttgttaaaattaaaaacaacgtattcctttgtagtgtgaatatgagcaatctattttatatgaac

SEQ ID NO: 553570 - DNA, 120 bp, Artificial Sequence
  ENSG00000168702_125 (sequence is synthesized)
ttttttggttgtacttaatcaacgaggagaatctctgcacttttccattatacggtttgaaggctgtaatacagtgtcatattatttttctgtttaaattgatggaaaaatgattgaatg

SEQ ID NO: 553571 - DNA, 120 bp, Artificial Sequence
  ENSG00000168702_126 (sequence is synthesized)
gtcaactctcttctttgtgcccataaagatcgattcagactctgctgaaaatatatagctctcacaagttcagcatcacctgctttgaaattagccttagattgccaaccaatagatgag

SEQ ID NO: 553572 - DNA, 120 bp, Artificial Sequence
  ENSG00000168702_127 (sequence is synthesized)
aattttgaggaaaaaaattaaaaatatgtaaaattaataatttgcatgaacacagatgactacattttccaaaacttagtggactctatgtgatgtactaaatgtatacaccttgtaagc

SEQ ID NO: 553573 - DNA, 120 bp, Artificial Sequence
  ENSG00000168702_128 (sequence is synthesized)
aatagttatatttaggtggtagaacatagcaaaaatataaccgaaagttggccgactgcacttgctatggaataagaccttttattctccctcagtctcgagataaatagccagcctaga

SEQ ID NO: 553574 - DNA, 120 bp, Artificial Sequence
  ENSG00000168702_129 (sequence is synthesized)
gcacaacagggcattgggtacttgcatcttaggtatttcttcccagtcacatccattttgtggaagattaacccaaccccttacactacactgaacactaaagaataatatataagcaca

SEQ ID NO: 553575 - DNA, 120 bp, Artificial Sequence
  ENSG00000168702_130 (sequence is synthesized)
caaattggtgacagaatttcaattacgtgaacgcatcctctttgctaggtcaaaaaacaaagggcaaagcagacattttagtatacagagtgattggcaaatattttcaagatttaatat

SEQ ID NO: 553576 - DNA, 120 bp, Artificial Sequence
  ENSG00000168702_131 (sequence is synthesized)
gagcaacccattatttgccctatccaaaatatattcaagggccttccaagttgtagaagaacaatgatcttcccataatcaaaagtggagagtcgaaatgctgtgccagttgctctggta

SEQ ID NO: 553577 - DNA, 120 bp, Artificial Sequence
  ENSG00000168702_132 (sequence is synthesized)
ttcaggtttctctgggttttacagaacgcatggaccccattcacgtttggtttgtttatcttcaaatttgagttgaaacgagtgcgatttatttaagttgtatataaaaataaaaggata

SEQ ID NO: 553578 - DNA, 120 bp, Artificial Sequence
  ENSG00000168702_133 (sequence is synthesized)
gcatttttatacaaatatctttaaaggcacaaaagatttattcacaagttttggagggctttttgttcctctgatagacatgactgacttttagctgtcataatgtattaacctaacaga

SEQ ID NO: 553579 - DNA, 120 bp, Artificial Sequence
  ENSG00000168702_134 (sequence is synthesized)
tgaaatatgttaaatatgtggttgctctttatccctttgtacaagcattaaaaaaactgctgttttataagaagactttttgttgtactatgtgcatgcatactacctatttctaaactt

SEQ ID NO: 553580 - DNA, 120 bp, Artificial Sequence
  ENSG00000168702_135 (sequence is synthesized)
tgccatattgaggcctttataaactattgatttatgtaatactagtgcaattttgcttgaacaatgttatgcatatcataaactttttcaggttcttgtttaagtacattttttaaattg

SEQ ID NO: 553581 - DNA, 120 bp, Artificial Sequence
  ENSG00000168702_136 (sequence is synthesized)
attgaacagtatttttcattttggttataatatagtcattttgcctatgtttctacaatgaagtgttaaatactttataaaaaattgttgactgacttatttaaatgaaattctacatat

SEQ ID NO: 553582 - DNA, 120 bp, Artificial Sequence
  ENSG00000168702_137 (sequence is synthesized)
ccttttgttttgaaaacctttaaaagggaggaagaaaacaaaatctctcagcttacagtctgtacggtaataggccacaggtcagatttggccagcaggctatataatttgccaaatctt

SEQ ID NO: 553583 - DNA, 120 bp, Artificial Sequence
  ENSG00000168702_138 (sequence is synthesized)
acagttgaggcaggtctgtgctcaggcactgctgctccatggaacagcataacctcacacaatgaatgcacgaagcacagagttttgtttgcatctaccagtcatggtgccagactgatg

SEQ ID NO: 553584 - DNA, 120 bp, Artificial Sequence
  ENSG00000168702_139 (sequence is synthesized)
caatatggtgtagtctacatatgctgggttttgtttccttctattttttcatacttccttattggttaggattgcatttgactgcatgttatagaaacagtgacttaactgaataggggt

SEQ ID NO: 553585 - DNA, 120 bp, Artificial Sequence
  ENSG00000168703_0 (sequence is synthesized)
aagcacctgcctggcaacatggggtccagcagcttcttggtcctcatggtgtctctcgttcttgtgaccctggtggctgtggaaggagttaaagagggtatagagaaagcaggggtttgc

SEQ ID NO: 553586 - DNA, 120 bp, Artificial Sequence
  ENSG00000168703_1 (sequence is synthesized)
ccagctgacaacgtacgctgcttcaagtccgatcctccccagtgtcacacagaccaggactgtctgggggaaaggaagtgttgttacctgcactgtggcttcaagtgtgtgattcctgtg

SEQ ID NO: 553587 - DNA, 120 bp, Artificial Sequence
  ENSG00000168703_2 (sequence is synthesized)
aaggaactggaagaaggaggaaacaaggatgaagatgtgtcaaggccataccctgagccaggatgggaggccaagtgtccaggctcctcctctaccaggtgtcctcagaaatgatgctgg

SEQ ID NO: 553588 - DNA, 120 bp, Artificial Sequence
  ENSG00000168703_3 (sequence is synthesized)
agacttggaatatggaagaagcaatacccaaccccaccaaagaaaacctgagcttgaagtccttttccccaaaaagagggaagagtcacaaaaagtccagaccccagggacggtactttc

SEQ ID NO: 553589 - DNA, 120 bp, Artificial Sequence
  ENSG00000168703_4 (sequence is synthesized)
cctctctacctggtgctcctccctaatgctcatgaatggacccctcatgaatgaaaccagtgcccttataagagaccccaaagagctgccttgcccttctgcaatgtgtgatcacagcta

SEQ ID NO: 553590 - DNA, 81 bp, Artificial Sequence
  ENSG00000168703_5 (sequence is synthesized)
aagagctgccttgcccttctgcaatgtgtgatcacagctagaaggcactgtcagagaagagaaactggtcctcaccagatg

SEQ ID NO: 553591 - DNA, 120 bp, Artificial Sequence
  ENSG00000168710_0 (sequence is synthesized)
gctttgcgtgcgtgtttgcgtacagcggaggtggcggcgcgggcaggtcggagctcggagctgctgttctggttctcttgtggccgccgtcgctgtccggctgccttgggctgccgaaca

SEQ ID NO: 553592 - DNA, 120 bp, Artificial Sequence
  ENSG00000168710_1 (sequence is synthesized)
gacaaggcgtgggccacagcacctcagaagccgacgcagctcgacgcaggggccggcaggagggtgggcgatcgcgtgtcggagggcgccgcgcgggcaggcgggcgggcgccagagggg

SEQ ID NO: 553593 - DNA, 120 bp, Artificial Sequence
  ENSG00000168710_2 (sequence is synthesized)
gaaagaggcgggggcggcgggtcagccgctggccgggccggccggggaatgtcgatgcctgacgcgatgccgctgcccggggtcggggaggagctgaagcaggccaaggagatcgaggac

SEQ ID NO: 553594 - DNA, 120 bp, Artificial Sequence
  ENSG00000168710_3 (sequence is synthesized)
gccgagaagtactccttcatggccaccgtcaccaaggcgcccaagaagcaaatccagtttgctgatgacatgcaggagttcaccaaattccccaccaaaactggccgaagatctttgtct

SEQ ID NO: 553595 - DNA, 120 bp, Artificial Sequence
  ENSG00000168710_4 (sequence is synthesized)
cgctcgatctcacagtcctccactgacagctacagttcagctgcatcctacacagatagctctgatgatgaggtttctccccgagagaagcagcaaaccaactccaagggcagcagcaat

SEQ ID NO: 553596 - DNA, 120 bp, Artificial Sequence
  ENSG00000168710_5 (sequence is synthesized)
ttctgtgtgaagaacatcaagcaggcagaatttggacgccgggagattgagattgcagagcaagacatgtctgctctgatttcactcaggaaacgtgctcagggggagaagcccttggct

SEQ ID NO: 553597 - DNA, 120 bp, Artificial Sequence
  ENSG00000168710_6 (sequence is synthesized)
ggtgctaaaatagtgggctgtacacacatcacagcccagacagcggtgttgattgagacactctgtgccctgggggctcagtgccgctggtctgcttgtaacatctactcaactcagaat

SEQ ID NO: 553598 - DNA, 120 bp, Artificial Sequence
  ENSG00000168710_7 (sequence is synthesized)
gaagtagctgcagcactggctgaggctggagttgcagtgttcgcttggaagggcgagtcagaagatgacttctggtggtgtattgaccgctgtgtgaacatggatgggtggcaggccaac

SEQ ID NO: 553599 - DNA, 120 bp, Artificial Sequence
  ENSG00000168710_8 (sequence is synthesized)
atgatcctggatgatgggggagacttaacccactgggtttataagaagtatccaaacgtgtttaagaagatccgaggcattgtggaagagagcgtgactggtgttcacaggctgtatcag

SEQ ID NO: 553600 - DNA, 120 bp, Artificial Sequence
  ENSG00000168710_9 (sequence is synthesized)
ctctccaaagctgggaagctctgtgttccggccatgaacgtcaatgattctgttaccaaacagaagtttgataacttgtactgctgccgagaatccattttggatggcctgaagaggacc

SEQ ID NO: 553601 - DNA, 120 bp, Artificial Sequence
  ENSG00000168710_10 (sequence is synthesized)
acagatgtgatgtttggtgggaaacaagtggtggtgtgtggctatggtgaggtaggcaagggctgctgtgctgctctcaaagctcttggagcaattgtctacattaccgaaatcgacccc

SEQ ID NO: 553602 - DNA, 120 bp, Artificial Sequence
  ENSG00000168710_11 (sequence is synthesized)
atctgtgctctgcaggcctgcatggatgggttcagggtggtaaagctaaatgaagtcatccggcaagtcgatgtcgtaataacttgcacaggaaataagaatgtagtgacacgggagcac

SEQ ID NO: 553603 - DNA, 120 bp, Artificial Sequence
  ENSG00000168710_12 (sequence is synthesized)
ttggatcgcatgaaaaacagttgtatcgtatgcaatatgggccactccaacacagaaatcgatgtgaccagcctccgcactccggagctgacgtgggagcgagtacgttctcaggtggac

SEQ ID NO: 553604 - DNA, 120 bp, Artificial Sequence
  ENSG00000168710_13 (sequence is synthesized)
catgtcatctggccagatggcaaacgagttgtcctcctggcagagggtcgtctactcaatttgagctgctccacagttcccacctttgttctgtccatcacagccacaacacaggctttg

SEQ ID NO: 553605 - DNA, 120 bp, Artificial Sequence
  ENSG00000168710_14 (sequence is synthesized)
gcactgatagaactctataatgcacccgaggggcgatacaagcaggatgtgtacttgcttcctaagaaaatggatgaatacgttgccagcttgcatctgccatcatttgatgcccacctt

SEQ ID NO: 553606 - DNA, 120 bp, Artificial Sequence
  ENSG00000168710_15 (sequence is synthesized)
acagagctgacagatgaccaagcaaaatatctgggactcaacaaaaatgggccattcaaacctaattattacagatactaatggaccatactaccaaggaccagtccacctgaaccacac

SEQ ID NO: 553607 - DNA, 120 bp, Artificial Sequence
  ENSG00000168710_16 (sequence is synthesized)
aagttctgcagaccacacaggaacttgcttcatggctctttagatgaaatagaagttcagggttcctcactctagtcactaaagaaggattttactctcccagcccagaaaggtgattct

SEQ ID NO: 553608 - DNA, 120 bp, Artificial Sequence
  ENSG00000168710_17 (sequence is synthesized)
ttctttaccatttctggggactttagtcttaattaggtaccttattaacaggaaatgctaaggtaccttctctgtggaacaatctgcaatgtctaaatcgccttaaaagagcccatttct

SEQ ID NO: 553609 - DNA, 120 bp, Artificial Sequence
  ENSG00000168710_18 (sequence is synthesized)
tagctgctgaaatcagtgctctttcacttcttcagagaagcagggatggtacctacccggcaggtaggttagatgtgggtggtgcatgttaatttcccttagaagttccaagccctgttt

SEQ ID NO: 553610 - DNA, 120 bp, Artificial Sequence
  ENSG00000168710_19 (sequence is synthesized)
cctgcgtaaaggtggtatgtccagttcagagatgtgtataatgagcatggcttgttaagatcaggaggcccacttggatttatagtatagcccttcctccactcccaccagacttgctca

SEQ ID NO: 553611 - DNA, 120 bp, Artificial Sequence
  ENSG00000168710_20 (sequence is synthesized)
actcccaccagacttgctcatttttcgagtttttaactagactacactctattgagtttaattttgtcctctaggatttatttctgttgtccaaaaaaaaaaaaaaagaaaagaaaaatt

SEQ ID NO: 553612 - DNA, 120 bp, Artificial Sequence
  ENSG00000168710_21 (sequence is synthesized)
atgctgaggaattgcttgagtggttagttgttaccaatttctcttttgaacctttggagctaaggatgctgagtctagagaaatgctagtctcaagccctgttaagtccctctgtttcta

SEQ ID NO: 553613 - DNA, 120 bp, Artificial Sequence
  ENSG00000168710_22 (sequence is synthesized)
gcccgtagttcatagcatcagtgaactggagccacaacagcaaattctatcagctgtgtaccatacagcttgtgctgaaggcgaatttcttgagccattactcagtataaagcactgagt

SEQ ID NO: 553614 - DNA, 120 bp, Artificial Sequence
  ENSG00000168710_23 (sequence is synthesized)
tctatctttaggatttatctttaagagcaaatttctggtcagctgtgcttctgcaacctaaaatatttaaagggaggtaggtgtgggcaggaggaggaatgataaattgggccagggcaa

SEQ ID NO: 553615 - DNA, 120 bp, Artificial Sequence
  ENSG00000168710_24 (sequence is synthesized)
gaaaaatctagcttcatataatttgtctgggactatacaccctatataatgttagttttacagaagtaatatgacttttgattgctacataccacaaagagtttatgaactgagatcata

SEQ ID NO: 553616 - DNA, 120 bp, Artificial Sequence
  ENSG00000168710_25 (sequence is synthesized)
aagggcaactgatgtgtgaagaaagtagtcagtacatcctggctcatgctctgaaagaatatccagagaggctctctcaaagatcagggagatgtattcccatgccatgcaccctgcttc

SEQ ID NO: 553617 - DNA, 120 bp, Artificial Sequence
  ENSG00000168710_26 (sequence is synthesized)
ccagcatttctgcatggtcaagtgagctttatgctcatgagctttaagtatataattatccaggattttaaatcctcaacttgttctagcttgtgatccctcaaagttgggtcatacgtt

SEQ ID NO: 553618 - DNA, 120 bp, Artificial Sequence
  ENSG00000168710_27 (sequence is synthesized)
agtgctagatactagaaattttcacttttccactgatcagagagacagacattaaaaacaaaaatagaagaaaggaaagctttcaccctgcagcttcttagcagggaacaattgtcttgc

SEQ ID NO: 553619 - DNA, 120 bp, Artificial Sequence
  ENSG00000168710_28 (sequence is synthesized)
caaaacttttttcccttttctctcccattttcttttacccaatcccttcttactccttgccagtgtgaccatgctttcttctctgtagatgttaacagttaaggcctattttcctcgggc

SEQ ID NO: 553620 - DNA, 120 bp, Artificial Sequence
  ENSG00000168710_29 (sequence is synthesized)
acttaaccaaccaatcagaacaccacatctgttaggggaggtaacctggccaacagtgtatccatcacgttagccctgctggagggaagggacccacattcacctgccctctgacctgcc

SEQ ID NO: 553621 - DNA, 120 bp, Artificial Sequence
  ENSG00000168710_30 (sequence is synthesized)
ccttgatcccatatctattaccgtgtccataggaataataggtaagggctctgtctctgtcaagccatgtaacaaaggacactgttaaaaaaaaaaaaaagtctggcatcagagggagca

SEQ ID NO: 553622 - DNA, 120 bp, Artificial Sequence
  ENSG00000168710_31 (sequence is synthesized)
tgtggagagcaacttgggaagaacaagttcattttgtattgaatgatttttaatgaatgcaatattaatccttgcagatgagcaataatcattaaaatcgattaaaatgataagacctta

SEQ ID NO: 553623 - DNA, 120 bp, Artificial Sequence
  ENSG00000168710_32 (sequence is synthesized)
gcttctgactgtggaattggattctagctgtgtgtgtgttatatcctgttactgttgagacacagaggcgggagtcggcgggggaagatatgtgctgagattagtcagcctgccctccct

SEQ ID NO: 553624 - DNA, 120 bp, Artificial Sequence
  ENSG00000168710_33 (sequence is synthesized)
ctcccccaagaaactcaggccccatctggggagagtgagaacttaagaaacttgagacagggaaggagagccgggagcagccaaaacctgctaagtctcagaagactggtttctgcacaa

SEQ ID NO: 553625 - DNA, 120 bp, Artificial Sequence
  ENSG00000168710_34 (sequence is synthesized)
gggaatggaagaagtgactggaggtggctgtggattcaactctggcctgagattgattcccttgagataagttgttttctgcaaatccagtttgctgatgacatgcaggagttcaccaaa

SEQ ID NO: 553626 - DNA, 120 bp, Artificial Sequence
  ENSG00000168710_35 (sequence is synthesized)
gccgagaagtactccttcatggccaccgtcaccaaggcgcccaagaaggtgcgggggctctgggtggcggcgggggctcgggctccggcctcgcggaagggacgcgagcaagcccgggct

SEQ ID NO: 553627 - DNA, 120 bp, Artificial Sequence
  ENSG00000168710_36 (sequence is synthesized)
ctggctagtttgggacttctgggggtgactggggacggcggaggtgatgtagggggtggcggctgtgcggccccaggcctctcccgggctgaaaggccgcctctgacctcgctttccttt

SEQ ID NO: 553628 - DNA, 120 bp, Artificial Sequence
  ENSG00000168710_37 (sequence is synthesized)
gtccctcggcccaagtcctccgggatcgttttgaaacccgacagggccaggccttaaatttgcgactgacttttcctggatgaagggcctcgaagacgagagtgggagggggtgaaccaa

SEQ ID NO: 553629 - DNA, 120 bp, Artificial Sequence
  ENSG00000168710_38 (sequence is synthesized)
gtcctcctggcagaggtacacacagagaaggaccctggcagagcagcacaagcagagtagttagatctatgaggggggaggggagggaaacaaatattaggcctatgtttccctgaattt

SEQ ID NO: 553630 - DNA, 120 bp, Artificial Sequence
  ENSG00000168710_39 (sequence is synthesized)
acagctgattctttaacctttcagactcagatggatttgcagaaaataggaaaaagcctagagtcctgatctggaactgtaattcttcctcttccaactgagtctagaggggtgtaaagt

SEQ ID NO: 553631 - DNA, 120 bp, Artificial Sequence
  ENSG00000168710_40 (sequence is synthesized)
cctctcccgctttggcttgacttgtatgccattggaatctgagacagagctcatcccagggctctctcttacctttccagggtcgtctactcaatttgagctgctccacagttcccacct

SEQ ID NO: 553632 - DNA, 80 bp, Artificial Sequence
  ENSG00000168724_0 (sequence is synthesized)
ccgcttgccgcagcctgcgtcgtctgccgccaccgcgcgccttcactgacctacaccaccgccgccgccgccgccgccgc

SEQ ID NO: 553633 - DNA, 80 bp, Artificial Sequence
  ENSG00000168724_1 (sequence is synthesized)
cttcactgacctacaccaccgccgccgccgccgccgccgccgggctcgctggctggcccggtgcgggcggcggactcccg

SEQ ID NO: 553634 - DNA, 120 bp, Artificial Sequence
  ENSG00000168724_2 (sequence is synthesized)
ggccgcccgcccggtcgggcgatgaagtgtcactatgaggcgctgggggtgcggcgcgacgccagcgaggaggagctcaagaaggcctatcggaagctggccctgaaatggcacccggat

SEQ ID NO: 553635 - DNA, 120 bp, Artificial Sequence
  ENSG00000168724_3 (sequence is synthesized)
aaaaatctggataatgccgcagaagcagctgaacaatttaaattaatccaagcagcatatgatgtgttgagtgaccctcaggaaagagcatggtatgataatcatagagaggccctactt

SEQ ID NO: 553636 - DNA, 120 bp, Artificial Sequence
  ENSG00000168724_4 (sequence is synthesized)
aaaggtgggtttgatggcgaatatcaagatgacagcttagatttgctacgctatttcaccgttacctgttattctggttatggagatgatgaaaagggattttacacggtgtatcgtaat

SEQ ID NO: 553637 - DNA, 120 bp, Artificial Sequence
  ENSG00000168724_5 (sequence is synthesized)
gtttttgaaatgattgccaaggaagaactagaatctgtgttagaggaagaggttgatgatttcccaacttttggagactcccagagtgactatgatacggtagtccatcctttctacgct

SEQ ID NO: 553638 - DNA, 120 bp, Artificial Sequence
  ENSG00000168724_6 (sequence is synthesized)
tattggcagagtttctgcactcaaaagaattttgcatggaaggaagaatatgatacacgacaggcttcaaaccgctgggaaaaacgagccatggaaaaagaaaacaaaaagattcgggac

SEQ ID NO: 553639 - DNA, 120 bp, Artificial Sequence
  ENSG00000168724_7 (sequence is synthesized)
aaagcaaggaaagagaagaatgagcttgtccgtcagctggtagctttcattcgtaaaagagataaaagagtgcaggcgcatcgaaaacttgtggaagaacagaatgcagagaaggcgagg

SEQ ID NO: 553640 - DNA, 120 bp, Artificial Sequence
  ENSG00000168724_8 (sequence is synthesized)
aaagccgaagagatgaggcggcagcagaagctaaagcaggccaaactggtggagcagtacagagaacagagctggatgactatggccaatttggagaaagagctccaggagatggaggca

SEQ ID NO: 553641 - DNA, 120 bp, Artificial Sequence
  ENSG00000168724_9 (sequence is synthesized)
cggtacgagaaggagtttggagatggatcggatgaaaatgaaatggaagaacatgaactcaaagatgaggaggatggtaaagacagtgatgaggccgaggacgctgagctctatgatgac

SEQ ID NO: 553642 - DNA, 120 bp, Artificial Sequence
  ENSG00000168724_10 (sequence is synthesized)
ctttactgcccagcatgtgacaaatcgttcaagacagaaaaggccatgaagaatcacgagaagtcaaagaagcatcgggaaatggtggccttgctaaaacaacagctggaggaggaagaa

SEQ ID NO: 553643 - DNA, 120 bp, Artificial Sequence
  ENSG00000168724_11 (sequence is synthesized)
gaaaatttttcaagacctcaaattgatgaaaatccattagatgacaattctgaggaagaaatggaagatgcaccaaaacaaaagctttctaaaaaacagaagaaaaagaaacagaaacca

SEQ ID NO: 553644 - DNA, 120 bp, Artificial Sequence
  ENSG00000168724_12 (sequence is synthesized)
gcacagaattatgatgacaatttcaatgtaaatggacctggagaaggagtaaaggttgatccagaagatactaacttaaatcaagacagtgccaaagaattggaagatagtccccaggaa

SEQ ID NO: 553645 - DNA, 120 bp, Artificial Sequence
  ENSG00000168724_13 (sequence is synthesized)
aatgtcagtgtcacagagatcattaaaccatgtgatgatccaaaaagtgaagctaaaagtgttcctaaacccaaaggaaagaaaaccaaagatatgaaaaaacctgtcagagtacctgct

SEQ ID NO: 553646 - DNA, 120 bp, Artificial Sequence
  ENSG00000168724_14 (sequence is synthesized)
gaaccacaaacaatgagtgttcttatcagctgtacaacctgccatagtgaatttccatctcggaataaactttttgaccatctaaaggccacaggtcatgcaagagcaccttcatcatcg

SEQ ID NO: 553647 - DNA, 120 bp, Artificial Sequence
  ENSG00000168724_15 (sequence is synthesized)
tctttaaacagcgcaacaagtagtcaaagcaagaaagagaaacgtaaaaacagatagagattctgcctgtgcttttgtttgactgtctctagattttgaaaccaaaaaactgaactgaaa

SEQ ID NO: 553648 - DNA, 120 bp, Artificial Sequence
  ENSG00000168724_16 (sequence is synthesized)
tcatctaaagagttaaaatttcagtgatctgcaattaattacattgtggaagattattttttatcttgtaaaaacacttttttggtttaatatatatttttaaaacatttcactagtgat

SEQ ID NO: 553649 - DNA, 120 bp, Artificial Sequence
  ENSG00000168724_17 (sequence is synthesized)
tgaattctacttttgccatctgaattgacttgaatgtcttaaaacaggtaaatactgtaaagtgtgtattcttgatgtttattggctcatgtggacagaaatgtacagggagaattacat

SEQ ID NO: 553650 - DNA, 120 bp, Artificial Sequence
  ENSG00000168724_18 (sequence is synthesized)
tattttaacacacagaagtgcaactttctgctttattttctgaatttcacattacttttacttaatgcttttgtgttttgttaatacttcataatatgtgaaaaactcggatcttttaaa

SEQ ID NO: 553651 - DNA, 120 bp, Artificial Sequence
  ENSG00000168724_19 (sequence is synthesized)
aagcatcatagatcatttttccatatgacactggttccgattttaaaaattatttttaaataaccgattattgattactgtattttttttctcaagaacagtgataggtagaaactaatt

SEQ ID NO: 553652 - DNA, 120 bp, Artificial Sequence
  ENSG00000168724_20 (sequence is synthesized)
gaacatttggtagtctttcaagaatagtgtctcttcaaggttttacttgatttaatttgatattttactggtttaccagtaaggtgtattgttcagttttttgctccgatttgaattgtg

SEQ ID NO: 553653 - DNA, 120 bp, Artificial Sequence
  ENSG00000168724_21 (sequence is synthesized)
gaggtggaagcaaattagtttacatggcatgtcctccctaggcacagtgacagctgtaaagtatgacggaacaaggtagcagatggtacagaatttatactatttaagaagagatgtggt

SEQ ID NO: 553654 - DNA, 120 bp, Artificial Sequence
  ENSG00000168724_22 (sequence is synthesized)
gttcttcattgagtttttttcttcactattttcagaagtttttgttcttttttttttttccatcactcagtggagaaaagctttgttaatgaaagattttgtgatagagctgatgcttat

SEQ ID NO: 553655 - DNA, 120 bp, Artificial Sequence
  ENSG00000168724_23 (sequence is synthesized)
acatctattctataacagtgatgaatattaacacaaaggaaatatggagaactgttataactgagtgttagaacagtcgtgtacattgatcagtattgagtccatttttaggatggatta

SEQ ID NO: 553656 - DNA, 73 bp, Artificial Sequence
  ENSG00000168724_24 (sequence is synthesized)
gtacattgatcagtattgagtccatttttaggatggattagtcagttcttttcattggtcttgaaagtaattt

SEQ ID NO: 553657 - DNA, 120 bp, Artificial Sequence
  ENSG00000168724_25 (sequence is synthesized)
tttaaactcactggcttgaaatgtgtgctttctgtacaatgaagttattgctttccatatatccttgaatcttcagattaacgaaatgaacaaattttcggttacagatcagctctcaaa

SEQ ID NO: 553658 - DNA, 120 bp, Artificial Sequence
  ENSG00000168724_26 (sequence is synthesized)
cactaaagtccttaatggcaaggtcttttctgatagcttcatggatagtattgatgatcagatttcttctgtgttattgtcttaaaaataagcatttgaaccttaatttaaattcttttc

SEQ ID NO: 553659 - DNA, 120 bp, Artificial Sequence
  ENSG00000168724_27 (sequence is synthesized)
ttttccatttagagatatgtttttttctttaccttcatacctttctatttcttgctaatttctatcactaattccttataattgtccctgctccccttcttgatctcttcagggggaata

SEQ ID NO: 553660 - DNA, 120 bp, Artificial Sequence
  ENSG00000168724_28 (sequence is synthesized)
ctaggcagttttgtatcttctgatctcgtaccctgagacttcatctgaatgtgctctgccgccttcttatctgaactagatgaattggccataattatgaataggaatattaatgaacca

SEQ ID NO: 553661 - DNA, 120 bp, Artificial Sequence
  ENSG00000168724_29 (sequence is synthesized)
gaggacatactagtcacatgttattatacactaaaaaataggaagtcatcttgaaaggcagttaatgtactgcaaatgtccctatgacttctttgctttctcttataccaaacatgcagg

SEQ ID NO: 553662 - DNA, 120 bp, Artificial Sequence
  ENSG00000168724_30 (sequence is synthesized)
tatttaatttgtttaatgagggttgagtggagttatgtgtcgcttttattcggattgacgaaaatcaaccataattttcaagggatcttcatgggttgtgactggaagctgaccttagtc

SEQ ID NO: 553663 - DNA, 120 bp, Artificial Sequence
  ENSG00000168724_31 (sequence is synthesized)
ttgcgtctcatcctttatgatgttgagaaatcatctaatttctcagaactttttcttatctctaacacagttattaccataataatattgtctccatttatcatacaggatcattatgaa

SEQ ID NO: 553664 - DNA, 120 bp, Artificial Sequence
  ENSG00000168724_32 (sequence is synthesized)
aaatgaagtagtatatatgaaaatgctttttaaacacaaaagctttatacaaaatattgttgaatttaaataaggtaaatcttttttagtttatatatttgcagactatacatgttggat

SEQ ID NO: 553665 - DNA, 120 bp, Artificial Sequence
  ENSG00000168724_33 (sequence is synthesized)
ggattaaatgggcaattaagttttataggaatttgcttcctaagtctacttttgaagaggaaaacaggaacgtaccatatattttgctaagggtaaaatatttttggtgaattgcagaca

SEQ ID NO: 553666 - DNA, 120 bp, Artificial Sequence
  ENSG00000168724_34 (sequence is synthesized)
tttaatttcacttgtctgaggtaaaacaataaactaaaatacatgggcatgcatcttacactgatcttattagaggtcagtgctaagtacccatcttgattgaagttagctcagatgtgg

SEQ ID NO: 553667 - DNA, 120 bp, Artificial Sequence
  ENSG00000168724_35 (sequence is synthesized)
agattcatagaatgagggtccaggagaagaaagttaggggaaatctcattttctttctgtaattcattcagtggtgccaaagctgggggttccctacaatggctatttagactttccctg

SEQ ID NO: 553668 - DNA, 120 bp, Artificial Sequence
  ENSG00000168724_36 (sequence is synthesized)
cttcaaaataagagcagtatccttagctctagccaagcatttttctaattcctgcctttggtcacaaagaaggaaaagcagagctgtgaatgagttagtggaggtcaagtcacatcagag

SEQ ID NO: 553669 - DNA, 120 bp, Artificial Sequence
  ENSG00000168724_37 (sequence is synthesized)
ttcatgacctagtgattgctggtgaagtaatattggaattttggtaccatgagaagacttataaaggatttcatcagaagttttcattttttctaaatcctcccctacaaaattttcaga

SEQ ID NO: 553670 - DNA, 120 bp, Artificial Sequence
  ENSG00000168724_38 (sequence is synthesized)
ttggaaattactcttgtatttgtagaagattgtctctaaaattgtggtttaactcacgcaggaagtaaaattcctatagcaagacatagtttcattttagaggacccccaaaatcccgtg

SEQ ID NO: 553671 - DNA, 120 bp, Artificial Sequence
  ENSG00000168724_39 (sequence is synthesized)
aattctctggtgatgattctagcctaaccttcaacataaaataatgaagagaacttttaaacttttttatgaattcctaaacattaccatttatgtggcagaagttctgttccctataat

SEQ ID NO: 553672 - DNA, 120 bp, Artificial Sequence
  ENSG00000168724_40 (sequence is synthesized)
ctgcaatgctgaagtatctctattcaattcccttccttatctgttaaatttaatgtctttatactaaaaatataggctcttgggattggagaggaaaaattagaggtgattttcagattt

SEQ ID NO: 553673 - DNA, 120 bp, Artificial Sequence
  ENSG00000168724_41 (sequence is synthesized)
cttgttctatggaagaggaagctgagctcagggagatatgagctccacagccacagctggttaggggcggctgccagtagaacagggcagatgcctggactcccaactcagtaggccttc

SEQ ID NO: 553674 - DNA, 120 bp, Artificial Sequence
  ENSG00000168724_42 (sequence is synthesized)
tgttacacctcaaaatgtgttacatgggaagaaaaagattaagaaaaagcaagataattttgaagaaggacgagaggaagaggcatgaacttgtcctaacaatgtcaaagaatattttaa

SEQ ID NO: 553675 - DNA, 120 bp, Artificial Sequence
  ENSG00000168724_43 (sequence is synthesized)
aggtataccagttaaagtagtgtgtggctggtgccagtagaggtcagtcaagggatccctgacgagaataaagagcccagaaacaggtccatgtttatatgggaacttgatttttgacag

SEQ ID NO: 553676 - DNA, 120 bp, Artificial Sequence
  ENSG00000168724_44 (sequence is synthesized)
atacggcaagctctatggggaaaacaatatgtactaccttatacccttccccaaaaacaaagggattaaagacctaaatatgaagacaaaacttttaaatgagaatctataaggttattt

SEQ ID NO: 553677 - DNA, 120 bp, Artificial Sequence
  ENSG00000168724_45 (sequence is synthesized)
tcatgattttgcaaatgggaaggatttctttaaagcaagacacaaaagcatacacaggaaaaaatgatgcataaaaacatggcttctgtagaacaatagagactgtaaaagaacaagcta

SEQ ID NO: 553678 - DNA, 120 bp, Artificial Sequence
  ENSG00000168724_46 (sequence is synthesized)
cagacaaggaaatgtttgcaatgcatggaactgtcaaaggattcgtatctggaatacattaaagaagcaaaagaacctcatacaaaagtcattgagtaaatgacagccatgcattagaac

SEQ ID NO: 553679 - DNA, 120 bp, Artificial Sequence
  ENSG00000168724_47 (sequence is synthesized)
agcaattctcaaaacttttggtctcaagatccctttacactcttcaaaagtgagaaccccaaagagttttcatgtatgtgggttaaatctattgatattttctgttagaatttaaaaatt

SEQ ID NO: 553680 - DNA, 120 bp, Artificial Sequence
  ENSG00000168724_48 (sequence is synthesized)
atgttaaaaaaataagaagaatgactatttttcaaaacaaaaaatgagaagagtggtattgttttacatttttacaaatctctttaacatttagcttaataaaagatagctggcctctca

SEQ ID NO: 553681 - DNA, 120 bp, Artificial Sequence
  ENSG00000168724_49 (sequence is synthesized)
ggactccgcggagccagcagagagggacctggcggcctaggagctccttgccccgcccggccagtgcccggagccgccctgcccgtctcggtgggcgaagcgctctgccctggcgcaccc

SEQ ID NO: 553682 - DNA, 120 bp, Artificial Sequence
  ENSG00000168724_50 (sequence is synthesized)
cggctcacaccccatctcctcatacccgcgaccccggccccgcatcgccactgtagggggaaaactgcagtccaacaacctcacttgctcccgctaccgggtcgcagacaccacgaggga

SEQ ID NO: 553683 - DNA, 120 bp, Artificial Sequence
  ENSG00000168724_51 (sequence is synthesized)
gcagtcgggaactcggaactcagacctgccccaggcttgcttttccctgcgtcccttgcagcgcagcctctcggtgtttttcctccgctgccctccacctcgtccgggaatcccagatac

SEQ ID NO: 553684 - DNA, 120 bp, Artificial Sequence
  ENSG00000168724_52 (sequence is synthesized)
attacaggtgtgagccaccgtgcctggcagtgtttttatgaaaacactgtataaaacattctgtataaaacactgtattaaacactgtataaaacatttatctctgtataaaacattcag

SEQ ID NO: 553685 - DNA, 120 bp, Artificial Sequence
  ENSG00000168724_53 (sequence is synthesized)
acattcagagatattttaaggaccttgttttaactttgtttcaactgttttaaggaaattccttaatttttgtgccaaatttgatattcaatttgatttctgaagttgctttttaaagat

SEQ ID NO: 553686 - DNA, 120 bp, Artificial Sequence
  ENSG00000168724_54 (sequence is synthesized)
gttcatttaagatgtaaagattatttaaattgcctttaaaattaatgaattaacttttaaagtgcagttcacttttttgagtgttctagagagcactcaaataatgatggttaaaaggag

SEQ ID NO: 553687 - DNA, 120 bp, Artificial Sequence
  ENSG00000168724_55 (sequence is synthesized)
tttatgtatagatacacacacacatatgtatacagatgaagagcgttgagaagaggatgctagaggaatgtgcccacacacatctcagcagcatggccaaaatcagaaagatgtcacttt

SEQ ID NO: 553688 - DNA, 120 bp, Artificial Sequence
  ENSG00000168724_56 (sequence is synthesized)
gatccagttcttgtttaccttatcctgctgtggcgctgattttgtcgtggatcattaacacttgacactcacatgagaacaagactcctgctgcgtccctggagtgtcactaagcaaatc

SEQ ID NO: 553689 - DNA, 120 bp, Artificial Sequence
  ENSG00000168724_57 (sequence is synthesized)
tccatgctcacgacagcagcctgtgttgggccccaccatgttgtgaggacacatggcagcagctggggcccttcctgctcagaggagccctggactcttggtgctgcacaaggccatggt

SEQ ID NO: 553690 - DNA, 120 bp, Artificial Sequence
  ENSG00000168724_58 (sequence is synthesized)
gtggactaggaggaggtctcacccaagggaggtagccagtcctgttctctccttcctcctcttgtctgactttcttttccccatcctcctcggttcctctagaacagagaatcatttctt

SEQ ID NO: 553691 - DNA, 120 bp, Artificial Sequence
  ENSG00000168724_59 (sequence is synthesized)
atttcttgaggaaagatctgatagtgaggagcttcaagtttctgtcattacagaaccctgaaaagaattaaagtgagagagcaaagtgggagcatgacgtgaaaatgctaacactggagc

SEQ ID NO: 553692 - DNA, 120 bp, Artificial Sequence
  ENSG00000168724_60 (sequence is synthesized)
aacagtgatggggtggggagtgtgtgtacttcggagtttaaggcacttagtagtaggaaggaggaaacagatgtgggtgagacctacagtatgactctggctatagaaaaaggtatataa

SEQ ID NO: 553693 - DNA, 120 bp, Artificial Sequence
  ENSG00000168724_61 (sequence is synthesized)
agaactacacaaactggtaatgttgaagctttgaagaactttggagagttgaagcctagaaagggaaattcacatgtatttcactctgacaccaggtgtttgttccctttctacaaatgg

SEQ ID NO: 553694 - DNA, 120 bp, Artificial Sequence
  ENSG00000168724_62 (sequence is synthesized)
ggaaactgaatttcaggttaattgtccaaggacaaaagctattgagtagaaaggctgacacttcattccatctgcctgacaacttgaaggcacccagatcatctgactccatggagcctg

SEQ ID NO: 553695 - DNA, 120 bp, Artificial Sequence
  ENSG00000168724_63 (sequence is synthesized)
cagcctctcgagttgctgggactgcaggcatgcactgccacgcctggctatttttctgtattttagtagagacggtttcaccatgttgcacagggtggtcttgaactcctgacctcatga

SEQ ID NO: 553696 - DNA, 120 bp, Artificial Sequence
  ENSG00000168724_64 (sequence is synthesized)
aaagtgctgggattgcaggtgtgagctaccgtgtctggcctccatgttacttctacatgagaattgatctggggaggaagaagggttctcaggcttgggcaaccactgatatagttcagc

SEQ ID NO: 553697 - DNA, 120 bp, Artificial Sequence
  ENSG00000168724_65 (sequence is synthesized)
tctctaatttcactgatgtgaggaaaggattcagagaattcaagtgacttcttcacagctgcagaatggcagagctaagatagatacattatacccagcaccctccccacaccactctgc

SEQ ID NO: 553698 - DNA, 120 bp, Artificial Sequence
  ENSG00000168724_66 (sequence is synthesized)
tgtcccctggatccagggcctttatgctggcagctcctctgttgcttctctggagtggtgtggacactggccacctactgagaagtgtttttttaaaaaatgtgtgtgtgtgtgtgtgtg

SEQ ID NO: 553699 - DNA, 120 bp, Artificial Sequence
  ENSG00000168724_67 (sequence is synthesized)
tgtgtgtatagtatttttaaaaaataaaggtcttagatatcagcttcagagatgtaactgtctttcataatataagtgatgtttgccaggaatattatcctaaatttgttagacatattt

SEQ ID NO: 553700 - DNA, 120 bp, Artificial Sequence
  ENSG00000168724_68 (sequence is synthesized)
ctgacatatctgtgatgatagtttgaaaattagtatgtattatttgttgccttttatgccattgtgtccttttcttgatgttttcaaagctggctgaatcctacacaatatgttacactc

SEQ ID NO: 553701 - DNA, 120 bp, Artificial Sequence
  ENSG00000168724_69 (sequence is synthesized)
ctaatctgcattttttaaatgcataggccgtttaacttagcacagactattggcctctgcttgaagaatagtatacctataaactggaagcattatcatcacttactcattataacccat

SEQ ID NO: 553702 - DNA, 120 bp, Artificial Sequence
  ENSG00000168724_70 (sequence is synthesized)
cctgtctgttctgtacagtatagttggacccagatttttaccctatgaatttggttagcacaaatgggggaaagtatgaaatgccaaggaaaattgaaattcatgtaggagatgagtaga

SEQ ID NO: 553703 - DNA, 120 bp, Artificial Sequence
  ENSG00000168724_71 (sequence is synthesized)
ggaatgttcaggagttcaagcagaacaagaggaacccaactataccgtttctgatctaaatggtatggtggggaaaaaccatcagatcaacagaaaggacataatttttaaataaaagta

SEQ ID NO: 553704 - DNA, 120 bp, Artificial Sequence
  ENSG00000168724_72 (sequence is synthesized)
aagaaatggaagatgcaccaaaacaaaaagtcaagtatttgacatttcgatttatatttgctcttaggctttctaaaaaacagaagaaaaagaaacagaaaccagcacaggatgtacctg

SEQ ID NO: 553705 - DNA, 120 bp, Artificial Sequence
  ENSG00000168724_73 (sequence is synthesized)
gcaaagattcatatctgcctgcagctcactttcagatggcttggggaaaaaagtgtgtgttgggagagagaagagatggagagagcgagcacaaatgtgccaaaatgttgcttgaaaaca

SEQ ID NO: 553706 - DNA, 120 bp, Artificial Sequence
  ENSG00000168724_74 (sequence is synthesized)
gaaatgtgtatttggtgagccattccgcaaagagcctgcaaagatgtggatccatcaacagttttgtttgatataatgtatctttttttttcattaaaataaaaagaagcacattggaaa

SEQ ID NO: 553707 - DNA, 120 bp, Artificial Sequence
  ENSG00000168734_0 (sequence is synthesized)
aaaagtctgagcccatgttctttaaaatgttgatggtggttgtctgggtgtggaattatgagtgacttgttttgttctttgtacttttctgtgctttttgctttgttttcaataagaggc

SEQ ID NO: 553708 - DNA, 120 bp, Artificial Sequence
  ENSG00000168734_1 (sequence is synthesized)
aataactgtcattttgacagaagccactgtgctggggaactggagctgtcctctctgcagaatgcatctggacttacctctgcccccttgccttctgtccccacaggcctgaggagcgat

SEQ ID NO: 553709 - DNA, 120 bp, Artificial Sequence
  ENSG00000168734_2 (sequence is synthesized)
gcgacaggcatgatggaggtcgagtcctcctactcggacttcatctcctgtgaccggacaggccgtcggaatgcggtccctgacatccagggagactcagaggctgtgagcgtgaggaag

SEQ ID NO: 553710 - DNA, 120 bp, Artificial Sequence
  ENSG00000168734_3 (sequence is synthesized)
ctggctggagacatgggcgagctggcactcgagggggcagaaggacaggtggagggaagcgccccagacaaggaagctggcaaccagccccagagcagcgatgggaccacctcgtcttga

SEQ ID NO: 553711 - DNA, 120 bp, Artificial Sequence
  ENSG00000168734_4 (sequence is synthesized)
cagcagcctcttctctgagctccatgtcccagataaaccaggccagactgagaaggctccccagaggcctctgtggcctccactccgggaaagccctctgcccacacccacaggcttcac

SEQ ID NO: 553712 - DNA, 120 bp, Artificial Sequence
  ENSG00000168734_5 (sequence is synthesized)
attcccaccaccttcgcaccgtgcccaggtacactttcaagacactgtaaccacaagatgttatttattgagctggcgccgggacttgggcggggcctgccctacagtgagcagcccaca

SEQ ID NO: 553713 - DNA, 120 bp, Artificial Sequence
  ENSG00000168734_6 (sequence is synthesized)
caggaacgctcctctcgcgagcggcccgggcagggaccctgtcccaacaccaacacctcctctccagcccaatcttctgggtccagacctgcttgtcccttttttagaaaacacttttaa

SEQ ID NO: 553714 - DNA, 120 bp, Artificial Sequence
  ENSG00000168734_7 (sequence is synthesized)
actttttaaaaattttaaaccttttttcagcagatatggagagagctgacaatcaattcacattttttaagccattttagctaaactgtcattgtgcatctctgaggttccctcatggag

SEQ ID NO: 553715 - DNA, 120 bp, Artificial Sequence
  ENSG00000168734_8 (sequence is synthesized)
ctccacagatccatttttagggaagggattttggctcaaaacgatctgaccacctctgccctgtccaccaggataagtgacacctaggacccaggaaataaatgccgatgatttgtgtga

SEQ ID NO: 553716 - DNA, 120 bp, Artificial Sequence
  ENSG00000168734_9 (sequence is synthesized)
atttaggagacacggggaagagacagagaggagggtaaagtgagaatcctgcccgcaccacaggtctggactgctaaccttgaatcctggtttcttaaattctgcctccgcttctgactg

SEQ ID NO: 553717 - DNA, 120 bp, Artificial Sequence
  ENSG00000168734_10 (sequence is synthesized)
agtggaaaatctgaagagatgcaagcaggaaaaagaaattaaaccagtaagatagagactgccactctctgggaaccttgctgtgtagctgagcctcagcaagtttgataatacagacac

SEQ ID NO: 553718 - DNA, 120 bp, Artificial Sequence
  ENSG00000168734_11 (sequence is synthesized)
agcaggaggcctggggaggacccagcatgcccggccaccaagcagtgatgcagctggactgttccgcagctttccagagacctccatggaagcacagacttccatgggttgaagagagtt

SEQ ID NO: 553719 - DNA, 120 bp, Artificial Sequence
  ENSG00000168734_12 (sequence is synthesized)
ccgcggctgcggaaggggacgcgaaccgtcctggtcccatccgagccgccgtagcgcgagtgccgcgggagttcggcagcccaggtcgccaaggcaacgggctccgctgcgggttgcggg

SEQ ID NO: 553720 - DNA, 120 bp, Artificial Sequence
  ENSG00000168734_13 (sequence is synthesized)
gttctggaaggaaggtacctagactttgtggtccctgccaggaagtggagagtggaaatgtggaatgcctcacactcctcaactagaattcccgtactgattagtcaacagtggaaaatc

SEQ ID NO: 553721 - DNA, 120 bp, Artificial Sequence
  ENSG00000168734_14 (sequence is synthesized)
ctgcgggcgctaggctgccccggggaggcgctgcggaccggcggcccaggcacggagaggcggcgagaccgcagaattcccgtactgattagtcaacagtggaaaatctgaagagatgca

SEQ ID NO: 553722 - DNA, 120 bp, Artificial Sequence
  ENSG00000168734_15 (sequence is synthesized)
agtgctgggatcacaggcatgaaccaccacgcctggcccagggggattccagttccaagccttaagacccaacaaagacacacttcagaactcaggagacaccatggtccctggttcttg

SEQ ID NO: 553723 - DNA, 120 bp, Artificial Sequence
  ENSG00000168734_16 (sequence is synthesized)
tgatttctcccaactatgggtgggagacaagctcacccagggccagcctctccattccttctcacaggacccacctggtaggcctggacatgtccaggcaagaggctgcttcctgggatg

SEQ ID NO: 553724 - DNA, 120 bp, Artificial Sequence
  ENSG00000168734_17 (sequence is synthesized)
attttgactgtggagaagggggctctggtaaagtatcttgatcatctcttagggtatgggattgtgaggaattactctcttttcacccaaaggaattggaatgagcatctgaagtcaaaa

SEQ ID NO: 553725 - DNA, 120 bp, Artificial Sequence
  ENSG00000168743_0 (sequence is synthesized)
gagggggctccgggcgccgcgcagcagacctgctccggccgcgcgcctcgccgctgtcctccgggagcggcagcagtagcccgggcggcgagggctgggggttcctcgagactctcagag

SEQ ID NO: 553726 - DNA, 120 bp, Artificial Sequence
  ENSG00000168743_1 (sequence is synthesized)
ctcgagactctcagaggggcgcctcccatcggcgcccaccaccccaacctgttcctcgcgcgccactgcgctgcgccccaggacccgctgcccaacatggattttctcctggcgctggtg

SEQ ID NO: 553727 - DNA, 120 bp, Artificial Sequence
  ENSG00000168743_2 (sequence is synthesized)
ctggtatcctcgctctacctgcaggcggccgccgagttcgacgggaggtggcccaggcaaatagtgtcatcgattggcctatgtcgttatggtgggaggattgactgctgctggggctgg

SEQ ID NO: 553728 - DNA, 120 bp, Artificial Sequence
  ENSG00000168743_3 (sequence is synthesized)
gctcgccagtcttggggacagtgtcagcctgtgtgccaaccacgatgcaaacatggtgaatgtatcgggccaaacaagtgcaagtgtcatcctggttatgctggaaaaacctgtaatcaa

SEQ ID NO: 553729 - DNA, 120 bp, Artificial Sequence
  ENSG00000168743_4 (sequence is synthesized)
gatctaaatgagtgtggcctgaagccccggccctgtaagcacaggtgcatgaacacttacggcagctacaagtgctactgtctcaacggatatatgctcatgccggatggttcctgctca

SEQ ID NO: 553730 - DNA, 120 bp, Artificial Sequence
  ENSG00000168743_5 (sequence is synthesized)
agtgccctgacctgctccatggcaaactgtcagtatggctgtgatgttgttaaaggacaaatacggtgccagtgcccatcccctggcctgcagctggctcctgatgggaggacctgtgta

SEQ ID NO: 553731 - DNA, 120 bp, Artificial Sequence
  ENSG00000168743_6 (sequence is synthesized)
gatgttgatgaatgtgctacaggaagagcctcctgccctagatttaggcaatgtgtcaacacttttgggagctacatctgcaagtgtcataaaggcttcgatctcatgtatattggaggc

SEQ ID NO: 553732 - DNA, 120 bp, Artificial Sequence
  ENSG00000168743_7 (sequence is synthesized)
aaatatcaatgtcatgacatagacgaatgctcacttggtcagtatcagtgcagcagctttgctcgatgttataacatacgtgggtcctacaagtgcaaatgtaaagaaggataccagggt

SEQ ID NO: 553733 - DNA, 120 bp, Artificial Sequence
  ENSG00000168743_8 (sequence is synthesized)
gatggactgacttgtgtgtatatcccaaaagttatgattgaaccttcaggtccaattcatgtaccaaagggaaatggtaccattttaaagggtgacacaggaaataataattggattcct

SEQ ID NO: 553734 - DNA, 120 bp, Artificial Sequence
  ENSG00000168743_9 (sequence is synthesized)
gatgttggaagtacttggtggcctccgaagacaccatatattcctcctatcattaccaacaggcctacttctaagccaacaacaagacctacaccaaagccaacaccaattcctactcca

SEQ ID NO: 553735 - DNA, 120 bp, Artificial Sequence
  ENSG00000168743_10 (sequence is synthesized)
ccaccaccaccacccctgccaacagagctcagaacacctctaccacctacaaccccagaaaggccaaccaccggactgacaactatagcaccagctgccagtacacctccaggagggatt

SEQ ID NO: 553736 - DNA, 120 bp, Artificial Sequence
  ENSG00000168743_11 (sequence is synthesized)
acagttgacaacagggtacagacagaccctcagaaacccagaggagatgtgttcattccacggcaaccttcaaatgacttgtttgaaatatttgaaatagaaagaggagtcagtgcagac

SEQ ID NO: 553737 - DNA, 120 bp, Artificial Sequence
  ENSG00000168743_12 (sequence is synthesized)
gatgaagcaaaggatgatccaggtgttctggtacacagttgtaattttgaccatggactttgtggatggatcagggagaaagacaatgacttgcactgggaaccaatcagggacccagca

SEQ ID NO: 553738 - DNA, 120 bp, Artificial Sequence
  ENSG00000168743_13 (sequence is synthesized)
ggtggacaatatctgacagtgtcggcagccaaagccccagggggaaaagctgcacgcttggtgctacctctcggccgcctcatgcattcaggggacctgtgcctgtcattcaggcacaag

SEQ ID NO: 553739 - DNA, 120 bp, Artificial Sequence
  ENSG00000168743_14 (sequence is synthesized)
gtgacggggctgcactctggcacactccaggtgtttgtgagaaaacacggtgcccacggagcagccctgtggggaagaaatggtggccatggctggaggcaaacacagatcaccttgcga

SEQ ID NO: 553740 - DNA, 120 bp, Artificial Sequence
  ENSG00000168743_15 (sequence is synthesized)
ggggctgacatcaagagcgtcgtcttcaaaggtgaaaaaaggcgtggtcacactggggagattggattagatgatgtgagcttgaaaaaaggccactgctctgaagaacgctaacaactc

SEQ ID NO: 553741 - DNA, 120 bp, Artificial Sequence
  ENSG00000168743_16 (sequence is synthesized)
cagaactaacaatgaactcctatgttgctctatcctctttttccaattctcatcttctctcctcttctcccttttatcaggcctaggagaagagtgggtcagtgggtcagaaggaagtct

SEQ ID NO: 553742 - DNA, 120 bp, Artificial Sequence
  ENSG00000168743_17 (sequence is synthesized)
atttggtgacccaggtttttctggcctgcttttgtgcaatcccaatgaacagtgataccctccttgaaatacaggggcatcgcagacacatcaaagccatctgtgggtgttgccttccat

SEQ ID NO: 553743 - DNA, 120 bp, Artificial Sequence
  ENSG00000168743_18 (sequence is synthesized)
cctgtgtctctttcaggaaggcattcagcatgcgtgagccataccatcctccatcctgattacaaggtgctccttgtagcaaattatgagagtgagttacgggagcagtttttaaaagaa

SEQ ID NO: 553744 - DNA, 120 bp, Artificial Sequence
  ENSG00000168743_19 (sequence is synthesized)
gtaccatgagtagtattgacttcccttgagatatgatgtacaatgtgcttgtgaaattgacttaccctcttcacttaagttagttctggcctgacctgaactctgacttttactgccatt

SEQ ID NO: 553745 - DNA, 120 bp, Artificial Sequence
  ENSG00000168743_20 (sequence is synthesized)
cactttataaaataagggtgtgtaacatatcaagatacatttatttttatctgttttttttttcctgttaaagacaattatgtagagtgggcacgtaatccctccttagtagtattgtgt

SEQ ID NO: 553746 - DNA, 120 bp, Artificial Sequence
  ENSG00000168743_21 (sequence is synthesized)
tttgtgtaaatgtgctattgatattaagtatttacatgttccaaatatttacagactctagttgcaaggtaaagggcagcttgtgatctcaaaaaaatacatggtgaaatgtcatccagt

SEQ ID NO: 553747 - DNA, 120 bp, Artificial Sequence
  ENSG00000168743_22 (sequence is synthesized)
tccatgaccttatattggcagcagtaggaaattggcagaagtgttgggttgtggtaacggagtgatgaatttttttttaatggccttgagtttgatctctgcaaaggataggaaaccttt

SEQ ID NO: 553748 - DNA, 120 bp, Artificial Sequence
  ENSG00000168743_23 (sequence is synthesized)
aggaagacaagaaactgcagttaatttagaactgtcactgtttcaagttacactttaaaaccacagcttttaccatcataacatggctctggtaatatgtaggaagctttataaaagttt

SEQ ID NO: 553749 - DNA, 120 bp, Artificial Sequence
  ENSG00000168743_24 (sequence is synthesized)
tggttgattcagaaaaaggatcctgttgcagagtgagaggaagcatagggggaaactccattggaacagattttcacacaacgttttaaattgatataagtttaggcagttgtagttcat

SEQ ID NO: 553750 - DNA, 120 bp, Artificial Sequence
  ENSG00000168743_25 (sequence is synthesized)
aacttatgttgctcatgttgtgctgtgtcaggatgggataggaagcaagtcccatgcttagaggcatgggatgtgttggaacgggatttacacacactggaggagcagggcaagttggaa

SEQ ID NO: 553751 - DNA, 120 bp, Artificial Sequence
  ENSG00000168743_26 (sequence is synthesized)
ttctaagatccatgaacccccaactgtatttcctccctgcatattttaccaatatattaaaaaacaatgtaacttttaaaaggcatcattcctgaggtttgtcttaatttctgattaagt

SEQ ID NO: 553752 - DNA, 120 bp, Artificial Sequence
  ENSG00000168743_27 (sequence is synthesized)
aatcagaatattttctgctatttttgccaggaatcacaaagatgattaaagggttggaaaaaaagatctatgatggaaaattaaaggaactgggattattgagcctggagaagagaagac

SEQ ID NO: 553753 - DNA, 120 bp, Artificial Sequence
  ENSG00000168743_28 (sequence is synthesized)
tgaggggcaaaccattgatggttttcaagtatatgaagggttggcacagagagggtggcgaccagctgttctccatatgcactaagaatagaacaagaggaaactggcttagactagagt

SEQ ID NO: 553754 - DNA, 120 bp, Artificial Sequence
  ENSG00000168743_29 (sequence is synthesized)
ataagggagcatttcttggcaggggccattgttagaatacttcataaaaaaagaagtgtgaaaatctcagtatctctctctctttctaaaaaattagataaaaatttgtctatttaagat

SEQ ID NO: 553755 - DNA, 120 bp, Artificial Sequence
  ENSG00000168743_30 (sequence is synthesized)
ggttaaagatgttcttacccaaggaaaagtaacaaattatagaatttcccaaaagatgttttgatcctactagtagtatgcagtgaaaatctttagaactaaataatttggacaaggctt

SEQ ID NO: 553756 - DNA, 120 bp, Artificial Sequence
  ENSG00000168743_31 (sequence is synthesized)
aatttaggcatttccctcttgacctcctaatggagagggattgaaaggggaagagcccaccaaatgctgagctcactgaaatatctctcccttatggcaatcctagcagtattaaagaaa

SEQ ID NO: 553757 - DNA, 120 bp, Artificial Sequence
  ENSG00000168743_32 (sequence is synthesized)
aaaggaaactatttattccaaatgagagtatgatggacagatattttagtatctcagtaatgtcctagtgtggcggtggttttcaatgtttcttcatgttaaaggtataagcctttcatt

SEQ ID NO: 553758 - DNA, 120 bp, Artificial Sequence
  ENSG00000168743_33 (sequence is synthesized)
tgttcaatggatgatgtttcagatttttttttttttaagagatccttcaaggaacacagttcagagagattttcatcgggtgcattctctctgcttcgtgtgtgacaagttatcttggct

SEQ ID NO: 553759 - DNA, 120 bp, Artificial Sequence
  ENSG00000168743_34 (sequence is synthesized)
gctgagaaagagtgccctgccccacaccggcagacctttccttcacctcatcagtatgattcagtttctcttatcaattggactctcccaggttccacagaacagtaatattttttgaac

SEQ ID NO: 553760 - DNA, 120 bp, Artificial Sequence
  ENSG00000168743_35 (sequence is synthesized)
aataggtacaatagaaggtcttctgtcatttaacctggtaaaggcagggctggagggggaaaataaatcattaagcctttgagtaacggcagaatatatggctgtagatccatttttaat

SEQ ID NO: 553761 - DNA, 120 bp, Artificial Sequence
  ENSG00000168743_36 (sequence is synthesized)
ggttcatttcctttatggtcatataactgcacagctgaagatgaaaggggaaaataaatgaaaattttacttttcgatgccaatgatacattgcactaaactgatggaagaagttatcca

SEQ ID NO: 553762 - DNA, 120 bp, Artificial Sequence
  ENSG00000168743_37 (sequence is synthesized)
aagtactgtataacatcttgtttattatttaatgttttctaaaataaaaaatgttagtggttttccaaatggcctaataaaaacaattatttgtaaataaaaacactgttagtaatacca

SEQ ID NO: 553763 - DNA, 120 bp, Artificial Sequence
  ENSG00000168743_38 (sequence is synthesized)
tttgttttgcagctttctacgtcttaaggcagagaatagccaggataaggtgccagctcaaaggaagcaaatataaaaacaaagtccaccaaatgaaattactaacaccagcctatcatt

SEQ ID NO: 553764 - DNA, 120 bp, Artificial Sequence
  ENSG00000168743_39 (sequence is synthesized)
acaatgacttgcactgggaaccaatcagggacccagcagacaattgtagctgtctgcatgcaggtggacttgacttgtagcaactggagacaaggtgtagttctccatgtgtctgagatt

SEQ ID NO: 553765 - DNA, 120 bp, Artificial Sequence
  ENSG00000168743_40 (sequence is synthesized)
cagctcactgtcctgctgccaccctccaccacctcagaggctgctgtaactttgagaaaataacctttgaacctcagtctctacaatgcttaaataaagagaacattcaattagagaaaa

SEQ ID NO: 553766 - DNA, 120 bp, Artificial Sequence
  ENSG00000168743_41 (sequence is synthesized)
actcatccctagaggggcagtcctgtcctaatgtgctcgggagttgagctgatagagacagaaacagtctgctcatttcttcttcaaaacccgactggagagccaaatatttcttttggt

SEQ ID NO: 553767 - DNA, 120 bp, Artificial Sequence
  ENSG00000168743_42 (sequence is synthesized)
atggaaagaagctctggttatatggataggagagaacacttgttgtctagatacccctagttcatagattcatttgttgttttttgttgattttctgatccactcatctttctgattatt

SEQ ID NO: 553768 - DNA, 120 bp, Artificial Sequence
  ENSG00000168743_43 (sequence is synthesized)
gcttggccttgcaggtctgacttggggattttcaggttgtttaagaacatcatgtacctttgggtaacttcaagtggtcttggaatgcagattccaaagtaagatcagcgttgaagaatc

SEQ ID NO: 553769 - DNA, 120 bp, Artificial Sequence
  ENSG00000168743_44 (sequence is synthesized)
ttgaccttttcaaacagccatgcaagaagaaaatgctgtggaagggaagaaaaaaattatatttcctccccaaagttggagagagaagggaacatacagtatgtaagaaacagaaaagca

SEQ ID NO: 553770 - DNA, 120 bp, Artificial Sequence
  ENSG00000168743_45 (sequence is synthesized)
taacaagttgataaatacccaagtccagcctccttacagagaaaagatctggaatttctttttttggacatttgttttgcagctttctacgtcttaaggcagagaatagccaggataagg

SEQ ID NO: 553771 - DNA, 120 bp, Artificial Sequence
  ENSG00000168743_46 (sequence is synthesized)
tcgaagacacctctatcactcccaaattaaaaatattcttatctcaaactactttccatggctatttttccaaaatatgtgagctgccattttgctgataaataaaaatatattaatgat

SEQ ID NO: 553772 - DNA, 120 bp, Artificial Sequence
  ENSG00000168743_47 (sequence is synthesized)
aatattctggaaatgaaaaattggatttgaaaatacagcatcacaaaaggtctgaaatatttaaatttagaatttggactatagaagaatagcataacttcaattattggttaatatttt

SEQ ID NO: 553773 - DNA, 120 bp, Artificial Sequence
  ENSG00000168743_48 (sequence is synthesized)
tgttatgaaatgtttttttataacaaaatggtgactaaaatattactattttaaacatgtcctagatttttttttgtttcagaaaagcactgaaagttgaatatgtgtaagtctccggga

SEQ ID NO: 553774 - DNA, 120 bp, Artificial Sequence
  ENSG00000168748_0 (sequence is synthesized)
ccggagccgcagcccgaacgagcggaccgagccgaccgggcaggtgcacggctgcggggacggcagcggcatgaccggccaccacggctggggctacggccaggacgacggcccctcgca

SEQ ID NO: 553775 - DNA, 120 bp, Artificial Sequence
  ENSG00000168748_1 (sequence is synthesized)
cgcattggcacaagctgtatcccattgcccagggagatcgccaatcacccatcaatatcatctccagccaggctgtgtactctcccagcctgcaaccactggagctttcctatgaggcct

SEQ ID NO: 553776 - DNA, 120 bp, Artificial Sequence
  ENSG00000168748_2 (sequence is synthesized)
gcatgtccctcagcatcaccaacaatggccactctgtccaggtagacttcaatgacagcgatgaccgaaccgtggtgactgggggccccctggaagggccctaccgcctcaagcagtttc

SEQ ID NO: 553777 - DNA, 120 bp, Artificial Sequence
  ENSG00000168748_3 (sequence is synthesized)
acttccactggggcaagaagcacgatgtgggttctgagcacacggtggacggcaagtccttccccagcgagctgcatctggttcactggaatgccaagaagtacagcacttttggggagg

SEQ ID NO: 553778 - DNA, 120 bp, Artificial Sequence
  ENSG00000168748_4 (sequence is synthesized)
cggcctcagcacctgatggcctggctgtggttggtgtttttttggagacaggagacgagcaccccagcatgaatcgtctgacagatgcgctctacatggtccggttcaagggcaccaaag

SEQ ID NO: 553779 - DNA, 120 bp, Artificial Sequence
  ENSG00000168748_5 (sequence is synthesized)
cccagttcagctgcttcaaccccaagtgcctcctgcctgccagccggcactactggacctacccgggctctctgacgactcccccactcagtgagagtgtcacctggattgtgctccggg

SEQ ID NO: 553780 - DNA, 120 bp, Artificial Sequence
  ENSG00000168748_6 (sequence is synthesized)
acatggtgaacaacttccggccaccacagccactgaagggccgcgtggtaaaggcctccttccgggcctgagctgcccatctgcctagccggccactagggcaccatcttctcaagggct

SEQ ID NO: 553781 - DNA, 120 bp, Artificial Sequence
  ENSG00000168748_7 (sequence is synthesized)
tccatgtcagcagacaccaaaccatctgaggcttcctccctggggggtgctggggaccctccttcagccagtttgctccttggtcaccctggaggcttctggatgggacccttgagtctg

SEQ ID NO: 553782 - DNA, 120 bp, Artificial Sequence
  ENSG00000168748_8 (sequence is synthesized)
gggcacccttcagctgccctggggacaggaaggacaggagctaagcagggtccaagcctggggctgcctctgctctccaagacccaaagaccctgggaacctcctctggtcttccccact

SEQ ID NO: 553783 - DNA, 120 bp, Artificial Sequence
  ENSG00000168748_9 (sequence is synthesized)
ggcagtggcagcagccccaccccgagcgcacactgtgatggaggagactgagctccctggggcgggcagctgacactaccagagagactcaagcaataattagaggtgggcagagctgcc

SEQ ID NO: 553784 - DNA, 120 bp, Artificial Sequence
  ENSG00000168748_10 (sequence is synthesized)
ctctcggcattacctcttctgcaggctctgccatgcacgcacctcactgccaggccattaaaatcagcacccagcatgctggaggtgacgtggccttctccctccagccacctgctgcca

SEQ ID NO: 553785 - DNA, 120 bp, Artificial Sequence
  ENSG00000168748_11 (sequence is synthesized)
cgggcaggccctggctatagcttatacagtatctccccttgtccccacccagtcaccaaagccacctacatgacagtccatccctgttgaattaataaattaatgtatccatgcaacaaa

SEQ ID NO: 553786 - DNA, 120 bp, Artificial Sequence
  ENSG00000168748_12 (sequence is synthesized)
cggcaagtgagcggggacctcgggggagcggggctccgcgtggcaagggcgcagtgtcccccggagagaatttccccgcagaagtggccgagctgccttctcggccggtacgtgagggaa

SEQ ID NO: 553787 - DNA, 120 bp, Artificial Sequence
  ENSG00000168748_13 (sequence is synthesized)
gggggcacttgggggcgcaagcatgtgtctgggtgtctacaccgagcagggtgtttgcgcacgtccgggtgtgagtcgtgggagcccgtggcccacaccagcctcctgggctgacgcgga

SEQ ID NO: 553788 - DNA, 120 bp, Artificial Sequence
  ENSG00000168754_0 (sequence is synthesized)
gcacttggccggcgagctccccagctggcggcggcggcggctgtgagctggccgcttggtttggagtcggaactcaatccccagaactggatctttaggttccacgttggcggccctgga

SEQ ID NO: 553789 - DNA, 120 bp, Artificial Sequence
  ENSG00000168754_1 (sequence is synthesized)
tctagggacgcaactcttggggtcctcccactgcgccgcctggggagcctgctcctgcttcctttcccggctagctggccccgtcctctgaggccgtgcgaattcccgccaccctccctc

SEQ ID NO: 553790 - DNA, 120 bp, Artificial Sequence
  ENSG00000168754_2 (sequence is synthesized)
accccggagccctgcccttcccgccctatgtggccaaggcttccaggtgcgggcctcgctccacaactcaggaggcaggatcagcggctccattttacaggacagatgtcccacggcttg

SEQ ID NO: 553791 - DNA, 120 bp, Artificial Sequence
  ENSG00000168754_3 (sequence is synthesized)
cagatggctgggccccaggagacggtgctagcccttcctctgagagaaggggtgcaggctgccgccaccgtgcccatcctcctgtacaacctggaggatggcttgtcagaccatcccctg

SEQ ID NO: 553792 - DNA, 120 bp, Artificial Sequence
  ENSG00000168754_4 (sequence is synthesized)
gaccaggggccccgctgccctgcccggcggccctgcagccctgcctcggctccagctcccacatcgccaaagaagcccaagatacaggcacctggggaaacgtttcccactgactggagc

SEQ ID NO: 553793 - DNA, 120 bp, Artificial Sequence
  ENSG00000168754_5 (sequence is synthesized)
cccccgcccgtggaattcctcaacccgagggtgctgcaggccagtcgggaggccccggcccagaggtgggtgggtgtggtgggcccccagggcctgaggagactggctggtgagctgccc

SEQ ID NO: 553794 - DNA, 120 bp, Artificial Sequence
  ENSG00000168754_6 (sequence is synthesized)
gaggagttggagcaggaacacctggacttggacccgaagaggggcctggccttgccagagaagctgttctggaacacgtcaggcctgagccagcaggctgcggccccagagttttcctgg

SEQ ID NO: 553795 - DNA, 120 bp, Artificial Sequence
  ENSG00000168754_7 (sequence is synthesized)
gggggctcaggaagctacttcaacaacctggactacttactgcaggagaagagggaacaggccctggagcaggagcgagagaggctgcttctgcaggagtgtctcaatctcaactccttg

SEQ ID NO: 553796 - DNA, 120 bp, Artificial Sequence
  ENSG00000168754_8 (sequence is synthesized)
gatcttgatgaagaggaagtgccactcacacccgagcacaggatgctggtggaaaagtactcagtgtccctgcagaccatcccgccggtccatccaggtgagactgtgtttctgcccagg

SEQ ID NO: 553797 - DNA, 120 bp, Artificial Sequence
  ENSG00000168754_9 (sequence is synthesized)
tgtcaccccctgccatgcatcctggactcctcactcctgaagccacgcagccacctggaagggctgttcctcagctccccgccagcccaacagctctccttcctgcgcagtggcctcctg

SEQ ID NO: 553798 - DNA, 120 bp, Artificial Sequence
  ENSG00000168754_10 (sequence is synthesized)
aacatcctctacctgcacatgcctgactgcccggtatccctgctccagtggctgttccagctgctgacatggcctccagaaacatctttgggagcctttggtcttctgtgggatctcatt

SEQ ID NO: 553799 - DNA, 120 bp, Artificial Sequence
  ENSG00000168754_11 (sequence is synthesized)
aagaagtcagggaggcattccacagcctgggtgcccacagtcctgccctgtaccctctggggcccttttggcacggtggcagggtgcttccaggcgaggctggcctgaatgagaatgagg

SEQ ID NO: 553800 - DNA, 120 bp, Artificial Sequence
  ENSG00000168754_12 (sequence is synthesized)
agcaggacgctccccaagagattgccttggacatcagcctgggccacatctacaagtttctggcgctgtgtgcccaggcccagccgggggcctacactgatgagaacctcatgggactga

SEQ ID NO: 553801 - DNA, 120 bp, Artificial Sequence
  ENSG00000168754_13 (sequence is synthesized)
ttgagctgctgtgccgcaccagcctggacgtggggctccgcctgctgcccaaagttgacctccagcagcttctcctcttgctcctggagaacatccgggagtggccagggaagctccagg

SEQ ID NO: 553802 - DNA, 120 bp, Artificial Sequence
  ENSG00000168754_14 (sequence is synthesized)
aactgtgctgcaccctgagctgggtgtctgaccaccaccacaacctgctggccctcgtgcagttcttcccagacatgacctcccggagcaggcggcttcgaagccagctcagccttgtgg

SEQ ID NO: 553803 - DNA, 120 bp, Artificial Sequence
  ENSG00000168754_15 (sequence is synthesized)
tcattgctcgaatgctgggccagcaggagatgctccctctctggcaagagaagacccagctgtcctcgctcagccggctcctgggcctcatgaggccatcatctctcaggcaatacctgg

SEQ ID NO: 553804 - DNA, 120 bp, Artificial Sequence
  ENSG00000168754_16 (sequence is synthesized)
actctgtgcccttgccaccctgccaggagcaacagccaaaggctagtgccgagctagaccacaaggcctgctacctgtgccacagcttgctgatgctggccggggtagttgttagctgcc

SEQ ID NO: 553805 - DNA, 120 bp, Artificial Sequence
  ENSG00000168754_17 (sequence is synthesized)
aggacatcactccagaccagtggggcgagctgcagctgctgtgcatgcagttggaccgccacatcagcacgcagatccgggagagcccccaggccatgcaccgcaccatgctcaaggacc

SEQ ID NO: 553806 - DNA, 120 bp, Artificial Sequence
  ENSG00000168754_18 (sequence is synthesized)
tggctacccagacctacatccgttggcaggagctgctgacccactgccagccccaggcccagtatttcagcccctggaaagacatctaaagggacagggtcagggcagcccagggctcct

SEQ ID NO: 553807 - DNA, 120 bp, Artificial Sequence
  ENSG00000168754_19 (sequence is synthesized)
ggcttcagcaggaagtgaacaggctcagggaactggaggaagcgaagcatcaaggccagaggaggccacatgctgaccagcctgatgaggcaagagcctgcccctgccaccgccccgacc

SEQ ID NO: 553808 - DNA, 120 bp, Artificial Sequence
  ENSG00000168754_20 (sequence is synthesized)
cctctcctctctgcaagagcctgcctctgccaccgccccgaccccctctcctctcagcaagggatgggcctctctgcctcgcccacccctcagccctcctcccagccatctcctcttccc

SEQ ID NO: 553809 - DNA, 120 bp, Artificial Sequence
  ENSG00000168754_21 (sequence is synthesized)
taaggcctctgtctccatagctctggtttccctgggcctcagtcctccccaccctccttcctctgtctccctgtcactaatgtgaggtttctttgtgcacattaaagtcttctttcagca

SEQ ID NO: 553810 - DNA, 120 bp, Artificial Sequence
  ENSG00000168754_22 (sequence is synthesized)
tttcttccaggttcagagacccccatcctgggaggcacagacgagccttcccctgcctctttccccgtctccatcatgctgcgagggggctggaggggagaggagtgcaggacccagccc

SEQ ID NO: 553811 - DNA, 120 bp, Artificial Sequence
  ENSG00000168754_23 (sequence is synthesized)
gctttaaaatcccctggaaggaaaagagcgggaaggggagtggaaggcaggggctgaagacacaggccaggcggaatgaagatgatggtggtcttgctcatgctgtcctcgctcagccgg

SEQ ID NO: 553812 - DNA, 120 bp, Artificial Sequence
  ENSG00000168754_24 (sequence is synthesized)
tagcccccagacctgggaggggcgggaagtggtcaggcagggctggccagagccaccagcacatccacccccgctgcagctgctgagctcctggcagggatatgggtggagtgggcatgt

SEQ ID NO: 553813 - DNA, 90 bp, Artificial Sequence
  ENSG00000168754_25 (sequence is synthesized)
cagccacccgccatgtgttttaaacaccatgaggtgtgttcacgcaacattcaagaagagcagctccccgccagcccaacagctctcctt

SEQ ID NO: 553814 - DNA, 120 bp, Artificial Sequence
  ENSG00000168754_26 (sequence is synthesized)
cacaggggtttagaattgactggtgtaggagcagaggacctggggctggatctgggcacagcaatttgcagggcactgctgggcaggagtccctgatggccaagctgctgggctctgtat

SEQ ID NO: 553815 - DNA, 120 bp, Artificial Sequence
  ENSG00000168754_27 (sequence is synthesized)
ctcccacaagctgcagcggaggccccatggagcaggagcagaagcacacgttggagaactgaacttgaaggacaggacttacagcattgaggtcacacagctgtcctcgctcagccggct

SEQ ID NO: 553816 - DNA, 120 bp, Artificial Sequence
  ENSG00000168757_0 (sequence is synthesized)
ggctcttcgcgcgcagtcccttagggggcgcctggaagcccggcgcatgcgccctgagggctcgctgacctaccgggtgccagagaggctgcggcagggttcctgtggcgtgggtcgggc

SEQ ID NO: 553817 - DNA, 86 bp, Artificial Sequence
  ENSG00000168757_1 (sequence is synthesized)
ctgcggcagggttctgtgcgagtgccaaggagggcaccgccttcaggatggaggctgtgcaggagggggcggccggggtggagagt

SEQ ID NO: 553818 - DNA, 120 bp, Artificial Sequence
  ENSG00000168757_2 (sequence is synthesized)
gctgttggatgacataatggcggaggtggaggtggtggcggaggaggagggcctcgtggagcggcgggaggaggcccagcgggcacagcaggctgtgcctggccctgggcccatgacccc

SEQ ID NO: 553819 - DNA, 120 bp, Artificial Sequence
  ENSG00000168757_3 (sequence is synthesized)
gctgagctacatggtcagcctggaggtggaagaagagaagcatcgtgttcatctctgcaagatcatgttgttctttcggagtaacccctacttccagaataaagtgattaccaaggaata

SEQ ID NO: 553820 - DNA, 120 bp, Artificial Sequence
  ENSG00000168757_4 (sequence is synthesized)
gaataaagtgattaccaaggaatatctggtgaacatcacagaatacagggcttctcattccactccaattgagtggtatccggattatgaagtggaggcctatcgccgcagacaccacaa

SEQ ID NO: 553821 - DNA, 120 bp, Artificial Sequence
  ENSG00000168757_5 (sequence is synthesized)
cagcagccttaacttcttcaactggttctctgaccacaacttcgcaggatctaacaagattgctgagatcctatgtaaggacctgtggcgcaatcccctgcaatactacaagaggatgaa

SEQ ID NO: 553822 - DNA, 120 bp, Artificial Sequence
  ENSG00000168757_6 (sequence is synthesized)
gccacctgaagagggaacagagacgtcaggggactcccagttgttgagttgaatatgatggagcatcagattttacctaatacagcagaactcctaaaaagttacagccatatgcaggac

SEQ ID NO: 553823 - DNA, 120 bp, Artificial Sequence
  ENSG00000168757_7 (sequence is synthesized)
agcagtactcagcatggtcttatgcacaggaactaaaggaaaaagagatcgagtcacaaaaattcaggaagagggggtaaatgtggattgtatggaatgaaaaataaacattctcaagga

SEQ ID NO: 553824 - DNA, 75 bp, Artificial Sequence
  ENSG00000168757_8 (sequence is synthesized)
tcggcagcgggaaaagatggagcggaggcgcaagccccacctagatgttattgcaaaccacccccagatgtcagc

SEQ ID NO: 553825 - DNA, 120 bp, Artificial Sequence
  ENSG00000168757_9 (sequence is synthesized)
tgaggtgagtcctcactgggaaacatgaggaatgaccccgtgtgttcccagctgcttgggtcacctttctgagccctgatgaggcctttcccgattgagtcccctgacagatcctatgta

SEQ ID NO: 553826 - DNA, 120 bp, Artificial Sequence
  ENSG00000168757_10 (sequence is synthesized)
tcccctgcaatactacaagaggatgaagccacctgaagagggaacagagacgtcagaaattccttgagaggaagacagagagtgacagaatccaggacgttcatggcattgggctgaaaa

SEQ ID NO: 553827 - DNA, 120 bp, Artificial Sequence
  ENSG00000168757_11 (sequence is synthesized)
ggcacgttagagactgcactgcaaagcgggtgatagctgtggagtcttaagcccagtgaagaatcgtccatttccagaatcaatgagaagtaaagctgaaaatcattcagttcagtctgt

SEQ ID NO: 553828 - DNA, 120 bp, Artificial Sequence
  ENSG00000168757_12 (sequence is synthesized)
ggcacttgattccacggctgtcaaccccaccggcagtcatcccaccaaccccatgagattgggctccctgaatgtgcgtcctggtcatccttgccccaaaccacaaaggactgtttagat

SEQ ID NO: 553829 - DNA, 120 bp, Artificial Sequence
  ENSG00000168757_13 (sequence is synthesized)
tgatggatttccttaagctgttgccccatcagacttgtgtgtgcttttagggcccagtgcatcttgttagctgactcccctcacagacaatactgggaatggggcagggattgcgcagaa

SEQ ID NO: 553830 - DNA, 120 bp, Artificial Sequence
  ENSG00000168757_14 (sequence is synthesized)
cagtttgtaacacgtggtaggaggaagtttaagggatcacaaatggggaagggatatccttttctcagcgggccccacaattgaaacatttcaaagtatggctcagagaaaatgcgtttt

SEQ ID NO: 553831 - DNA, 80 bp, Artificial Sequence
  ENSG00000168758_0 (sequence is synthesized)
ccgtggtggcgcggggagcccgagcctaggggcgcggagccgggcggggacggaggggcggtggcagagaggccgcggag

SEQ ID NO: 553832 - DNA, 120 bp, Artificial Sequence
  ENSG00000168758_1 (sequence is synthesized)
caggcggcgacgcgggggcaggggtggacggcggtcagagccgaacgcgagggcggcgcccggggactggagctgcgcgcaataggacagctggcctgaagctcagagccggggcgtgcg

SEQ ID NO: 553833 - DNA, 120 bp, Artificial Sequence
  ENSG00000168758_2 (sequence is synthesized)
ccatggccccacactgggctgtctggctgctggcagcaaggctgtggggcctgggcattggggctgaggtgtggtggaaccttgtgccgcgtaagacagtgtcttctggggagctggcca

SEQ ID NO: 553834 - DNA, 120 bp, Artificial Sequence
  ENSG00000168758_3 (sequence is synthesized)
cggtagtacggcggttctcccagaccggcatccaggacttcctgacactgacgctgacggagcccactgggcttctgtacgtgggcgcccgagaggccctgtttgccttcagcatggagg

SEQ ID NO: 553835 - DNA, 120 bp, Artificial Sequence
  ENSG00000168758_4 (sequence is synthesized)
ccctggagctgcaaggagcgatctcctgggaggcccccgtggagaagaagactgagtgtatccagaaagggaagaacaaccagaccgagtgcttcaacttcatccgcttcctgcagccct

SEQ ID NO: 553836 - DNA, 120 bp, Artificial Sequence
  ENSG00000168758_5 (sequence is synthesized)
acaatgcctcccacctgtacgtctgtggcacctacgccttccagcccaagtgcacctacgtcaacatgctcaccttcactttggagcatggagagtttgaagatgggaagggcaagtgtc

SEQ ID NO: 553837 - DNA, 120 bp, Artificial Sequence
  ENSG00000168758_6 (sequence is synthesized)
cctatgacccagctaagggccatgctggccttcttgtggatggtgagctgtactcggccacactcaacaacttcctgggcacggaacccattatcctgcgtaacatggggccccaccact

SEQ ID NO: 553838 - DNA, 120 bp, Artificial Sequence
  ENSG00000168758_7 (sequence is synthesized)
ccatgaagacagagtacctggccttttggctcaacgaacctcactttgtaggctctgcctatgtacctgagagtgtgggcagcttcacgggggacgacgacaaggtctacttcttcttca

SEQ ID NO: 553839 - DNA, 120 bp, Artificial Sequence
  ENSG00000168758_8 (sequence is synthesized)
gggagcgggcagtggagtccgactgctatgccgagcaggtggtggctcgtgtggcccgtgtctgcaagggcgatatggggggcgcacggaccctgcagaggaagtggaccacgttcctga

SEQ ID NO: 553840 - DNA, 120 bp, Artificial Sequence
  ENSG00000168758_9 (sequence is synthesized)
aggcgcggctggcatgctctgccccgaactggcagctctacttcaaccagctgcaggcgatgcacaccctgcaggacacctcctggcacaacaccaccttctttggggtttttcaagcac

SEQ ID NO: 553841 - DNA, 120 bp, Artificial Sequence
  ENSG00000168758_10 (sequence is synthesized)
agtggggtgacatgtacctgtcggccatctgtgagtaccagttggaagagatccagcgggtgtttgagggcccctataaggagtaccatgaggaagcccagaagtgggaccgctacactg

SEQ ID NO: 553842 - DNA, 120 bp, Artificial Sequence
  ENSG00000168758_11 (sequence is synthesized)
accctgtacccagccctcggcctggctcgtgcattaacaactggcatcggcgccacggctacaccagctccctggagctacccgacaacatcctcaacttcgtcaagaagcacccgctga

SEQ ID NO: 553843 - DNA, 120 bp, Artificial Sequence
  ENSG00000168758_12 (sequence is synthesized)
tggaggagcaggtggggcctcggtggagccgccccctgctcgtgaagaagggcaccaacttcacccacctggtggccgaccgggttacaggacttgatggagccacctatacagtgctgt

SEQ ID NO: 553844 - DNA, 120 bp, Artificial Sequence
  ENSG00000168758_13 (sequence is synthesized)
tcattggcacaggagacggctggctgctcaaggctgtgagcctggggccctgggttcacctgattgaggagctgcagctgtttgaccaggagcccatgagaagcctggtgctatctcaga

SEQ ID NO: 553845 - DNA, 120 bp, Artificial Sequence
  ENSG00000168758_14 (sequence is synthesized)
gcaagaagctgctctttgccggctcccgctctcagctggtgcagctgcccgtggccgactgcatgaagtatcgctcctgtgcagactgtgtcctcgcccgggacccctattgcgcctgga

SEQ ID NO: 553846 - DNA, 120 bp, Artificial Sequence
  ENSG00000168758_15 (sequence is synthesized)
gatccagcatgtgatgacctcggacacttcaggcatctgcaacctccgtggcagtaagaaagtcaggcccactcccaaaaacatcacggtggtggcgggcacagacctggtgctgccctg

SEQ ID NO: 553847 - DNA, 120 bp, Artificial Sequence
  ENSG00000168758_16 (sequence is synthesized)
ccacctctcctccaacttggcccatgcccgctggacctttgggggccgggacctgcctgcggaacagcccgggtccttcctctacgatgcccggctccaggccctggttgtgatggctgc

SEQ ID NO: 553848 - DNA, 120 bp, Artificial Sequence
  ENSG00000168758_17 (sequence is synthesized)
ccagccccgccatgccggggcctaccactgcttttcagaggagcagggggcgcggctggctgctgaaggctaccttgtggctgtcgtggcaggcccgtcggtgaccttggaggcccgggc

SEQ ID NO: 553849 - DNA, 120 bp, Artificial Sequence
  ENSG00000168758_18 (sequence is synthesized)
ccccctggaaaacctggggctggtgtggctggcggtggtggccctgggggctgtgtgcctggtgctgctgctgctggtgctgtcattgcgccggcggctgcgggaagagctggagaaagg

SEQ ID NO: 553850 - DNA, 120 bp, Artificial Sequence
  ENSG00000168758_19 (sequence is synthesized)
ggccaaggctactgagaggaccttggtgtaccccctggagctgcccaaggagcccaccagtccccccttccggccctgtcctgaaccagatgagaaactttgggatcctgtcggttacta

SEQ ID NO: 553851 - DNA, 120 bp, Artificial Sequence
  ENSG00000168758_20 (sequence is synthesized)
ctattcagatggctcccttaagatagtacctgggcatgcccggtgccagcccggtggggggcccccttcgccacctccaggcatcccaggccagcctctgccttctccaactcggcttca

SEQ ID NO: 553852 - DNA, 120 bp, Artificial Sequence
  ENSG00000168758_21 (sequence is synthesized)
cctggggggtgggcggaactcaaatgccaatggttacgtgcgcttacaactaggaggggaggaccggggagggctcgggcaccccctgcctgagctcgcggatgaactgagacgcaaact

SEQ ID NO: 553853 - DNA, 120 bp, Artificial Sequence
  ENSG00000168758_22 (sequence is synthesized)
gcagcaacgccagccactgcccgactccaaccccgaggagtcatcagtatgaggggaacccccaccgcgtcggcgggaagcgtgggaggtgtagctcctacttttgcacaggcaccagct

SEQ ID NO: 553854 - DNA, 120 bp, Artificial Sequence
  ENSG00000168758_23 (sequence is synthesized)
acctcagggacatggcacgggcacctgctctgtctgggacagatactgcccagcacccacccggccatgaggacctgctctgctcagcacgggcactgccacttggtgtggctcaccagg

SEQ ID NO: 553855 - DNA, 120 bp, Artificial Sequence
  ENSG00000168758_24 (sequence is synthesized)
gcaccagcctcgcagaaggcatcttcctcctctctgtgaatcacagacacgcgggaccccagccgccaaaacttttcaaggcagaagtttcaagatgtgtgtttgtctgtatttgcacat

SEQ ID NO: 553856 - DNA, 120 bp, Artificial Sequence
  ENSG00000168758_25 (sequence is synthesized)
gtgtttgtgtgtgtgtgtatgtgtgtgtgcacgcgcgtgcgcgcttgtggcatagccttcctgtttctgtcaagtcttcccttggcctgggtcctcctggtgagtcattggagctatgaa

SEQ ID NO: 553857 - DNA, 120 bp, Artificial Sequence
  ENSG00000168758_26 (sequence is synthesized)
ggggaaggggtcgtatcactttgtctctcctacccccactgccccgagtgtcgggcagcgatgtacatatggaggtggggtggacagggtgctgtgccccttcagagggagtgcagggct

SEQ ID NO: 553858 - DNA, 120 bp, Artificial Sequence
  ENSG00000168758_27 (sequence is synthesized)
tggggtgggcctagtcctgctcctagggctgtgaatgttttcagggtggggggagggagatggagcctcctgtgtgtttggggggaagggtgggtggggcctcccacttggccccggggt

SEQ ID NO: 553859 - DNA, 120 bp, Artificial Sequence
  ENSG00000168758_28 (sequence is synthesized)
tcagtggtattttatacttgccttcttcctgtacagggctgggaaaggctgtgtgaggggagagaagggagagggtgggcctgctgtggacaatggcatactctcttccagccctaggag

SEQ ID NO: 553860 - DNA, 120 bp, Artificial Sequence
  ENSG00000168758_29 (sequence is synthesized)
gagggctcctaacagtgtaacttattgtgtccccgcgtatttatttgttgtaaatatttgagtatttttatattgacaaataaaatggagaaaatgaaacgattgctctgatggggctaa

SEQ ID NO: 553861 - DNA, 120 bp, Artificial Sequence
  ENSG00000168758_30 (sequence is synthesized)
ccctcttgggcaacaaaggggcctcgggaagctgggccccttcgctcccggcccttctcacactcctgccctgctgatgtggaacggggtttggggttctgcagggctattgtctgcgct

SEQ ID NO: 553862 - DNA, 120 bp, Artificial Sequence
  ENSG00000168758_31 (sequence is synthesized)
tagggctcatgccacttgttaatcagccttccagtggcacgaggagtcattttctggggataggcgctttgcccaaagcgtgagaagcaggagcaggccctttctgttgattgaagggtc

SEQ ID NO: 553863 - DNA, 120 bp, Artificial Sequence
  ENSG00000168758_32 (sequence is synthesized)
ttcctggctggtgaagccctttccagacttgagggcagggaccagtggtcctcggggcctagaaagaggcagaattgggggccaaacggcagacccctctggtccgccccaaaagacgcc

SEQ ID NO: 553864 - DNA, 120 bp, Artificial Sequence
  ENSG00000168758_33 (sequence is synthesized)
tcggttcccccagcgtgcctcccctggatactcgcctcgacgtggctcgcccgcggtcgttcctgcaactgcacggtcgggagtccctctccccagcccagcccgcccggagtcttcggg

SEQ ID NO: 553865 - DNA, 120 bp, Artificial Sequence
  ENSG00000168758_34 (sequence is synthesized)
tgtgagatgtttatgatgccctcaccatggtggttttccttccagcccccatttccgtgactgtttccctgaagtgcttgcattatacccttgtgcaatactctttttggtttttttttg

SEQ ID NO: 553866 - DNA, 60 bp, Artificial Sequence
  ENSG00000168758_35 (sequence is synthesized)
acaggtgcctgccactatgcccagctaaaggttttttgtttttgttttttgctcactgca

SEQ ID NO: 553867 - DNA, 120 bp, Artificial Sequence
  ENSG00000168758_36 (sequence is synthesized)
cccaaagtgctgggattccaggcatgacctgctgttcctagttgccttgtgcaatactcttgtggcatgtttgctacacctcctgaactttgatttgtttgccttttaccagctattatg

SEQ ID NO: 553868 - DNA, 120 bp, Artificial Sequence
  ENSG00000168758_37 (sequence is synthesized)
ctattatgactcaaaattgtcccctagaacatggaataatggcagaaagaaagtgtgtggttgaataaacacacagattggcatccaccgttgaaacaggaaaacatcttatgttatgct

SEQ ID NO: 553869 - DNA, 120 bp, Artificial Sequence
  ENSG00000168758_38 (sequence is synthesized)
gctgctgttgtgagggctgatgggccttgaaatgtatttcctgcactatgtgtgtgtgagtgtgtgtgattatactttttggcctcacagccccatcatccctttctaataacgtcacgt

SEQ ID NO: 553870 - DNA, 120 bp, Artificial Sequence
  ENSG00000168758_39 (sequence is synthesized)
cgataaggggcttaggattgcatctggcctgtgtaagccctctgagttctgcggttcttagagttcccttttcagcactatagctctgccttgttcccttgttcctccttctggcgcccc

SEQ ID NO: 553871 - DNA, 120 bp, Artificial Sequence
  ENSG00000168758_40 (sequence is synthesized)
gttctcctcttccccagccctgctttcctgcactaacatgcactctgttttctctgccactacagtcaggcccactcccaaaaacatcacggtggtggcgggcacagacctggtgctgcc

SEQ ID NO: 553872 - DNA, 120 bp, Artificial Sequence
  ENSG00000168758_41 (sequence is synthesized)
ctgtgctcgcatctctggcagcctggattggggtcctgctggagtgaagggtttcctgaggcagggagtactcatagccgtctgtgcctcctgctctgctggactctgatagaggcagtg

SEQ ID NO: 553873 - DNA, 120 bp, Artificial Sequence
  ENSG00000168758_42 (sequence is synthesized)
ggcagcagggcaaagaaggaagcagccgccgaggaagcgaaggtggggtgggggtgcccagccctgcggccggaggtgccattgaccctgagagcaagagccatcagtctgatggcttcc

SEQ ID NO: 553874 - DNA, 120 bp, Artificial Sequence
  ENSG00000168758_43 (sequence is synthesized)
tctggccggaagctgtggctgagatatccttccttcctcccagcagcctggatttgcctcctcccaggctgggaaaggctagggaggcccaggtggggctgtcagggccaaaggctgttt

SEQ ID NO: 553875 - DNA, 120 bp, Artificial Sequence
  ENSG00000168758_44 (sequence is synthesized)
caaaagtgtcctttattgccaatcagggggtttggctggcatctgcttgtggcatggggtgctggctctcgtggagcaagactgagggctgtcgagccccaggggtcctgcccatcagca

SEQ ID NO: 553876 - DNA, 120 bp, Artificial Sequence
  ENSG00000168763_0 (sequence is synthesized)
gcagcaggcgatggcggcggcggtagctgcggcgggtcggttaggctggttgttcgccgcgctctgcctgggcaacgccgcgggggaggccgcgccgggcccgcgagtgctgggcttctg

SEQ ID NO: 553877 - DNA, 120 bp, Artificial Sequence
  ENSG00000168763_1 (sequence is synthesized)
cctggaggaggatggagcggcgggcgcgggttgggtacgcggaggggcggcgcgggacacgccggacgccaccttcctcctgcgcctcttcggcccgggcttcgccaacagctcttggtc

SEQ ID NO: 553878 - DNA, 80 bp, Artificial Sequence
  ENSG00000168763_2 (sequence is synthesized)
ccaacagctcttggtcctgggtggccccggagggggcgggctgccgggaggaggcggcctcccccgcgggcgagtggcgc

SEQ ID NO: 553879 - DNA, 80 bp, Artificial Sequence
  ENSG00000168763_3 (sequence is synthesized)
ggccgggctgctggcgctggcagcgctggcgcgaggcctgcagctgagcgcgctggcgctggcgcctgccgaggtgcagg

SEQ ID NO: 553880 - DNA, 80 bp, Artificial Sequence
  ENSG00000168763_4 (sequence is synthesized)
cgcgctggcgctggcgcctgccgaggtgcaggtgctgcgcgagagcggctcggaggcggagcgtgcggcggcgcggcgtt

SEQ ID NO: 553881 - DNA, 120 bp, Artificial Sequence
  ENSG00000168763_5 (sequence is synthesized)
ctgctgctggccagcctggcgcaggcggcgctggcggtgctgctgtaccgcgcggccggccagcgtgcggtgcccgccgtgttgggcagcgcggggctcgtgttcctggtgggagaggtg

SEQ ID NO: 553882 - DNA, 120 bp, Artificial Sequence
  ENSG00000168763_6 (sequence is synthesized)
tgttcctggtgggagaggtggtgccggccgccgtgagcgggcgctggacgctggcgctggcgccgcgagcgctcggcctcagccgcctggccgtcctgctcactctgcccgtcgcgctgc

SEQ ID NO: 553883 - DNA, 120 bp, Artificial Sequence
  ENSG00000168763_7 (sequence is synthesized)
ctggcggcgcggcccgggcggctgcgggagcgggtgctggagctggcgcgcggcggcggcgacccctacagcgatctcagcaagggcgtgctgcgctgccggaccgtggaggacgtgctc

SEQ ID NO: 553884 - DNA, 120 bp, Artificial Sequence
  ENSG00000168763_8 (sequence is synthesized)
gctcacgcccctcgaagactgcttcatgctggacgccagcaccgtgctggacttcggcgtcctggccagcatcatgcagagcggccacacgcgcatcccggtgtacgaggaggagcgctc

SEQ ID NO: 553885 - DNA, 120 bp, Artificial Sequence
  ENSG00000168763_9 (sequence is synthesized)
caacatcgtggacatgctctacctcaaggacttggccttcgtggatcccgaagactgcacgccgctcagcaccatcactcgtttctacaaccatccgctccacttcgtcttcaacgacac

SEQ ID NO: 553886 - DNA, 120 bp, Artificial Sequence
  ENSG00000168763_10 (sequence is synthesized)
caagctggacgctgtcctggaggaattcaagcgagggaagtcccacctggccatcgtgcagaaggtgaacaacgagggtgaaggcgaccccttctacgaggtcctgggcctggtcaccct

SEQ ID NO: 553887 - DNA, 120 bp, Artificial Sequence
  ENSG00000168763_11 (sequence is synthesized)
ggaggacgtgatcgaggagatcatcaggtccgagatcctggacgagtctgaagactaccgagacaccgtggtgaagaggaagcctgcttctctgatggcccctctgaagcggaaggagga

SEQ ID NO: 553888 - DNA, 120 bp, Artificial Sequence
  ENSG00000168763_12 (sequence is synthesized)
gttctccttgttcaaggtgtctgatgatgaatataaagtaacaatctcgcctcagctgctcttggccacccagcgcttcctgtcccgagaagtggatgtattcagcccgctgcgcatctc

SEQ ID NO: 553889 - DNA, 120 bp, Artificial Sequence
  ENSG00000168763_13 (sequence is synthesized)
tgagaaggtcctgctgcacctgttgaagcatcccagtgtcaaccaggaagtgaggtttgacgagagcaaccggctggccacacaccactacctgtaccagcgcagccagccggtggatta

SEQ ID NO: 553890 - DNA, 120 bp, Artificial Sequence
  ENSG00000168763_14 (sequence is synthesized)
cttcattctcatcctgcagggcagggttgaagtggagatcgggaaagagggtctgaagtttgagaatggggccttcacgtactatggagtgtcggccctaactgtgccatcctcggttca

SEQ ID NO: 553891 - DNA, 120 bp, Artificial Sequence
  ENSG00000168763_15 (sequence is synthesized)
ccagtccccggtgtcctcgctccagcccatccgccatgacctgcagcccgacccaggtgacggcacgcattcatctgcgtattgtcccgactacaccgtgagggcgctctctgatctgca

SEQ ID NO: 553892 - DNA, 120 bp, Artificial Sequence
  ENSG00000168763_16 (sequence is synthesized)
gctcatcaaggttacgcgactgcagtacctcaatgcactcctggctacccgagcccagaacctgccacagtcccctgagaacaccgacctgcaggttattccaggcagccagaccaggct

SEQ ID NO: 553893 - DNA, 120 bp, Artificial Sequence
  ENSG00000168763_17 (sequence is synthesized)
ccttggtgagaagaccaccacagcggcagggtccagccacagcaggcccggcgtcccggtggaaggcagccctgggcggaacccaggcgtttaacggctcactaggcagccccagatctg

SEQ ID NO: 553894 - DNA, 120 bp, Artificial Sequence
  ENSG00000168763_18 (sequence is synthesized)
gggaacagatgagcacgtggggagctggagtgagctgagcagaagttttgtgcccgcctgcccccatcccctccaggccacgttttagatggcccttgtagttgcgggtcctgggtgtcc

SEQ ID NO: 553895 - DNA, 120 bp, Artificial Sequence
  ENSG00000168763_19 (sequence is synthesized)
tcagaactagacatcaatgcctggatccttcagccggccctgccctcctttaggagacaggagtcaccagggcacagccctccaggcccgcctcaggaaggaatgaaaggaatgccatca

SEQ ID NO: 553896 - DNA, 120 bp, Artificial Sequence
  ENSG00000168763_20 (sequence is synthesized)
gcagttactgcctttgtgtggccgtgacctctatttgtttgcttttaatttgccaacctatcgctgctggcagcactttttgagcaagccgagagcacccattttggctgggggttcaga

SEQ ID NO: 553897 - DNA, 120 bp, Artificial Sequence
  ENSG00000168763_21 (sequence is synthesized)
tcgatggccttgtccatgttgtcctttctggcttccctgatggtgtcatgtttcagcgcatgcgccccagcctttcccatgtgccaaaccagaagctccactgcccgtaggctgtccctg

SEQ ID NO: 553898 - DNA, 120 bp, Artificial Sequence
  ENSG00000168763_22 (sequence is synthesized)
tagccctgctccctccctggaggctgctcttctgattctgagagctggcctagtggtgctgagggcccctttctgcttctctgcccacctgctgagttgccactcgcagtgttgtcagtt

SEQ ID NO: 553899 - DNA, 120 bp, Artificial Sequence
  ENSG00000168763_23 (sequence is synthesized)
cccgtgttctgagaagaggtcatgcctgggaggaagggatcgtcatgctgcatcgaatcctctctccgccgtgtggcccccaggagagtagctgcctgttgcacctgctccacacctccc

SEQ ID NO: 553900 - DNA, 120 bp, Artificial Sequence
  ENSG00000168763_24 (sequence is synthesized)
cacagcctccctgcaggtgctgtgtggccgtgatgtgcagagagcagtgagggagggttcatgaaccaggtggatcctctttaaaaaaaaaaaagtttttgttatatctctagaacattt

SEQ ID NO: 553901 - DNA, 120 bp, Artificial Sequence
  ENSG00000168763_25 (sequence is synthesized)
caagtcttttcctttttttctgttcctagctatggggttttagagaagtgggaacaggaaggcatttgtctttttcttctagtttactacattttccttccgtagttcttcagctgtgtg

SEQ ID NO: 553902 - DNA, 120 bp, Artificial Sequence
  ENSG00000168763_26 (sequence is synthesized)
gaaacgggcatcacaaggacataggatcatagattgggtagggagggaggaggatttctggaacttttctcaaaggaatttggacccttataaatgggactgaaggtcaaaacaacagtg

SEQ ID NO: 553903 - DNA, 120 bp, Artificial Sequence
  ENSG00000168763_27 (sequence is synthesized)
atatccttgcttagaaattgtcctcaaggaataaactctgagagcaagcccgggttggaaacagatgctttaaaatcctctctccagaacagtggttttttgtttgtttatttgagatgg

SEQ ID NO: 553904 - DNA, 120 bp, Artificial Sequence
  ENSG00000168763_28 (sequence is synthesized)
gctgggattataggtgtgagctaagatcagggattcttaaccttggctgcacaccagaatcacctggcaaattaaaaatacgtggacctgccaccagagcttgtgatttaatcagagtcg

SEQ ID NO: 553905 - DNA, 71 bp, Artificial Sequence
  ENSG00000168763_29 (sequence is synthesized)
cgtggacctgccaccagagcttgtgatttaatcagagtcggcatcagagttttcaattgatcttgctctgt

SEQ ID NO: 553906 - DNA, 120 bp, Artificial Sequence
  ENSG00000168763_30 (sequence is synthesized)
cagcctcgacctccctggttcaggccatcctgccacctcagcctcctgagtagtagggactacaggtaggcaccaccacacccagctaatacttttaatttttttttgtagagatagggt

SEQ ID NO: 553907 - DNA, 75 bp, Artificial Sequence
  ENSG00000168763_31 (sequence is synthesized)
cccagctaatacttttaatttttttttgtagagatagggtctcattatgttgcctggggtagtctcgaactccta

SEQ ID NO: 553908 - DNA, 120 bp, Artificial Sequence
  ENSG00000168763_32 (sequence is synthesized)
tacacctttcacccaggttcccctaatgttaacagcttacatataaccttggtacatttatcaaaactaaaggtgcaatcatactaatagctagagtttatttggattttaccatttttc

SEQ ID NO: 553909 - DNA, 120 bp, Artificial Sequence
  ENSG00000168763_33 (sequence is synthesized)
ccaatgtcccttttctgctgcagcagccaatccaggatgccatactgcacttagagctgttgctttcttttttcctaactttatattttgaaataatttcagatgataggaagttgtaaa

SEQ ID NO: 553910 - DNA, 120 bp, Artificial Sequence
  ENSG00000168763_34 (sequence is synthesized)
ggtaagggccccacgcacccttcatctagtttccctccatggttacatcttatatggttgtaatgcagtattccaacaaagactctgacactggtgcgatgtgggtggacagtccaaatc

SEQ ID NO: 553911 - DNA, 120 bp, Artificial Sequence
  ENSG00000168763_35 (sequence is synthesized)
atttgtcacatgtacatctgtgtaactaccactgcaatcaggataaagaagtcccatccccacaaggatctccctccccaccttccctaactcctggtaaccactaatcgttcatctctt

SEQ ID NO: 553912 - DNA, 120 bp, Artificial Sequence
  ENSG00000168763_36 (sequence is synthesized)
cttattttgtcatttcaagaatgttgtataaatgggagcatagtgtgtaagcattcgggattgtcttttttcactcggcgtcattctcgggagatcatccaggcattgcatgtgtcaaca

SEQ ID NO: 553913 - DNA, 120 bp, Artificial Sequence
  ENSG00000168763_37 (sequence is synthesized)
gtttgctcctttttattgctgagtggtattccgtggtgtatgcattggccccctgaaggacacctgggatgtttccagtttggggctattccaaataaagctgctacgactattcatgta

SEQ ID NO: 553914 - DNA, 120 bp, Artificial Sequence
  ENSG00000168763_38 (sequence is synthesized)
ttcccagtagacctttccctctttggcacagttggaaactgcagttgataaatgactgtggactagtgcgcgttttttgttttcagagcacacgtaagggtccagccacagcaggcccgg

SEQ ID NO: 553915 - DNA, 120 bp, Artificial Sequence
  ENSG00000168763_39 (sequence is synthesized)
ccaggcctggagtccctcctgcttcctcaggccagggaagggtctaggagaagaggggagcaggggcatgcggatatgcaccctcccaccccaaacaattgaggtggtgggtttctcctt

SEQ ID NO: 553916 - DNA, 120 bp, Artificial Sequence
  ENSG00000168763_40 (sequence is synthesized)
ccgctgtcttctgacgggaaaggtaatctggccgcatctgtttctctccttgccactcctcccagggcagggttgaagtggagatcgggaaagagggtctgaagtttgagaatggggcct

SEQ ID NO: 553917 - DNA, 120 bp, Artificial Sequence
  ENSG00000168763_41 (sequence is synthesized)
tcacgtactatggagtgtcggccctaactgtgccatcctcgggtaagccacggccctgctgatgctgagggccagggtggaggctgcagagcctgtcccccatcatcacttgggctctca

SEQ ID NO: 553918 - DNA, 120 bp, Artificial Sequence
  ENSG00000168763_42 (sequence is synthesized)
gtgcccctcctcacctctccttccacctgagcccaccaccccacaaggtggtgtagcccctgggcttccaggagggagggcagcattcttcatcgctcaactttgtggcccactccaccc

SEQ ID NO: 553919 - DNA, 120 bp, Artificial Sequence
  ENSG00000168763_43 (sequence is synthesized)
ctgcaaaacctctcccggctgtgtttgtccttctctcccagcttcccatgcacattgcctctccagagtgattggtggggtgggtcttcgaaactgtacagttgtccccaccaggggagg

SEQ ID NO: 553920 - DNA, 120 bp, Artificial Sequence
  ENSG00000168763_44 (sequence is synthesized)
caaggtcttaaaaacacttgactcagttgctcttctctgcccttaactagcttaaagttgtgcctctgtcctcttcgggcacggtgtcacctttcctgcctaccttctgcatctcgcttc

SEQ ID NO: 553921 - DNA, 120 bp, Artificial Sequence
  ENSG00000168765_0 (sequence is synthesized)
ctagtgcttccggaccttgctccctgaacactcggaggtggcggtggatcttactccttccagccagtgaggatccagcaacctgctccgtgcctcccgcgcctgttggttggaagtgac

SEQ ID NO: 553922 - DNA, 120 bp, Artificial Sequence
  ENSG00000168765_1 (sequence is synthesized)
gaccttgaagatcggccggttggaagtgacgaccttgaagatcggcgggcgcagcggggccgagggggcgggtctggcgctaggtccagcccctgcgtgccgggaaccccagaggaggtc

SEQ ID NO: 553923 - DNA, 120 bp, Artificial Sequence
  ENSG00000168765_2 (sequence is synthesized)
gcagttcagcccagctgaggcctgtctgcagaatcgacaccaaccagcatcatgtccatgacactggggtactgggacatccgcgggctggcccacgccatccgcctgctcctggaatac

SEQ ID NO: 553924 - DNA, 120 bp, Artificial Sequence
  ENSG00000168765_3 (sequence is synthesized)
acagactcaagctacgaggaaaagaagtatacgatgggggacgctcctgactatgacagaagccagtggctgaatgaaaaattcaagctgggcctggactttcccaatctgccctacttg

SEQ ID NO: 553925 - DNA, 120 bp, Artificial Sequence
  ENSG00000168765_4 (sequence is synthesized)
attgatggggctcacaagatcacccagagcaacgccatcctgtgctacattgcccgcaagcacaacctgtgtggggagacagaagaggagaagattcgtgtggacattttggagaaccag

SEQ ID NO: 553926 - DNA, 120 bp, Artificial Sequence
  ENSG00000168765_5 (sequence is synthesized)
ggaggaacttcctacaatgatgcagcacttctcacagttcctggggaagaggccatggtttgttggagacaagatcacctttgtagatttcctcgcctatgatgtccttgacctccaccg

SEQ ID NO: 553927 - DNA, 120 bp, Artificial Sequence
  ENSG00000168765_6 (sequence is synthesized)
tatatttgagcccaactgcttggacgcctttccaaatctgaaggacttcatctcccgctttgagggcttggagaagatctctgcctacatgaagtccagccgcttcctcccaaaacctct

SEQ ID NO: 553928 - DNA, 120 bp, Artificial Sequence
  ENSG00000168765_7 (sequence is synthesized)
gtacacaagggtggctgtctggggcaacaagtaatgccttgaaggccaggaggtgggagtgaggagcccatactcagcctgctgcccaggctgtgcagcgcagctggactctgcatccca

SEQ ID NO: 553929 - DNA, 120 bp, Artificial Sequence
  ENSG00000168765_8 (sequence is synthesized)
gcacctgcctcctcgttcctttctcctgtttattcccatctttacccccaagactttattgggcctcttcacttcccctaaacccctgtcccatgcaggccctttgaagcctcagctacc

SEQ ID NO: 553930 - DNA, 120 bp, Artificial Sequence
  ENSG00000168765_9 (sequence is synthesized)
cactttccttcatgaacatccccctcccaacactacccttccctgcactaaagccagcctgaccttccttcctgttagtggttgtatctgctttgaagggcctacctggcccctcgcctg

SEQ ID NO: 553931 - DNA, 120 bp, Artificial Sequence
  ENSG00000168765_10 (sequence is synthesized)
tggagctcagccctgagctgtccccgtgttgcatgacagcattgactggtttacaggccctgctcctgcagcatggcccctgccttaggcctacctgatcaaaataaagcctcagccaca

SEQ ID NO: 553932 - DNA, 120 bp, Artificial Sequence
  ENSG00000168765_11 (sequence is synthesized)
acactgattttactgctattcaccgaccttctcctctgcatgaggcagggtgtgaggcacagtgggagttgcatagatgactgccccatcctggaaatgagtgcagtgagaggcctgcag

SEQ ID NO: 553933 - DNA, 120 bp, Artificial Sequence
  ENSG00000168765_12 (sequence is synthesized)
tgaaggacttcatctcccgctttgaggtgatgcccccatcctcctttctctttgatgccccttgttccgttacctcctttcagatgctttcccagtcctggagctacataaagaataact

SEQ ID NO: 553934 - DNA, 120 bp, Artificial Sequence
  ENSG00000168765_13 (sequence is synthesized)
tgcatttattgagtgctggcttcatgccaggaaccttgcccagcacattatacctatcgtgtggaatttgaaatttccaacattcctacagggtgacagaattatcttgcccatttagag

SEQ ID NO: 553935 - DNA, 120 bp, Artificial Sequence
  ENSG00000168765_14 (sequence is synthesized)
ttggagaaccagtttatggacagccgtatgcagctggccaaactctgctatgacccagattttgagaaactgaaaccagaatacctgcaggcactccctgaaatgctgaagctctactca

SEQ ID NO: 553936 - DNA, 120 bp, Artificial Sequence
  ENSG00000168765_15 (sequence is synthesized)
cagtttctggggaagcagccatggtttcttggggacaagatcacctttgtggatttcatcgcttatgatgtccttgagagaaaccaagtatttgagcccagctgcctggatgccttccca

SEQ ID NO: 553937 - DNA, 120 bp, Artificial Sequence
  ENSG00000168765_16 (sequence is synthesized)
aacctgaaggacttcatctcccgatttgagggcttggagaagatctctgcctacatgaagtccagccgcttcctcccaagacctgtgttcacaaagatggctgtctggggcaacaagtag

SEQ ID NO: 553938 - DNA, 120 bp, Artificial Sequence
  ENSG00000168765_17 (sequence is synthesized)
ttcctagtgcttctccttgacacgcacagggatgaatgcattttcctaacaggcagctcaggggcggccagagggcctttgttcctctgtctccttccatgcagcctctcaaaatctcat

SEQ ID NO: 553939 - DNA, 120 bp, Artificial Sequence
  ENSG00000168765_18 (sequence is synthesized)
ctctccagaaactactcaatgtccattgtattattctgccactgcactaggaggaactttcaacttctttctctgagctcctttagttctttgtatccttgattttgctcatgtctgggt

SEQ ID NO: 553940 - DNA, 120 bp, Artificial Sequence
  ENSG00000168765_19 (sequence is synthesized)
ccagagcctgccaggtactcaggtgctcctgggctgacccagaggagggtggttgggaggtcagtggggacagattcagggatagtgttgcattcctctctgccttcccatcaccacaaa

SEQ ID NO: 553941 - DNA, 120 bp, Artificial Sequence
  ENSG00000168765_20 (sequence is synthesized)
cttgctcgtggccagctggggccatacacagccctggggaggccacatctgtgcagggagcttgtgtctgagggtggtgacagctgttttctgcctcaggagaaactgaagccagaatac

SEQ ID NO: 553942 - DNA, 120 bp, Artificial Sequence
  ENSG00000168765_21 (sequence is synthesized)
gtctgctacagccctgactttgtgagtccctccctggtctggaccagaagccaggcttgtattcccatctactctggtcctattcacaatttgaactcctcactgctattgatcctctga

SEQ ID NO: 553943 - DNA, 120 bp, Artificial Sequence
  ENSG00000168765_22 (sequence is synthesized)
ccaatgtaggtgcaggggaaggggcggttttgggggaaagtgcgacgtgtctctgactgcatctcctctccccagattagaggtgttcggatcaggagtcttctgcccaattcctctcac

SEQ ID NO: 553944 - DNA, 120 bp, Artificial Sequence
  ENSG00000168765_23 (sequence is synthesized)
tcctggttgtctacacagcccctgcatgatgttctgtgtcccagctcatttgttcatgtgacagtatttctatgtcaggcctgccatgagcgggcacagtgagtgcctggtctcccctct

SEQ ID NO: 553945 - DNA, 120 bp, Artificial Sequence
  ENSG00000168765_24 (sequence is synthesized)
tgtggcataatgtgatggtcaattttctgcatcaacttgactgggctaagggatgctcagatggcaggtaaaatcattgtgcttgtgagggtgtttccagaagagatttgcctttgaatc

SEQ ID NO: 553946 - DNA, 120 bp, Artificial Sequence
  ENSG00000168765_25 (sequence is synthesized)
agaagacagcaaagatttccttcagcaatgaaggaggcatccaccaaactgtcagggcccagagagaagaaaaagacaggaagggtgaatttgacctctctgactgggacatccatctct

SEQ ID NO: 553947 - DNA, 120 bp, Artificial Sequence
  ENSG00000168765_26 (sequence is synthesized)
gcctatcctgggacctccacactcctggttctctggccttcagacttgatcagggactaacaccatcgcctcccacccccacctttgttctgaggcctttagcctctgaatgataccact

SEQ ID NO: 553948 - DNA, 120 bp, Artificial Sequence
  ENSG00000168765_27 (sequence is synthesized)
ggctttcctgcttctctatcctgcagtcggcagatcatgggacttcttcactccaaaattgtgtgagccaattcccataacagatagataaatttataaataaacacacaaatttcctac

SEQ ID NO: 553949 - DNA, 120 bp, Artificial Sequence
  ENSG00000168765_28 (sequence is synthesized)
tggctacctctgcaggcctcccctgctggagctgcaggctgtcccttccctgagccccggtgagggagtcctgtggccttgcaaggcagaatgctggggcgggatgctgggccccctgtt

SEQ ID NO: 553950 - DNA, 120 bp, Artificial Sequence
  ENSG00000168765_29 (sequence is synthesized)
taattgggttgggtgtccctcagagcttccctaaaccctggaagccttagccgtgtggggtccagagccctcagcgggattctttgtccctgaaccctgggatgtgggactgagtggtca

SEQ ID NO: 553951 - DNA, 120 bp, Artificial Sequence
  ENSG00000168765_30 (sequence is synthesized)
gattctagatccacctgtctcagggatcttgccactggttccttgggagggtccccgggaaggagggctgggctctggggaggtttgttttcacttcttcttccccacggcagctcctga

SEQ ID NO: 553952 - DNA, 120 bp, Artificial Sequence
  ENSG00000168765_31 (sequence is synthesized)
gctctcccttttgtgacaaaagaaagaagcctcaggcctcatccagcctggatttcacagcccagggcactttggaagaggcagagaactttaggagcatggatgcagctggcaatagta

SEQ ID NO: 553953 - DNA, 120 bp, Artificial Sequence
  ENSG00000168765_32 (sequence is synthesized)
ggactgacacacggtggcattgacgtcgagtacgaaacccacaggcagtattcatagctactcccagaagctttgcacgatcagacccccacgtggggaatcctgagagccagagctgtg

SEQ ID NO: 553954 - DNA, 120 bp, Artificial Sequence
  ENSG00000168765_33 (sequence is synthesized)
tgcccctgttgaaggagtgtatgttgaagtgctctgtgctggggcactctccttctttatcttttttcctctcttttttccctccagtgttccaagtgttccccctgtgagatgagtagc

SEQ ID NO: 553955 - DNA, 120 bp, Artificial Sequence
  ENSG00000168765_34 (sequence is synthesized)
gcagagcagcctgtgaggtgtgtggcaccacctgggtaccaggcctggggcctgcccctcactcatggggaaccatccctcacccgtgctgaatttgtttgagagcagcaaatcctactt

SEQ ID NO: 553956 - DNA, 120 bp, Artificial Sequence
  ENSG00000168765_35 (sequence is synthesized)
ttagtacagatgtgagaatttgaggcattagtccaacaagtttttcagcctagaatttgttttcctttcccactacccatcaagggatctggttactcagctagttcccatcagctctgg

SEQ ID NO: 553957 - DNA, 120 bp, Artificial Sequence
  ENSG00000168765_36 (sequence is synthesized)
ctgtggtctcggctgagtggccttggggttatgtaagaggtagtgggaggggaagagagctgagggctgcagcatatggtccacctgggcttggccctttgggaataggcagccctggct

SEQ ID NO: 553958 - DNA, 120 bp, Artificial Sequence
  ENSG00000168765_37 (sequence is synthesized)
ctctctgaatccttagaaattacacggctatttgatcctggaaagatcgtgcagagcacacctgagtgtcatacagcctggtctgaggtagtggggttggagatgaggtgggttggggca

SEQ ID NO: 553959 - DNA, 120 bp, Artificial Sequence
  ENSG00000168765_38 (sequence is synthesized)
cagtggtgtttagctcaggtaccaggtggggaggtttagactttctgctttaaaaggaatgattagagcctggtctggcgtttcttttgctggtccaacacaccttgaccactttcatcc

SEQ ID NO: 553960 - DNA, 120 bp, Artificial Sequence
  ENSG00000168765_39 (sequence is synthesized)
aggttttgccaggtccttgggtgagatctgggctctcttccaggctgcacagacattttcagaggtcccctctgtgtgtgcaaacctaggcaagccaggtgcctccctgtgaaacaggag

SEQ ID NO: 553961 - DNA, 120 bp, Artificial Sequence
  ENSG00000168765_40 (sequence is synthesized)
aatgttgtgtagtcagagagtgacaggacctcctgagggatttgggggaggatggggatttgacagaaagaggccagaactggagagagacagaaccagtctacgttgcagctctgtccc

SEQ ID NO: 553962 - DNA, 120 bp, Artificial Sequence
  ENSG00000168765_41 (sequence is synthesized)
ccttagtagctatttgagtgtgaggaagttactgaacttctgtttcccacatgagaaatggtgataatagattcagccttgcagagtagtcgagtgggttttctaagcttatgttgtaat

SEQ ID NO: 553963 - DNA, 120 bp, Artificial Sequence
  ENSG00000168765_42 (sequence is synthesized)
ttctcttgggtacagagcacccagcaccgggtagaatcttcataagtgttagctgttactgtggtacaacattacttaaaggaagttggaagagttaactccgcaaatctggggacccta

SEQ ID NO: 553964 - DNA, 120 bp, Artificial Sequence
  ENSG00000168765_43 (sequence is synthesized)
agaggctgtgtgatgcctcagcacttgagcccacgtggaaaggctgtggccagggccctgacctgctgtgtctgcagtggggttgtcccagccctcatgggcagctgaccttgagttctg

SEQ ID NO: 553965 - DNA, 120 bp, Artificial Sequence
  ENSG00000168769_0 (sequence is synthesized)
gcggccgccccgagacgccggccccgctgagtgatgagaacagacgtcaaactgccttatgaatattgatgcggaggctaggctgctttcgtagagaagcagaaggaagcaagatggctg

SEQ ID NO: 553966 - DNA, 120 bp, Artificial Sequence
  ENSG00000168769_1 (sequence is synthesized)
ccctttaggatttgttagaaaggagacccgactgcaactgctggattgctgcaaggctgagggacgagaacgaggctggcaaacattcagcagcacaccctctcaagattgtttacttgc

SEQ ID NO: 553967 - DNA, 120 bp, Artificial Sequence
  ENSG00000168769_2 (sequence is synthesized)
ctttgctcctgttgagttacaacgcttggaagcaggagatgggctcagcagcagccaataggacatgatccaggaagagcagtaagggactgagctgctgaattcaactagagggcagcc

SEQ ID NO: 553968 - DNA, 120 bp, Artificial Sequence
  ENSG00000168769_3 (sequence is synthesized)
ttgtggatggccccgaagcaagcctgatggaacaggatagaaccaaccatgttgagggcaacagactaagtccattcctgataccatcacctcccatttgccagacagaacctctggcta

SEQ ID NO: 553969 - DNA, 120 bp, Artificial Sequence
  ENSG00000168769_4 (sequence is synthesized)
caaagctccagaatggaagcccactgcctgagagagctcatccagaagtaaatggagacaccaagtggcactctttcaaaagttattatggaataccctgtatgaagggaagccagaata

SEQ ID NO: 553970 - DNA, 120 bp, Artificial Sequence
  ENSG00000168769_5 (sequence is synthesized)
gtcgtgtgagtcctgactttacacaagaaagtagagggtattccaagtgtttgcaaaatggaggaataaaacgcacagttagtgaaccttctctctctgggctccttcagatcaagaaat

SEQ ID NO: 553971 - DNA, 120 bp, Artificial Sequence
  ENSG00000168769_6 (sequence is synthesized)
tgaaacaagaccaaaaggctaatggagaaagacgtaacttcggggtaagccaagaaagaaatccaggtgaaagcagtcaaccaaatgtctccgatttgagtgataagaaagaatctgtga

SEQ ID NO: 553972 - DNA, 120 bp, Artificial Sequence
  ENSG00000168769_7 (sequence is synthesized)
gttctgtagcccaagaaaatgcagttaaagatttcaccagtttttcaacacataactgcagtgggcctgaaaatccagagcttcagattctgaatgagcaggaggggaaaagtgctaatt

SEQ ID NO: 553973 - DNA, 120 bp, Artificial Sequence
  ENSG00000168769_8 (sequence is synthesized)
accatgacaagaacattgtattacttaaaaacaaggcagtgctaatgcctaatggtgctacagtttctgcctcttccgtggaacacacacatggtgaactcctggaaaaaacactgtctc

SEQ ID NO: 553974 - DNA, 120 bp, Artificial Sequence
  ENSG00000168769_9 (sequence is synthesized)
aatattatccagattgtgtttccattgcggtgcagaaaaccacatctcacataaatgccattaacagtcaggctactaatgagttgtcctgtgagatcactcacccatcgcatacctcag

SEQ ID NO: 553975 - DNA, 120 bp, Artificial Sequence
  ENSG00000168769_10 (sequence is synthesized)
ggcagatcaattccgcacagacctctaactctgagctgcctccaaagccagctgcagtggtgagtgaggcctgtgatgctgatgatgctgataatgccagtaaactagctgcaatgctaa

SEQ ID NO: 553976 - DNA, 120 bp, Artificial Sequence
  ENSG00000168769_11 (sequence is synthesized)
atacctgttcctttcagaaaccagaacaactacaacaacaaaaatcagtttttgagatatgcccatctcctgcagaaaataacatccagggaaccacaaagctagcgtctggtgaagaat

SEQ ID NO: 553977 - DNA, 120 bp, Artificial Sequence
  ENSG00000168769_12 (sequence is synthesized)
tctgttcaggttccagcagcaatttgcaagctcctggtggcagctctgaacggtatttaaaacaaaatgaaatgaatggtgcttacttcaagcaaagctcagtgttcactaaggattcct

SEQ ID NO: 553978 - DNA, 120 bp, Artificial Sequence
  ENSG00000168769_13 (sequence is synthesized)
tttctgccactaccacaccaccaccaccatcacaattgcttctttctccccctcctcctcttccacaggttcctcagcttccttcagaaggaaaaagcactctgaatggtggagttttag

SEQ ID NO: 553979 - DNA, 120 bp, Artificial Sequence
  ENSG00000168769_14 (sequence is synthesized)
aagaacaccaccactaccccaaccaaagtaacacaacacttttaagggaagtgaaaatagagggtaaacctgaggcaccaccttcccagagtcctaatccatctacacatgtatgcagcc

SEQ ID NO: 553980 - DNA, 120 bp, Artificial Sequence
  ENSG00000168769_15 (sequence is synthesized)
cttctccgatgctttctgaaaggcctcagaataattgtgtgaacaggaatgacatacagactgcagggacaatgactgttccattgtgttctgagaaaacaagaccaatgtcagaacacc

SEQ ID NO: 553981 - DNA, 120 bp, Artificial Sequence
  ENSG00000168769_16 (sequence is synthesized)
tcaagcataacccaccaatttttggtagcagtggagagctacaggacaactgccagcagttgatgagaaacaaagagcaagagattctgaagggtcgagacaaggagcaaacacgagatc

SEQ ID NO: 553982 - DNA, 120 bp, Artificial Sequence
  ENSG00000168769_17 (sequence is synthesized)
ttgtgcccccaacacagcactatctgaaaccaggatggattgaattgaaggcccctcgttttcaccaagcggaatcccatctaaaacgtaatgaggcatcactgccatcaattcttcagt

SEQ ID NO: 553983 - DNA, 120 bp, Artificial Sequence
  ENSG00000168769_18 (sequence is synthesized)
atcaacccaatctctccaatcaaatgacctccaaacaatacactggaaattccaacatgcctggggggctcccaaggcaagcttacacccagaaaacaacacagctggagcacaagtcac

SEQ ID NO: 553984 - DNA, 120 bp, Artificial Sequence
  ENSG00000168769_19 (sequence is synthesized)
aaatgtaccaagttgaaatgaatcaagggcagtcccaaggtacagtggaccaacatctccagttccaaaaaccctcacaccaggtgcacttctccaaaacagaccatttaccaaaagctc

SEQ ID NO: 553985 - DNA, 120 bp, Artificial Sequence
  ENSG00000168769_20 (sequence is synthesized)
atgtgcagtcactgtgtggcactagatttcattttcaacaaagagcagattcccaaactgaaaaacttatgtccccagtgttgaaacagcacttgaatcaacaggcttcagagactgagc

SEQ ID NO: 553986 - DNA, 120 bp, Artificial Sequence
  ENSG00000168769_21 (sequence is synthesized)
cattttcaaactcacaccttttgcaacataagcctcataaacaggcagcacaaacacaaccatcccagagttcacatctccctcaaaaccagcaacagcagcaaaaattacaaataaaga

SEQ ID NO: 553987 - DNA, 120 bp, Artificial Sequence
  ENSG00000168769_22 (sequence is synthesized)
ataaagaggaaatactccagacttttcctcacccccaaagcaacaatgatcagcaaagagaaggatcattctttggccagactaaagtggaagaatgttttcatggtgaaaatcagtatt

SEQ ID NO: 553988 - DNA, 120 bp, Artificial Sequence
  ENSG00000168769_23 (sequence is synthesized)
caaaatcaagcgagttcgagactcataatgtccaaatgggactggaggaagtacagaatataaatcgtagaaattccccttatagtcagaccatgaaatcaagtgcatgcaaaatacagg

SEQ ID NO: 553989 - DNA, 120 bp, Artificial Sequence
  ENSG00000168769_24 (sequence is synthesized)
tttcttgttcaaacaatacacacctagtttcagagaataaagaacagactacacatcctgaactttttgcaggaaacaagacccaaaacttgcatcacatgcaatattttccaaataatg

SEQ ID NO: 553990 - DNA, 120 bp, Artificial Sequence
  ENSG00000168769_25 (sequence is synthesized)
tgatcccaaagcaagatcttcttcacaggtgctttcaagaacaggagcagaagtcacaacaagcttcagttctacagggatataaaaatagaaaccaagatatgtctggtcaacaagctg

SEQ ID NO: 553991 - DNA, 120 bp, Artificial Sequence
  ENSG00000168769_26 (sequence is synthesized)
cgcaacttgctcagcaaaggtacttgatacataaccatgcaaatgtttttcctgtgcctgaccagggaggaagtcacactcagacccctccccagaaggacactcaaaagcatgctgctc

SEQ ID NO: 553992 - DNA, 120 bp, Artificial Sequence
  ENSG00000168769_27 (sequence is synthesized)
taaggtggcatctcttacagaagcaagaacagcagcaaacacagcaaccccaaactgagtcttgccatagtcagatgcacaggccaattaaggtggaacctggatgcaagccacatgcct

SEQ ID NO: 553993 - DNA, 120 bp, Artificial Sequence
  ENSG00000168769_28 (sequence is synthesized)
gtatgcacacagcaccaccagaaaacaaaacatggaaaaaggtaactaagcaagagaatccacctgcaagctgtgataatgtgcagcaaaagagcatcattgagaccatggagcagcatc

SEQ ID NO: 553994 - DNA, 120 bp, Artificial Sequence
  ENSG00000168769_29 (sequence is synthesized)
tgaagcagtttcacgccaagtcgttatttgaccataaggctcttactctcaaatcacagaagcaagtaaaagttgaaatgtcagggccagtcacagttttgactagacaaaccactgctg

SEQ ID NO: 553995 - DNA, 120 bp, Artificial Sequence
  ENSG00000168769_30 (sequence is synthesized)
cagaacttgatagccacaccccagctttagagcagcaaacaacttcttcagaaaagacaccaaccaaaagaacagctgcttctgttctcaataattttatagagtcaccttccaaattac

SEQ ID NO: 553996 - DNA, 120 bp, Artificial Sequence
  ENSG00000168769_31 (sequence is synthesized)
tagatactcctataaaaaatttattggatacacctgtcaagactcaatatgatttcccatcttgcagatgtgtagagcaaattattgaaaaagatgaaggtcctttttatacccatctag

SEQ ID NO: 553997 - DNA, 120 bp, Artificial Sequence
  ENSG00000168769_32 (sequence is synthesized)
gagcaggtcctaatgtggcagctattagagaaatcatggaagaaaggtttggacagaagggtaaagctattaggattgaaagagtcatctatactggtaaagaaggcaaaagttctcagg

SEQ ID NO: 553998 - DNA, 120 bp, Artificial Sequence
  ENSG00000168769_33 (sequence is synthesized)
gatgtcctattgctaagtgggtggttcgcagaagcagcagtgaagagaagctactgtgtttggtgcgggagcgagctggccacacctgtgaggctgcagtgattgtgattctcatcctgg

SEQ ID NO: 553999 - DNA, 120 bp, Artificial Sequence
  ENSG00000168769_34 (sequence is synthesized)
tgtgggaaggaatcccgctgtctctggctgacaaactctactcggagcttaccgagacgctgaggaaatacggcacgctcaccaatcgccggtgtgccttgaatgaagagagaacttgcg

SEQ ID NO: 554000 - DNA, 120 bp, Artificial Sequence
  ENSG00000168769_35 (sequence is synthesized)
cctgtcaggggctggatccagaaacctgtggtgcctccttctcttttggttgttcatggagcatgtactacaatggatgtaagtttgccagaagcaagatcccaaggaagtttaagctgc

SEQ ID NO: 554001 - DNA, 120 bp, Artificial Sequence
  ENSG00000168769_36 (sequence is synthesized)
ttggggatgacccaaaagaggaagagaaactggagtctcatttgcaaaacctgtccactcttatggcaccaacatataagaaacttgcacctgatgcatataataatcagattgaatatg

SEQ ID NO: 554002 - DNA, 120 bp, Artificial Sequence
  ENSG00000168769_37 (sequence is synthesized)
aacacagagcaccagagtgccgtctgggtctgaaggaaggccgtccattctcaggggtcactgcatgtttggacttctgtgctcatgcccacagagacttgcacaacatgcagaatggca

SEQ ID NO: 554003 - DNA, 120 bp, Artificial Sequence
  ENSG00000168769_38 (sequence is synthesized)
gcacattggtatgcactctcactagagaagacaatcgagaatttggaggaaaacctgaggatgagcagcttcacgttctgcctttatacaaagtctctgacgtggatgagtttgggagtg

SEQ ID NO: 554004 - DNA, 120 bp, Artificial Sequence
  ENSG00000168769_39 (sequence is synthesized)
tggaagctcaggaggagaaaaaacggagtggtgccattcaggtactgagttcttttcggcgaaaagtcaggatgttagcagagccagtcaagacttgccgacaaaggaaactagaagcca

SEQ ID NO: 554005 - DNA, 120 bp, Artificial Sequence
  ENSG00000168769_40 (sequence is synthesized)
tacaaaacaaactgaaaacgcaagccaggctaaacagttggcagaacttttgcgactttcaggaccagtcatgcagcagtcccagcagccccagcctctacagaagcagccaccacagcc

SEQ ID NO: 554006 - DNA, 120 bp, Artificial Sequence
  ENSG00000168769_41 (sequence is synthesized)
ccagcagcagcagagaccccagcagcagcagccacatcaccctcagacagagtctgtcaactcttattctgcttctggatccaccaatccatacatgagacggcccaatccagttagtcc

SEQ ID NO: 554007 - DNA, 120 bp, Artificial Sequence
  ENSG00000168769_42 (sequence is synthesized)
ttatccaaactcttcacacacttcagatatctatggaagcaccagccctatgaacttctattccacctcatctcaagctgcaggttcatatttgaattcttctaatcccatgaaccctta

SEQ ID NO: 554008 - DNA, 120 bp, Artificial Sequence
  ENSG00000168769_43 (sequence is synthesized)
ccctgggcttttgaatcagaatacccaatatccatcatatcaatgcaatggaaacctatcagtggacaactgctccccatatctgggttcctattctccccagtctcagccgatggatct

SEQ ID NO: 554009 - DNA, 120 bp, Artificial Sequence
  ENSG00000168769_44 (sequence is synthesized)
gtataggtatccaagccaagaccctctgtctaagctcagtctaccacccatccatacactttaccagccaaggtttggaaatagccagagttttacatctaaatacttaggttatggaaa

SEQ ID NO: 554010 - DNA, 120 bp, Artificial Sequence
  ENSG00000168769_45 (sequence is synthesized)
ccaaaatatgcagggagatggtttcagcagttgtaccattagaccaaatgtacatcatgtagggaaattgcctccttatcccactcatgagatggatggccacttcatgggagccacctc

SEQ ID NO: 554011 - DNA, 120 bp, Artificial Sequence
  ENSG00000168769_46 (sequence is synthesized)
tagattaccacccaatctgagcaatccaaacatggactataaaaatggtgaacatcattcaccttctcacataatccataactacagtgcagctccgggcatgttcaacagctctcttca

SEQ ID NO: 554012 - DNA, 120 bp, Artificial Sequence
  ENSG00000168769_47 (sequence is synthesized)
tgccctgcatctccaaaacaaggagaatgacatgctttcccacacagctaatgggttatcaaagatgcttccagctcttaaccatgatagaactgcttgtgtccaaggaggcttacacaa

SEQ ID NO: 554013 - DNA, 120 bp, Artificial Sequence
  ENSG00000168769_48 (sequence is synthesized)
attaagtgatgctaatggtcaggaaaagcagccattggcactagtccagggtgtggcttctggtgcagaggacaacgatgaggtctggtcagacagcgagcagagctttctggatcctga

SEQ ID NO: 554014 - DNA, 120 bp, Artificial Sequence
  ENSG00000168769_49 (sequence is synthesized)
cattgggggagtggccgtggctccaactcatgggtcaattctcattgagtgtgcaaagcgtgagctgcatgccacaacccctttaaagaatcccaataggaatcaccccaccaggatctc

SEQ ID NO: 554015 - DNA, 120 bp, Artificial Sequence
  ENSG00000168769_50 (sequence is synthesized)
cctcgtcttttaccagcataagagcatgaatgagccaaaacatggcttggctctttgggaagccaaaatggctgaaaaagcccgtgagaaagaggaagagtgtgaaaagtatggcccaga

SEQ ID NO: 554016 - DNA, 120 bp, Artificial Sequence
  ENSG00000168769_51 (sequence is synthesized)
ctatgtgcctcagaaatcccatggcaaaaaagtgaaacgggagcctgctgagccacatgaaacttcagagcccacttacctgcgtttcatcaagtctcttgccgaaaggaccatgtccgt

SEQ ID NO: 554017 - DNA, 120 bp, Artificial Sequence
  ENSG00000168769_52 (sequence is synthesized)
gaccacagactccacagtaactacatctccatatgccttcactcgggtcacagggccttacaacagatatatatgatatcacccccttttgttggttacctcacttgaaaagaccacaac

SEQ ID NO: 554018 - DNA, 120 bp, Artificial Sequence
  ENSG00000168769_53 (sequence is synthesized)
caacctgtcagtagtatagttctcatgacgtgggcagtggggaaaggtcacagtattcatgacaaatgtggtgggaaaaacctcagctcaccagcaacaaaagaggttatcttaccatag

SEQ ID NO: 554019 - DNA, 120 bp, Artificial Sequence
  ENSG00000168769_54 (sequence is synthesized)
cacttaattttcactggctcccaagtggtcacagatggcatctaggaaaagaccaaagcattctatgcaaaaagaaggtggggaagaaagtgttccgcaatttacatttttaaacactgg

SEQ ID NO: 554020 - DNA, 120 bp, Artificial Sequence
  ENSG00000168769_55 (sequence is synthesized)
ttctattattggacgagatgatatgtaaatgtgatcccccccccccgcttacaactctacacatctgtgaccacttttaataatatcaagtttgcatagtcatggaacacaaatcaaaca

SEQ ID NO: 554021 - DNA, 120 bp, Artificial Sequence
  ENSG00000168769_56 (sequence is synthesized)
agtactgtagtattacagtgacaggaatcttaaaataccatctggtgctgaatatatgatgtactgaaatactggaattatggctttttgaaatgcagtttttactgtaatcttaacttt

SEQ ID NO: 554022 - DNA, 120 bp, Artificial Sequence
  ENSG00000168769_57 (sequence is synthesized)
tatttatcaaaatagctacaggaaacatgaatagcaggaaaacactgaatttgtttggatgttctaagaaatggtgctaagaaaatggtgtctttaatagctaaaaatttaatgccttta

SEQ ID NO: 554023 - DNA, 120 bp, Artificial Sequence
  ENSG00000168769_58 (sequence is synthesized)
tatcatcaagatgctatcagtgtactccagtgcccttgaataataggggtaccttttcattcaagtttttatcataattacctattcttacacaagcttagtttttaaaatgtggacatt

SEQ ID NO: 554024 - DNA, 120 bp, Artificial Sequence
  ENSG00000168769_59 (sequence is synthesized)
ttaaaggcctctggattttgctcatccagtgaagtccttgtaggacaataaacgtatatatgtacatatatacacaaacatgtatatgtgcacacacatgtatatgtataaatattttaa

SEQ ID NO: 554025 - DNA, 120 bp, Artificial Sequence
  ENSG00000168769_60 (sequence is synthesized)
atggtgttttagaagcactttgtctacctaagctttgacaacttgaacaatgctaaggtactgagatgtttaaaaaacaagtttactttcattttagaatgcaaagttgatttttttaag

SEQ ID NO: 554026 - DNA, 120 bp, Artificial Sequence
  ENSG00000168769_61 (sequence is synthesized)
gaaacaaagaaagcttttaaaatatttttgcttttagccatgcatctgctgatgagcaattgtgtccatttttaacacagccagttaaatccaccatggggcttactggattcaagggaa

SEQ ID NO: 554027 - DNA, 120 bp, Artificial Sequence
  ENSG00000168769_62 (sequence is synthesized)
tacgttagtccacaaaacatgttttctggtgctcatctcacatgctatactgtaaaacagttttatacaaaattgtatgacaagttcattgctcaaaaatgtacagttttaagaattttc

SEQ ID NO: 554028 - DNA, 120 bp, Artificial Sequence
  ENSG00000168769_63 (sequence is synthesized)
tattaactgcaggtaataattagctgcatgctgcagactcaacaaagctagttcactgaagcctatgctattttatggatcataggctcttcagagaactgaatggcagtctgcctttgt

SEQ ID NO: 554029 - DNA, 120 bp, Artificial Sequence
  ENSG00000168769_64 (sequence is synthesized)
gttgataattatgtacattgtgacgttgtcatttcttagcttaagtgtcctctttaacaagaggattgagcagactgatgcctgcataagatgaataaacagggttagttccatgtgaat

SEQ ID NO: 554030 - DNA, 120 bp, Artificial Sequence
  ENSG00000168769_65 (sequence is synthesized)
ctgtcagttaaaaagaaacaaaaacaggcagctggtttgctgtggtggttttaaatcattaatttgtataaagaagtgaaagagttgtatagtaaattaaattgtaaacaaaactttttt

SEQ ID NO: 554031 - DNA, 80 bp, Artificial Sequence
  ENSG00000168769_66 (sequence is synthesized)
atatatatatatatatatatatatgagtttgaagcagaattcacatcatgatggtgctactcagcctgctacaaatatat

SEQ ID NO: 554032 - DNA, 120 bp, Artificial Sequence
  ENSG00000168769_67 (sequence is synthesized)
cctgctacaaatatatcataatgtgagctaagaattcattaaatgtttgagtgatgttcctacttgtcatatacctcaacactagtttggcaataggatattgaactgagagtgaaagca

SEQ ID NO: 554033 - DNA, 120 bp, Artificial Sequence
  ENSG00000168769_68 (sequence is synthesized)
ttgtgtaccatcatttttttccaagtccttttttttattgttaaaaaaaaaagcataccttttttcaatacttgatttcttagcaagtataacttgaacttcaacctttttgttctaaaa

SEQ ID NO: 554034 - DNA, 120 bp, Artificial Sequence
  ENSG00000168769_69 (sequence is synthesized)
attcagggatatttcagctcatgctctccctatgccaacatgtcacctgtgtttatgtaaaattgttgtaggttaataaatatattctttgtcagggatttaacccttttattttgaatc

SEQ ID NO: 554035 - DNA, 120 bp, Artificial Sequence
  ENSG00000168769_70 (sequence is synthesized)
ccttctattttacttgtacatgtgctgatgtaactaaaactaattttgtaaatctgttggctctttttattgtaaagaaaagcattttaaaagtttgaggaatcttttgactgtttcaag

SEQ ID NO: 554036 - DNA, 120 bp, Artificial Sequence
  ENSG00000168769_71 (sequence is synthesized)
caggaaaaaaaaattacatgaaaatagaatgcactgagttgataaagggaaaaattgtaaggcaggagtttggcaagtggctgttggccagagacttacttgtaactctctaaatgaagt

SEQ ID NO: 554037 - DNA, 120 bp, Artificial Sequence
  ENSG00000168769_72 (sequence is synthesized)
ttttttgatcctgtaatcactgaaggtacatactccatgtggacttcccttaaacaggcaaacacctacaggtatggtgtgcaacagattgtacaattacattttggcctaaatacattt

SEQ ID NO: 554038 - DNA, 120 bp, Artificial Sequence
  ENSG00000168769_73 (sequence is synthesized)
ttgcttactagtatttaaaataaattcttaatcagaggaggcctttgggttttattggtcaaatctttgtaagctggcttttgtctttttaaaaaatttcttgaatttgtggttgtgtcc

SEQ ID NO: 554039 - DNA, 120 bp, Artificial Sequence
  ENSG00000168769_74 (sequence is synthesized)
aatttgcaaacatttccaaaaatgtttgctttgcttacaaaccacatgattttaatgttttttgtataccataatatctagccccaaacatttgattactacatgtgcattggtgatttt

SEQ ID NO: 554040 - DNA, 120 bp, Artificial Sequence
  ENSG00000168769_75 (sequence is synthesized)
gatcatccattcttaatatttgatttctgtgtcacctactgtcatttgttaaactgctggccaacaagaacaggaagtatagtttggggggttggggagagtttacataaggaagagaag

SEQ ID NO: 554041 - DNA, 120 bp, Artificial Sequence
  ENSG00000168769_76 (sequence is synthesized)
aaattgagtggcatattgtaaatatcagatctataattgtaaatataaaacctgcctcagttagaatgaatggaaagcagatctacaatttgctaatataggaatatcaggttgactata

SEQ ID NO: 554042 - DNA, 120 bp, Artificial Sequence
  ENSG00000168769_77 (sequence is synthesized)
tagccatacttgaaaatgcttctgagtggtgtcaactttacttgaatgaatttttcatcttgattgacgcacagtgatgtacagttcacttctgaagctagtggttaacttgtgtaggaa

SEQ ID NO: 554043 - DNA, 120 bp, Artificial Sequence
  ENSG00000168769_78 (sequence is synthesized)
acttttgcagtttgacactaagataacttctgtgtgcatttttctatgcttttttaaaaactagtttcatttcattttcatgagatgtttggtttataagatctgaggatggttataaat

SEQ ID NO: 554044 - DNA, 120 bp, Artificial Sequence
  ENSG00000168769_79 (sequence is synthesized)
actgtaagtattgtaatgttatgaatgcaggttatttgaaagctgtttattattatatcattcctgataatgctatgtgagtgtttttaataaaatttatatttatttaatgcactctaa

SEQ ID NO: 554045 - DNA, 120 bp, Artificial Sequence
  ENSG00000168769_80 (sequence is synthesized)
ccgtgccatcccaacctcccacctcgcccccaaccttcgcgcttgctctgcttcttctcccaggggtggagacccgccgaggtccccggggttcccgagggctgcacccttccccgcgct

SEQ ID NO: 554046 - DNA, 120 bp, Artificial Sequence
  ENSG00000168769_81 (sequence is synthesized)
cgctcgccagccctggcccctactccgcgctggtccgggcgcaccactccccccgcgccactgcacggcgtgagggcagcccaggtctccactgcgcgccccgctgtacggccccaggtg

SEQ ID NO: 554047 - DNA, 80 bp, Artificial Sequence
  ENSG00000168769_82 (sequence is synthesized)
cggcctttgtgctggacgcccggtgcggggggctaattccctgggagccggggctgagggccccagggcggcggcgcagg

SEQ ID NO: 554048 - DNA, 80 bp, Artificial Sequence
  ENSG00000168769_83 (sequence is synthesized)
ggcccgggcggaggaggagagccggcggtagcggcagtggcagcggcgagagcttgggcggccgccgccgcctcctcgcg

SEQ ID NO: 554049 - DNA, 120 bp, Artificial Sequence
  ENSG00000168769_84 (sequence is synthesized)
ttcaggtcctctaaatcctaggtcgcttcccactactacatactaccctaaaaaatctgtaattcgcaaatttattttttgatctttttcataacttattaaatttttattgaacaaata

SEQ ID NO: 554050 - DNA, 120 bp, Artificial Sequence
  ENSG00000168769_85 (sequence is synthesized)
aaacagaaggtgggccggggcggggagaaacagaactcggtcaatttcccagtttgtcgggtctttaaaaatacaggcccctaaagcactaagggcatgccctcggtgaaacaggggagc

SEQ ID NO: 554051 - DNA, 120 bp, Artificial Sequence
  ENSG00000168769_86 (sequence is synthesized)
gcttctgctgaatgagattaaagcgacagaaaagggaaaggagagcgcgggcaacgggatctaaagggagatagagacgcgggcctctgagggctggcaaacattcagcagcacaccctc

SEQ ID NO: 554052 - DNA, 120 bp, Artificial Sequence
  ENSG00000168769_87 (sequence is synthesized)
atggcgtttatccagaattagcaaatttatcttcagatatgggattttccttctttttttaaatcttgagtctggcagcaatttgtaaaggctcataaaaatctgaagcttacatttttt

SEQ ID NO: 554053 - DNA, 120 bp, Artificial Sequence
  ENSG00000168769_88 (sequence is synthesized)
gtcaagttaccgatgcttgtgtcttgtgaaagagaacttcacttacatgcagtttttccaaaagaattaaataatcgtgcatgtttatttttccctctcttcagatcctgtaaaatttga

SEQ ID NO: 554054 - DNA, 120 bp, Artificial Sequence
  ENSG00000168769_89 (sequence is synthesized)
atgtatctgttttagatcaattcgcctatttagctctttgtatattatctcctggagagacagctaggcagcaaaaaaacaatctattaaaatgagaaaataacgaccataggcagtcta

SEQ ID NO: 554055 - DNA, 120 bp, Artificial Sequence
  ENSG00000168769_90 (sequence is synthesized)
atgtacgaactttaaatattttttaattcaaggtaaaatatattagtttcacaagatttctggctaatagggaaattattatcttcagtcttcatgagttgggggaaatgataatgctga

SEQ ID NO: 554056 - DNA, 120 bp, Artificial Sequence
  ENSG00000168769_91 (sequence is synthesized)
cactcttagtgctcctaaagtttccttttctccatttatacatttggaatgttgtgatttatattcattttgattcccttttctctaaaatttcatctttttgattaaaaaatatgatac

SEQ ID NO: 554057 - DNA, 120 bp, Artificial Sequence
  ENSG00000168769_92 (sequence is synthesized)
aggcatacctcagagatattgtgggtttggctccataccacaataaaatgaatattacaataaagcaagttgtaaggactttttggtttctcactgtatgtaaaagttatttatatacta

SEQ ID NO: 554058 - DNA, 120 bp, Artificial Sequence
  ENSG00000168769_93 (sequence is synthesized)
ctttttgctggtggagggtcgtgcttcagtattgatcgctgtggactgatcatggtggtagttgctgaaggttgctgggatggctgtgtgtgtggcaatttcttaaaataagacaacagt

SEQ ID NO: 554059 - DNA, 85 bp, Artificial Sequence
  ENSG00000168769_94 (sequence is synthesized)
acccacagcagaatttctttgaaaattggactcagtcctctcaaactgtgctgctgctttatcaactaagtttttgtaattttct

SEQ ID NO: 554060 - DNA, 120 bp, Artificial Sequence
  ENSG00000168769_95 (sequence is synthesized)
ctgtgctgctgctttatcaactaagtttttgtaattttctgaatcctttgttgtcatttcagcagtttacagcatcttcattggaagtatattccatctcaaacattctttgttcatcca

SEQ ID NO: 554061 - DNA, 120 bp, Artificial Sequence
  ENSG00000168769_96 (sequence is synthesized)
taagaagcaacttcttatcaagttttttcatgacattgcagtaactcagccccatcttcaggctctacttctaattctggttctcttgctacatctccctcatctgcagtgacctctcca

SEQ ID NO: 554062 - DNA, 120 bp, Artificial Sequence
  ENSG00000168769_97 (sequence is synthesized)
cggaagtcttgaactcctcaaagtaatccatgagggttggaatcaacttctaaactcctgttaatgttgatatattgaccccctcccatgaattatgaatgttcttaataacttctaaat

SEQ ID NO: 554063 - DNA, 120 bp, Artificial Sequence
  ENSG00000168769_98 (sequence is synthesized)
ggtgatacctttccagaaggctttcaatgtactttgcccggatccatcagaagactatcttggcagctgtagactaacaatatatttcttaaatgataagacttgaaagtcaaaagtact

SEQ ID NO: 554064 - DNA, 120 bp, Artificial Sequence
  ENSG00000168769_99 (sequence is synthesized)
ccttaatccataggctgcagaatcaatgttgtattaacaggcacgaaaacagcattaatcttgtgcatctccatcggagctcttgggtgactaggtgccttgagcagtaatattttgaaa

SEQ ID NO: 554065 - DNA, 120 bp, Artificial Sequence
  ENSG00000168769_100 (sequence is synthesized)
ttttttgttttttttttttgttttttagcagtaagtctcaacactgggcttaaaatattcagtaaactatgttgtaaaaagatgtgttatcatccagactttgttgttccattactctac

SEQ ID NO: 554066 - DNA, 120 bp, Artificial Sequence
  ENSG00000168769_101 (sequence is synthesized)
tgttccattactctacacaagcagggtacacttagcataattcttaagggccttggaattttcagaatggtaaatgagtatgggcttcaacttaaaatcatcaactgcattagcctgtaa

SEQ ID NO: 554067 - DNA, 120 bp, Artificial Sequence
  ENSG00000168769_102 (sequence is synthesized)
caagagagtcagcctgtcctttgaagcaaggcattgacttctatctatgaaagtcttagatggcaccttgtttcaatagtaggctgtttagtacagccaccttcatcagtgatcttagct

SEQ ID NO: 554068 - DNA, 120 bp, Artificial Sequence
  ENSG00000168769_103 (sequence is synthesized)
tgcagcttctacatcagcacttgctgcctcaccttgtccttttatgttatagagacagctgcgcttcttaaactttataaaccaacttctgctagcttccaacttctcttctgcagcttc

SEQ ID NO: 554069 - DNA, 120 bp, Artificial Sequence
  ENSG00000168769_104 (sequence is synthesized)
aacttctcttctgcagcttcctcattctcttcatagaactgaagggagtcaaggccttgctctggattaagctttggcttaaggaatgttgtggctgacgtgatcttctatccagaccac

SEQ ID NO: 554070 - DNA, 120 bp, Artificial Sequence
  ENSG00000168769_105 (sequence is synthesized)
taaagcgctctccatatcagcaataaggccgttttgctttcttacctttcatgtgttcactggagtaatttccttcaagaatttttcctttacattcacaacttggctaactggcatgca

SEQ ID NO: 554071 - DNA, 120 bp, Artificial Sequence
  ENSG00000168769_106 (sequence is synthesized)
tgcaaggcctagctttcagcctgtcttggcttttgacatgccttcctcacttagctcgtcatatctagcttttgatttaaagtggcaggcatacaactcttcctttcacttgaacactta

SEQ ID NO: 554072 - DNA, 120 bp, Artificial Sequence
  ENSG00000168769_107 (sequence is synthesized)
aattggcctaatttcaatattgttgtgttttagggaatagagaggcccagggagagggagagagcccaaacggctggttgatagagcaggcagaatgcacacaacatttatcagattatg

SEQ ID NO: 554073 - DNA, 120 bp, Artificial Sequence
  ENSG00000168769_108 (sequence is synthesized)
catttatcagattatgtttgcaccatttaccagattatgggtacggtttgtggcaccccccaaaaattagaatagtaacatcaaagatcactgatcacagatcgccataacataaataat

SEQ ID NO: 554074 - DNA, 120 bp, Artificial Sequence
  ENSG00000168769_109 (sequence is synthesized)
aataaactttaaaatactgtgagaattaccaaaatgtgatacagagacatgaagtgagcacatgctgttgaaaaaaatgacactgatagacatacttaacacgtgggattgccacaaacc

SEQ ID NO: 554075 - DNA, 120 bp, Artificial Sequence
  ENSG00000168769_110 (sequence is synthesized)
ttcagtttgtaaaagtcacagtaactgtgactcacaaaagaacaaagcacaataaaacgaggtatgcctgtatttttaaaaaaagctttttgttaaaattcaggatatgtaataggtctg

SEQ ID NO: 554076 - DNA, 120 bp, Artificial Sequence
  ENSG00000168769_111 (sequence is synthesized)
taggaatagtgaaatatttttgctgatggatgtagatatatacgtggatagagatgaagatcttaattatagctatgcagcatagatttagtcaaagacatttgaaaagacaaatgttaa

SEQ ID NO: 554077 - DNA, 120 bp, Artificial Sequence
  ENSG00000168769_112 (sequence is synthesized)
attagtgtggctaatgacctacccgtgccatgttttccctcttgcaatgagataccccacactgtgtagaaggatggagggaggactcctactgtccctctttgcgtgtggttattaagt

SEQ ID NO: 554078 - DNA, 120 bp, Artificial Sequence
  ENSG00000168769_113 (sequence is synthesized)
tgcctcactgggctaaaacaccacacatctcatagataatatttggtaagttgtaatcgtcttcactcttctcttatcacccacccctatcttcccacttttccatctttgttggtttgc

SEQ ID NO: 554079 - DNA, 120 bp, Artificial Sequence
  ENSG00000168769_114 (sequence is synthesized)
aacagccccttctttttgcctgactctccaggattttctctcatcataaattgttctaaagtacatactaatatgggtctggattgactattcttatttgcaaaacagcaattaaatgtt

SEQ ID NO: 554080 - DNA, 120 bp, Artificial Sequence
  ENSG00000168769_115 (sequence is synthesized)
atagggaagtaggaagaaaaaggggtatccttgacaataaaccaagcaatattctgggggtgggatagagcaggaaattttatttttaatcttttaaaatccaagtaataggtaggcttc

SEQ ID NO: 554081 - DNA, 120 bp, Artificial Sequence
  ENSG00000168769_116 (sequence is synthesized)
cagttagctttaaatgttttttttttccagctcaaaaaattggattgtagttgatactacatataatacattctaattccctcactgtattctttgtttagtttcatttatttggtttaa

SEQ ID NO: 554082 - DNA, 120 bp, Artificial Sequence
  ENSG00000168769_117 (sequence is synthesized)
aataattttttatcccatatctgaaatgtaatatatttttatccaacaaccagcatgtacatatacttaattatgtggcacattttctaatagatcagtccatcaatctactcattttaa

SEQ ID NO: 554083 - DNA, 120 bp, Artificial Sequence
  ENSG00000168769_118 (sequence is synthesized)
agaaaaaaaaattttaaagtcacttttagagcccttaatgtgtagttgggggttaagctttgtggatgtagcctttatatttagtataattgaggtctaaaataataatcttctattatc

SEQ ID NO: 554084 - DNA, 120 bp, Artificial Sequence
  ENSG00000168769_119 (sequence is synthesized)
gcagattaacgtttatccttttgtatatgtcagaatttttccagccttcacacacaaagcagtaaacaattgtaaattgagtaattattagtaggcttagctattctagggttgccaaca

SEQ ID NO: 554085 - DNA, 120 bp, Artificial Sequence
  ENSG00000168769_120 (sequence is synthesized)
ctacacactgtgctattcaccagagagtcacaatatttgacaggactaatagtctgctagctggcacaggctgcccactttgcgatggatgccagaaaacccaggcatgaacaggaatcg

SEQ ID NO: 554086 - DNA, 120 bp, Artificial Sequence
  ENSG00000168769_121 (sequence is synthesized)
gccagccaggctgccagccacaaggtactggcacaggctccaacgagaggtcccactctggctttcccacctgataataaagtgtcaaagcagaaagactggtaaagtgtggtataagaa

SEQ ID NO: 554087 - DNA, 120 bp, Artificial Sequence
  ENSG00000168769_122 (sequence is synthesized)
aagaaccactgaattaaattcacctagtgttgcaaatgagtacttatctctaagttttcttttaccataaaaagagagcaagtgtgatatgttgaatagaaagagaaacatactatttac

SEQ ID NO: 554088 - DNA, 120 bp, Artificial Sequence
  ENSG00000168769_123 (sequence is synthesized)
agctgcctttttttttttttttcgctatcaatcacaggtatacaagtacttgcctttactcctgcatgtagaagactcttatgagcgagataatgcagagaaggcctttcatataaattt

SEQ ID NO: 554089 - DNA, 120 bp, Artificial Sequence
  ENSG00000168769_124 (sequence is synthesized)
atacagctctgagctgttcttcttctagggtgccttttcattaagaggtaggcagtattattattaaagtacttaggatacattggggcagctaggacatattcagtatcattcttgctc

SEQ ID NO: 554090 - DNA, 120 bp, Artificial Sequence
  ENSG00000168769_125 (sequence is synthesized)
catttccaaattattcatttctaaattagcatgtagaagttcactaaataatcatctagtggcctggcagaaatagtgaatttccctaagtgccttttttttgttgtttttttgttttgt

SEQ ID NO: 554091 - DNA, 120 bp, Artificial Sequence
  ENSG00000168769_126 (sequence is synthesized)
tttttaaacaagcagtaggtggtgctttggtcataagggaagatatagtctatttctaggactattccatattttccatgtggctggatactaactatttgccagcctccttttctaaat

SEQ ID NO: 554092 - DNA, 120 bp, Artificial Sequence
  ENSG00000168769_127 (sequence is synthesized)
tgtgagacattcttggaggaacagttctaactaaaatctattatgactccccaagttttaaaatagctaaatttagtaagggaaaaaatagtttatgttttagaagactgaacttagcaa

SEQ ID NO: 554093 - DNA, 120 bp, Artificial Sequence
  ENSG00000168769_128 (sequence is synthesized)
actaacctgaattttgtgctttgtgaaattttatatcgaaatgagctttcccattttcacccacatgtaatttacaaaatagttcattacaattatctgtacattttgatattgaggaaa

SEQ ID NO: 554094 - DNA, 120 bp, Artificial Sequence
  ENSG00000168769_129 (sequence is synthesized)
aacaaggcttaaaaaccattatccagtttgcttggcgtagacctgtttaaaaaataataaaccgttcatttctcaggatgtggtcatagaataaagttatgctcaaatgttcaaatattt

SEQ ID NO: 554095 - DNA, 120 bp, Artificial Sequence
  ENSG00000168769_130 (sequence is synthesized)
atcagctgtagggtctgggtctgggtttgtgtctgcctcctcctaccttcttatccccctttagggggctgtacgaagtgaatgtcacagggagtggaattggagtacactgagtgggtt

SEQ ID NO: 554096 - DNA, 120 bp, Artificial Sequence
  ENSG00000168769_131 (sequence is synthesized)
ttttttttccttaagtccgcgcgttttgttagcggcgctgagtgaaagaggaaagaatagtttctctggttccccaaacaagaccagaactcacttttctcaaggtacataagtcagcgc

SEQ ID NO: 554097 - DNA, 120 bp, Artificial Sequence
  ENSG00000168769_132 (sequence is synthesized)
tgggctgagccttccagcctggggaatgtatgtaagagaatttatggacaaatctgtgtcccggctttgtgcttctcccgaatcagcttcgtttggttccttggctggcaaacattcagc

SEQ ID NO: 554098 - DNA, 120 bp, Artificial Sequence
  ENSG00000168769_133 (sequence is synthesized)
cttcaacttcaagttaccctgcaccctctcaaatacttttctttattgtctatgcttaggacacatggattagattgttaagatttgtgaatttactaaagttgtgtactgacttatgta

SEQ ID NO: 554099 - DNA, 120 bp, Artificial Sequence
  ENSG00000168772_0 (sequence is synthesized)
gcacacagcgactggagacggacggagagcaacgcgctgggagaggagagaccaccgacaacagacccgcgctctcacacatacactcacactcgactctttcctctccccccacctcct

SEQ ID NO: 554100 - DNA, 120 bp, Artificial Sequence
  ENSG00000168772_1 (sequence is synthesized)
cctccttccacccccaccactaacaccatctcctcctccttctctctgcaacaagaaaaaaaagccatttacagttgtaacagttggaggataatgcaaaggaagacgctgcctgggaat

SEQ ID NO: 554101 - DNA, 120 bp, Artificial Sequence
  ENSG00000168772_2 (sequence is synthesized)
tcaccgtctgtggaaatgagccccagagaggaataaagcagccctcaccttgctctccccacccgaacccactttccccacccgcctcggcccccaccccaacaccaccatcactccctt

SEQ ID NO: 554102 - DNA, 120 bp, Artificial Sequence
  ENSG00000168772_3 (sequence is synthesized)
ccctcccccccacctttcccccttttccacccaggtgtcggaccaggcggtccccacttccaccctgcaccccttcttccccccctgcaccatgaacaccaatgtctgcgtggagcccgg

SEQ ID NO: 554103 - DNA, 120 bp, Artificial Sequence
  ENSG00000168772_4 (sequence is synthesized)
gccgagcccggaggccccgggcttgcccaaggaaagccacttgcccgagggggctctgaacagccttgtggattacaactcggaaatggagcgctaccgctcctttgccacctccttcta

SEQ ID NO: 554104 - DNA, 120 bp, Artificial Sequence
  ENSG00000168772_5 (sequence is synthesized)
caagaccaacgggggcgccttcccacaggcggccaagatcgcgcgcatcaccacccccatcttccccagcagcgccgccgccgccgcggccgccgcgcgcatcggcatgtccccctggaa

SEQ ID NO: 554105 - DNA, 80 bp, Artificial Sequence
  ENSG00000168772_6 (sequence is synthesized)
gcatgtccccctggaactgcgacaacgcggccaccgccgccgccgccaccgccatgctctggggcagcggcgggggcggg

SEQ ID NO: 554106 - DNA, 120 bp, Artificial Sequence
  ENSG00000168772_7 (sequence is synthesized)
caggaaatcctcctccgccgccgcctcctcctccgcctcctcctcctcggcgatcctccccgccggcggtggcggcggcggcggcggcggcggcagcaggaccagcatgcaccaccgaaa

SEQ ID NO: 554107 - DNA, 120 bp, Artificial Sequence
  ENSG00000168772_8 (sequence is synthesized)
gcaccaccgaaacgactcccagaggctggggaaagctggctgcccgccagagccgtcgttgcaaatggcaaatactaatttcctctccaccttatcccctgaacactgcagacctttggc

SEQ ID NO: 554108 - DNA, 120 bp, Artificial Sequence
  ENSG00000168772_9 (sequence is synthesized)
gggggaatgcatgaacaagctcaaatgcggcgctgctgaagcagagataatgaatctccccgagcgcgtggggactttttccgctatcccggctttagggggcatctcattacctccagg

SEQ ID NO: 554109 - DNA, 120 bp, Artificial Sequence
  ENSG00000168772_10 (sequence is synthesized)
ggtcatcgtcatgacagcccttcactcccccgcagcagcctcagcagccgtcacagacagtgcgtttcaaattgccaatctggcagactgcccgcagaatcattcctcctcctcctcgtc

SEQ ID NO: 554110 - DNA, 120 bp, Artificial Sequence
  ENSG00000168772_11 (sequence is synthesized)
ctcctcagggggagctggcggagccaacccagccaagaagaagaggaaaaggtgtggggtctgcgtgccctgcaagaggctcatcaactgtggcgtctgcagcagttgcaggaaccgcaa

SEQ ID NO: 554111 - DNA, 120 bp, Artificial Sequence
  ENSG00000168772_12 (sequence is synthesized)
aacgggacaccagatctgcaaatttagaaaatgtgaagagctaaagaaaaaacctggcacttcactagagagaacacctgttcccagcgctgaagcattccgatggttcttttaaagcag

SEQ ID NO: 554112 - DNA, 120 bp, Artificial Sequence
  ENSG00000168772_13 (sequence is synthesized)
tagtatatcttattttcaaggcatttggaaatgaagggcaaactaatgtcttgttttaagaaactgcttagtccaccactgaagaaaatatccagaaattattttcattttatgtatagg

SEQ ID NO: 554113 - DNA, 120 bp, Artificial Sequence
  ENSG00000168772_14 (sequence is synthesized)
aaaaaaaagaggaaaagaaaagaaaaagacataaaaataatgtgagagcttggagaattggccagtctatttactttcaatacgctgattctttctttgatgtaatttagctatagtagt

SEQ ID NO: 554114 - DNA, 120 bp, Artificial Sequence
  ENSG00000168772_15 (sequence is synthesized)
atttagctatagtagtgaagttgttgtctattttgaaagtggctgtaaaaaataagtttgggtaaacccctgctgtaaaatcatgtatctttgcaaagtacatatctatacttcattttc

SEQ ID NO: 554115 - DNA, 120 bp, Artificial Sequence
  ENSG00000168772_16 (sequence is synthesized)
aaatatatgtgtttcagtactgtaaactgtacagatagcagcttgtattttgtgtgtttagacacaaggagacaatcatgtctgagcatctatggagattaacagtttgtacacaacagt

SEQ ID NO: 554116 - DNA, 120 bp, Artificial Sequence
  ENSG00000168772_17 (sequence is synthesized)
atggttctgcaagttaaatctggagcaataaattttagctttaactattttttgccagtggtttagaagcagcaacagcactggcaccattttgccatgcatctttccatagagacttga

SEQ ID NO: 554117 - DNA, 120 bp, Artificial Sequence
  ENSG00000168772_18 (sequence is synthesized)
tgccaagttttacaagactaaaagattatgatgcatccaccaattaccttcagttttattgttataagaggggaagatgttatgaaagtttcaattaatcttttgagcactatattagag

SEQ ID NO: 554118 - DNA, 120 bp, Artificial Sequence
  ENSG00000168772_19 (sequence is synthesized)
tagtggttatgcacttgcattgcttacaaacgagctgtacagaagggtatacctcccaaatacttagtgtagttgacttgtcttgggttgcactgtaaggcagagtactcagagtagttg

SEQ ID NO: 554119 - DNA, 120 bp, Artificial Sequence
  ENSG00000168772_20 (sequence is synthesized)
gaaaatgcagaatcagttgtataatttttttttataaaaacggtgttttttaggctaaagaataaagtatcatatcttaggaggggaaaatttataactgacattttttccccagcccaa

SEQ ID NO: 554120 - DNA, 120 bp, Artificial Sequence
  ENSG00000168772_21 (sequence is synthesized)
tatgggctgtatacgttttattgtttcttaatttttttcttattttttctgtaggaaaaaatcttaataaaaactaccccaatgttttaacttcatgtatgatattaaatgggtagtttt

SEQ ID NO: 554121 - DNA, 120 bp, Artificial Sequence
  ENSG00000168772_22 (sequence is synthesized)
aacacttgaatatgttgagggcttctgccttgaggcagggcttgatatatttttaatttacaaagaattaaacatattcataaaagtgaggcattttatctctttttattttcttttctc

SEQ ID NO: 554122 - DNA, 120 bp, Artificial Sequence
  ENSG00000168772_23 (sequence is synthesized)
gctccattgctgccatttccattgttgttacttgatgctttcattcctgagaaggcagggctacagtctctggaatttcataaatgcatgacatacccctccccccacaacctacacaca

SEQ ID NO: 554123 - DNA, 120 bp, Artificial Sequence
  ENSG00000168772_24 (sequence is synthesized)
aaggatctaatgcttcatagaacctgtgctaccttttcatgttggagttggttttcttatcacagtcagggttcttaaggccgtcccatcaggacaaatatttaccttccattttatttc

SEQ ID NO: 554124 - DNA, 120 bp, Artificial Sequence
  ENSG00000168772_25 (sequence is synthesized)
tgtttgtcccaattataaagactattttcagtttcaggagtagaacagggtttagcaaaaatatgtagagtatcaaagttacctactgcaactttttgttctttgtccactagccaggtg

SEQ ID NO: 554125 - DNA, 120 bp, Artificial Sequence
  ENSG00000168772_26 (sequence is synthesized)
atttaacccactaaatccattagcttgctgaaaaatgttagcaaagtaaatcacgagaagaaagataatttgagaagagaaatggtatggtacaatgaaagaagctgtaaagattaggaa

SEQ ID NO: 554126 - DNA, 120 bp, Artificial Sequence
  ENSG00000168772_27 (sequence is synthesized)
agactagtaagtgaatatttttaaaaatttagttgtagatttcaatgggatacgataggacagaaaagattttttaaaaagcagaaagagtgtttcatggtgaaagtactgggggagggt

SEQ ID NO: 554127 - DNA, 120 bp, Artificial Sequence
  ENSG00000168772_28 (sequence is synthesized)
ggacaaagcatgcacacatgccaatttgaaaatcaagtgtgacttacctcacgtagagtatgaatacatggtccacagttatggtcaacaagcgttttcaagaaaaactcatgatgtgtt

SEQ ID NO: 554128 - DNA, 120 bp, Artificial Sequence
  ENSG00000168772_29 (sequence is synthesized)
acacccatccatatttagagatgagaattaaatgattacaagctaaaatgtgctgtatactgtattaattttgagatagctttctacttgatgtatatttctttgagggtttctatctag

SEQ ID NO: 554129 - DNA, 120 bp, Artificial Sequence
  ENSG00000168772_30 (sequence is synthesized)
ttagaatttcagcttctgctgtgggaccaatgagagctgtatgagtttttttttttttttccttttccattattttattttttgttttttgtttaccaatttgctaattaattacaagta

SEQ ID NO: 554130 - DNA, 120 bp, Artificial Sequence
  ENSG00000168772_31 (sequence is synthesized)
agtgaaaacttactttcacacttgaatgataagcttgccttgctctttggaaaatgatgattgttattacagaagtgaaacaaacttctattcaggctacagtaggcatacaataaccta

SEQ ID NO: 554131 - DNA, 120 bp, Artificial Sequence
  ENSG00000168772_32 (sequence is synthesized)
aagatctcatagaagtatactgagagtctaaaatacattctagtagtgcatgtcttggtgtgcttttgtttgtttgctttctaaaagaactaatgaatctgtatattgtaaactgtggtg

SEQ ID NO: 554132 - DNA, 120 bp, Artificial Sequence
  ENSG00000168772_33 (sequence is synthesized)
ttttacatgtcaattcatttttttaatgaaagaaaatttgttgattactgaaatgagaaagtgtagcttttcattaattctcttatgttttttattcttgatattgttcttttataccac

SEQ ID NO: 554133 - DNA, 120 bp, Artificial Sequence
  ENSG00000168772_34 (sequence is synthesized)
ccactttttaatgtttttggttaaactccatttatataatgtaggatgcatataaagttctcattggtgatgttgaagaaagagatgactcttctggcctttctctagttttcttcctca

SEQ ID NO: 554134 - DNA, 120 bp, Artificial Sequence
  ENSG00000168772_35 (sequence is synthesized)
tatgtccctgtactgagaacttctaaagcttatcattataaacctaaggcagtgatttgaaagtttacatttttcatgattttcaaataccaatgaaatgtaacttttaaatattcctca

SEQ ID NO: 554135 - DNA, 120 bp, Artificial Sequence
  ENSG00000168772_36 (sequence is synthesized)
ctgtgtgttttatattcactgtcaagaaaattcagaatgtagattgtgtggacagctatacacaacttaataattatatatcagataaactgaataaaaaactttgtaagagtggtctac

SEQ ID NO: 554136 - DNA, 120 bp, Artificial Sequence
  ENSG00000168772_37 (sequence is synthesized)
gcacacaggatcttgtcctccctaggcgtggatagagagatgccataatctgccagcatttggggagatcatggtaaatacttgaggcgttgatacatagtgcagtgagccaatttcctt

SEQ ID NO: 554137 - DNA, 120 bp, Artificial Sequence
  ENSG00000168772_38 (sequence is synthesized)
ttcagttgtcactcagcaccataacatcacgaagaacatcattaatgcaaacctctcactaagccttcagaccaaagtggctttctgatggactctgcctgtctgtctacaagtggagtc

SEQ ID NO: 554138 - DNA, 120 bp, Artificial Sequence
  ENSG00000168772_39 (sequence is synthesized)
agattcaaagtagaaatgtatccatccttgggaaagaaaataggaagtcttcccccactgtaggagtatataaaaatgtctcctggttgcttaattcccaacactcaatttccttcttct

SEQ ID NO: 554139 - DNA, 120 bp, Artificial Sequence
  ENSG00000168772_40 (sequence is synthesized)
aaacacatttataaggagcaagagatggtgcacttattatgaattaatattaagcaatcactaaaagaaaggaatattctcttcctttcaatcagaaaccctgatatgtaagttgtgcaa

SEQ ID NO: 554140 - DNA, 120 bp, Artificial Sequence
  ENSG00000168772_41 (sequence is synthesized)
ttaatgctaaagcatataaagtctttaagctgataagtatctgtaatcaaataatgaaaaaaggaaagcagttaaatgaacacactattcagggtcaaatatgttcagcaaaaagccgta

SEQ ID NO: 554141 - DNA, 120 bp, Artificial Sequence
  ENSG00000168772_42 (sequence is synthesized)
gcgggtctttgatcatggttagattcacagtgatatcaaacagttggttctcatgtaacagctaaatgtttcagtttttttttttttattaaatttggcatttcacactgagatctgtat

SEQ ID NO: 554142 - DNA, 120 bp, Artificial Sequence
  ENSG00000168772_43 (sequence is synthesized)
tcctagtgaataaaagacagctactatattaggagggattccattttcacaattgcaaaacagatatttcaggaacatgggccacaaaatgtactcctttcacagtgttctcctcttctg

SEQ ID NO: 554143 - DNA, 120 bp, Artificial Sequence
  ENSG00000168772_44 (sequence is synthesized)
aactgtgcagttatctattaaattttctaatagatatttgtgtaaggtgtatgtatgcttgtgcaattatttaaaaaacggttttggaaaacagtgtatttattaaagaaaattacttat

SEQ ID NO: 554144 - DNA, 90 bp, Artificial Sequence
  ENSG00000168772_45 (sequence is synthesized)
ggggcatgtacaaaactgtttcaatttgcccagtaaagttgtttttgtgaaatttctgtgttgttgaataaaggactttagtactcaaaa

SEQ ID NO: 554145 - DNA, 120 bp, Artificial Sequence
  ENSG00000168772_46 (sequence is synthesized)
taggcttcttgacctcaaggatcttaatataaggaagaaataatttttaaaagaggcttccctgcttaccttctcacttctcctgcaataaactgtccatattcttacatctggggatgc

SEQ ID NO: 554146 - DNA, 120 bp, Artificial Sequence
  ENSG00000168778_0 (sequence is synthesized)
atagctccgggcgttcgcttgcaagatggcggcggcggggcagtggctgctgcgttttcgtgtctgagtccttcctgggttctaatgagggcgcggttctgctgtgcccggcccgcgagg

SEQ ID NO: 554147 - DNA, 120 bp, Artificial Sequence
  ENSG00000168778_1 (sequence is synthesized)
tctaaggcatgggcttccagcctccggccgctcttcttttgaggcttttccttctgcagggcatcctgaggcttctgtggggggacctggctttcatccctccttttatccgaatgtccg

SEQ ID NO: 554148 - DNA, 120 bp, Artificial Sequence
  ENSG00000168778_2 (sequence is synthesized)
gccctgcggtcagcgcgtccctggtcggagacaccgagggtgtgaccgtgtccctggcagtgctgcaggacgaggcgggaatattgccaattccgacgtgtggagtgctgaacaatgaga

SEQ ID NO: 554149 - DNA, 120 bp, Artificial Sequence
  ENSG00000168778_3 (sequence is synthesized)
cggaagactggagcgtgactgtgatccccggtgcgaaggtgttggaagtgacagtgaggtggaagagaggtctggactggtgttcctccaatgagacagattccttctcagagtccccct

SEQ ID NO: 554150 - DNA, 120 bp, Artificial Sequence
  ENSG00000168778_4 (sequence is synthesized)
gtatcctccagacccttctggtttcagcatctcataattcatcctgttcagcacatctactcattcaagtggaaatttatgccaactcttctctgacccataatgcctcagagaacgtga

SEQ ID NO: 554151 - DNA, 120 bp, Artificial Sequence
  ENSG00000168778_5 (sequence is synthesized)
ctgtcattcctaaccaggtgtatcagccccttggcccttgtccttgtaatttaacagctggagcctgtgatgttcgctgctgctgtgaccaggaatgctcatcaaatttaacaacgctgt

SEQ ID NO: 554152 - DNA, 120 bp, Artificial Sequence
  ENSG00000168778_6 (sequence is synthesized)
tcagacggtcctgcttcaccggcgtgtttggaggagacgtcaatcctccttttgatcagctctgctctgctgggacgacgacacgtggtgtccccgattggtttccctttctgtgtgtgc

SEQ ID NO: 554153 - DNA, 120 bp, Artificial Sequence
  ENSG00000168778_7 (sequence is synthesized)
agtccccccttgccaacacacccttccttggttacttctatcatggtgctgtttcccccaaacaggactcttcctttgaagtatatgtggatactgacgcaaaagactttgcagactttg

SEQ ID NO: 554154 - DNA, 120 bp, Artificial Sequence
  ENSG00000168778_8 (sequence is synthesized)
gttacaaacaaggagatcccattatgactgtaaagaaggcatattttactattccgcaggtgtccctggctgggcagtgtatgcagaacgccccagtggcatttcttcacaattttgatg

SEQ ID NO: 554155 - DNA, 120 bp, Artificial Sequence
  ENSG00000168778_9 (sequence is synthesized)
ttaaatgcgttactaatttggaactataccaagaacgagatggtattatcaatgcgaagataaagaatgttgccttaggaggcatagttacaccaaaagtgatctatgaggaagcaactg

SEQ ID NO: 554156 - DNA, 120 bp, Artificial Sequence
  ENSG00000168778_10 (sequence is synthesized)
acctagacaaattcatcaccaatacagaaactcctttaaataacggatcaacccctagaattgtgaatgtggaagaacattatattttcaaatggaataataataccatcagtgaaataa

SEQ ID NO: 554157 - DNA, 120 bp, Artificial Sequence
  ENSG00000168778_11 (sequence is synthesized)
atgttaaaatttttagggcagagattaatgcccaccagaaagggataatgacacagagatttgtagtaaaatttttaagctataatagtggtaatgaagaagaattatctggaaatccag

SEQ ID NO: 554158 - DNA, 120 bp, Artificial Sequence
  ENSG00000168778_12 (sequence is synthesized)
tctaaatatcaacaggatgaataatgtcacgactttacatctttggcaatcggctggaaggggtctgtgtacatcagcaactttcaaacccattttatttggagaaaatgtactctctgg

SEQ ID NO: 554159 - DNA, 120 bp, Artificial Sequence
  ENSG00000168778_13 (sequence is synthesized)
atgcctgttagaagtcgggattaatgaaaattgtactcagctcagggagaatgctgttgaaagacttgattcattaatacaagcgactcacgttgcaatgagaggcaactccgattacgc

SEQ ID NO: 554160 - DNA, 120 bp, Artificial Sequence
  ENSG00000168778_14 (sequence is synthesized)
tgatcttagtgatggctggctcgaaataatacgtgtagatgcccctgatccaggtgcagacccgctggctagcagtgtgaacggcatgtgcctggatattcctgctcacctgagcatccg

SEQ ID NO: 554161 - DNA, 120 bp, Artificial Sequence
  ENSG00000168778_15 (sequence is synthesized)
catcctcatctcggatgctggcgcggtggaagggattactcagcaggagatactcggtgtagagacaaggttctcctcagtgaactggcagtaccagtgtgggcttacctgtgagcacaa

SEQ ID NO: 554162 - DNA, 120 bp, Artificial Sequence
  ENSG00000168778_16 (sequence is synthesized)
ggccgaccttctccctatcagtgcatccgtccagtttattaaaattcctgcacagttaccccaccccctgacaagattccagatcaattatacagagtatgactgcaacagaaatgaggt

SEQ ID NO: 554163 - DNA, 120 bp, Artificial Sequence
  ENSG00000168778_17 (sequence is synthesized)
gtgttggccgcagcttctatatccatggactcagtattatcaaggggagctgcattctcagtgtgttgctaagggcttactgttgctgttgttcctcacattggccttgttcctcagcaa

SEQ ID NO: 554164 - DNA, 86 bp, Artificial Sequence
  ENSG00000168778_18 (sequence is synthesized)
tgttgctgttgttcctcacattggccttgttcctcagcaacccctggaccagaatatgcaaagcctatagttagacaaccacctgg

SEQ ID NO: 554165 - DNA, 120 bp, Artificial Sequence
  ENSG00000168778_19 (sequence is synthesized)
cggctcactgcaatctctgcctcccaagcaatcctcccacctcagcctctggtgtagctgggaccacagatgctccaccatgcctggctgtatttttggtaaagacggggtttcgccttg

SEQ ID NO: 554166 - DNA, 120 bp, Artificial Sequence
  ENSG00000168778_20 (sequence is synthesized)
gctgggaccacagatgctccaccatgcctggctgtatttttggtaaagacggggtttcgccttgttgcccagggtggtctgtaactcctgagctcagatgatctgcccacctcggcctcc

SEQ ID NO: 554167 - DNA, 120 bp, Artificial Sequence
  ENSG00000168778_21 (sequence is synthesized)
actgcgtccggtccatctgacttctcaaagactttagaccttgacttcagtgatttgttgtagtcttgtatgcttctctataaaattttaataaatgaaatgtcttatttttgtagaaaa

SEQ ID NO: 554168 - DNA, 120 bp, Artificial Sequence
  ENSG00000168778_22 (sequence is synthesized)
gattctcataattataacccataaaactaagttggacttgtttcttatgtgcatttatgatttaattaacgagagtacactttgtatgacaaaatgcaattttaaggtaaacactatgga

SEQ ID NO: 554169 - DNA, 120 bp, Artificial Sequence
  ENSG00000168778_23 (sequence is synthesized)
gaataatttcttttcctagtgaaatggtgcacattatattttattttgttttatttctagggataatgacacagagatttgtagtaaaatttttaagctataatagtggtaatgaagaag

SEQ ID NO: 554170 - DNA, 120 bp, Artificial Sequence
  ENSG00000168778_24 (sequence is synthesized)
aattatctggaaatccaggtaagatgagtatatgccagtcattgatcttacaaacatactttagttcaacactcccagccatcaggatggttataagtaactctctccaatttagtttct

SEQ ID NO: 554171 - DNA, 63 bp, Artificial Sequence
  ENSG00000168778_25 (sequence is synthesized)
atcaggatggttataagtaactctctccaatttagtttctgactctgacctctggagtgcagt

SEQ ID NO: 554172 - DNA, 120 bp, Artificial Sequence
  ENSG00000168778_26 (sequence is synthesized)
tacaggtgcacaccaccatgcctggctttttttttttttttttaatcacacaacacaggaagttttattcatctgctacttctccaaagagaggcttgcagggttgctcactttaatata

SEQ ID NO: 554173 - DNA, 120 bp, Artificial Sequence
  ENSG00000168778_27 (sequence is synthesized)
agttttattcatctgctacttctccaaagagaggcttgcagggttgctcactttaatataatttttatatttttagtagagataggctgttgttcaccgtgttggccaggctggtcttga

SEQ ID NO: 554174 - DNA, 120 bp, Artificial Sequence
  ENSG00000168778_28 (sequence is synthesized)
ccctggccttagcctcccaaagtgttgtgattacaggcatgagccactgccccagcctctttattctctgttgtggcactgtattcattttttttttttttgagacggagtttaactctt

SEQ ID NO: 554175 - DNA, 120 bp, Artificial Sequence
  ENSG00000168778_29 (sequence is synthesized)
aggcgtgagccactacgcctggccgacatggtattctttttgtgataacaatgtattttttttttttacatagtctgttgtacatagtaacaagttgctgtaaatgtgaagcattctttc

SEQ ID NO: 554176 - DNA, 120 bp, Artificial Sequence
  ENSG00000168778_30 (sequence is synthesized)
tctttagctactgttttttttgagacccgaagttgccatctttctctcaagggtattttcgaaagcttcgcctatgtgttttctttccttgtgcatgactcttgtattatttgcagagtt

SEQ ID NO: 554177 - DNA, 120 bp, Artificial Sequence
  ENSG00000168778_31 (sequence is synthesized)
agggcttgctatgctggaggaaacaggctcacgttcctttgttgtgtttgtctaggttaccaacttggcaagcctgtccgagctctaaatatcaacaggatgaataatgtcacgacttta

SEQ ID NO: 554178 - DNA, 120 bp, Artificial Sequence
  ENSG00000168778_32 (sequence is synthesized)
attagccctttggcaaattggtgttagaagtattaccatattttgaatctaatcaagcaatcaattattttaaagcctagttggtttatttagcagagaggtacatgctgctgaataaca

SEQ ID NO: 554179 - DNA, 120 bp, Artificial Sequence
  ENSG00000168778_33 (sequence is synthesized)
gtgatgatggtttttcctgcttctacagctttttaaaaaggaatgctaacattgtttgcacctgaagtgctggttgctagtagaaaagattgaaatatgagattggcttgagagtcccat

SEQ ID NO: 554180 - DNA, 120 bp, Artificial Sequence
  ENSG00000168778_34 (sequence is synthesized)
gttattgttgcctgtagcccaggatggtgctaattggagacatgaaaataacttcgttctgaactgcaggaaatctgtgcttcagtggtaattacgcacacctgccagaggcagtgtcac

SEQ ID NO: 554181 - DNA, 120 bp, Artificial Sequence
  ENSG00000168778_35 (sequence is synthesized)
ttctgaagaaaccaccgctcaggatctgagaagtctgataaaggcacctttgttcagctttgaaaggattagactaacagtgatctcagtttttgaaaactggcaactttatttctactt

SEQ ID NO: 554182 - DNA, 120 bp, Artificial Sequence
  ENSG00000168778_36 (sequence is synthesized)
actgttttctgtttttcacggaaaactgaagttaatctttacttttgtttagcaaaaagtagcaagaggataatctttttcttttatagctggaaggggtctgtgtacatcagcaacttt

SEQ ID NO: 554183 - DNA, 120 bp, Artificial Sequence
  ENSG00000168778_37 (sequence is synthesized)
tttaaaaaaattttttaaatgatgtctaaatgttacagaaagcataaaacatatagaaacttaaaaaaaagtacggataatattgccacttggaagtgatcaccattactgttttggctt

SEQ ID NO: 554184 - DNA, 120 bp, Artificial Sequence
  ENSG00000168779_0 (sequence is synthesized)
gagcgccgggctgacgtgcggcggcgatggaagaacttacggcgttcgtctccaagtcttttgaccagaaagtgaaggagaagaaggaggcgatcacgtaccgggaggtgctggagagcg

SEQ ID NO: 554185 - DNA, 120 bp, Artificial Sequence
  ENSG00000168779_1 (sequence is synthesized)
aagaaggaggcgatcacgtaccgggaggtgctggagagcgggccgctgcgcggggccaaggagccgaccggctgcaccgaggcgggccgcgacgaccgcagcagcccggcagtccgggcg

SEQ ID NO: 554186 - DNA, 120 bp, Artificial Sequence
  ENSG00000168779_2 (sequence is synthesized)
gaggaggcggaggaggtgtaggaggaggaggagcaggcggaggagctggaggagggcgctctcccgtccgggagctggacatgggcgccgccgagagaagcagggagccgggcagcccgc

SEQ ID NO: 554187 - DNA, 120 bp, Artificial Sequence
  ENSG00000168779_3 (sequence is synthesized)
gactgacggaggtgtccccggagctgaaagatcgcaaagaggatgcgaaagggatggaggacgaaggccagaccaaaatcaagcagaggcgaagtcggaccaatttcaccctggaacaac

SEQ ID NO: 554188 - DNA, 120 bp, Artificial Sequence
  ENSG00000168779_4 (sequence is synthesized)
tcaatgagctggagaggctttttgacgagacccactatcccgacgccttcatgcgagaggaactgagccagcgactgggcctgtcggaggcccgagtgcaggtttggtttcaaaatcgaa

SEQ ID NO: 554189 - DNA, 120 bp, Artificial Sequence
  ENSG00000168779_5 (sequence is synthesized)
gagctaaatgtagaaaacaagaaaatcaactccataaaggtgttctcataggggccgccagccagtttgaagcttgtagagtcgcaccttatgtcaacgtaggtgctttaaggatgccat

SEQ ID NO: 554190 - DNA, 120 bp, Artificial Sequence
  ENSG00000168779_6 (sequence is synthesized)
ttcagcaggatagtcattgcaacgtgacgcccttgtcctttcaggttcaggcgcagctgcagctggacagcgctgtggcgcacgcgcaccaccacctgcatccgcacctggccgcgcacg

SEQ ID NO: 554191 - DNA, 120 bp, Artificial Sequence
  ENSG00000168779_7 (sequence is synthesized)
cgccctacatgatgttcccagcaccgcccttcggactgccgctcgccacgctggccgcggattcggcttccgccgcctcggtagtggcggccgcagcagccgccaagaccaccagcaaga

SEQ ID NO: 554192 - DNA, 120 bp, Artificial Sequence
  ENSG00000168779_8 (sequence is synthesized)
actccagcatcgccgatctcagactgaaagccaaaaagcacgccgcagccctgggtctgtgacgccaacgccagcaccaatgtcgcgcctgtcccgcggcactcagcctgcacgccctcc

SEQ ID NO: 554193 - DNA, 120 bp, Artificial Sequence
  ENSG00000168779_9 (sequence is synthesized)
gcgccccgctgcttctccgttacccctttgagacctcgggagccggccctcttcccgcctcactgaccatccctcgtcccctatcgcatcttggactcggaaagccagactccacgcagg

SEQ ID NO: 554194 - DNA, 120 bp, Artificial Sequence
  ENSG00000168779_10 (sequence is synthesized)
accagggatctcacgaggcacgcaggctccgtggctcctgcccgttttcctactcgagggcctagaattgggttttgtaggagcgggtttgggggagtctggagagagactggacagggg

SEQ ID NO: 554195 - DNA, 120 bp, Artificial Sequence
  ENSG00000168779_11 (sequence is synthesized)
agtgctggaaccgcggagtttggctcaccgcaaagctgcaacgatggactcttgcatagaaaaaaaaatcttgttaacaatgaaaaaatgagcaaacaaaaaaatcgaaagacaaacggg

SEQ ID NO: 554196 - DNA, 120 bp, Artificial Sequence
  ENSG00000168779_12 (sequence is synthesized)
tttggcagaagctgaaattggagaaccaaggagcaaaaacaaattttaaaattaaagtattttatacatttaaaaatatggaaaaacaacccagacgattctcgagagactggggggagt

SEQ ID NO: 554197 - DNA, 120 bp, Artificial Sequence
  ENSG00000168779_13 (sequence is synthesized)
taccaacttaaatgtgtgtttttaaaaatgcgctaagaaggcaaagcagaaagaagaggtatacttatttaaaaaactaagatgaaaaaagtgcgcagctgggaagttcacaggttttga

SEQ ID NO: 554198 - DNA, 120 bp, Artificial Sequence
  ENSG00000168779_14 (sequence is synthesized)
aactgacctttttctgcgaagttcacgttaacacgagaaatttgatgagagaggcgggcctccttttacgttgaatcagatgctttgagtttaaacccaccatgtatggaagagcaagaa

SEQ ID NO: 554199 - DNA, 120 bp, Artificial Sequence
  ENSG00000168779_15 (sequence is synthesized)
aagagaaaatattaaaacgaggagagagaaaaataatattaacacaaaaaaatgccacagacaatgatttctctgagaaattattatggcaaaactgtctggactgctgacagtaaattc

SEQ ID NO: 554200 - DNA, 120 bp, Artificial Sequence
  ENSG00000168779_16 (sequence is synthesized)
cggtttgcatgttacttgtattccattgatggtgtgtctcctcccacccccttatctcccatgcactcactccattttcatcttcactatgaaaaacaataccaaaagtatctggaaatt

SEQ ID NO: 554201 - DNA, 80 bp, Artificial Sequence
  ENSG00000168779_17 (sequence is synthesized)
tatatatatatatatatatatatatttgccctgtctttgatcctggggaacaaaagaaaaaagtcagaaagggaaaaaat

SEQ ID NO: 554202 - DNA, 120 bp, Artificial Sequence
  ENSG00000168779_18 (sequence is synthesized)
cagaaagggaaaaaattacactcattgtcctaagaagacagaggtgggcagaatatgtggggaaaggaaaaagaaaacaagaccaccaaatgaaataatgaaggtacagcgcctcgctgt

SEQ ID NO: 554203 - DNA, 120 bp, Artificial Sequence
  ENSG00000168779_19 (sequence is synthesized)
gccagacacagtaggcgctcaatcagtattagttcccaccattccccttttcttgtgttccttcttgttggtttcctgaagtcctatttgaagacagtggtttatttccccctctctatc

SEQ ID NO: 554204 - DNA, 120 bp, Artificial Sequence
  ENSG00000168779_20 (sequence is synthesized)
ccgtcaaattcaccttaaataacacccagctagatacaggcactaggtttgtgtaagatatgttgatacacacgaacaaagtttattttgactataatgtgtggactgactttcaacatt

SEQ ID NO: 554205 - DNA, 78 bp, Artificial Sequence
  ENSG00000168779_21 (sequence is synthesized)
gtttattttgactataatgtgtggactgactttcaacatttgcattttatctcacaaaggtgtatctattcaagtaac

SEQ ID NO: 554206 - DNA, 120 bp, Artificial Sequence
  ENSG00000168779_22 (sequence is synthesized)
gggataccttggactaagccagtctgtatcccaattcgctagcaagcctaagtttgtggggttttgtttttgtttttgttttaccttctaatttacaagaaagaggaaaagctcttctaa

SEQ ID NO: 554207 - DNA, 120 bp, Artificial Sequence
  ENSG00000168779_23 (sequence is synthesized)
ctgaactttggtatgcggttgagctttgtaactatttgttctccatgaaaacaaaattatttatatttgacatatttttttctagtgtattaagttattttaaacaaaagatgttatctc

SEQ ID NO: 554208 - DNA, 120 bp, Artificial Sequence
  ENSG00000168779_24 (sequence is synthesized)
atgacgtgttgtcagtacaaaatgtgtcgcctccaattctgttaaaccttttaaataagtgccaagttattaattgaagacactttgcgatcaattgaatgaaaatatcgtttcatttga

SEQ ID NO: 554209 - DNA, 120 bp, Artificial Sequence
  ENSG00000168779_25 (sequence is synthesized)
ccgagttgcgaggggaggtaatttactcaaaacaagaggccgccgttaggaagtataaatagtgggacttcaagcgcagcgtcgctatcagatctgaactctccgcaggaagaattgtca

SEQ ID NO: 554210 - DNA, 120 bp, Artificial Sequence
  ENSG00000168779_26 (sequence is synthesized)
aagatcttaacattgaacaagcgcgctccggcagggaagcatcagttcccatttccctccggcagcccccgccccttctcttctcctcctcctcctccctctcctcttcacccttctccc

SEQ ID NO: 554211 - DNA, 120 bp, Artificial Sequence
  ENSG00000168779_27 (sequence is synthesized)
cctcttcctcttcttcctcctcctcctcttcttacttctttttctccttctacttctcctcctctttcttctttcttctcctctttttcttcttctttctcctcctccctctcctccccc

SEQ ID NO: 554212 - DNA, 120 bp, Artificial Sequence
  ENSG00000168779_28 (sequence is synthesized)
aaagctagcctctagcgcagagtttgccgggagggagaaggggcagaggtggaaagcttaaccctccggtcgcctaggtgtttggggccgccaagacccctcgaactccgcagagcccct

SEQ ID NO: 554213 - DNA, 120 bp, Artificial Sequence
  ENSG00000168779_29 (sequence is synthesized)
gaatctttggatcttaggggccaaaacttcccattctctttcaaggtagaaggaagccaacgaaagctgaggtccaggctacgctgcttctcccgggcgaggcgtttcggtttcttgacc

SEQ ID NO: 554214 - DNA, 120 bp, Artificial Sequence
  ENSG00000168779_30 (sequence is synthesized)
ggctcttccggaaatgatttttaacacccatgctggcctggatcctgcgctgggaagaactgcaaacagcctcgactatctaaactcagctttgacttcttaaaacccggagtctctgat

SEQ ID NO: 554215 - DNA, 120 bp, Artificial Sequence
  ENSG00000168779_31 (sequence is synthesized)
tcgggcgcagaggataaaggttccagggggatatatatatggtggctgtatatgctcacactagaagagctcctgtttttaaagggaggagaaggacaggaaagtggcaacggatgtgtg

SEQ ID NO: 554216 - DNA, 120 bp, Artificial Sequence
  ENSG00000168779_32 (sequence is synthesized)
caaacccagagcagaaaaattcatattttattaaacatccgagctgctggttgcatgaaaaggctttgagcaaccaatagaaaccgaggatcgcgaatattccgcttgaacctgttgatc

SEQ ID NO: 554217 - DNA, 120 bp, Artificial Sequence
  ENSG00000168779_33 (sequence is synthesized)
tctgtgggttaagcgtttagggtcgagtctgcgtttccacgagggagggcgaagagagaacagaaagagcggttgctttcgcccgccaccggaggctggttttccgcctcctgccttctg

SEQ ID NO: 554218 - DNA, 120 bp, Artificial Sequence
  ENSG00000168779_34 (sequence is synthesized)
gcccggcttgggcggcgagccctttgggcagccaacatggcgtgggcgcctgtgctcgtgcgaccccggtcgggcaggcgggacggagattacctggctgtccaggggaccttatgcagg

SEQ ID NO: 554219 - DNA, 120 bp, Artificial Sequence
  ENSG00000168779_35 (sequence is synthesized)
gtttggcccgagcccaggggcagcgaggggcgtctgcggatgcggctccctgtgcggcacaacaccggggtctgttgctctcgctgatacctttcggcccaattgttcctaaattagacc

SEQ ID NO: 554220 - DNA, 120 bp, Artificial Sequence
  ENSG00000168779_36 (sequence is synthesized)
agcaagtttgcggtaggcagagagccagcggtggtgagagctggcctgagaacgagccagccttctgggaatggccggtgtgagaggccagtgggtggccttgccgcgcccttatgtcca

SEQ ID NO: 554221 - DNA, 120 bp, Artificial Sequence
  ENSG00000168779_37 (sequence is synthesized)
gactttgctctgtgagaggcctggcgctgcgcctttgatttctgtgagtgctgcggagcaagtgagtgcgaaagtgagtggaaaccatttggtgtttgctggggaaggccggtgactggg

SEQ ID NO: 554222 - DNA, 120 bp, Artificial Sequence
  ENSG00000168779_38 (sequence is synthesized)
gggtgaatagtgaggcggtgagtcgaggtacgtttgtgaaggaggtggtggatgactgcccaccttgccccaggcggccgctcagacttgacctttgcgcttctccgggatattcttcct

SEQ ID NO: 554223 - DNA, 120 bp, Artificial Sequence
  ENSG00000168779_39 (sequence is synthesized)
ccgggtgggttgagaagccggaccaggattccacgagggggaaggattctctattcttttttgcgacaaatctggtaacaggatttgctgtgctgttttcgtccgtgtgtgtgtgcgtgt

SEQ ID NO: 554224 - DNA, 120 bp, Artificial Sequence
  ENSG00000168781_0 (sequence is synthesized)
aggttcggctgcgcgagcggagggaggcggttccctcttatgcttttcatctccatccccagccccacccacagccagggggcttgggttctgagctgatggggtacccccctctgcaga

SEQ ID NO: 554225 - DNA, 120 bp, Artificial Sequence
  ENSG00000168781_1 (sequence is synthesized)
gcgggatgagtgggtgttccggcagggatgtggtcattgacggccagtgagggcgagagtaccacggcccacttcttccttggagctggagatgaggggctgggcacccgtggaataggc

SEQ ID NO: 554226 - DNA, 120 bp, Artificial Sequence
  ENSG00000168781_2 (sequence is synthesized)
atgaggccagaagagagtgacagcgagctccttgaggatgaggaggatgaagtgcctcctgaacctcagatcattgttggcatctgtgccatgaccaagaaatccaagtccaagccaatg

SEQ ID NO: 554227 - DNA, 120 bp, Artificial Sequence
  ENSG00000168781_3 (sequence is synthesized)
actcaaatcctagagcgactctgcagatttgactacctgactgttgtcattctgggagaagatgtaatccttaatgaacctgtggaaaactggccatcctgccactgcctcatctctttc

SEQ ID NO: 554228 - DNA, 120 bp, Artificial Sequence
  ENSG00000168781_4 (sequence is synthesized)
cactccaaaggctttcctctggacaaagctgttgcttactccaagcttcgaaacccctttcttatcaatgatctggccatgcagtattacatccaagataggagggaggtgtaccggatc

SEQ ID NO: 554229 - DNA, 120 bp, Artificial Sequence
  ENSG00000168781_5 (sequence is synthesized)
ctgcaggaagagggtattgatctgcctcgatatgctgtgctcaaccgtgatcctgcccggcctgaggaatgcaacctgatagaaggtgaagaccaagtagaggtcaatggagctgtcttt

SEQ ID NO: 554230 - DNA, 120 bp, Artificial Sequence
  ENSG00000168781_6 (sequence is synthesized)
cccaagccctttgtggagaagccagtgagtgcagaagaccacaatgtttacatctactaccccagctcagctggaggaggaagccagcgtctctttcgtaagattggcagccgaagcagt

SEQ ID NO: 554231 - DNA, 120 bp, Artificial Sequence
  ENSG00000168781_7 (sequence is synthesized)
gtttactctcctgagagcagcgtccgaaagacggggtcgtacatctatgaggagtttatgccaacagatggcacagatgtcaaggtgtatacagtggggccagattatgcccatgctgaa

SEQ ID NO: 554232 - DNA, 120 bp, Artificial Sequence
  ENSG00000168781_8 (sequence is synthesized)
gctagaaaatctccagctttggatgggaaggttgaacgagacagtgaggggaaagagattcgatatccagtcatgctgactgccatggaaaagctggtggccaggaaagtctgcgtagct

SEQ ID NO: 554233 - DNA, 120 bp, Artificial Sequence
  ENSG00000168781_9 (sequence is synthesized)
ttcaagcaaacagtttgtggatttgaccttcttcgtgccaatggtcattcctttgtgtgtgatgtcaatggctttagttttgtcaagaactcgatgaaatactacgatgactgtgccaag

SEQ ID NO: 554234 - DNA, 120 bp, Artificial Sequence
  ENSG00000168781_10 (sequence is synthesized)
attctggggaacaccataatgcgggagcttgccccacagttccagattccatggtccatccccacggaggctgaggacattcccattgttcccaccacatctggcactatgatggaactt

SEQ ID NO: 554235 - DNA, 120 bp, Artificial Sequence
  ENSG00000168781_11 (sequence is synthesized)
cgttgtgtcattgcaattattcgtcatggggatcgtactcccaagcagaagatgaagatggaagtgaaacacccaaggttttttgctctgtttgaaaaacatggtggctacaagacaggg

SEQ ID NO: 554236 - DNA, 120 bp, Artificial Sequence
  ENSG00000168781_12 (sequence is synthesized)
aaattaaaactcaagcgacctgagcagctccaggaggtgctggatatcacaaggctgttgttggctgaactggagaaagaaccaggtggtgagatcgaggagaagactggaaaactagag

SEQ ID NO: 554237 - DNA, 120 bp, Artificial Sequence
  ENSG00000168781_13 (sequence is synthesized)
cagctgaagtctgtactggagatgtatggtcacttctcaggtataaaccggaaggtacaattgacttactaccctcatggagtaaaagcttctaatgaggggcaagatccacagagggaa

SEQ ID NO: 554238 - DNA, 120 bp, Artificial Sequence
  ENSG00000168781_14 (sequence is synthesized)
actctggccccatctctgttgctggtactgaagtggggtggagaactgactcctgctggccgtgttcaggctgaggagctggggcgagcttttcgctgcatgtaccctggaggacagggt

SEQ ID NO: 554239 - DNA, 120 bp, Artificial Sequence
  ENSG00000168781_15 (sequence is synthesized)
gactatgctggcttccctggttgtgggctgcttcgtctccatagcactttccgccacgatctcaagatctatgcctctgatgagggtcgtgttcagatgactgctgctgccttcgccaag

SEQ ID NO: 554240 - DNA, 120 bp, Artificial Sequence
  ENSG00000168781_16 (sequence is synthesized)
ggccttctggctctagaaggggagctgacacccattttggtgcaaatggtgaagagtgccaacatgaatgggctactggacagcgatggggattccttgagcagctgccagcaccgggtg

SEQ ID NO: 554241 - DNA, 120 bp, Artificial Sequence
  ENSG00000168781_17 (sequence is synthesized)
aaggctcggctgcaccatattctacagcaggatgcgccctttggccctgaggactacgatcagctggctcccaccagaagtacttccctgctcaactccatgactatcatccagaatcct

SEQ ID NO: 554242 - DNA, 120 bp, Artificial Sequence
  ENSG00000168781_18 (sequence is synthesized)
gtgaaggtctgtgatcaggtatttgccctgatcgaaaacctcacccaccagatccgggaacgaatgcaggaccccaggtctgtagacctgcagctctaccacagtgagacactagagcta

SEQ ID NO: 554243 - DNA, 120 bp, Artificial Sequence
  ENSG00000168781_19 (sequence is synthesized)
atgctacagcgttggagcaagctggagcgtgactttcgacagaagagtgggcgctatgatatcagtaagatccctgacatctatgactgtgtcaagtatgatgtgcagcacaatgggagt

SEQ ID NO: 554244 - DNA, 120 bp, Artificial Sequence
  ENSG00000168781_20 (sequence is synthesized)
ctgggacttcaaggcacagcagagttgctccgtctctctaaggcactggctgatgtggtcattccccaggagtacgggatcagtcgggaggagaaactggaaattgctgtgggcttctgt

SEQ ID NO: 554245 - DNA, 120 bp, Artificial Sequence
  ENSG00000168781_21 (sequence is synthesized)
cttccactgttgcggaagatactacttgacctgcagagaacccacgaggatgagtctgtcaacaagctgcatcccctgtactcccgaggcgtgctctccccaggtcgccacgttcgaacg

SEQ ID NO: 554246 - DNA, 120 bp, Artificial Sequence
  ENSG00000168781_22 (sequence is synthesized)
cgtctctatttcaccagtgagagccatgtccactccctgctcagtgtcttccgttatggaggacttcttgatgagacccaggatgcacaatggcagcgagctttggattatcttagtgcc

SEQ ID NO: 554247 - DNA, 120 bp, Artificial Sequence
  ENSG00000168781_23 (sequence is synthesized)
ttatcagaggaacggttccatgtggagctacacttcagccccggagtgaaaggtgttgaggaagaaggcagtgccccggctggctgtggattccgtccagcctcttctgagaatgaggag

SEQ ID NO: 554248 - DNA, 120 bp, Artificial Sequence
  ENSG00000168781_24 (sequence is synthesized)
atgaaaaccaaccaaggcagtatggagaacctgtgtccaggaaaggcatcagatgaaccagaccgggcattgcagacttcaccccagcctcctgagggccctggccttccgaggagatca

SEQ ID NO: 554249 - DNA, 120 bp, Artificial Sequence
  ENSG00000168781_25 (sequence is synthesized)
cccctcattcgtaaccgaaaagctggttccatggaggtactttctgagacttcatcctcgaggcctggtggctaccggctcttttcatcttcacggccacccacagaaatgaagcagagt

SEQ ID NO: 554250 - DNA, 120 bp, Artificial Sequence
  ENSG00000168781_26 (sequence is synthesized)
ggcctaggctcacagtgcacagggctgttcagcaccacagtgctgggtggctcctccagtgccccgaatcttcaggactacgcccgcagccatggcaaaaagctaccacctgccagtctg

SEQ ID NO: 554251 - DNA, 120 bp, Artificial Sequence
  ENSG00000168781_27 (sequence is synthesized)
aagcaccgagatgggtttgaagggtgttccatggtgcctaccatctaccctctggaaacactgcataatgccctttccctacgtcaagtgagtgaattcttgagtagagtctgccagcgc

SEQ ID NO: 554252 - DNA, 120 bp, Artificial Sequence
  ENSG00000168781_28 (sequence is synthesized)
cacactgatgcccaggcacaggcatctgcagccctctttgattccatgcacagcagccaggcctcagataacccattttctccaccacgtactcttcattcacctcccctgcaactccag

SEQ ID NO: 554253 - DNA, 120 bp, Artificial Sequence
  ENSG00000168781_29 (sequence is synthesized)
cagcgctctgagaagcccccttggtacagcagtggcccttctagcactgtgtccagtgctggtccttcttcccctactacagtagatggtaactcccaatttggcttcagtgatcaaccc

SEQ ID NO: 554254 - DNA, 120 bp, Artificial Sequence
  ENSG00000168781_30 (sequence is synthesized)
tccctaaattcacacgtggctgaagaacatcaaggccttgggctgctccaggagacccctgggagtggagcacaagagctctccatagaaggggagcaagagctttttgaaccaaatcag

SEQ ID NO: 554255 - DNA, 120 bp, Artificial Sequence
  ENSG00000168781_31 (sequence is synthesized)
tccccacaggtgccacctatggaaaccagccagccatacgaggaggtcagccagccatgtcaggaggtccctgacatcagccagccatgccaggacatttctgaggcgctcagccagcca

SEQ ID NO: 554256 - DNA, 120 bp, Artificial Sequence
  ENSG00000168781_32 (sequence is synthesized)
tgtcagaaggtccctgacatcagccagcaatgccaggagaaccatgacaatggtaaccacacatgccaggaggtccctcacatcagccagccatgccagaagtccagccaactgtgccag

SEQ ID NO: 554257 - DNA, 120 bp, Artificial Sequence
  ENSG00000168781_33 (sequence is synthesized)
aaagtctctgaggaagtttgccagctatgtctggagaactccgaggaggtcagccagccatgccagggggtctctgtggaggttggcaagctggtccataagttccatgtaggggttggt

SEQ ID NO: 554258 - DNA, 120 bp, Artificial Sequence
  ENSG00000168781_34 (sequence is synthesized)
agcttggtccaggaaacccttgtagaagttggcagcccagctgaagagatccctgaggaggtcatccagccataccaggagttctctgtggaggttggcaggctggcccaggagacttct

SEQ ID NO: 554259 - DNA, 120 bp, Artificial Sequence
  ENSG00000168781_35 (sequence is synthesized)
gcgatcaatctgttatctcagggcatccctgagattgataaaccatcccaagagttccctgaggagattgatctgcaggcccaggaggtccctgaggagataaattagaagtcctgggtg

SEQ ID NO: 554260 - DNA, 120 bp, Artificial Sequence
  ENSG00000168781_36 (sequence is synthesized)
gtccctgaagtgattgatcagctgcctggagagggtattcctcaagcccagcatccatctggtgatccaaaccctcagagccagtctctagcccatgaccagcactcaccccttccacca

SEQ ID NO: 554261 - DNA, 120 bp, Artificial Sequence
  ENSG00000168781_37 (sequence is synthesized)
gcaacatgtgattaattttctcattagtggtatcacactataccagccatttgagccagcaaccttttctgttggctaactcactggccagctctcaccagcggtgtctggggaagtagt

SEQ ID NO: 554262 - DNA, 120 bp, Artificial Sequence
  ENSG00000168781_38 (sequence is synthesized)
tctctttgtatgaagcatacctgtgccagagctgtggttgaggaggagccagttttaggttcgaagaagccattggctcctcacttagccattagacttgaataggatttccttggggtg

SEQ ID NO: 554263 - DNA, 120 bp, Artificial Sequence
  ENSG00000168781_39 (sequence is synthesized)
ggttggtctgtcattacccagccttctctgagcatcctaggaaatcacagattgttaaaggaaatgccgcttcactgctgaagacaccatctggcgacagcaaatgcaaaagaggggact

SEQ ID NO: 554264 - DNA, 120 bp, Artificial Sequence
  ENSG00000168781_40 (sequence is synthesized)
ctagggtcttcacttttctggggaaatgttcacgacttctcaaggtacgcttagaccatatgtgcattcaggggactcttgtctttgccagcactcctcaggtgagcccgggatggctat

SEQ ID NO: 554265 - DNA, 120 bp, Artificial Sequence
  ENSG00000168781_41 (sequence is synthesized)
ctgaaatgtctggaaaatagagtcccttccccaaacatctgacatggccactaaatctttagacttgccttatagatccttccatatcatccccaagtgccccttctgcctcagtcctgt

SEQ ID NO: 554266 - DNA, 120 bp, Artificial Sequence
  ENSG00000168781_42 (sequence is synthesized)
tcctctgggcaatagctctagggaaaagtaggtattagactgctgtgcaaaattcagagcaactacttaaaatgctctagaggattcttagccagtctgtgaaagtgggcctcctctgtg

SEQ ID NO: 554267 - DNA, 120 bp, Artificial Sequence
  ENSG00000168781_43 (sequence is synthesized)
gtggggctgtttggcttaggagatgctgtagtagtagagataatcaggttctattttaagcaatcagcagagatcaatattgtacagatacaagcaaaggtttaataaatatatatatat

SEQ ID NO: 554268 - DNA, 120 bp, Artificial Sequence
  ENSG00000168781_44 (sequence is synthesized)
atatttatttctgtagttgtgccagggacagactggccaaagaccaaacactgcagggtccccaagaaatttgtccttatatcattgtgtctgagggccagatatgattatgaagctttt

SEQ ID NO: 554269 - DNA, 120 bp, Artificial Sequence
  ENSG00000168781_45 (sequence is synthesized)
tccaaagatccagggatgggaatgggagtgggtaggaggggtaatgcggtcattggagtcgggggctggaacattatgagtgctcaataaatataaactaatgagaatggtggtgatgga

SEQ ID NO: 554270 - DNA, 84 bp, Artificial Sequence
  ENSG00000168781_46 (sequence is synthesized)
tccaccacgtactcttcattcacctcccctgcaactccagcagcgctctgagaagcccccttggttagagctcctgacctcaag

SEQ ID NO: 554271 - DNA, 120 bp, Artificial Sequence
  ENSG00000168781_47 (sequence is synthesized)
accgcaaagaagtcgcgctttgattgggccgctgtcaggtgtcgctgcctgcaggttcggctgcgcgagcggagggaggcgggactcaagagtagccttcctcgaggacctgcctttccc
